United States Patent Application Publication US 2026/0226531 A1 - sequence listing, part 4

SEQ ID NO: 50861 - DNA, 110 bp, synthetic construct
  source 1..110: mol_type = other DNA
tagataactccaggtgcctgttcttagtggaaatactttgggaaaaaccttctaaaggcaaagggagaagattatgagagtcgtatttatagattgttggtttctattgg

SEQ ID NO: 50862 - DNA, 110 bp, synthetic construct
  source 1..110: mol_type = other DNA
aggcaaagggagaagattatgagagtcgtatttatagattgttggtttctattggtctcagcatccttgaacttcacaaattcaaaactatgataagtctcaggatctgt

SEQ ID NO: 50863 - DNA, 110 bp, synthetic construct
  source 1..110: mol_type = other DNA
aagttggagatttaatatttgaatccagttctatttcatggaaaagcccctacatatacccatgtcatgaacattttatgagaggggagatatctttgtcacttagagat

SEQ ID NO: 50864 - DNA, 110 bp, synthetic construct; identical to SEQ ID NO: 50863
  source 1..110: mol_type = other DNA

SEQ ID NO: 50865 - DNA, 110 bp, synthetic construct
  source 1..110: mol_type = other DNA
tcggattcgttaaccactgtgccacaacgggaactcctgtttcttttttttttacatgcattcttcaccattcttccgtgaagtcagaaaacagcatcccaagttgtcat

SEQ ID NO: 50866 - DNA, 110 bp, synthetic construct; identical to SEQ ID NO: 50865
  source 1..110: mol_type = other DNA

SEQ ID NO: 50867 - DNA, 110 bp, synthetic construct
  source 1..110: mol_type = other DNA
gatggcttgctttgctgccagcatgagcccctgttgaatgcaggctgtggaccaggtaaggcagacgcccatggggctgaggctgcagctggcagtgccccgggcgtggc

SEQ ID NO: 50868 - DNA, 110 bp, synthetic construct
  source 1..110: mol_type = other DNA
tacttttactcccagtgtatagtagatttcctcacatagagaacttgctcactaaatgaagaactaccataggacccagaaatcccactcttgggcacatatccagacaa

SEQ ID NO: 50869 - DNA, 110 bp, synthetic construct; identical to SEQ ID NO: 50868
  source 1..110: mol_type = other DNA

SEQ ID NO: 50870 - DNA, 110 bp, synthetic construct
  source 1..110: mol_type = other DNA
ctccccagattgctctcaccccctttctagtcaatttgcctgccaatatggcagtttttcaaaaattgtaactgacctttaaaatgccaatcttggagctccttggtggc

SEQ ID NO: 50871 - DNA, 110 bp, synthetic construct
  source 1..110: mol_type = other DNA
agtttgtactttcatgcaaggaaaattggctgaccacttatttactcaaagaatggtattgagaactggggagggtaccactagttacagcaaacgtgacccctgtcctc

SEQ ID NO: 50872 - DNA, 110 bp, synthetic construct
  source 1..110: mol_type = other DNA
catatttaggcatctacaagtggccaactattgctggatatttctggaaattgactttccaagaggagttactttgcttaaccacttctccagagcaaataaatctaaac

SEQ ID NO: 50873 - DNA, 110 bp, synthetic construct
  source 1..110: mol_type = other DNA
tttccaagaggagttactttgcttaaccacttctccagagcaaataaatctaaactttaagccgtatttccaaaggaatcacagatcatgcacttggtagactgaactag

SEQ ID NO: 50874 - DNA, 110 bp, synthetic construct
  source 1..110: mol_type = other DNA
agggattaaaattagaggcccctaaacaaatctgcttagtgcacaaattttatatacatataaatcacttgataaaacaatggctgctctcctagcaaagatgagaaaca

SEQ ID NO: 50875 - DNA, 110 bp, synthetic construct
  source 1..110: mol_type = other DNA
acatataaatcacttgataaaacaatggctgctctcctagcaaagatgagaaacatctcatcctggtcatatagggaggatgcagtatcgaagcagacatttggggtggg

SEQ ID NO: 50876 - DNA, 110 bp, synthetic construct
  source 1..110: mol_type = other DNA
aaggtaagtctttgtgtggagagagcgagcttgcagttgacaggtcagtggtaccagtgcagtgggaacgcattatagtgccgtcacagttaagttccacttagcagcag

SEQ ID NO: 50877 - DNA, 110 bp, synthetic construct
  source 1..110: mol_type = other DNA
agtgcagtgggaacgcattatagtgccgtcacagttaagttccacttagcagcagccttttctccccccaaactcctcacagggtctttgtgcagagctctggggagcgc

SEQ ID NO: 50878 - DNA, 110 bp, synthetic construct
  source 1..110: mol_type = other DNA
tttcaaagcggtggtcaactatgcgtttgagggtatgaaccgtgaacgaacaggaaagtacatacatgcaggtaaggaggcagtcccatcctctgtaagcagcacagttg

SEQ ID NO: 50879 - DNA, 110 bp, synthetic construct
  source 1..110: mol_type = other DNA
aagtacatacatgcaggtaaggaggcagtcccatcctctgtaagcagcacagttggaccctataagcaggagattctgggattctacccacgtaaacagatacatgtcag

SEQ ID NO: 50880 - DNA, 110 bp, synthetic construct
  source 1..110: mol_type = other DNA
ctgtcagcctacgccacagccacagccacgtgggtaatgaacctgactagtatctgtggggactcaggttcgatccctggcctcacgcagcaggttaaagcctctggcat

SEQ ID NO: 50881 - DNA, 110 bp, synthetic construct; identical to SEQ ID NO: 50880
  source 1..110: mol_type = other DNA

SEQ ID NO: 50882 - DNA, 110 bp, synthetic construct
  source 1..110: mol_type = other DNA
tttttgacaataccctaagtgctaaataacattggaatgtgacctcgaggcaaagagattactacggatgtggaggatattttcaaaaggtcctggatggctccaacatt

SEQ ID NO: 50883 - DNA, 110 bp, synthetic construct
  source 1..110: mol_type = other DNA
agattactacggatgtggaggatattttcaaaaggtcctggatggctccaacattgtgctttcgcttgacttaactgcagtagggcaattattcaagagcgcatccgcct

SEQ ID NO: 50884 - DNA, 110 bp, synthetic construct
  source 1..110: mol_type = other DNA
ctttaaaacgaagaagaaatcctttcaccagtatctttgtttcagaaatgttgatttgttttcctatagataagaagatctctgcctaaaacgccagctgacagccagtt

SEQ ID NO: 50885 - DNA, 110 bp, synthetic construct; identical to SEQ ID NO: 50884
  source 1..110: mol_type = other DNA

SEQ ID NO: 50886 - DNA, 110 bp, synthetic construct; identical to SEQ ID NO: 50884
  source 1..110: mol_type = other DNA

SEQ ID NO: 50887 - DNA, 110 bp, synthetic construct; identical to SEQ ID NO: 50884
  source 1..110: mol_type = other DNA

SEQ ID NO: 50888 - DNA, 110 bp, synthetic construct
  source 1..110: mol_type = other DNA
agcaaggagagtgctggcagaacagtggaacctgctcctatacctacagagacaagcaaaagctaagaagagaatccagtacttccaaaccagctctacatcaactacta

SEQ ID NO: 50889 - DNA, 110 bp, synthetic construct
  source 1..110: mol_type = other DNA
ggcagaacagtggaacctgctcctatacctacagagacaagcaaaagctaagaagagaatccagtacttccaaaccagctctacatcaactactaaaggatcttctctaa

SEQ ID NO: 50890 - DNA, 110 bp, synthetic construct
  source 1..110: mol_type = other DNA
gcaaccatttgtacattcaaagcaaacacatacctactttctagccttgtgcttctcgacatggtagccactggacacacgtagctacagagcgcttgaaatgggattcg

SEQ ID NO: 50891 - DNA, 110 bp, synthetic construct
  source 1..110: mol_type = other DNA
tcgacatggtagccactggacacacgtagctacagagcgcttgaaatgggattcgtcagaactgagttgtgctgggagcatgaaacacatatgaaatttcaaagatgtgg

SEQ ID NO: 50892 - DNA, 110 bp, synthetic construct
  source 1..110: mol_type = other DNA
ttgtgtactatgtgatctctcatttctggatggtgcttgattattcaacttcccacggatcatgctcgctcgccctccgtgttgaacccgcacaaagccattttgccgtc

SEQ ID NO: 50893 - DNA, 110 bp, synthetic construct
  source 1..110: mol_type = other DNA
cggatcatgctcgctcgccctccgtgttgaacccgcacaaagccattttgccgtcaaaggtccttacatcttgcaaaggcgaggagagtaaggaaggcagaatctataga

SEQ ID NO: 50894 - DNA, 110 bp, synthetic construct
  source 1..110: mol_type = other DNA
ctgtttatttgcttttatcctgatcaaaatgtgtgcattgttgtactctcaataacactctttctctccatccagtgggtcctgtgacataggcttattagaaagttgct

SEQ ID NO: 50895 - DNA, 110 bp, synthetic construct
  source 1..110: mol_type = other DNA
cactctttctctccatccagtgggtcctgtgacataggcttattagaaagttgctctggtgacttaaaaaacacgctgctacatgaagaagaccatgagaatttcacata

SEQ ID NO: 50896 - DNA, 110 bp, synthetic construct
  source 1..110: mol_type = other DNA
ccccattttttgtttctttgcattttgggtccttccagaaaccaaaatcatcaggatataacaactgcgtatgtacttggacatgtatgcacatatacaggtgtgtctat

SEQ ID NO: 50897 - DNA, 110 bp, synthetic construct
  source 1..110: mol_type = other DNA
atataacaactgcgtatgtacttggacatgtatgcacatatacaggtgtgtctatgtgctcattatacttggatggatatacgtgtgtgtgggtgggtggggggtgtatg

SEQ ID NO: 50898 - DNA, 110 bp, synthetic construct
  source 1..110: mol_type = other DNA
ggaagggcaccccatctgatcctgccagatgtgggaagagagcctagaaagctcttccctgtaacaacacggctcgggcctctttatactttacatgctggctcctctag

SEQ ID NO: 50899 - DNA, 110 bp, synthetic construct
  source 1..110: mol_type = other DNA
tccctgtaacaacacggctcgggcctctttatactttacatgctggctcctctagccaagatcaaaaagcagctattctccaaaatcactttcaaaaccctgtagtttta

SEQ ID NO: 50900 - DNA, 110 bp, synthetic construct
  source 1..110: mol_type = other DNA
tctcaggcatcaggcccttcaggctaagctgaaaagcccatgaactcaataccatgaccccactaagtgtgggaagaaaagtaagctgggaatgagctggtctgaaaagc

SEQ ID NO: 50901 - DNA, 110 bp, synthetic construct
  source 1..110: mol_type = other DNA
aagcacatgccagactccatttcccagaatgccctgtacctggaaaaaactacatctcctagtatgaatgatacccatgtcttcccaagtgcctgcaccaatttctgttt

SEQ ID NO: 50902 - DNA, 110 bp, synthetic construct
  source 1..110: mol_type = other DNA
ctcctagtatgaatgatacccatgtcttcccaagtgcctgcaccaatttctgtttgtttggttttttgtttgtttttcagtttcattctccaaatggatatacggattag

SEQ ID NO: 50903 - DNA, 110 bp, synthetic construct
  source 1..110: mol_type = other DNA
gattacaatttcatttcattttaattagattttaaatttggtttttttggcaggtccaaacgtatagcaatagagaccaaaggtcttttagatatgccattgcataagag

SEQ ID NO: 50904 - DNA, 110 bp, synthetic construct
  source 1..110: mol_type = other DNA
aacccgttcatagaatcagaatatttaaacttcatagcataaggagttccccgttgtggctcaatgggttacaaacccaactggtatccatgaggacgcaggtttgatct

SEQ ID NO: 50905 - DNA, 110 bp, synthetic construct; identical to SEQ ID NO: 50904
  source 1..110: mol_type = other DNA

SEQ ID NO: 50906 - DNA, 110 bp, synthetic construct
  source 1..110: mol_type = other DNA
tgacgtcattcactcctccatctacttaacaactacgtcctgaacacccggtaagtggtaagcactgttctgcgttctgagagtacatcaatgaacaatatagacaatat

SEQ ID NO: 50907 - DNA, 110 bp, synthetic construct
  source 1..110: mol_type = other DNA
tggtaagcactgttctgcgttctgagagtacatcaatgaacaatatagacaatattacctgcctaaggaagcttccattctaataggagagccaaacattgcacaaaata

SEQ ID NO: 50908 - DNA, 110 bp, synthetic construct
  source 1..110: mol_type = other DNA
ccccctggcctttttccatcacgtttcaaagaatggacgtagtagccactgcaaagtctctcctatttctgttcggtccctccgttcctcctccgaccatggggctatca

SEQ ID NO: 50909 - DNA, 110 bp, synthetic construct
  source 1..110: mol_type = other DNA
gtctctcctatttctgttcggtccctccgttcctcctccgaccatggggctatcattccacaccagcagtgtgtgatgaggctgccaacaagaagaaaaaagaaaggggg

SEQ ID NO: 50910 - DNA, 110 bp, synthetic construct
  source 1..110: mol_type = other DNA
gagggttccttacaggggtgtaccagttgtagggcgttctcgaagcatgtaagggtgaaaaaagagagcagagctcagtagaagccaagacctcccaaattaccaccaac

SEQ ID NO: 50911 - DNA, 110 bp, synthetic construct
  source 1..110: mol_type = other DNA
ccttgatgcccagtttggtattacatccatgtctcaaacaagctaagctgaggtcaaagcatgtataactgaaaatagaataggaactactattttccgagcccttgacc

SEQ ID NO: 50912 - DNA, 110 bp, synthetic construct
  source 1..110: mol_type = other DNA
tttacccggcacaggctctctacccccttcccaccagatccaccaccacccacatccccagacagtctttcagctaaagttcgatcagtttcaatgacggcagctgcaga

SEQ ID NO: 50913 - DNA, 110 bp, synthetic construct
  source 1..110: mol_type = other DNA
ccccagacagtctttcagctaaagttcgatcagtttcaatgacggcagctgcagaagttcctggaggtactagcaattatggagaaggaactacacatagtaataataac

SEQ ID NO: 50914 - DNA, 110 bp, synthetic construct
  source 1..110: mol_type = other DNA
ccaaacgcagggaattagatggtgccaaggtgggcgctttagagactctccttaggcgtttctttccaaggggggaaaaaacagcagaaaggggcctcccggaacacagc

SEQ ID NO: 50915 - DNA, 110 bp, synthetic construct
  source 1..110: mol_type = other DNA
gcgtttctttccaaggggggaaaaaacagcagaaaggggcctcccggaacacagctcgttaggctgcagagtgaaacctcccttaagcaaaattaaaattcctaactatt

SEQ ID NO: 50916 - DNA, 110 bp, synthetic construct
  source 1..110: mol_type = other DNA
tgacccggagggaggcgaggataaggagcttagcttccgattgtgctggtcccgaagtagtggcggccccaagcccgcagccactagtccaggacttgggcctgggactc

SEQ ID NO: 50917 - DNA, 110 bp, synthetic construct
  source 1..110: mol_type = other DNA
gcacagctgagaaggcagcagcccaagaagtcgggggaaaaccattgagcatggcctctagaagccagatttccgcatttccggaagagtgagccaacaccaccgagagg

SEQ ID NO: 50918 - DNA, 110 bp, synthetic construct
  source 1..110: mol_type = other DNA
ctctagaagccagatttccgcatttccggaagagtgagccaacaccaccgagaggcagagctcagtgaagacagaaagttgacccttggctgcagcctcacagaggtcac

SEQ ID NO: 50919 - DNA, 110 bp, synthetic construct
  source 1..110: mol_type = other DNA
catgaacgtgctgagtatacggggcagaaaccgtggagcccacggtgagtaagggacaccgagggagaggctctttcaagccaggggattatgagaacacagagggtagg

SEQ ID NO: 50920 - DNA, 110 bp, synthetic construct
  source 1..110: mol_type = other DNA
acaccgagggagaggctctttcaagccaggggattatgagaacacagagggtaggggccataaaaaccaaatgaagaagcttgtgttttatcacacgggctgtgggatgc

SEQ ID NO: 50921 - DNA, 110 bp, synthetic construct
  source 1..110: mol_type = other DNA
ttagtgacttgggactttaaatcgtgccccatctttatttctttaagaaaaaactcagtgcagtatccgatgttctgtaaacacctataggactaaaccctcaaccataa

SEQ ID NO: 50922 - DNA, 110 bp, synthetic construct
  source 1..110: mol_type = other DNA
tgcggaaacaaaaattaaatgcccagaaagcgactggtttgcttgcttttttagtgacagtttcgtgacagctcttctgtcttagaactgcgcgatgtagctttctaagt

SEQ ID NO: 50923 - DNA, 110 bp, synthetic construct
  source 1..110: mol_type = other DNA
gacagtttcgtgacagctcttctgtcttagaactgcgcgatgtagctttctaagtctgccaggctgcaggacttgtagcaaagctacctttgatctcgaatcacatggta

SEQ ID NO: 50924 - DNA, 110 bp, synthetic construct
  source 1..110: mol_type = other DNA
caagtaggaaaccagagcagggacccatctaaacagactgggtacatgattggagcttgggaagccgaatgctggaaggcgacgtttcctattgtaacatctcccccttc

SEQ ID NO: 50925 - DNA, 110 bp, synthetic construct
  source 1..110: mol_type = other DNA
cttgggaagccgaatgctggaaggcgacgtttcctattgtaacatctcccccttctggtcaggatggctcagggattaagaggtcaagccaatgggagttctgacctcgg

SEQ ID NO: 50926 - DNA, 110 bp, synthetic construct; identical to SEQ ID NO: 50924
  source 1..110: mol_type = other DNA

SEQ ID NO: 50927 - DNA, 110 bp, synthetic construct; identical to SEQ ID NO: 50925
  source 1..110: mol_type = other DNA

SEQ ID NO: 50928 - DNA, 110 bp, synthetic construct
  source 1..110: mol_type = other DNA
cagatgctcacatagtggaatggtccccaagaggagagaagtatgtagttgtcatactgaataaaatagacatctatcggcttgacactgcatctgtcagtggcaccatc

SEQ ID NO: 50929 - DNA, 110 bp, synthetic construct
  source 1..110: mol_type = other DNA
ataaccaatcagtgtaggctttgttgttggcttgtttctctgtttatagaactttcctactttctagcactgtaagagcctccaggctcatcttgtatatttcatgcccc

SEQ ID NO: 50930 - DNA, 110 bp, synthetic construct
  source 1..110: mol_type = other DNA
cctactttctagcactgtaagagcctccaggctcatcttgtatatttcatgccccaatacagaattcagccatttctttcattgggcagtgatagacctggtactggata

SEQ ID NO: 50931 - DNA, 110 bp, synthetic construct
  source 1..110: mol_type = other DNA
tgtgcaaagacccagagcaggatggagcttgggggacacagccataaggttcaggagagggtcctgctggagagagagtggagggagcaagggtagggtctgaaaactcc

SEQ ID NO: 50932 - DNA, 110 bp, synthetic construct
  source 1..110: mol_type = other DNA
acagagtgaaacgcaagtaagtataatgtaactatgatcctcaattaatttaacaaaaccgttaagcaatttggaattttccgcaatcaagctacaatactgacttgcat

SEQ ID NO: 50933 - DNA, 110 bp, synthetic construct
  source 1..110: mol_type = other DNA
aaaccgttaagcaatttggaattttccgcaatcaagctacaatactgacttgcatatgagttaaaccttatcttctggcttaaagaaaaagacatttatgtggaggctca

SEQ ID NO: 50934 - DNA, 110 bp, synthetic construct
  source 1..110: mol_type = other DNA
ataccgtggtaaagattatgttatggaactggatttggcttttctacttaggaagttggacacattaatacttgtgagttcaattttctcatctgtaaagtgggaagatt

SEQ ID NO: 50935 - DNA, 110 bp, synthetic construct
  source 1..110: mol_type = other DNA
tacatccactatcctctaatagagaagaaaaattacattgaaaaaagaaaacaaatcagccaaaggcaaaacgtcgccggagctgcgtgtgaaaaaaaaaaggcctctct

SEQ ID NO: 50936 - DNA, 110 bp, synthetic construct
  source 1..110: mol_type = other DNA
aacgagtgcttccctggcagaaatctggaacaggagcagagaaggtcagagaacagccatcctctttcttcccacggcgccttggagaaccctgcacggagctcccggag

SEQ ID NO: 50937 - DNA, 110 bp, synthetic construct
  source 1..110: mol_type = other DNA
gccatcctctttcttcccacggcgccttggagaaccctgcacggagctcccggaggcggggacagtcagctggtcagaacccatccgtccggagagcagaaaatggcctg

SEQ ID NO: 50938 - DNA, 110 bp, synthetic construct
  source 1..110: mol_type = other DNA
atcttcactcttttttaaaaaaaatataattatttttggccatgcctgaggtatgtggaggatcctaggccaaggactgaactcaagcttcagcagtgacctgagccact

SEQ ID NO: 50939 - DNA, 110 bp, synthetic construct
  source 1..110: mol_type = other DNA
tggaggatcctaggccaaggactgaactcaagcttcagcagtgacctgagccactgcagtgagaaggccagatccttgacccactgagccacaagaaaaattcctgtctg

SEQ ID NO: 50940 - DNA, 110 bp, synthetic construct
  source 1..110: mol_type = other DNA
ggcagagagaagggctgggggtgctgggtggccggggtaccgggatgtgatgcagggttttcaagattgtcttctgtgtggtggctgcactgtggatgagcccgtgtgga

SEQ ID NO: 50941 - DNA, 110 bp, synthetic construct
  source 1..110: mol_type = other DNA
tccttctgctgtctggatgggtactcgtacacatagccgtggcctgtcctcactggcatgatcacctgcgggcaggaagacacggggtgaaattccaagccaggtcctgg

SEQ ID NO: 50942 - DNA, 110 bp, synthetic construct
  source 1..110: mol_type = other DNA
tatgcgaagcctttttcattctctaggttaaaaagcttattaattcacaccaagtgacattcctgcttttctgtttctgtcccgcacagagtatatctgaagttcatttc

SEQ ID NO: 50943 - DNA, 110 bp, synthetic construct
  source 1..110: mol_type = other DNA
gacattcctgcttttctgtttctgtcccgcacagagtatatctgaagttcatttcgaggtggtttgggttatgtaaagaaaagctaaagggtgctggagccgggtacacc

SEQ ID NO: 50944 - DNA, 110 bp, synthetic construct
  source 1..110: mol_type = other DNA
ctggttgagcacctgtggtgtggtctgccctcctcatgcagtgcatgggaaaacaaggacctgcagagaaaaggatgctccctaggcccacaactccatggagatgacgc

SEQ ID NO: 50945 - DNA, 110 bp, synthetic construct
  source 1..110: mol_type = other DNA
aggacctgcagagaaaaggatgctccctaggcccacaactccatggagatgacgcacaactggccctggagtctccggactcctagtctgggtctgtctccaccgccccc

SEQ ID NO: 50946 - DNA, 110 bp, synthetic construct
  source 1..110: mol_type = other DNA
gctgttttagttcacggcctctctacccagctgttgcaactgtcttcatccttcatcctcaaaacaacagggaagactttgaaaactggcaagtgtcttgatcatacttg

SEQ ID NO: 50947 - DNA, 110 bp, synthetic construct
  source 1..110: mol_type = other DNA
tcctcaaaacaacagggaagactttgaaaactggcaagtgtcttgatcatacttgcttgtcacaaaaaccacagtgaatctagtgggggaagtggaaaggcagctggaac

SEQ ID NO: 50948 - DNA, 110 bp, synthetic construct
  source 1..110: mol_type = other DNA
aggatcaaaagagtgaaatggaaaagctttctctatggcagagtctagtgacttaaggtgattaaatgccacatctggtatcgggtaccatatcaaattatcacattgtg

SEQ ID NO: 50949 - DNA, 110 bp, synthetic construct
  source 1..110: mol_type = other DNA
attttccccgccagtggatgaagtgagtggtgacccttttgaccaagctaaggaatcagaggaggaatacagtttgtagctgctgagctggaggtggccagggtaaggag

SEQ ID NO: 50950 - DNA, 110 bp, synthetic construct
  source 1..110: mol_type = other DNA
tcagaggaggaatacagtttgtagctgctgagctggaggtggccagggtaaggaggccaggcagtacgggacaagtggggttgaggttcaggcaagaagtctagggtggg

SEQ ID NO: 50951 - DNA, 110 bp, synthetic construct
  source 1..110: mol_type = other DNA
ggaggatggtctggatgagctccccagaaacttctgcctggtgagcaggactgtgtgggtaaacaagatccactcgaattctttgggcctgacggataatttggacacta

SEQ ID NO: 50952 - DNA, 110 bp, synthetic construct
  source 1..110: mol_type = other DNA
tgccagatccttaacctgctgcaccataagagaacgccaaaagaagttttttaaagatatcagctgcttctgagtaaatggagtaactggaatataaattggtacaattt

SEQ ID NO: 50953 - DNA, 110 bp, synthetic construct
  source 1..110: mol_type = other DNA
gatatcagctgcttctgagtaaatggagtaactggaatataaattggtacaatttctttggaaaaaagtggcattacctagtaaagttgaaaatgtatataacattcagc

SEQ ID NO: 50954 - DNA, 110 bp, synthetic construct
  source 1..110: mol_type = other DNA
aggaccgacaatggggagcaggccattgccagagctgcacacacttcactcctgcttcaaaccccaagtcgggtctccagttgctggcttattttaaagtccttggtgca

SEQ ID NO: 50955 - DNA, 110 bp, synthetic construct
  source 1..110: mol_type = other DNA
ttcaaaccccaagtcgggtctccagttgctggcttattttaaagtccttggtgcacaaataagcaaatgggggataaggaatgtccagtcattgtttgaggattttctgg

SEQ ID NO: 50956 - DNA, 110 bp, synthetic construct
  source 1..110: mol_type = other DNA
ccctttcgagaatctgatgtaagtacttttgtattaaacatcaagcttgctgatttgctctgttttagcatcagtgtgacctcaatgcttgggtcgggtgggcaccagag

SEQ ID NO: 50957 - DNA, 110 bp, synthetic construct
  source 1..110: mol_type = other DNA
gaccccttcttttgtccagccttgtacctatatttttgcttttttaaataaagtatttcagatgttcagttcctgccttgttctctaataaagagaaaggaaggtgggct

SEQ ID NO: 50958 - DNA, 110 bp, synthetic construct
  source 1..110: mol_type = other DNA
gcttggtggctttgatgggagagctgcatttgaagtgagcatggtctgcatctttccccagggtgtgctggcagtcactgccatcatgggagttgacggagctagagcca

SEQ ID NO: 50959 - DNA, 110 bp, synthetic construct
  source 1..110: mol_type = other DNA
ccccagggtgtgctggcagtcactgccatcatgggagttgacggagctagagccatagccagctgcacatcagcacttttactgtgctcagtgactgtcactgctctgtt

SEQ ID NO: 50960 - DNA, 110 bp, synthetic construct
  source 1..110: mol_type = other DNA
ggatagtggtaacagacccggggtgactgggaggtcatcgaagctggcagtgagggagccatgtgtgagcccgggatggtaaccctcacactcccagtaggttctgactg

SEQ ID NO: 50961 - DNA, 110 bp, synthetic construct
  source 1..110: mol_type = other DNA
gagccatgtgtgagcccgggatggtaaccctcacactcccagtaggttctgactgtcctcagactcttgtgagcttcttttcctctgcctgctcctcgtgtgtcagtact

SEQ ID NO: 50962 - DNA, 110 bp, synthetic construct
  source 1..110: mol_type = other DNA
cttgtcatagttcccattatcacagtatagaatactcagggactgggatgtaataaagatgcttgcctgttcagtaagtggtactgggagaactggatggccacatggaa

SEQ ID NO: 50963 - DNA, 110 bp, synthetic construct
  source 1..110: mol_type = other DNA
attatcacagtatagaatactcagggactgggatgtaataaagatgcttgcctgttcagtaagtggtactgggagaactggatggccacatggaaaagaatgaaattaga

SEQ ID NO: 50964 - DNA, 110 bp, synthetic construct
  source 1..110: mol_type = other DNA
ctcctccactttcagtgaggaaacctggaatttaggaatttttttaatcctttccagacatttatgggctacagtgggacagacgtagctgtgaatacaaaattacacag

SEQ ID NO: 50965 - DNA, 110 bp, synthetic construct
  source 1..110: mol_type = other DNA
agacatttatgggctacagtgggacagacgtagctgtgaatacaaaattacacagcgatttaacttatatgtcccgttttagaaggtcttatctgggaatatgtcgcaat

SEQ ID NO: 50966 - DNA, 110 bp, synthetic construct
  source 1..110: mol_type = other DNA
acatctactcgtgtaacaagagctgtaacctttaatgacctccgaggtcttggccgtatccatggctgtagaaatcagactcagtaatggaacacttggttcttccgttt

SEQ ID NO: 50967 - DNA, 110 bp, synthetic construct
  source 1..110: mol_type = other DNA
gtatccatggctgtagaaatcagactcagtaatggaacacttggttcttccgttttccggaggctgtcttaacaccccatgagtatgatgtctaatttttctggcctttg

SEQ ID NO: 50968 - DNA, 110 bp, synthetic construct
  source 1..110: mol_type = other DNA
atatttgagatctcactcggtcctcacaacagctctgaggggtaaatactctggttagttccgtgttacagatgtagacacaggaccagagaggttgggcaacaggcccc

SEQ ID NO: 50969 - DNA, 110 bp, synthetic construct
  source 1..110: mol_type = other DNA
tctatgtgatgttataatggtgagccctgtcattctccatttgtcccaacccatggactggtgacatgtctagttcagcattcgtgacacatggaccctctggtggagga

SEQ ID NO: 50970 - DNA, 110 bp, synthetic construct
  source 1..110: mol_type = other DNA
gactggtgacatgtctagttcagcattcgtgacacatggaccctctggtggaggaggagaaagggggtgggggctgggtgtgggagatctctgtacattctcctcagttt

SEQ ID NO: 50971 - DNA, 110 bp, synthetic construct
  source 1..110: mol_type = other DNA
atttgagtttgattatttaatagtttagatgttcataccaatggctagctagtaacagttttaattgatacataacagcagttcaaatagtccaagacagctagatagcc

SEQ ID NO: 50972 - DNA, 110 bp, synthetic construct
  source 1..110: mol_type = other DNA
gcaagactcacatgtagaaattatagtaactcataactgtatcatccagaaataactactggcaactcgatgtatttcatatgtgtgtgtatgtagactatatacatgca

SEQ ID NO: 50973 - DNA, 110 bp, synthetic construct; identical to SEQ ID NO: 50972
  source 1..110: mol_type = other DNA

SEQ ID NO: 50974 - DNA, 110 bp, synthetic construct
  source 1..110: mol_type = other DNA
atcgaacctgcatcctcatgaatactggtagaattagtttctgctgcaccacaccgggaactcccttaaatatactatttaaagctgtaaaagtgtacaagttattaggt

SEQ ID NO: 50975 - DNA, 110 bp, synthetic construct
  source 1..110: mol_type = other DNA
ggcttgcattttacacttttatacctacttcacacttttaaagcctgttttccattggcctcagaatgctgttgtttgtaagacacgcagtgatgtcttgcaccatttag

SEQ ID NO: 50976 - DNA, 110 bp, synthetic construct
  source 1..110: mol_type = other DNA
gatggaggcaacgtaaatcatcataagggtaattgacctcagcaaagtaaggagcccaccccaaagaaaaaaattggccagaaaatgtagttgaggaaataattaaagta

SEQ ID NO: 50977 - DNA, 110 bp, synthetic construct
  source 1..110: mol_type = other DNA
agtaaggagcccaccccaaagaaaaaaattggccagaaaatgtagttgaggaaataattaaagtaaatttttctgaaataaactaaatgcatctccttttagaagtcatt

SEQ ID NO: 50978 - DNA, 110 bp, synthetic construct
  source 1..110: mol_type = other DNA
tctttttggtccgcttccttgtagaagtctaccttttgtgaatatatgcagaacagactccatagcaccttttaaaggtctctaaataatagcagacttctttttagatt

SEQ ID NO: 50979 - DNA, 110 bp, synthetic construct
  source 1..110: mol_type = other DNA
gactccatagcaccttttaaaggtctctaaataatagcagacttctttttagattagattttgccctactgcgatttccttcgttgtcctacagccagttcacctctact

SEQ ID NO: 50980 - DNA, 110 bp, synthetic construct
  source 1..110: mol_type = other DNA
gccgggtcatctatccacacaacttctgcctcgtgtagtaatagtcttctttggggtgggggtgaaggggacaactcaggagtaggaaaggattttttttagcctgaatc

SEQ ID NO: 50981 - DNA, 110 bp, synthetic construct
  source 1..110: mol_type = other DNA
gtgggggtgaaggggacaactcaggagtaggaaaggattttttttagcctgaatccagggagcacaggtgtgtgggctttgtgttggtgccgcagatattttaaaaatgc

SEQ ID NO: 50982 - DNA, 110 bp, synthetic construct
  source 1..110: mol_type = other DNA
gcaactgacgatccctgcggtcaacgtcattcacagaaccgtgggcgcccctggggacttgagcacggacgtttctggcactgcaaatcccgccggggtggctgaactaa

SEQ ID NO: 50983 - DNA, 110 bp, synthetic construct
  source 1..110: mol_type = other DNA
gacttgagcacggacgtttctggcactgcaaatcccgccggggtggctgaactaagcagtgttgtgccatgtattcccatcggccaaatccgcgtgccaggccttccgaa

SEQ ID NO: 50984 - DNA, 110 bp, synthetic construct
  source 1..110: mol_type = other DNA
attgtggaggcgggcaagtccacaaacctacagggttgaccagaaggaaagcctcgaagtcaagtatacagaggttgtgagctgaatattcttttccgaggcaatcggtc

SEQ ID NO: 50985 - DNA, 110 bp, synthetic construct
  source 1..110: mol_type = other DNA
gaagtcaagtatacagaggttgtgagctgaatattcttttccgaggcaatcggtctttttggtaaggctgtcaattgatcggatgaggcccacccacattgtggtaagtt

SEQ ID NO: 50986 - DNA, 110 bp, synthetic construct
  source 1..110: mol_type = other DNA
ctttcatttgtagatccctctacacgatagctttcagtttcgcatgcttttcagtgtaatggggtaatggtgtcatgactgtattttttgatacccgtctttcattttcc

SEQ ID NO: 50987 - DNA, 110 bp, synthetic construct
  source 1..110: mol_type = other DNA
aggctatttcggcttgcaactcaaacatctgcctacgtgttgccgtgtaattgtcaagtgcttcatgcgcacttccgatttcgtcacagggaagattgacaaggcatctg

SEQ ID NO: 50988 - DNA, 110 bp, synthetic construct
  source 1..110: mol_type = other DNA
aagtgcttcatgcgcacttccgatttcgtcacagggaagattgacaaggcatctggtccaggctcaagattaatttggttaatcattttccagttttattgaggacatga

SEQ ID NO: 50989 - DNA, 110 bp, synthetic construct
  source 1..110: mol_type = other DNA
ccgtctccgtccccttttacagtgagtctttcctgctgctttccctaaagtcttagcctgaaattcagccataagcagacacatcctattagccttcattttatgccatt

SEQ ID NO: 50990 - DNA, 110 bp, synthetic construct
  source 1..110: mol_type = other DNA
gcctgaaattcagccataagcagacacatcctattagccttcattttatgccattcgtattttccctgaatttctctaaaacaaggcaacacattaagggaacaactaat

SEQ ID NO: 50991 - DNA, 110 bp, synthetic construct
  source 1..110: mol_type = other DNA
cgcagtgcctcgctgacagctactggaaatagatcaagtggatgggagaagtcgcagagatggatgtgacggcagaggggtgtagcatttcctcagacccggagccatag

SEQ ID NO: 50992 - DNA, 110 bp, synthetic construct
  source 1..110: mol_type = other DNA
aatatcgcagaggaatgagagcagacagggagctcacctgcctctgtatcacacgccccatgccaaccccatgttagaatgacaatgtgaaaagggtgaattattacaca

SEQ ID NO: 50993 - DNA, 110 bp, synthetic construct
  source 1..110: mol_type = other DNA
tattttgtgatgtaacagtggaattagaaaacaacatgggggccgttggagactggccagggccaaattttgtagtcctactctgtcctttcaaaatagtaggactaatc

SEQ ID NO: 50994 - DNA, 110 bp, synthetic construct
  source 1..110: mol_type = other DNA
gccagggccaaattttgtagtcctactctgtcctttcaaaatagtaggactaatctgagggtctggaaacagcctacatcttgacctgggtaattgctacaccggtgtat

SEQ ID NO: 50995 - DNA, 110 bp, synthetic construct
  source 1..110: mol_type = other DNA
tgcagaaagacagttatttcccttgtaccttcaataaagtaggctcttggtgtagcacttttttttattagcagctttgtcacatagtcctgacctgcgtttagctgagt

SEQ ID NO: 50996 - DNA, 110 bp, synthetic construct
  source 1..110: mol_type = other DNA
cacttttttttattagcagctttgtcacatagtcctgacctgcgtttagctgagtccacctccttttggctgtgactagggaaacatcccttaaaagattcctgataaat

SEQ ID NO: 50997 - DNA, 110 bp, synthetic construct
  source 1..110: mol_type = other DNA
aagggcatttgactctgtgtttcacaaacttggtgaatatgcatgacttttaactcaatgatcccagtcctagaaattaatcgcgaagaaagaatctagcaagggcaaag

SEQ ID NO: 50998 - DNA, 110 bp, synthetic construct
  source 1..110: mol_type = other DNA
caatgatcccagtcctagaaattaatcgcgaagaaagaatctagcaagggcaaagatttagctgcaaggatggcatggccttgtttttacaacaacaagatcttggaacc

SEQ ID NO: 50999 - DNA, 110 bp, synthetic construct
  source 1..110: mol_type = other DNA
tctccggcagagcatgaaatctcactccagtcttttcctgcctcaatttccaactcttctccgatgccaggcatgccgcctcgtccatgcaacccggtctgctcgctggc

SEQ ID NO: 51000 - DNA, 110 bp, synthetic construct
  source 1..110: mol_type = other DNA
cttctccgatgccaggcatgccgcctcgtccatgcaacccggtctgctcgctggctctgcggcagaaagcgccagctcttgcttgcctgctctaggggccaccctcagac

SEQ ID NO: 51001 - DNA, 110 bp, synthetic construct
  source 1..110: mol_type = other DNA
gggctctctgttacggagcatctctggcctctatcccctaaattccagtagcaatttgcctcttagtcatgagaataaagaatatctctagacattacccagtgtcctct

SEQ ID NO: 51002 - DNA, 110 bp, synthetic construct
  source 1..110: mol_type = other DNA
atgcatgtatgtacagatgtatgtgtagatatgggtgtaatatatgtgtatataggacatgcacatgtgtagttcatatgtatatgtagatgtggatgtcacatatgtgc

SEQ ID NO: 51003 - DNA, 110 bp, synthetic construct
  source 1..110: mol_type = other DNA
gacatgcacatgtgtagttcatatgtatatgtagatgtggatgtcacatatgtgccattcgtgtgtatacgtatatggaggcatagatataagtggagctgtatatgtgt

SEQ ID NO: 51004 - DNA, 110 bp, synthetic construct
  source 1..110: mol_type = other DNA
ttcaccgctgcttcatgcagcagccacatagccgatgcccgtgttttctaaaggccaccctggaaacagcagcaggaaaaactgcctctctctcaccacaacctaggcag

SEQ ID NO: 51005 - DNA, 110 bp, synthetic construct
  source 1..110: mol_type = other DNA
caccctggaaacagcagcaggaaaaactgcctctctctcaccacaacctaggcagcactactgaaggtgacttctccatagggctcaggcttgctctcatccctgaagct

SEQ ID NO: 51006 - DNA, 110 bp, synthetic construct
  source 1..110: mol_type = other DNA
cctaagctattttttaaaaaatggaaaccaaagcaattatcagcagcaaccaagcaaaggaaggacaaataaactctcccccaacactgccaccaagacactaaacactc

SEQ ID NO: 51007 - DNA, 110 bp, synthetic construct; identical to SEQ ID NO: 51006
  source 1..110: mol_type = other DNA

SEQ ID NO: 51008 - DNA, 110 bp, synthetic construct
  source 1..110: mol_type = other DNA
acttgaagaacttaatgagcagctactgaataccaaaaatgcatatacttataaagaatttaaaaaacatcattctgctggtggatcacttttgagattactggaactcc

SEQ ID NO: 51009 - DNA, 110 bp, synthetic construct
  source 1..110: mol_type = other DNA
gaatttaaaaaacatcattctgctggtggatcacttttgagattactggaactccaattatagcatgatttgggcatttggaaaattcttattatgatcacggtgtgatg

SEQ ID NO: 51010 - DNA, 110 bp, synthetic construct; identical to SEQ ID NO: 51008
  source 1..110: mol_type = other DNA

SEQ ID NO: 51011 - DNA, 110 bp, synthetic construct; identical to SEQ ID NO: 51009
  source 1..110: mol_type = other DNA

SEQ ID NO: 51012 - DNA, 110 bp, synthetic construct
  source 1..110: mol_type = other DNA
caagtcacacttctggagctggtgaggctcagagtggttcagccacatacccaaatcacacagcttattgccggaaggtagcgactagaatcggatcccttttttttttt

SEQ ID NO: 51013 - DNA, 110 bp, synthetic construct
  source 1..110: mol_type = other DNA
tcacacagcttattgccggaaggtagcgactagaatcggatccctttttttttttttaaattcaccaacgaacgcccatcctacttcataaggtttcttttctcaaagac

SEQ ID NO: 51014 - DNA, 110 bp, synthetic construct
  source 1..110: mol_type = other DNA
cacgtgctggaacaagaagaaactttcagtcatgactgttttacacactgttgaggagtttgaaacaaaagggaaaactctgtatagagaaacaagatgtgttggctaag

SEQ ID NO: 51015 - DNA, 110 bp, synthetic construct
  source 1..110: mol_type = other DNA
gagtttgaaacaaaagggaaaactctgtatagagaaacaagatgtgttggctaaggaaccgttatcttaggactagtaggatggcaattaactgaatgtgcaaagtagcc

SEQ ID NO: 51016 - DNA, 110 bp, synthetic construct
  source 1..110: mol_type = other DNA
ttggaaaacttggtatggagatttagagttttcaggaaagacctataatttgtgagcaattgtataagctggacagtctttctgaggtctaccaatgtggtgattcaatg

SEQ ID NO: 51017 - DNA, 110 bp, synthetic construct
  source 1..110: mol_type = other DNA
tcaccatcattaactaacatggactccaacacatgaggacaacagatggtaattccagagaaaatcttttacaagtggctctcgtatgattagacacggagcttttagag

SEQ ID NO: 51018 - DNA, 110 bp, synthetic construct
  source 1..110: mol_type = other DNA
cagagaaaatcttttacaagtggctctcgtatgattagacacggagcttttagagctaagacacatcaacatcactaaggcgccatgaggttttctagaaacattcttaa

SEQ ID NO: 51019 - DNA, 110 bp, synthetic construct
  source 1..110: mol_type = other DNA
tctccctgtgccccaaaatcaagtatcccgcagagccctcaatctcagctctcccactcacgtccatagtccctgactctgcgagtggcactcgcaagagcccatctgcc

SEQ ID NO: 51020 - DNA, 110 bp, synthetic construct
  source 1..110: mol_type = other DNA
actcacgtccatagtccctgactctgcgagtggcactcgcaagagcccatctgccgaaccggaaactcagcaatcatccttgagggcaaaaccgccctgccctgtcagcc

SEQ ID NO: 51021 - DNA, 110 bp, synthetic construct
  source 1..110: mol_type = other DNA
tcaacgtgtggcttccagggtcgttcgagccattgtcacttctcagagaatgagatcggagagaagaaatttggagaagcccttttctttttaaagaagataaccccaaa

SEQ ID NO: 51022 - DNA, 110 bp, synthetic construct
  source 1..110: mol_type = other DNA
tcggagagaagaaatttggagaagcccttttctttttaaagaagataaccccaaagccatgcacataaccttgactcatctccttttagcctgaatgtagtctcatggtc

SEQ ID NO: 51023 - DNA, 110 bp, synthetic construct
  source 1..110: mol_type = other DNA
ttgtgtgttcgtaagatttttgtattggttcagggttttgttcagtttagggacttttccctttggggagctgctgatgccaatggattgggtttttcggtcctcagacg

SEQ ID NO: 51024 - DNA, 110 bp, synthetic construct
  source 1..110: mol_type = other DNA
tttccctttggggagctgctgatgccaatggattgggtttttcggtcctcagacgtggttgactggatgccttgggactcactggtactctctcctggatgcctgggagt

SEQ ID NO: 51025 - DNA, 110 bp, synthetic construct
  source 1..110: mol_type = other DNA
tcagattttctcacaaacgtgggcttggccaccttgtagcctaggacatccccgctgccacagttagaatcttcctgcccaacctcatcccagggaacccattcctgctg

SEQ ID NO: 51026 - DNA, 110 bp, synthetic construct
  source 1..110: mol_type = other DNA
tgccacagttagaatcttcctgcccaacctcatcccagggaacccattcctgctgtgacaactctagccaggcccatccagcaacaatataacagaccacctagaagcct

SEQ ID NO: 51027 - DNA, 110 bp, synthetic construct
  source 1..110: mol_type = other DNA
tggataccatactggccagcagagttagaagctgcaaacgcagggcagactatggaggagaatgaaccaccaaaccagggcacaaccctctgaggtccccttaggccgct

SEQ ID NO: 51028 - DNA, 110 bp, synthetic construct
  source 1..110: mol_type = other DNA
ccagagaagtggcacatcgcctccctttaagcagacttcccagaagtcattcaaatatttcagcttacagctcaagtcaaagcttgatagtggggccacacctattctca

SEQ ID NO: 51029 - DNA, 110 bp, synthetic construct
  source 1..110: mol_type = other DNA
agcagcaacgctcaggtaggtgtaatgggttgcctgtccccctgccacacagtcggagacctgatcacggtggcctgggttttgcttatgccagccccacccagctgcca

SEQ ID NO: 51030 - DNA, 110 bp, synthetic construct
  source 1..110: mol_type = other DNA
tctaattcctccttttccagccctttccaccacttctgggcttccatgtgtccgcatcagtgtcatatcatctatgtatcagggagtaatcctgcatctgggtttgaaga

SEQ ID NO: 51031 - DNA, 110 bp, synthetic construct
  source 1..110: mol_type = other DNA
tgtagcaccgtttagtttacagcatcaacgccctgaattctggcaaactgaagaaaaagtctccagtggccggggagccatttccagcttcttaagttgaaagcttttaa

SEQ ID NO: 51032 - DNA, 110 bp, synthetic construct
  source 1..110: mol_type = other DNA
gctcatccggctgtgtatgaatgactgcttccaggctgatggttttcacgcgtctccagcagtgagaccttttatttagagcaggtctctaggtgacacctccactatag

SEQ ID NO: 51033 - DNA, 110 bp, synthetic construct
  source 1..110: mol_type = other DNA
ccagcagtgagaccttttatttagagcaggtctctaggtgacacctccactataggaaaccagcgttactgaggctgtcggactgagtgttcccttcttccctgtaacca

SEQ ID NO: 51034 - DNA, 110 bp, synthetic construct
  source 1..110: mol_type = other DNA
ccaaaagaagtatgactagtatagaatttggggtgactggcctatagatgctaactgaaattgtgagtgttggtgacatcattgagggagcatgcgtggcatcagaactg

SEQ ID NO: 51035 - DNA, 110 bp, synthetic construct
  source 1..110: mol_type = other DNA
tgaaattgtgagtgttggtgacatcattgagggagcatgcgtggcatcagaactggtagggtctgggttaaataattactagatgagaagtcaggaccaggaccaggacc

SEQ ID NO: 51036 - DNA, 110 bp, synthetic construct
  source 1..110: mol_type = other DNA
tcatccctactcctcttccttagcttctgaagaacttgctgtcgctggggcccctgattggactcttaaatgtgaagaagctaaaagcttccggggaacttgtcaggttc

SEQ ID NO: 51037 - DNA, 110 bp, synthetic construct
  source 1..110: mol_type = other DNA
gattggactcttaaatgtgaagaagctaaaagcttccggggaacttgtcaggttccccgaagggagtgcttctgtcagcaagggttgggggggttgggaaaagaagcagc

SEQ ID NO: 51038 - DNA, 110 bp, synthetic construct
  source 1..110: mol_type = other DNA
atggctctgatgagctagatttacctaggaagatgagaggctgacctgtcagtgtgtactcgggacccaagggtgggggccctcccgctgcccaagtggaccagctctgg

SEQ ID NO: 51039 - DNA, 110 bp, synthetic construct
  source 1..110: mol_type = other DNA
ttcaacatagttttggtagctttagccatagccatcggtcaagaacaagaaataaaaggaatccagattggaaaagaagaagtaaaactgttactgttggcagatgacat

SEQ ID NO: 51040 - DNA, 110 bp, synthetic construct; identical to SEQ ID NO: 51039
  source 1..110: mol_type = other DNA

SEQ ID NO: 51041 - DNA, 110 bp, synthetic construct
  source 1..110: mol_type = other DNA
gtgtggactgaagttccgattccagcaattggaactgcgtgacccaagccatttgacacggagggagctcagttcccttattataaaattggaataataacggcttcttc

SEQ ID NO: 51042 - DNA, 110 bp, synthetic construct
  source 1..110: mol_type = other DNA
acacggagggagctcagttcccttattataaaattggaataataacggcttcttccaaaggctgctctgaggatgaaatgacatacaggtgcggtcctgacacatgacaa

SEQ ID NO: 51043 - DNA, 110 bp, synthetic construct
  source 1..110: mol_type = other DNA
ggatactccggagaaagagaacaggttcctttattgagaacctctgatgcgcaaagcaccagccagccgctccttgtaagtgtcacgcgtcgcccggagaaggcagggag

SEQ ID NO: 51044 - DNA, 110 bp, synthetic construct
  source 1..110: mol_type = other DNA
gcaccagccagccgctccttgtaagtgtcacgcgtcgcccggagaaggcagggagacccatttaccctctagggtaggctgagggcatgctgagggtgcccagttagggg

SEQ ID NO: 51045 - DNA, 110 bp, synthetic construct
  source 1..110: mol_type = other DNA
tacctggcaggcgaagccaaatggcacgttcaaattttgactctgacggtttctgttttatttgggggttttttctgttctgtttttgtatcaggtctacttttgatctc

SEQ ID NO: 51046 - DNA, 110 bp, synthetic construct
  source 1..110: mol_type = other DNA
ttttatttgggggttttttctgttctgtttttgtatcaggtctacttttgatctcccaacgtgactctttggaggcaaaggcacctcctcctcatgtctggagtcttctt

SEQ ID NO: 51047 - DNA, 110 bp, synthetic construct
  source 1..110: mol_type = other DNA
cagaagtaaaatcaacaacaacagctcctatggcttcttgttttacatagaataaaacaactttgtagcctgatgtggtcattgaatactcagcacatgcaacacgctgt

SEQ ID NO: 51048 - DNA, 110 bp, synthetic construct
  source 1..110: mol_type = other DNA
aacaactttgtagcctgatgtggtcattgaatactcagcacatgcaacacgctgttctaagcactccctattgtgtttttaacttacctcgcaggaaatgctattatagc

SEQ ID NO: 51049 - DNA, 110 bp, synthetic construct
  source 1..110: mol_type = other DNA
gtgaattgtattgtgagttatatctcaataaagctatttttaaaaaaagtacatacactgtataagcaaatccttgaaggagaggtgacagttaaccaggaaggtagaga

SEQ ID NO: 51050 - DNA, 110 bp, synthetic construct
  source 1..110: mol_type = other DNA
tccgttaaccactgagccgtgaggggaactccagaacctgtttttcaaatgatttctgacatgggatctcttggttctcaaatttgagctttcgtctgaaccacctggaa

SEQ ID NO: 51051 - DNA, 110 bp, synthetic construct
  source 1..110: mol_type = other DNA
ctgacatgggatctcttggttctcaaatttgagctttcgtctgaaccacctggaacagatgtaggctccgcccccaaggttcctgattccgtgggtctgggtagagccag

SEQ ID NO: 51052 - DNA, 110 bp, synthetic construct
  source 1..110: mol_type = other DNA
gctatatagcagaaattggcacaacattgtaaataaactatacttttataaaaaggattttttagggccatacctgcagcatgtggaagctcctaggctagaggttgaat

SEQ ID NO: 51053 - DNA, 110 bp, synthetic construct
  source 1..110: mol_type = other DNA
ttggcacaacattgtaaataaactatacttttataaaaaggattttttagggccatacctgcagcatgtggaagctcctaggctagaggttgaatcagagctgtagctgc

SEQ ID NO: 51054 - DNA, 110 bp, synthetic construct
  source 1..110: mol_type = other DNA
gctgtgctcactgctgttggagtgctgcgccttcaggcctcctcagggagagctaaggtgtatattctagttctagttctcgtagccgcgtaacaaattaccacagactt

SEQ ID NO: 51055 - DNA, 110 bp, synthetic construct
  source 1..110: mol_type = other DNA
aggtgtatattctagttctagttctcgtagccgcgtaacaaattaccacagacttggcagcttgggatgacacacagttattatcttagctttctgaggtcaggagccct

SEQ ID NO: 51056 - DNA, 110 bp, synthetic construct
  source 1..110: mol_type = other DNA
gtggacttgctactgctttgctgactactgcttgccggtgctaaggaccaggcgaaggcattcacataaatatgaatgcagaaaacccagaacgaactgaccacgctggg

SEQ ID NO: 51057 - DNA, 110 bp, synthetic construct
  source 1..110: mol_type = other DNA
atctccagccctgggcaaaaactggcctccatgagaagacatcctgacacagatgagccctagcaggagaaacagtggtgagagaatgaatgaatgcatctctcaaaggg

SEQ ID NO: 51058 - DNA, 110 bp, synthetic construct
  source 1..110: mol_type = other DNA
agccctagcaggagaaacagtggtgagagaatgaatgaatgcatctctcaaagggatctctcaagccacccatctcagaaccatgctgggctgtcccatgggttaggggc

SEQ ID NO: 51059 - DNA, 110 bp, synthetic construct
  source 1..110: mol_type = other DNA
aatgtggaggtgagcagtctcagagtggatagaatagctctgccgtgtcaccagtgacccagactcctccatccttgtattccgccatcttcatcgtcttggggacacca

SEQ ID NO: 51060 - DNA, 110 bp, synthetic construct
  source 1..110: mol_type = other DNA
actggcacattggtgacctcagtctaacacctttccagacagaggcagaagtgacagcccgtcctgaaccattatgtcgctctctaacccatgcccagtgtagacagcgt

SEQ ID NO: 51061 - DNA, 110 bp, synthetic construct
  source 1..110: mol_type = other DNA
agcccgtcctgaaccattatgtcgctctctaacccatgcccagtgtagacagcgtctgatggttaccaccatatctggatacacccagcatgccgagcctagcatcacag

SEQ ID NO: 51062 - DNA, 110 bp, synthetic construct
  source 1..110: mol_type = other DNA
cacagcgccattcagcacatccttggctgtgcatctctctgagcagaccatcaagtacacaaggggcaggtttggttttgttctctgccgtcactccggcacctagaact

SEQ ID NO: 51063 - DNA, 110 bp, synthetic construct
  source 1..110: mol_type = other DNA
taaattcttggtttctctggggaaaaaaaaaaatcccagaaagagttggcaatactgggttagcattttcacatgcacagccgttgcctggagctgagtagtggcagccc

SEQ ID NO: 51064 - DNA, 110 bp, synthetic construct
  source 1..110: mol_type = other DNA
tgggttagcattttcacatgcacagccgttgcctggagctgagtagtggcagccctttcagatgggctgttgctgttcagtttgccatggaccccactactccctattgc

SEQ ID NO: 51065 - DNA, 110 bp, synthetic construct
  source 1..110: mol_type = other DNA
aacagtagaagtttctatacaaaaaggtagaaatcagtgacagaactagagggtcatgtaacaaaagatggcttgggaccaaggagaaacatagaggctcgatgatgtct

SEQ ID NO: 51066 - DNA, 110 bp, synthetic construct
  source 1..110: mol_type = other DNA
atgtaacaaaagatggcttgggaccaaggagaaacatagaggctcgatgatgtcttgcttaggtctccacattggagaaattcacaactcccaaattttcacttgaagag

SEQ ID NO: 51067 - DNA, 110 bp, synthetic construct
  source 1..110: mol_type = other DNA
caacgggaggtggttgctggaggggtcccgggggctcatgtgggaaaaaatcccccccccctccaccccgcttcttcttgcagagcttaaagcgctgccctcgatgtcct

SEQ ID NO: 51068 - DNA, 110 bp, synthetic construct
  source 1..110: mol_type = other DNA
cccccctccaccccgcttcttcttgcagagcttaaagcgctgccctcgatgtcctgccgcagaagccctgagagttactgccagaccttggaaataattagtacacttac

SEQ ID NO: 51069 - DNA, 110 bp, synthetic construct
  source 1..110: mol_type = other DNA
acctgctggcctttctctagccgctgaatgcaactcagagtcagagctgactggcgctcgctggtaactgggctaattattcacatagtaggagtcggggaaagtgaacg

SEQ ID NO: 51070 - DNA, 110 bp, synthetic construct
  source 1..110: mol_type = other DNA
gctcgctggtaactgggctaattattcacatagtaggagtcggggaaagtgaacggaagaggataaactgggaggggggccagtgcgtcgcattttcctttcaaccaaat

SEQ ID NO: 51071 - DNA, 110 bp, synthetic construct
  source 1..110: mol_type = other DNA
ttaaaggtaaagagacatctcgtgccctgttctccagagcacggccaaatacctgtcacgtagaaagcacttaatagctgttcgctatatcagtgagtgaataaatgggt

SEQ ID NO: 51072 - DNA, 110 bp, synthetic construct
  source 1..110: mol_type = other DNA
tcacgtagaaagcacttaatagctgttcgctatatcagtgagtgaataaatgggtgagtcttctatccatatgtaaatatgtacctgcagacagatatgagggacaaagt

SEQ ID NO: 51073 - DNA, 110 bp, synthetic construct
  source 1..110: mol_type = other DNA
ggaacgtgtgtacaggctcgttttccaggcactgacattgtcttggtgtttctggtatgtgccctccatgacttcccgcctcaccaggggggctcttactcttagtttca

SEQ ID NO: 51074 - DNA, 110 bp, synthetic construct
  source 1..110: mol_type = other DNA
tatgtgccctccatgacttcccgcctcaccaggggggctcttactcttagtttcactctgcagaggagcctgttagcatccctgaatgtcagaggaggttagatgccaga

SEQ ID NO: 51075 - DNA, 110 bp, synthetic construct
  source 1..110: mol_type = other DNA
atcatctttggctgcacaccaccctggggtcgggggtttggtagaaactcctatacccttcaggtgctctgcatgtgcgtgagcttgaaccatgcaagacggttccgaca

SEQ ID NO: 51076 - DNA, 110 bp, synthetic construct
  source 1..110: mol_type = other DNA
aaataaaaagggacctacattgcatggggctacgtacacaggaccaagccatggaatcagctgctcaattttctacactggggtaaaagtacccgtatacatcagtatta

SEQ ID NO: 51077 - DNA, 110 bp, synthetic construct
  source 1..110: mol_type = other DNA
atcagctgctcaattttctacactggggtaaaagtacccgtatacatcagtattacgacttcgattcataagaggagacaagacaacagtcggagggaggaggtcattac

SEQ ID NO: 51078 - DNA, 110 bp, synthetic construct
  source 1..110: mol_type = other DNA
gaaccatacccgtcagcatgcgtgccctgcgtcatgctcatatttgtggagacctggtcacatggcaggcactccgtgaccatctgtaaaaagctgaatagctccagggc

SEQ ID NO: 51079 - DNA, 110 bp, synthetic construct
  source 1..110: mol_type = other DNA
ggtcacatggcaggcactccgtgaccatctgtaaaaagctgaatagctccagggccattatggggctcctgacaccatacaacgtatacacactaaatctttccctctat

SEQ ID NO: 51080 - DNA, 110 bp, synthetic construct
  source 1..110: mol_type = other DNA
cacggccccggctccatttcccccagttcactccccggacctcatactcctaagctagcttattcctccacagctgtccacatctcatcaaaactagcacaccaccactc

SEQ ID NO: 51081 - DNA, 110 bp, synthetic construct
  source 1..110: mol_type = other DNA
tagcttattcctccacagctgtccacatctcatcaaaactagcacaccaccactcagggctgtctcttcctttcctcacaagggctgcgtgtcgtgtaaaacttagagtc

SEQ ID NO: 51082 - DNA, 110 bp, synthetic construct
  source 1..110: mol_type = other DNA
gctgtccaaccagcatgctgatttccctgtcaaatctgcgttcaatttagttgatttaaaggacttgacttagtggaatgactaaggcaggcgagcttggccagtcgctc

SEQ ID NO: 51083 - DNA, 110 bp, synthetic construct
  source 1..110: mol_type = other DNA
ttaaaggacttgacttagtggaatgactaaggcaggcgagcttggccagtcgctcttggaaaggcacaaacacgctccctgccgagacctatggggctctgccacctatt

SEQ ID NO: 51084 - DNA, 110 bp, synthetic construct
  source 1..110: mol_type = other DNA
agggcaccacacgtgcagagaagcgtgaggcacggaaccgcgctgggggagaagcactgacgtccactctctgcagaatgacgctggagacgtggacgcatctgcccctg

SEQ ID NO: 51085 - DNA, 110 bp, synthetic construct
  source 1..110: mol_type = other DNA
actgacgtccactctctgcagaatgacgctggagacgtggacgcatctgcccctggctctgagtctccccgctgacctggcctgtctttctaactcccacgtttattccc

SEQ ID NO: 51086 - DNA, 110 bp, synthetic construct
  source 1..110: mol_type = other DNA
caaatccttgaactaaagggagtaattacatgtaatgatcagttctttcctggatctccatggaaggccaatacccttattgcataacccaaggccctgtgtacctctct

SEQ ID NO: 51087 - DNA, 110 bp, synthetic construct
  source 1..110: mol_type = other DNA
ctccatggaaggccaatacccttattgcataacccaaggccctgtgtacctctctcccctgtgcactcagagcgggttttaacctaagcatttattgctacgatccttca

SEQ ID NO: 51088 - DNA, 110 bp, synthetic construct
  source 1..110: mol_type = other DNA
tattttctcctagagctgggtgccatgctctttgtaggtccatttgatcaggttgctaattgtgctgatcaactcttctgcatcccttcttttggctggtgtattattta

SEQ ID NO: 51089 - DNA, 110 bp, synthetic construct
  source 1..110: mol_type = other DNA
ctaattgtgctgatcaactcttctgcatcccttcttttggctggtgtattatttatttccttttctattccaatctgagtctctagctgtttgagatctaaaggttttgg

SEQ ID NO: 51090 - DNA, 110 bp, synthetic construct
  source 1..110: mol_type = other DNA
atgtaagggccaagcgtaagttatcagctcagcgcatcctaggccttcctgcctgcaggcaggctctgtggagagtcggattttcaaaaattactgtcagggaaatcaaa

SEQ ID NO: 51091 - DNA, 110 bp, synthetic construct
  source 1..110: mol_type = other DNA
caggcaggctctgtggagagtcggattttcaaaaattactgtcagggaaatcaaagcaggggaagcactgggatttgagaacttggagcctctctccactgctgcagcct

SEQ ID NO: 51092 - DNA, 110 bp, synthetic construct
  source 1..110: mol_type = other DNA
gccacctcactgtctgctcgtccaagggcagatcaagcggctgtgcgtctgggtggtgcgggccgcaggactactttcgacaggtcaaagcttttctgagtgacatcaag

SEQ ID NO: 51093 - DNA, 110 bp, synthetic construct
  source 1..110: mol_type = other DNA
gtgcgggccgcaggactactttcgacaggtcaaagcttttctgagtgacatcaagataattacacaaaactatgtaggtccgtccttaaatcctacagttccctgcccca

SEQ ID NO: 51094 - DNA, 110 bp, synthetic construct
  source 1..110: mol_type = other DNA
gttaccgactttctcattctgtctcaagaccgaattctggtcaaacacccatctcctccaccaagtagccggacaccttccagcgtcagctttgctttgagcccccaccc

SEQ ID NO: 51095 - DNA, 110 bp, synthetic construct
  source 1..110: mol_type = other DNA
ctccaccaagtagccggacaccttccagcgtcagctttgctttgagcccccacccccatgattcctttcttctgcctcttccccttcctcttcctccccgtccctggccc

SEQ ID NO: 51096 - DNA, 110 bp, synthetic construct
  source 1..110: mol_type = other DNA
ttttcaattctgagacattcagagggcggctggttgagagagccccacacataccagcaccagtgcggctggggatgtgattaccacacgagagcttcccagcacccgtt

SEQ ID NO: 51097 - DNA, 110 bp, synthetic construct
  source 1..110: mol_type = other DNA
agcaccagtgcggctggggatgtgattaccacacgagagcttcccagcacccgttacatgcctgctggaaacgggaattagagctgctggtaacctggacacacagctga

SEQ ID NO: 51098 - DNA, 110 bp, synthetic construct
  source 1..110: mol_type = other DNA
gaaacccgaaatgtaccaaacaaattggggagttccaaagagggagcctgggcggaacacaggagccgaaccctgcagagcctcaccgactctgcatggcatgtagctct

SEQ ID NO: 51099 - DNA, 110 bp, synthetic construct
  source 1..110: mol_type = other DNA
aacacaggagccgaaccctgcagagcctcaccgactctgcatggcatgtagctctcgtcgcaagtcttcaaccagaaaaagacctgactgaaccactttggtgagaaaaa

SEQ ID NO: 51100 - DNA, 110 bp, synthetic construct
  source 1..110: mol_type = other DNA
catggatgctaagagccaaggccaggagagggtccgacccactgcgcacagcccagggccaacccaggagaggtcccggggggaggagaggccaggaaccctgaggacca

SEQ ID NO: 51101 - DNA, 110 bp, synthetic construct
  source 1..110: mol_type = other DNA
gggccaacccaggagaggtcccggggggaggagaggccaggaaccctgaggaccaacatgcttgaaacttgaagctgaacctcttgctctgccctgagatcccacgtaag

SEQ ID NO: 51102 - DNA, 110 bp, synthetic construct
  source 1..110: mol_type = other DNA
atacctactttcatctcagggtcatttcagctcagacactcaactgagagatgaggaggaaatcccggcagatcccagaccccgtttccaaatgatcctgaggccgtctg

SEQ ID NO: 51103 - DNA, 110 bp, synthetic construct
  source 1..110: mol_type = other DNA
gaggaaatcccggcagatcccagaccccgtttccaaatgatcctgaggccgtctgccacctaaccttcaacagatcgactttgtgaaccagtgaattccccgcacttgtt

SEQ ID NO: 51104 - DNA, 110 bp, synthetic construct
  source 1..110: mol_type = other DNA
aaatttacacctcagtaaaattacaacccaccatggggtcatggttcttccagaatggtctgggaagaactaaaatcacttatgttcaattcagagatagagaggacgac

SEQ ID NO: 51105 - DNA, 110 bp, synthetic construct; identical to SEQ ID NO: 51104
  source 1..110: mol_type = other DNA

SEQ ID NO: 51106 - DNA, 110 bp, synthetic construct
  source 1..110: mol_type = other DNA
ttaaaaaggaaggaaattctgacatgagctgcaacaggaataaaccttgaagacattatgtcaagcaaataagccaggaacagaaggacaaatactgtgggattccactt

SEQ ID NO: 51107 - DNA, 110 bp, synthetic construct
  source 1..110: mol_type = other DNA
ttatgtcaagcaaataagccaggaacagaaggacaaatactgtgggattccacttacacgagggagctagaacaaattcaaagaggcaggaagtggaatggtgatagctg

SEQ ID NO: 51108 - DNA, 110 bp, synthetic construct
  source 1..110: mol_type = other DNA
aggatggtttttacactttgagctgggttagaatggacccgtgaatggaacatgaatttcacattgatcaggggctcctaaatgccaccttgtttggaaatagtgtcttt

SEQ ID NO: 51109 - DNA, 110 bp, synthetic construct
  source 1..110: mol_type = other DNA
tggccttcatttctgccacgcctctactggcccccggtttaagcccttttgcagttgaatgcatagaagtcacctttctgtttctcatgcataaagaaggcttgttaaat

SEQ ID NO: 51110 - DNA, 110 bp, synthetic construct
  source 1..110: mol_type = other DNA
tgaatgcatagaagtcacctttctgtttctcatgcataaagaaggcttgttaaatgctggagggggtttggagaaagggagccctcctactctgctggtgggaatataaa

SEQ ID NO: 51111 - DNA, 110 bp, synthetic construct
  source 1..110: mol_type = other DNA
gatccctggcctcgctcagggggttaaagatccggcattgccaggagctgtggtgtaggtccttatgagagacaggagggaaaggccgcatgaagctggagacagaccct

SEQ ID NO: 51112 - DNA, 110 bp, synthetic construct
  source 1..110: mol_type = other DNA
taggtccttatgagagacaggagggaaaggccgcatgaagctggagacagaccctggactcagccatggccaggggactccaggagccaccggatgcttccaaagattcc

SEQ ID NO: 51113 - DNA, 110 bp, synthetic construct
  source 1..110: mol_type = other DNA
ttcgtagcaagagaggacggctgctcttgccgtctgaatgccttgctgtgattgtaagagactgtcctatgagcagtcgccggggcctgatgccacgaggtctctgcaga

SEQ ID NO: 51114 - DNA, 110 bp, synthetic construct
  source 1..110: mol_type = other DNA
aaaacccaaggggcaaagatgactgagctgtcatccccaagagtcctaggaaggcgaatcaccaccaacttcctaggctttgttgattcatccttaacaaaggggaactc

SEQ ID NO: 51115 - DNA, 110 bp, synthetic construct
  source 1..110: mol_type = other DNA
gcatcctcatggttcctagccagattcatttcggctgcaccaggacgggaactccttttatttttgcccttcaacaaagcttcacccctgctaaggaagtcgttcaggta

SEQ ID NO: 51116 - DNA, 110 bp, synthetic construct
  source 1..110: mol_type = other DNA
ttttatttttgcccttcaacaaagcttcacccctgctaaggaagtcgttcaggtagggttagcttaactccacgaaattcaaggtaaacgtcttgtgcttaatgaggtca

SEQ ID NO: 51117 - DNA, 110 bp, synthetic construct
  source 1..110: mol_type = other DNA
gaacggactaaaaagaagctcttccattttgtgtataaagccaggttttgtcctactcttacatatttaaaacacacgacttaattagagcaagaaactgtgtactgcat

SEQ ID NO: 51118 - DNA, 110 bp, synthetic construct
  source 1..110: mol_type = other DNA
ctcttacatatttaaaacacacgacttaattagagcaagaaactgtgtactgcattagctgtgggaaaaagttaattctgtaagccagagaaccactgtcttaatgcaaa

SEQ ID NO: 51119 - DNA, 110 bp, synthetic construct
  source 1..110: mol_type = other DNA
aaaagccgtctgcattgctctggtttagttttgaattgtctggacttttaagctggtctgggaggacctttcacaagaggacagcagaacagtgtgcaaggaacgtggga

SEQ ID NO: 51120 - DNA, 110 bp, synthetic construct
  source 1..110: mol_type = other DNA
gtctgggaggacctttcacaagaggacagcagaacagtgtgcaaggaacgtgggagcgaaagcctgagggcacgtggaccgtgtgggctggggagcaagcctaaggcagg

SEQ ID NO: 51121 - DNA, 110 bp, synthetic construct
  source 1..110: mol_type = other DNA
gtccttccccttcctgcagcctgtgagctgttaaataagtgcccctcccttgtggggtttgcatgagtttgagttcacgagaaatacttagaatagtacctggcatatgt

SEQ ID NO: 51122 - DNA, 110 bp, synthetic construct
  source 1..110: mol_type = other DNA
gccagggtcgaatgaatttagacctttctctggggactgaatgccacccagctgtggctggtccctttcttttattgccaatttatgcgatcatttcccagcatttaaaa

SEQ ID NO: 51123 - DNA, 110 bp, synthetic construct
  source 1..110: mol_type = other DNA
aggcatatgtaaactattgtgcatccatgcctgatggcctcctgatcttaagacaggtgacacccggggtgggggcttatctctaagtgatactgtgagtgagatggttt

SEQ ID NO: 51124 - DNA, 110 bp, synthetic construct
  source 1..110: mol_type = other DNA
ggtgacacccggggtgggggcttatctctaagtgatactgtgagtgagatggtttaaggtgtggcgtgttttttctgccacagccttataactgggccttggattaaaaa

SEQ ID NO: 51125 - DNA, 110 bp, synthetic construct
  source 1..110: mol_type = other DNA
agggcatgtttcggctggtggaactgaagaaactccttctagagagagtagttacacgcctcctggccccctggcctgctgctcgcatctcgatgaacaggactcagatg

SEQ ID NO: 51126 - DNA, 110 bp, synthetic construct
  source 1..110: mol_type = other DNA
aagctgtaccttgagagctgtcaccaggcatttcctagtttgaatgttactttaaaaagcatatatcctgaattcatgggtgaaaatgaggttttgtttatatgtgcttt

SEQ ID NO: 51127 - DNA, 110 bp, synthetic construct
  source 1..110: mol_type = other DNA
ttcatcaccactgagccacaacaggcactcctctcttaatttttgtaaaaaacaaaacaaaacaatctatccagcatttaggcgttttatagctatagagcttttcaaag

SEQ ID NO: 51128 - DNA, 110 bp, synthetic construct
  source 1..110: mol_type = other DNA
aacaaaacaatctatccagcatttaggcgttttatagctatagagcttttcaaagtatctggtctgcctcactgacagaaacctatattctcccccttcagtaatttcta

SEQ ID NO: 51129 - DNA, 110 bp, synthetic construct
  source 1..110: mol_type = other DNA
gattcaaaacaggccatttatcattaccaaaaacagcaggcctgcggtcgaacgatgaagacacatgcagatgccagaggcctgctcttcggagcccctccctataacct

SEQ ID NO: 51130 - DNA, 110 bp, synthetic construct
  source 1..110: mol_type = other DNA
tgaagacacatgcagatgccagaggcctgctcttcggagcccctccctataacctttttcccgtgcaaataaggcatcctcgcctggaaccaatcagaggatgaaaacgc

SEQ ID NO: 51131 - DNA, 110 bp, synthetic construct
  source 1..110: mol_type = other DNA
atttgagccccatctgctgtcatgcgccattactttagagtgcacccacgttgccaggcactattcaagaggccagaactgaattacctgactctgccctcaagggggtt

SEQ ID NO: 51132 - DNA, 110 bp, synthetic construct
  source 1..110: mol_type = other DNA
ataatagtgtgactggaagctccctaaaatgaatgtggtaaaacttaaaaaataagtttagtaaaccttaaatccttctcttggatgtctgcaaagtatatttgggttaa

SEQ ID NO: 51133 - DNA, 110 bp, synthetic construct; identical to SEQ ID NO: 51132
  source 1..110: mol_type = other DNA

SEQ ID NO: 51134 - DNA, 110 bp, synthetic construct
  source 1..110: mol_type = other DNA
gtgacctgattaacgtgtgggtggagaggaaagtgcctgttactcttctgagacatcttaagtctgtgactatctcacaggcccttcccaagttaccctccttggcttat

SEQ ID NO: 51135 - DNA, 110 bp, synthetic construct
  source 1..110: mol_type = other DNA
tcttaagtctgtgactatctcacaggcccttcccaagttaccctccttggcttatatgcattgaatatggtgtcaagaataaattttaaaaagctatactctgaatacac

SEQ ID NO: 51136 - DNA, 110 bp, synthetic construct
  source 1..110: mol_type = other DNA
tggaacttctcaggctaggtaggggtcaaactggagctgcagctgccagcctatgccaaagccacttgggatctgagccatgtctgatccaaaccacgtctgcgaccttc

SEQ ID NO: 51137 - DNA, 110 bp, synthetic construct; identical to SEQ ID NO: 51136
  source 1..110: mol_type = other DNA

SEQ ID NO: 51138 - DNA, 110 bp, synthetic construct
  source 1..110: mol_type = other DNA
acaaccaaataattccctaccctatcagaccaccttcctagaacaaagctttatattgattccttttattactctaaaatgagtttcttgagaaacactacacacacaat

SEQ ID NO: 51139 - DNA, 110 bp, synthetic construct
  source 1..110: mol_type = other DNA
cctaccctatcagaccaccttcctagaacaaagctttatattgattccttttattactctaaaatgagtttcttgagaaacactacacacacaatttttaagaaacatca

SEQ ID NO: 51140 - DNA, 110 bp, synthetic construct
  source 1..110: mol_type = other DNA
gcagggatctgggtggcttattatagcattcatcatgacttgggagaaagtgggagttttaaacaaaacataaaaagctataaatagaaaagattgatttgactatatta

SEQ ID NO: 51141 - DNA, 110 bp, synthetic construct
  source 1..110: mol_type = other DNA
tttgggttgctgctgtggtgagggttcaatccccagtctagaaacttccacatgccacaggcgcagccaaaaaaaaattgggtctcaataacacatcaaggtaatgtcct

SEQ ID NO: 51142 - DNA, 110 bp, synthetic construct; identical to SEQ ID NO: 51141
  source 1..110: mol_type = other DNA

SEQ ID NO: 51143 - DNA, 110 bp, synthetic construct
  source 1..110: mol_type = other DNA
tcattccaagtctcagtctcatctcagtcaaggatgctaccacctaattcacacatggaggtgtcacaactaaggcattaagctgtgcacatgaggctgggaggcttgga

SEQ ID NO: 51144 - DNA, 110 bp, synthetic construct
  source 1..110: mol_type = other DNA
tggaggtgtcacaactaaggcattaagctgtgcacatgaggctgggaggcttggactagctgtctctggtgtcagctatgtggcaagtgtatgggctgccagccttgatg

SEQ ID NO: 51145 - DNA, 110 bp, synthetic construct
  source 1..110: mol_type = other DNA
cctgctcagcacatgacttttggtgtgtcgacttcagagctgcgtgggatggatccaagaacatttcttcattaggggctctactggggagaaaggaccctttgacagtt

SEQ ID NO: 51146 - DNA, 110 bp, synthetic construct
  source 1..110: mol_type = other DNA
cattgtacacaataaaatgtaaaaataacattttaaaataatgctaaggtatcatttgcctcttatgctcattcgctcctgcgtacacagtggcatttcccagaggctac

SEQ ID NO: 51147 - DNA, 110 bp, synthetic construct
  source 1..110: mol_type = other DNA
ttgcctcttatgctcattcgctcctgcgtacacagtggcatttcccagaggctacaggatgggtgatgacatctctctggtggctaatggcatgtgtgcttatggggagc

SEQ ID NO: 51148 - DNA, 110 bp, synthetic construct
  source 1..110: mol_type = other DNA
ctacagtaacaaattaccacaaacttggtggcttgtaacaatagaaccgtgttttctcattcttttggaggccagaagtctaaaatttttatcactgggctaaaatcaag

SEQ ID NO: 51149 - DNA, 110 bp, synthetic construct
  source 1..110: mol_type = other DNA
cagggcagggggtaaacagggaatgtggggggacacatcagctgggccattaccagctttgtggctttgattctgaaacaggcaccattggagggtcatgagtagagtga

SEQ ID NO: 51150 - DNA, 110 bp, synthetic construct
  source 1..110: mol_type = other DNA
gctttgtggctttgattctgaaacaggcaccattggagggtcatgagtagagtgatttgatttgaaaacattgttgtggctatttatggaaggtgcactgtagagcagcc

SEQ ID NO: 51151 - DNA, 110 bp, synthetic construct
  source 1..110: mol_type = other DNA
cctacaaatatctcatgctcatcttgagccctcgtatgtgaggcaaagtgtggtgcccaggtgtctttgaatagctatataattaaggtttctattttttaaatctacct

SEQ ID NO: 51152 - DNA, 110 bp, synthetic construct
  source 1..110: mol_type = other DNA
tgattacttgtgattcttttttttttttttttttttactgcctgtactcccttggggccttgtggattggctctcacttagcaagtcaaactagttgtaatattactaca

SEQ ID NO: 51153 - DNA, 110 bp, synthetic construct
  source 1..110: mol_type = other DNA
ccacagattccaaaaatccacaaatgttcaagttccttatataaaacagtatagtatctgcatataacctatacacgtcctcctatatactttaaataatcctagattac

SEQ ID NO: 51154 - DNA, 110 bp, synthetic construct
  source 1..110: mol_type = other DNA
atctgcatataacctatacacgtcctcctatatactttaaataatcctagattacttgtaatacctgatagaatatagtgcgaatatgtgaataattgtcaacatgcaac

SEQ ID NO: 51155 - DNA, 110 bp, synthetic construct
  source 1..110: mol_type = other DNA
tcacaccatcttccttctggagggcttttctctactttaaaggctagaaagctataaactacatttcccagactgccttgtacctgaggtatcatctggggatttccatt

SEQ ID NO: 51156 - DNA, 110 bp, synthetic construct
  source 1..110: mol_type = other DNA
aaactacatttcccagactgccttgtacctgaggtatcatctggggatttccatttcccaagtcggctgagacttggagggtagaaatgaagagcaggccttgcacttac

SEQ ID NO: 51157 - DNA, 110 bp, synthetic construct
  source 1..110: mol_type = other DNA
ctctgtctcggtgattctatttggcacaggtggagagaggctagctacgctgccgcaaaacatcttcattgggttgttgtgagattgaagaaggtggtgcaggccaagct

SEQ ID NO: 51158 - DNA, 110 bp, synthetic construct
  source 1..110: mol_type = other DNA
ccatcctttcaggcacatgtgcctgtgttggtttctggccacatgtacagttctgtgagtcatcctggctgtggccagtgactggctttgggagctgggtcccatagacc

SEQ ID NO: 51159 - DNA, 110 bp, synthetic construct
  source 1..110: mol_type = other DNA
tgagtcatcctggctgtggccagtgactggctttgggagctgggtcccatagaccagcccccaggccagcccagggtctggctcatggtttaggtagccagatttcacca

SEQ ID NO: 51160 - DNA, 110 bp, synthetic construct
  source 1..110: mol_type = other DNA
aaggcctctaaaaatccacatcccatcctccaaaaccatgtccagattgtccgcgcattcatcccaaggaaacgctgctggttgtctttggatcgacgggaaggaccatg

SEQ ID NO: 51161 - DNA, 110 bp, synthetic construct
  source 1..110: mol_type = other DNA
cattcatcccaaggaaacgctgctggttgtctttggatcgacgggaaggaccatgtatttaccaagcagcaattttattgaaagcagcctaaatcaagcagagcaagaac

SEQ ID NO: 51162 - DNA, 110 bp, synthetic construct
  source 1..110: mol_type = other DNA
cagggttgtgggtgactgtgcaatggggtgtgataccttcttctctgtatcttttccatcaacatcgtcacatgctggtttctgcctaaagccaagaacccccagttcat

SEQ ID NO: 51163 - DNA, 110 bp, synthetic construct
  source 1..110: mol_type = other DNA
ccatcaacatcgtcacatgctggtttctgcctaaagccaagaacccccagttcatatggattttacaccaattccacataggtttatatttacttctggctatttcgttt

SEQ ID NO: 51164 - DNA, 110 bp, synthetic construct
  source 1..110: mol_type = other DNA
acatctcagtgcatgccaaggagaagagagtgctttggaagaaaggttggcacagagccggaatcctcccacagccctggcctcctcagacccagagccagaccagtgag

SEQ ID NO: 51165 - DNA, 110 bp, synthetic construct
  source 1..110: mol_type = other DNA
gtttggactctgcctcaagacagtctggggaagtggggttgggggtgggtagatgaaactaggctgttgacatggggtgatggggacatgggagcttatgatctactttt

SEQ ID NO: 51166 - DNA, 110 bp, synthetic construct
  source 1..110: mol_type = other DNA
aaactaggctgttgacatggggtgatggggacatgggagcttatgatctacttttggacatgtttgctattttctctttctttctttctttgctttttagggccacgccc

SEQ ID NO: 51167 - DNA, 110 bp, synthetic construct
  source 1..110: mol_type = other DNA
aactcctataaatcccggctcctcctcttcctttgcagaacagcctcggagtttatctgagatgctgtgtgccaggcttgaagggttctgaacgtttgcccaaggacact

SEQ ID NO: 51168 - DNA, 110 bp, synthetic construct
  source 1..110: mol_type = other DNA
gctatacaacaacgtgaagctacctaacatcagtgaacagtccccttaaagataataaattcaggagttcccactgtggctcagtgagttaaggacctaacattctctct

SEQ ID NO: 51169 - DNA, 110 bp, synthetic construct
  source 1..110: mol_type = other DNA
aacatcagtgaacagtccccttaaagataataaattcaggagttcccactgtggctcagtgagttaaggacctaacattctctctctgtgaagatgcaggtttgatccct

SEQ ID NO: 51170 - DNA, 110 bp, synthetic construct
  source 1..110: mol_type = other DNA
tacaacttccttagaaaggaaacatcaagaaagaaaataatgtagctgaaggacgaaaaggagaaaatcagatatatttccatgcattttagtgcaggcggaagccacac

SEQ ID NO: 51171 - DNA, 110 bp, synthetic construct
  source 1..110: mol_type = other DNA
ttcagtccagttcaaagcatggaccttcctgttctgggtctcactgcaggcagtatttatactcttttttttcttttccttttttttctttaatagctgtacccatagca

SEQ ID NO: 51172 - DNA, 110 bp, synthetic construct
  source 1..110: mol_type = other DNA
gggtctcactgcaggcagtatttatactcttttttttcttttccttttttttctttaatagctgtacccatagcatatggacattcctgggccagggattgaatctgaac

SEQ ID NO: 51173 - DNA, 110 bp, synthetic construct
  source 1..110: mol_type = other DNA
cagcttaaagccttcggcaagagctcaaagacacttgtatcaccaggagatactgggaagaagccaagcagaggaacatctaatcagatctccaagaagcacatattaag

SEQ ID NO: 51174 - DNA, 110 bp, synthetic construct
  source 1..110: mol_type = other DNA
acaaacctgtaaacaaacaataaggcgtgaatcaggggaatgtggatgagtcctgggaggtgacaggcaatgaacttggcggaggaagggctccaagctggaaacaggta

SEQ ID NO: 51175 - DNA, 110 bp, synthetic construct
  source 1..110: mol_type = other DNA
ggaggtgacaggcaatgaacttggcggaggaagggctccaagctggaaacaggtactaattatgtagggggtgggggggagagtcttctatttttaaatcccccccccct

SEQ ID NO: 51176 - DNA, 110 bp, synthetic construct
  source 1..110: mol_type = other DNA
cagtaatacaatacgagtattcataccacacataggcttgcttaatacactataaaaatgtggacctcttctcaataaggtacacatattgactgagagatcaggatggt

SEQ ID NO: 51177 - DNA, 110 bp, synthetic construct
  source 1..110: mol_type = other DNA
aaatgtggacctcttctcaataaggtacacatattgactgagagatcaggatggtttgctgcctgttttttgtttgtttgttttcacaataaaattcttgagacattcct

SEQ ID NO: 51178 - DNA, 110 bp, synthetic construct; identical to SEQ ID NO: 51176
  source 1..110: mol_type = other DNA

SEQ ID NO: 51179 - DNA, 110 bp, synthetic construct; identical to SEQ ID NO: 51177
  source 1..110: mol_type = other DNA

SEQ ID NO: 51180 - DNA, 110 bp, synthetic construct
  source 1..110: mol_type = other DNA
caacaattggattggattcactggcactttggtgcagctgtcctgagaagccacctttcttttccatttttctcttgctgctcccacatctaaagagcacgacgtatttt

SEQ ID NO: 51181 - DNA, 110 bp, synthetic construct
  source 1..110: mol_type = other DNA
tttcttttccatttttctcttgctgctcccacatctaaagagcacgacgtatttttattgttctcctgttttatttacaaacagggttaagtcaactgggatacttaggg

SEQ ID NO: 51182 - DNA, 110 bp, synthetic construct
  source 1..110: mol_type = other DNA
tttggacctccagatttgtcctgttcaaaatctctctacaccacattttagcctcccaaatactagaactcttctggttaaagatgaagcccacaagcttttgcatatca

SEQ ID NO: 51183 - DNA, 110 bp, synthetic construct
  source 1..110: mol_type = other DNA
atttcactgtcagtttcagagcagggaggaggacagagccgtggggtcacaagaaggcagactaggagctgtaacaagtcacatataatacataacttacctttcgactt

SEQ ID NO: 51184 - DNA, 110 bp, synthetic construct
  source 1..110: mol_type = other DNA
gaatcaaaatggcattctgaagaaaatcctcaacttgcctagcaaagctgagtagcccagggagctctccagggtactggtcggcttccacctatggttctccctaacct

SEQ ID NO: 51185 - DNA, 110 bp, synthetic construct
  source 1..110: mol_type = other DNA
cccagggagctctccagggtactggtcggcttccacctatggttctccctaacctggaagccagagcctcccattttgtgtctgacatctagcctccaccctggacttgg

SEQ ID NO: 51186 - DNA, 110 bp, synthetic construct
  source 1..110: mol_type = other DNA
tgaggccatgttacatattaatgaagctaaccactattcacatgttagggttatcctttacacacacacacacacactatttccacaagattttgatcaaacagtgcatt

SEQ ID NO: 51187 - DNA, 110 bp, synthetic construct
  source 1..110: mol_type = other DNA
actatcctgtttgtccagcaccgtcctgggtgttagggaggattcaaaggaattacaagcaggcaaacttaaggagcttatccccggcctggggaaatcaaaaaagagca

SEQ ID NO: 51188 - DNA, 110 bp, synthetic construct
  source 1..110: mol_type = other DNA
caagcaggcaaacttaaggagcttatccccggcctggggaaatcaaaaaagagcaatagggtttccctattgacgtggtgccttaggagaagtttctgagaagggagaga

SEQ ID NO: 51189 - DNA, 110 bp, synthetic construct; identical to SEQ ID NO: 51187
  source 1..110: mol_type = other DNA

SEQ ID NO: 51190 - DNA, 110 bp, synthetic construct; identical to SEQ ID NO: 51188
  source 1..110: mol_type = other DNA

SEQ ID NO: 51191 - DNA, 110 bp, synthetic construct
  source 1..110: mol_type = other DNA
agtgatgcttagtgaaggactaatttttccccactaaggacaagtacttagtaccttctaagtactctgacctatgcctcctaaggttttctagtcctaccaatgaaaat

SEQ ID NO: 51192 - DNA, 110 bp, synthetic construct
  source 1..110: mol_type = other DNA
ttctaagtactctgacctatgcctcctaaggttttctagtcctaccaatgaaaataggcaccgtgagagctctgagttacatttcctccccatccttttggtagttcttt

SEQ ID NO: 51193 - DNA, 110 bp, synthetic construct
  source 1..110: mol_type = other DNA
ccacccgaccgtcattcagtgggactgctgcaacagtctcctcaatatttagtcggtgatcttctgcttaaaattcgtggcttccatttatggtcaatataaagtccaga

SEQ ID NO: 51194 - DNA, 110 bp, synthetic construct
  source 1..110: mol_type = other DNA
gtgatcttctgcttaaaattcgtggcttccatttatggtcaatataaagtccagacttctttttgtgacggggaaggatctcagctttcatcattcactcctgctgaacc

SEQ ID NO: 51195 - DNA, 110 bp, synthetic construct
  source 1..110: mol_type = other DNA
atggatttgcaagatgatccattttcgttttgtagccattccccttcttgtccgtcctctgtcctacttggttatttttgtcattgctcaagctggagactctgatctgc

SEQ ID NO: 51196 - DNA, 110 bp, synthetic construct
  source 1..110: mol_type = other DNA
cctctgtcctacttggttatttttgtcattgctcaagctggagactctgatctgctggggatgcaccctgctcccagactgctttttgaggtggtctgcaggcccctttg

SEQ ID NO: 51197 - DNA, 110 bp, synthetic construct
  source 1..110: mol_type = other DNA
aggaactgaactatttttttttaaatatggtctttcagtggcccccagattatgctgggcctttaaagagaaaaccttggcctcaaggaattgctgatgtgatacagtgg

SEQ ID NO: 51198 - DNA, 110 bp, synthetic construct
  source 1..110: mol_type = other DNA
tgggcctttaaagagaaaaccttggcctcaaggaattgctgatgtgatacagtgggcagatgtgtacagaaatttgtggacttgctaaggaatggcttataagtatttca

SEQ ID NO: 51199 - DNA, 110 bp, synthetic construct
  source 1..110: mol_type = other DNA
atgaaataccttggttgtaattcaaatgatgtgctgcagttttccaagagccccaaagcctggtatcttagctaaagtctttactcccatggtactttcccacttccata

SEQ ID NO: 51200 - DNA, 110 bp, synthetic construct
  source 1..110: mol_type = other DNA
aagcctggtatcttagctaaagtctttactcccatggtactttcccacttccatagcatctacttcctatgagatactattgctatcatttttttaggaaaagcaaagaa

SEQ ID NO: 51201 - DNA, 110 bp, synthetic construct
  source 1..110: mol_type = other DNA
gatgcaatttggtccctggcctcgcttggtaggttaaggatccaatgctgctgctagctttggcataggttggcatgtggcttggatctggcgttgctgtggcataggcc

SEQ ID NO: 51202 - DNA, 110 bp, synthetic construct
  source 1..110: mol_type = other DNA
ctggcctcgcttggtaggttaaggatccaatgctgctgctagctttggcataggttggcatgtggcttggatctggcgttgctgtggcataggcctcagctgcagctccg

SEQ ID NO: 51203 - DNA, 110 bp, synthetic construct
  source 1..110: mol_type = other DNA
gggtgatggaagtgatgttgcaaaggttacatgacgcggccagctctgccatactttgtagctgctccatccagtgaccgctcaggataatgacttcctatcaggaaaat

SEQ ID NO: 51204 - DNA, 110 bp, synthetic construct
  source 1..110: mol_type = other DNA
attcttctgtcatgtgtgtctctgtgtccgaatttcctcttttcataagaatgtcaatcataatggattaggggcccaccttactcccatatgacttcatcttaactaat

SEQ ID NO: 51205 - DNA, 110 bp, synthetic construct
  source 1..110: mol_type = other DNA
aaagtttccaatctgaaagtcggggagaatcatagtaatattggtaaaaatagggatatcaacaggaggagctaataaaggcacaagaagaagtcacctgagttttcccc

SEQ ID NO: 51206 - DNA, 110 bp, synthetic construct
  source 1..110: mol_type = other DNA
atatcaacaggaggagctaataaaggcacaagaagaagtcacctgagttttccccgtgttccgtgcgaggtgcagctgagatggccatccaaatgggacggtggaccagg

SEQ ID NO: 51207 - DNA, 110 bp, synthetic construct; identical to SEQ ID NO: 51205
  source 1..110: mol_type = other DNA

SEQ ID NO: 51208 - DNA, 110 bp, synthetic construct; identical to SEQ ID NO: 51206
  source 1..110: mol_type = other DNA

SEQ ID NO: 51209 - DNA, 110 bp, synthetic construct
  source 1..110: mol_type = other DNA
tcttaaagtagcataatctctttcttattacaatgaagatcgctgcagctgagtcgtactatcctgatacgtctgtttagtttggttattagtttctaattctcttagag

SEQ ID NO: 51210 - DNA, 110 bp, synthetic construct
  source 1..110: mol_type = other DNA
tctactttataattaaagccaattcaactgcaacattttcgtttttgttaaacgtacctgcagagcttgatgtggttgtagctccaaaggtgaaaccagaggttgcagta

SEQ ID NO: 51211 - DNA, 110 bp, synthetic construct
  source 1..110: mol_type = other DNA
acctgcagagcttgatgtggttgtagctccaaaggtgaaaccagaggttgcagtattattactgctgggtccaggaccaaagacaaatggggtgacagctgtacccgtgc

SEQ ID NO: 51212 - DNA, 110 bp, synthetic construct
  source 1..110: mol_type = other DNA
ttttttttaatctatcttttgaaggaggatctggtttttaaaaattccaaaacccagcagataatcaaagagacacttcttaataaggcaacagcccgttaactgaagtc

SEQ ID NO: 51213 - DNA, 110 bp, synthetic construct
  source 1..110: mol_type = other DNA
caaacctgagtcctcatggatattagtcaggtttgttaccaccaagctataatgggaaactctggaaatcaaaaattttaagttgacttctttctcaaattttaacataa

SEQ ID NO: 51214 - DNA, 110 bp, synthetic construct; identical to SEQ ID NO: 51213
  source 1..110: mol_type = other DNA

SEQ ID NO: 51215 - DNA, 110 bp, synthetic construct
  source 1..110: mol_type = other DNA
atctcatcttgctcctatcccgcttctcccatccttcagcgtcctgtccaggccccaagaagaaactctgagcctcacccgctgaacaggaccatccaacagcatagctg

SEQ ID NO: 51216 - DNA, 110 bp, synthetic construct
  source 1..110: mol_type = other DNA
caagaagaaactctgagcctcacccgctgaacaggaccatccaacagcatagctgcatcctgtgtcaaaggcaaaactattgcccagggactcagatgctaccaggttct

SEQ ID NO: 51217 - DNA, 110 bp, synthetic construct; identical to SEQ ID NO: 51215
  source 1..110: mol_type = other DNA

SEQ ID NO: 51218 - DNA, 110 bp, synthetic construct; identical to SEQ ID NO: 51216
  source 1..110: mol_type = other DNA

SEQ ID NO: 51219 - DNA, 110 bp, synthetic construct
  source 1..110: mol_type = other DNA
agacactatgctgggttcttaacctgctgagccacaatgagaactccactattcatatttaaaaggggggggcactaacttagtgtttagtcagcggtatgtagaaacac

SEQ ID NO: 51220 - DNA, 110 bp, synthetic construct
  source 1..110: mol_type = other DNA
accacttcgccacaacggggaactccgaaaaagattcattaagctaggacacttgtgagaaatgcaagcgggcaggcaaggaggctctgctccaggaatcctaattctag

SEQ ID NO: 51221 - DNA, 110 bp, synthetic construct
  source 1..110: mol_type = other DNA
tctggtcttataataaccaaggttaaaacgaacagctatgaaacaacagtttcagtcaacagagtgtcaagtatttactgcattcgaggactcttccagagacttgagag

SEQ ID NO: 51222 - DNA, 110 bp, synthetic construct
  source 1..110: mol_type = other DNA
tcaacagagtgtcaagtatttactgcattcgaggactcttccagagacttgagagaccacacaggcaaaatcctgttaatcttcctgcctcgaggcaggactgaacttca

SEQ ID NO: 51223 - DNA, 110 bp, synthetic construct
  source 1..110: mol_type = other DNA
agcagaggctagcttccacattgtttactccagcagtgtccttcaaggcgcaacctctcaactcccaactagagatcaaaggtgaagcagctcagaggaaagacctgagg

SEQ ID NO: 51224 - DNA, 110 bp, synthetic construct
  source 1..110: mol_type = other DNA
tctcaactcccaactagagatcaaaggtgaagcagctcagaggaaagacctgaggctacaggtcagaggagaacctgcgttcaaatcctagcacttctacttctgagctc

SEQ ID NO: 51225 - DNA, 110 bp, synthetic construct
  source 1..110: mol_type = other DNA
attttttaaaaacagcaaagagaatttacaaaatgctttcagggtgctaggcattgccgaatctaagccctgagaacataaagatgaatcatatatagtccttgtcctag

SEQ ID NO: 51226 - DNA, 110 bp, synthetic construct; identical to SEQ ID NO: 51225
  source 1..110: mol_type = other DNA

SEQ ID NO: 51227 - DNA, 110 bp, synthetic construct
  source 1..110: mol_type = other DNA
tcagattcgttaaccactgagccgtgatgggaactccaatattcttgaacatatgtaggtctttaggaaaaattcatcaaagtgggattgtgggctcaaatggcttgtac

SEQ ID NO: 51228 - DNA, 110 bp, synthetic construct; identical to SEQ ID NO: 51227
  source 1..110: mol_type = other DNA

SEQ ID NO: 51229 - DNA, 110 bp, synthetic construct
  source 1..110: mol_type = other DNA
gctattcctggaggtagtgatggtgcaccagtacagaatttagctgctttcccactgctcccctgcccacaggaattccaagctagagcgggtcaccctgtgggaatccc

SEQ ID NO: 51230 - DNA, 110 bp, synthetic construct
  source 1..110: mol_type = other DNA
tgctcccctgcccacaggaattccaagctagagcgggtcaccctgtgggaatcccaagccaaagatggccaaagatctatttgcttctgtgtttgctgctttacctgggg

SEQ ID NO: 51231 - DNA, 110 bp, synthetic construct
  source 1..110: mol_type = other DNA
acacctagatctcattcccctcaaactaatttgtccagggcatggtatgggtagctggggttttcaaaagctccctagggcggtaccatgtgtagccaggtttgaaaacc

SEQ ID NO: 51232 - DNA, 110 bp, synthetic construct
  source 1..110: mol_type = other DNA
tggggttttcaaaagctccctagggcggtaccatgtgtagccaggtttgaaaacccctgtgatatcgcagcccctcaaatgacatcagattccattctatcaacctcagt

SEQ ID NO: 51233 - DNA, 110 bp, synthetic construct
  source 1..110: mol_type = other DNA
tacatgtgagtcttgcccctaatgttcagcccattttacatgcaaggattctgaacttaaggacagaggccatattcttggggtaaaaaactttaaaaaattctgaggag

SEQ ID NO: 51234 - DNA, 110 bp, synthetic construct
  source 1..110: mol_type = other DNA
cttaaggacagaggccatattcttggggtaaaaaactttaaaaaattctgaggaggaagttcctgttgtggctcaggggaaacgagcccaactagtatccttgaggacgt

SEQ ID NO: 51235 - DNA, 110 bp, synthetic construct
  source 1..110: mol_type = other DNA
aaagcttaaaggatatattagctctattgaataaacatagagaaaaaaacagcaaaaacttaataatccactcttctcccaagctcaattgtgagaagcaaataacagag

SEQ ID NO: 51236 - DNA, 110 bp, synthetic construct; identical to SEQ ID NO: 51235
  source 1..110: mol_type = other DNA

SEQ ID NO: 51237 - DNA, 110 bp, synthetic construct
  source 1..110: mol_type = other DNA
ctagataggagggatgtgttacaggcagcagtgataaagcttggtgatggggattggttggatatggcagatgagagaaagggaggaatctaaggtaactcccaggtgac

SEQ ID NO: 51238 - DNA, 110 bp, synthetic construct
  source 1..110: mol_type = other DNA
tgtaattaagaatcctgctttctttccagaggaaacgctgcaccggattgatggtttaaacttcagcagtgaacagtttataaaaacttagataaatccacatcacttga

SEQ ID NO: 51239 - DNA, 110 bp, synthetic construct
  source 1..110: mol_type = other DNA
ttaaacttcagcagtgaacagtttataaaaacttagataaatccacatcacttgattttgatattccaagaacatgatcgaattccacacaaatgttttgctgtgtgtct

SEQ ID NO: 51240 - DNA, 110 bp, synthetic construct
  source 1..110: mol_type = other DNA
gcaagctctcacatcctgtccaccgagcccagtatgtgggtttgcctgacaacgtggccttctgtttttctgtcatactcacggatgtttagttagtgtgagtcagcacc

SEQ ID NO: 51241 - DNA, 110 bp, synthetic construct
  source 1..110: mol_type = other DNA
ggccttctgtttttctgtcatactcacggatgtttagttagtgtgagtcagcacccctgagtttgattcacttcaggatacctgcaggaagttgctaagcctgtcaggct

SEQ ID NO: 51242 - DNA, 110 bp, synthetic construct
  source 1..110: mol_type = other DNA
gaaaaagacacttgaggtttttgcctatttcgagtgttgaaaggtgaggaatattcccaaagagtgacaaattttagttagtaagaagactccttatccattcgtaagga

SEQ ID NO: 51243 - DNA, 110 bp, synthetic construct
  source 1..110: mol_type = other DNA
cccaaagagtgacaaattttagttagtaagaagactccttatccattcgtaaggacagcggtgacctgtcccatgagtacctcctttgagaagtgtggcagggccgagtg

SEQ ID NO: 51244 - DNA, 110 bp, synthetic construct
  source 1..110: mol_type = other DNA
gacaactcctttcaagaactggcttaaagtacagcgtggtgtttccacccaaggcaggccagtaaagcaatggatttcagttaaccagtttttttttttttttttttttt

SEQ ID NO: 51245 - DNA, 110 bp, synthetic construct
  source 1..110: mol_type = other DNA
tggcaagctactctgaatgcttttgcttgtaccttcgttttgggtcctgaactagctaaatcagggtcttctagaggtttgctctaaataagctagtgagcatttaccta

SEQ ID NO: 51246 - DNA, 110 bp, synthetic construct
  source 1..110: mol_type = other DNA
ctaaatcagggtcttctagaggtttgctctaaataagctagtgagcatttacctatccctaaataagacccacagacctgcctgcctaattttggcaatcaaagctccat

SEQ ID NO: 51247 - DNA, 110 bp, synthetic construct
  source 1..110: mol_type = other DNA
cttgctttatgtgtgtttctgtttaaagataccttatttaatgtatattgttgactcatttatattgaactcgcagacaacaccactgtaactcatgcctgaatgaagct

SEQ ID NO: 51248 - DNA, 110 bp, synthetic construct
  source 1..110: mol_type = other DNA
attttgtaggttgtctttttgtttttatttttaatggttttctttgctgtgcattaggtcccattggtttatttttgctgttatttctattgccttgggtgactgaccta

SEQ ID NO: 51249 - DNA, 110 bp, synthetic construct; identical to SEQ ID NO: 51248
  source 1..110: mol_type = other DNA

SEQ ID NO: 51250 - DNA, 110 bp, synthetic construct
  source 1..110: mol_type = other DNA
cattgtctggatgggctcaccacttggatctcagaaacccaagtgaagaactggcagcaaaagggagcactgagcgaacggcctcgtcaggtgactcatatactccagtc

SEQ ID NO: 51251 - DNA, 110 bp, synthetic construct
  source 1..110: mol_type = other DNA
ggaattaatcctaaaaacatataattgtctgccctaagagtataatggtccctgagcaaggctccatgaactatatggcctgcgcagaaataattcatggtctcaagctg

SEQ ID NO: 51252 - DNA, 110 bp, synthetic construct
  source 1..110: mol_type = other DNA
gcaaggctccatgaactatatggcctgcgcagaaataattcatggtctcaagctgatacttactgcataactcatgactgactacattcataagtgcctgtgttcttttg

SEQ ID NO: 51253 - DNA, 110 bp, synthetic construct
  source 1..110: mol_type = other DNA
ttgtatggtagtagaaagcttgaaaatggcagagattgaaaaacagcttttatgtagcttgtacctcttccctgtctagagtcagggaagctttcctagaaataggaaat

SEQ ID NO: 51254 - DNA, 110 bp, synthetic construct
  source 1..110: mol_type = other DNA
agcttgtacctcttccctgtctagagtcagggaagctttcctagaaataggaaattaagcttggtgtaatggagagaacactactgtgattcagtgcttaaatttgacaa

SEQ ID NO: 51255 - DNA, 110 bp, synthetic construct
  source 1..110: mol_type = other DNA
tagtaagatatttttcctttctgctttttggaaaccaaacctggccttgccaagtatcaatgttggagttgtgcctccaatgtcctgttatgatactttctcatctgtcg

SEQ ID NO: 51256 - DNA, 110 bp, synthetic construct
  source 1..110: mol_type = other DNA
tactctgtccgtgggtctgatctagtcccatagaggatgggaagcttacttcatgaaagttacactggaaggtcttaagtgtaaggaatgctgtgtttacattggatctg

SEQ ID NO: 51257 - DNA, 110 bp, synthetic construct
  source 1..110: mol_type = other DNA
tgtgtataagtccctcagagatcagtaaatctgagtgcatgagctgccagtgcaaggagcagataaaactttttccttctaaagtcccaatgtattgagaaggatggcag

SEQ ID NO: 51258 - DNA, 110 bp, synthetic construct
  source 1..110: mol_type = other DNA
tatttttgggcaatcttgtggacatccagatggatccactgcctcttttccagatggacacagttgtctcttcagctcctgtgtttcttgaaatccagttccctggagag

SEQ ID NO: 51259 - DNA, 110 bp, synthetic construct
  source 1..110: mol_type = other DNA
tacatttatataaataattctatatgtaaccatctgtatctgaggtcatactgatgtcttcaactctaatctattacaccacgtggatcactctagcatccttctctttc

SEQ ID NO: 51260 - DNA, 110 bp, synthetic construct
  source 1..110: mol_type = other DNA
gtcttcaactctaatctattacaccacgtggatcactctagcatccttctctttctcatttgtaacctctccctccaacagtgagaaacctggctctcaccatctgccat

SEQ ID NO: 51261 - DNA, 110 bp, synthetic construct
  source 1..110: mol_type = other DNA
tctctgggtcatttataactggaaacttggacctcttaatccccttcatctactttgcctgttcccccactcccattcttctggcaaccaccagtttctactctgtacct

SEQ ID NO: 51262 - DNA, 110 bp, synthetic construct
  source 1..110: mol_type = other DNA
tgcctgttcccccactcccattcttctggcaaccaccagtttctactctgtacctatgagtctgtttctgttttgtttggtttcttagattccacatgcaagtgaaatca

SEQ ID NO: 51263 - DNA, 110 bp, synthetic construct
  source 1..110: mol_type = other DNA
ttattaggacagaaatcactatcaatgtgtaaatgtgtacatctgtgtgtgtgtgtgtaagcatgtatgtacatttccaaaagctaattgaatctaagatgagccttgca

SEQ ID NO: 51264 - DNA, 110 bp, synthetic construct
  source 1..110: mol_type = other DNA
tgtaagcatgtatgtacatttccaaaagctaattgaatctaagatgagccttgcaggtgattggattttagaatcaagtgaatgtgtgagtaaacctgatttagatcaga

SEQ ID NO: 51265 - DNA, 110 bp, synthetic construct
  source 1..110: mol_type = other DNA
caaaatttagattcttgtgtccagatagacatcttttttttttttttcaccccagtgatctcaggaggttgctttccatacacagaaatattttctgtttctcagtccaa

SEQ ID NO: 51266 - DNA, 110 bp, synthetic construct
  source 1..110: mol_type = other DNA
aagactaataaagcaaaaactggaatgactatgctaacgttgtccataatacacatcagaaaaaaaggaatattagtagcaatatgaggaaacatttcatcaaggagtca

SEQ ID NO: 51267 - DNA, 110 bp, synthetic construct; identical to SEQ ID NO: 51266
  source 1..110: mol_type = other DNA

SEQ ID NO: 51268 - DNA, 110 bp, synthetic construct
  source 1..110: mol_type = other DNA
catgcacctcgcaggcctgctgcagagttggtggtaagcgggaagagaaccacacagcactcaagtgcttggctgccttcggcatgtcagtcaaacactgaatgcatgca

SEQ ID NO: 51269 - DNA, 110 bp, synthetic construct
  source 1..110: mol_type = other DNA
ctgcagctccacatgctacttttagtattttcccattgccctcacatctgtgtgtttaaaattacatgcttgtcatatagctcgttcttttccaactaaattatgtgctt

SEQ ID NO: 51270 - DNA, 110 bp, synthetic construct
  source 1..110: mol_type = other DNA
ttaaaattacatgcttgtcatatagctcgttcttttccaactaaattatgtgcttttccatttctgtgtctaaagtttaggaccttatcctcttccccaaccgactctga

SEQ ID NO: 51271 - DNA, 110 bp, synthetic construct
  source 1..110: mol_type = other DNA
ttgggaaagtaaagcattggcatctgctaacaagcagactctcatcccagtttctaacgagctcacaaactccagggtagagctatattatcagaaatgcatgttaaaaa

SEQ ID NO: 51272 - DNA, 110 bp, synthetic construct
  source 1..110: mol_type = other DNA
tatgccatgggtgcgggccgaaaataacaaacaaacaaaccaacaaaaaaactttagctgctatatttcctacttcctatatttttggttgtttttcactcttgactaag

SEQ ID NO: 51273 - DNA, 110 bp, synthetic construct; identical to SEQ ID NO: 51272
  source 1..110: mol_type = other DNA

SEQ ID NO: 51274 - DNA, 110 bp, synthetic construct
  source 1..110: mol_type = other DNA
gtaggctgaaaagctccagtagtcagaaatgtagactgtaggcgtaaaggtggtcatgttctctgctactgtgaatgttccacaccttacactttgtcctgaagctagcc

SEQ ID NO: 51275 - DNA, 110 bp, synthetic construct
  source 1..110: mol_type = other DNA
atgttctctgctactgtgaatgttccacaccttacactttgtcctgaagctagccctcaagtgacaaggatttaattttccaaactctgatccagggacagccactatct

SEQ ID NO: 51276 - DNA, 110 bp, synthetic construct
  source 1..110: mol_type = other DNA
taacagaaagtatacaaagcaactgataaatctgtgggttacaatatgtatgtaattttccaccagtgacagtcagccaatgagtgaacagttgcaactccagaaagccg

SEQ ID NO: 51277 - DNA, 110 bp, synthetic construct; identical to SEQ ID NO: 51276
  source 1..110: mol_type = other DNA

SEQ ID NO: 51278 - DNA, 110 bp, synthetic construct
  source 1..110: mol_type = other DNA
ccagctatttcagtacagataaatttgagaaccatggactgagactaaaggattttcttaaaagatcatacttggcacttgctttcctgtagatggaaacacaagtattt

SEQ ID NO: 51279 - DNA, 110 bp, synthetic construct
  source 1..110: mol_type = other DNA
tcttaaaagatcatacttggcacttgctttcctgtagatggaaacacaagtattttttctctctgcgtcctcggctccaagcacagagcttgtcacataacatcaataat

SEQ ID NO: 51280 - DNA, 110 bp, synthetic construct
  source 1..110: mol_type = other DNA
ccacagcaggatctcctaaactttcttataaaccgtgtgtagaacccccatgtacagaattgacaattctgctttgcaacctactatggcttgttatacaatggtaatac

SEQ ID NO: 51281 - DNA, 110 bp, synthetic construct
  source 1..110: mol_type = other DNA
ttagaggtgcttccctcaactagagaaattctccagttagatttgcatttaatattagcaatcacattagattgccactaatgataaccaactagatattcactattatt

SEQ ID NO: 51282 - DNA, 110 bp, synthetic construct
  source 1..110: mol_type = other DNA
tttagagataagagatctaaaatgctgcactctagtgatggaatcgccggaaagtcgaaaagggctttttgctctttttttaatggatcatccagaaacatatctccatc

SEQ ID NO: 51283 - DNA, 110 bp, synthetic construct
  source 1..110: mol_type = other DNA
ttatatgagggagtgtacctatatggatatataaatatataatatcagctttttgccctagacctcagagcaagaaggcctgctttgactttgaaagcatttgatttatg

SEQ ID NO: 51284 - DNA, 110 bp, synthetic construct
  source 1..110: mol_type = other DNA
ccctagacctcagagcaagaaggcctgctttgactttgaaagcatttgatttatgcagagatccctggttcctgcctttattctggaaggcatggttagaatgataatct

SEQ ID NO: 51285 - DNA, 110 bp, synthetic construct
  source 1..110: mol_type = other DNA
taggaaaatggttcaatttgagccagaggaaaagcaggtgagactaacaaggtgagtcatctgcgacttggcattgtgatgcctcagtcctagaatctgattacattttt

SEQ ID NO: 51286 - DNA, 110 bp, synthetic construct
  source 1..110: mol_type = other DNA
gtcatctgcgacttggcattgtgatgcctcagtcctagaatctgattacattttttcctggattttgaagctagtttctatttagttcatagacaactcatccatatata

SEQ ID NO: 51287 - DNA, 110 bp, synthetic construct
  source 1..110: mol_type = other DNA
aaactgaacaatggcagcttaaatattcacagcctacaatttcaataaggcatcttaataaaaattatggcatcaggaatgaagatctgatgtgtgggagtgtttacagg

SEQ ID NO: 51288 - DNA, 110 bp, synthetic construct; identical to SEQ ID NO: 51287
  source 1..110: mol_type = other DNA

SEQ ID NO: 51289 - DNA, 110 bp, synthetic construct; identical to SEQ ID NO: 51287
  source 1..110: mol_type = other DNA

SEQ ID NO: 51290 - DNA, 110 bp, synthetic construct; identical to SEQ ID NO: 51287
  source 1..110: mol_type = other DNA

SEQ ID NO: 51291 - DNA, 110 bp, synthetic construct
  source 1..110: mol_type = other DNA
taaatggaaacagagaaatcctatgaatgagagctagtcttgcctaatagctcgtgcctcaaagaaaagaaacaagaatataggtcctgcttctctccattccttagaat

SEQ ID NO: 51292 - DNA, 110 bp, synthetic construct
  source 1..110: mol_type = other DNA
cagtgaggatggaaatgtcctgtatctgcactgtccgtgtaggaatactcaccgcatgtgggtattgagcacttgaaatacagctagacctgtatgactgaggtgctgaa

SEQ ID NO: 51293 - DNA, 110 bp, synthetic construct
  source 1..110: mol_type = other DNA
agtcttaaaccttatattgccaactctcattaatccacagcctcagcaagctaggaactttaaaattcaggatttaaatgtgctcttttaccattttaccaaatggcccc

SEQ ID NO: 51294 - DNA, 110 bp, synthetic construct
  source 1..110: mol_type = other DNA
ctataaatccctcttcttgcctgatggagaaaccaacgctacagattgagctataggattttagaggcaaaaatatggtgcctattggaaatttttgctccctgctccag

SEQ ID NO: 51295 - DNA, 110 bp, synthetic construct
  source 1..110: mol_type = other DNA
ggattttagaggcaaaaatatggtgcctattggaaatttttgctccctgctccagaagtgaatgtatttagacgctgttagattcttcactttcttgagaaggaaagggt

SEQ ID NO: 51296 - DNA, 110 bp, synthetic construct
  source 1..110: mol_type = other DNA
tggtgcattgaggagacctggatctccatccagaaatccctacttagagtcctgagattcaatatatttcaccctagtaggtcaccagcgtttcgaaaaacaagtttatt

SEQ ID NO: 51297 - DNA, 110 bp, synthetic construct
  source 1..110: mol_type = other DNA
gattcaatatatttcaccctagtaggtcaccagcgtttcgaaaaacaagtttattgatctataaacatcttttcacttcctagttaagatggtatttagattgtcatatg

SEQ ID NO: 51298 - DNA, 110 bp, synthetic construct
  source 1..110: mol_type = other DNA
attctaggaggtgaagatagacgacaaactatcaaacaagaaaactatcagatgtgcgatagtggattgtggataatgaatgtggtgaggagtgctcatgcgaactttaa

SEQ ID NO: 51299 - DNA, 110 bp, synthetic construct
  source 1..110: mol_type = other DNA
gcgatagtggattgtggataatgaatgtggtgaggagtgctcatgcgaactttaaatgggtagtagggaagatctcttcaaggagatagcgtttaatccacgattaaagg

SEQ ID NO: 51300 - DNA, 110 bp, synthetic construct
  source 1..110: mol_type = other DNA
aaattcattgctagaatcttttcagaaaaagtgagctattctaaaagttagtttgaccgactatcttagttgcaggctgagacaaagtaagggactgactcccacatctg

SEQ ID NO: 51301 - DNA, 110 bp, synthetic construct
  source 1..110: mol_type = other DNA
aaaaacaaatagtgggccatgctgttgcatctttgctctgcttcctgtttgcaattggtttttaaaggaccaacaatcattgattttgagctctaaaatgtcccctttac

SEQ ID NO: 51302 - DNA, 110 bp, synthetic construct
  source 1..110: mol_type = other DNA
tggtttttaaaggaccaacaatcattgattttgagctctaaaatgtcccctttactgaaacactctgtgctaaaaggtgtgggtcccagtcttagaatctctgttaattt

SEQ ID NO: 51303 - DNA, 110 bp, synthetic construct
  source 1..110: mol_type = other DNA
cggatggagaaactgaggttcaggaggctcagggacttgcctggggccctacagttatttcatggctttgacagctaggactagagcacaggtgctcaatgaaaggctgg

SEQ ID NO: 51304 - DNA, 110 bp, synthetic construct
  source 1..110: mol_type = other DNA
tatttcatggctttgacagctaggactagagcacaggtgctcaatgaaaggctggtgaggtaataagtagaacagggacaagataatgaaagcatgtcagacccacagaa

SEQ ID NO: 51305 - DNA, 110 bp, synthetic construct
  source 1..110: mol_type = other DNA
tgctaggttctctttcttaccttttagttgtgctcattgtcaagcatcgttaagtaagttattattatgtaaatgttatagcatgctggatcagctattcatcacaattg

SEQ ID NO: 51306 - DNA, 110 bp, synthetic construct
  source 1..110: mol_type = other DNA
aagttattattatgtaaatgttatagcatgctggatcagctattcatcacaattgccaacaactccatagatcattcagaaaaaaaaatggtgctgtatagaaaatcgat

SEQ ID NO: 51307 - DNA, 110 bp, synthetic construct
  source 1..110: mol_type = other DNA
tcctagaaaagggaaccggacttgaggagcttcagcgaccttcccacagtcaaagagcctgcacatcacagactacatacgtgctgaaacccaaaccttctgcctcctga

SEQ ID NO: 51308 - DNA, 110 bp, synthetic construct
  source 1..110: mol_type = other DNA
ttccacatgacgtagaacaagagctcaatactcaattcatagatccatagatctgtgtgagaccatagagagcatccctccagccctcaaagaggcttaagtgacttgct

SEQ ID NO: 51309 - DNA, 110 bp, synthetic construct
  source 1..110: mol_type = other DNA
caaaacattggccacattccccatgtcttacaatatatccttgagcctgtcttactcccaacagtttgtacttcccactccccaacccctaggttgcccctccccctaca

SEQ ID NO: 51310 - DNA, 110 bp, synthetic construct; identical to SEQ ID NO: 51309
  source 1..110: mol_type = other DNA

SEQ ID NO: 51311 - DNA, 110 bp, synthetic construct
  source 1..110: mol_type = other DNA
aattcttgtctgctttatagttttctgaggcaagttggtatgtgaaagggagagaagaaaatgtgtcttcaatgcacaaatacgtacaatatagtatgccaatcagaatt

SEQ ID NO: 51312 - DNA, 110 bp, synthetic construct
  source 1..110: mol_type = other DNA
agaaaatgtgtcttcaatgcacaaatacgtacaatatagtatgccaatcagaattaattgtaactaattacatcttagtttacacatgtgtcccaacaaaccttcatcta

SEQ ID NO: 51313 - DNA, 110 bp, synthetic construct
  source 1..110: mol_type = other DNA
agtcatttaaattttcaagtacttaattttgcctaaatgttagcattttaaaaagatttaaactatccttggaggtcccatcgtggctcaggggttaacaaatatgacca

SEQ ID NO: 51314 - DNA, 110 bp, synthetic construct
  source 1..110: mol_type = other DNA
attttgcctaaatgttagcattttaaaaagatttaaactatccttggaggtcccatcgtggctcaggggttaacaaatatgaccaggaacgatgaggttgcgggtttgat

SEQ ID NO: 51315 - DNA, 110 bp, synthetic construct
  source 1..110: mol_type = other DNA
tttcccaatcatctagtctagttcagtacctttaatagctctattctggcccagtgagacaagataaaatcccacagctcaactgccataccttccttcaaaccttgtta

SEQ ID NO: 51316 - DNA, 110 bp, synthetic construct
  source 1..110: mol_type = other DNA
aactctctttcacctgagtcccaattcacatcatactttttccagaaaggtttctctgaagactccctgaatttaaggtttcccctccctcctttctgatagcccagaga

SEQ ID NO: 51317 - DNA, 110 bp, synthetic construct
  source 1..110: mol_type = other DNA
ctgaagactccctgaatttaaggtttcccctccctcctttctgatagcccagagaacttagaaattaaattgctaatttaggaattaaattactaaattaaattagtaat

SEQ ID NO: 51318 - DNA, 110 bp, synthetic construct
  source 1..110: mol_type = other DNA
aggctcacacacaccttctccctgagttttcacactcacatgacaagcctccacccactagctcagagcaagccacccagtccctctggaatgagataatccctcttcga

SEQ ID NO: 51319 - DNA, 110 bp, synthetic construct
  source 1..110: mol_type = other DNA
gctgcacccatcacactgtcgagtcccctgagcatctctgaccacgtcccctccactaccagactgcttcctgactcagatgatcttcatgttggcggaaaagtaggtac

SEQ ID NO: 51320 - DNA, 110 bp, synthetic construct
  source 1..110: mol_type = other DNA
ctaccagactgcttcctgactcagatgatcttcatgttggcggaaaagtaggtacttctggggctctttccaacaaatcgctaacacggtgtaacgtcctccaacctgct

SEQ ID NO: 51321 - DNA, 110 bp, synthetic construct
  source 1..110: mol_type = other DNA
catccatcaaatttgaggaaaactcacatacagcaggggtctcaaactccagtccttgtgccaaatccagcccttgcctgttgttgtgcggcctgcatgtcaactacatc

SEQ ID NO: 51322 - DNA, 110 bp, synthetic construct
  source 1..110: mol_type = other DNA
ttgtgccaaatccagcccttgcctgttgttgtgcggcctgcatgtcaactacatcttctgacatttttaaagagttagaaaaaagaattaaaaaagagaatttcacaaaa

SEQ ID NO: 51323 - DNA, 110 bp, synthetic construct
  source 1..110: mol_type = other DNA
ttttagcaccatctgcggcgaggaaaaaagctgtcacattactaaattgcaccacacctatctagagtattttgcctgtaacagatgtggccaaggccacacctatgtct

SEQ ID NO: 51324 - DNA, 110 bp, synthetic construct
  source 1..110: mol_type = other DNA
acctatctagagtattttgcctgtaacagatgtggccaaggccacacctatgtctttcttgttttcaagccaagtgaatattctgtggctgaggaacaattctttccact

SEQ ID NO: 51325 - DNA, 110 bp, synthetic construct
  source 1..110: mol_type = other DNA
tcccttgaaatgtttctcagtgactagaccagatctacttcttttcttaggactcgcaaacacttggttgtgctttccaaggccaagaagggcaaatgagggctgaaatc

SEQ ID NO: 51326 - DNA, 110 bp, synthetic construct
  source 1..110: mol_type = other DNA
gagactatgaatcatgacaaatctttgtcatgtcttcatagcagcataacttatactagctaagatatgaaagcaaactcggtgtccattaacagatgaatgaattgaat

SEQ ID NO: 51327 - DNA, 110 bp, synthetic construct
  source 1..110: mol_type = other DNA
ccctcctagccctagccaatcaatggaccttctcctcaactctcatcacagaagcccaaaggagttcatttggcaaggcaggtccttccatagagaaagagggagagaaa

SEQ ID NO: 51328 - DNA, 110 bp, synthetic construct
  source 1..110: mol_type = other DNA
ccaaaggagttcatttggcaaggcaggtccttccatagagaaagagggagagaaagaaacttcctgggcagagttagaattgtcctttgtgggtgaagagaggggaaagc

SEQ ID NO: 51329 - DNA, 110 bp, synthetic construct
  source 1..110: mol_type = other DNA
gctctcagaaagttatcaccaacctaactggacatccaggcactcagcttttgatttttcaggttttgttctttagctgaaaaagacgttcttcccataccaccacacat

SEQ ID NO: 51330 - DNA, 110 bp, synthetic construct
  source 1..110: mol_type = other DNA
ttttcaggttttgttctttagctgaaaaagacgttcttcccataccaccacacattcctccacaccctaccccctttctgccatcctttcttccctccagaaagtcactt

SEQ ID NO: 51331 - DNA, 110 bp, synthetic construct
  source 1..110: mol_type = other DNA
ccatgggaattcctacataattcttttttttttttcacactttcttggagttgtgcagtttggggttctgcctcccccatccactgtcagtttggggtaataaaaaaggt

SEQ ID NO: 51332 - DNA, 110 bp, synthetic construct
  source 1..110: mol_type = other DNA
cagtttggggttctgcctcccccatccactgtcagtttggggtaataaaaaaggtaataattgcctaccttattgatagttttgtacacagaaaatagccaggagcattc

SEQ ID NO: 51333 - DNA, 110 bp, synthetic construct
  source 1..110: mol_type = other DNA
agtcttcgtgaaataagcttcattgaacccttgcaatgtcaagtccattttgtggtagagctatggagtggacaccttggacagatgaaaaggtttgtccatttctcagt

SEQ ID NO: 51334 - DNA, 110 bp, synthetic construct
  source 1..110: mol_type = other DNA
ccacctggcataagttccttctcaaaggacttcttttagagcaagtgtgctagctaagaattcttttggcttttgtatctctgttttgcctttggattttggaagatata

SEQ ID NO: 51335 - DNA, 110 bp, synthetic construct
  source 1..110: mol_type = other DNA
atgactgagaattgaccattgtgtacattattgcgactcactgggatcaggatgggcagctttggtagagtgggggggggtgtgaaagcctggcttattagagagttgaa

SEQ ID NO: 51336 - DNA, 110 bp, synthetic construct
  source 1..110: mol_type = other DNA
ttagctgctattgtatcacctataaggttgagaattttatagaaagctggccttttatgaggagctgatggcccaggggtagtagatttgatgctttttcagggtgtaac

SEQ ID NO: 51337 - DNA, 110 bp, synthetic construct
  source 1..110: mol_type = other DNA
tatgaggagctgatggcccaggggtagtagatttgatgctttttcagggtgtaacttccagcaagataaccatttgtgtcagggatgacagttgttactggatcacagag

SEQ ID NO: 51338 - DNA, 110 bp, synthetic construct
  source 1..110: mol_type = other DNA
tggatattcctacatcagaaaattaggtgctttacggtggatttaaattggatgtgaaaatgttatacagagaacacctattgtttccattgaatgatgtatgccctgca

SEQ ID NO: 51339 - DNA, 110 bp, synthetic construct
  source 1..110: mol_type = other DNA
tattaaaggtgttccattgcttagtgagcattgaaatataaatctgtgtatttccagggcaaagcataatttctcttcaaataaacagttgtagacaagtttcattgctg

SEQ ID NO: 51340 - DNA, 110 bp, synthetic construct
  source 1..110: mol_type = other DNA
agggcaaagcataatttctcttcaaataaacagttgtagacaagtttcattgctgcagaaagcacattcattttttagtaacaacagaaaaagagtccaacattatagtg

SEQ ID NO: 51341 - DNA, 110 bp, synthetic construct
  source 1..110: mol_type = other DNA
tgtgacgtgtctgcagtcatatacataaattctgccctgtctgtgcaacctcctgcactatagcgtcatttctcctccaagcttttcctgatgctttggaggaaagtgga

SEQ ID NO: 51342 - DNA, 110 bp, synthetic construct
  source 1..110: mol_type = other DNA
ggctcctcccagaagcattggatctactttgagtttaagaactattgacctgtcgacattcagtcagctttgtggtttctttggcaaattagctctcttaaagactactg

SEQ ID NO: 51343 - DNA, 110 bp, synthetic construct
  source 1..110: mol_type = other DNA
aggtacaggcagtgttctaagtgttttaagtgtgttatatcatttgttataaatatttaaaatacagggagtccttgtcatgactcagcggaaatgaatccgactagtat

SEQ ID NO: 51344 - DNA, 110 bp, synthetic construct; identical to SEQ ID NO: 51343
  source 1..110: mol_type = other DNA

SEQ ID NO: 51345 - DNA, 110 bp, synthetic construct
  source 1..110: mol_type = other DNA
ttcagattcatccatattgttgcatgtttattcctttttattgcttagtagtactgctgagtagtactctgatgcatgaatagaccatgatttgtttatgggttcaccag

SEQ ID NO: 51346 - DNA, 110 bp, synthetic construct
  source 1..110: mol_type = other DNA
gctgagtagtactctgatgcatgaatagaccatgatttgtttatgggttcaccagttggagtacctttgggttgtgtccaaattttggcaattatcagtaaagctgctct

SEQ ID NO: 51347 - DNA, 110 bp, synthetic construct
  source 1..110: mol_type = other DNA
agttgagttcagtggccaaaataacacaaaatctttttcttccttattttcctttacactttaaaccattctgtggctctttaagtgtgtcttggaatctatataaattt

SEQ ID NO: 51348 - DNA, 110 bp, synthetic construct
  source 1..110: mol_type = other DNA
acactttaaaccattctgtggctctttaagtgtgtcttggaatctatataaatttctgtccatagccacaatcagctcatattagtcttttctgaaaataggtactacat

SEQ ID NO: 51349 - DNA, 110 bp, synthetic construct
  source 1..110: mol_type = other DNA
ctctccacgtcctcctttgtcccttttgcaagacttgggcacgtgggtggttcttctctcctcctctgagtgggagagcctggagctcaccgggttccactaacacctcc

SEQ ID NO: 51350 - DNA, 110 bp, synthetic construct
  source 1..110: mol_type = other DNA
ctctcctcctctgagtgggagagcctggagctcaccgggttccactaacacctccttctgtaacaggaagggcatcatctgagctgcacaggcatcactggcttccaagt

SEQ ID NO: 51351 - DNA, 110 bp, synthetic construct
  source 1..110: mol_type = other DNA
gagttaaattctgaagaattaaattctcaataagccagattctgagacccattgtctggagactgagcttgtttaaaatctattgaaattctgctcatggaattattcag

SEQ ID NO: 51352 - DNA, 110 bp, synthetic construct
  source 1..110: mol_type = other DNA
ttttttctttaaattttattactgcaccgtcaacatatggatttgccgaagccagggaattaatctgagccacaactgagacctgtgcttcagctgcagcaccaccagat

SEQ ID NO: 51353 - DNA, 110 bp, synthetic construct
  source 1..110: mol_type = other DNA
taccgtatcatacggaatagtttcacttctctaaaaatcctctgagctctcctgtttatccctccctcccatcccccaacaccaggcaaccactgattatttttagtgcc

SEQ ID NO: 51354 - DNA, 110 bp, synthetic construct
  source 1..110: mol_type = other DNA
aatcctctgagctctcctgtttatccctccctcccatcccccaacaccaggcaaccactgattatttttagtgccttcatggttttaccttctccagaatgtcatatagt

SEQ ID NO: 51355 - DNA, 110 bp, synthetic construct
  source 1..110: mol_type = other DNA
tatctttgatttactctaattcgaaaatgaagtgccagggtgtagttttcttggcttgtgtcctactcggtgttctctgagcttcctggatctgtggtttagtatctgac

SEQ ID NO: 51356 - DNA, 110 bp, synthetic construct
  source 1..110: mol_type = other DNA
aacagaacagtggctggtaacagggcttgctctccccagtcacatggtatatttgatgcctaaagcccagaccagctgttcctctccttttgaacttgtatacttgtttc

SEQ ID NO: 51357 - DNA, 110 bp, synthetic construct
  source 1..110: mol_type = other DNA
ctttccccaagtgtctcttcagaagagcaaacctccttcctggctaaagcctggttgcaaagtaactgactgtagctttgacggtagcacatttaaccttctcacattcc

SEQ ID NO: 51358 - DNA, 110 bp, synthetic construct
  source 1..110: mol_type = other DNA
tgcaaagtaactgactgtagctttgacggtagcacatttaaccttctcacattccctcacttcctcccactttcttcttcatgagagggagaaccaccttgtctttgttt

SEQ ID NO: 51359 - DNA, 110 bp, synthetic construct
  source 1..110: mol_type = other DNA
ccttcatttatcaatctgaggccttatttaacctcagactagtggcaaacaaagtcatgtgctgaacatgaagattcctggtcaggagcccacccccccgggggtggggg

SEQ ID NO: 51360 - DNA, 110 bp, synthetic construct
  source 1..110: mol_type = other DNA
catgtgctgaacatgaagattcctggtcaggagcccacccccccgggggtggggggttcaccaggggtatttgccctgtgttttccaggaaacgctgagggtgagtgtat

SEQ ID NO: 51361 - DNA, 110 bp, synthetic construct
  source 1..110: mol_type = other DNA
cccttcaggaatcgttgactgaccaccttctaggcatccttggcttcaggtccagttcttttggctgaaagagctgtcggaaggacgataaggttgctcccggaggcccg

SEQ ID NO: 51362 - DNA, 110 bp, synthetic construct
  source 1..110: mol_type = other DNA
ttcttttggctgaaagagctgtcggaaggacgataaggttgctcccggaggcccgtcttctcagcaggcagctttctcagcacgtctccattagctccgcagaagaaaag

SEQ ID NO: 51363 - DNA, 110 bp, synthetic construct; identical to SEQ ID NO: 51361
  source 1..110: mol_type = other DNA

SEQ ID NO: 51364 - DNA, 110 bp, synthetic construct; identical to SEQ ID NO: 51362
  source 1..110: mol_type = other DNA

SEQ ID NO: 51365 - DNA, 110 bp, synthetic construct
  source 1..110: mol_type = other DNA
aatcctagcagtcaattagggaacagaattaacagcttcattatcccaagcaggccttgcctggaaaaccgtgggcagagtgtcttccatgtgataaaccaaagcctaaa

SEQ ID NO: 51366 - DNA, 110 bp, synthetic construct
  source 1..110: mol_type = other DNA
cttgcctggaaaaccgtgggcagagtgtcttccatgtgataaaccaaagcctaaagcctaaatacccaatggacttgctgctggctgggtctcaaaggtggaggctggtt

SEQ ID NO: 51367 - DNA, 110 bp, synthetic construct
  source 1..110: mol_type = other DNA
atcctctctcttgttttttaaatagttcctggtactcaacaaatgtctcttggccctagttttgtagaatcttctaaaggacacaatgtcttagttgttgctggaaggca

SEQ ID NO: 51368 - DNA, 110 bp, synthetic construct
  source 1..110: mol_type = other DNA
ctagttttgtagaatcttctaaaggacacaatgtcttagttgttgctggaaggcaatggaaagagacattgtatcctaataatttgcacatcaagatggttgggtcattg

SEQ ID NO: 51369 - DNA, 110 bp, synthetic construct
  source 1..110: mol_type = other DNA
ttcctcatcatcttggtctccagattcaagtgcatcctcttcttcaacctcttgatcttggactcctagcctccaaaactatgagcagatgcatttctgacatttacacc

SEQ ID NO: 51370 - DNA, 110 bp, synthetic construct
  source 1..110: mol_type = other DNA
tcttggactcctagcctccaaaactatgagcagatgcatttctgacatttacaccacccaggaggtggtgttttgtgatggtagcctgagcagatagtacagctcttttt

SEQ ID NO: 51371 - DNA, 110 bp, synthetic construct
  source 1..110: mol_type = other DNA
agggactgggcaaaatcagagcgaggcactgcatcgaatttttggctaacaggtctctgcagaatgggccagtggggacactgttgccacccgctggtcaccatggtcca

SEQ ID NO: 51372 - DNA, 110 bp, synthetic construct
  source 1..110: mol_type = other DNA
tctgcagaatgggccagtggggacactgttgccacccgctggtcaccatggtccatcctgtcttttcctgcccgcagacttcagtcagtctactccaatccatcagagac

SEQ ID NO: 51373 - DNA, 110 bp, synthetic construct
  source 1..110: mol_type = other DNA
tttactgggagactgccaagtagctgtgttggtcgttagttggtctgagcaaactgctagatgcccgaaagtccctggtaacccaatgctagctctgaacacctcttaca

SEQ ID NO: 51374 - DNA, 110 bp, synthetic construct
  source 1..110: mol_type = other DNA
gctagatgcccgaaagtccctggtaacccaatgctagctctgaacacctcttacagatattgacatggaacaaagagcaggactcaaaagggcagcaaatacctgtgaaa

SEQ ID NO: 51375 - DNA, 110 bp, synthetic construct
  source 1..110: mol_type = other DNA
aagatcatcaataaacaagggctgttaaaaaagctaaggggacataacatataacaaatggaaatgacaaaggaaaaaaaaaaaaaagattgtgagaatcaggacatttc

SEQ ID NO: 51376 - DNA, 110 bp, synthetic construct
  source 1..110: mol_type = other DNA
gaagagccttccaatcttaggggaaggaacagatccagtgtgttctcccgagacgattccagggcttcagacaaggaaaattaaactcataaggacgtaaatgcataacc

SEQ ID NO: 51377 - DNA, 110 bp, synthetic construct
  source 1..110: mol_type = other DNA
aaattggtaaaaccactatggagtttcctttaaaaactaaaaataaactaccatatgattcaccagtctcaatcctaggcactgacctggagaaaaccataatttgaaaa

SEQ ID NO: 51378 - DNA, 110 bp, synthetic construct; identical to SEQ ID NO: 51377
  source 1..110: mol_type = other DNA

SEQ ID NO: 51379 - DNA, 110 bp, synthetic construct
  source 1..110: mol_type = other DNA
gggaaggatttaggtcagtgagtctggtttctcctttgaaaccatgttctaactgaggaatggggatctgtgcctggccccgcgaccagcctgaactggaagctaggcga

SEQ ID NO: 51380 - DNA, 110 bp, synthetic construct
  source 1..110: mol_type = other DNA
aggaatggggatctgtgcctggccccgcgaccagcctgaactggaagctaggcgagtcacacagcatcagttcagcggaggttgcccgcccaggccccagccagacaaac

SEQ ID NO: 51381 - DNA, 110 bp, synthetic construct
  source 1..110: mol_type = other DNA
taaaatattttcattaccccaagtagaaactctacacacattaatctatggtgcatttttattatcaactttaaaatgaatggagagctgtaaaatgaaaaggtcccccc

SEQ ID NO: 51382 - DNA, 110 bp, synthetic construct
  source 1..110: mol_type = other DNA
ccactgcagctggcaatgctggaggcgatgctcctggaagctgaaggctcttcctcttcctcgccaccttatcacaacttcttccctggccagttttgcaggtgatcccc

SEQ ID NO: 51383 - DNA, 110 bp, synthetic construct
  source 1..110: mol_type = other DNA
tctcccatttcccccacctttcagctttgctcttgaattctagtgagatatagaaggaaaattagctctgctctaagtcacgcagagagtccgtaccgtggcccgcaggt

SEQ ID NO: 51384 - DNA, 110 bp, synthetic construct
  source 1..110: mol_type = other DNA
ggaaaattagctctgctctaagtcacgcagagagtccgtaccgtggcccgcaggtgggatgaggttctagggatgggggaggcgaggatggggttcccggttctggaagt

SEQ ID NO: 51385 - DNA, 110 bp, synthetic construct
  source 1..110: mol_type = other DNA
aggttgtaaattctctgagggccaggtggtgtcttctcctggacttctggacttctatccagtattcagagttctgcacatcgcaggcattcaaatatgcaagtgcttca

SEQ ID NO: 51386 - DNA, 110 bp, synthetic construct
  source 1..110: mol_type = other DNA
tatccagtattcagagttctgcacatcgcaggcattcaaatatgcaagtgcttcaaccaacttcttcactgattcagccattcaaagcctcaaaacttgtatttaaaatt

SEQ ID NO: 51387 - DNA, 110 bp, synthetic construct
  source 1..110: mol_type = other DNA
agggagcacgtgagtgctggaccacaggcatatccaggaaaggggaatctgggaagatggcccacggttagactcttcctggcggaccaggcttcatttaagatgctctt

SEQ ID NO: 51388 - DNA, 110 bp, synthetic construct
  source 1..110: mol_type = other DNA
agtggatagatttgaaagcctaaaataaagctccatgaaactcaaggaagcattgattcacccaactgaataaacaacttactgaatttgctaatctaattaatcaactc

SEQ ID NO: 51389 - DNA, 110 bp, synthetic construct
  source 1..110: mol_type = other DNA
caagctatcatctggcttagcaggatttgccaaaatgtctttctttgaaaaactccaaaaatactcatattaaaaataaatgtgttgaattctggttattcatggtagtt

SEQ ID NO: 51390 - DNA, 110 bp, synthetic construct
  source 1..110: mol_type = other DNA
caaaaatactcatattaaaaataaatgtgttgaattctggttattcatggtagttatgttctataaagtcactgtgaacactgaatttgcaaacatggaaccattgctcc

SEQ ID NO: 51391 - DNA, 110 bp, synthetic construct
  source 1..110: mol_type = other DNA
aatggactcttttactattgagcaggttatgcttgtgtatgaagttttgcaattgaaactttaaattgttcacacaaggaccggttattcaatttataaagcagtcactt

SEQ ID NO: 51392 - DNA, 110 bp, synthetic construct
  source 1..110: mol_type = other DNA
atttctatcttgtatgtggggaacatgacccataatgttgccgaaactatatcttcctttaatctcaactctgcagtgttgatgttataaacactatgctgacagagcct

SEQ ID NO: 51393 - DNA, 110 bp, synthetic construct
  source 1..110: mol_type = other DNA
aaattgacaagtagatccaggatttcatgtatcagcaccctaggttttatcatgtatataatcccctcttttccccctgttactgtcaagattttcaaggggggattatg

SEQ ID NO: 51394 - DNA, 110 bp, synthetic construct
  source 1..110: mol_type = other DNA
tttatttagcaggtgtttgttctggcacatcactgtccctcagtgctgtttggaaaattgcgatagtaatggaatttacctcgttgggtttgtctaaggtttaaacaagt

SEQ ID NO: 51395 - DNA, 110 bp, synthetic construct
  source 1..110: mol_type = other DNA
aattgcgatagtaatggaatttacctcgttgggtttgtctaaggtttaaacaagttaataaaagtgctaacaatgtcgtaagccattacctaagcgctagctctgttgat

SEQ ID NO: 51396 - DNA, 110 bp, synthetic construct
  source 1..110: mol_type = other DNA
cctactcagaggtttgcctttttgccctcagtccaaggaatggcaagaggatggtatctaagatggtagcagtgattcaggtgctgcctgtgtgaatctaaatatctcat

SEQ ID NO: 51397 - DNA, 110 bp, synthetic construct
  source 1..110: mol_type = other DNA
ccacttacctgtcaggatttctttacccagctgttcctggcttactcccagccacccccaccagctccacacatctagaagcacgttcattgtcgttggctaaaacccag

SEQ ID NO: 51398 - DNA, 110 bp, synthetic construct
  source 1..110: mol_type = other DNA
taatgacaagctctagaaccctctgtgtactgcagctgtggaaatcacttctagctttgcgttctatactagaagcttggagataatccatgagactatttggtacacct

SEQ ID NO: 51399 - DNA, 110 bp, synthetic construct
  source 1..110: mol_type = other DNA
atggagttgtccagtctttcccatggcaactgacaaaataaacaataagagcaaaaaccagaggttacataagtgccatcgctggactaggagctgtgtggagatgatgg

SEQ ID NO: 51400 - DNA, 110 bp, synthetic construct
  source 1..110: mol_type = other DNA
aaccagaggttacataagtgccatcgctggactaggagctgtgtggagatgatggaggtcttttgtggcttttggttttctttgggttgaaggtgttaggtgaagataca

SEQ ID NO: 51401 - DNA, 110 bp, synthetic construct
  source 1..110: mol_type = other DNA
ccacgctatccagccgtggtctccctgacccgacctggtttctaccctggcttgaaggggctctcaacatgcggtggtgaccacaggcgatgtgggcgctgtgaaggccg

SEQ ID NO: 51402 - DNA, 110 bp, synthetic construct
  source 1..110: mol_type = other DNA
aggggctctcaacatgcggtggtgaccacaggcgatgtgggcgctgtgaaggccgagggagccacagtcatgctgccccgcctgcccgcgcccctgccctggcggtgact

SEQ ID NO: 51403 - DNA, 110 bp, synthetic construct
  source 1..110: mol_type = other DNA
aaaattttgaaatatttagtgatgctttgacgaaatcccctgcaaatcttgttgccctgcagctgccacactcgtgaaatcaatggcctttattgctttgggtatagggc

SEQ ID NO: 51404 - DNA, 110 bp, synthetic construct
  source 1..110: mol_type = other DNA
cctgcagctgccacactcgtgaaatcaatggcctttattgctttgggtatagggcagatagtctggcttctagaacaaatatgtcattgtgccgatggcagaaaagttct

SEQ ID NO: 51405 - DNA, 110 bp, synthetic construct
  source 1..110: mol_type = other DNA
ttcctgaacatctccaatagctgcagttttctcatctgtgaaatggacatgagagtagtgcctaccttctaggttttcttgtgaggattaactgtggagtactcagagca

SEQ ID NO: 51406 - DNA, 110 bp, synthetic construct
  source 1..110: mol_type = other DNA
ccatcctcctgggaacctctcaggggtattgagggaggttttagtttctgttgtttttgagatcatcgagacctctggttttagaagtgatgagccttaggcagcaagga

SEQ ID NO: 51407 - DNA, 110 bp, synthetic construct
  source 1..110: mol_type = other DNA
aaaagatgtccccctcctattttaagcacattaatgatggatctggaggggccgtcttcctctagcagcactgtagccacttacatcattgtcagaaaacaagatagtat

SEQ ID NO: 51408 - DNA, 110 bp, synthetic construct
  source 1..110: mol_type = other DNA
aactttctattatggcagcccaagctgactaggataggtgcttaacatttattttggaggcttaaaaaataaaatgaagagttcctgttctggctctggggtaacgaacc

SEQ ID NO: 51409 - DNA, 110 bp, synthetic construct
  source 1..110: mol_type = other DNA
accagttggattcgtaacctgctgagccacaaaaggagcttgagaaaaggcagatttaaaacaagctattacgtgagcctaaaatataataccacctggagaaagcaaac

SEQ ID NO: 51410 - DNA, 110 bp, synthetic construct
  source 1..110: mol_type = other DNA
tttgacccctagcttgggaacctccatgtgctaccagtgcggccctagaaagaccaataaataaataaataagtacaggggcagctgccaggctattggtaatgtcgtag

SEQ ID NO: 51411 - DNA, 110 bp, synthetic construct; identical to SEQ ID NO: 51410
  source 1..110: mol_type = other DNA

SEQ ID NO: 51412 - DNA, 110 bp, synthetic construct
  source 1..110: mol_type = other DNA
gacagctggcccagggtcattgagttcagagcaaaagtgggccctgtggacaccacactttgagggctctttgaatgatccagctgggacagctccaggttctttttgtg

SEQ ID NO: 51413 - DNA, 110 bp, synthetic construct
  source 1..110: mol_type = other DNA
gaccttcagttaagtcctatatcaatggtccggggtaaggaaagataagaactgatgcagtctttttatatttctcatttccaagtggccaccagttgccctccttttct

SEQ ID NO: 51414 - DNA, 110 bp, synthetic construct
  source 1..110: mol_type = other DNA
tgcagtctttttatatttctcatttccaagtggccaccagttgccctccttttctggttgccatgtagaatagccttcaggttctccaaaattttcttgttgctgctatt

SEQ ID NO: 51415 - DNA, 110 bp, synthetic construct
  source 1..110: mol_type = other DNA
ttaggtcctttttacagatgctcttagtacatttgattttattagaaatatttgagctcatggtgatctcattcctggaaataaataattacagttgctcatgactactt

SEQ ID NO: 51416 - DNA, 110 bp, synthetic construct
  source 1..110: mol_type = other DNA
gctcatggtgatctcattcctggaaataaataattacagttgctcatgactactttatattatagccagatctaaacctagccaagttaccatgaactccccttactgac

SEQ ID NO: 51417 - DNA, 110 bp, synthetic construct
  source 1..110: mol_type = other DNA
gctcctaaagcctgataaaatgcatcaaatattagatgaatctcctggtcttcttctctgttggtcaccatctctgagatttcagctacattgatgtagtaattagtgga

SEQ ID NO: 51418 - DNA, 110 bp, synthetic construct
  source 1..110: mol_type = other DNA
acagaaaaccttctctgagtttggggaagaccagagatggtaatcttcaccacactgaaaaatcataccccaaaagtccctttgctccttcagtgagcagtatgtggagc

SEQ ID NO: 51419 - DNA, 110 bp, synthetic construct
  source 1..110: mol_type = other DNA
tgaaaaatcataccccaaaagtccctttgctccttcagtgagcagtatgtggagctgtgaggaaggcaagccatcaacgcttttatatattttgggaaccttaaggaatt

SEQ ID NO: 51420 - DNA, 110 bp, synthetic construct
  source 1..110: mol_type = other DNA
atttctggaaatgcgttttgtttaatggccaaaggagcatcttcagtgaattttggtgaattttaaaaatagaggacttaaatccttgggtgagaacctcaggcctacag

SEQ ID NO: 51421 - DNA, 110 bp, synthetic construct
  source 1..110: mol_type = other DNA
catttagattctgataaaattagaaattcagggctttaaaaataaattgagagaccaaagctctaaactagtagactagcttttttggtctcaggactcctttacatgct

SEQ ID NO: 51422 - DNA, 110 bp, synthetic construct
  source 1..110: mol_type = other DNA
agccaatgctaagaagggctaattgtgtgacctatgacaatgaaaagcttctttcgctttctttggagacattccaggctgttccaacagtcaacaaaatagtaattgcc

SEQ ID NO: 51423 - DNA, 110 bp, synthetic construct
  source 1..110: mol_type = other DNA
atgcttggacccagtagcgcttttgcataaattacttccacaagtattcgtccatggctgataggattaagcatgatgacacggagtcttggatggcctcactttgataa

SEQ ID NO: 51424 - DNA, 110 bp, synthetic construct
  source 1..110: mol_type = other DNA
ggctgataggattaagcatgatgacacggagtcttggatggcctcactttgataagggaagaaaaggaaaaagaaattctgacaagtgaatgaccacagaaagggaaaat

SEQ ID NO: 51425 - DNA, 110 bp, synthetic construct
  source 1..110: mol_type = other DNA
cattgtgatgctccagtggaacaggtcacaaagcacaattcttagttcatattgcctggagtcacaagtctaacatcaagcttgcaaaaccctcatttgcctcctgtaac

SEQ ID NO: 51426 - DNA, 110 bp, synthetic construct
  source 1..110: mol_type = other DNA
gctgattaagctcttgtgtctcagctccaaacctgtgcttctacacagcctatgctgagactctataaactgagtttctgctttgccagattaatcagccaatagagaat

SEQ ID NO: 51427 - DNA, 110 bp, synthetic construct
  source 1..110: mol_type = other DNA
cctagtgatggtaggccaagcctccctctcatttctgagatgactgctctgatttgtccctgctgtctggagatcacacaggaagctccaagtcatgcttagccccccac

SEQ ID NO: 51428 - DNA, 110 bp, synthetic construct
  source 1..110: mol_type = other DNA
caccggatggcttactgacaccctggtaatctataaaattcctttgaccttcacaggagtattaaagtttatgatatgcaaactgtctcaatttttaaacattttttaaa

SEQ ID NO: 51429 - DNA, 110 bp, synthetic construct
  source 1..110: mol_type = other DNA
tatttactttgatattgctgaccacttgtatcttgaaattcctttttgacttcagatatactatgctcctctgattcttctgtataccttcaacagttccttcagctatt

SEQ ID NO: 51430 - DNA, 110 bp, synthetic construct
  source 1..110: mol_type = other DNA
atatactatgctcctctgattcttctgtataccttcaacagttccttcagctattcttagaacctccttgtgcctatcctttgaatactatgttttgcaagttttcttct

SEQ ID NO: 51431 - DNA, 110 bp, synthetic construct
  source 1..110: mol_type = other DNA
aagtgctatgtcacgactctgatggaactaacacaactgtgtgtatttctcaagacttagagaaatgtacactgaaaacttaatgtacttataccttactttatgcctta

SEQ ID NO: 51432 - DNA, 110 bp, synthetic construct; identical to SEQ ID NO: 51431
  source 1..110: mol_type = other DNA

SEQ ID NO: 51433 - DNA, 110 bp, synthetic construct
  source 1..110: mol_type = other DNA
tcaaggacactgcagaatgggagaggatcttgttcccacattcagaatgatattctgctttctttggggttggatgcatattgtttgatggataattgagctgttatata

SEQ ID NO: 51434 - DNA, 110 bp, synthetic construct
  source 1..110: mol_type = other DNA
tgctttctttggggttggatgcatattgtttgatggataattgagctgttatatatcacttctgcataacattatgcatcatgactctttttccagcaaactgataaaaa

SEQ ID NO: 51435 - DNA, 110 bp, synthetic construct
  source 1..110: mol_type = other DNA
tcctgcctttgctgcctgggagtgtttaacccaacctctaaggagcctctgtcccttaaagagtaagagtcacttctggaagtgtggagaagattgattaatccaagttt

SEQ ID NO: 51436 - DNA, 110 bp, synthetic construct
  source 1..110: mol_type = other DNA
catagtgaggatgcaggttcacaccctggccttgctcagtgggtgaaggatcctctgttgctgcaagctgcagcataagtaatagatgtggttcagatccagtgttgctg

SEQ ID NO: 51437 - DNA, 110 bp, synthetic construct
  source 1..110: mol_type = other DNA
tgttgctgcaagctgcagcataagtaatagatgtggttcagatccagtgttgctgtagcttcagcttcaatttgatccctaggccaggaacttccatatgctgcaggtgt

SEQ ID NO: 51438 - DNA, 110 bp, synthetic construct
  source 1..110: mol_type = other DNA
accaactctatttaaaaatccctgtccttccttttcacatctgattgaattagaagaggccaccagcttcaagaactgtcaatttatgactcagccaggggctgaagtta

SEQ ID NO: 51439 - DNA, 110 bp, synthetic construct
  source 1..110: mol_type = other DNA
cacaacagacttggagtcaaaagaatttttaaactctcctttttgagtcctaataaacattcagtcaggccaaaccaagaaaactttgaatcaaatgaatggtttctttt

SEQ ID NO: 51440 - DNA, 110 bp, synthetic construct
  source 1..110: mol_type = other DNA
ttcaaaggtcactatggttggtaaattccacttactgaacttgggctgagttcttgctgctcaaatgtatttataagagacagcatgatcatgctttagttttgagatat

SEQ ID NO: 51441 - DNA, 110 bp, synthetic construct
  source 1..110: mol_type = other DNA
gccacctccaaagaaaggcaagttgctgaatattcccgagagctttggttccagtgtctttccctcacaagaagccacattcacatctcttttcctaggatgtcctccaa

SEQ ID NO: 51442 - DNA, 110 bp, synthetic construct; identical to SEQ ID NO: 51441
  source 1..110: mol_type = other DNA

SEQ ID NO: 51443 - DNA, 110 bp, synthetic construct
  source 1..110: mol_type = other DNA
gaaccccaagttggatttcttaatgtaaaatattttggagctcaaacctaagatgtcacctctacagtctattttttgttgttgttgttgttgttgttgttgttgtttta

SEQ ID NO: 51444 - DNA, 110 bp, synthetic construct
  source 1..110: mol_type = other DNA
tggccacactggaatggccttatttgcttttgcaaataagaggtgaaggtacacggattcacagctcagttcattaatctttaccatttccatatggcagatactccact

SEQ ID NO: 51445 - DNA, 110 bp, synthetic construct
  source 1..110: mol_type = other DNA
tactatgcacattagcaacacatgcatctatgattacactgttctcacttgaacatgtcattctactttaaaattaattgttcatacatcttcctgtcccattagactac

SEQ ID NO: 51446 - DNA, 110 bp, synthetic construct
  source 1..110: mol_type = other DNA
gttcacatggagcaggaaataaagataaaatgcttgaaccctcaatagcagttctactaacttcataaagataaggaaattacaaggcctctttagaaagtacagtctca

SEQ ID NO: 51447 - DNA, 110 bp, synthetic construct
  source 1..110: mol_type = other DNA
tagcagttctactaacttcataaagataaggaaattacaaggcctctttagaaagtacagtctcataccacttactacccacaaattaacaagtattcaagatgaatttt

SEQ ID NO: 51448 - DNA, 110 bp, synthetic construct
  source 1..110: mol_type = other DNA
tttgggttgccctccagagacagaagctgcataaatacttaccaatttgagagcaaagatgttaaatttaaagctatattccctgctcccttgctaatcagacagcaatc

SEQ ID NO: 51449 - DNA, 110 bp, synthetic construct
  source 1..110: mol_type = other DNA
aagatgttaaatttaaagctatattccctgctcccttgctaatcagacagcaatccattttttccaagatctctgcaatactcccacttagagactagcaaagtataaat

SEQ ID NO: 51450 - DNA, 110 bp, synthetic construct
  source 1..110: mol_type = other DNA
gtgaatggaccacttttctaaaagggagggtggtcattagaaacatgagatagaagatatataataccacaaaataattcaaggcaaagataaaaatacctactattttc

SEQ ID NO: 51451 - DNA, 110 bp, synthetic construct
  source 1..110: mol_type = other DNA
gaagcctctcattccatagttttctcacatttgagccattaaataaaaaccaggcgctagtggtcagaatgcttattgacatagcttgcctggggctttacaactggaaa

SEQ ID NO: 51452 - DNA, 110 bp, synthetic construct
  source 1..110: mol_type = other DNA
gctagtggtcagaatgcttattgacatagcttgcctggggctttacaactggaaacttcagtcatgaatgccaccttctaacaaggatgctgtgggtggtattcttattc

SEQ ID NO: 51453 - DNA, 110 bp, synthetic construct
  source 1..110: mol_type = other DNA
ttgcctcattagctcaggaaatactatcacaagctaattctttcagaagtagaggcaagaacagatagcatatggtttttctctgcaaatgtggtctcgctacatttaaa

SEQ ID NO: 51454 - DNA, 110 bp, synthetic construct
  source 1..110: mol_type = other DNA
tagactcaagagagtatgatgttaacccaccgtaaactgatttatagatttaaagaattttccatctacatgtcagaaagctattttgtagacatagacaaatactctaa

SEQ ID NO: 51455 - DNA, 110 bp, synthetic construct
  source 1..110: mol_type = other DNA
aacaggaagaggaagtggaggactgcaaaggtaagactcacaccttgtcacatgtacagtcataagcaccttgtggtctgcgcatcgataaagaagagatttaaagagag

SEQ ID NO: 51456 - DNA, 110 bp, synthetic construct
  source 1..110: mol_type = other DNA
acagtcataagcaccttgtggtctgcgcatcgataaagaagagatttaaagagagtatttgttcttttctcctctcattttggttttggactttacaataccttacttaa

SEQ ID NO: 51457 - DNA, 110 bp, synthetic construct
  source 1..110: mol_type = other DNA
agaaagatgggagagggcaaaggggagaggagagcagagagaaatctcagctataaagtagcctgatcctaagggagttatggagcccaaattgcactgcagagttcatc

SEQ ID NO: 51458 - DNA, 110 bp, synthetic construct
  source 1..110: mol_type = other DNA
aaaaagtttcgtctgttttgcttaatgaatgggaagtggaggactctgtgagcgtttctttaaaaattttaatctactatcgcatctgaatcctctaaccaccttttagg

SEQ ID NO: 51459 - DNA, 110 bp, synthetic construct
  source 1..110: mol_type = other DNA
ctcagccagccatgctatgcgtcagtgtggcagtttccagacagagctagccattgatgtaccctttggcttggggaaaactggtttctcctccttcccccccttttgta

SEQ ID NO: 51460 - DNA, 110 bp, synthetic construct
  source 1..110: mol_type = other DNA
aagtctggaacctgaagcggcacataagaccaaggttttctcaagaacgaggaagtctgatactaaggattgagctgttggcacttctccataatctacaaaacccactc

SEQ ID NO: 51461 - DNA, 110 bp, synthetic construct
  source 1..110: mol_type = other DNA
tctgatactaaggattgagctgttggcacttctccataatctacaaaacccactccgtgtctacagatcactggtaaatttccccacgcaaaaatatgtgggaatagggt

SEQ ID NO: 51462 - DNA, 110 bp, synthetic construct
  source 1..110: mol_type = other DNA
tacagggattcgcatatgtctgcctgtgtctgccggactgttaggtgggcccaacaggaatgtgtttttatgaaaaactaaggcatcacatgaaggaaaagagaaacaaa

SEQ ID NO: 51463 - DNA, 110 bp, synthetic construct
  source 1..110: mol_type = other DNA
gccctagaagatgtcaaaatgaattaaagctgtcgtaattttaaaaatcagtagtgcccagggagggtcaactagacaatggaacatgataaaaagccccaaaactgacc

SEQ ID NO: 51464 - DNA, 110 bp, synthetic construct
  source 1..110: mol_type = other DNA
agaaccaacaacactcaagaccctaagcatgcatagcttgctcagataccatgagctatgtagccagctggcatcctttgggaaacacctcccctctgtatcctttcacc

SEQ ID NO: 51465 - DNA, 110 bp, synthetic construct
  source 1..110: mol_type = other DNA
ctatgtagccagctggcatcctttgggaaacacctcccctctgtatcctttcaccaaactggaccattgagtccagaggtcaccaaggagcagtggttagtagggagaaa

SEQ ID NO: 51466 - DNA, 110 bp, synthetic construct
  source 1..110: mol_type = other DNA
catattctgagtctgaggctgaggttatagacagcaagaaatactgttccctaatatgcatatcttcggtttctttaaaagatctcaaaagtcacggagtggaacacgtc

SEQ ID NO: 51467 - DNA, 110 bp, synthetic construct
  source 1..110: mol_type = other DNA
atgcatatcttcggtttctttaaaagatctcaaaagtcacggagtggaacacgtcaattccccagtgtgtggtcacaagccattggaatgttaagtcacacataactacc

SEQ ID NO: 51468 - DNA, 110 bp, synthetic construct
  source 1..110: mol_type = other DNA
tatgatagattaataatcctgcagagtttcctgtaactaagccacagtgaattagaggaatcaggctgcaatgcattgtctcgtaaatattttcatttaaaatatggagt

SEQ ID NO: 51469 - DNA, 110 bp, synthetic construct
  source 1..110: mol_type = other DNA
agtgaattagaggaatcaggctgcaatgcattgtctcgtaaatattttcatttaaaatatggagtttcccttgtggctcagtgggttgcaaacccaactagcatccatga

SEQ ID NO: 51470 - DNA, 110 bp, synthetic construct
  source 1..110: mol_type = other DNA
acagataattactagaatcccttgtttttttgaacttggggaaaagagtgacattaagctggctggacaactaacaggtaacgtaattctaccaatattatttggaaggg

SEQ ID NO: 51471 - DNA, 110 bp, synthetic construct
  source 1..110: mol_type = other DNA
aagctggctggacaactaacaggtaacgtaattctaccaatattatttggaagggaacaggggtaaaactccaatatcacatccatcatatctgtctctaactgaatgtc

SEQ ID NO: 51472 - DNA, 110 bp, synthetic construct; identical to SEQ ID NO: 51470
  source 1..110: mol_type = other DNA

SEQ ID NO: 51473 - DNA, 110 bp, synthetic construct; identical to SEQ ID NO: 51471
  source 1..110: mol_type = other DNA

SEQ ID NO: 51474 - DNA, 110 bp, synthetic construct
  source 1..110: mol_type = other DNA
tctctttggttgagttgcggaggcttctcattagctgagtttttactggaggaagagaaaaatcttcattcttcctactggtgtttgaaaagttaaactgtgaggagggg

SEQ ID NO: 51475 - DNA, 110 bp, synthetic construct
  source 1..110: mol_type = other DNA
ggtcatataagccacacctcagtcaatgtgaaaaggaactgcacaagagtgtggataccaagagatggggctcatcagggccatcttggaggctggctatagaaacatca

SEQ ID NO: 51476 - DNA, 110 bp, synthetic construct
  source 1..110: mol_type = other DNA
ggcagctgccgtaacatttctggaggcccagcgagattccaaccattctggcctcttgagccatcagaacagaggcaagttctgcctggcagccggggagccctgaacca

SEQ ID NO: 51477 - DNA, 110 bp, synthetic construct
  source 1..110: mol_type = other DNA
ttgagccatcagaacagaggcaagttctgcctggcagccggggagccctgaaccaaacgaggccccctgaaccaaacgaggtggcgcaccacctgacggtattccgggtc

SEQ ID NO: 51478 - DNA, 110 bp, synthetic construct
  source 1..110: mol_type = other DNA
tttcagttctttgtcactctacagagcagctattttcaaccatctctcctaagttgaagagcattccattgagctctgcactcttggcaagccctttgacctttctgagg

SEQ ID NO: 51479 - DNA, 110 bp, synthetic construct
  source 1..110: mol_type = other DNA
ttttattttctagagttattaggatgtgatttacacacggtaaaattcacccaagtacacagctgaccatgtttcagtaattatacagccatcaccaccacaatcaagat

SEQ ID NO: 51480 - DNA, 110 bp, synthetic construct
  source 1..110: mol_type = other DNA
agcgcttccctggtgattcaaatgggcagctagtgttgaggaccatgaactgatggtgtggcagggtgtgggggctggagaagccacgtgcataaagaactaaggtgaag

SEQ ID NO: 51481 - DNA, 110 bp, synthetic construct
  source 1..110: mol_type = other DNA
atacaggtaggtgtgtgtgtgtggtgtgtgtgtgtgtgtgtgtgtgttttgacagggtatcacagctcacgtccctctcaagccacatcccaggagaaagccacacgaga

SEQ ID NO: 51482 - DNA, 110 bp, synthetic construct
  source 1..110: mol_type = other DNA
ggtatcacagctcacgtccctctcaagccacatcccaggagaaagccacacgagacttgcctggatcgcctctcctgaaggccgctgaaccctgcgaaggactggcttct

SEQ ID NO: 51483 - DNA, 110 bp, synthetic construct
  source 1..110: mol_type = other DNA
gctctggataaggtcccaacaggtgcccagcccccttggcactacagtgtggttccagaagcttttcagcagcacccccaccactgtgcagtgccagccctatgatcttc

SEQ ID NO: 51484 - DNA, 110 bp, synthetic construct
  source 1..110: mol_type = other DNA
cagaagcttttcagcagcacccccaccactgtgcagtgccagccctatgatcttcctattgtgctcagtgtccaggaaacagccctgccaaagccctgccaaaagtcttg

SEQ ID NO: 51485 - DNA, 110 bp, synthetic construct
  source 1..110: mol_type = other DNA
gaagctataacccattaaacggcatttcccccctctgcccaagccatggcaatcaccatgccattttctgtctctatgaagcggactactctagataccacatataggtt

SEQ ID NO: 51486 - DNA, 110 bp, synthetic construct
  source 1..110: mol_type = other DNA
ccatgccattttctgtctctatgaagcggactactctagataccacatataggttgaatcatacagtgatttgcctttatttttatttttatttttgattttgttttgta

SEQ ID NO: 51487 - DNA, 110 bp, synthetic construct
  source 1..110: mol_type = other DNA
gatatattctgatcctcttcaaatccatactggaaaagaaagactaaagctagggaaattcagtgctcagaggggcaagtcagtgaggtggagataagggggtggaggtt

SEQ ID NO: 51488 - DNA, 110 bp, synthetic construct
  source 1..110: mol_type = other DNA
aaattcagtgctcagaggggcaagtcagtgaggtggagataagggggtggaggttatagagagtacttctgactgcacagtgagaagtgagtctggaacaataaaggacc

SEQ ID NO: 51489 - DNA, 110 bp, synthetic construct
  source 1..110: mol_type = other DNA
cagcaaaggtggacttctgttgccttcctatatcaggggttcatattcagataccaagcagtagatcaaggattttgagctattgatgccgccgagagggtaggcaagct

SEQ ID NO: 51490 - DNA, 110 bp, synthetic construct
  source 1..110: mol_type = other DNA
aagcagtagatcaaggattttgagctattgatgccgccgagagggtaggcaagctctctctcaccttggagagtgtctttggcgggtattttgttgtctgcacctgatgt

SEQ ID NO: 51491 - DNA, 110 bp, synthetic construct
  source 1..110: mol_type = other DNA
aattttattttttaatgttttcagtttttggctgtggcgtgcagtggcttcatgtgggatatcagctcccagattggggactgaacccaggctgaagtggtgaaagcatt

SEQ ID NO: 51492 - DNA, 110 bp, synthetic construct
  source 1..110: mol_type = other DNA
gggatatcagctcccagattggggactgaacccaggctgaagtggtgaaagcattatgtcctaacctctagagcaccagggaactttcagttcatcaactttattattat

SEQ ID NO: 51493 - DNA, 110 bp, synthetic construct
  source 1..110: mol_type = other DNA
tttaatcgtagcacaatactccagtgggtggtattcggtttttaagtgtgttacaggtaatttgttactaaagctgttaattacttaagtttttaaaccctttccttaaa

SEQ ID NO: 51494 - DNA, 110 bp, synthetic construct
  source 1..110: mol_type = other DNA
tctctgcccaccacttcgcagattgcctcttgtgttaagagctgactacttaaaggatgaaccagcttttcaagagctgtgaccaactccgtggagccacccaaagagcc

SEQ ID NO: 51495 - DNA, 110 bp, synthetic construct
  source 1..110: mol_type = other DNA
taagagctgactacttaaaggatgaaccagcttttcaagagctgtgaccaactccgtggagccacccaaagagccaaagctgtccttcatcttccacctcccattgcaaa

SEQ ID NO: 51496 - DNA, 110 bp, synthetic construct
  source 1..110: mol_type = other DNA
gaaacccaccttgctagaatgaatgcaaggattagtttcacctgaaaagacttaaagggaattacaatagctagaatagtctgggaataaacatcccattgttcacacca

SEQ ID NO: 51497 - DNA, 110 bp, synthetic construct
  source 1..110: mol_type = other DNA
cattgttttccaattctttattttctgccatctttattacttcctttcttctgatttaagtttccccatctctttcaatagcttcatgagtaaaaagcttatttggttta

SEQ ID NO: 51498 - DNA, 110 bp, synthetic construct
  source 1..110: mol_type = other DNA
tgagggcagagctttctgtgacaatattatatatttctgtgttgaatttttgcgtggcactccatcaacccactcgagaggtgtaccgtaattaatctcacttattatga

SEQ ID NO: 51499 - DNA, 110 bp, synthetic construct
  source 1..110: mol_type = other DNA
tagaggcaggttttaaaggaggggtgggcacccctggatggtttctagggagttcagaagaagcagtgcctctttaatttgccgcctccacataagcaaagctgttgctc

SEQ ID NO: 51500 - DNA, 110 bp, synthetic construct
  source 1..110: mol_type = other DNA
agaagaagcagtgcctctttaatttgccgcctccacataagcaaagctgttgctctaaacttacaggggagagtgcccgcttgttttaggattttgatttcccagctctg

SEQ ID NO: 51501 - DNA, 110 bp, synthetic construct
  source 1..110: mol_type = other DNA
gcagttttggtaaggaaggtgatggaattaatagcacatataaaaattggattttggcgttgccattgtggctcagcacaaatgaagctgattagtatccatgaggatgc

SEQ ID NO: 51502 - DNA, 110 bp, synthetic construct
  source 1..110: mol_type = other DNA
aaggtgatggaattaatagcacatataaaaattggattttggcgttgccattgtggctcagcacaaatgaagctgattagtatccatgaggatgctggtttgatccctgg

SEQ ID NO: 51503 - DNA, 110 bp, synthetic construct
  source 1..110: mol_type = other DNA
gatgtgcatctgaaggataccttttgatagtgatctgagcggtccagaatgtcaggccaagtgtttgcagctagaaaaagcccgagttccccagttgagcagttataacg

SEQ ID NO: 51504 - DNA, 110 bp, synthetic construct
  source 1..110: mol_type = other DNA
gccaagtgtttgcagctagaaaaagcccgagttccccagttgagcagttataacgcaatggcaggggctgcccagccactgagaccatggttcaggtacatctgcaaaca

SEQ ID NO: 51505 - DNA, 110 bp, synthetic construct
  source 1..110: mol_type = other DNA
tcccaaagtgtctggctttttaaaacacacatatgcccagatcgatgtgtatgaaacatctgagcctaactgcacaaagcagctctatctaactaaagacacttactcac

SEQ ID NO: 51506 - DNA, 110 bp, synthetic construct
  source 1..110: mol_type = other DNA
agctaaagaaatgccgccccttttgagaacaacactctaagtttggacatagtcatactttgagaagctcctcacttaattcacagttcttcaaaagcaatgcaaaggat

SEQ ID NO: 51507 - DNA, 110 bp, synthetic construct
  source 1..110: mol_type = other DNA
gtgacttaaaaacagtctaattgggtcctgagtaactggaaggcagttgtaatatcagtgagtgccagctcattgaaagcgattcggctcccaagctgatagaatgaaac

SEQ ID NO: 51508 - DNA, 110 bp, synthetic construct
  source 1..110: mol_type = other DNA
cagtgagtgccagctcattgaaagcgattcggctcccaagctgatagaatgaaactagcctctgtcacctctaaaggaagcttctctcaccttagaacttcatcctcaac

SEQ ID NO: 51509 - DNA, 110 bp, synthetic construct
  source 1..110: mol_type = other DNA
ctctgattagaccctgggaacctctatttgctgcgggtgtggccctaaaataaaagacaagagacaaataagaaaccccacaaaaaaaaacccattgtgcttaacagtgc

SEQ ID NO: 51510 - DNA, 110 bp, synthetic construct
  source 1..110: mol_type = other DNA
gacaagagacaaataagaaaccccacaaaaaaaaacccattgtgcttaacagtgcaattaagtactttagacattttcctacttttttattataatgctacaaggggcat

SEQ ID NO: 51511 - DNA, 110 bp, synthetic construct
  source 1..110: mol_type = other DNA
cccttctgctctctgacatattccactgggcttttacccagagaacactggccagtgtcactgattgctctgtctcccattttctttagcttgcctgcctattcttgtct

SEQ ID NO: 51512 - DNA, 110 bp, synthetic construct
  source 1..110: mol_type = other DNA
aaaatttcatttgaaaatagggttgatctgatcaggaaagttaaaatcatgggtacagttatagctgaagaagctgcacccagagaggtaatgacttgcctaaagtgacg

SEQ ID NO: 51513 - DNA, 110 bp, synthetic construct
  source 1..110: mol_type = other DNA
cagttatagctgaagaagctgcacccagagaggtaatgacttgcctaaagtgacgcaatgtctgatttctggtctggccaacaggcatgtcccaagctttcctattatac

SEQ ID NO: 51514 - DNA, 110 bp, synthetic construct
  source 1..110: mol_type = other DNA
aactccctcaacttattttcttcatgtgaaaaatgaagatgatattgtgacagagttgaggtaatcattttcacagagaaatcatttccagagaattatagcttatacat

SEQ ID NO: 51515 - DNA, 110 bp, synthetic construct
  source 1..110: mol_type = other DNA
ttgaggtaatcattttcacagagaaatcatttccagagaattatagcttatacatcacattcttctttttgcaaccatgatcattcatttgtcagagcatgaaatcacaa

SEQ ID NO: 51516 - DNA, 110 bp, synthetic construct; identical to SEQ ID NO: 51514
  source 1..110: mol_type = other DNA

SEQ ID NO: 51517 - DNA, 110 bp, synthetic construct; identical to SEQ ID NO: 51515
  source 1..110: mol_type = other DNA

SEQ ID NO: 51518 - DNA, 110 bp, synthetic construct
  source 1..110: mol_type = other DNA
ttacagtttaacagctggagactcataccaatctctttctattggggaatgcagcagttacagagctggataaatgaaaagactcatgaaacatcacagggtgttctcat

SEQ ID NO: 51519 - DNA, 110 bp, synthetic construct
  source 1..110: mol_type = other DNA
agttacagagctggataaatgaaaagactcatgaaacatcacagggtgttctcatggaaggctttaataaaggtagaggatacaggatagatggagaaacatatacctct

SEQ ID NO: 51520 - DNA, 110 bp, synthetic construct
  source 1..110: mol_type = other DNA
tttgcttcctttttaaaaattccatgttttcccttctctccagggttgaaagttccacactatgtgtcttaaagttgtaacacccataccaaaaaatgtaatactaatca

SEQ ID NO: 51521 - DNA, 110 bp, synthetic construct
  source 1..110: mol_type = other DNA
cacactatgtgtcttaaagttgtaacacccataccaaaaaatgtaatactaatcattatattaaaaaaaattagagggtgcaggaggagggaaaacaaggagttgttcaa

SEQ ID NO: 51522 - DNA, 110 bp, synthetic construct
  source 1..110: mol_type = other DNA
catacttgtgggcaaaacaggctcctagaacctgagggcatctctccaataaggaaaataggtgccaggtgttaggaatgaaagctcaccacaaagtagtatgcagttct

SEQ ID NO: 51523 - DNA, 110 bp, synthetic construct
  source 1..110: mol_type = other DNA
cccaggttgccacagctgtggctcagattcaatcccaggccccacggaacttcaatatgccatgggtgtggccattaaaaaacatcctgaaatgaaagacttgaccaaat

SEQ ID NO: 51524 - DNA, 110 bp, synthetic construct
  source 1..110: mol_type = other DNA
tatgccatgggtgtggccattaaaaaacatcctgaaatgaaagacttgaccaaatgataatggtcattctctggagcttggctgctttttcacacacattctaaatcatg

SEQ ID NO: 51525 - DNA, 110 bp, synthetic construct
  source 1..110: mol_type = other DNA
gtaccacactctgtggtggagattccctctgccctgaatctctttcaccacgatgagcttttacctatggggaagaacaacaatccaaaacaagacacacaagtaatttg

SEQ ID NO: 51526 - DNA, 110 bp, synthetic construct
  source 1..110: mol_type = other DNA
tactccaaagtttagaggtcacggagcagagaaggtatctaaggagcaaaggagtctgaggaggaacaaatgtgaagggagataaaacagctcaagtgaaatcttggaaa

SEQ ID NO: 51527 - DNA, 110 bp, synthetic construct
  source 1..110: mol_type = other DNA
ctgaggaggaacaaatgtgaagggagataaaacagctcaagtgaaatcttggaaaccaggtgaggaaactggttcaaggaagaagcagtgatcagttgtgtcaaatcctg

SEQ ID NO: 51528 - DNA, 110 bp, synthetic construct
  source 1..110: mol_type = other DNA
aatgagccaagaaatgtctattgtagtccagaaagcatatggttatctacatatctgtataaaagtgtctggccactaaccattgttaatacattgcctattgtcctaca

SEQ ID NO: 51529 - DNA, 110 bp, synthetic construct
  source 1..110: mol_type = other DNA
tgtataaaagtgtctggccactaaccattgttaatacattgcctattgtcctacacagctaccaggactgtggtgaaatttggaagtaccatgtgctccatttgttttcc

SEQ ID NO: 51530 - DNA, 110 bp, synthetic construct
  source 1..110: mol_type = other DNA
tctctaagctgtctctctgacctgtgaatctctagaaagatgaggggcctttgaaaaaggtcgagaccagcgtgacaaaaaccggaggaagaaactgtaatggtctcaaa

SEQ ID NO: 51531 - DNA, 110 bp, synthetic construct
  source 1..110: mol_type = other DNA
aaaggtcgagaccagcgtgacaaaaaccggaggaagaaactgtaatggtctcaaagcttgagccgtctcagttcattgtagaatacaattggtgtcattgtttgctttcc

SEQ ID NO: 51532 - DNA, 110 bp, synthetic construct
  source 1..110: mol_type = other DNA
tccattctgctgacaaaaggggtatactatcaggttcacttctcaggagaaaatctggtttctatcatttttcctgtttctccaatgagtacagtttaaagtactcattg

SEQ ID NO: 51533 - DNA, 110 bp, synthetic construct
  source 1..110: mol_type = other DNA
tggtttctatcatttttcctgtttctccaatgagtacagtttaaagtactcattggagaaacaaagcaaagtttgttaaaccctgttaacgtctggagagaaaagtagat

SEQ ID NO: 51534 - DNA, 110 bp, synthetic construct
  source 1..110: mol_type = other DNA
gacgtctgtcatctactgggaggaaatttgcttaaacttcatgcattggctttaggctgttacatttatgtccatttgtgactgttctagctgcatgggtagttcttatt

SEQ ID NO: 51535 - DNA, 110 bp, synthetic construct
  source 1..110: mol_type = other DNA
gctgttacatttatgtccatttgtgactgttctagctgcatgggtagttcttattttgttaatttaactttttctacacacttaatacgtcactgaatttgcaaaacctc

SEQ ID NO: 51536 - DNA, 110 bp, synthetic construct
  source 1..110: mol_type = other DNA
atgaagcattagcaccctcaatagacacccctagtacccttctaagtatttgtcagtaccaatcagccgaatctctcgactcccagagtcctcagctgggaatagaagtg

SEQ ID NO: 51537 - DNA, 110 bp, synthetic construct
  source 1..110: mol_type = other DNA
gtaccaatcagccgaatctctcgactcccagagtcctcagctgggaatagaagtgtctgtctcctggaatatcaacctcctttcctgccacagttggtggctggtgccct

SEQ ID NO: 51538 - DNA, 110 bp, synthetic construct
  source 1..110: mol_type = other DNA
ctagcctctttgcatgagacacccagagggagaacttatccgaggagccttctggctccctctccatctggcaccagctaccagtgcctggcaggaattaacagccttgg

SEQ ID NO: 51539 - DNA, 110 bp, synthetic construct
  source 1..110: mol_type = other DNA
ctccctctccatctggcaccagctaccagtgcctggcaggaattaacagccttggtagtcctggcttaattttcaagtattccaaaggagaagaaaggttgccatgctga

SEQ ID NO: 51540 - DNA, 110 bp, synthetic construct
  source 1..110: mol_type = other DNA
gctgccaccatgcctaagagaaaggccaaaggagatgctaaaggtgacaaagcgaaggcgaaagatgagccacagagaagatcggcacggttgtctgctaaacctgcccc

SEQ ID NO: 51541 - DNA, 110 bp, synthetic construct
  source 1..110: mol_type = other DNA
aaaagaacacacttccacctgctctcaccactacatcaaccaagctcttgtaagtgtggtcatgcaaaccaccttttcttctattattgtggacgataaagtgcacctgc

SEQ ID NO: 51542 - DNA, 110 bp, synthetic construct
  source 1..110: mol_type = other DNA
acggctgtaggggtggatcccaccccttccctccagcacccccaaacaatggtacctgatcttcaagggcatctgggtttcctcagctttcaccctcaaatgtgatcacc

SEQ ID NO: 51543 - DNA, 110 bp, synthetic construct
  source 1..110: mol_type = other DNA
gcagtgaagatcagagttgccctgacttgtttcttgcccagagaaggatccaaagtgtctaattttcttatttctttctacctgttggaagagttgcagagctccccagc

SEQ ID NO: 51544 - DNA, 110 bp, synthetic construct
  source 1..110: mol_type = other DNA
ggatccaaagtgtctaattttcttatttctttctacctgttggaagagttgcagagctccccagctgaaagggtaaaaagctggagaatgtgggtgtcgatcccactacc

SEQ ID NO: 51545 - DNA, 110 bp, synthetic construct
  source 1..110: mol_type = other DNA
aaagagttcttatctctaagacatacaagctgaagaagttagggtgaaatgatatgtctaggttttactttaaaacactcccactcccatcttcaaccccctcctcctcc

SEQ ID NO: 51546 - DNA, 110 bp, synthetic construct
  source 1..110: mol_type = other DNA
cagcactgccctcccacctagagctatgtgagcaggtgtttgggctttcaacctcatcgatagcccaggctgtggcccggaccaactcctactatggtggccagacccca

SEQ ID NO: 51547 - DNA, 110 bp, synthetic construct
  source 1..110: mol_type = other DNA
atcgatagcccaggctgtggcccggaccaactcctactatggtggccagaccccaggggccacacaagtgctttttgttaatggtgagtatgccatcagaacacaactcc

SEQ ID NO: 51548 - DNA, 110 bp, synthetic construct
  source 1..110: mol_type = other DNA
agttcttttcctactcttcctcattgtggtattttttggatgtgtatatttgtatgtacactctagctcatttgccagattttgtatagacttctgtatatcaaagatgg

SEQ ID NO: 51549 - DNA, 110 bp, synthetic construct
  source 1..110: mol_type = other DNA
tttcaaaatatagcatcaatccaactactccctaccacttatcatgactatctctaagtcaccattagctcttacctgaactgttggagcagtattccaactagagttct

SEQ ID NO: 51550 - DNA, 110 bp, synthetic construct
  source 1..110: mol_type = other DNA
aagtcaccattagctcttacctgaactgttggagcagtattccaactagagttctgcttgcacttgacattctatctacaatctctccctatgctgcagcaagtgaccct

SEQ ID NO: 51551 - DNA, 110 bp, synthetic construct
  source 1..110: mol_type = other DNA
atatctaaatcatcttggccagtggagctacattgtccagaattccattttctgtgtgtttctggttgaacggttcccaagagatattcttgcaggagatttggaggaag

SEQ ID NO: 51552 - DNA, 110 bp, synthetic construct; identical to SEQ ID NO: 51551
  source 1..110: mol_type = other DNA

SEQ ID NO: 51553 - DNA, 110 bp, synthetic construct
  source 1..110: mol_type = other DNA
cttcttatcaactttaacatatacaatacaggattgttaactatagctgtcacgctctacattaccttctcagaaagtccttgtaatgaactgggaaagtttaataaagg

SEQ ID NO: 51554 - DNA, 110 bp, synthetic construct
  source 1..110: mol_type = other DNA
aaagagaagaatggaagtaactccttcccagcaaaaattttaaggcgatgctgtttaattattgcctacaatctgaaaaaagttttacaggttctggccggttagctcag

SEQ ID NO: 51555 - DNA, 110 bp, synthetic construct
  source 1..110: mol_type = other DNA
agtaactccttcccagcaaaaattttaaggcgatgctgtttaattattgcctacaatctgaaaaaagttttacaggttctggccggttagctcagttggttagagcgtgg

SEQ ID NO: 51556 - DNA, 110 bp, synthetic construct
  source 1..110: mol_type = other DNA
gagccacttctatcatcataaaaaggtgacacttgcatttccaattagcttacctcttgtatttagcagcccttgtcaacaaaatgacatttgtgttagactagttcaaa

SEQ ID NO: 51557 - DNA, 110 bp, synthetic construct
  source 1..110: mol_type = other DNA
cttgtatttagcagcccttgtcaacaaaatgacatttgtgttagactagttcaaaggccaatgaatctgcaagattctagactgactcatgatttaatattgagatgtca

SEQ ID NO: 51558 - DNA, 110 bp, synthetic construct
  source 1..110: mol_type = other DNA
ttgcagcaagctgtggtataggccgcagatgtggctcagatccttgctgtgatgtaggcttaggtgggcagctgaagctttaattcaacccctagcccaggacttccatg

SEQ ID NO: 51559 - DNA, 110 bp, synthetic construct
  source 1..110: mol_type = other DNA
ttaacaaggcctatcccttgggtattcctatttcttgattaagacaattcttgtgatcaacctcctaaatgctccctttacatctttgtttctaagtgtgtatataaggg

SEQ ID NO: 51560 - DNA, 110 bp, synthetic construct
  source 1..110: mol_type = other DNA
ctacattaatgtggggggaaactgggcagctatagagctctggatcattgtgatcctgtatcacaaagacaacattatgggctttataaaacatgtgtgtaactgagtgc

SEQ ID NO: 51561 - DNA, 110 bp, synthetic construct
  source 1..110: mol_type = other DNA
tacagcctgaggaacaatgagctaaaggtggctttaaaaaaggctctaggccaaagcaagatcttctcccaatgattcttactggctgaaaggagttcaacaagagacaa

SEQ ID NO: 51562 - DNA, 110 bp, synthetic construct
  source 1..110: mol_type = other DNA
ttctctttgacacttcaaggaaaaagtcagttgaagaagctgagctcagctgaagtagagaaggttgttagaacagcagggaagagggacgcagaggctggagcaatgag

SEQ ID NO: 51563 - DNA, 110 bp, synthetic construct
  source 1..110: mol_type = other DNA
gtttcctgaagttagtatcagcagtttggggctgggaggggagtatattagggaaaagagggcgcattgaggcagctaaccgcaggaaaggctaattcaagtgtgagcaa

SEQ ID NO: 51564 - DNA, 110 bp, synthetic construct
  source 1..110: mol_type = other DNA
agaaggtccccaccgtgaataactgaataacggcagcaggattaagacacagggcaggaaacgcctggagttggggaaatattttccgggacaaggaagttaaggacaca

SEQ ID NO: 51565 - DNA, 110 bp, synthetic construct
  source 1..110: mol_type = other DNA
aggaaacgcctggagttggggaaatattttccgggacaaggaagttaaggacacatattttttaagacgttctgcagccttcctcatggacagcccctgtgtatacgctt

SEQ ID NO: 51566 - DNA, 110 bp, synthetic construct
  source 1..110: mol_type = other DNA
ccggagggctggaaactttctagctggagatagactgtggtgccagccactttggacaaggtcatactgtcacgaataggaatcttaatgtgcaggtgttttcctgacgc

SEQ ID NO: 51567 - DNA, 110 bp, synthetic construct
  source 1..110: mol_type = other DNA
ctgatgagtaagcaggaatttactagctaaggagcatcggagagagacagaaaaaaaatgcaagtacctggagaggttaggagaagaactaggagagtcagaggagccac

SEQ ID NO: 51568 - DNA, 110 bp, synthetic construct
  source 1..110: mol_type = other DNA
gcttttttttctgaagcaaacattacttcttgggtaaagatttggctgaactgtctgtgctagagcagaggaccctgcctggcctcccaaacctcgctccccttagggtt

SEQ ID NO: 51569 - DNA, 110 bp, synthetic construct
  source 1..110: mol_type = other DNA
ggtccccaaactgtggttgctcttgagaagcctgaaggacctcagcaggatggaccacagactgaagagccctgttctttaagctggactgccctttccttgctgaagga

SEQ ID NO: 51570 - DNA, 110 bp, synthetic construct
  source 1..110: mol_type = other DNA
tatgtctcccctactctactccactcccccaacccccccatccccaccaccaccagcaccagtgtagaatgttcccaacacaataagtagctagagtgatgttaaaattt

SEQ ID NO: 51571 - DNA, 110 bp, synthetic construct
  source 1..110: mol_type = other DNA
gcaccagtgtagaatgttcccaacacaataagtagctagagtgatgttaaaatttaagtcagattaaatctctcttcccctcatctctccagtgactttccatctcagaa

SEQ ID NO: 51572 - DNA, 110 bp, synthetic construct
  source 1..110: mol_type = other DNA
gtccatggtccagacaccacccacacttcgcctgcccttctgcccccaccggcaggtagatgattttgtgtgtgaggtcccttctctaattcgactctcctgtggggaca

SEQ ID NO: 51573 - DNA, 110 bp, synthetic construct
  source 1..110: mol_type = other DNA
gtagatgattttgtgtgtgaggtcccttctctaattcgactctcctgtggggacaccacctacaatgagatccagatggctgttgccagtgtcttcatcttggtggtgcc

SEQ ID NO: 51574 - DNA, 110 bp, synthetic construct
  source 1..110: mol_type = other DNA
tccttaatccatggtgccaggccagggattgaacatttgtcccagtgttcccaagacgctgcccatcccattttgccatagagtggaactcctgtatcagtgatttttgc

SEQ ID NO: 51575 - DNA, 110 bp, synthetic construct
  source 1..110: mol_type = other DNA
acgctgcccatcccattttgccatagagtggaactcctgtatcagtgatttttgccttccgatgaatacaaagtaaaaaatagaagtaaaaaatataacttctacaattt

SEQ ID NO: 51576 - DNA, 110 bp, synthetic construct
  source 1..110: mol_type = other DNA
gttgaattaaagcatcttaatgtttgcgtaatattttatagcttatacgcatcttaaactgctgacccctggaggcagaatttaactattaaaccaggttttatttgacc

SEQ ID NO: 51577 - DNA, 110 bp, synthetic construct
  source 1..110: mol_type = other DNA
tgcacactcgaagagtcagatctcccccaaacactccacacacagtgataaacgtgcacccatgaatacctgcacaccgtgtttgtgcatcatacttgactaatccaagg

SEQ ID NO: 51578 - DNA, 110 bp, synthetic construct
  source 1..110: mol_type = other DNA
cttgataagttaatcagtaaaccaataggctttaagtcccaaattgcaatgggccagggattgtaatatgcacagatcacacaatgaagtagaaggagctatacatttat

SEQ ID NO: 51579 - DNA, 110 bp, synthetic construct
  source 1..110: mol_type = other DNA
agggattgtaatatgcacagatcacacaatgaagtagaaggagctatacatttataatcacgagaaataactgagtgttaaatcttgcgttcagactgaaaccacaggaa

SEQ ID NO: 51580 - DNA, 110 bp, synthetic construct
  source 1..110: mol_type = other DNA
acagcccaccctggccgcacatcctgggaaatcctgtcctcccggcatgtgtgaactcagaggctgcagcagaaacccgcataccactggtctcccaggacggaagctgg

SEQ ID NO: 51581 - DNA, 110 bp, synthetic construct
  source 1..110: mol_type = other DNA
catgtgtgaactcagaggctgcagcagaaacccgcataccactggtctcccaggacggaagctggtgtgcgtcccacgtcagtagggcaggcagctccagggctgctggg

SEQ ID NO: 51582 - DNA, 110 bp, synthetic construct
  source 1..110: mol_type = other DNA
cgcagttcgtgcggttcgacaactacgccccgaatccgcggatggagcctcgggtgccgtggatacagcaggaggggcaggactattgggatgaggagacgcggaaagtc

SEQ ID NO: 51583 - DNA, 110 bp, synthetic construct
  source 1..110: mol_type = other DNA
agcctcgggtgccgtggatacagcaggaggggcaggactattgggatgaggagacgcggaaagtcaaggacaacgcacagacttacggagtgggcctgaacaccctgcgc

SEQ ID NO: 51584 - DNA, 110 bp, synthetic construct
  source 1..110: mol_type = other DNA
ccaaagggtcaataaagttttcacagaagtgtgagtctgctcatcatacgaaccgtaagaattgtaagctctttgaaaacaaacaccaggtcgtacttttctggatccct

SEQ ID NO: 51585 - DNA, 110 bp, synthetic construct
  source 1..110: mol_type = other DNA
agtaacactttactttctcaaggcagtgtccttggaacagctcccactgtgggaacaataggcagaactcatgtccaaggacaagcaggtgaggatcctatttgcctagg

SEQ ID NO: 51586 - DNA, 110 bp, synthetic construct
  source 1..110: mol_type = other DNA
gacaaggttgatatgagagaacctgagcccagagttgctctcctgcctgacggcagaccaatctgaccacgtgtcactacgccccactcctgtcttcactctattctcac

SEQ ID NO: 51587 - DNA, 110 bp, synthetic construct
  source 1..110: mol_type = other DNA
gaccaatctgaccacgtgtcactacgccccactcctgtcttcactctattctcacctccagattgtgctcaaagtaactgagtttctcagaggtataagccccatgaatc

SEQ ID NO: 51588 - DNA, 110 bp, synthetic construct
  source 1..110: mol_type = other DNA
gaagaaggtttggctgtgcttggttctgtgcttgttttcccttcaaatgggcttggctattgtgaaagaaaaagaagtgaatgagcggacaggaaagccaaggaaggtca

SEQ ID NO: 51589 - DNA, 110 bp, synthetic construct
  source 1..110: mol_type = other DNA
tgcctaaaaccctcttttaaatgctgctttaaggcaaatagggaaatagagcaagagctagggatggaggtggatcaagaacaagttgattcttttcagttgcatgaaaa

SEQ ID NO: 51590 - DNA, 110 bp, synthetic construct
  source 1..110: mol_type = other DNA
agctagggatggaggtggatcaagaacaagttgattcttttcagttgcatgaaaataaacagcataagaacaactcagtagagagagaattcgataatgtctgagaaagt

SEQ ID NO: 51591 - DNA, 110 bp, synthetic construct
  source 1..110: mol_type = other DNA
tccatcttacccccaagctgtcccggttccattcaccagatcctgatggcgccgccctaccttataggagcggggcatgctgggtaggacggtgcccccacagcagctga

SEQ ID NO: 51592 - DNA, 110 bp, synthetic construct
  source 1..110: mol_type = other DNA
cccagattctcttaattctctctgtactgtcccggatggtagcaatgtggctatttatttattttttctttttagggccacacccatggcatgcagaagtacccaggcta

SEQ ID NO: 51593 - DNA, 110 bp, synthetic construct
  source 1..110: mol_type = other DNA
ttctctctgtactgtcccggatggtagcaatgtggctatttatttattttttctttttagggccacacccatggcatgcagaagtacccaggctaggagtctaatcagag

SEQ ID NO: 51594 - DNA, 110 bp, synthetic construct
  source 1..110: mol_type = other DNA
actgacatctctgcagcgtggttcccattaccctgctttctcctttcttcatcaaaccctcagtgtttgcctgtgtataagagtgagccgggatgttatcctgcagcttc

SEQ ID NO: 51595 - DNA, 110 bp, synthetic construct
  source 1..110: mol_type = other DNA
ctttctcctttcttcatcaaaccctcagtgtttgcctgtgtataagagtgagccgggatgttatcctgcagcttctccattttgacatattccccacagtcaagagggct

SEQ ID NO: 51596 - DNA, 110 bp, synthetic construct
  source 1..110: mol_type = other DNA
taaacttctcaagctgaacttgagtcccattcccaccctaaacctgttcctcccccagcattccccagcaagtggtactgccgtatgtccagttgcttaggccaaagcta

SEQ ID NO: 51597 - DNA, 110 bp, synthetic construct
  source 1..110: mol_type = other DNA
cagcattccccagcaagtggtactgccgtatgtccagttgcttaggccaaagctaagatgatatccttgattcctttttttctctcaccttctacttccaaagcattatt

SEQ ID NO: 51598 - DNA, 110 bp, synthetic construct
  source 1..110: mol_type = other DNA
atgggctacttgagttctggaggggaaggagaaagtgtgcgaaggataaacaggtaaggccagggattcatgtgaggttatttcttttgcaggcaccggatgcgtgggga

SEQ ID NO: 51599 - DNA, 110 bp, synthetic construct
  source 1..110: mol_type = other DNA
aggaaggttgagaggctgtacagcatgtccactaagagcacagattacagaaccagaatttctgttttcgaatttgagctcagcatgacctcaagcgaattccttcactc

SEQ ID NO: 51600 - DNA, 110 bp, synthetic construct
  source 1..110: mol_type = other DNA
taaaccccagacacgttgtgcttaagaaggaaagctacaagtggagagaaggaaggagaaaaagacaaccggcttctagcccatgtggagtgtcttgagatgaaaaagaa

SEQ ID NO: 51601 - DNA, 110 bp, synthetic construct
  source 1..110: mol_type = other DNA
tccaacctagggcccccatctcctaactccactgtgacccagggttttgaggattgggaaagccagctgggatgctccaagaagagccaggaggacgaagaactctggga

SEQ ID NO: 51602 - DNA, 110 bp, synthetic construct
  source 1..110: mol_type = other DNA
gggaaagccagctgggatgctccaagaagagccaggaggacgaagaactctgggaggaaattgattaatgcctgggtaccgaaggatattcccccagctgatacctgggt

SEQ ID NO: 51603 - DNA, 110 bp, synthetic construct
  source 1..110: mol_type = other DNA
attcctcagtttagaatcatcaaggcaatacattagtctttgctttaatggctctgaattttggtttataggtagaaaggtccccattcccaagttataaaggaattcac

SEQ ID NO: 51604 - DNA, 110 bp, synthetic construct
  source 1..110: mol_type = other DNA
gaattttggtttataggtagaaaggtccccattcccaagttataaaggaattcacccatattttctttttcgtctttggccaccccacagtatatagagcccccgggcca

SEQ ID NO: 51605 - DNA, 110 bp, synthetic construct
  source 1..110: mol_type = other DNA
aaaagagaagcagagctttgtgtggggccaagagaaaaggcagagctagtgaccgtgagggggtggggtgtgcaggaacccgggtcctcctattgattccatggcttctg

SEQ ID NO: 51606 - DNA, 110 bp, synthetic construct
  source 1..110: mol_type = other DNA
tggctccactgctaggtctggaaattaagctgaaaagacccagcctggatgcttgcataacccaaagcggggattggcacagacgctctggaatatgttcccgtctgtcg

SEQ ID NO: 51607 - DNA, 110 bp, synthetic construct
  source 1..110: mol_type = other DNA
acaacagcaacacttagaaatcagggattcagggatgtgtggcctggacaaccaggcactgaccaccaccaagaattggaactggggcttccagactcgctggggtcctt

SEQ ID NO: 51608 - DNA, 110 bp, synthetic construct
  source 1..110: mol_type = other DNA
ggggcctggccttggggagcgttagggatgtggataggactaatgggtcaagacctgccggttacacacaagtgttgggaccccagagaatttcctgtctctgaaaaaag

SEQ ID NO: 51609 - DNA, 110 bp, synthetic construct
  source 1..110: mol_type = other DNA
gtcctggtcaccaggccccctagagcaagaggcatgtgaaggaacagcagagtcaaaacccggcccaacacaaaggtccccactgttcatggacatagaaaactgatgct

SEQ ID NO: 51610 - DNA, 110 bp, synthetic construct
  source 1..110: mol_type = other DNA
aaacccggcccaacacaaaggtccccactgttcatggacatagaaaactgatgctccccagacagggagtccgcctgcttctccacaatggggtgacctgctcccccact

SEQ ID NO: 51611 - DNA, 110 bp, synthetic construct
  source 1..110: mol_type = other DNA
taggcaaacaacaccttcagccatggtcaccgaagctgcagttatccaagtgacagcctagaggagttgagatactgagagtttaggggcatggcaataaagaagggtgg

SEQ ID NO: 51612 - DNA, 110 bp, synthetic construct
  source 1..110: mol_type = other DNA
caggatgtccctttcttccaaggaatcccacctaagacagaaaagctgacctcacaggcccttctctttgcaaaggagtcccttgtggggcagactctctacaaggcagc

SEQ ID NO: 51613 - DNA, 110 bp, synthetic construct
  source 1..110: mol_type = other DNA
aggcccttctctttgcaaaggagtcccttgtggggcagactctctacaaggcagctccctccacccactcaggacagacacctgaatgccagatccaggtccgggggcaa

SEQ ID NO: 51614 - DNA, 110 bp, synthetic construct
  source 1..110: mol_type = other DNA
aagcggtactcgttccagcagtggtagatgccataggccagcacccccagcactcctatgatcagcacgaacaccaggggcccagccaccaggcgcagaagcaggacaaa

SEQ ID NO: 51615 - DNA, 110 bp, synthetic construct
  source 1..110: mol_type = other DNA
gttatctgtgtctgtgtccgtcagggcaaggatgatgtatgtcactgcctcgctcccccgaccccgagcccggtgtctgacacatgacggatgctcaagcaaggtttgct

SEQ ID NO: 51616 - DNA, 110 bp, synthetic construct
  source 1..110: mol_type = other DNA
ccccgaccccgagcccggtgtctgacacatgacggatgctcaagcaaggtttgcttgaacgaatgagcaaaacactcacacagcatcaggatcaccttctgcagctcgcc

SEQ ID NO: 51617 - DNA, 110 bp, synthetic construct
  source 1..110: mol_type = other DNA
gcctgtggccaaacagactattttatagtggccccgtctgacttaaggaccagccacttttgctatgaaatttttagctttatgctgagctccccaaggcactagtaagg

SEQ ID NO: 51618 - DNA, 110 bp, synthetic construct
  source 1..110: mol_type = other DNA
ctgtcccgccaggatgtgccatctctctcccgtctcctgcctccggaggtccaccctcagcctccatgacccagcctcactccttgctctgagtagagtagagccctgcc

SEQ ID NO: 51619 - DNA, 110 bp, synthetic construct
  source 1..110: mol_type = other DNA
atgctaccgccccagagctaggtggcttctttggcatcctgccagtcctggacctgttgctcccggcccccgaacccccaggtcaagccaggtactcagacaaggtcccc

SEQ ID NO: 51620 - DNA, 110 bp, synthetic construct
  source 1..110: mol_type = other DNA
gttgctcccggcccccgaacccccaggtcaagccaggtactcagacaaggtccccctctcctccccaggagagcatggtggccggccagtggagggacatgctggactac

SEQ ID NO: 51621 - DNA, 110 bp, synthetic construct
  source 1..110: mol_type = other DNA
atccctcccctgccttcttagagggcatagtcccagctgcccctctcaaatccagatcaccccccaggacccggcccctaagctccagttctcactggtggtgatggtct

SEQ ID NO: 51622 - DNA, 110 bp, synthetic construct
  source 1..110: mol_type = other DNA
tctctccgatgacagttctcttcccttcccttcactggccctgcttctcccttaccaacacttacatccacctcgggtgggcaggagttcccaggcataggagccggaac

SEQ ID NO: 51623 - DNA, 110 bp, synthetic construct
  source 1..110: mol_type = other DNA
gctggcggcttcttattgggtttggccactagggggagacctgctgtaaggagcgagaggatggggtgtttcacattccctcattccctccccttcagagtctgggctcc

SEQ ID NO: 51624 - DNA, 110 bp, synthetic construct
  source 1..110: mol_type = other DNA
acctgtaaagttccctttgacacaacatatgcacatgttctgtggtttggaacacggacatctttaggggcctccacagggaggttctcctggaagcttacaatctttct

SEQ ID NO: 51625 - DNA, 110 bp, synthetic construct
  source 1..110: mol_type = other DNA
ggacatctttaggggcctccacagggaggttctcctggaagcttacaatctttctgggcaattataaggggatgcagatgaccagattgaatatttggggttctccctta

SEQ ID NO: 51626 - DNA, 110 bp, synthetic construct
  source 1..110: mol_type = other DNA
aacccctttccccatatctgggtttctctcaatgaggtaacttttggagatcacctaaggatgagggctggttgctggaggaaccaaccttgaatagaaggttggaactt

SEQ ID NO: 51627 - DNA, 110 bp, synthetic construct
  source 1..110: mol_type = other DNA
ctaagaagaatgagccagtgaatgggatttcataaaccattgtggagaacaaggagagcaataaaactcccttttatttagtggctaggaactataagactctgtagtgg

SEQ ID NO: 51628 - DNA, 110 bp, synthetic construct
  source 1..110: mol_type = other DNA
gagcaataaaactcccttttatttagtggctaggaactataagactctgtagtggatactgtcttaagtacaaactcatttaatctcagtaaccttctcagtgcagtcct

SEQ ID NO: 51629 - DNA, 110 bp, synthetic construct
  source 1..110: mol_type = other DNA
gaaaaaatagatttctaaagctaattaggcatccaatggagggggaatgaattatttttcaaacaaagaaatgtagagacttgtcactagaagagcaccactatgagata

SEQ ID NO: 51630 - DNA, 110 bp, synthetic construct; identical to SEQ ID NO: 51629
  source 1..110: mol_type = other DNA

SEQ ID NO: 51631 - DNA, 110 bp, synthetic construct
  source 1..110: mol_type = other DNA
aagtgtcccccaagaagctctctctctattacctccttgagcagcgagtcggcacccctgctgcctctgcaggagcttcttatgggtgtgtccaccaagaaagctgtcct

SEQ ID NO: 51632 - DNA, 110 bp, synthetic construct
  source 1..110: mol_type = other DNA
aacaccgtgtgtgctctgggcctgattgtggctctggtgggcatcatcgtcggaaccgtcctcatcatcaagggtgtgcgcaaaggcaacgccactgaacgccgagggcc

SEQ ID NO: 51633 - DNA, 110 bp, synthetic construct
  source 1..110: mol_type = other DNA
agtgattttaatccccaatctgagattctgagattgagagctttgagaatgggggaagatggctgccccagaagaactagaaaagttggtgttttttggaaaagagactt

SEQ ID NO: 51634 - DNA, 110 bp, synthetic construct
  source 1..110: mol_type = other DNA
tcttacagaatttagaaatggtttttgtactccaaacaatggtagaacaaatattcagcttggggggttcctgttctgactcagcaggttacgaacctgactagtatcca

SEQ ID NO: 51635 - DNA, 110 bp, synthetic construct; identical to SEQ ID NO: 51634
  source 1..110: mol_type = other DNA

SEQ ID NO: 51636 - DNA, 110 bp, synthetic construct
  source 1..110: mol_type = other DNA
tggtgataagacaattttgtgggattgtccctctttcacatatttccaaagctaatatcctcaaagtcagaaaaatattcttgatgcctagccctcatatccttttacta

SEQ ID NO: 51637 - DNA, 110 bp, synthetic construct
  source 1..110: mol_type = other DNA
tatcctcaaagtcagaaaaatattcttgatgcctagccctcatatccttttactaccatgaagttgaccattcaccagtattcagcaaattttaactgagaacccacata

SEQ ID NO: 51638 - DNA, 110 bp, synthetic construct
  source 1..110: mol_type = other DNA
acagcgacaggtaacttggcagcagtggcaatggggcctgagaccctattcttacagctattgaggcacccatgacttcagccccctgctgtcctccccctggagtggca

SEQ ID NO: 51639 - DNA, 110 bp, synthetic construct
  source 1..110: mol_type = other DNA
agctattgaggcacccatgacttcagccccctgctgtcctccccctggagtggcagagcctgctaacccgataaagtagaagtgtctgcaaaacccagtggcccagaact

SEQ ID NO: 51640 - DNA, 110 bp, synthetic construct
  source 1..110: mol_type = other DNA
aagtaactgagatttcagtaatgtatgaataccatagtatttcacatctgcacacaatataatccttcagtaaccatagaatgagttgttgaaaggacccaagaggtgat

SEQ ID NO: 51641 - DNA, 110 bp, synthetic construct
  source 1..110: mol_type = other DNA
agaaaccaaatagaggagggggacggcctgcggagaccccacgggggcaccgcagatggggggaggggaggctagctcctccggaggtgtgtctgcctgtaaccccctcg

SEQ ID NO: 51642 - DNA, 110 bp, synthetic construct
  source 1..110: mol_type = other DNA
atggggggaggggaggctagctcctccggaggtgtgtctgcctgtaaccccctcggaccctctcctagcaccagccttgatgtcaaagcccagaacagcagcacctcaga

SEQ ID NO: 51643 - DNA, 110 bp, synthetic construct
  source 1..110: mol_type = other DNA
cgccactgcatcctggatctctcgaagcactgcctgggaaaacggggcagaggatggaaggggtgactttggcaggagagaacagacccccatgtctcattccaggcctt

SEQ ID NO: 51644 - DNA, 110 bp, synthetic construct
  source 1..110: mol_type = other DNA
ggaaggggtgactttggcaggagagaacagacccccatgtctcattccaggccttaggatgctccctcaatctacctggaaatactaaaccctcttctttcctgtttcct

SEQ ID NO: 51645 - DNA, 110 bp, synthetic construct
  source 1..110: mol_type = other DNA
aagtttgtcttcatccatgtgcatccatgcaaatgttggcatttaggtctagacctcatttcacttctctgtaaaatgagtcagctagactctctaatctcaaaatttcc

SEQ ID NO: 51646 - DNA, 110 bp, synthetic construct
  source 1..110: mol_type = other DNA
ccaaggttgggtactggagtctctgagagtctcaatgaagggactatacggtactagcagagaagcttgtctatcccatttcctctacatgtgagactaagtatggcaca

SEQ ID NO: 51647 - DNA, 110 bp, synthetic construct
  source 1..110: mol_type = other DNA
agcagagaagcttgtctatcccatttcctctacatgtgagactaagtatggcacagaagtggctcaaaattcttgcatgtttaaacaggacgatttacccaggagaagac

SEQ ID NO: 51648 - DNA, 110 bp, synthetic construct
  source 1..110: mol_type = other DNA
aatcccctcctccagatcccagcatccctgacaccctgggagagctcaccaagacccggcaaaatgcatacagtacaaacactgtttaaaattttactgcagctagcagg

SEQ ID NO: 51649 - DNA, 110 bp, synthetic construct
  source 1..110: mol_type = other DNA
ccggcaaaatgcatacagtacaaacactgtttaaaattttactgcagctagcaggggactttggatggagcaagagtgcatattggaggtggggaggggagctagttggt

SEQ ID NO: 51650 - DNA, 110 bp, synthetic construct
  source 1..110: mol_type = other DNA
actctctgggcctatgtgagtcccccgggatggggcagaggggggcgagttctggattgttgggaagtcccacacctcttgacccctgactttccctcactaggcactag

SEQ ID NO: 51651 - DNA, 110 bp, synthetic construct
  source 1..110: mol_type = other DNA
attgttgggaagtcccacacctcttgacccctgactttccctcactaggcactaggggccacagtgctcatctctgcagctccatttttcgtcctcttccttatcccggt

SEQ ID NO: 51652 - DNA, 110 bp, synthetic construct
  source 1..110: mol_type = other DNA
taagagtgggatgttttggtccagtaaccatctgccatttttttctttttctcttgaaatgatttggttacatatgctcaaaaacaaaaaaacaaaccaaaacaaacaaa

SEQ ID NO: 51653 - DNA, 110 bp, synthetic construct
  source 1..110: mol_type = other DNA
cataaattcattaggattccatgatcacaaactgagtgtcctgtatgatttgaataagaaggaaggagactacatagcttctaacttctgctccatcataagacatttaa

SEQ ID NO: 51654 - DNA, 110 bp, synthetic construct
  source 1..110: mol_type = other DNA
tatatgcttgtcttaagtctgcggtatctcaaactgagttctagattggatgtaaaaaagtgtctgtaacccttctttggtaaatgctgtgattaaaattgtgaaggaga

SEQ ID NO: 51655 - DNA, 110 bp, synthetic construct
  source 1..110: mol_type = other DNA
aaacctgagataattgggcacaacgtttctttgggtatagctgccatcagtgaaatccttgggatgctggtaaatccttccaagagccttttctatctccctctcctctc

SEQ ID NO: 51656 - DNA, 110 bp, synthetic construct
  source 1..110: mol_type = other DNA
tttctcttatgtcctgaacgtgttctcaaaactttccttctgtgtccccgagggtccaagtctctgttaaacaggccagtgttgggaaactgaagctgattctttatttc

SEQ ID NO: 51657 - DNA, 110 bp, synthetic construct
  source 1..110: mol_type = other DNA
ccaagtctctgttaaacaggccagtgttgggaaactgaagctgattctttatttccttcagatgaaccaccctgatccttgagaaataaaggcgacttaaagagacagaa

SEQ ID NO: 51658 - DNA, 110 bp, synthetic construct
  source 1..110: mol_type = other DNA
tctcctttgccattcaagatgtttccattcctaaacatcttttaagtaatgactgacaggtcctgtgcggaattctggggaccgcaggatggatggttcgaggctctcaa

SEQ ID NO: 51659 - DNA, 110 bp, synthetic construct
  source 1..110: mol_type = other DNA
acaggtcctgtgcggaattctggggaccgcaggatggatggttcgaggctctcaaagagcttgtggttccacagaggagacaggacagtagacaattacataaaggcaca

SEQ ID NO: 51660 - DNA, 110 bp, synthetic construct
  source 1..110: mol_type = other DNA
aaatgcgaggcaagtaaaaatagtccgctagccttttgtttgttttaaatgcaccttataatcgccttcatcttggctcaaatcttgttgaacatttacagcttcttacc

SEQ ID NO: 51661 - DNA, 110 bp, synthetic construct
  source 1..110: mol_type = other DNA
cagggctccctccgcatgggatagcccttagacagccaagctcacagtcctggtaggttatctgcaaggtcaggcaaattttgatgagatttgggaaggagcagcagttt

SEQ ID NO: 51662 - DNA, 110 bp, synthetic construct
  source 1..110: mol_type = other DNA
cattatcttgaaattccaataatctccaagaatttggatgagatgaggacactaaacaatgctcaaaccatattttagccattgctgttgtctggagaacacattggaag

SEQ ID NO: 51663 - DNA, 110 bp, synthetic construct
  source 1..110: mol_type = other DNA
agaaaaacaaaacgtagaacaagcagaacaaatgaaaaatagctaacaaaatggcagatcttcatccaaccatatcagttggtatcttagttccaactggctatgctgat

SEQ ID NO: 51664 - DNA, 110 bp, synthetic construct
  source 1..110: mol_type = other DNA
ataaatcacaccatcacagtatctcaaaacaatgttgagtctcctccagtgtgggaaagggtatgctttcattgatgattcgagtaagaaaacatggtagactttggcca

SEQ ID NO: 51665 - DNA, 110 bp, synthetic construct
  source 1..110: mol_type = other DNA
cagagttagtgactgctgcttcttttagtagccaaaagaaaaccaatggatatattttggtcacttttagccaccaatttgaaggtgagactaaaataattcgatttggc

SEQ ID NO: 51666 - DNA, 110 bp, synthetic construct
  source 1..110: mol_type = other DNA
ttaaaatgctttaagggatatttccccatactagtatttgaatatgccacagtgatccagctactttcacttctatgtaaaacaggaaagagaatatatcctaaatgaat

SEQ ID NO: 51667 - DNA, 110 bp, synthetic construct
  source 1..110: mol_type = other DNA
ggatatttccccatactagtatttgaatatgccacagtgatccagctactttcacttctatgtaaaacaggaaagagaatatatcctaaatgaatttcatggatattaaa

SEQ ID NO: 51668 - DNA, 110 bp, synthetic construct
  source 1..110: mol_type = other DNA
tgtttgtattttcccaactgttacaaggctctttttcatttagacctgggatttttctttctcttactctacttggtttttatagctttcctcccaacacaaacactgcc

SEQ ID NO: 51669 - DNA, 110 bp, synthetic construct
  source 1..110: mol_type = other DNA
tctttctcttactctacttggtttttatagctttcctcccaacacaaacactgcccagaacttactttgcaacaaataaatattcatgaaattgacttgttcatcagtgt

SEQ ID NO: 51670 - DNA, 110 bp, synthetic construct
  source 1..110: mol_type = other DNA
ccaatgggccataagaaccacccaaaagtagctatactaaaactttgtcatcacaaatatgtttaggttgtgtcatttcgctttctttactctgcttttgattcctgtgt

SEQ ID NO: 51671 - DNA, 110 bp, synthetic construct
  source 1..110: mol_type = other DNA
aaaatatttgaactatgtcccaggctttctaaagtacatacctatttctgccattttaaaatcttttgtatcttcaactgctgtatattatggctcaagtttcatagaaa

SEQ ID NO: 51672 - DNA, 110 bp, synthetic construct
  source 1..110: mol_type = other DNA
gtgggtgccacttttattaactgtcagcacatgaccatctcactccctcaaacaactatcaccaagaaatacttaatttgccatatacttgactgttattctgttcattt

SEQ ID NO: 51673 - DNA, 110 bp, synthetic construct; identical to SEQ ID NO: 51672
  source 1..110: mol_type = other DNA

SEQ ID NO: 51674 - DNA, 110 bp, synthetic construct
  source 1..110: mol_type = other DNA
cttgccagggtcatgttcagtcttattttctatgacgcaagatgcgcctcatggggaggtgtcatctacaaaaatactttctatattgcaatattcagcttaatgatatt

SEQ ID NO: 51675 - DNA, 110 bp, synthetic construct
  source 1..110: mol_type = other DNA
gaggtgtcatctacaaaaatactttctatattgcaatattcagcttaatgatattgttcaatagtatgggtcccaccatacctcttttcttactgtcatttccagtgtag

SEQ ID NO: 51676 - DNA, 110 bp, synthetic construct
  source 1..110: mol_type = other DNA
gaatgacttttcctcttcactgcatgcctcactgcatattccatgcatcccgctctcctggccgtgttcctttgccatcttgaatgtgatgcatgtacagctccttttgt

SEQ ID NO: 51677 - DNA, 110 bp, synthetic construct
  source 1..110: mol_type = other DNA
agaactgagatccttacaagaagctgcaaagcttaagaaggaccttctgaacaggtgcagagcttggttcagagaataagcacagggccaaagtaagaacaaagaaaatt

SEQ ID NO: 51678 - DNA, 110 bp, synthetic construct
  source 1..110: mol_type = other DNA
caggctttagtgtatcagtcatctgtctgacacacagcgggtttaaaaaatcttaatttacatacattctcttcttacatacttcaataaagacctgagggcataccatt

SEQ ID NO: 51679 - DNA, 110 bp, synthetic construct
  source 1..110: mol_type = other DNA
atgtctttctttaaatgtcatgaaccaacctctgataccttcaggcttgccttcggcagcttccttgactttctcagcctccatagacttgaggagagttagggtcttgt

SEQ ID NO: 51680 - DNA, 110 bp, synthetic construct
  source 1..110: mol_type = other DNA
tgttgtgcccttgaataaagcaggtcctaggaaacaactaaagtgacattggctcaagggattcctatataaattttagtaagtattttggaaaaatatttatcaaatat

SEQ ID NO: 51681 - DNA, 110 bp, synthetic construct
  source 1..110: mol_type = other DNA
ttatctgcatctccatggggtaaaaatcttgcagctaactgataacttcactaactcttgggcctttaaccattagaaaactgtaaattgaactaaacatatttctgtct

SEQ ID NO: 51682 - DNA, 110 bp, synthetic construct
  source 1..110: mol_type = other DNA
tcttgggcctttaaccattagaaaactgtaaattgaactaaacatatttctgtcttatggtggtgagagaagaggaatagaataaattctgtaaagaaaagaaatgcatt

SEQ ID NO: 51683 - DNA, 110 bp, synthetic construct; identical to SEQ ID NO: 51681
  source 1..110: mol_type = other DNA

SEQ ID NO: 51684 - DNA, 110 bp, synthetic construct; identical to SEQ ID NO: 51682
  source 1..110: mol_type = other DNA

SEQ ID NO: 51685 - DNA, 110 bp, synthetic construct
  source 1..110: mol_type = other DNA
tgtcactcttatctgtagatgtatgtggaacatacaagaagtaataaatactaattatccactaaactttttcatggagattacccatagttccttagctcccaggtatt

SEQ ID NO: 51686 - DNA, 110 bp, synthetic construct
  source 1..110: mol_type = other DNA
tatccactaaactttttcatggagattacccatagttccttagctcccaggtatttcctcagcaaaaagttctgaaacaagcttaattgtaaaattttaaagttaaaggt

SEQ ID NO: 51687 - DNA, 110 bp, synthetic construct
  source 1..110: mol_type = other DNA
agactctattaacctgggtacattttgggtttttcctgatagtatcgtctcttctggagcttccactgtggcgtggtggaaacgaatctgactagtatccatgagaatgc

SEQ ID NO: 51688 - DNA, 110 bp, synthetic construct; identical to SEQ ID NO: 51687
  source 1..110: mol_type = other DNA

SEQ ID NO: 51689 - DNA, 110 bp, synthetic construct
  source 1..110: mol_type = other DNA
cagcatcactggcacccactatacattatacaattattatgcaagccagatgccatttgcctccaaacttcgtgtggagctaaacatcagttttttgggaaagagtcgtc

SEQ ID NO: 51690 - DNA, 110 bp, synthetic construct
  source 1..110: mol_type = other DNA
ttacatgtatatgctgaagcgagcacagaagacatgtatcttaaagacttcatttgcaaagacaaatgcctcttttggggatttcattctatttctgagcccacagcatc

SEQ ID NO: 51691 - DNA, 110 bp, synthetic construct; identical to SEQ ID NO: 51690
  source 1..110: mol_type = other DNA

SEQ ID NO: 51692 - DNA, 110 bp, synthetic construct
  source 1..110: mol_type = other DNA
gaataagcctcagcctccacgaccttacctgagttgcaaagagcagctgctaatcagggaagggagggacacggagaccagggaggagccgtgcagccttggggcagggt

SEQ ID NO: 51693 - DNA, 110 bp, synthetic construct
  source 1..110: mol_type = other DNA
agggaagggagggacacggagaccagggaggagccgtgcagccttggggcagggtcctagcttctcctcaaggaacatacataatgtctttgagcctttctatagaacta

SEQ ID NO: 51694 - DNA, 110 bp, synthetic construct
  source 1..110: mol_type = other DNA
cctctcccataagaactttcattaggctcaatacaaagcaataccattgtacacattggtgatggaacttgaaattgagctaataattcttcatgtttaatgactagcta

SEQ ID NO: 51695 - DNA, 110 bp, synthetic construct
  source 1..110: mol_type = other DNA
ttagtgccccattgcagtcagatcacagttcccaggttgtagtttaccattagaaaataataaatcaatggccttgagattgagtatcggaggcaaaaaaaaacagaaag

SEQ ID NO: 51696 - DNA, 110 bp, synthetic construct
  source 1..110: mol_type = other DNA
tacaactgattaattctcaagaatgggcaaaccttttctgaaaagggctagagagtaaatattttaggctttttggaccctatcatctctggcacaacaactcagctctg

SEQ ID NO: 51697 - DNA, 110 bp, synthetic construct
  source 1..110: mol_type = other DNA
taaatattttaggctttttggaccctatcatctctggcacaacaactcagctctgccatagtaaggtaaaagcagtcacagaaaacgtacctatcacaggcgttccattc

SEQ ID NO: 51698 - DNA, 110 bp, synthetic construct
  source 1..110: mol_type = other DNA
atgctcttgattgagatttatccatctgtttcttaaagcatttgcttgcaaactttatagctgctgtgccaaggtcagctagtgctctaagtttatgctgctgtttgtcc

SEQ ID NO: 51699 - DNA, 110 bp, synthetic construct
  source 1..110: mol_type = other DNA
caatagtggaattttatgggagcttccaaaacctctctaggaaggaaaaaaaaagcatactatgcctgcagaaggaaactcagttacggctagtttaatgcccaaaagtg

SEQ ID NO: 51700 - DNA, 110 bp, synthetic construct
  source 1..110: mol_type = other DNA
tctgattctgtgtataagtggagacaaaactccaataaccccactgcagatggtagaatgcaaggtaaacctctctatgttatactatcagactaagctctggtggtgca

SEQ ID NO: 51701 - DNA, 110 bp, synthetic construct
  source 1..110: mol_type = other DNA
gaatgcaaggtaaacctctctatgttatactatcagactaagctctggtggtgcagcaggttaaggacccagtgttgtcactgctgtggttcggattccatccctggccc

SEQ ID NO: 51702 - DNA, 110 bp, synthetic construct
  source 1..110: mol_type = other DNA
gtccccaggtctacggcgcacaaattgtcagacagagctgctgtttagggacacgtgccccatgttttcagtgaaattactgggagcagcagttcctaacaatattcaat

SEQ ID NO: 51703 - DNA, 110 bp, synthetic construct
  source 1..110: mol_type = other DNA
gcccctggcccagggcagccagttcttttaaggggtccagtgacctggagctgtggctcagggttggcttaaaaagatgggtgggggcaaccagccctcatttagaaact

SEQ ID NO: 51704 - DNA, 110 bp, synthetic construct
  source 1..110: mol_type = other DNA
gctcagggttggcttaaaaagatgggtgggggcaaccagccctcatttagaaactgcaaccagaagcccacaagagcatggagggggaccacagcaaaccccgtttggac

SEQ ID NO: 51705 - DNA, 110 bp, synthetic construct
  source 1..110: mol_type = other DNA
atcaggtggcttctggtacagacaacacggcctctgcgtgtctgaccttgaggaaggaccttagggatactggctctggaactagcctgcctaagtctgacctcaagctc

SEQ ID NO: 51706 - DNA, 110 bp, synthetic construct
  source 1..110: mol_type = other DNA
ggaccttagggatactggctctggaactagcctgcctaagtctgacctcaagctctgctgctcactagctgtgtgatttcagccagttaattccctctctgtgtcctggg

SEQ ID NO: 51707 - DNA, 110 bp, synthetic construct
  source 1..110: mol_type = other DNA
gcagcctctacaggggacagagagggtccctgcccaagagcttgtcactgctgggaatgagggccccctagttaaaggcagtgcacctccatgcccactggtgatcagct

SEQ ID NO: 51708 - DNA, 110 bp, synthetic construct
  source 1..110: mol_type = other DNA
aggtgggaaaagacaaatatttttttgccagagtcttgtctgtgtaaacaattcgagtcactcagaatcagcgtgtcagccctatgcagctgagggaggaaatacggagc

SEQ ID NO: 51709 - DNA, 110 bp, synthetic construct
  source 1..110: mol_type = other DNA
agtcactcagaatcagcgtgtcagccctatgcagctgagggaggaaatacggagctgggcagcgggatgatccactcgccaagcctctggactggagcccagcctcaggg

SEQ ID NO: 51710 - DNA, 110 bp, synthetic construct
  source 1..110: mol_type = other DNA
ctgcttgtcccatttgtttgcagagtcattaacagcttctcttgtaggcagattccacctctggccttaaagatggaacctgcattactattccctgtgacccatccctg

SEQ ID NO: 51711 - DNA, 110 bp, synthetic construct
  source 1..110: mol_type = other DNA
cacctctggccttaaagatggaacctgcattactattccctgtgacccatccctgagcccgtccttctcagtgaagacaagtgggttgacactgctgtgacccagctgtc

SEQ ID NO: 51712 - DNA, 110 bp, synthetic construct
  source 1..110: mol_type = other DNA
tctttgttcagcctgtgtaacttggcttttgcacaaatttcctggcttgtgtgccattttcctatccaggacaaacattcccctgagacccacccatttttattagggct

SEQ ID NO: 51713 - DNA, 110 bp, synthetic construct
  source 1..110: mol_type = other DNA
attttcctatccaggacaaacattcccctgagacccacccatttttattagggctcaaacacgctcccagttacgtctagccccctccgtatgctgagaaccacagtcca

SEQ ID NO: 51714 - DNA, 110 bp, synthetic construct
  source 1..110: mol_type = other DNA
ctttccatttgcccctgaggtaggcctcaccctcattttaaagaaaagacaaaaacagaagttactaagactcaaactaggctccagccccaaagaggctagaggtggaa

SEQ ID NO: 51715 - DNA, 110 bp, synthetic construct
  source 1..110: mol_type = other DNA
agtttttaaagtagtcttttattaaagtatatggtattctatcagtgcactttccaccttgtaacagctctgcatcctcatcaatactcgttgggtttgtaacctgctga

SEQ ID NO: 51716 - DNA, 110 bp, synthetic construct
  source 1..110: mol_type = other DNA
accttgtaacagctctgcatcctcatcaatactcgttgggtttgtaacctgctgagcctcaacgggaactccccttgggaggaattcttcagacattatggaaaacatct

SEQ ID NO: 51717 - DNA, 110 bp, synthetic construct
  source 1..110: mol_type = other DNA
tttggactgctctcctagctcagatatttcttccatattctctcaaggaaaccttggggcagcatgatttaagagtgtgtgtgaagggatctcttcattcaagcaagagt

SEQ ID NO: 51718 - DNA, 110 bp, synthetic construct
  source 1..110: mol_type = other DNA
gtgcttaagggctattgcattaatttttatgtgctactttttgactctgaattatttgatgaataaactctaggaagctatttgagaacaaagtgtaagggaacctcaac

SEQ ID NO: 51719 - DNA, 110 bp, synthetic construct
  source 1..110: mol_type = other DNA
gtttcaaaatacaagtagtgttattgataaagttaagacttaaaatttttttttctcaaaagaaaggccatcttatgtgacatggaaatggaccaattaggagaaggaac

SEQ ID NO: 51720 - DNA, 110 bp, synthetic construct
  source 1..110: mol_type = other DNA
gactggatcttccaaacgtgacccacacttgcaccttcctgggaatggtatgaagcatttacaacagttaccattgaaaagcacagctgatgtggtggcatttattatac

SEQ ID NO: 51721 - DNA, 110 bp, synthetic construct
  source 1..110: mol_type = other DNA
tttctatgactatttcatgatgtccctttttgtatgtcaccaacttaattatagctgaaaaattgccacaaataagcaattaccactcatgataaggaatgggaacacat

SEQ ID NO: 51722 - DNA, 110 bp, synthetic construct
  source 1..110: mol_type = other DNA
tgaaaaattgccacaaataagcaattaccactcatgataaggaatgggaacacattgctaaaaaacaaaatcaaggctgacataacagtgattttcttctggagccggat

SEQ ID NO: 51723 - DNA, 110 bp, synthetic construct
  source 1..110: mol_type = other DNA
gttcactatgatccaaatagatttacaaagtggttcctggaaatatttctttctcattggtatcatttgcaactaattgttcaaatgatgttttttgctagcttccccag

SEQ ID NO: 51724 - DNA, 110 bp, synthetic construct
  source 1..110: mol_type = other DNA
ggtttttaaacaggaaaggcctcgtgaagttccttgtgagctaagacaagggggtgaatggagagctctgggggcagagctttatggaagtgggaggggcaaaggcaggt

SEQ ID NO: 51725 - DNA, 110 bp, synthetic construct
  source 1..110: mol_type = other DNA
aaatttggacagcaaaaagctgcctttcgaggacatgtaccagagctttcacatatcatctttgctgacatcactttggcaagagtatagtcacatggtagccctggagg

SEQ ID NO: 51726 - DNA, 110 bp, synthetic construct
  source 1..110: mol_type = other DNA
ttaccacccacatttccaggagcacaaaacactaaaggtttctccaaagctcactgatgcagcaagaggcagagcaaaggtttcaaaccaggagcaggccaggaggggag

SEQ ID NO: 51727 - DNA, 110 bp, synthetic construct
  source 1..110: mol_type = other DNA
gatgcagcaagaggcagagcaaaggtttcaaaccaggagcaggccaggaggggagcagcccccaggaggagcccggcccctctctggcggctccaaacccaggttacagg

SEQ ID NO: 51728 - DNA, 110 bp, synthetic construct
  source 1..110: mol_type = other DNA
ctaggaagaaagcatacagaacacctttgcaaatttaagctgggaagggtgacgtaacaaatgttgatcaaaggtacggaactactggaacaatcactgttggcagtttt

SEQ ID NO: 51729 - DNA, 110 bp, synthetic construct
  source 1..110: mol_type = other DNA
gggagaggctctctcctgggctggccagcttgcctacaccactatcctgccccttcccactggaatgaatctgagtacctgactgccacctggcccacctcccatcacag

SEQ ID NO: 51730 - DNA, 110 bp, synthetic construct
  source 1..110: mol_type = other DNA
acaacaaggctcagcactaagaataaggaggtaaaacagagtcttcagcttcaggaagcccgtggatcttgcagaccagaaactgtttatgaatacagattagagtgcaa

SEQ ID NO: 51731 - DNA, 110 bp, synthetic construct
  source 1..110: mol_type = other DNA
ccctgtaaaagtagaggtgtaatcttttaatatactatttatttggcccatgtggaattttttcaaaaaatcttactaagatggaatttctcacccagataatgcctgaa

SEQ ID NO: 51732 - DNA, 110 bp, synthetic construct; identical to SEQ ID NO: 51731
  source 1..110: mol_type = other DNA

SEQ ID NO: 51733 - DNA, 110 bp, synthetic construct
  source 1..110: mol_type = other DNA
tacatcattttactaaaaagaaaacaacacatttaaaatcagcagttcaagccgcattgttaaaagacctttttcggagcctatgcttacagtgataactatctaaatca

SEQ ID NO: 51734 - DNA, 110 bp, synthetic construct
  source 1..110: mol_type = other DNA
atactgatcagatattgtgcccattatccagatgggcttatcctggtcatgcttattcttatttaattagttaatgaaatagtagctcattcttgtataattaatgaaat

SEQ ID NO: 51735 - DNA, 110 bp, synthetic construct
  source 1..110: mol_type = other DNA
acagactgaaatgccgtgtgtgtttataaggggtccctaaagaaaagaggccaacagtcctgccctttccccacactgctgcctgtactggctggagctctggccatggt

SEQ ID NO: 51736 - DNA, 110 bp, synthetic construct
  source 1..110: mol_type = other DNA
agtcctgccctttccccacactgctgcctgtactggctggagctctggccatggtcctggaccacgagctgcaggatcacaggtacatcacagctgtggcaggaaggaat

SEQ ID NO: 51737 - DNA, 110 bp, synthetic construct
  source 1..110: mol_type = other DNA
cacacccagcctttaaccagttgttggctggagaatcaaagggctttactgcagtgggctaggactctcagcagcttctcttcctgtatttggagggtgaacagcccaga

SEQ ID NO: 51738 - DNA, 110 bp, synthetic construct
  source 1..110: mol_type = other DNA
gccgtagcctcctgaggggttgccaagtgaagggatggcacaggccagaaaagtagggcatgtccttggccggtcagaaatgggcagcaaaggaaaacacgcagacatat

SEQ ID NO: 51739 - DNA, 110 bp, synthetic construct
  source 1..110: mol_type = other DNA
atacataagctttgagtaatggatactttaaacagcaactaataaaagatcctttgagtaattcagtcctatcagaccaaagtagaaatacaacataacttgtagtgggt

SEQ ID NO: 51740 - DNA, 110 bp, synthetic construct
  source 1..110: mol_type = other DNA
agccattgaatttggggctatcttgttacgtagaatagataactaaaacacaaatttacaacctacaaaataactaaactgaaagctcacggcaaactatacactctttt

SEQ ID NO: 51741 - DNA, 110 bp, synthetic construct
  source 1..110: mol_type = other DNA
taggacacttgtcaaataacccatttgcgttctgaggcacaactttgacctcacgtacagcaccccaatttttaaaatattttttgtcccaatctgccctcacacccaat

SEQ ID NO: 51742 - DNA, 110 bp, synthetic construct
  source 1..110: mol_type = other DNA
atttcttctagaatgtccacttttctgatatataattattcattataatcttttttttttttcttcttaacatctgtgcctgcagcatatggaagttcctgactcagggg

SEQ ID NO: 51743 - DNA, 110 bp, synthetic construct
  source 1..110: mol_type = other DNA
tttttttcttcttaacatctgtgcctgcagcatatggaagttcctgactcaggggttgaatcagagctgcaaatacaccacagccacagtaaaactggatccaggccaca

SEQ ID NO: 51744 - DNA, 110 bp, synthetic construct
  source 1..110: mol_type = other DNA
agttataatcttttatatatactgcactgtttgattttatcattaaatcagtacggcactgtttttaaacacttgagtctacactctggaaatgtgttcatttgcccatg

SEQ ID NO: 51745 - DNA, 110 bp, synthetic construct; identical to SEQ ID NO: 51744
  source 1..110: mol_type = other DNA

SEQ ID NO: 51746 - DNA, 110 bp, synthetic construct
  source 1..110: mol_type = other DNA
ctctcctggctttctaggcattgggtccaagcacccgagggggtgacccagggaacgtgggagtccagggctctccgggagacgcggatgttgtcttcccttcagactct

SEQ ID NO: 51747 - DNA, 110 bp, synthetic construct
  source 1..110: mol_type = other DNA
cgtgggagtccagggctctccgggagacgcggatgttgtcttcccttcagactcttgggaacagccccgccaagcccacaggcatataggacgcaacagtgtgctggcag

SEQ ID NO: 51748 - DNA, 110 bp, synthetic construct
  source 1..110: mol_type = other DNA
tctcttttgagaactgggccagtctggcagtttcctccatctgggagtggaagtggaattttagattgtacctcttctgattttctgtctgtgcaagcatagcttatttg

SEQ ID NO: 51749 - DNA, 110 bp, synthetic construct
  source 1..110: mol_type = other DNA
gaagaaacgaagactgacaaaaagccaaatatcacaaagtctttcaaagccgtgttcacggtaagaaaaaaacagaaggaacagatggcttcagggttggagctggtgtt

SEQ ID NO: 51750 - DNA, 110 bp, synthetic construct
  source 1..110: mol_type = other DNA
tcacggtaagaaaaaaacagaaggaacagatggcttcagggttggagctggtgttattgtgacaatgacagaaaggaaactgagtccagctcctcctaccatgtttccgc

SEQ ID NO: 51751 - DNA, 110 bp, synthetic construct; identical to SEQ ID NO: 51749
  source 1..110: mol_type = other DNA

SEQ ID NO: 51752 - DNA, 110 bp, synthetic construct; identical to SEQ ID NO: 51750
  source 1..110: mol_type = other DNA

SEQ ID NO: 51753 - DNA, 110 bp, synthetic construct
  source 1..110: mol_type = other DNA
tcgctgccggatcacacaggcctccaagctgctctgcggaaaggctgatgttccgacagtcaaccaggttattgattaaacagtgggtgtggatcatgaagcaaaaccac

SEQ ID NO: 51754 - DNA, 110 bp, synthetic construct
  source 1..110: mol_type = other DNA
tcccatctgcactcactgtccctctgccccctccggcctcttcccaaccttcttctctacatggcagccacagtgacatcttcaaaatcccagttagccgcccctaatta

SEQ ID NO: 51755 - DNA, 110 bp, synthetic construct
  source 1..110: mol_type = other DNA
accccagagcagatacaaattccaaccccttatcactcgagctcactttcaaatttacagctaagatacattctctcaaagggaaaattaagtaatactagtagagttat

SEQ ID NO: 51756 - DNA, 110 bp, synthetic construct
  source 1..110: mol_type = other DNA
tacagctaagatacattctctcaaagggaaaattaagtaatactagtagagttatgttaatctctatctcacctgttttggcaacttgctacaaagtacaatatttcata

SEQ ID NO: 51757 - DNA, 110 bp, synthetic construct
  source 1..110: mol_type = other DNA
aagcatgaggcgtacccagctacaaagagttctagtcgaatcacacaaaccacatcccaagcttctgctcagagctggcctacttcatgtctgcacgtgctccatgggcc

SEQ ID NO: 51758 - DNA, 110 bp, synthetic construct
  source 1..110: mol_type = other DNA
cgtcttccttccaattagacttgcctaccatcaccatccaccagcctgtcctaaccagaaacccgggatcattcggaaccctcctctccttctccccacagtccctcact

SEQ ID NO: 51759 - DNA, 110 bp, synthetic construct
  source 1..110: mol_type = other DNA
cagaaacccgggatcattcggaaccctcctctccttctccccacagtccctcactaagctcttccaattctaccttcttactctcttccctccactcaatccactcttac

SEQ ID NO: 51760 - DNA, 110 bp, synthetic construct
  source 1..110: mol_type = other DNA
ctccagcttctgcctggcaacccggggtcctttgatcccttcagctggagggagtgtcagcagcgtcctgtttttaatggtctccaggatgcccccctgtccctctgtgg

SEQ ID NO: 51761 - DNA, 110 bp, synthetic construct
  source 1..110: mol_type = other DNA
tggaaactgcgaaaattaatttgatgcagaaaacacacttcctgtttctgtaaaaaagctgactgggctgatcttaccccttccactggatatatatagacttgacaagc

SEQ ID NO: 51762 - DNA, 110 bp, synthetic construct
  source 1..110: mol_type = other DNA
ttaaaatggaaaacacgtgaaaatgttgctggtttactaagaagctgggtgcaatgtctgcagcaggtgacggtgaggtgcgtcggtgtcaacctctgtggttttcctca

SEQ ID NO: 51763 - DNA, 110 bp, synthetic construct
  source 1..110: mol_type = other DNA
agtggtaggaatctgccaaaatccaagctcccagacaccagccaagtgccaatcctgcaagcaagtcagtctcaggacacaagcctcacggctgctgtgctaacagttct

SEQ ID NO: 51764 - DNA, 110 bp, synthetic construct
  source 1..110: mol_type = other DNA
aagaggtgaatgtggcaaccagagcaaggaaagatactccaagcagagaaaacgcaaaaagcaagctgacaacgtgtgttccaggtgctgctggagatgccactggcaca

SEQ ID NO: 51765 - DNA, 110 bp, synthetic construct
  source 1..110: mol_type = other DNA
cagagggtggacactccctggcgcttcttctcctggcagaggtgccccataccagctctcaccactgcctccagctctttctcaagctttgagaaccagccccatcactc

SEQ ID NO: 51766 - DNA, 110 bp, synthetic construct
  source 1..110: mol_type = other DNA
tagggaagtgaaaatggcttctgaaatgagaatgttgctttttataaataaagaaccatcattattttccggttttagatcctatgataaactgtttggggacatcatta

SEQ ID NO: 51767 - DNA, 110 bp, synthetic construct
  source 1..110: mol_type = other DNA
tatttgactccataagcctgatgaattgagtgagaagcattgtggttttcagcgtttggtatttcacatgaattaaaaagcaacccagacgcttctgttacctggggctc

SEQ ID NO: 51768 - DNA, 110 bp, synthetic construct
  source 1..110: mol_type = other DNA
agtgttcattttaaaacacaagttattctgagatgtggtggctctcaggctgtatgtatactgtccagaagaaagggtttttttttgttggtttgttttttaataaacgg

SEQ ID NO: 51769 - DNA, 110 bp, synthetic construct
  source 1..110: mol_type = other DNA
gtatactgtccagaagaaagggtttttttttgttggtttgttttttaataaacggagctctcttttctccaacttccactttattcctcaatagttagtttcctggctgg

SEQ ID NO: 51770 - DNA, 110 bp, synthetic construct
  source 1..110: mol_type = other DNA
caaacctaggtgctgttgagtccttgtgcctggtgccttataaaaaactcagttctggagctcctgtcatggctctgcggtaacaaacctgtctagtgttcatgaggatg

SEQ ID NO: 51771 - DNA, 110 bp, synthetic construct
  source 1..110: mol_type = other DNA
tgcttctaggattcaaaggatcatcttcaagtggtggagcttaaacaggctgcgcagcacagatcagcagatatattctgatcatgaggaatttgtacactttgctgaga

SEQ ID NO: 51772 - DNA, 110 bp, synthetic construct
  source 1..110: mol_type = other DNA
ctaacctcagaacagacaaaaatagtaaaccgaatgctacaataaggaaattgtggggccttagctatttaaatcagaccattgttgacgttctgaaggtgactccattc

SEQ ID NO: 51773 - DNA, 110 bp, synthetic construct
  source 1..110: mol_type = other DNA
gggccttagctatttaaatcagaccattgttgacgttctgaaggtgactccattcgtatcatgagagaatcaaaagggtgtccaatgtctaagagatgtcactttcttag

SEQ ID NO: 51774 - DNA, 110 bp, synthetic construct
  source 1..110: mol_type = other DNA
tgctgggcttttgtgggcagatgtctatgctttagggacctttgcagttttgttgtctgcctctgagtttttgtctttggagtgtttggaatagaattctttttgtgaag

SEQ ID NO: 51775 - DNA, 110 bp, synthetic construct
  source 1..110: mol_type = other DNA
ggcagtgagtgaaggacccgatgttgctgcagctgtggtgtatataggtcacagctccggctcgaattcgatccttagcgtgggaccttccatatgctattaggcaggca

SEQ ID NO: 51776 - DNA, 110 bp, synthetic construct
  source 1..110: mol_type = other DNA
tccggctcgaattcgatccttagcgtgggaccttccatatgctattaggcaggcagctgaaacagaaaagaaaaatacacataggaaaagtcaggtttggtgttagtgtg

SEQ ID NO: 51777 - DNA, 110 bp, synthetic construct
  source 1..110: mol_type = other DNA
cagacacgcacgctcttgtctcgttgaatgcacaggagttccagaagtctctgggggccaagcattcggtctacgacaccacacacaggaccgggcgctcgctcaaggag

SEQ ID NO: 51778 - DNA, 110 bp, synthetic construct
  source 1..110: mol_type = other DNA
ggccaagcattcggtctacgacaccacacacaggaccgggcgctcgctcaaggagaagacctcgctggccgacgacaacctgaagctggacgacatgctgagtgagctcc

SEQ ID NO: 51779 - DNA, 110 bp, synthetic construct
  source 1..110: mol_type = other DNA
ccagggcggactgtgctcaggtctcagtgtagcccccttggtgtctgaccactgaggatgcactcagagtagctggagaagggccagcactgcggtgacctgggaagaca

SEQ ID NO: 51780 - DNA, 110 bp, synthetic construct
  source 1..110: mol_type = other DNA
atcatctccatattgacacacctagtgtgcccgccgggggcgtgctggagaaaagggccacaagccaggcgctgcgatcttcatggagcgaggggaagtgaccccgagat

SEQ ID NO: 51781 - DNA, 110 bp, synthetic construct
  source 1..110: mol_type = other DNA
ggccacaagccaggcgctgcgatcttcatggagcgaggggaagtgaccccgagatggtctaacaaaagcggtggctgatggagtgtctgcacttgagcttcggaggaacg

SEQ ID NO: 51782 - DNA, 110 bp, synthetic construct
  source 1..110: mol_type = other DNA
ggagtttgcattcctgtggcaggctggtggttgaagactctgtgctccgaggccagctcttcctggtttgcatgttatcctctagctgtgtcatcttgctcaaagtgtta

SEQ ID NO: 51783 - DNA, 110 bp, synthetic construct
  source 1..110: mol_type = other DNA
gctcttcctggtttgcatgttatcctctagctgtgtcatcttgctcaaagtgttatatttctgggcatcagtgtcttcatccaaaaactggaaataaatcacaactactg

SEQ ID NO: 51784 - DNA, 110 bp, synthetic construct
  source 1..110: mol_type = other DNA
ggaccaagctgaaaattcacccaagtggcagcttcgaggccacccaaagtgccagggctctgctttcattgcaccaattactgtgggttctctctgtacttgagcagaga

SEQ ID NO: 51785 - DNA, 110 bp, synthetic construct
  source 1..110: mol_type = other DNA
ggctctgctttcattgcaccaattactgtgggttctctctgtacttgagcagagaacttagcttcttaaagctttcaagtttccttgctgatgaaccggtggcaacccct

SEQ ID NO: 51786 - DNA, 110 bp, synthetic construct
  source 1..110: mol_type = other DNA
gggtccttgacccccagtagcttttaagactttccctggtctaagaatgacaagatttctctgtctcatgtctcatgtcctccggatctgcaatcagctattttccctga

SEQ ID NO: 51787 - DNA, 110 bp, synthetic construct
  source 1..110: mol_type = other DNA
tttctctgtctcatgtctcatgtcctccggatctgcaatcagctattttccctgaagagccctggtttcttttcatgggaagtggtattgagaaaccacaggtggcatgc

SEQ ID NO: 51788 - DNA, 110 bp, synthetic construct
  source 1..110: mol_type = other DNA
atcagcccaggagggtgtggtgaattgtgctgcagtctcaagagactccctggatcaccctcgaaccagcatcttctctttgtcctgttcctatagcttctcatcactta

SEQ ID NO: 51789 - DNA, 110 bp, synthetic construct
  source 1..110: mol_type = other DNA
caccctcgaaccagcatcttctctttgtcctgttcctatagcttctcatcacttagctctaagcttcccaggggaagaagcatgtgatggactaggtcccttcaaaactc

SEQ ID NO: 51790 - DNA, 110 bp, synthetic construct; identical to SEQ ID NO: 51788
  source 1..110: mol_type = other DNA

SEQ ID NO: 51791 - DNA, 110 bp, synthetic construct; identical to SEQ ID NO: 51789
  source 1..110: mol_type = other DNA

SEQ ID NO: 51792 - DNA, 110 bp, synthetic construct
  source 1..110: mol_type = other DNA
cttcagcattggggtttgcaccggaacgtgccataggtaaatgatgcggtaaaaggggttttagttagagagccgtttaaataccaaactgtgtgtttaaactgagtata

SEQ ID NO: 51793 - DNA, 110 bp, synthetic construct
  source 1..110: mol_type = other DNA
gaagactcttccgttgtgtgcggatgctggttttaagggtttgtaatgaatgatttggccctactaaaaagggacatgttgggattgatgtcgtggctcagtggttaaca

SEQ ID NO: 51794 - DNA, 110 bp, synthetic construct
  source 1..110: mol_type = other DNA
gtgtgcggatgctggttttaagggtttgtaatgaatgatttggccctactaaaaagggacatgttgggattgatgtcgtggctcagtggttaacaaacccaactagcatc

SEQ ID NO: 51795 - DNA, 110 bp, synthetic construct
  source 1..110: mol_type = other DNA
ttcttgccttttgtctagtttggatatgcatgtttgaagaaactgagcataaatcaaaataaaaatttaggaagttctgtggctcatcgagttaagaatccaactagtag

SEQ ID NO: 51796 - DNA, 110 bp, synthetic construct
  source 1..110: mol_type = other DNA
ttcccagatatttgagttaaacagactgcctctagctctccccttttctctaagctcttcgcccaagtccaaatggaaactgaaagtcttaaaaagagaatctcaacccg

SEQ ID NO: 51797 - DNA, 110 bp, synthetic construct
  source 1..110: mol_type = other DNA
tcttcgcccaagtccaaatggaaactgaaagtcttaaaaagagaatctcaacccggaactctcgtggctctcacgcgcaaaaactttacgatctgtaaagagagacggca

SEQ ID NO: 51798 - DNA, 110 bp, synthetic construct
  source 1..110: mol_type = other DNA
agaactacagttcccggcatgcgtcagacgagagcttccggcgccgtctcttcccagcattctctgtttacttccgggttcaccaacactgaaagaagaacgtgagtaga

SEQ ID NO: 51799 - DNA, 110 bp, synthetic construct
  source 1..110: mol_type = other DNA
agcattctctgtttacttccgggttcaccaacactgaaagaagaacgtgagtagatagagcaggcgttcggttgagggctctggggtctcttttcccccgctgccgccta

SEQ ID NO: 51800 - DNA, 110 bp, synthetic construct
  source 1..110: mol_type = other DNA
tcgtccacatcgccctcctcctcagccatactaacccgcagtcggacagctggttgggtcaaggaggttgggatggaagcccttactcagcgttgccacgattaaggggc

SEQ ID NO: 51801 - DNA, 110 bp, synthetic construct
  source 1..110: mol_type = other DNA
tacgtgagccgcccgcccttggcccggtcctcgccggcgtactgtaccagcagttcggacatcacagagccagagcagaagatgctgagtgttaataagagcgtctccat

SEQ ID NO: 51802 - DNA, 110 bp, synthetic construct
  source 1..110: mol_type = other DNA
tcaccgctcttattcagaccaagccagttcttccagccccatttgacctgcccaaagtagggggcactggcctccccctgtcgttcatcaagcttgatttccacaggcta

SEQ ID NO: 51803 - DNA, 110 bp, synthetic construct
  source 1..110: mol_type = other DNA
agtagggggcactggcctccccctgtcgttcatcaagcttgatttccacaggctacgtctgcagtgccggtggccttgccacatcgctgcttcctttatcagcttcccat

SEQ ID NO: 51804 - DNA, 110 bp, synthetic construct
  source 1..110: mol_type = other DNA
cgcctcctcacggatactagttgggttcgtttctgctgagccacaatgagaactccaagttggagtttttaaaaattatttgtctggtctttttagggccgcacctgcag

SEQ ID NO: 51805 - DNA, 110 bp, synthetic construct; identical to SEQ ID NO: 51804
  source 1..110: mol_type = other DNA

SEQ ID NO: 51806 - DNA, 110 bp, synthetic construct
  source 1..110: mol_type = other DNA
gtgctgtgtaaaggtctgtacttttttggctggcaggtgggcagagccaggagtgacagtgaacgcaaatcctggccgggcagctgcaggtgcttgaggcagacacctgt

SEQ ID NO: 51807 - DNA, 110 bp, synthetic construct
  source 1..110: mol_type = other DNA
tgaaaaattcagtttgcagcaggaaccagaaagctgctgggttccccctcccccccaccggcgtgttctctgcctggctcatcttcctggggtgcggggcgtgggtgtgg

SEQ ID NO: 51808 - DNA, 110 bp, synthetic construct
  source 1..110: mol_type = other DNA
gaacccacgtacattgtttcacttttctcattttgtttcttggtctgtaagatgggaactgtgagatgacctcactcagctggactgaggactgaactaaatgagaccag

SEQ ID NO: 51809 - DNA, 110 bp, synthetic construct
  source 1..110: mol_type = other DNA
gaactgtgagatgacctcactcagctggactgaggactgaactaaatgagaccaggcaagcatgctgtgtggtgcacgttcagtgctactgtggcaggaagcccaaggcc

SEQ ID NO: 51810 - DNA, 110 bp, synthetic construct
  source 1..110: mol_type = other DNA
aaatatttcactgtacacagataacatcgtctgtgataaaagccactcctattaagcagctactgtggacgcctgctttaccgtcctcacctctgcttctcaaaagagta

SEQ ID NO: 51811 - DNA, 110 bp, synthetic construct
  source 1..110: mol_type = other DNA
gcagctactgtggacgcctgctttaccgtcctcacctctgcttctcaaaagagtaactttgagatggagaaaagctgaagagctttcccaggacaagcgctagtgagcac

SEQ ID NO: 51812 - DNA, 110 bp, synthetic construct
  source 1..110: mol_type = other DNA
tatttgccatcatcctccccacccccacctgtgtgggcatctgcaaatctgataaagtacatggagtgtgtttgtctcagacaaagccctgtccccccaccggagcatag

SEQ ID NO: 51813 - DNA, 110 bp, synthetic construct
  source 1..110: mol_type = other DNA
agtacatggagtgtgtttgtctcagacaaagccctgtccccccaccggagcataggcaaacgcatgtgttcacacatacacacacacacacacacacacacacacacacc

SEQ ID NO: 51814 - DNA, 110 bp, synthetic construct
  source 1..110: mol_type = other DNA
gtgatgctgtgagccccaactcttgtctcctcctccgagctcacaggtgcctccctgagcaccctggcctcccaccagtcagcagcggggggagcagagccggggcccac

SEQ ID NO: 51815 - DNA, 110 bp, synthetic construct
  source 1..110: mol_type = other DNA
tgagcaccctggcctcccaccagtcagcagcggggggagcagagccggggcccacaagctcggccctgagggctgaggtccacgcaaccttgacttcctagcaacaacct

SEQ ID NO: 51816 - DNA, 110 bp, synthetic construct
  source 1..110: mol_type = other DNA
ctttcttggttacttaaacatatcatgttgtggggcttctctgggccactctggtgaccagagtctctgtcgcctgtcagagtgctgagttaggatgacaacttgttttc

SEQ ID NO: 51817 - DNA, 110 bp, synthetic construct
  source 1..110: mol_type = other DNA
gattatttgattaatgtctctctcccctccaagactggtcttgccggtctggctcaccatttccctcagcctctcttgcaacgcgcccaggcacttaatagatactcaat

SEQ ID NO: 51818 - DNA, 110 bp, synthetic construct
  source 1..110: mol_type = other DNA
tgctgagcacagacgtggcagatagggacacagttacatgagtacctggttaattctgacttctgggacctcaggggcacttggacagctcaggagcaatgcacttccca

SEQ ID NO: 51819 - DNA, 110 bp, synthetic construct
  source 1..110: mol_type = other DNA
tcagggcaccctcgttttagaggtatggacagcctcactcccatgcctgcaggcacatggtatggaacacactttgtggggctgaggagggggatgaaggagagaggcgg

SEQ ID NO: 51820 - DNA, 110 bp, synthetic construct
  source 1..110: mol_type = other DNA
cctgctccccagggctcccccagagctggtggcatgtcttaatagccctgctgtggccaccaagactctgtgaccaaggtcagaacctgaatccggtacctgcttcaggg

SEQ ID NO: 51821 - DNA, 110 bp, synthetic construct
  source 1..110: mol_type = other DNA
ctgcacacatgtatgtgcatgtgtgcatgtgtgtccatgggttggaacctgaacctgctctcaagctgccccaggcccagcatggcaacactagctggaatgcagggtac

SEQ ID NO: 51822 - DNA, 110 bp, synthetic construct
  source 1..110: mol_type = other DNA
tgctctcaagctgccccaggcccagcatggcaacactagctggaatgcagggtaccgacagctcaggtcctggatcactggctcccaaaccagaatctgaggatgccctg

SEQ ID NO: 51823 - DNA, 110 bp, synthetic construct
  source 1..110: mol_type = other DNA
cagaggctgggggtgaggcccagaccagcccacgcagagctcccaccccactcccgctgtgataagactagtctaagggcctttcattcccaccacctatccctgtgccc

SEQ ID NO: 51824 - DNA, 110 bp, synthetic construct
  source 1..110: mol_type = other DNA
acgagtcttttcctctgctcttctaagagctgcagttgactcggaagcaaaaggtgaactgataagccactatactgactgcaaggatgaagacatgaatccccaaagaa

SEQ ID NO: 51825 - DNA, 110 bp, synthetic construct
  source 1..110: mol_type = other DNA
ctaaccctgctcatctctagtctctgacttcttactttctactcctgtctacatccctgttccctcttttgttatagttatacagcttttatttttcctctgttgcccct

SEQ ID NO: 51826 - DNA, 110 bp, synthetic construct
  source 1..110: mol_type = other DNA
cctgttccctcttttgttatagttatacagcttttatttttcctctgttgcccctacacttatctacccctcctcacatctttttttttttttttctcctcccttttttg

SEQ ID NO: 51827 - DNA, 110 bp, synthetic construct
  source 1..110: mol_type = other DNA
aggtgagaatgggtgaaagaaatgaaaatgttacagctgaagagaagacagaataggttcaggtccaatccaacttctctctttcctgtcagccaacagtcttacctttc

SEQ ID NO: 51828 - DNA, 110 bp, synthetic construct
  source 1..110: mol_type = other DNA
ttctttaactgttgtcaaatctccatcacctggtggaggtgatgtttcttcactgctgggctttctgtctgagctggggtgtaggctctgggggggaagctcggttccct

SEQ ID NO: 51829 - DNA, 110 bp, synthetic construct
  source 1..110: mol_type = other DNA
taatggttattttctcattttagaagtaatttccagactgtctacagcacgagtattctagggcttcaggaagatgcccaaatttcatgcccaaattctctaacacacag

SEQ ID NO: 51830 - DNA, 110 bp, synthetic construct
  source 1..110: mol_type = other DNA
atcattcaccacagtaacactttcctggctgttcccaacctcactgctttcttccaaactcaggagctcctaaaaatcaactgcaactcaatatactccatcctcaatgt

SEQ ID NO: 51831 - DNA, 110 bp, synthetic construct
  source 1..110: mol_type = other DNA
tgttccagttcatcagctcctcagaggacaactcctgacatctgaggcccaggccctatcttcagcagagtaactgctgaaagactgcctctactcacctctgctcccct

SEQ ID NO: 51832 - DNA, 110 bp, synthetic construct
  source 1..110: mol_type = other DNA
ctatcttcagcagagtaactgctgaaagactgcctctactcacctctgctcccctacccattctcactccccaccctatcttgccacagtgtgcattaaacacttattcc

SEQ ID NO: 51833 - DNA, 110 bp, synthetic construct
  source 1..110: mol_type = other DNA
agaatcatatactcaaccaagggagttagaaatacatgtggtgggagagaaggggtggctgtaaagatgaacacaggaagctacaagtcagatagggccaagggtcttat

SEQ ID NO: 51834 - DNA, 110 bp, synthetic construct
  source 1..110: mol_type = other DNA
gtcacaagaatttgacatgccttgttcagttgtagagagcaaagtgtcagtgaacatatagtacacctgcctggtcagggccccttgttaagctcaaaaaatgagaaagg

SEQ ID NO: 51835 - DNA, 110 bp, synthetic construct
  source 1..110: mol_type = other DNA
atatagtacacctgcctggtcagggccccttgttaagctcaaaaaatgagaaaggaaacacagactatcttgtctaccccctttcattcctctttcagcatgagctttta

SEQ ID NO: 51836 - DNA, 110 bp, synthetic construct
  source 1..110: mol_type = other DNA
gctgcactgaattgggaagggctaacagattcaggaataaagttcatgaatatatattttagtgtatttatgatgattcccttcccaaaccgaatataaatgatcttcag

SEQ ID NO: 51837 - DNA, 110 bp, synthetic construct
  source 1..110: mol_type = other DNA
atagcagtgacgccagatctttaacagggccagggattgaacccgcatggatgttattcgggtctactagctactgagccatgacaggagctcctattttttgcttttta

SEQ ID NO: 51838 - DNA, 110 bp, synthetic construct
  source 1..110: mol_type = other DNA
tctgaacatctgctgcttcatatgtggcctgggacagtccctgcctcctgaagcagcatcccatgagctaagatatgtacataatgcttagcacgggtcagcagcgtggt

SEQ ID NO: 51839 - DNA, 110 bp, synthetic construct
  source 1..110: mol_type = other DNA
aatctagtcatctgccagccccaactccaaatttcctgttactataaatccttgacagtttagagtgaaggatggtggcctgtgggacagagaatcctcattagatgaat

SEQ ID NO: 51840 - DNA, 110 bp, synthetic construct
  source 1..110: mol_type = other DNA
cttactggcgttgacttgaacaagttcctcagtttccctgaatgtctttcctccgtggtaaagtggggtataccagctactctgccggatggttttggagttcaaatgag

SEQ ID NO: 51841 - DNA, 110 bp, synthetic construct
  source 1..110: mol_type = other DNA
acaggcatttccatggcctgggtgctaagggaaggaacagcacagtgtggtgaataagctggccctgcagttggctagtgaggaagattgtgtgttcagtcccaccctga

SEQ ID NO: 51842 - DNA, 110 bp, synthetic construct
  source 1..110: mol_type = other DNA
tggacgcgcgcacatccaccggcagcaggcgggaccacagctgcccagctgggggattacgagcaggaatgaatcagcagccgggggacacttgactttaggggcgcaca

SEQ ID NO: 51843 - DNA, 110 bp, synthetic construct
  source 1..110: mol_type = other DNA
attacgagcaggaatgaatcagcagccgggggacacttgactttaggggcgcacaagagcctgctgcttaggttcctggagcagatgccccgctcaagggcagcggagct

SEQ ID NO: 51844 - DNA, 110 bp, synthetic construct
  source 1..110: mol_type = other DNA
ggggttacttgatagagtgtgcaaggcccacgttctggcaccagctggaccggtcattgctcaggaagtgaaataccgtgttgcccactgggcagtgttgggcagttgag

SEQ ID NO: 51845 - DNA, 110 bp, synthetic construct
  source 1..110: mol_type = other DNA
cctcccaggaattacctgcattttcacagaggaatgtcctgagagtaagaatagtcacaaaggaatgcctctctggtggcaggaatttcaggccctgggacaccaggcat

SEQ ID NO: 51846 - DNA, 110 bp, synthetic construct
  source 1..110: mol_type = other DNA
ccttggtgcagaagttcaagggtatactcggaccctggcctgcacccctggcttgccaaccacctatcctgcacagatgtggacgagtgtgctgagggcaacggcggctg

SEQ ID NO: 51847 - DNA, 110 bp, synthetic construct
  source 1..110: mol_type = other DNA
ctcccgcctccacctctgtgaccgcacaccccacccactgaccctaagacctcgccaggtagtcttcacttccaaccccggaatttccccagtactgcccagggacccaa

SEQ ID NO: 51848 - DNA, 110 bp, synthetic construct
  source 1..110: mol_type = other DNA
ccatgacgcaacaggtgtggccataaaaaggagaaaaaaaaagggaatcagggttcgaagcttttctgcagacttctggtcctgggctgttgccagtactcttggctatg

SEQ ID NO: 51849 - DNA, 110 bp, synthetic construct
  source 1..110: mol_type = other DNA
cgaagcttttctgcagacttctggtcctgggctgttgccagtactcttggctatgttttggaaatatgcattgcttccacagcgtatctttaggttcctcttccatcccc

SEQ ID NO: 51850 - DNA, 110 bp, synthetic construct
  source 1..110: mol_type = other DNA
gcagctgtggggagaagggttaccaaagagacatggttactgctctagtccagctaggagatgactagagccagcgtaaggcggtgctcatgtgataaggccccaagggg

SEQ ID NO: 51851 - DNA, 110 bp, synthetic construct
  source 1..110: mol_type = other DNA
aagagacatggttactgctctagtccagctaggagatgactagagccagcgtaaggcggtgctcatgtgataaggccccaaggggtggatttgagagtgatcaaggaaat

SEQ ID NO: 51852 - DNA, 110 bp, synthetic construct
  source 1..110: mol_type = other DNA
ggagaaatccagagactaggagcaccatgcaggaggcttagctgaggaagtgacagaagctgaggcttgaagaacaaggaggtgttaagggggtgagatgacccaggagg

SEQ ID NO: 51853 - DNA, 110 bp, synthetic construct
  source 1..110: mol_type = other DNA
atggatactagtcaggttcgttcctgctgaaccacaatgggaactcaaaaacacacaaacaaacaaaaaaacccaaacaaaaaagctttttattgtgataaaatatacct

SEQ ID NO: 51854 - DNA, 110 bp, synthetic construct
  source 1..110: mol_type = other DNA
cgcaccagcagcccatcactggcctggggtgccaggatggggcggtgttagggagaggacagttagggggtggcttaggtatcgggacaataaggtgggggcctggggac

SEQ ID NO: 51855 - DNA, 110 bp, synthetic construct
  source 1..110: mol_type = other DNA
aggacagttagggggtggcttaggtatcgggacaataaggtgggggcctggggacctgtgcatgcccttgtgtgtgtgcagtctggatatcgacaactgtgcagggtatc

SEQ ID NO: 51856 - DNA, 110 bp, synthetic construct
  source 1..110: mol_type = other DNA
aaactgcccaccttggccaaacaaggcaatagctgctggcatgagttgtctcatagcaggaggccctgataaggagcctgacgctgccctgaagcctgaccaggaggatt

SEQ ID NO: 51857 - DNA, 110 bp, synthetic construct
  source 1..110: mol_type = other DNA
ttgtctcatagcaggaggccctgataaggagcctgacgctgccctgaagcctgaccaggaggatttgggagcaaccaacctcccaggatccttggcgctggaatccatct

SEQ ID NO: 51858 - DNA, 110 bp, synthetic construct
  source 1..110: mol_type = other DNA
atcttgcgaaatgacttcctacaataagtttagttaacatctatcatctcatagagatgttaaaaaagaggaaaagcacacatatcacacatgtcattcaacagtgttaa

SEQ ID NO: 51859 - DNA, 110 bp, synthetic construct
  source 1..110: mol_type = other DNA
taggtgtcagtcagccaactccatgagaaaaatctgagtcacattttagctctcgcctaattagaattctaatgattgtgactaacaactgtgtagttaatccatgtgaa

SEQ ID NO: 51860 - DNA, 110 bp, synthetic construct
  source 1..110: mol_type = other DNA
gccacagccatgctggtggccctggaagctctcatcccctacattgagagaaatgaacagaaaattttaatttaaccatcatcagtatctgctatgtgaaaagaaaaaaa

SEQ ID NO: 51861 - DNA, 110 bp, synthetic construct
  source 1..110: mol_type = other DNA
atactctgtgttcagtgactgcagctaaattgagtttaatggaatccaagctcactccccgcccaacatttgatcaagtaactatgtcacaaacacaagcatattccacc

SEQ ID NO: 51862 - DNA, 110 bp, synthetic construct
  source 1..110: mol_type = other DNA
gtgtctcacggttaaatgggtcccgagcccctgtatccacattctctgacattctatcctcaagtcctcaaagaatgacagacgtcataacttgagcatctgctaagtgc

SEQ ID NO: 51863 - DNA, 110 bp, synthetic construct
  source 1..110: mol_type = other DNA
atcctcaagtcctcaaagaatgacagacgtcataacttgagcatctgctaagtgcgggactctgtgctggatgttgcagatgcaaaggcaactgccctgaagcgcatttg

SEQ ID NO: 51864 - DNA, 110 bp, synthetic construct
  source 1..110: mol_type = other DNA
ttataagttagcactgcctcctccacatttattagatggttctcaaacattaatatgggtaagtcagctggggggttaaaattcagactgattcatttgaagtgggacca

SEQ ID NO: 51865 - DNA, 110 bp, synthetic construct
  source 1..110: mol_type = other DNA
accatgacgggaactcctctgacagttttttgacacttattcttgccacataactgagatgggacatgtctcatgttgtaaagttgcagcttttatctggtcagtttaaa

SEQ ID NO: 51866 - DNA, 110 bp, synthetic construct
  source 1..110: mol_type = other DNA
gagatgggacatgtctcatgttgtaaagttgcagcttttatctggtcagtttaaaactcatgatcattggacttaaaaatctcatggagttctcattgtggctcagcagg

SEQ ID NO: 51867 - DNA, 110 bp, synthetic construct
  source 1..110: mol_type = other DNA
cccttattctcctgtcattactgcccagtgtgctctttcactcaggccaacccacttcctggcttttgtgtgattggctgatttctacttctgtgctttgcacagacctc

SEQ ID NO: 51868 - DNA, 110 bp, synthetic construct
  source 1..110: mol_type = other DNA
ccaatgcttctgctgcagtccaagccattgcagtcaaattcttaacccactgcaccagagcgggaactcctagatggtgtttaatttaaagtcgtgtggaagttcctgga

SEQ ID NO: 51869 - DNA, 110 bp, synthetic construct
  source 1..110: mol_type = other DNA
atctgaaaagacctggggttgagagagaagggggatgggtttaaggaattggctcatgtgactgggtggggcatggttagcacgtctaagatctgtagggcaggctagca

SEQ ID NO: 51870 - DNA, 110 bp, synthetic construct
  source 1..110: mol_type = other DNA
atgtgactgggtggggcatggttagcacgtctaagatctgtagggcaggctagcaagctggaaatttgggcagaaccctttttttttttttttttctttcattttagggc

SEQ ID NO: 51871 - DNA, 110 bp, synthetic construct
  source 1..110: mol_type = other DNA
cgaagcatttggccactttattctgttctcctctctaaggttcagaaatgaaccagggtctggataggaggctgtaatctggactgctcactgaccttgtcttttactcc

SEQ ID NO: 51872 - DNA, 110 bp, synthetic construct
  source 1..110: mol_type = other DNA
gggtctggataggaggctgtaatctggactgctcactgaccttgtcttttactccctgtgcctctactcaaggttgaacaagatctgtagtggtctctcctttcagagga

SEQ ID NO: 51873 - DNA, 110 bp, synthetic construct
  source 1..110: mol_type = other DNA
caacaaacgtgggcacagtaggacctggcctgactccttctgtagagacaaaggatgctgcaggtgctttggtctgcgctccacacctgggccagtgtttcctcaggcag

SEQ ID NO: 51874 - DNA, 110 bp, synthetic construct
  source 1..110: mol_type = other DNA
tgctgcaggtgctttggtctgcgctccacacctgggccagtgtttcctcaggcagctcccgccacccctcctggatcccagagcctagtgtggctgaagtgattgtcatt

SEQ ID NO: 51875 - DNA, 110 bp, synthetic construct
  source 1..110: mol_type = other DNA
tcagcgtcacctgcacagctaccagtggaggaactgggcccagaactaccccaggatatggacccttctggcttcttacagcttcctggtgtctggagcccgctggcaag

SEQ ID NO: 51876 - DNA, 110 bp, synthetic construct
  source 1..110: mol_type = other DNA
cactttggtcagaggcatataaaccctatctcccaggagtgagctcatgcccagccaatccagggactgccctacagccccgatgccctatcccagcaagcttcccgcac

SEQ ID NO: 51877 - DNA, 110 bp, synthetic construct
  source 1..110: mol_type = other DNA
cctgggagagacagcatggtggggtagcacgagggccttgtcaccagctgcgtgactttgaccgagtcactttgtcccctctctagggatgggcagtgcagagcaggggc

SEQ ID NO: 51878 - DNA, 110 bp, synthetic construct
  source 1..110: mol_type = other DNA
tttggttaagattattaaagttcaacttcttagaataaaacagctaacatctatacttctacatgaagatcacagtttataccttaaaaccatgtaagactccttccatg

SEQ ID NO: 51879 - DNA, 110 bp, synthetic construct
  source 1..110: mol_type = other DNA
caggatgttgaactaatttgaactgaattagaaatcaggatggtccccactcatttgctgaattttaagctaagtggaattgagttattcaggtatatgtatacttaaac

SEQ ID NO: 51880 - DNA, 110 bp, synthetic construct
  source 1..110: mol_type = other DNA
atttattttctctgaaaagcttatgaccactgaccaaccacggcagctgattatatccaaacaaaatcatgatgaaaaatacaagtaattattcatagctaggaagaaag

SEQ ID NO: 51881 - DNA, 110 bp, synthetic construct
  source 1..110: mol_type = other DNA
ttgaaaaagccaaatgatctacaagatttataatgataaacagcagttccttgccccaccccctcccagtggagttagtcagcaagcagctgctttcagtgcttttattc

SEQ ID NO: 51882 - DNA, 110 bp, synthetic construct
  source 1..110: mol_type = other DNA
gaagaatgaagactgccagggccaggagttgtctctgcagtggccactgggtcgtctttcattgctcagagcaacatcaagaaggttcttcacaatatctccaggttgcg

SEQ ID NO: 51883 - DNA, 110 bp, synthetic construct
  source 1..110: mol_type = other DNA
caggagcaggcactcttcttacacatcccttcctcctcacccgcctcccagcctccacttgctccaagaccagctcccaaggacagtgcctatgttttatgcatatttgt

SEQ ID NO: 51884 - DNA, 110 bp, synthetic construct
  source 1..110: mol_type = other DNA
aggcacagaggccaacaaaggaagctattttcagttacttgtttgtaaaacgaaggtttgtgtttgagttttctctgaggtgggagttttaataatgggcctgagggtgg

SEQ ID NO: 51885 - DNA, 110 bp, synthetic construct
  source 1..110: mol_type = other DNA
caccagggagcttttcagactcacagacccccaggcccagttcttggcagctcttagcacatcccggaaatgcagtttaaagactcctcaagtggttctgctatggctgt

SEQ ID NO: 51886 - DNA, 110 bp, synthetic construct
  source 1..110: mol_type = other DNA
agcacatcccggaaatgcagtttaaagactcctcaagtggttctgctatggctgttctagagggtgacctccagccccttaatttcaggggggaaactgagccctaaggg

SEQ ID NO: 51887 - DNA, 110 bp, synthetic construct
  source 1..110: mol_type = other DNA
cccttacacgtctgtgtggctcctggaggacgttcaagcataagcatcattttcacaggcactgactcacaagaggtccaattaattctgaggcagatgagctgggtcac

SEQ ID NO: 51888 - DNA, 110 bp, synthetic construct
  source 1..110: mol_type = other DNA
caggcactgactcacaagaggtccaattaattctgaggcagatgagctgggtcacaagccccccattttatagctgatgggcccaaggctcagagtggggagtgaccccc

SEQ ID NO: 51889 - DNA, 110 bp, synthetic construct
  source 1..110: mol_type = other DNA
agccgagtctgtaaactaccccacagttcatggcaacgctgcatctttaacccactgagcgaggccagcaatccaacctgcaatctcatggtttccggttggatttgatt

SEQ ID NO: 51890 - DNA, 110 bp, synthetic construct
  source 1..110: mol_type = other DNA
tgagcgaggccagcaatccaacctgcaatctcatggtttccggttggatttgattccactgtgccacgagaggaactccattttatttatttatttatttattttttagg

SEQ ID NO: 51891 - DNA, 110 bp, synthetic construct
  source 1..110: mol_type = other DNA
tgcctcctgcttcctttccccagagtggagaaagcaggctgtgcgacttcctgtcagccagctccaaatatcggggctgggtgggcccctgaggatcatctgttgttctc

SEQ ID NO: 51892 - DNA, 110 bp, synthetic construct
  source 1..110: mol_type = other DNA
cactgttctcttgtggaggtagtcttggctctgtgcctttcttcttccctaacttttttacccaaagagaggtgtttcttttgagggggtggtcctggacagaaagccct

SEQ ID NO: 51893 - DNA, 110 bp, synthetic construct
  source 1..110: mol_type = other DNA
gacactacccctagcctctgggctcccctactgaagtgaaggatccaacacacaagcctggtcctgttgaaaatccttccctggctcccactggctcaggataaagctcc

SEQ ID NO: 51894 - DNA, 110 bp, synthetic construct
  source 1..110: mol_type = other DNA
tgattttcatgagccagtgggagccagctccagcacacccctgtgacaagcctttattgcaaagcttcaggggagtctgggcagaactgagggagaagttattctaagtg

SEQ ID NO: 51895 - DNA, 110 bp, synthetic construct
  source 1..110: mol_type = other DNA
agctccagcacacccctgtgacaagcctttattgcaaagcttcaggggagtctgggcagaactgagggagaagttattctaagtgaaataatccagacacaaaagagcac

SEQ ID NO: 51896 - DNA, 110 bp, synthetic construct
  source 1..110: mol_type = other DNA
ctacaccccaaccgcagccacgcaggatccaggccgaatctgtgaccgatgtcacagctcagggcagcacgggatccttagcccattgagtgaggccagggattgaatct

SEQ ID NO: 51897 - DNA, 110 bp, synthetic construct; identical to SEQ ID NO: 51896
  source 1..110: mol_type = other DNA

SEQ ID NO: 51898 - DNA, 110 bp, synthetic construct
  source 1..110: mol_type = other DNA
gtctggaataagcctcctcccccgcagaccctgctgagtgtggaaatggtgacaggcctggaggaggagacgctgcttcccgggggctccccctgcaagtgggggagagg

SEQ ID NO: 51899 - DNA, 110 bp, synthetic construct
  source 1..110: mol_type = other DNA
ccctttcgcttagctagggggcctgaagcttccgtctgcgccccatcctggcaggatcccaggacgcagccccgggcttcccaagagcaagggcaccaggcctggggtcc

SEQ ID NO: 51900 - DNA, 110 bp, synthetic construct
  source 1..110: mol_type = other DNA
atcccaggacgcagccccgggcttcccaagagcaagggcaccaggcctggggtccaacctctgctgggagaccacaaaggatccccccctttcctaccagcgacagcgct

SEQ ID NO: 51901 - DNA, 110 bp, synthetic construct
  source 1..110: mol_type = other DNA
caggcgtcctaggcctcagctcttcccatagatgctctcatcagcgtccagcatcgctggactctgcaaagtcccaggggtgtgggtggggggtgggagtgggtcagaac

SEQ ID NO: 51902 - DNA, 110 bp, synthetic construct
  source 1..110: mol_type = other DNA
gctggactctgcaaagtcccaggggtgtgggtggggggtgggagtgggtcagaaccctgccttgggactgttcccttccccacgagttctgctgaatgccgccatgggtt

SEQ ID NO: 51903 - DNA, 110 bp, synthetic construct
  source 1..110: mol_type = other DNA
atcaaaccccctccacagcagtgacccaacccgctgcagtgaaaacaccggatccctaaccccctgagcaccagggaactggcagggaactcctagttgagctgattctc

SEQ ID NO: 51904 - DNA, 110 bp, synthetic construct
  source 1..110: mol_type = other DNA
ctaaccccctgagcaccagggaactggcagggaactcctagttgagctgattctcagaatctgctctccctccacctcttcttacatgaaggtccatggccaccccagct

SEQ ID NO: 51905 - DNA, 110 bp, synthetic construct
  source 1..110: mol_type = other DNA
acaacaatgctacataaacaaccacaaaacctcaggggcacagaacaatgaccattgcttagttcataagtctgtggggttcagcttatctggggctgggctgagctggg

SEQ ID NO: 51906 - DNA, 110 bp, synthetic construct
  source 1..110: mol_type = other DNA
ttgcagcggaagcgggaggagtattttggcttcattgaacagtattatgactctcgaaatgaggagcatcaccaggatacctacagacaggtacagtcatcacctgctgc

SEQ ID NO: 51907 - DNA, 110 bp, synthetic construct
  source 1..110: mol_type = other DNA
gacactttcaggaaaggggtcccagtggacacagttgcttaatgagagtgttctgtgcaggtagagagccaaggaaatgagcgtctttctggaatgcagtttctagacga

SEQ ID NO: 51908 - DNA, 110 bp, synthetic construct
  source 1..110: mol_type = other DNA
tgcaggtagagagccaaggaaatgagcgtctttctggaatgcagtttctagacgagccttattactacctttccaatcaatgttcatgccctttgacacggtaatttcat

SEQ ID NO: 51909 - DNA, 110 bp, synthetic construct
  source 1..110: mol_type = other DNA
tgtgaaagcttttccaggtgcctggaacccagcactcttcacttgacccttgacctttacctagcacctgagcacagatgagaatttgtctttctttttttttttttttt

SEQ ID NO: 51910 - DNA, 110 bp, synthetic construct
  source 1..110: mol_type = other DNA
aggtgcctggaacccagcactcttcacttgacccttgacctttacctagcacctgagcacagatgagaatttgtctttcttttttttttttttttgtcttttgtcttttt

SEQ ID NO: 51911 - DNA, 110 bp, synthetic construct
  source 1..110: mol_type = other DNA
cacctgttccatcccagagggcgatgctcaccttgaggttctggttctctctgggcagagtgtgtttgacgtcctggatggggaggagatgcggcgagctcggacccggg

SEQ ID NO: 51912 - DNA, 110 bp, synthetic construct
  source 1..110: mol_type = other DNA
ccattgatgggtgggtaagccctcagcattaataggtagagggaggacacccaaatagtgcttgccccacaccagtgtactcatattagaacaagctccccataaatggc

SEQ ID NO: 51913 - DNA, 110 bp, synthetic construct
  source 1..110: mol_type = other DNA
tagtgcttgccccacaccagtgtactcatattagaacaagctccccataaatggctgctgccagcatctgtgtccccagggggagtcccagtgggcttctgtctctcagg

SEQ ID NO: 51914 - DNA, 110 bp, synthetic construct; identical to SEQ ID NO: 51912
  source 1..110: mol_type = other DNA

SEQ ID NO: 51915 - DNA, 110 bp, synthetic construct
  source 1..110: mol_type = other DNA
gacacccaaatagtgcttgccccacaccagtgtactcatattagaacaagctccccataaatggctgctgccagcatctgtgtccccagggggagtcccagtgggcttct

SEQ ID NO: 51916 - DNA, 110 bp, synthetic construct
  source 1..110: mol_type = other DNA
actcctgtccccccactgctgaagggccggcccagggcacctcccccttgttctctcggggtaatgagtcacacttacacagctctggctgccagctggaagctgctcca

SEQ ID NO: 51917 - DNA, 110 bp, synthetic construct
  source 1..110: mol_type = other DNA
tcggggtaatgagtcacacttacacagctctggctgccagctggaagctgctccaggcacttcatgtgcttcaactcatctaattcccgccacaaccctctgaacacggg

SEQ ID NO: 51918 - DNA, 110 bp, synthetic construct
  source 1..110: mol_type = other DNA
cctccttacgctgccgctttagagtccccacacaacctcagctctgacaagaattgattacgcttccggtctgatggcagcgcccctggtttccagggagttccgagtct

SEQ ID NO: 51919 - DNA, 110 bp, synthetic construct
  source 1..110: mol_type = other DNA
ggctcctttgtgcctctggttttcacacattctcagtgtaaacctctctcctgcgaccctggcctccctgtgccctctcacgcacacccagaaactgcagaaagggaagt

SEQ ID NO: 51920 - DNA, 110 bp, synthetic construct
  source 1..110: mol_type = other DNA
gcttttcagtttggatgcgtgtctgggcagagcagttgctcacaaaagtttgctggatgtgaatggctagacctgccttatttatcccctagatcatgagctcctgaaat

SEQ ID NO: 51921 - DNA, 110 bp, synthetic construct
  source 1..110: mol_type = other DNA
gatgtgaatggctagacctgccttatttatcccctagatcatgagctcctgaaatctgggactttggcacatagcacagtgctttgacaaaggatgtatttacatttgtt

SEQ ID NO: 51922 - DNA, 110 bp, synthetic construct
  source 1..110: mol_type = other DNA
ctttttcctagtcctctatcaggacagagcagtcgctctcccctcagatggagctctcttaggacagggctgtgtctcctcctcagattggggttccctcagggtggggc

SEQ ID NO: 51923 - DNA, 110 bp, synthetic construct
  source 1..110: mol_type = other DNA
ttaagtgagagagaagaaaactatccagcttaacacactcttgttttgtggcctttttttctgtcattcaaaactgaatctagtataatctaatcttttccctatctccc

SEQ ID NO: 51924 - DNA, 110 bp, synthetic construct
  source 1..110: mol_type = other DNA
ttgtggcctttttttctgtcattcaaaactgaatctagtataatctaatcttttccctatctcccctccaaaatataaacatatacagatttttaatgggacccaaatac

SEQ ID NO: 51925 - DNA, 110 bp, synthetic construct
  source 1..110: mol_type = other DNA
cttccgaaaatccatgcttcaattcaattcaactacagcatacggtgattgagtgctaatgcttgactgaattctgggcatcagagatgaaaaagccaattttgtggatg

SEQ ID NO: 51926 - DNA, 110 bp, synthetic construct
  source 1..110: mol_type = other DNA
tgggcagtttacctctctgcctctttttctttaaaaaaagtatatcctagagttgctctgaggtttagtgagctctgatgcctgtcaaggcccttggcacagtgcctaac

SEQ ID NO: 51927 - DNA, 110 bp, synthetic construct
  source 1..110: mol_type = other DNA
ctatactgggggctaagttagagacatttattctttcccagcagatcatttaagggaaaatatttactaggtgtgtgtggtttataagacataacttgatcaattttaag

SEQ ID NO: 51928 - DNA, 110 bp, synthetic construct; identical to SEQ ID NO: 51927
  source 1..110: mol_type = other DNA

SEQ ID NO: 51929 - DNA, 110 bp, synthetic construct
  source 1..110: mol_type = other DNA
agaatagctcttagtgtcacagtagttgttatttgaatgggattttttatgttattagtggattgatagttgggacaaggtgctatacatgatgctttttcctctgtaag

SEQ ID NO: 51930 - DNA, 110 bp, synthetic construct
  source 1..110: mol_type = other DNA
tagtggattgatagttgggacaaggtgctatacatgatgctttttcctctgtaaggtttttggcctcattaaattacatgtgacattggaaaaagattttattttgacag

SEQ ID NO: 51931 - DNA, 110 bp, synthetic construct
  source 1..110: mol_type = other DNA
agatacaatgtagatgccattacaatgttaaatatatgatttgtaactcttactttccaatttccatcaataaagcacagctgcttacttacaaatcaggctggattaag

SEQ ID NO: 51932 - DNA, 110 bp, synthetic construct
  source 1..110: mol_type = other DNA
tccaatttccatcaataaagcacagctgcttacttacaaatcaggctggattaagcagtttgttacatctcatggctcactagagtaatttgaaacagtgaagatttacc

SEQ ID NO: 51933 - DNA, 110 bp, synthetic construct
  source 1..110: mol_type = other DNA
tgaaaggtgaaattggttgggctgctgttaaaaccttagaatccctgagttagaagggctgcccaagacctttgctgcttcctcattcagccacaagtgctgctgttgta

SEQ ID NO: 51934 - DNA, 110 bp, synthetic construct
  source 1..110: mol_type = other DNA
gggctgcccaagacctttgctgcttcctcattcagccacaagtgctgctgttgtatgtttgccacaagaccttcagtgtgaggcagggagagttgcaccagcaccatttt

SEQ ID NO: 51935 - DNA, 110 bp, synthetic construct
  source 1..110: mol_type = other DNA
agagatgcttttgttgtagccaaaataaaatatacagaaaaactgagaacattactaactggaatgttagtgaagactttcaatgaataaaaagcttcattgccaagtgc

SEQ ID NO: 51936 - DNA, 110 bp, synthetic construct
  source 1..110: mol_type = other DNA
taactggaatgttagtgaagactttcaatgaataaaaagcttcattgccaagtgctggctggattttcctttaatatgacagtgattcccaaaatagaaatttgagagca

SEQ ID NO: 51937 - DNA, 110 bp, synthetic construct
  source 1..110: mol_type = other DNA
ctgttccccgagaggtgccggctgatttgggatgtagtcgtgtgtatgcatgacgcagccttagtcaccacccgcgtgtccttgttcgtagctgctgtttgttgtcactg

SEQ ID NO: 51938 - DNA, 110 bp, synthetic construct
  source 1..110: mol_type = other DNA
caactgtaagatttgtcttaaaaaacagggctcgaagccactcaaatacaacatttaaaagtatcaatagaaatgcatacaaatcacactgatgaggagagaaagaccta

SEQ ID NO: 51939 - DNA, 110 bp, synthetic construct
  source 1..110: mol_type = other DNA
tcaaaggtgaggaagcagaggatctagtctgtgagctatacacccaataagcaacaactctggaaagataaacgagtggttgttcatgggccctgaatgccttccagtgt

SEQ ID NO: 51940 - DNA, 110 bp, synthetic construct
  source 1..110: mol_type = other DNA
tcttttacgttcagttgactggaattactgttttgacaacttctgaaaatataagccctcccctacatcactcagccataaggcattcaagtcaaccagagctcttagtc

SEQ ID NO: 51941 - DNA, 110 bp, synthetic construct; identical to SEQ ID NO: 51940
  source 1..110: mol_type = other DNA

SEQ ID NO: 51942 - DNA, 110 bp, synthetic construct
  source 1..110: mol_type = other DNA
ggacagacattatttattatggcaccctttaggaatatcagaaaccagtgatagtacaccactgttgcagctgaggccaaagcaatctattatctacaaatgaggaacaa

SEQ ID NO: 51943 - DNA, 110 bp, synthetic construct
  source 1..110: mol_type = other DNA
gattcatcaaccactgagccacgatgggaactccaccaaactcttaaacagctggaggaaatagccctcttttaaaaagctttctttctcgaagttagactcctacccaa

SEQ ID NO: 51944 - DNA, 110 bp, synthetic construct
  source 1..110: mol_type = other DNA
aggaaatagccctcttttaaaaagctttctttctcgaagttagactcctacccaaccacgtggtggcctgggtggaggagagggcatacggacaacacacacttatactc

SEQ ID NO: 51945 - DNA, 110 bp, synthetic construct
  source 1..110: mol_type = other DNA
tatgtcaggctgagtcagttactgaaaagaagctgggcactgccacagaaaggtggccccgcagtaaaagacaatgtggtggtcttttaaataactttaaaaaaattaca

SEQ ID NO: 51946 - DNA, 110 bp, synthetic construct
  source 1..110: mol_type = other DNA
gccccgcagtaaaagacaatgtggtggtcttttaaataactttaaaaaaattacatatgacctcgaccttatacctgactaatattctcaagggtaagtctcaatcttgg

SEQ ID NO: 51947 - DNA, 110 bp, synthetic construct
  source 1..110: mol_type = other DNA
gctacatagtgccagtttcgtgccagtgccaccccctggaggcaattcagaatgggtcaagagcgctcagctggtgacaggaatatccaaatgcctgcctcagttcctat

SEQ ID NO: 51948 - DNA, 110 bp, synthetic construct
  source 1..110: mol_type = other DNA
gtcaagagcgctcagctggtgacaggaatatccaaatgcctgcctcagttcctatgacgacacaaaaacaggaaggctcctcaggcttatcagatgcatccaattaacat

SEQ ID NO: 51949 - DNA, 110 bp, synthetic construct
  source 1..110: mol_type = other DNA
gagaaaaccacaccatgaggtagacggagtactgttcaagggcagatcacgctgaccaatctcagacagacagtcatcccggcctgctatgataaagagtttccctacaa

SEQ ID NO: 51950 - DNA, 110 bp, synthetic construct
  source 1..110: mol_type = other DNA
ccaatctcagacagacagtcatcccggcctgctatgataaagagtttccctacaaagttcattctactactgtctgcaaaaacttatttcctacccttctccactctact

SEQ ID NO: 51951 - DNA, 110 bp, synthetic construct
  source 1..110: mol_type = other DNA
gacagcttatatttaagcaattaactcttcctgaccatcttcctgattctttttgccgtatgctctcttgcccattatggctgtgtggagagctttaggcagctggtatc

SEQ ID NO: 51952 - DNA, 110 bp, synthetic construct
  source 1..110: mol_type = other DNA
ccgtatgctctcttgcccattatggctgtgtggagagctttaggcagctggtatctagtcttaccaacacatctgcacccatatttaacaacgtaaatggcaatatgagg

SEQ ID NO: 51953 - DNA, 110 bp, synthetic construct
  source 1..110: mol_type = other DNA
ctaatgtggaagaccgctgaatgacactcgttcactagcagcagcgtgtgacggacctggcctaattccccagactgtttcctcattttataaatgaggataactaccca

SEQ ID NO: 51954 - DNA, 110 bp, synthetic construct
  source 1..110: mol_type = other DNA
cctggcctaattccccagactgtttcctcattttataaatgaggataactacccattctgcctacgttggagaattgtgcggctaaaagaaaataatgtatgcaaaggtg

SEQ ID NO: 51955 - DNA, 110 bp, synthetic construct
  source 1..110: mol_type = other DNA
ttgtatacttttaaattttgtgctcatgctattggtatcatcataagaatacatagccaaattaaggaatcaagatgtacccctactaggcttttctatatgttatcatg

SEQ ID NO: 51956 - DNA, 110 bp, synthetic construct
  source 1..110: mol_type = other DNA
gccaaattaaggaatcaagatgtacccctactaggcttttctatatgttatcatgtcagctgcaaacagtgacagtttcatttcttcctttccaatacggattccttttt

SEQ ID NO: 51957 - DNA, 110 bp, synthetic construct
  source 1..110: mol_type = other DNA
ggaagtgacggttgcttcttagtcacaccatggatgctgttacctgcttaaaatgcctacacactagctaaggaaacagctcagggtcaaaggccagaacttgcaatttg

SEQ ID NO: 51958 - DNA, 110 bp, synthetic construct
  source 1..110: mol_type = other DNA
taacccactgaatcactacaagaactccttttccagcaaatgtatagcatacattttacatgtaaatctttaattcaactagaacttattttggtgtaggtctaattctt

SEQ ID NO: 51959 - DNA, 110 bp, synthetic construct
  source 1..110: mol_type = other DNA
ttcttcctcgcatccaggtcagatgaccggtgtagaaactttaccaacgattttgcctaatctctgaaatgtcttccttgaccttttgtttcttgccattcaagggaaat

SEQ ID NO: 51960 - DNA, 110 bp, synthetic construct
  source 1..110: mol_type = other DNA
gcaacctcagtcagattcgtttctactgtgccacgacgggaactctgataccaggtttaggatacagcttacactgtggagtgcagagcagggaaccaaaaagtaactgg

SEQ ID NO: 51961 - DNA, 110 bp, synthetic construct
  source 1..110: mol_type = other DNA
tttaggatacagcttacactgtggagtgcagagcagggaaccaaaaagtaactggatccatgaagacagaaactagccatgaggtttatctttctctagacaccccagtt

SEQ ID NO: 51962 - DNA, 110 bp, synthetic construct
  source 1..110: mol_type = other DNA
agttcttgccagtacttgcagtcaatcatttctggggcgtatgtcactaaattgaaatgtgtatgtgtattggcttatttcccaataattgttatattttattgttccca

SEQ ID NO: 51963 - DNA, 110 bp, synthetic construct
  source 1..110: mol_type = other DNA
acagattaagcagaatgatcagtccttggcctcgtttcctcctgctgggagttcgttgatcctagaaatggggggggggtggcaccctgactccccaggactcctggctg

SEQ ID NO: 51964 - DNA, 110 bp, synthetic construct
  source 1..110: mol_type = other DNA
ttttttcctatctttatcctttactgtcacacagactgcttcacgtctgacccgtctggtcagcaagcaattctctgacagcagctgggtgtcctgcagtttaactccgt

SEQ ID NO: 51965 - DNA, 110 bp, synthetic construct
  source 1..110: mol_type = other DNA
actctgccaggaagaatgtggcggttttatcagccatgtctccatctccagatcaggagctcaacatatggtggggcctgaagtggcggaaggcacagcccccccccacc

SEQ ID NO: 51966 - DNA, 110 bp, synthetic construct
  source 1..110: mol_type = other DNA
aagggccgccgataggctcccccatgtccagggcgttgtggctcttcctcctgtaaaactacttggctctgctcccaggcagagatcggagagggctcttgctcagggat

SEQ ID NO: 51967 - DNA, 110 bp, synthetic construct
  source 1..110: mol_type = other DNA
aaactacttggctctgctcccaggcagagatcggagagggctcttgctcagggattaaagcttctcaggtccagaagcttcgttttcccagtttcgagatgtaactaaca

SEQ ID NO: 51968 - DNA, 110 bp, synthetic construct
  source 1..110: mol_type = other DNA
ggtggaatctgtgttctctgggaatctcatcccggcgttcttctgcctctcagctagacgtcctttggcaagtgagggtctctccctaggaggctcaggacccctgggga

SEQ ID NO: 51969 - DNA, 110 bp, synthetic construct
  source 1..110: mol_type = other DNA
gaagagtgattttagagcctgtgcgcaaagatggctagagagacgtggtgactatgggaccagggtgacctccaccagttatgccaactgtggctagtagcccagaactg

SEQ ID NO: 51970 - DNA, 110 bp, synthetic construct
  source 1..110: mol_type = other DNA
gggaccagggtgacctccaccagttatgccaactgtggctagtagcccagaactgtggtagctctgtggccaggggctgtgcccacgcctgggcatttggttgctggtgc

SEQ ID NO: 51971 - DNA, 110 bp, synthetic construct; identical to SEQ ID NO: 51969
  source 1..110: mol_type = other DNA

SEQ ID NO: 51972 - DNA, 110 bp, synthetic construct; identical to SEQ ID NO: 51970
  source 1..110: mol_type = other DNA

SEQ ID NO: 51973 - DNA, 110 bp, synthetic construct
  source 1..110: mol_type = other DNA
tttgacggtaccattattgggtcccaggataatcaaattaaaggagacttcattagcagggttggggtgtggggagaacaaacggattatctcctacctgagggggctct

SEQ ID NO: 51974 - DNA, 110 bp, synthetic construct
  source 1..110: mol_type = other DNA
gcagggttggggtgtggggagaacaaacggattatctcctacctgagggggctctttgaaagggaaggtctagttaatggttctgaatttggagccttgattttggctgt

SEQ ID NO: 51975 - DNA, 110 bp, synthetic construct
  source 1..110: mol_type = other DNA
tgcggcaaggatttaatctccctggttcaggctgcttgttgtaagaccaggcaattacatggacgtcttggttcactgattacgccacgtagatattatagagtcgatcc

SEQ ID NO: 51976 - DNA, 110 bp, synthetic construct
  source 1..110: mol_type = other DNA
tacatggacgtcttggttcactgattacgccacgtagatattatagagtcgatcctgaattaatagcctgaaggatttttaagaaagacactcacttggcagctctgggt

SEQ ID NO: 51977 - DNA, 110 bp, synthetic construct
  source 1..110: mol_type = other DNA
accaaaatggaaactttcctggttgtgtctggtgaactggcgggtggttccacatgggagcttgtttgcacgtacccagccccaacccccaattaccaacggtgaaggaa

SEQ ID NO: 51978 - DNA, 110 bp, synthetic construct
  source 1..110: mol_type = other DNA
aaagctgccagggggccctctccccggccagccaaccgtaagcaagtatccagcagactggattgctaggtcgagagttcacgacactgattccatcagtaacgggatgt

SEQ ID NO: 51979 - DNA, 110 bp, synthetic construct
  source 1..110: mol_type = other DNA
cagagctcatgcagtccctctccgtcctgggcattgccacctccccggggcccttccctatttcgccatcctaaatgctgactgaaacactgggggaggggggaggaggg

SEQ ID NO: 51980 - DNA, 110 bp, synthetic construct
  source 1..110: mol_type = other DNA
ccctatttcgccatcctaaatgctgactgaaacactgggggaggggggaggagggaagaaggagtgcacaggggttcacagcaacaaactgctcccagcacatggctctg

SEQ ID NO: 51981 - DNA, 110 bp, synthetic construct
  source 1..110: mol_type = other DNA
aaaccaacaggactctggcaaacagaaatttacttacttatgagcacagtaaggtgcattcaactcggaaaggccgtgccctgcaagcaggtgtaaggtcttccagttat

SEQ ID NO: 51982 - DNA, 110 bp, synthetic construct
  source 1..110: mol_type = other DNA
gaaactgcaggcagcaactaccatttacggtctgaaaagacacaacaaacgccaatatttcaaaagctgttcttactccacaaggatgtactgatggaagatttaacaat

SEQ ID NO: 51983 - DNA, 110 bp, synthetic construct
  source 1..110: mol_type = other DNA
ctggatcctctgggaggggaacaccaagatgggattagacatgaggaggtggggagggagatggagagggagagagagaaagaagcagggatcaggaggacgtgaagaga

SEQ ID NO: 51984 - DNA, 110 bp, synthetic construct
  source 1..110: mol_type = other DNA
gggagatggagagggagagagagaaagaagcagggatcaggaggacgtgaagagagtttcagaccttttgtgggtctgacatgtatgaaagaggaggaagatggaaggat

SEQ ID NO: 51985 - DNA, 110 bp, synthetic construct
  source 1..110: mol_type = other DNA
cacccagccctgcctccatctaaccacatggccaaaacaccgtactagagaaatagcactagacttaatagctagacaaccaaataagactctgccaccaccagccacca

SEQ ID NO: 51986 - DNA, 110 bp, synthetic construct
  source 1..110: mol_type = other DNA
gaacccacacttcccatagaactttggagcatccatcacaagatatgtaacagtgtgctgagaacaaacagcagcatgaaggctttcacagctcagtgaggctcagttac

SEQ ID NO: 51987 - DNA, 110 bp, synthetic construct
  source 1..110: mol_type = other DNA
gaagccccagtggatgggcttgagggatgcagggccaagtccaggccagctggttggcagatgggtttatcaggaggtagactttcatgccaattcaaaagcaggaaatt

SEQ ID NO: 51988 - DNA, 110 bp, synthetic construct
  source 1..110: mol_type = other DNA
agctggagacttgacttccccttcagccctggaactcaaccctcagccccgccttcccagtcttcctccctccctgtcatgtgtactgagtgatatattcgttgtcagct

SEQ ID NO: 51989 - DNA, 110 bp, synthetic construct
  source 1..110: mol_type = other DNA
cccagtcttcctccctccctgtcatgtgtactgagtgatatattcgttgtcagctaccgtgttcttgctggggacacagaagtaaatcgggggtgttctgtgcgggggag

SEQ ID NO: 51990 - DNA, 110 bp, synthetic construct
  source 1..110: mol_type = other DNA
agtctaaatctgacgtcaagccactgggctctggcactgactagctttgtgaccttggccgggttactgaactcctctgtgccttctttctttttaacaaaaggagagta

SEQ ID NO: 51991 - DNA, 110 bp, synthetic construct
  source 1..110: mol_type = other DNA
tggccgggttactgaactcctctgtgccttctttctttttaacaaaaggagagtaatagtggcacctgtctcagagggtggtgggactaagtgagcgtaacaccctacac

SEQ ID NO: 51992 - DNA, 110 bp, synthetic construct; identical to SEQ ID NO: 51990
  source 1..110: mol_type = other DNA

SEQ ID NO: 51993 - DNA, 110 bp, synthetic construct; identical to SEQ ID NO: 51991
  source 1..110: mol_type = other DNA

SEQ ID NO: 51994 - DNA, 110 bp, synthetic construct
  source 1..110: mol_type = other DNA
ggatgcaggactggggagtcaggctgcagggaggcctgacccgaatgccctgttatcagtgcggacttccaaatgccacaagagatgccacaacgagaacaccacacgcg

SEQ ID NO: 51995 - DNA, 110 bp, synthetic construct
  source 1..110: mol_type = other DNA
aagagattaaggcagggaaaaccaagtaggatcccctgaaactgcatcaccattctaatccatcctgatggccaactatgctcaaaagcgatatagctcccctggaggaa

SEQ ID NO: 51996 - DNA, 110 bp, synthetic construct
  source 1..110: mol_type = other DNA
ccagccccaccactgaggagagcttaagatgggtcaagactgtgcatttagttaccacaacctccagaaagcgtattggtcacctataccaacactgacatttaaaagga

SEQ ID NO: 51997 - DNA, 110 bp, synthetic construct
  source 1..110: mol_type = other DNA
ataatagttctcacctcccaggattattgtgaggttatataagctagtacatataaaacacttagaattgtgactgatacatagtaagtactaggttattattattggag

SEQ ID NO: 51998 - DNA, 110 bp, synthetic construct
  source 1..110: mol_type = other DNA
gaggttgggaggcaaggaaagagccacggcctgagaaacaggtcaggggttcaagtcctgagtctgccacttgctagaggccaggcctcaagctacttactcactctctc

SEQ ID NO: 51999 - DNA, 110 bp, synthetic construct
  source 1..110: mol_type = other DNA
tcctgagtctgccacttgctagaggccaggcctcaagctacttactcactctctcagagcctcctttcttcatatgtcaaatgagacagaaaagatctctggactttttt

SEQ ID NO: 52000 - DNA, 110 bp, synthetic construct
  source 1..110: mol_type = other DNA
accccggaccaaacccgccgcagcagattccctgggcagagggccaggaatctacatgtaaagctccccagggaaatctgacagtcactctgggctttgcctctacagca

SEQ ID NO: 52001 - DNA, 110 bp, synthetic construct
  source 1..110: mol_type = other DNA
agacacaatccccccgcctcagggtgaaagcccagctccaccactggctcttgaagccaccttgggtgggccacttacctgccccaggtctccattaactgtcttgcatg

SEQ ID NO: 52002 - DNA, 110 bp, synthetic construct
  source 1..110: mol_type = other DNA
gtaagttggcccctcctcagagaaggagaaggagatgcggcaggggaagggtggtttgcagggccaccctctcctcctgaaggtcccgagaatagttcagaaggcagggc

SEQ ID NO: 52003 - DNA, 110 bp, synthetic construct
  source 1..110: mol_type = other DNA
ttgcagggccaccctctcctcctgaaggtcccgagaatagttcagaaggcagggctgggttgcgagctggagctctagtatgaggaaaatgcagccccgccatcatccct

SEQ ID NO: 52004 - DNA, 110 bp, synthetic construct
  source 1..110: mol_type = other DNA
ggagtgccggaggaggcggttgggattttaacactagcttctagatccagtccgggctaattcctttctacaaatgccaatgttttttccgcctgggtctgtggcagatc

SEQ ID NO: 52005 - DNA, 110 bp, synthetic construct
  source 1..110: mol_type = other DNA
attaccagcatttagtgatgctgtcttgatcctggtttcctgatgattacaagaagccagagtgtgcagtagcatccttttgtgcagctcgcctgtccaaaacatacggg

SEQ ID NO: 52006 - DNA, 110 bp, synthetic construct
  source 1..110: mol_type = other DNA
gcagtagggacccaacaggggtggttggccttcctgcagatctaggtccagacccagctcggccgagctgtgaggcacttagagccagaaagcccgcaactcaaccatgt

SEQ ID NO: 52007 - DNA, 110 bp, synthetic construct
  source 1..110: mol_type = other DNA
agctcggccgagctgtgaggcacttagagccagaaagcccgcaactcaaccatgttctaggcgtgaataagcaggagggggggtggccagaggctgggctcagggctcag

SEQ ID NO: 52008 - DNA, 110 bp, synthetic construct
  source 1..110: mol_type = other DNA
gtcacaagatccagtcccctgtctcccagcacagccagaaggagagacagctactctgtttataaaaacaaacaccgattttataagcacacaggcatttgttccacatg

SEQ ID NO: 52009 - DNA, 110 bp, synthetic construct
  source 1..110: mol_type = other DNA
ttactacatgataactattattttctcctcttggaaactgactaaatagcaaggaacctagtcctgtcattctggagagttgggcatgatggaggcactgggggtgtggg

SEQ ID NO: 52010 - DNA, 110 bp, synthetic construct
  source 1..110: mol_type = other DNA
ttttgaagatgggctctttgctggctactttagaagcagacgctgacttattgtacacaccctgccgcttgccaccacgtggcagctgctgcctccttctgccttcggac

SEQ ID NO: 52011 - DNA, 110 bp, synthetic construct
  source 1..110: mol_type = other DNA
tgcaggagcccaaagagcctctccctgccaggcgtctcccccacaagggttctggttgctcaagttgcaaaatggcaccttgggttcagcaattaagacttcacgtggac

SEQ ID NO: 52012 - DNA, 110 bp, synthetic construct
  source 1..110: mol_type = other DNA
ttgctcaagttgcaaaatggcaccttgggttcagcaattaagacttcacgtggacctgctgcctttgatcacaagggaggaggtgacggggcgctgaaatggtgagggca

SEQ ID NO: 52013 - DNA, 110 bp, synthetic construct; identical to SEQ ID NO: 52011
  source 1..110: mol_type = other DNA

SEQ ID NO: 52014 - DNA, 110 bp, synthetic construct; identical to SEQ ID NO: 52012
  source 1..110: mol_type = other DNA

SEQ ID NO: 52015 - DNA, 110 bp, synthetic construct
  source 1..110: mol_type = other DNA
caaactctgtctctgcatttcaattcagcaccaacaacagaggccaagttctggcaacaaaggcactgtctctgccttagaggaacttccagtctcgtggagaagataca

SEQ ID NO: 52016 - DNA, 110 bp, synthetic construct
  source 1..110: mol_type = other DNA
ggctgagagctgcctcctcgagggatgaatgaaggtgaaggtgaagctatggggacaggagtatgtgtgagtgtgagcactgatgagcaatgccgagggcccgtcatctt

SEQ ID NO: 52017 - DNA, 110 bp, synthetic construct
  source 1..110: mol_type = other DNA
catattttatattgtacatgtactatatatatattgccttgagacttcctcttcgaaccatggattacttagctgttgtttagtttccaagtgtctagagattttcagtt

SEQ ID NO: 52018 - DNA, 110 bp, synthetic construct
  source 1..110: mol_type = other DNA
tgtggccccacccaaggctcttgcccccctcccctgactacatccagctcaggttggctgatgatgactctctgctggccaggaaactgtttgcccatcctgtgtgtctg

SEQ ID NO: 52019 - DNA, 110 bp, synthetic construct
  source 1..110: mol_type = other DNA
tcaacagcgtttgaggtgtttggggtttgttattggatactctttgtcggtgcgtctgtgagcactcagcccagctagatttaaggccagaaggagtttaacttcttcca

SEQ ID NO: 52020 - DNA, 110 bp, synthetic construct
  source 1..110: mol_type = other DNA
gttgatagtttaagttcaagaaagtagaccaatattgagtttcggaggtattgtgaaaggacaatggagcagtaaatatagcgagagctcattgtccttttaccctctag

SEQ ID NO: 52021 - DNA, 110 bp, synthetic construct
  source 1..110: mol_type = other DNA
aaaggacaatggagcagtaaatatagcgagagctcattgtccttttaccctctagctgtcaagacgatgagttgtccgggcatagaaaccattgccaacccccccacata

SEQ ID NO: 52022 - DNA, 110 bp, synthetic construct
  source 1..110: mol_type = other DNA
ttgtttctgcccctctgtcctttcgcgcatgatcctcagggccctggggtgggctctgccagccccctctactcctggggaactcctgcccctccctcaggctcatctga

SEQ ID NO: 52023 - DNA, 110 bp, synthetic construct
  source 1..110: mol_type = other DNA
ctgccagccccctctactcctggggaactcctgcccctccctcaggctcatctgaacggacatgacttgggtggaatgtcgcaggattccctgcagctggccagaccctc

SEQ ID NO: 52024 - DNA, 110 bp, synthetic construct
  source 1..110: mol_type = other DNA
atacagactccgaccagtcagagccgatccttattacagcagttcccatctggcgagtgcatcctgagagtgggcactaagctaagggcgacacacacaccatctcattt

SEQ ID NO: 52025 - DNA, 110 bp, synthetic construct
  source 1..110: mol_type = other DNA
ttcatgtgggaggagcccgagatccaggcggctctgaggaggctgaaggaagccggctgcaggctgcgcatcatgaagccccaggacttcgagtacgtctggcagaattt

SEQ ID NO: 52026 - DNA, 110 bp, synthetic construct
  source 1..110: mol_type = other DNA
tacattttcaggaagcgagaggggactcacgtgcacgcaggttaaaaaggactcactctgcaatagctttacaccccacaatgcggcctgaagacccgattccatcttct

SEQ ID NO: 52027 - DNA, 110 bp, synthetic construct
  source 1..110: mol_type = other DNA
ctctgcaatagctttacaccccacaatgcggcctgaagacccgattccatcttctgattggtcttctgattggtccttatttgcgtggggaacaggttatttggtggccg

SEQ ID NO: 52028 - DNA, 110 bp, synthetic construct
  source 1..110: mol_type = other DNA
cctgggtggtcccaggaacatgtggttcctctataaatgaggtctggttctgattcatttagaattagcatgctcaatacaacagaaatctccaataagagcagcttaaa

SEQ ID NO: 52029 - DNA, 110 bp, synthetic construct
  source 1..110: mol_type = other DNA
catttagaattagcatgctcaatacaacagaaatctccaataagagcagcttaaataaaatcatagtttattatctcttactagaaagtttggagataggcaccccaggg

SEQ ID NO: 52030 - DNA, 110 bp, synthetic construct
  source 1..110: mol_type = other DNA
gctcccactgttgtggcttcagccaccatctaactacaatctaatgagcaagaagagcccagctgagcttttctctgatccacctgaggttataaaatgattgtcgcagc

SEQ ID NO: 52031 - DNA, 110 bp, synthetic construct
  source 1..110: mol_type = other DNA
cttgcccaaggttgttcaacatcacactctggccacgaaatacattcattgtcccagggaggacatttgccctgtaattgagaactctgcagggagggggtcacattggg

SEQ ID NO: 52032 - DNA, 110 bp, synthetic construct
  source 1..110: mol_type = other DNA
ggaccctaagcttggaaccttcactgctcccttgcacagctgtcccctgcaataggggaagagaatggtaagtggctgtgccttgggctccaaagtctaggagaggagcc

SEQ ID NO: 52033 - DNA, 110 bp, synthetic construct
  source 1..110: mol_type = other DNA
ccaaaaaaattttgctggtctctgtctccactactgaactctgccattacagaaacaagctggccatggagtgccagccacgcaagtagaaccctctaagcccttggata

SEQ ID NO: 52034 - DNA, 110 bp, synthetic construct
  source 1..110: mol_type = other DNA
caagctggccatggagtgccagccacgcaagtagaaccctctaagcccttggatatttgattggttcctagaggggcaagtaaatccccagacaggtcccaacaagccag

SEQ ID NO: 52035 - DNA, 110 bp, synthetic construct
  source 1..110: mol_type = other DNA
cttctggtcatttgcaagggagtttaacctaagctaagctctggcctagtctcaccactcgccctaggtccccagaccccatacttaagaggttgagtctgggtccttga

SEQ ID NO: 52036 - DNA, 110 bp, synthetic construct
  source 1..110: mol_type = other DNA
gtccagcctctgctccccactgttatgcacagatattaggggcaggctgttagttctggccggctgcttgtcctggtctgggtatttctacacttaatagggagaagaga

SEQ ID NO: 52037 - DNA, 110 bp, synthetic construct
  source 1..110: mol_type = other DNA
gccaccaggacagagaaatcctaaatgttgtgacaccatatttctaccccaaatttcatcctggtagaattactggccagtaattacctagcaaattagagaatctacca

SEQ ID NO: 52038 - DNA, 110 bp, synthetic construct
  source 1..110: mol_type = other DNA
tttaatcctcaggatgacccccacacgatgggcactgtcattgtcatttccatgcttcagaagaggaagctaaggcaccaggatgacccagctgcaaaagcagctgggcc

SEQ ID NO: 52039 - DNA, 110 bp, synthetic construct
  source 1..110: mol_type = other DNA
gttttccaggggcaaaagccgaggcctgtttaggatgaaccaaatgcccaagagagaagaggcaatagcatgagaatcctgtgtctggactcaagccaagcccctgacca

SEQ ID NO: 52040 - DNA, 110 bp, synthetic construct
  source 1..110: mol_type = other DNA
aaacgtttttcaaaactctgataccaagtgtcctttacactatacagacccatttgccacttgaaatgataaggaatcctttcccttaagcttttcaatcccatgcaaac

SEQ ID NO: 52041 - DNA, 110 bp, synthetic construct
  source 1..110: mol_type = other DNA
tttttagggctgcgcccatggcataagaaggttcccaggctagggggttgaggggtctagttggagctgcagctgctgacctaggccgaggccacagcaacaccagatca

SEQ ID NO: 52042 - DNA, 110 bp, synthetic construct; identical to SEQ ID NO: 52041
  source 1..110: mol_type = other DNA

SEQ ID NO: 52043 - DNA, 110 bp, synthetic construct
  source 1..110: mol_type = other DNA
taattattattcaggtttctgaaaccttattcagaaggcaggactcaataggattgagattagtacacagccactaggtaacaacatgaaaacttctctattttgccatc

SEQ ID NO: 52044 - DNA, 110 bp, synthetic construct
  source 1..110: mol_type = other DNA
tggggaccaaggaggggggacagctccctctgctggaggctcaaggaatagcatagcctcaggaactgctgcaccattcactgcccaacactcaccacttcagtgcctgt

SEQ ID NO: 52045 - DNA, 110 bp, synthetic construct
  source 1..110: mol_type = other DNA
attttcctcgttaatggtgtggagatgggagggacaaaagagagattactttttttctaggagatggaccaatgaattcaattctatcctgcatgtttcttcagctatat

SEQ ID NO: 52046 - DNA, 110 bp, synthetic construct
  source 1..110: mol_type = other DNA
tctaggagatggaccaatgaattcaattctatcctgcatgtttcttcagctatatattcagataatccaaaatagaaagtaggaaacggccattttgtactattgtaatt

SEQ ID NO: 52047 - DNA, 110 bp, synthetic construct
  source 1..110: mol_type = other DNA
agtgagactggaaggccggtgaggcctggaagagatcaaagcatctaggaatgagatctcaggccacagcctagctcctcccggagcacttgctcaggctgggtttgcac

SEQ ID NO: 52048 - DNA, 110 bp, synthetic construct
  source 1..110: mol_type = other DNA
atctcaggccacagcctagctcctcccggagcacttgctcaggctgggtttgcacacctgtcaaataggggtaaactgggggacgaaattaaaggagagagaaaagctag

SEQ ID NO: 52049 - DNA, 110 bp, synthetic construct
  source 1..110: mol_type = other DNA
aggagggaggacctctgcaggggctcaggatggtggagctgggaattagggggcgggaggaaggtcatgacaaggttgcccaggatatgaccggcttaaaaaggccagcg

SEQ ID NO: 52050 - DNA, 110 bp, synthetic construct
  source 1..110: mol_type = other DNA
tccgctgaaccgtggccggaactccctagtccccttatttttcaggcctaaaccatgtcccgtgtcaccaaaccaactatggacctaatagcttggggtccagttagttg

SEQ ID NO: 52051 - DNA, 110 bp, synthetic construct
  source 1..110: mol_type = other DNA
tgtcccgtgtcaccaaaccaactatggacctaatagcttggggtccagttagttggcagcaaggtgggagtcattgtgaggagcaaccccaggttttgccaacagtgggg

SEQ ID NO: 52052 - DNA, 110 bp, synthetic construct
  source 1..110: mol_type = other DNA
ctcggccgatgcatgtgtccacaggtgcccatctgcccatctggacgtggcttgggtttccagctccagtacggatcccctgaacctctcaaaaccactggaaccagctg

SEQ ID NO: 52053 - DNA, 110 bp, synthetic construct
  source 1..110: mol_type = other DNA
cagactccggggagaactcacacagaaaagcagagtcacgacagccaccttcaaatccaaagagagagtcacgtgggagagtctctgaaagctgtctttttaaatttttc

SEQ ID NO: 52054 - DNA, 110 bp, synthetic construct
  source 1..110: mol_type = other DNA
gaagtgatggtaaatgcttagcaatcagccctccaaaaaaaagaggaaaaaaaaagccttgattgtagcatgtgtcaatttctgtggtgtaaatactctcagtatggcca

SEQ ID NO: 52055 - DNA, 110 bp, synthetic construct
  source 1..110: mol_type = other DNA
gccttgattgtagcatgtgtcaatttctgtggtgtaaatactctcagtatggccaatcacagctgacaagctgacatggagtcagaaagaaatgttcacaatcaactctc

SEQ ID NO: 52056 - DNA, 110 bp, synthetic construct
  source 1..110: mol_type = other DNA
tagagattgggcttacagtaactttggggaagggcacagaacaagatgaaggtttattttgtttgtttgtttttttatggccgcacccggggatcaaatccaagccacag

SEQ ID NO: 52057 - DNA, 110 bp, synthetic construct
  source 1..110: mol_type = other DNA
ggggaagggcacagaacaagatgaaggtttattttgtttgtttgtttttttatggccgcacccggggatcaaatccaagccacagctgtgacctatgccacaggtgtggc

SEQ ID NO: 52058 - DNA, 110 bp, synthetic construct
  source 1..110: mol_type = other DNA
ccttctcttacttgtcctcgtgtttccagccactggtacaatcccagcacttcgggataaatgcttgctaaaaacaagtaagttgtcggcaaaaggaccagagcctggca

SEQ ID NO: 52059 - DNA, 110 bp, synthetic construct
  source 1..110: mol_type = other DNA
ttaagccatttttgttccttacagttgaattcacttcttctctagtccacctttgtaagggcacatcagctttttaatcttggcgtcaccagcagtgagtgcctgacaga

SEQ ID NO: 52060 - DNA, 110 bp, synthetic construct
  source 1..110: mol_type = other DNA
ctgactatgtaagtaatgaattcagagattttgacagttcttgcaaatatagttatgaacactgttttgtttttggggaaattgaggagggagtaacactgccctcttcc

SEQ ID NO: 52061 - DNA, 110 bp, synthetic construct
  source 1..110: mol_type = other DNA
gactccctcacctgcctgcagctactcacaggtcagctaggcggctctgctcctgagagctgactggctgttaacctgcgcacctcggctttccttcctatgcgctctca

SEQ ID NO: 52062 - DNA, 110 bp, synthetic construct
  source 1..110: mol_type = other DNA
tgactagtttcctctgagccacaatgggaactccaaaataactttttttaatagagtatcttgtgaaactctgttgctttaaacaagctggaaaatggtactataaataa

SEQ ID NO: 52063 - DNA, 110 bp, synthetic construct
  source 1..110: mol_type = other DNA
gagccacaatgggaactccaaaataactttttttaatagagtatcttgtgaaactctgttgctttaaacaagctggaaaatggtactataaataaaacctagatgattaa

SEQ ID NO: 52064 - DNA, 110 bp, synthetic construct
  source 1..110: mol_type = other DNA
gtgggttaaggatctgacgttgccacaagctgcagtgttaagtcacaggtacggctgggatctgctattgcggtgcctatggcataagctgcagcttcagctctcattca

SEQ ID NO: 52065 - DNA, 110 bp, synthetic construct
  source 1..110: mol_type = other DNA
tctaggagtatcatgcctgaattacacagctgataaatagcagggattcagaggagagctgttcttgtggtacaacattaacatactttggtgcttaacattctttccca

SEQ ID NO: 52066 - DNA, 110 bp, synthetic construct
  source 1..110: mol_type = other DNA
gaaatgtccctggccaaacctttccaggaggaagcaaggcaggatgtgatgaggaaggagccaagaaaagtagactgcagacagaggtgtgatgcatctctggtagaaga

SEQ ID NO: 52067 - DNA, 110 bp, synthetic construct
  source 1..110: mol_type = other DNA
aggagccaagaaaagtagactgcagacagaggtgtgatgcatctctggtagaagatgggggaaagctggctgcctcccctacgggattaatgatgtaagtctacatgcta

SEQ ID NO: 52068 - DNA, 110 bp, synthetic construct
  source 1..110: mol_type = other DNA
gatacctgtgtgttgtctgtgtccagtctagactttgggtggggggcgggagttgtagtccttgtctcatgtggtttttctcccctagtttttcatggtaaatgccagag

SEQ ID NO: 52069 - DNA, 110 bp, synthetic construct
  source 1..110: mol_type = other DNA
cagtgacaacttggaggagggactggtgctaccttcctgtgtgtgtgtgtgtgtgtgtgtgtgtgtgtgtgttagacctcgggcacctcctccagtggagcagctaggga

SEQ ID NO: 52070 - DNA, 110 bp, synthetic construct
  source 1..110: mol_type = other DNA
tgtgtgtgtgtgtgtgttagacctcgggcacctcctccagtggagcagctagggacaggtgtaaagcgtgagggaagctgggagagtcatgaaagggtttttctttggtg

SEQ ID NO: 52071 - DNA, 110 bp, synthetic construct; identical to SEQ ID NO: 52069
  source 1..110: mol_type = other DNA

SEQ ID NO: 52072 - DNA, 110 bp, synthetic construct; identical to SEQ ID NO: 52070
  source 1..110: mol_type = other DNA

SEQ ID NO: 52073 - DNA, 110 bp, synthetic construct
  source 1..110: mol_type = other DNA
gccaaagcaatgaaagcagaatcttaaccactagaccaacaaggaactcccagattttccagattggaatattctataactacaaacaggtatatgtggtgtatgttact

SEQ ID NO: 52074 - DNA, 110 bp, synthetic construct; identical to SEQ ID NO: 52073
  source 1..110: mol_type = other DNA

SEQ ID NO: 52075 - DNA, 110 bp, synthetic construct
  source 1..110: mol_type = other DNA
tcacttggcttctgactggctgggttgctgggctgcctcttctgaccttctcaattaaactcttcctcctggagctattggagatctgtgcagcagttctgatgctggat

SEQ ID NO: 52076 - DNA, 110 bp, synthetic construct
  source 1..110: mol_type = other DNA
ctggctcttatctccaaccaaggcccacttgccttgctccgacaattcttaaataacagcccaagcgaaggccatgccaccttccaaaagacaccccttcgggaacgccc

SEQ ID NO: 52077 - DNA, 110 bp, synthetic construct
  source 1..110: mol_type = other DNA
acagcccaagcgaaggccatgccaccttccaaaagacaccccttcgggaacgccctcccccccgccccatccacttaggaactccgggtcaccaaacaagctcccctaga

SEQ ID NO: 52078 - DNA, 110 bp, synthetic construct
  source 1..110: mol_type = other DNA
agctcctgagccagctccagctttcccaggtgcttttccagggccttggagatggcatcgcgggctcccagctgattcagcaccacggcgtagtccctgctcaccgaggc

SEQ ID NO: 52079 - DNA, 110 bp, synthetic construct
  source 1..110: mol_type = other DNA
catcgcgggctcccagctgattcagcaccacggcgtagtccctgctcaccgaggccaggcggtgcaggaagaggatcagctcctggagcacctggggtgggggcagggag

SEQ ID NO: 52080 - DNA, 110 bp, synthetic construct
  source 1..110: mol_type = other DNA
aagaaaatgtaccataaacaaataggatttactcaaaaaatgaatagatggtttactctcatgaaaataagaaatgagagaagtcacacagttgtctcggtagatgcgaa

SEQ ID NO: 52081 - DNA, 110 bp, synthetic construct; identical to SEQ ID NO: 52080
  source 1..110: mol_type = other DNA

SEQ ID NO: 52082 - DNA, 110 bp, synthetic construct
  source 1..110: mol_type = other DNA
ggtatagaaatacataccctgggagtttattatgaccattaactaatatttgacaggtgctgggggagttcccgttctagctcagtggtaaccagaccaactaggatcca

SEQ ID NO: 52083 - DNA, 110 bp, synthetic construct
  source 1..110: mol_type = other DNA
cacctggactgagcaccctcctggggtttagaggcatcattctgggaagctctgtcctgggcagtgcgctcttgttgacagaggctcttgttggcggaggcttttagggg

SEQ ID NO: 52084 - DNA, 110 bp, synthetic construct
  source 1..110: mol_type = other DNA
ggtccctggccgacagaatgagcatgagatcacatggaagaatggatgcatcttcactgggttcaggcatctgggagaggccagagagggtgagggaggacttctcactc

SEQ ID NO: 52085 - DNA, 110 bp, synthetic construct
  source 1..110: mol_type = other DNA
actgggttcaggcatctgggagaggccagagagggtgagggaggacttctcactctctgaggaggccaggcctggccctccccagtgtggagctggatagggaggggctt

SEQ ID NO: 52086 - DNA, 110 bp, synthetic construct
  source 1..110: mol_type = other DNA
tgtttctcccagagatccatcagctgcccaagaaattgggtgggaatacaacacagcaattggagaagtcagctctgtctccctcctcccccacattccagaaatggcag

SEQ ID NO: 52087 - DNA, 110 bp, synthetic construct
  source 1..110: mol_type = other DNA
cgcaactaccttcttacctaactctcacacaccaagccaatatttcacttaccctaaatcatgccaagtctaggttccagctaactaggggctacacctacagattacag

SEQ ID NO: 52088 - DNA, 110 bp, synthetic construct
  source 1..110: mol_type = other DNA
caagaggagccagaggcagcagaatccaggcagggcaggtggccatttcctaagggagactcctcagagtgaggctgaggctgcattagccctggttgtggattagaaac

SEQ ID NO: 52089 - DNA, 110 bp, synthetic construct
  source 1..110: mol_type = other DNA
gagactcctcagagtgaggctgaggctgcattagccctggttgtggattagaaacccaagttggagagttcccgttgtggttcagcaggtcaagaacacaacataacatc

SEQ ID NO: 52090 - DNA, 110 bp, synthetic construct; identical to SEQ ID NO: 52088
  source 1..110: mol_type = other DNA

SEQ ID NO: 52091 - DNA, 110 bp, synthetic construct; identical to SEQ ID NO: 52089
  source 1..110: mol_type = other DNA

SEQ ID NO: 52092 - DNA, 110 bp, synthetic construct
  source 1..110: mol_type = other DNA
gcttccatcatggttatgggtaaaatcccaccgtggctcatgccctttccggccggcacccaaacagctgaacttggctggaaataacacatattcaggctgactggtct

SEQ ID NO: 52093 - DNA, 110 bp, synthetic construct
  source 1..110: mol_type = other DNA
tctggacagtgtaaaaatctgcaaatacggaactcccgttttggctcagcggttaacaaacccaactaatagccataaagacacgggtttgatccctggcctcactcagt

SEQ ID NO: 52094 - DNA, 110 bp, synthetic construct; identical to SEQ ID NO: 52093
  source 1..110: mol_type = other DNA

SEQ ID NO: 52095 - DNA, 110 bp, synthetic construct
  source 1..110: mol_type = other DNA
ctggcctacaccacagccacaataatgcgggatctgagctgcatctgcgatcacagcctatgccacagctcatggcaatgcaggatctttaaccactgagctagtgaagc

SEQ ID NO: 52096 - DNA, 110 bp, synthetic construct; identical to SEQ ID NO: 52095
  source 1..110: mol_type = other DNA

SEQ ID NO: 52097 - DNA, 110 bp, synthetic construct
  source 1..110: mol_type = other DNA
gtgagtttctaagaaacctgataggaaacagaaggagagacccattctggtaccactcaggtcgccgtgagaacggtgccgtgagatgaagcaggcaaacatgtgcttcc

SEQ ID NO: 52098 - DNA, 110 bp, synthetic construct
  source 1..110: mol_type = other DNA
ctcaggtcgccgtgagaacggtgccgtgagatgaagcaggcaaacatgtgcttcccctctccgtggaggcacttgggtccgaaccatgaggtaaacaagcctagcaaaac

SEQ ID NO: 52099 - DNA, 110 bp, synthetic construct
  source 1..110: mol_type = other DNA
tttccccgtccacacacttgcctcatcacaccaattcaatgtgacagacatgtcctagccatcctctgcgtgtgaggtctgagctgtcccgtgcgaggccttgagggagg

SEQ ID NO: 52100 - DNA, 110 bp, synthetic construct
  source 1..110: mol_type = other DNA
ttcttccttgtgctgagagccttcttgctgtggtttctgacgcatccttccttcgtttccattttacataactgctcactgtgccctgggcagctgggtctagagatctt

SEQ ID NO: 52101 - DNA, 110 bp, synthetic construct
  source 1..110: mol_type = other DNA
tggtctgtggagagtttaaaaagcccgttgttgggtgctgcctgctgatgggcatgtctcagcctggatggggagggagggagatctgagacccccccgcgagaggtggg

SEQ ID NO: 52102 - DNA, 110 bp, synthetic construct
  source 1..110: mol_type = other DNA
gtctcagcctggatggggagggagggagatctgagacccccccgcgagaggtgggtggctcttgggtagctatgggagggtagggtgagccccggaggggatgacaggag

SEQ ID NO: 52103 - DNA, 110 bp, synthetic construct
  source 1..110: mol_type = other DNA
ccaagaggaataagaccccagtcctgccttcaaaagctttccatctagtcatggagacagattccagcaagagctttttcatataacatgctgtggccattgggagcaca

SEQ ID NO: 52104 - DNA, 110 bp, synthetic construct
  source 1..110: mol_type = other DNA
cacggatggtgcttctgtgtacccaggtcctctagaaactcattcaccagtagctcattctgcaaacatttcctgaataccttccatgctttagaccagaggttctcaaa

SEQ ID NO: 52105 - DNA, 110 bp, synthetic construct
  source 1..110: mol_type = other DNA
tagtgactagtcattgacgtgtgggctgtggacctcagcatccagcccccactttgcgtcttcccagctttttcaaagccttcttttcctcgcctttgaaagggggctga

SEQ ID NO: 52106 - DNA, 110 bp, synthetic construct
  source 1..110: mol_type = other DNA
atatccagaaaggctacatgttatcagtgagcatttaaaataactatgcctgcactgttccaggagattgtcgtggttactgttgctgcttaacaaattactccaggact

SEQ ID NO: 52107 - DNA, 110 bp, synthetic construct
  source 1..110: mol_type = other DNA
cctaacttattcatgcagccctttgacagctatttactgagtaccagctaagcaccagtggagcctggggtcaaggctgcacagggaggtgggtaggcagggcttgggcc

SEQ ID NO: 52108 - DNA, 110 bp, synthetic construct
  source 1..110: mol_type = other DNA
cttctccagcagttgggctgcagaagtcaacccatgggtggagctggatactgcagcagacacttggacgaggtctctgagcctagagagatgaggctctttgacgtgtc

SEQ ID NO: 52109 - DNA, 110 bp, synthetic construct
  source 1..110: mol_type = other DNA
agggagagagagaaatcacttaacacaatcattttccaccctggtttaagggttccttgcagctgtggaggccagggaggactgtacatctcagggacacaggtgagttt

SEQ ID NO: 52110 - DNA, 110 bp, synthetic construct
  source 1..110: mol_type = other DNA
cttgcagctgtggaggccagggaggactgtacatctcagggacacaggtgagtttttcacttggcaccaccttataggtccccactgggagtacattgcttggtgatggc

SEQ ID NO: 52111 - DNA, 110 bp, synthetic construct
  source 1..110: mol_type = other DNA
aaaagaaacatcttctcctggcaaaattttgtgtaaaccatactctgctgtcagtagctgaagggttatcaatgctgggacttttagctattagagcccacgcacctccc

SEQ ID NO: 52112 - DNA, 110 bp, synthetic construct
  source 1..110: mol_type = other DNA
gcccaagttctgcagcttctaaatggtagcactagactccaacctagggcccgtgatcccaaatccaagcacctagaggtagtggtcagttgacagaaaggtggagatgg

SEQ ID NO: 52113 - DNA, 110 bp, synthetic construct
  source 1..110: mol_type = other DNA
aaagcatttaacaaccaggacccgccagggcaccaaataatcacagcagatgccagctgctggcagctggtacggctgtatgggtgcacaagtatgaacagtggttctgc

SEQ ID NO: 52114 - DNA, 110 bp, synthetic construct
  source 1..110: mol_type = other DNA
tggaaccatagatcttttttttttttgtccccaaagagctttagtgaaatatagttcatgtactatacaatttacccacttaaagagtacagttcagggggagttcccct

SEQ ID NO: 52115 - DNA, 110 bp, synthetic construct
  source 1..110: mol_type = other DNA
ccattaggtgtcaggaattcaacacacttcatctctcattctcacttcaactccgctgggagccatgtgtttttttcaaaaataaaaacgcctttatataaaaaacataa

SEQ ID NO: 52116 - DNA, 110 bp, synthetic construct
  source 1..110: mol_type = other DNA
ctgcgcggtttattctgcttaggaggtggaattagtttcggacgtttgtgtgtaaagtaaggcaggagctgcaaacagaaatgacaatatcagaaaagaaaaagttataa

SEQ ID NO: 52117 - DNA, 110 bp, synthetic construct
  source 1..110: mol_type = other DNA
ctcctctttgctgggacacccctgcatggctcacagctcacctctgtacagtctggattcagtcgccaccaccgatgccggcctctgtcgcatccgctccacgccccttc

SEQ ID NO: 52118 - DNA, 110 bp, synthetic construct
  source 1..110: mol_type = other DNA
agctggttctcccaggatatgctctggagtcccccagaccctgaagaacaaggcagagcaagacttgacctttctgtgggctggtttggaggctgggtggtagaaactac

SEQ ID NO: 52119 - DNA, 110 bp, synthetic construct
  source 1..110: mol_type = other DNA
gagcaagacttgacctttctgtgggctggtttggaggctgggtggtagaaactacagagtttggagtcctgggtctgtgttttctggtcactgtgaacagcctgagtgat

SEQ ID NO: 52120 - DNA, 110 bp, synthetic construct
  source 1..110: mol_type = other DNA
gccatatttgatgtggctcccagaacccaggtttctcgtctgctcctatggcaacaatgatgctgtcttgtccagggaaatcttgtcccgctcttcagagggactgggta

SEQ ID NO: 52121 - DNA, 110 bp, synthetic construct
  source 1..110: mol_type = other DNA
gggacccaggaagatgcaggacactctgctactgttgtcattggctgtacatgcctcaccgaagctgaaataatggccacaaaggctgcagcttccggtcctgaggaccg

SEQ ID NO: 52122 - DNA, 110 bp, synthetic construct
  source 1..110: mol_type = other DNA
atgggatgatatggaagggataggaaccagaccatgaacttggcatttatccaggcttcctggagcgacaaaagaggatgaaactggtgaagatgttggtcaataaatgt

SEQ ID NO: 52123 - DNA, 110 bp, synthetic construct
  source 1..110: mol_type = other DNA
cttcctggagcgacaaaagaggatgaaactggtgaagatgttggtcaataaatgtcaatattcagaggtagaattggcaagaggcgagaacaatggagccagtagaggct

SEQ ID NO: 52124 - DNA, 110 bp, synthetic construct
  source 1..110: mol_type = other DNA
gcagctttctggggggtcacccctgccctgcggacccatccctgaagatctgagtgaaatcctcgcagatttccttggacttgggctaataagatttttcctttgaaagg

SEQ ID NO: 52125 - DNA, 110 bp, synthetic construct
  source 1..110: mol_type = other DNA
gaaatcctcgcagatttccttggacttgggctaataagatttttcctttgaaaggaactttccattgtttgttttaaaagtgaaatgagcattttttccaaccacagagg

SEQ ID NO: 52126 - DNA, 110 bp, synthetic construct
  source 1..110: mol_type = other DNA
aatgccagactatagactatgcttatcacaataagtattaaattcaagacaatgacctaagccaccggtagggtttatcaaaattcaggtaagatatgttcatggtacat

SEQ ID NO: 52127 - DNA, 110 bp, synthetic construct
  source 1..110: mol_type = other DNA
gtagggtaagatgagtgagtggctcacatgcagtgttagtggaaatgaggcagctcagaggccttgggagcaaagcaggattctcttctacttttctagtggtgatgctc

SEQ ID NO: 52128 - DNA, 110 bp, synthetic construct
  source 1..110: mol_type = other DNA
cagaggccttgggagcaaagcaggattctcttctacttttctagtggtgatgctctagtgggccttagttttgaaagaggctttgtcaaatgtcctagagacactgagaa

SEQ ID NO: 52129 - DNA, 110 bp, synthetic construct
  source 1..110: mol_type = other DNA
accaggaaagtgtgacttatactcagtggagactaaaatgatccagatatttaatttatcacacagggattttaaagcagctattgtaaaataaaatacgatggtaataa

SEQ ID NO: 52130 - DNA, 110 bp, synthetic construct
  source 1..110: mol_type = other DNA
ttttaccttgtgcatcattaacaaattatggtacttaacggttatttttatgacgctggtcttataaacttcatacgaggtgtataactgatttacccacaaagaaaaca

SEQ ID NO: 52131 - DNA, 110 bp, synthetic construct
  source 1..110: mol_type = other DNA
tccctggccttgctcagtgggttgagtgtttggcattgccgcaagctttggtgtgggtcgcagacatggttcggatctgacattgctggggttgtggtgttggccagcag

SEQ ID NO: 52132 - DNA, 110 bp, synthetic construct; identical to SEQ ID NO: 52131
  source 1..110: mol_type = other DNA

SEQ ID NO: 52133 - DNA, 110 bp, synthetic construct
  source 1..110: mol_type = other DNA
attcatgcacagccctgaaagtgagtgcctccttaaatgttgtgccctggccacttcgcctgccttaccataggcccaagtccggctctggaaacatattggtgtaaacc

SEQ ID NO: 52134 - DNA, 110 bp, synthetic construct
  source 1..110: mol_type = other DNA
tcgcctgccttaccataggcccaagtccggctctggaaacatattggtgtaaaccatttcacgagacatattctaagcaaggtatcataaaacagaaatatagtaatata

SEQ ID NO: 52135 - DNA, 110 bp, synthetic construct
  source 1..110: mol_type = other DNA
gtttctggggtgatcatctgtaaaacagatggaataaacctatttaagctttaccttttttgttgttgttgttcagactccatgaaagtttctttactctgctctcatct

SEQ ID NO: 52136 - DNA, 110 bp, synthetic construct
  source 1..110: mol_type = other DNA
ttttttgttgttgttgttcagactccatgaaagtttctttactctgctctcatctctgcagttactgtgcttccactattaagaacaatgcaagatgccaacatacacgg

SEQ ID NO: 52137 - DNA, 110 bp, synthetic construct
  source 1..110: mol_type = other DNA
taaacatgaatcatttgggccctagcctacagaacatcgtggaaaatctttggcttaagagaataagaacagttcaaacaacagttcctttttccccctttcctgaagga

SEQ ID NO: 52138 - DNA, 110 bp, synthetic construct
  source 1..110: mol_type = other DNA
taagagaataagaacagttcaaacaacagttcctttttccccctttcctgaaggaggatggtgagggggagccagaagcgctggtggaggtgagtctgctggctggtagc

SEQ ID NO: 52139 - DNA, 110 bp, synthetic construct
  source 1..110: mol_type = other DNA
ccagttttagccaaacaggttgctgcctttttctcaaatttcagtctccagctttgtgagcctgttgggtgggtcttccgccaaaggattctgatggctgctgtgatcag

SEQ ID NO: 52140 - DNA, 110 bp, synthetic construct
  source 1..110: mol_type = other DNA
tgaaggaacactcttagctctgtgtcgtgacctatgtaagcacacaggcatgtatgtagtcacctagtcaccatatttagaacgaatgtacatggaaatattcttgacag

SEQ ID NO: 52141 - DNA, 110 bp, synthetic construct
  source 1..110: mol_type = other DNA
gtagtcacctagtcaccatatttagaacgaatgtacatggaaatattcttgacaggtctgttgtttgggatattaataaataccagccaagctcctccttactttttctc

SEQ ID NO: 52142 - DNA, 110 bp, synthetic construct
  source 1..110: mol_type = other DNA
tacactttaggtttgatgtcagcattgcttaatgcttcttgtaatagctatgttcttcatgtgttgaaaatgtgccaactaggagtccctgccccggtgcagtggattaa

SEQ ID NO: 52143 - DNA, 110 bp, synthetic construct
  source 1..110: mol_type = other DNA
ttcagaagaggagatgggcagggttccttccactgtcttctgtcagtcaaaggcggtcacaggggccagcccacagtcaagggggttggggagcgcgtagagccacccaa

SEQ ID NO: 52144 - DNA, 110 bp, synthetic construct
  source 1..110: mol_type = other DNA
aagacatttcttggaaccacatcttagtgcggttcacccaataaaaagctcctctggctccaagtgggcatgaaagttcatcgcaacatttgccatcaataaaaaaccaa

SEQ ID NO: 52145 - DNA, 110 bp, synthetic construct
  source 1..110: mol_type = other DNA
ggctccaagtgggcatgaaagttcatcgcaacatttgccatcaataaaaaaccaattctttccatatgaacagcattactgctgtcgaatggttattgagtgatgatacc

SEQ ID NO: 52146 - DNA, 110 bp, synthetic construct
  source 1..110: mol_type = other DNA
taatcagcacagccaaccgagactgactccttggtggagtaaagacaactgaccaaccgacagaggacagcagtgatgggtcgagcttgccgaatccctctttatgcaga

SEQ ID NO: 52147 - DNA, 110 bp, synthetic construct
  source 1..110: mol_type = other DNA
accgacagaggacagcagtgatgggtcgagcttgccgaatccctctttatgcagaggcccccatcataggagacagctgctcctcctctttcccttcccttcccagctga

SEQ ID NO: 52148 - DNA, 110 bp, synthetic construct
  source 1..110: mol_type = other DNA
aacactcattacaggtcctcaatgggtcagaacctaccaggtgctgaggagagacagctgattgagaagaaagaggcagaggtgtgatcggaagggacttgaagagtggc

SEQ ID NO: 52149 - DNA, 110 bp, synthetic construct
  source 1..110: mol_type = other DNA
agctgattgagaagaaagaggcagaggtgtgatcggaagggacttgaagagtggcagggacagtgtctggcttagggaaggaagaaggggaatataagctcttttgaaca

SEQ ID NO: 52150 - DNA, 110 bp, synthetic construct
  source 1..110: mol_type = other DNA
ggctttctggtaactgggggtctaggcgaggagggaagaagcggagctggtgatgtcatcagcaaggcaattactaaaagcagcaggggctggttgtcactttgtagcat

SEQ ID NO: 52151 - DNA, 110 bp, synthetic construct
  source 1..110: mol_type = other DNA
tcaaaacatacttattcacgtcgaaagcatttcttccctgctaggctctgtgcggagagctgagggagagagaagagacgcccgatgtgtgatactctgggatctcgaaa

SEQ ID NO: 52152 - DNA, 110 bp, synthetic construct
  source 1..110: mol_type = other DNA
tgcataatttacctcacccagtgggttgtaatgttctcatgggtagggtcctcgtattttattttgttataccctctttcacctcagggcagagcgtgtctccaattcct

SEQ ID NO: 52153 - DNA, 110 bp, synthetic construct
  source 1..110: mol_type = other DNA
gcagcgctgctctctgagagcctggaataattaattccaacaggagccttctacgagcgagaagctcagaaaggatgagtggaggcttgctgagtttgtggttctttcaa

SEQ ID NO: 52154 - DNA, 110 bp, synthetic construct
  source 1..110: mol_type = other DNA
agagacagcgcaccccataattcttgaccgttcaagctccctaatttgtacccggaggcttcccagctcccagcctagaaaacacacaatatgggaacgtttgtctcttg

SEQ ID NO: 52155 - DNA, 110 bp, synthetic construct
  source 1..110: mol_type = other DNA
ctccactttctgaccagtgtcctttcaacgaatggctccctccttcccacccaaaccccatgccatgcttggtgccttttggagaactcatctactcccgggaacatcat

SEQ ID NO: 52156 - DNA, 110 bp, synthetic construct
  source 1..110: mol_type = other DNA
tttccaggtcctccagtggatgcctctatgacattagatccatataagctcacgagagacctcacatggggaaatacagacttggggccactctgtctcaacttcctggc

SEQ ID NO: 52157 - DNA, 110 bp, synthetic construct
  source 1..110: mol_type = other DNA
tgaatgcccttcgtggagcctcccaatgttaagcccaaggcgacaaacactgacctaagctctgcctttctcaccgcacccacgtccccaggggaagtcatcaaattaaa

SEQ ID NO: 52158 - DNA, 110 bp, synthetic construct
  source 1..110: mol_type = other DNA
taagctctgcctttctcaccgcacccacgtccccaggggaagtcatcaaattaaagggcagaaggatgtaaaacagccacaccaaagtggtctggctgagttcatcagtc

SEQ ID NO: 52159 - DNA, 110 bp, synthetic construct
  source 1..110: mol_type = other DNA
tgggttgacttctcagaagcctttctcgggaaccatttttccagcttataccccgttcttgactgttactctctgcctaggtcagcacataggtgcccagacagtggaaa

SEQ ID NO: 52160 - DNA, 110 bp, synthetic construct
  source 1..110: mol_type = other DNA
aattcctgagcagagagttaagatccccttcaagacatcacgcactgctgcctctccaaaatcaggctgtatcgattctactacatgagacgttttggtttctgtttcca

SEQ ID NO: 52161 - DNA, 110 bp, synthetic construct
  source 1..110: mol_type = other DNA
ccaaaatcaggctgtatcgattctactacatgagacgttttggtttctgtttccaaactactgggaaatgctgggttaaataaggttcaaggttgcttgatggagtttcc

SEQ ID NO: 52162 - DNA, 110 bp, synthetic construct
  source 1..110: mol_type = other DNA
tccaccgtcatttacactccgggtggattcaagacagagacagatgttcagagaataccatttcgggtagctggtgttgactaaaaaatcatgcacaaactaaaagttaa

SEQ ID NO: 52163 - DNA, 110 bp, synthetic construct
  source 1..110: mol_type = other DNA
taccatttcgggtagctggtgttgactaaaaaatcatgcacaaactaaaagttaagaattatgttttggggagttctcatcgtggctcagcggttaatgaattcgactag

SEQ ID NO: 52164 - DNA, 110 bp, synthetic construct
  source 1..110: mol_type = other DNA
tatttggtagagccagaagcgcaaaagaaactagaaagctaagaactgcaaagaaaaattgagattacattcttatgaaatctgaatatgaaacagatacagaaaatgat

SEQ ID NO: 52165 - DNA, 110 bp, synthetic construct
  source 1..110: mol_type = other DNA
aaattgagattacattcttatgaaatctgaatatgaaacagatacagaaaatgattcaactgacccccttcagttaggttttgctcaagaacataatggttgtaattagc

SEQ ID NO: 52166 - DNA, 110 bp, synthetic construct
  source 1..110: mol_type = other DNA
ttctgattcaagtgttttcttgaccacactaagaaatattggtaagcatgtattataaatttgtcattccaggcacttggcacttggctactggtggttctttttttttt

SEQ ID NO: 52167 - DNA, 110 bp, synthetic construct; identical to SEQ ID NO: 52166
  source 1..110: mol_type = other DNA

SEQ ID NO: 52168 - DNA, 110 bp, synthetic construct
  source 1..110: mol_type = other DNA
gacagtcaagggcaagataatagggggcactgtgtgccaagctaggcgattcaactttgccctgagaattagagggcacaagaagaaattttattttattttattttatt

SEQ ID NO: 52169 - DNA, 110 bp, synthetic construct
  source 1..110: mol_type = other DNA
cctgggaacctctatatgcctcaggtacggcccgaaaaagcaaaacaataataacagtaatgtaactggattatacctggatttcaacaggccccctccaagcttaagcc

SEQ ID NO: 52170 - DNA, 110 bp, synthetic construct; identical to SEQ ID NO: 52169
  source 1..110: mol_type = other DNA

SEQ ID NO: 52171 - DNA, 110 bp, synthetic construct
  source 1..110: mol_type = other DNA
gccactaatgggcgatgtgaccttgtgcaagtcccttaacctctctaggcatctgtttccagctgttagccctgctctcatagttcagttctgttatccactgctttttt

SEQ ID NO: 52172 - DNA, 110 bp, synthetic construct
  source 1..110: mol_type = other DNA
cccatctttgctgatgagagcaaggaaaactaaaaatgcagcttcttctcccctggggccttctcctgagctccatctccaaaatcacctcttaaaaaagcaatgttctg

SEQ ID NO: 52173 - DNA, 110 bp, synthetic construct
  source 1..110: mol_type = other DNA
ttagtaaacccaaataaacgcaaagagagggaaacgttaacgatgaaaagaactccctcacaaagaaacctaaagaccctacagccccaaatagctagtttatcttttaa

SEQ ID NO: 52174 - DNA, 110 bp, synthetic construct
  source 1..110: mol_type = other DNA
cctcacaaagaaacctaaagaccctacagccccaaatagctagtttatcttttaaattcatttcaaaactcttaattgtggtagactaattaagaggcaccaactgccta

SEQ ID NO: 52175 - DNA, 110 bp, synthetic construct
  source 1..110: mol_type = other DNA
tctgaaagggactggtcaggcgtgattttaacccaaatctctgcctttggcagtaaaattcgagacaggagtgcagaacttcagagacgatcttagtcaacctcttcccc

SEQ ID NO: 52176 - DNA, 110 bp, synthetic construct
  source 1..110: mol_type = other DNA
cttcccaatcaagttggggagtatccttaatataagcaaaccgcatataatcatatcacaagagctatgctttcctgaggtgccttacagactttatgatgaatcctttc

SEQ ID NO: 52177 - DNA, 110 bp, synthetic construct
  source 1..110: mol_type = other DNA
ctgcagttgtctcctatctaagctgccttgtctccctatagtctactctcaacacaatagccagcgcaagctttgtaaacaggagcccagcctgtcactcctcagcttca

SEQ ID NO: 52178 - DNA, 110 bp, synthetic construct
  source 1..110: mol_type = other DNA
aatagccagcgcaagctttgtaaacaggagcccagcctgtcactcctcagcttcagaccctttgcttctccgactcttgatccctcagctcctgttaaaccagtattctg

SEQ ID NO: 52179 - DNA, 110 bp, synthetic construct
  source 1..110: mol_type = other DNA
agttttgtcatttgacagaaaacagctagatctcgttaaaatcatgtttccagagttcctgtcacagctcagtggtaattaaccaggctagcatccatgaggacgtgggt

SEQ ID NO: 52180 - DNA, 110 bp, synthetic construct
  source 1..110: mol_type = other DNA
caaacataaagccataatgtgatttcctgtaactttgcagcaataaacggctcagtcatttgggaccggccgtccatcgtgggatcctatcataacagctgtgattgttt

SEQ ID NO: 52181 - DNA, 110 bp, synthetic construct
  source 1..110: mol_type = other DNA
ccgctaacaagatttccatcattgtctggggagccctttggggctgctgacaacataaaccaaagttacagtgattatggaaacttgaggaaccggaaaggaattctggt

SEQ ID NO: 52182 - DNA, 110 bp, synthetic construct
  source 1..110: mol_type = other DNA
taaaccaaagttacagtgattatggaaacttgaggaaccggaaaggaattctggtaccttttccctggttgggagtggggaggggatgacatgggacagggttccagctt

SEQ ID NO: 52183 - DNA, 110 bp, synthetic construct
  source 1..110: mol_type = other DNA
catttacttctgtcttctctatgtgaacaatgtcatgacttgagcccatgatgcaggcctcttttccaatcaatgtaaaatcttatttttagtcataaacaagggaaatc

SEQ ID NO: 52184 - DNA, 110 bp, synthetic construct
  source 1..110: mol_type = other DNA
ggcctcttttccaatcaatgtaaaatcttatttttagtcataaacaagggaaatcaggtctttctatagttggcattcaaatgctcagctgcagccccaaagtcacacag

SEQ ID NO: 52185 - DNA, 110 bp, synthetic construct
  source 1..110: mol_type = other DNA
aattcattgtttaactgtgaatgtgaaggtgctaccaaagagaatcatcagaatactaatatctatcaaatacttacatggcaggtgctgacctgagcactggctgtgtg

SEQ ID NO: 52186 - DNA, 110 bp, synthetic construct
  source 1..110: mol_type = other DNA
ctaatatctatcaaatacttacatggcaggtgctgacctgagcactggctgtgtgaaattctttaatctttacaacaatcctgataaagtggttttcatatgctattaat

SEQ ID NO: 52187 - DNA, 110 bp, synthetic construct
  source 1..110: mol_type = other DNA
acttgggttactgctgtgtcacaacaggaactctggggtgtgaaccttcagattgctgtggttgtgcccctggaggtacagcgctgggacccatctattactgtgaatca

SEQ ID NO: 52188 - DNA, 110 bp, synthetic construct
  source 1..110: mol_type = other DNA
ctgtggttgtgcccctggaggtacagcgctgggacccatctattactgtgaatcaagctcggctactcatagatctagaaacgggcaaagtgaactcctagattagttct

SEQ ID NO: 52189 - DNA, 110 bp, synthetic construct
  source 1..110: mol_type = other DNA
agaaacccagggttggctctcaggcccttacctggctccctggatgcacgtgaacttcacaagcacccggccatcccaacagtgctgccgcagctctgctctctgatcca

SEQ ID NO: 52190 - DNA, 110 bp, synthetic construct
  source 1..110: mol_type = other DNA
ttcacaagcacccggccatcccaacagtgctgccgcagctctgctctctgatccataagaaaaaagatattagagacatggtcacgactcccacagaggtggcctctggg

SEQ ID NO: 52191 - DNA, 110 bp, synthetic construct; identical to SEQ ID NO: 52189
  source 1..110: mol_type = other DNA

SEQ ID NO: 52192 - DNA, 110 bp, synthetic construct; identical to SEQ ID NO: 52190
  source 1..110: mol_type = other DNA

SEQ ID NO: 52193 - DNA, 110 bp, synthetic construct
  source 1..110: mol_type = other DNA
agcaagagccatctattaggacagacaattccgattcagctccataaatgtttctgccctggccctaccatttgctaaacattagggtcttaaattgaaaaccaggtctg

SEQ ID NO: 52194 - DNA, 110 bp, synthetic construct
  source 1..110: mol_type = other DNA
gccctggccctaccatttgctaaacattagggtcttaaattgaaaaccaggtctgggtctcaaggaccttacaatctgaaaaaaacacagacaaacaggaaatgtacaca

SEQ ID NO: 52195 - DNA, 110 bp, synthetic construct
  source 1..110: mol_type = other DNA
ggtccctgttcccctcccccacaagtggagtgtacatacctccgactcaaacaggttcccctggagttcccttcgaagctcaggggtgaaggaaccctattgggagccat

SEQ ID NO: 52196 - DNA, 110 bp, synthetic construct
  source 1..110: mol_type = other DNA
cccccacaagtggagtgtacatacctccgactcaaacaggttcccctggagttcccttcgaagctcaggggtgaaggaaccctattgggagccatgaggttgtgggttcg

SEQ ID NO: 52197 - DNA, 110 bp, synthetic construct
  source 1..110: mol_type = other DNA
aagccttgcctcggttatcagctctacattatcgctttctagttgcttttccctgtattgggtctctttcttctatgtctgcatgctggtctctgacccagggcttgacc

SEQ ID NO: 52198 - DNA, 110 bp, synthetic construct
  source 1..110: mol_type = other DNA
cagagttgttgcaaatatatcagacaagagttcgtacagctgcagccatttttaattaaagtgaatgaaggaaggaaacccaccaagaccaaggcgtggagggcagactg

SEQ ID NO: 52199 - DNA, 110 bp, synthetic construct
  source 1..110: mol_type = other DNA
gttggggctcaacagagaagcttccacagtgttcttgatgcgggtttgatctctggcctcagtggattaagggtccagcgtcattatgagctgtggtgtaggctggcagc

SEQ ID NO: 52200 - DNA, 110 bp, synthetic construct; identical to SEQ ID NO: 52199
  source 1..110: mol_type = other DNA

SEQ ID NO: 52201 - DNA, 110 bp, synthetic construct
  source 1..110: mol_type = other DNA
agccaagccaagacccaagataccccccgggagaccagtccaacttcactgaccgctctcttccatgcccactccgctccagtgacactcacttcccagcagcttctcaa

SEQ ID NO: 52202 - DNA, 110 bp, synthetic construct
  source 1..110: mol_type = other DNA
ctctcttccatgcccactccgctccagtgacactcacttcccagcagcttctcaaactcaccaggcaattcctgcccctgggattttgctcttcctactctcctgcccac

SEQ ID NO: 52203 - DNA, 110 bp, synthetic construct
  source 1..110: mol_type = other DNA
attgtgatatttcggggtgcccaggagagttacaagagtctaaaaattaatagaggagttcccattgtagctcagcagtaacaaatctgactagcatccaagaaggtttg

SEQ ID NO: 52204 - DNA, 110 bp, synthetic construct
  source 1..110: mol_type = other DNA
ggtgcccaggagagttacaagagtctaaaaattaatagaggagttcccattgtagctcagcagtaacaaatctgactagcatccaagaaggtttgggtttgatccttggc

SEQ ID NO: 52205 - DNA, 110 bp, synthetic construct
  source 1..110: mol_type = other DNA
acagggttaggcagaaacccataactaagcatttaatcatttcttttataattgtataaaaccctgggaagatcgcagctatttttgattttgttttgttttgtttcaca

SEQ ID NO: 52206 - DNA, 110 bp, synthetic construct
  source 1..110: mol_type = other DNA
ctcaccttaagccctgctgcctcccttcgacaagctctacaccccaaagagcaaagctgccaaaagccagtcatttggggaacccgatctacttggttatttatttctgt

SEQ ID NO: 52207 - DNA, 110 bp, synthetic construct
  source 1..110: mol_type = other DNA
attctgttactgttactgtttattctaatgctcacactgtcctgatttggccaataggagcttttttgataccacttctctgtgtcctttggcatctcctaatctttctt

SEQ ID NO: 52208 - DNA, 110 bp, synthetic construct
  source 1..110: mol_type = other DNA
acaagatttgaatgtcaagccaaggttttgactgcctataccagagaaagcaacagtagctttcagagatatgattatctttttaaaatataggtagctcatgagatgtt

SEQ ID NO: 52209 - DNA, 110 bp, synthetic construct
  source 1..110: mol_type = other DNA
gctaccctggtgtaaattgtcttttcctatgtaattgcagtagtctgttatttacctccagtagctgtacattttacttaagattaaaagtcttctttaaataggctaca

SEQ ID NO: 52210 - DNA, 110 bp, synthetic construct
  source 1..110: mol_type = other DNA
aaggtaaagattagaattcttgtttctggaatggtgctatatgttcatgtaacagctgggatttttttttttttttttttgtcttttggtcttttctagggccgcaccca

SEQ ID NO: 52211 - DNA, 110 bp, synthetic construct; identical to SEQ ID NO: 52210
  source 1..110: mol_type = other DNA

SEQ ID NO: 52212 - DNA, 110 bp, synthetic construct
  source 1..110: mol_type = other DNA
tgaaccacaataggaagttccctgtaagaaattcttaatgagagttttgaaaaattttgcaccttagatcaaagtgagtatggtttttggaacatggatttgggagagct

SEQ ID NO: 52213 - DNA, 110 bp, synthetic construct
  source 1..110: mol_type = other DNA
tttgcaccttagatcaaagtgagtatggtttttggaacatggatttgggagagctagagagctcccattctcccatgaatgcttaaaaaaaattggaaaggacttgtaaa

SEQ ID NO: 52214 - DNA, 110 bp, synthetic construct
  source 1..110: mol_type = other DNA
gtgttctcctacgtgaagatcattgccaaggttaagtcctcctccaaagaagttgcccatttcgacagtcggatccatagcagccacgtgctggagatgaaactgaccaa

SEQ ID NO: 52215 - DNA, 110 bp, synthetic construct
  source 1..110: mol_type = other DNA
ccacggttgttttttgtctgtgtgagacagtgttgtttggtagttttatcatccaacccatctgcagatcagatccccaaagaaaatacccagacttcacaaacccacaa

SEQ ID NO: 52216 - DNA, 110 bp, synthetic construct
  source 1..110: mol_type = other DNA
acccatctgcagatcagatccccaaagaaaatacccagacttcacaaacccacaagctagtttgttatagaccatccaaaagaggcattggtggtccttgccatctattt

SEQ ID NO: 52217 - DNA, 110 bp, synthetic construct
  source 1..110: mol_type = other DNA
aatgagagcagaggtggtgggcagtatggacccatagacacagggtgactaaatgactacaactccgcaatcttgagtttccaggctgttgccagaaaagctgccctatt

SEQ ID NO: 52218 - DNA, 110 bp, synthetic construct
  source 1..110: mol_type = other DNA
tctggtggtgtcctgctcagcacgtccaactccctccctcccccaacaaggctgcccccgcatctccctggactgggcggcctgcagattcccagtcactcagcagctca

SEQ ID NO: 52219 - DNA, 110 bp, synthetic construct
  source 1..110: mol_type = other DNA
ccccgcatctccctggactgggcggcctgcagattcccagtcactcagcagctcattggtctcaccattatgcatgcaagtatcaccaaggtcccatgaaagttatatat

SEQ ID NO: 52220 - DNA, 110 bp, synthetic construct
  source 1..110: mol_type = other DNA
gctgagtagttgaggtcttgtcatgagggacaggcaaagcccctggatcatttgaagcagaggagtgacttgatctgctttatatttaatagcaccattcaaggtgagct

SEQ ID NO: 52221 - DNA, 110 bp, synthetic construct
  source 1..110: mol_type = other DNA
agcagaggagtgacttgatctgctttatatttaatagcaccattcaaggtgagctggggtggggggggagtcactttagaggcacaagagaggacaagagaggaggctat

SEQ ID NO: 52222 - DNA, 110 bp, synthetic construct
  source 1..110: mol_type = other DNA
aatctgaattagttatgctatgttctcaccccaccccctccaacccaaggaatactgtaaatgtatttctatcatttaaatgtgagactaaatccaggtacttcaatgct

SEQ ID NO: 52223 - DNA, 110 bp, synthetic construct
  source 1..110: mol_type = other DNA
tgtaaatgtatttctatcatttaaatgtgagactaaatccaggtacttcaatgctaaacaagtctgttcactgggagctgaagacaatcaaatccatgttatttttcaaa

SEQ ID NO: 52224 - DNA, 110 bp, synthetic construct
  source 1..110: mol_type = other DNA
atcactgaatatgtgtctgttacatttgatttaggtgggaagctattggagacgtttgagcagataagggatatgatccgacttacaatgtaacagaatcactttgccct

SEQ ID NO: 52225 - DNA, 110 bp, synthetic construct
  source 1..110: mol_type = other DNA
cagactgggcggctgcaacccaggttgccacagcccccatctcttgggggtgcgttgggcctctagggatccttctttgctctgatgattggagaggaagcatttgccaa

SEQ ID NO: 52226 - DNA, 110 bp, synthetic construct
  source 1..110: mol_type = other DNA
ggtctgggtgtcagcagggttgttttcctctaaggaaatctctccttaacctgtagagagcttccttcggatgccttcacatcgtctcccctctacatgtgtctatgtcc

SEQ ID NO: 52227 - DNA, 110 bp, synthetic construct
  source 1..110: mol_type = other DNA
tagaattgcgccacctggctttaaatcctgattcatcatttataagctgtgtcaccctcagtgggtaactaaattcctctttttctcattgtggagactgctccccaata

SEQ ID NO: 52228 - DNA, 110 bp, synthetic construct
  source 1..110: mol_type = other DNA
aatgagtgtcctagggaagcacacttagtgctacaggcacttaacatacagaaacacagactgtggaagatgctattggacgcagcttcctcttttagaatcaaaggcat

SEQ ID NO: 52229 - DNA, 110 bp, synthetic construct
  source 1..110: mol_type = other DNA
acagactgtggaagatgctattggacgcagcttcctcttttagaatcaaaggcatccaagaactcaaagaaagcttgtttcttttttttttcttttcttttctttttgtc

SEQ ID NO: 52230 - DNA, 110 bp, synthetic construct
  source 1..110: mol_type = other DNA
gtggcttgctaaaactgtgacatgttcaaggagtttgtgctgtggtgcagtgcggatgtggcattgtatctgcagcagcttaagtcgctactgaggcaggggtttgatcc

SEQ ID NO: 52231 - DNA, 110 bp, synthetic construct
  source 1..110: mol_type = other DNA
gatccctttcaagaaagagtttttagagacatgtaagtgaggagctcatggggggtgtgatcatcttgtgcccagtgctctgattggttgatggtgaggtagcagagtga

SEQ ID NO: 52232 - DNA, 110 bp, synthetic construct
  source 1..110: mol_type = other DNA
ccaggccagtatcctgagttttcatagcctgcaggacgcactggctctcacccttggaagtgactgcgttcacagttgactgcgactttctttatccttagctacagaca

SEQ ID NO: 52233 - DNA, 110 bp, synthetic construct
  source 1..110: mol_type = other DNA
tctcacccttggaagtgactgcgttcacagttgactgcgactttctttatccttagctacagacagggctgaaataccacccaaggaggtaaaaaaccagaatatcagga

SEQ ID NO: 52234 - DNA, 110 bp, synthetic construct
  source 1..110: mol_type = other DNA
cagactttcatatgagaactcgagctggcaaataaggctgaacaggagagatacctagggtgaggaaaggctctaaaatagacaaaaggagcactgaatgagggagaggg

SEQ ID NO: 52235 - DNA, 110 bp, synthetic construct
  source 1..110: mol_type = other DNA
attaacgggcctctgttgaacttcaaaatcaactattggagagtttaataaaaatctgccttttatttttatggtactgttttaattcatcctccggcttttggttttca

SEQ ID NO: 52236 - DNA, 110 bp, synthetic construct
  source 1..110: mol_type = other DNA
ttaacactgaaagtagtagactttgagtaaagattgccctccaaaatgtgggtgggcctctttcaatcaattgaaggcattactagaacaaaaacctgatctcccttcag

SEQ ID NO: 52237 - DNA, 110 bp, synthetic construct
  source 1..110: mol_type = other DNA
gcctctttcaatcaattgaaggcattactagaacaaaaacctgatctcccttcagcaagaaggaattctgccagcactctgcctttggactcaaactacagctcatccct

SEQ ID NO: 52238 - DNA, 110 bp, synthetic construct
  source 1..110: mol_type = other DNA
atgtgtatatgtgtatcccttccccatcccccatcctgtgctcttcaccttggcagtggagttacagctgagatcattgccttgctaatactgccttctcctcccaggaa

SEQ ID NO: 52239 - DNA, 110 bp, synthetic construct
  source 1..110: mol_type = other DNA
gtggagttacagctgagatcattgccttgctaatactgccttctcctcccaggaactgagcactgccctctgagcatttgtctctaaaccagcctcaggacctcatgtgc

SEQ ID NO: 52240 - DNA, 110 bp, synthetic construct
  source 1..110: mol_type = other DNA
ctttgaatctaaaacttcattaaaaataaattcctagtcaaaataacatgcacacacacacacatatatgcacacagatatatataaaatgggcgtatgttggggagttc

SEQ ID NO: 52241 - DNA, 110 bp, synthetic construct
  source 1..110: mol_type = other DNA
gttctcactgtggcacagtggtgttgctgcagctgtggcataggtctcagtgacagctcggatttgacccccagccttgaaacttacatatgctgtgggtgtggctgaaa

SEQ ID NO: 52242 - DNA, 110 bp, synthetic construct
  source 1..110: mol_type = other DNA
gctcggatttgacccccagccttgaaacttacatatgctgtgggtgtggctgaaaaagaaaagaaaaaaggtccctggaattaattttatggctaaagatacgggtcaag

SEQ ID NO: 52243 - DNA, 110 bp, synthetic construct
  source 1..110: mol_type = other DNA
agaaaaaacatacatcagggaattgtactgatggcttggataaaattggagaagccagagaaggtaacagctgtggttcaaattcagtctctggccctggaacttccata

SEQ ID NO: 52244 - DNA, 110 bp, synthetic construct
  source 1..110: mol_type = other DNA
ttctcctgaaaggaggagtcttcgatttcccttcctataaactcgtcacccctaaagatgctaagaccagattattccccatcagaattctgttttcagttgttggcctt

SEQ ID NO: 52245 - DNA, 110 bp, synthetic construct
  source 1..110: mol_type = other DNA
tgtcaaggctacagtctggtcatcaggtagttaatttctgccacctggtggggttgtcagtagctacaggacagacagctcacaggatatggctcagaacatcatctatg

SEQ ID NO: 52246 - DNA, 110 bp, synthetic construct
  source 1..110: mol_type = other DNA
cctcagcctaattcctttgacaccctctgtctctgatctggaattaatcctttccccacaacaagagaagtcacaggagcttccttccttccttcctccctccttctcgc

SEQ ID NO: 52247 - DNA, 110 bp, synthetic construct
  source 1..110: mol_type = other DNA
ctttggacaactctgattccagctaaggaagccgaaggccagcagccaataagcatgtcctcatggtaaacacacaatgactgtatatttgtaccacacactattttgtc

SEQ ID NO: 52248 - DNA, 110 bp, synthetic construct
  source 1..110: mol_type = other DNA
tgtcctcatggtaaacacacaatgactgtatatttgtaccacacactattttgtcaaacctcatgcaaaacagaaagaagaccgtgtttttatccaaaatggaaactcac

SEQ ID NO: 52249 - DNA, 110 bp, synthetic construct
  source 1..110: mol_type = other DNA
acagctgtttttacagtagggttgatctcatagagattactctcattatgattttgtcttccaactcattacaggcatactcctgtttgcactttgcagatgttgtagct

SEQ ID NO: 52250 - DNA, 110 bp, synthetic construct
  source 1..110: mol_type = other DNA
gtcttccaactcattacaggcatactcctgtttgcactttgcagatgttgtagcttttaagattgaagatttgtggcaaccttgttctaagcaagtctattagtaccatt

SEQ ID NO: 52251 - DNA, 110 bp, synthetic construct
  source 1..110: mol_type = other DNA
aaaacaaaacaaaacaaaacacagccaagaagctcttgtgaaagtcacaaccttggagcccaggtccatggaaagactgagacctaatcacaggattatgtaacacctgc

SEQ ID NO: 52252 - DNA, 110 bp, synthetic construct
  source 1..110: mol_type = other DNA
tcaaaattctagatccaatttaaggaatgcgcgggagctgtgcctgatacctacactcgcgatttgctaactgtagcctgttcacgtttcatctgtgctcaccggcttca

SEQ ID NO: 52253 - DNA, 110 bp, synthetic construct
  source 1..110: mol_type = other DNA
caatgacagcgtattgctcataaaggtgagaattgtcactgtgatgtgcagttgatggcgaataaaagcagcctcctcagcagctaataaaaggccatctggagacaccc

SEQ ID NO: 52254 - DNA, 110 bp, synthetic construct
  source 1..110: mol_type = other DNA
taagcaaatttacttgcccaaggctttacagctagttaaatggcagacccaggatttggaacctgggcaatttatccttgtccttagctggctcttgaaagtggttctca

SEQ ID NO: 52255 - DNA, 110 bp, synthetic construct
  source 1..110: mol_type = other DNA
ttggaacctgggcaatttatccttgtccttagctggctcttgaaagtggttctcagcctggggcagttttgcaccagaggacatttgataatgtctggagacaattttgg

SEQ ID NO: 52256 - DNA, 110 bp, synthetic construct
  source 1..110: mol_type = other DNA
tttgaattaagatgataaagaaggtaacgatgtagcccctataattttaaatttttttctttgagggtgtagcactagaaagtgcatataacataatgatgcagcttaac

SEQ ID NO: 52257 - DNA, 110 bp, synthetic construct; identical to SEQ ID NO: 52256
  source 1..110: mol_type = other DNA

SEQ ID NO: 52258 - DNA, 110 bp, synthetic construct
  source 1..110: mol_type = other DNA
ctgtgctaaggtgtcttttgtgtctcagctctgcagacaaacggaaggccgggtgggaactaagataagtgagaggggagagacccagaaaggccaccgaggaggcaggg

SEQ ID NO: 52259 - DNA, 110 bp, synthetic construct
  source 1..110: mol_type = other DNA
ccctctgttgaaagtaagggaagaaactttctttttctcagggcatttacttcagaagattttaaaagcactttctcctctctttgagtcgtatttacaacacctcgaaa

SEQ ID NO: 52260 - DNA, 110 bp, synthetic construct
  source 1..110: mol_type = other DNA
tttacttcagaagattttaaaagcactttctcctctctttgagtcgtatttacaacacctcgaaaactaggtaggtctcaggagttcccattgtggcttagtggtaacaa

SEQ ID NO: 52261 - DNA, 110 bp, synthetic construct
  source 1..110: mol_type = other DNA
ttctactttgtcaaatctccagctctgtaaaatggggaaatattacccagctactatagttggggtgagacttagatgggactaggtttttcacgtgccaggtcctcagt

SEQ ID NO: 52262 - DNA, 110 bp, synthetic construct
  source 1..110: mol_type = other DNA
tcagttaaccattggttgacttccttgggatatcacagtacattttcagaccccccaacgccttatctgggcctccaatccattcactctttagaagataatttttctaa

SEQ ID NO: 52263 - DNA, 110 bp, synthetic construct
  source 1..110: mol_type = other DNA
atttctgttgtgcaacatgctgatccagtcatacaggtatatacattcttgtcctcatactattctttctactcaaccctaacaggtgcttgtaggagaatgacattcaa

SEQ ID NO: 52264 - DNA, 110 bp, synthetic construct
  source 1..110: mol_type = other DNA
catactattctttctactcaaccctaacaggtgcttgtaggagaatgacattcaactttaacttctcaaaatggaaacttacctcacctgggttatttacagtcacagaa

SEQ ID NO: 52265 - DNA, 110 bp, synthetic construct
  source 1..110: mol_type = other DNA
ctctcaggctcttcagggattggttggttgtgctgaagaccatgctcccttccgggagcaccctcagccggtgtccgtcaaatgtggggcctgacctcttggctccaact

SEQ ID NO: 52266 - DNA, 110 bp, synthetic construct
  source 1..110: mol_type = other DNA
tcttcagtgttccatttggcacagcaagtggccgtgtctccacctcctataatggtgatacagcccttggaggtggctttcacaatttcatccatgagggctttcgttcc

SEQ ID NO: 52267 - DNA, 110 bp, synthetic construct
  source 1..110: mol_type = other DNA
atctctgacagcaaggagaagcagtaactcaaaatgccatgcgacctccctccaactcggtacaaggttgtactgagctgtcctagttttacagcttcctgtgggattag

SEQ ID NO: 52268 - DNA, 110 bp, synthetic construct
  source 1..110: mol_type = other DNA
cctggttttttgtctctccaaatgttcaaccctagaactgcaccactctgtgagtaagcacaagccaatgggagattctcccgggagagaaattgagttccctcccaaga

SEQ ID NO: 52269 - DNA, 110 bp, synthetic construct
  source 1..110: mol_type = other DNA
aagcacaagccaatgggagattctcccgggagagaaattgagttccctcccaagagcttgtaccagcgtgctgccacctgagacaacatgcacattctccacatttactt

SEQ ID NO: 52270 - DNA, 110 bp, synthetic construct
  source 1..110: mol_type = other DNA
aggagttcccatcttggctcagtggtaacaaacctgactaatattcatgaggacacgggtttgatccttggtcttacttggcgagttaaggattcagcgttgctatgagc

SEQ ID NO: 52271 - DNA, 110 bp, synthetic construct; identical to SEQ ID NO: 52270
  source 1..110: mol_type = other DNA

SEQ ID NO: 52272 - DNA, 110 bp, synthetic construct
  source 1..110: mol_type = other DNA
agcttgtataccaatcaaatgagctaacacaaatggaactattctgtagcccatgtttgtcgttaataggaatgatttataggcttgtggcaggttgaaaaatctttatt

SEQ ID NO: 52273 - DNA, 110 bp, synthetic construct
  source 1..110: mol_type = other DNA
gagaggggggccctcttcagctagtgttttgactttggtaactgagtgggtggcgacaccagtcacgaagctaaggagagcacaggagctggggattcaggagaaagggt

SEQ ID NO: 52274 - DNA, 110 bp, synthetic construct
  source 1..110: mol_type = other DNA
tgcttccattaattacccaggatctcagctcactttgggaagtcataattgagtcaagaattactatgctttgtagaaacaacaagagcactctttggactctacattcc

SEQ ID NO: 52275 - DNA, 110 bp, synthetic construct
  source 1..110: mol_type = other DNA
tcatgtaaagcatttaaatacatcatcgtatttaatatagcttttggttgctattgttattttcaccagctttccctgaaaaccggttccttctcttaaggtctttattc

SEQ ID NO: 52276 - DNA, 110 bp, synthetic construct; identical to SEQ ID NO: 52275
  source 1..110: mol_type = other DNA

SEQ ID NO: 52277 - DNA, 110 bp, synthetic construct
  source 1..110: mol_type = other DNA
caaggttaactgcccagtgatgtttcttaggagaaagccaagggattttcctggcgatgtcactcaatttgacatgtgatgtatgctcttattatttttttaaaaaaacg

SEQ ID NO: 52278 - DNA, 110 bp, synthetic construct
  source 1..110: mol_type = other DNA
gatgtcactcaatttgacatgtgatgtatgctcttattatttttttaaaaaaacgaataccagagttgccattgtggctaagaacccaactagtaaccatgaggatgttg

SEQ ID NO: 52279 - DNA, 110 bp, synthetic construct
  source 1..110: mol_type = other DNA
cccatgagtttcaagtacctcatggataattctgcttggatacaaataattgctggcgattttctggaagcacctgaaatatcgtgatgatatacacgaagccacttttg

SEQ ID NO: 52280 - DNA, 110 bp, synthetic construct
  source 1..110: mol_type = other DNA
gcgattttctggaagcacctgaaatatcgtgatgatatacacgaagccacttttgtccttaaattatatcagcaattgcctcatttggccctcttgatttctgcagtgtg

SEQ ID NO: 52281 - DNA, 110 bp, synthetic construct
  source 1..110: mol_type = other DNA
tccaatcataccagtctgtttcctatacctctgcctttgcttatgtgccccatgcccatttctagagtttcctgctcaaatcttccacatttagcctaggcatcattcaa

SEQ ID NO: 52282 - DNA, 110 bp, synthetic construct
  source 1..110: mol_type = other DNA
ccatttctagagtttcctgctcaaatcttccacatttagcctaggcatcattcaagactcagtttaattactacctcttcctaaatctatactcataccctacctaattc

SEQ ID NO: 52283 - DNA, 110 bp, synthetic construct
  source 1..110: mol_type = other DNA
cagccccctctcctgccactgagtctctaggtaggaaggagaaaattcaaatcagcagctaatctagttcctctgcactaaccacaataatataaacaatagttattcac

SEQ ID NO: 52284 - DNA, 110 bp, synthetic construct
  source 1..110: mol_type = other DNA
ataaagtgtaatgatattaatttgttaggccctaaatttcacttgacaaaaatggcttagaggaaatgtctctttgtcagggccaagttagagatttgaggagaatgtag

SEQ ID NO: 52285 - DNA, 110 bp, synthetic construct; identical to SEQ ID NO: 52284
  source 1..110: mol_type = other DNA

SEQ ID NO: 52286 - DNA, 110 bp, synthetic construct
  source 1..110: mol_type = other DNA
tacaagagcagtcttaaccatatatgggacttgatttcaagttctgtaggatcgatttctcaatcaaccaatattaatttagctgtttccatacataaggtaaggtaatt

SEQ ID NO: 52287 - DNA, 110 bp, synthetic construct
  source 1..110: mol_type = other DNA
gttggaagaagacatataatacttggactcattattcatttgcatttaatgagcttttgtaatcgtttaaagagaaatccaacaatgtcaaatactcttccttctactca

SEQ ID NO: 52288 - DNA, 110 bp, synthetic construct
  source 1..110: mol_type = other DNA
actgacctttaaaacaggaagaaaaatatatggcaggctacgtacatcattgataaacggactccttttccttaccaataagccctttaagcataaattttcagggggaa

SEQ ID NO: 52289 - DNA, 110 bp, synthetic construct; identical to SEQ ID NO: 52288
  source 1..110: mol_type = other DNA

SEQ ID NO: 52290 - DNA, 110 bp, synthetic construct
  source 1..110: mol_type = other DNA
tactccttgaagaaagggtttggaggaaatttaacacaagtaactagagagatgggagacggttaggaaaataaaatttgaacaggtgtcaaagtttgtagttgatataa

SEQ ID NO: 52291 - DNA, 110 bp, synthetic construct
  source 1..110: mol_type = other DNA
gagacggttaggaaaataaaatttgaacaggtgtcaaagtttgtagttgatataaaagctatgaataaggtcaattagactttgtcaccaaatccaaaaatttcaaaacc

SEQ ID NO: 52292 - DNA, 110 bp, synthetic construct
  source 1..110: mol_type = other DNA
aacccttaaccactcaacctcacttagccttacacaagcagttttgtaggtttaagtctgttggggcaacaggaaagcaaaacccatttggaggagcaaaggaaatccca

SEQ ID NO: 52293 - DNA, 110 bp, synthetic construct
  source 1..110: mol_type = other DNA
gtctgttggggcaacaggaaagcaaaacccatttggaggagcaaaggaaatcccaagtaagagtaaggaagaggaggagaaaaacaggtttactagggatagacattcac

SEQ ID NO: 52294 - DNA, 110 bp, synthetic construct
  source 1..110: mol_type = other DNA
ccatttcttctgccaaataagcacactttttctttcctaattggttaggatgatgagctggtggtaatgagtgctttaaaatttttgcctgaagggggaggggagaaaga

SEQ ID NO: 52295 - DNA, 110 bp, synthetic construct
  source 1..110: mol_type = other DNA
cctaattggttaggatgatgagctggtggtaatgagtgctttaaaatttttgcctgaagggggaggggagaaagagtaggatggactgggagtttggggttagtggatgc

SEQ ID NO: 52296 - DNA, 110 bp, synthetic construct
  source 1..110: mol_type = other DNA
taaagcagcaaggatacagaaagccatgtacacaaaaggaggaatttatgggatagactgagggataagctgtgttgtctaccctcaaggaagtgttaatcttgcccaaa

SEQ ID NO: 52297 - DNA, 110 bp, synthetic construct
  source 1..110: mol_type = other DNA
gactgagggataagctgtgttgtctaccctcaaggaagtgttaatcttgcccaaagagatggctgtgctaggagatatatagtgatttatctctaaacagtgtgctgctg

SEQ ID NO: 52298 - DNA, 110 bp, synthetic construct
  source 1..110: mol_type = other DNA
gaattagcgcaaggggaaggagggaagctaaggcttcggagacgtcgaaggaggggatcgagaaagaaaagctttcgaagaaggtgaagggaaaggggcagaagcgttgg

SEQ ID NO: 52299 - DNA, 110 bp, synthetic construct
  source 1..110: mol_type = other DNA
agggaggggagagaggctagaggttgaatcagttgccaatagccagtgatgtaatgcatcatgtctatgtaatgaagcatccagaaaaacccaaaaggactgaattctgg

SEQ ID NO: 52300 - DNA, 110 bp, synthetic construct
  source 1..110: mol_type = other DNA
aaagataacatctttggtgagggcccacatgatacgattacactagtgtgtgtttgtgaggtgctttaccacatacgtagcagatttccaaacatcaatgtaggagtttt

SEQ ID NO: 52301 - DNA, 110 bp, synthetic construct
  source 1..110: mol_type = other DNA
gtgaggtgctttaccacatacgtagcagatttccaaacatcaatgtaggagttttcatacaggagattcatgtttaaaaaggttgaagacaggtacaaagaatgcttctg

SEQ ID NO: 52302 - DNA, 110 bp, synthetic construct
  source 1..110: mol_type = other DNA
caccaggaagccacagatggaggtcacagggccagcagacccgtagataccagagcacggtgcctgggacaattctgtctcttattttccttggctgtggagacagggca

SEQ ID NO: 52303 - DNA, 110 bp, synthetic construct
  source 1..110: mol_type = other DNA
gcagagtctatagctctatgggatacaaatagggtcagctgcaatgtagggagcgcctattcattaaataagaattaattcagaatccactgccaaggaggataaaagat

SEQ ID NO: 52304 - DNA, 110 bp, synthetic construct
  source 1..110: mol_type = other DNA
ggctttgtgggcacctccttctgcctggaggttgggggggagctttagggtccttaggagaccagctctgtgcttggggagctacagtcctcactgggcattggttaatc

SEQ ID NO: 52305 - DNA, 110 bp, synthetic construct
  source 1..110: mol_type = other DNA
aggagaccagctctgtgcttggggagctacagtcctcactgggcattggttaatctggaataaagagcatgacatcaatagtgaccacaaggtaagttttgcctttcttc

SEQ ID NO: 52306 - DNA, 110 bp, synthetic construct
  source 1..110: mol_type = other DNA
accttactatgtcctggcttgttgactccatgaccttcctctagacgttatcttgttcacatggttttgatcacagtttgttcgggagatgactgaaggggaagctgggg

SEQ ID NO: 52307 - DNA, 110 bp, synthetic construct
  source 1..110: mol_type = other DNA
ggcttgttgactccatgaccttcctctagacgttatcttgttcacatggttttgatcacagtttgttcgggagatgactgaaggggaagctggggaagagatctggtcat

SEQ ID NO: 52308 - DNA, 110 bp, synthetic construct
  source 1..110: mol_type = other DNA
atgagcaccagttcaaagcttgacacattaaaacttccctgcagagttgtcagatttaccaaataaaagcaagatgcttaataaatttaaattttcaaataattacatgc

SEQ ID NO: 52309 - DNA, 110 bp, synthetic construct
  source 1..110: mol_type = other DNA
tggaattgaactgtcagcaagaattatttaagaattccatgtttaaaaatcagataacttatcaggagaaccttagccattccctagtggtctgtagatcacactcgata

SEQ ID NO: 52310 - DNA, 110 bp, synthetic construct
  source 1..110: mol_type = other DNA
aaaagacctgttaaagtacatttttgtctacaattacctgataagatacaattcaggggaaaacaggaaatgttaggactccaagttttgcaagtttgattagatgtgaa

SEQ ID NO: 52311 - DNA, 110 bp, synthetic construct
  source 1..110: mol_type = other DNA
ggggaaaacaggaaatgttaggactccaagttttgcaagtttgattagatgtgaatcaacctttagcaatttctagtagaggtttgggaaaacaatagaacactgatgtc

SEQ ID NO: 52312 - DNA, 110 bp, synthetic construct
  source 1..110: mol_type = other DNA
gtcaggttcattaccgctcagccattgtgggaattcctccccagaatattttctgttagtcgactgtgttccttttgtaagcatagctttgatgataacctaaatctcac

SEQ ID NO: 52313 - DNA, 110 bp, synthetic construct
  source 1..110: mol_type = other DNA
ttagtcgactgtgttccttttgtaagcatagctttgatgataacctaaatctcacagtgatgatgttccttagatgcaattacttgttacgatccctgaataattaaagt

SEQ ID NO: 52314 - DNA, 110 bp, synthetic construct
  source 1..110: mol_type = other DNA
gtctgctcagggcaggctacaaatctatgagccggtagcatgtttgccctaccgtccataagatagcttgagcaatgaggctgcagccacagtcacatatatgtatgaaa

SEQ ID NO: 52315 - DNA, 110 bp, synthetic construct
  source 1..110: mol_type = other DNA
aattccagcccggtatttattctcctaacctaccaccagtaacttcattttcctcctgcttcctccctcattccccagcataggtaaactctgatttgcatctcaacagg

SEQ ID NO: 52316 - DNA, 110 bp, synthetic construct
  source 1..110: mol_type = other DNA
acagatctaatgcttaagcctccaccagctcctgaacccctctccttcctgggtagccctggatcagaggcccgcagacaaagcactaagacccagtgaagatgagttca

SEQ ID NO: 52317 - DNA, 110 bp, synthetic construct
  source 1..110: mol_type = other DNA
gatggaagcagcccccagtgcctcagaggtcaatgtacggtcaaggttatagcgtgtatgttcacctgcaggagactgaagagatagtggcttgagtgctgggggtggga

SEQ ID NO: 52318 - DNA, 110 bp, synthetic construct
  source 1..110: mol_type = other DNA
ccatctccagttagctcttacacttttgaattatgaggcctctcaattctcaaaacacaaattccagagttcccctgtggcacagcagaaacaaatccaactaggaacaa

SEQ ID NO: 52319 - DNA, 110 bp, synthetic construct
  source 1..110: mol_type = other DNA
aatatctgaaatttaatagattctgagcaattatgcaactaggggtcatttttaattctaagctaacaattcccaaagcccttcaaatcaactagaatccagaagaaaaa

SEQ ID NO: 52320 - DNA, 110 bp, synthetic construct
  source 1..110: mol_type = other DNA
gtggttgccagctcaaaactaacctgggagcccttaaagacagttaagggttcggagcttcactaaggtccagaatacaagagttccagcagtataccgcgtgccaagaa

SEQ ID NO: 52321 - DNA, 110 bp, synthetic construct
  source 1..110: mol_type = other DNA
cttccaatctttaaaaacaacatcatccttgaagctacgatttagaaacagctgtagagtcctgttgaaagcatgtatttccctcccatatcagagaccaaaaaaataac

SEQ ID NO: 52322 - DNA, 110 bp, synthetic construct
  source 1..110: mol_type = other DNA
tggcctctgaagtcagactatctggatgcaactcccaggtctgggactgaccagctgtgtgaaccaacaactttttccctccatgcctcagttttctagtctgagaagtg

SEQ ID NO: 52323 - DNA, 110 bp, synthetic construct
  source 1..110: mol_type = other DNA
tgtgtgaaccaacaactttttccctccatgcctcagttttctagtctgagaagtgaagatgataataaaaatatctgcttcatcccctgggcttgtgtgagggttaaatg

SEQ ID NO: 52324 - DNA, 110 bp, synthetic construct
  source 1..110: mol_type = other DNA
tcagccgaaaactaccataaacttgggatttgacagctgtccaaatcatccccccatcactcttgcagaacttaaatacttcaaagggaatctggaagacaatttccctt

SEQ ID NO: 52325 - DNA, 110 bp, synthetic construct
  source 1..110: mol_type = other DNA
atgaaatttaccactcttattccaaattaaaaccaatggccattagacttcccaagacagaagttcacaatgaatttctaaactgaagatttcaactcattgtacacatg

SEQ ID NO: 52326 - DNA, 110 bp, synthetic construct
  source 1..110: mol_type = other DNA
gtcagctcttgtttaggaaacatgctagatgcctgcacccagtccccttacatctcactggccagctcttagccacaacctacgtctacctaccaaggatgcgagaaaat

SEQ ID NO: 52327 - DNA, 110 bp, synthetic construct
  source 1..110: mol_type = other DNA
cactggccagctcttagccacaacctacgtctacctaccaaggatgcgagaaaatgcagcactgttagctaggcacattgctgctcccaacaaaaactggggtttggcta

SEQ ID NO: 52328 - DNA, 110 bp, synthetic construct
  source 1..110: mol_type = other DNA
agtggcaccagaggattgcaatttcatccagcatgatttttattagccctgcaatttcttaatgggctcccctgagggctggctggtagaatcctgtactacccatccgg

SEQ ID NO: 52329 - DNA, 110 bp, synthetic construct
  source 1..110: mol_type = other DNA
ttcttaatgggctcccctgagggctggctggtagaatcctgtactacccatccggctttgctacaggcagcttaataaacacggcatctgccccgtgacaattgtcatca

SEQ ID NO: 52330 - DNA, 110 bp, synthetic construct
  source 1..110: mol_type = other DNA
gacaaagagatgatggaggcaggggttggagtaatgcacctgcagccaagggatggtggaagccaccagaagctggaagaggcaagaaatggatccacccttagagacgt

SEQ ID NO: 52331 - DNA, 110 bp, synthetic construct
  source 1..110: mol_type = other DNA
gtggaagccaccagaagctggaagaggcaagaaatggatccacccttagagacgtcagagggagtgtggtcctgccaacaattttattttggactctggcctccaaaaca

SEQ ID NO: 52332 - DNA, 110 bp, synthetic construct
  source 1..110: mol_type = other DNA
tcaatgtttgaaaaaatttgctgataagccagtgaccaaacacaggccggggggaaattgccattagagagctggtccctattcacggtctctgacttttcatcaagagg

SEQ ID NO: 52333 - DNA, 110 bp, synthetic construct
  source 1..110: mol_type = other DNA
tagggctctgggattttactctacttaaaagctaacaaaccagcctgtttaaggttccacgcaactcatgggtcagagatgatgacctttgttgctcttggcacagcaag

SEQ ID NO: 52334 - DNA, 110 bp, synthetic construct
  source 1..110: mol_type = other DNA
aagacccagcacggggccttcacccactgggaagacaaagtctgaaaacccacccactgcctgtagctcatccacttggtggctcacatactcctcccccaccttacctc

SEQ ID NO: 52335 - DNA, 110 bp, synthetic construct
  source 1..110: mol_type = other DNA
actgcctgtagctcatccacttggtggctcacatactcctcccccaccttacctcccatatctgaccacacacagacagcaactggacccgagccaaacacccacaggaa

SEQ ID NO: 52336 - DNA, 110 bp, synthetic construct
  source 1..110: mol_type = other DNA
gtctccaagagtagacagtgatgtcaacaccaaaaccattatcaggagaagcttcatcccacctcctcttctatccgttatctgctttgcttatcaaggtcacccatcta

SEQ ID NO: 52337 - DNA, 110 bp, synthetic construct
  source 1..110: mol_type = other DNA
ccaagcttgatttaactttctgtttgacaatcttaattttctaacaagaagttatgcactttaatttttcattgggccctttgtagctggtcctgcccacgaggtgcatt

SEQ ID NO: 52338 - DNA, 110 bp, synthetic construct
  source 1..110: mol_type = other DNA
gcactttaatttttcattgggccctttgtagctggtcctgcccacgaggtgcattcaaatactagctggtgctttggtcctttgaagactcagctagacagagtaagcaa

SEQ ID NO: 52339 - DNA, 110 bp, synthetic construct
  source 1..110: mol_type = other DNA
ttatagaaaacactttcacatccctttaatctctggattctcacaaccacctacctggtagggtaaatagagctcatattagttttcccaaaaaggcagatgaaagagaa

SEQ ID NO: 52340 - DNA, 110 bp, synthetic construct
  source 1..110: mol_type = other DNA
tggtagggtaaatagagctcatattagttttcccaaaaaggcagatgaaagagaaacaagacacaacttggttggtttcaccagactgctagtgccagtctggggacttg

SEQ ID NO: 52341 - DNA, 110 bp, synthetic construct
  source 1..110: mol_type = other DNA
agagcgggatggctgattcattttgtggtgcacctgaaatgagtacaacattgtcagctataccgcaataaaattaagttacaaataaataactacaagtataattttat

SEQ ID NO: 52342 - DNA, 110 bp, synthetic construct
  source 1..110: mol_type = other DNA
atgggtgaagaaccatggccctacagcagggacgggaacaagatgaggagcttgctctcgtctttggccggtcactcccctggggcacctggaatgtacttcacaggcca

SEQ ID NO: 52343 - DNA, 110 bp, synthetic construct
  source 1..110: mol_type = other DNA
tctcgtctttggccggtcactcccctggggcacctggaatgtacttcacaggccagtgactcggcaaaaccacataaaggggaggacaacggccaagtggcaatcccact

SEQ ID NO: 52344 - DNA, 110 bp, synthetic construct
  source 1..110: mol_type = other DNA
cactctcaaaggccaggctcatggcctggtaaactcagcctgttggtagacttattttcttttagtttttttaaaagtagttgctaacattaaaatacttggagctgtct

SEQ ID NO: 52345 - DNA, 110 bp, synthetic construct
  source 1..110: mol_type = other DNA
tttcttttagtttttttaaaagtagttgctaacattaaaatacttggagctgtctgacaacaatctggacttccaacttcaaggggatcgaaagtttcattctttccatc

SEQ ID NO: 52346 - DNA, 110 bp, synthetic construct
  source 1..110: mol_type = other DNA
aaggtacccttactaaccttctagatgtcattaaaatgggggtggctaatattcccattttataagatgtgacttggtctcatgctgtagtgggtaggagaaacaaaatc

SEQ ID NO: 52347 - DNA, 110 bp, synthetic construct
  source 1..110: mol_type = other DNA
ccctatggttttctgagtccagccttccaaccatggccctttttactttagctgccaaggatggccaaggtcctgctttctcctgtgtatatcgcacatttggggaatgg

SEQ ID NO: 52348 - DNA, 110 bp, synthetic construct
  source 1..110: mol_type = other DNA
caaggatggccaaggtcctgctttctcctgtgtatatcgcacatttggggaatggtgagtgtggacgatggtgagtataacccatgctgggttgccgtgcttggagaaat

SEQ ID NO: 52349 - DNA, 110 bp, synthetic construct
  source 1..110: mol_type = other DNA
ctaccaggactgtcaaaggagcttcactgaaagctaacattggcggaattcccatcgtggtcagcagtaacaaccccaatttatatccatgaggacgtgggttcgatccc

SEQ ID NO: 52350 - DNA, 110 bp, synthetic construct
  source 1..110: mol_type = other DNA
ggatgctcttcctgctcagaggctccaggttcaccactgcagcttgaagccatcgaagctcatccttattttgagagaaacatttttaggatatcactggtctcctaatt

SEQ ID NO: 52351 - DNA, 110 bp, synthetic construct
  source 1..110: mol_type = other DNA
cctgcaggacagaaagaaaacctgggctcaggggggaagaatctgctcctggcctccgaagtgggagaaggactctcagcagagttcaaaactggaccagaccgtgagga

SEQ ID NO: 52352 - DNA, 110 bp, synthetic construct
  source 1..110: mol_type = other DNA
ccgaagtgggagaaggactctcagcagagttcaaaactggaccagaccgtgaggagggaggggtaccttctcatgtctcttctctaaaggcagtgatcccaagagaagga

SEQ ID NO: 52353 - DNA, 110 bp, synthetic construct
  source 1..110: mol_type = other DNA
tgttgttttgctgtatgatttttgtttagcatgatgttagatggttttgctcttgaactgttctcctcttaccttccaagagaaacattcatatttatacctcatataat

SEQ ID NO: 52354 - DNA, 110 bp, synthetic construct; identical to SEQ ID NO: 52353
  source 1..110: mol_type = other DNA

SEQ ID NO: 52355 - DNA, 110 bp, synthetic construct
  source 1..110: mol_type = other DNA
tgagtggacttttggtcttttttgttgccaaactagctttgtctttttcaaaattgctgtaaacattcctctccatggaacagcctctgcccaacaaagagagttctcat

SEQ ID NO: 52356 - DNA, 110 bp, synthetic construct
  source 1..110: mol_type = other DNA
gttcctggcaaggtttagatggaaaaacagcaacagatcccagaagcagagctgtagccaggaataacctaagctcaagccacctgaagaaagggcaggataacactaag

SEQ ID NO: 52357 - DNA, 110 bp, synthetic construct
  source 1..110: mol_type = other DNA
agccaggaataacctaagctcaagccacctgaagaaagggcaggataacactaaggattccacatggttgccctcctctgcgtccccagaccagccatgacttggctcca

SEQ ID NO: 52358 - DNA, 110 bp, synthetic construct
  source 1..110: mol_type = other DNA
cgcaaggccagggatcgatcccacaacttcatggatactagttgggtttgttaatcactgagccacaatgagaagtccctcattactttttaattttagcaattctgata

SEQ ID NO: 52359 - DNA, 110 bp, synthetic construct; identical to SEQ ID NO: 52358
  source 1..110: mol_type = other DNA

SEQ ID NO: 52360 - DNA, 110 bp, synthetic construct
  source 1..110: mol_type = other DNA
gcctggcacatagcaagttccatatcagtgctggctggtactctaccagatctggggccacacgcaccagccatcatggttcaggagaaaaatgacctcagagaggtcat

SEQ ID NO: 52361 - DNA, 110 bp, synthetic construct
  source 1..110: mol_type = other DNA
ggccacacgcaccagccatcatggttcaggagaaaaatgacctcagagaggtcatgtcatgctttaaaccttgttaatccacaagcaagacagggtctctgcccctataa

SEQ ID NO: 52362 - DNA, 110 bp, synthetic construct; identical to SEQ ID NO: 52360
  source 1..110: mol_type = other DNA

SEQ ID NO: 52363 - DNA, 110 bp, synthetic construct; identical to SEQ ID NO: 52361
  source 1..110: mol_type = other DNA

SEQ ID NO: 52364 - DNA, 110 bp, synthetic construct
  source 1..110: mol_type = other DNA
gtttgcttctgtctcagtttgaattgtcagaacatagcaggacacctcttcccagagagcccattttcactagctgctggcatgagtcttacagactcaactattttgtt

SEQ ID NO: 52365 - DNA, 110 bp, synthetic construct
  source 1..110: mol_type = other DNA
cacttaaattcagatccttaatggtcacttagaaacaccttcaaagagatcactcaatggtgcagagctgaaatgacaagacctcaatgtagacgcctacccatcacact

SEQ ID NO: 52366 - DNA, 110 bp, synthetic construct
  source 1..110: mol_type = other DNA
tggcatcgctcagtggcttaaggatccggcgtcagatgcagggatcagatgcagcttggatctggcatcattgtggctgtggcgtagggaggcagctacagctcagactt

SEQ ID NO: 52367 - DNA, 110 bp, synthetic construct
  source 1..110: mol_type = other DNA
gcttaaggatccggcgtcagatgcagggatcagatgcagcttggatctggcatcattgtggctgtggcgtagggaggcagctacagctcagacttgacccctagcctggg

SEQ ID NO: 52368 - DNA, 110 bp, synthetic construct
  source 1..110: mol_type = other DNA
tagttgaagttacaagatattattcaaaggcatccccaccctgcagacttaagagggcaaagcagagagagagccacacagaccaagggtaccacagacaccacagcctg

SEQ ID NO: 52369 - DNA, 110 bp, synthetic construct
  source 1..110: mol_type = other DNA
ctaagccaagatagggctgggggaaaaaaacagcaacatgttgagacaatctaaagggaagaaaccaaaatgttataggagtttgattttgaaaaagaatcaggaggcat

SEQ ID NO: 52370 - DNA, 110 bp, synthetic construct
  source 1..110: mol_type = other DNA
acatgttgagacaatctaaagggaagaaaccaaaatgttataggagtttgattttgaaaaagaatcaggaggcatttatggcccccactctcatctctaggaaaagttgt

SEQ ID NO: 52371 - DNA, 110 bp, synthetic construct
  source 1..110: mol_type = other DNA
aggcttagaatcagcagccttccaccccatgactctgcttgtaatcctaaacaacccagccgtgattcatgattcaccttacatggttttagagagcttcctttgaatgg

SEQ ID NO: 52372 - DNA, 110 bp, synthetic construct
  source 1..110: mol_type = other DNA
cctaaacaacccagccgtgattcatgattcaccttacatggttttagagagcttcctttgaatgggtgtccttcagaggctgaagaagctcaggtgcagagggaagatga

SEQ ID NO: 52373 - DNA, 110 bp, synthetic construct
  source 1..110: mol_type = other DNA
gggctgagaagccaggacagtacaatggctgggccccctagtaccatacagtcagaatagaccagggcggtgttttagctggtgagggctgccacaacaaaataccacag

SEQ ID NO: 52374 - DNA, 110 bp, synthetic construct
  source 1..110: mol_type = other DNA
aatagaccagggcggtgttttagctggtgagggctgccacaacaaaataccacagactgagtgacttacacaatggaaatttacttctcacagttctggaggctgagggt

SEQ ID NO: 52375 - DNA, 110 bp, synthetic construct
  source 1..110: mol_type = other DNA
ggtgccaagaggcttcccagctggggtgaggggtgaggatggagctgaccacgtggatctttgagggcccgaaagtggtaagaagccaagtcatagaaacacaggcgggt

SEQ ID NO: 52376 - DNA, 110 bp, synthetic construct
  source 1..110: mol_type = other DNA
gatctttgagggcccgaaagtggtaagaagccaagtcatagaaacacaggcgggttcctagggagaatccttctggattccaggaccaagaagcaaacacaacttaaatc

SEQ ID NO: 52377 - DNA, 110 bp, synthetic construct
  source 1..110: mol_type = other DNA
acagctggacactccagtgtggacttcagctggtctgtctcttcctggacttggggtcacatgcactgctttgcagccccctggaaggactacagggtccaggccctcaa

SEQ ID NO: 52378 - DNA, 110 bp, synthetic construct
  source 1..110: mol_type = other DNA
gtcacatgcactgctttgcagccccctggaaggactacagggtccaggccctcaagtcacagatgacagattgcagcctggaaagagacacctccatgctcacacacaat

SEQ ID NO: 52379 - DNA, 110 bp, synthetic construct
  source 1..110: mol_type = other DNA
ctttcagctcttgagtggcacctcgcagttcttcccggtccacgtagctgtggaggcttcgtggactgcttctcttagatttccaggtgtgtgggtagaattcacatcct

SEQ ID NO: 52380 - DNA, 110 bp, synthetic construct
  source 1..110: mol_type = other DNA
caaatacatctagctgtagattaaaacagacacaaaatttttaatacaaattttgatcttgtcagcaactgcctaaatacttcgtaaacatacttaccgtctgtcctgat

SEQ ID NO: 52381 - DNA, 110 bp, synthetic construct
  source 1..110: mol_type = other DNA
atcttgtcagcaactgcctaaatacttcgtaaacatacttaccgtctgtcctgatggaaaatgaattgttttgggagctggttttccaatgaacttattaaaaagcttga

SEQ ID NO: 52382 - DNA, 110 bp, synthetic construct
  source 1..110: mol_type = other DNA
ccagaatcattagatatttgaaagaagggaaataaaaaatccttctagtagataatcaaccaagctgttccctttttaaaatgaatacaaactcattatcagtgaagagc

SEQ ID NO: 52383 - DNA, 110 bp, synthetic construct
  source 1..110: mol_type = other DNA
tcaaccaagctgttccctttttaaaatgaatacaaactcattatcagtgaagagctaaaataaatgtgaatggaaactacatggcattaagaaaatgaccaatctctctt

SEQ ID NO: 52384 - DNA, 110 bp, synthetic construct
  source 1..110: mol_type = other DNA
gctacttcctatgttggtagataaaggccgacaatgcccagaaggtcacagcatgggccacagctggagctgaatgttacatcctgctggacttgcccttcctcttcccc

SEQ ID NO: 52385 - DNA, 110 bp, synthetic construct
  source 1..110: mol_type = other DNA
gttaaggatgtgagggagccgtcatcctgctgcatatctgtcttttacaatgttctcatcagggcacccatctcacgaggtcccagggcctggagagggatgcgtatccg

SEQ ID NO: 52386 - DNA, 110 bp, synthetic construct
  source 1..110: mol_type = other DNA
tcatcagggcacccatctcacgaggtcccagggcctggagagggatgcgtatccgtgcacatgggaggcttggaacagactcagcccacagcagggaaataaatctgtaa

SEQ ID NO: 52387 - DNA, 110 bp, synthetic construct
  source 1..110: mol_type = other DNA
tcacttccaagatttggttgcaaatagaccatgatttcatttttacagctctccctcattttcttacctgcttgctttgagggagaggcccaggtgccaatagccagtga

SEQ ID NO: 52388 - DNA, 110 bp, synthetic construct
  source 1..110: mol_type = other DNA
tcattttcttacctgcttgctttgagggagaggcccaggtgccaatagccagtgaggacttgagactctcaggccaaaaacctgcaaggagctggattatgccaacaacc

SEQ ID NO: 52389 - DNA, 110 bp, synthetic construct; identical to SEQ ID NO: 52387
  source 1..110: mol_type = other DNA

SEQ ID NO: 52390 - DNA, 110 bp, synthetic construct; identical to SEQ ID NO: 52388
  source 1..110: mol_type = other DNA

SEQ ID NO: 52391 - DNA, 110 bp, synthetic construct
  source 1..110: mol_type = other DNA
actttgccaagtggatacattgccagcagcatcatgtagaaatatcatgtcccagtttcccaggggaaaccgaagcggagcgtgtggataaacctctttctggatatcac

SEQ ID NO: 52392 - DNA, 110 bp, synthetic construct
  source 1..110: mol_type = other DNA
tttcccaggggaaaccgaagcggagcgtgtggataaacctctttctggatatcacgcaggcaggtgtgtgatcgagcctgcaacctgctggccacagagggtcggctctc

SEQ ID NO: 52393 - DNA, 110 bp, synthetic construct
  source 1..110: mol_type = other DNA
attgccagtttccttcccctttggtgcgaactgttgcttgagaaatggaggggtcagaggcattaagggttgagacgtgaatcccagctgtcctatctcactgaggcctc

SEQ ID NO: 52394 - DNA, 110 bp, synthetic construct
  source 1..110: mol_type = other DNA
agaggcattaagggttgagacgtgaatcccagctgtcctatctcactgaggcctctgggggtggacaggtctccttcttcaggtaccttcgcccatcagcctctgagtta

SEQ ID NO: 52395 - DNA, 110 bp, synthetic construct
  source 1..110: mol_type = other DNA
agctaaaactgggaaatggcttctttttcacatcaaataatgactttgagaaatagtctgttgtgccaacatcctccctggcctccagtccccttttcgcaccccacccc

SEQ ID NO: 52396 - DNA, 110 bp, synthetic construct
  source 1..110: mol_type = other DNA
ctacttctctgagcctcagctgcctcagacatgaaacagggagaaccacctgctccacctgctgtgagaccggaaaagcttcatgaaaggccacccaggcttcggaccag

SEQ ID NO: 52397 - DNA, 110 bp, synthetic construct
  source 1..110: mol_type = other DNA
atctttaggtcctcctaggagcagagagagcagctactactcaagcctcccccgagctctgaaggatcaggtcaattctccacacccctcccctgggcaccatccagagg

SEQ ID NO: 52398 - DNA, 110 bp, synthetic construct
  source 1..110: mol_type = other DNA
gggaaagaatgaaaaaagtagatatctgctgcagcttgtcacttggtcccatcgggactgatggctcagcctgggagcagggtgggcatggggaaccgaagggggctgga

SEQ ID NO: 52399 - DNA, 110 bp, synthetic construct
  source 1..110: mol_type = other DNA
agtcataccttcaggcccttttaagtcttcttcctttcttgaattgacttttgtaaatatattatctctttgtccaacttgttaaaaaactttgtagcggaaaatatgta

SEQ ID NO: 52400 - DNA, 110 bp, synthetic construct; identical to SEQ ID NO: 52399
  source 1..110: mol_type = other DNA

SEQ ID NO: 52401 - DNA, 110 bp, synthetic construct
  source 1..110: mol_type = other DNA
agaagaagccttgcagcttctgcctgagtctcttggaaggctgctttttggaaccagctgccacactgcgagaagctcaagccacgtggagaggccatgcagggatgctc

SEQ ID NO: 52402 - DNA, 110 bp, synthetic construct
  source 1..110: mol_type = other DNA
cacttcagatgagctccagacccgggacccagacaaggacagagggtagcagagtggagggaagagctcctactgaagcctctgtgaggtgtgtgtgtgtgtgtgggggg

SEQ ID NO: 52403 - DNA, 110 bp, synthetic construct
  source 1..110: mol_type = other DNA
gcactgcactcggaggctgactctattagttcaagggtgagaacctggtctccatagctggacagaacactcctgaggacagggatggagatggcctgacctcatggcca

SEQ ID NO: 52404 - DNA, 110 bp, synthetic construct
  source 1..110: mol_type = other DNA
atgttagccacagccttgctggttggtgctgatgagactgcgtcctcctctgtaaaccagacaccctaagccgtgcccttagggctgttagtaacacgtagctaccaggc

SEQ ID NO: 52405 - DNA, 110 bp, synthetic construct
  source 1..110: mol_type = other DNA
accagacaccctaagccgtgcccttagggctgttagtaacacgtagctaccaggccaaccagaaacgtgtcctgtgaatgaggctcaggacaagggctgcgtcttgtctc

SEQ ID NO: 52406 - DNA, 110 bp, synthetic construct
  source 1..110: mol_type = other DNA
acagtctctgggaccgggttcttccctcttaaacccctctctagctactgagcttctcctgaaagcacctccatttccttcacgtcccaggcagaactacacctgtccaa

SEQ ID NO: 52407 - DNA, 110 bp, synthetic construct
  source 1..110: mol_type = other DNA
ctcctgaaagcacctccatttccttcacgtcccaggcagaactacacctgtccaactccataatttgctcagagatgccctctgtgtttacatcatttttatttttgcct

SEQ ID NO: 52408 - DNA, 110 bp, synthetic construct
  source 1..110: mol_type = other DNA
ggaaagatggaccactactacctcaccatactgttttgtcatgtcaggccactaagaagagcttaaaagtctccagaaataatacccattatctcaagaggacaagagtt

SEQ ID NO: 52409 - DNA, 110 bp, synthetic construct
  source 1..110: mol_type = other DNA
gaagagcttaaaagtctccagaaataatacccattatctcaagaggacaagagttgggttagcagggctttctcacctgcagcactggattccggacaaataggacaatg

SEQ ID NO: 52410 - DNA, 110 bp, synthetic construct
  source 1..110: mol_type = other DNA
agcttcaacccaaatccacccaggtctcctgggagtcttaagtcttaacctttcctacctcttgctcagacctgaccacccaccctgccaagggccagctgctgccacct

SEQ ID NO: 52411 - DNA, 110 bp, synthetic construct
  source 1..110: mol_type = other DNA
tacctcttgctcagacctgaccacccaccctgccaagggccagctgctgccaccttgaggaaaacacagccaccaccttccttgctggcctgggaagctgggctgagatc

SEQ ID NO: 52412 - DNA, 110 bp, synthetic construct
  source 1..110: mol_type = other DNA
aatcacaggaccaccagcaagggatggggctccagctccttctcaccaaagtctaggatggtgtgagcaaacccatccatcttgaggaacaagaagggcggttatgaggt

SEQ ID NO: 52413 - DNA, 110 bp, synthetic construct
  source 1..110: mol_type = other DNA
cttggccttccctctgctttactaggtcagtgagaggtggtcctgggtcccaacgctcctgttgctgagagagctcttccagcccagcctctgccacccacccccagcct

SEQ ID NO: 52414 - DNA, 110 bp, synthetic construct
  source 1..110: mol_type = other DNA
cacaaactaaatacctgatggagcaaaaacctacaggtaaaagatcaaaacctaagaatgtttaaagaaggctggggtttttctcatcatcttcaggtcagaaaatttct

SEQ ID NO: 52415 - DNA, 110 bp, synthetic construct
  source 1..110: mol_type = other DNA
gaatgtttaaagaaggctggggtttttctcatcatcttcaggtcagaaaatttctaagcatggtaccttaaaggccaaaatgttaacggaaaatatagatttgtacaact

SEQ ID NO: 52416 - DNA, 110 bp, synthetic construct
  source 1..110: mol_type = other DNA
cagaagtaactggataagaggtgacaagctgtaatatttttcagacctctgaaccctcaaaatctcaaataatacataataccttacacaaagtgaagtaaagtctagcc

SEQ ID NO: 52417 - DNA, 110 bp, synthetic construct
  source 1..110: mol_type = other DNA
tatggagaagctctttcacaacctgtccgtctgctggtcattgatgaaatagcttctgttttggagattgtgtaagtttccagaagctgagctgaaggacttccctgtct

SEQ ID NO: 52418 - DNA, 110 bp, synthetic construct
  source 1..110: mol_type = other DNA
tgactcagtgcagccaaaacaaccagcttgtggtcactctaatcccataatcacttggaatcccacagtcaatacgcaggcatgtccagccacatgccagcaatgctttt

SEQ ID NO: 52419 - DNA, 110 bp, synthetic construct
  source 1..110: mol_type = other DNA
ttggcctcatagactggacagctacatttgtcatggctgagcatggcatgagagggacacagaagtgtcatgaggtagggggaaaaaacaattcagcatccagttcctgc

SEQ ID NO: 52420 - DNA, 110 bp, synthetic construct
  source 1..110: mol_type = other DNA
agggtgtggacactccgtgtcccttcccacatgtcttgctctgtgcatctcttccatctgatatttgtctgtatcttttatcatatctttttataataagctagtaaata

SEQ ID NO: 52421 - DNA, 110 bp, synthetic construct
  source 1..110: mol_type = other DNA
atctgatatttgtctgtatcttttatcatatctttttataataagctagtaaatagtagatggcctatttttctgagttctgtgacctgctctagcaaactaattgaacc

SEQ ID NO: 52422 - DNA, 110 bp, synthetic construct
  source 1..110: mol_type = other DNA
attccttaattgttgtagcgcagcacaggagctggaagacccagttgttaacttttatggtggatgttttccaagaggctgcgtgtgttcccaccctactcttcagagct

SEQ ID NO: 52423 - DNA, 110 bp, synthetic construct
  source 1..110: mol_type = other DNA
tatggtggatgttttccaagaggctgcgtgtgttcccaccctactcttcagagctggcaagtgatattcccagagcttgcaaagagtctgacaagttggtggtggccgtg

SEQ ID NO: 52424 - DNA, 110 bp, synthetic construct
  source 1..110: mol_type = other DNA
caaaaacgggaaaagaagaagttgggttctgcccttgcctcccagcagctcaccggaaccaaaaaggccaggatgttgtaaatcagcctgacaatggagaccaccattgc

SEQ ID NO: 52425 - DNA, 110 bp, synthetic construct
  source 1..110: mol_type = other DNA
cctcttctgggttcctcagcattttcttcattgctctccaactattcacagagattgccagctttctgccattgagaacattatcaaaaattaccagggctactgtgaca

SEQ ID NO: 52426 - DNA, 110 bp, synthetic construct
  source 1..110: mol_type = other DNA
ggtgcaggtaccacattgacagaagtgtacaatagtgactttccaaagtgacagcttggctggactacatttcccagaatccctgctcctataggcttctggttagggca

SEQ ID NO: 52427 - DNA, 110 bp, synthetic construct
  source 1..110: mol_type = other DNA
ttggctggactacatttcccagaatccctgctcctataggcttctggttagggcagggcccaggggatatcactgcaggagatgggccagtgggcagaaagcagaagcca

SEQ ID NO: 52428 - DNA, 110 bp, synthetic construct
  source 1..110: mol_type = other DNA
tgtggggtgtgagtgagaaagcatgatccaggaggactcctgggtttctggttacaaccaaatctccccgccacaaaattcctgttccccggctgtgagcccatctgcca

SEQ ID NO: 52429 - DNA, 110 bp, synthetic construct
  source 1..110: mol_type = other DNA
aaccaaatctccccgccacaaaattcctgttccccggctgtgagcccatctgccaactttcagcccaaattgcatttccgaagccgacaccacaaacaaacagaggtaat

SEQ ID NO: 52430 - DNA, 110 bp, synthetic construct
  source 1..110: mol_type = other DNA
agactagtgtcatcgaaaatgactttcaggtaaaggacacaccctgaagaaaatctgccaaagacatgaccttctgggccctcggcctcttgttccctgtgttgagcttt

SEQ ID NO: 52431 - DNA, 110 bp, synthetic construct
  source 1..110: mol_type = other DNA
tgccaaagacatgaccttctgggccctcggcctcttgttccctgtgttgagctttacccttccgctgggctcccaggcaggacacaaactacacatagagaaaaatacat

SEQ ID NO: 52432 - DNA, 110 bp, synthetic construct
  source 1..110: mol_type = other DNA
agtcctctaccgggagggggggtgactctgtgccaaataatccaaactattataccaaagacatctaccccagagccaagaaaataaggatctttactgatgtggttatg

SEQ ID NO: 52433 - DNA, 110 bp, synthetic construct
  source 1..110: mol_type = other DNA
aagcccacctggtaagtaattctgttaaaatacagcactgttcataattgagatacacttggatagcacagggtgccatagccaatacctttttctgccttcacgttgta

SEQ ID NO: 52434 - DNA, 110 bp, synthetic construct
  source 1..110: mol_type = other DNA
tcttacaattacaaagctgatgctgctgagaaaatcagaaaagaaaatccagtagttgttggtgaaaagatccagaagatttgaactcctgctggaatacaaaatccttt

SEQ ID NO: 52435 - DNA, 110 bp, synthetic construct
  source 1..110: mol_type = other DNA
gattctcatcagctttcccccatgtcaggctttctttgtaggccctgggaacagacttggagagcccatccccatctccaaggcccacgagcacatttttggaatggtcc

SEQ ID NO: 52436 - DNA, 110 bp, synthetic construct
  source 1..110: mol_type = other DNA
tctggtgagcctcttaaaggcatttcttggctctgacaattcttttgtacgtagtaggtgcaccggctgtatccagaacaaagtaggtggtcagtaaatacatgctaaag

SEQ ID NO: 52437 - DNA, 110 bp, synthetic construct
  source 1..110: mol_type = other DNA
tcattattcccattttatgtacgaagaaactgaggcttggaaaggttaagcaaattgcttagggtgactcagcgactaagtgacagatcccggtctgtgtgatcccatca

SEQ ID NO: 52438 - DNA, 110 bp, synthetic construct
  source 1..110: mol_type = other DNA
tgcttagggtgactcagcgactaagtgacagatcccggtctgtgtgatcccatcacctgagtttgtcatcactctgtgtctgtcctctgtgtgttctgtctcttacttgt

SEQ ID NO: 52439 - DNA, 110 bp, synthetic construct
  source 1..110: mol_type = other DNA
caaaggctgtgttcgtgtgcacttccaagggtagggcatgacctcggccacatcgtcaccagtaggtaactgagctgatttcctctctgcccggagctgtggtcaggatt

SEQ ID NO: 52440 - DNA, 110 bp, synthetic construct
  source 1..110: mol_type = other DNA
tatattttgtgccgtgttgttcagtctcttcgtgctttttgcgggtggttctgctgtttaaaatgaccccctagagcagtgcggaagtgctcttcagtgccaggctgtga

SEQ ID NO: 52441 - DNA, 110 bp, synthetic construct
  source 1..110: mol_type = other DNA
gtttaaaatgaccccctagagcagtgcggaagtgctcttcagtgccaggctgtgatgtgacctacggagagacgatgtgtgttggacagacttcactcaggcgtgactca

SEQ ID NO: 52442 - DNA, 110 bp, synthetic construct
  source 1..110: mol_type = other DNA
atttgacagactctctggctggcctgcttcacagctgaaaccatttgccatttagtagatgataaagcaagtgacaattgacactaaaagagccattacaaagaagatgt

SEQ ID NO: 52443 - DNA, 110 bp, synthetic construct
  source 1..110: mol_type = other DNA
gccagatgctgttgtttctcatgtgcacacaggttcctgtccccaacctaccagccggtgtgcacgaggctgggaaatctgtcgaaaaggcagacgcaatcttttcccag

SEQ ID NO: 52444 - DNA, 110 bp, synthetic construct
  source 1..110: mol_type = other DNA
cggtgtgcacgaggctgggaaatctgtcgaaaaggcagacgcaatcttttcccaggaaagagacccgcggtttgctgagatgtttgcaggaatcagcgcatgtaagtttc

SEQ ID NO: 52445 - DNA, 110 bp, synthetic construct
  source 1..110: mol_type = other DNA
ctctgggtaaaagaggcacttgctgaagagtgaatgccagtggacctcctgcgcaccgctggcagacacagctaggcagagatgcagcttcctgtgcaatgcctggcctc

SEQ ID NO: 52446 - DNA, 110 bp, synthetic construct
  source 1..110: mol_type = other DNA
ccgctggcagacacagctaggcagagatgcagcttcctgtgcaatgcctggcctctctttaacgccctctatggacagagcctaacactgcaccagctgacaaaggagaa

SEQ ID NO: 52447 - DNA, 110 bp, synthetic construct
  source 1..110: mol_type = other DNA
ggtcccctgctctccatcccaaggtgacacgtaggtttcagaaaagctcagtgaataaaacaagcagtgagttgagctgatggttctgggcagagcctgaaggtaaggtc

SEQ ID NO: 52448 - DNA, 110 bp, synthetic construct
  source 1..110: mol_type = other DNA
taaaacaagcagtgagttgagctgatggttctgggcagagcctgaaggtaaggtcaagaggtcccagcagtggacagagagctgggaggcagggagctgagaggccctga

SEQ ID NO: 52449 - DNA, 110 bp, synthetic construct
  source 1..110: mol_type = other DNA
ctgagcatgttgcagcctgtctcacacaatctggacgtgtggcttccgaatggcaggcaaggcccaggtgttggattgggaacgagacatcaacaaggaatgaagtacga

SEQ ID NO: 52450 - DNA, 110 bp, synthetic construct
  source 1..110: mol_type = other DNA
ggcaaggcccaggtgttggattgggaacgagacatcaacaaggaatgaagtacgaaggaccatgagtgatggtgatggtgagggtacatgtgacattgcataacatggta

SEQ ID NO: 52451 - DNA, 110 bp, synthetic construct
  source 1..110: mol_type = other DNA
ttagatgggcctatgaggtacacatagatcccgagcccatccagaactttatacgatgggacgtggggtgggccaggagctctgggatcaaaaaagacccaggtggctgg

SEQ ID NO: 52452 - DNA, 110 bp, synthetic construct
  source 1..110: mol_type = other DNA
tgtcctggatctgcccagccgcaggcatagcgctgggcacagaagagctgacccattagtacttgtgattgggaacctgccacacgccctgattttaggagaggacttgc

SEQ ID NO: 52453 - DNA, 110 bp, synthetic construct
  source 1..110: mol_type = other DNA
gagatgcaggctccccgcccccgccctgctccctcagggcatccagggtctcagggtctgtgtgagtttggtgctcaggtcaagggtgtctggcactcaggagctgaggc

SEQ ID NO: 52454 - DNA, 110 bp, synthetic construct
  source 1..110: mol_type = other DNA
gtctgtgtgagtttggtgctcaggtcaagggtgtctggcactcaggagctgaggcatctcactttatagctgagccctgtgagggcagagggagtggaggctgcactgag

SEQ ID NO: 52455 - DNA, 110 bp, synthetic construct
  source 1..110: mol_type = other DNA
atgtggtcacctggggagttcaggtcccttttaaggtacgcgtgcttctcggttctggccagttgttgccaagtgggaagggtaggtggggagcctgctgcaggagctgt

SEQ ID NO: 52456 - DNA, 110 bp, synthetic construct
  source 1..110: mol_type = other DNA
tggccagttgttgccaagtgggaagggtaggtggggagcctgctgcaggagctgttgatataagagaagccagaaatctagacttttatataaaatctctctcctagtta

SEQ ID NO: 52457 - DNA, 110 bp, synthetic construct
  source 1..110: mol_type = other DNA
actggctgcgtagagagcctcttggtcccagggtgcattttcctgcagcccaggggctgctgcttctggaagggtttgggcaggaaactcaaacagccagtgatgacaat

SEQ ID NO: 52458 - DNA, 110 bp, synthetic construct
  source 1..110: mol_type = other DNA
gctgctgcttctggaagggtttgggcaggaaactcaaacagccagtgatgacaatgacacttcagtactgcaagactcttttgttagcaaaaactggtagggccctacca

SEQ ID NO: 52459 - DNA, 110 bp, synthetic construct
  source 1..110: mol_type = other DNA
agattcctagaaggctgaatgtccaggtctgagttggtttgagtggaagctgttctgaatctcacatacatatgtgcacgtgcgtgtgcacacacacacacatgcacacc

SEQ ID NO: 52460 - DNA, 110 bp, synthetic construct
  source 1..110: mol_type = other DNA
tgaatctcacatacatatgtgcacgtgcgtgtgcacacacacacacatgcacacccgcttgccctgtggacagagggatgtctttcccatcttcttgctgtgtggccttg

SEQ ID NO: 52461 - DNA, 110 bp, synthetic construct
  source 1..110: mol_type = other DNA
gagtcagcagggtgacatagctatcacgtggtggtcagtggtgaggaagtctctccttctgttgatatttctgctcagataagaattcaagccagagagcaggactacgc

SEQ ID NO: 52462 - DNA, 110 bp, synthetic construct
  source 1..110: mol_type = other DNA
tggctccagacctcagcccccacctgagcaccgctcccccttggcaggtcctcttgggtacttggtagctgtttgcctccatccccacatttgtacactgatgcagtgat

SEQ ID NO: 52463 - DNA, 110 bp, synthetic construct
  source 1..110: mol_type = other DNA
gggtacttggtagctgtttgcctccatccccacatttgtacactgatgcagtgatgcagtcctgcctgaacagagagggagatcatgaacccaaggggctcaccctcccc

SEQ ID NO: 52464 - DNA, 110 bp, synthetic construct
  source 1..110: mol_type = other DNA
ggtgtaaagactcccgtcagggccaatttcaagccacagtgttttaatggccagatcccaagattcctctctatttaaccacaggtcctgcaagctggtactagtcggcc

SEQ ID NO: 52465 - DNA, 110 bp, synthetic construct
  source 1..110: mol_type = other DNA
tcccaagattcctctctatttaaccacaggtcctgcaagctggtactagtcggcctcagtgcaggtggaaggctgagtcaacagaggggagttgaaggcagtgttgggaa

SEQ ID NO: 52466 - DNA, 110 bp, synthetic construct
  source 1..110: mol_type = other DNA
tgcctctcttacgaatgtgacctctctctaaactccaaaccctcttctggccacttcgagtgtcctcggagccctggagctggctttttcatgaaacaaggacttccaag

SEQ ID NO: 52467 - DNA, 110 bp, synthetic construct
  source 1..110: mol_type = other DNA
agagctgtttttattattctttgtttgcagttggagaaactgaggcttaaagaatgaaagctggaggtcccatcatggctcactgggtcaaaaacccaactagtacccat

SEQ ID NO: 52468 - DNA, 110 bp, synthetic construct
  source 1..110: mol_type = other DNA
tgcagttggagaaactgaggcttaaagaatgaaagctggaggtcccatcatggctcactgggtcaaaaacccaactagtacccatgaggatgtgggctccatctctggcc

SEQ ID NO: 52469 - DNA, 110 bp, synthetic construct
  source 1..110: mol_type = other DNA
acttggaggcagagtccagggctccacccaggctgtacactggcattggctttgtgctttggggcagttcaggccaccctgcgacgggcgcacagctctcaccctaagag

SEQ ID NO: 52470 - DNA, 110 bp, synthetic construct
  source 1..110: mol_type = other DNA
gctttggggcagttcaggccaccctgcgacgggcgcacagctctcaccctaagagaagggagaatggtccctttgtagctaatgaactccccatatggagcgctgctacc

SEQ ID NO: 52471 - DNA, 110 bp, synthetic construct
  source 1..110: mol_type = other DNA
gtcaggttcttaacctgctgagccacaatgggaactactccctttcatttctaattcaagctcaggaggcacaattttgcctcatagcagcatcctgccttagtgcctcc

SEQ ID NO: 52472 - DNA, 110 bp, synthetic construct; identical to SEQ ID NO: 52471
  source 1..110: mol_type = other DNA

SEQ ID NO: 52473 - DNA, 110 bp, synthetic construct
  source 1..110: mol_type = other DNA
gtctggaatggaggcgatggccaagctttgctgcagcattctgcagtgtgatgttgaccactgccttaattaagaccagtagatgtgagaagttgccatcgtgcctcagt

SEQ ID NO: 52474 - DNA, 110 bp, synthetic construct
  source 1..110: mol_type = other DNA
aggagccctctcaggatttccccatgcctttaggattttcccaaagaagcagattccagaatatttttccaatggcttcaacgtgttatctgctcgacattgctctgatg

SEQ ID NO: 52475 - DNA, 110 bp, synthetic construct
  source 1..110: mol_type = other DNA
tttcttaaaaaagttttcctccgagatctcataatatctgtccccttccttgcaggactctttgtgaattaagtcaaagctgattccttcccccagagaagatttgaatt

SEQ ID NO: 52476 - DNA, 110 bp, synthetic construct
  source 1..110: mol_type = other DNA
gactctttgtgaattaagtcaaagctgattccttcccccagagaagatttgaatttgcttccaccaggtggttaggggcctactgccctggaacaattttaagctgaatt

SEQ ID NO: 52477 - DNA, 110 bp, synthetic construct
  source 1..110: mol_type = other DNA
aaggtaaatttcccagctcttcgtagctgatgtcaaggtgatccaaagcagaatcgctaggctgcccatagaagctgctgggaacacgacacatgtcttgggccttcaga

SEQ ID NO: 52478 - DNA, 110 bp, synthetic construct
  source 1..110: mol_type = other DNA
gctaggctgcccatagaagctgctgggaacacgacacatgtcttgggccttcagaacactgttccgtggatttgaaggtctgcaggcgtgacagtcgccccgatggctct

SEQ ID NO: 52479 - DNA, 110 bp, synthetic construct
  source 1..110: mol_type = other DNA
tctgttcccctctcctccttgacaagcaaacatttcattctccttcgagcctgggacctctaagtccgggagggccacttaggaacagagaggctgagaagccaggcttt

SEQ ID NO: 52480 - DNA, 110 bp, synthetic construct
  source 1..110: mol_type = other DNA
catgttatatttctcatcctcccaagagggtcaggtaagaatgagtctgcgttgcacaggagtgactgaagctcagctattgaagctgaaccaccaaggtcacattgcta

SEQ ID NO: 52481 - DNA, 110 bp, synthetic construct
  source 1..110: mol_type = other DNA
tttcttgagaccgtgatctcgccagagggccaagctttggatctttctccctttctggccctgccagtgcactggtttcattgtggtcagacccagaaatgcaagccaga

SEQ ID NO: 52482 - DNA, 110 bp, synthetic construct
  source 1..110: mol_type = other DNA
gggagagggactacagcgagcacccaccacctctgtacccatagctggtgtggtacactgggcatgtttcctgcttttcaagtggatacgtgggaggatgtcaggcttgc

SEQ ID NO: 52483 - DNA, 110 bp, synthetic construct
  source 1..110: mol_type = other DNA
tgctgttgatgaggagtcatcccggagctgatgctgtcaaggcctgaggttctggaatctcaaggcatccccacaaaccaagtccaaatggactcttcagggtgacccaa

SEQ ID NO: 52484 - DNA, 110 bp, synthetic construct
  source 1..110: mol_type = other DNA
gcaacctacactacagcctgtggcaacaacagatccttaatctactgagggaggccagggtttgaacctgcatatggtaaatgtatgctaggttgggttcttaacccact

SEQ ID NO: 52485 - DNA, 110 bp, synthetic construct
  source 1..110: mol_type = other DNA
ttaatgagaaaccagaatgaaagtgaagagggaagccagttgtctcacctgtgactgccactgagccaggctgagctgggggttgaggtttgatgcttccaagccctgtg

SEQ ID NO: 52486 - DNA, 110 bp, synthetic construct
  source 1..110: mol_type = other DNA
tgccactgagccaggctgagctgggggttgaggtttgatgcttccaagccctgtgagcaaagcaaagagatgttcaggtcagaaaaacatatggaaaccatccactcccc

SEQ ID NO: 52487 - DNA, 110 bp, synthetic construct
  source 1..110: mol_type = other DNA
tgctttttcagttttaaagggaactgcatctccaaggcagcataacaaaacagtactgggctgccctcaggaagatagccccgctcaacctaaatggttcaatatcttga

SEQ ID NO: 52488 - DNA, 110 bp, synthetic construct
  source 1..110: mol_type = other DNA
ctgggctgccctcaggaagatagccccgctcaacctaaatggttcaatatcttgaaacagactgtcaggagatggggacgggaagagcagggtgctgtggaaaaaacaag

SEQ ID NO: 52489 - DNA, 110 bp, synthetic construct
  source 1..110: mol_type = other DNA
tgacacacagacattttcctgattccatgaaggaacagaagctagtactcaaagtaataccatgcctaagtaggttattaattctaaacatacaaagttatagacaccaa

SEQ ID NO: 52490 - DNA, 110 bp, synthetic construct
  source 1..110: mol_type = other DNA
gtctctgtgagactcagatgagggcatggatgtcccagctctacccccagcctcactgattatcagatttttgctgacagacctgtgtgaacctcggtttctttgtccag

SEQ ID NO: 52491 - DNA, 110 bp, synthetic construct
  source 1..110: mol_type = other DNA
gcttttggtgatggagctggaatttgagtagactgtttcctcacaatggcaggagttccggagagtaccatatatagggttaaaaggctccacattgaaaagttaagaaa

SEQ ID NO: 52492 - DNA, 110 bp, synthetic construct
  source 1..110: mol_type = other DNA
ttccggagagtaccatatatagggttaaaaggctccacattgaaaagttaagaaagggggagttcccgtcgtggtgcagtggttggccaacccgactaggaaccatgaag

SEQ ID NO: 52493 - DNA, 110 bp, synthetic construct
  source 1..110: mol_type = other DNA
gacgttgtgccaaataactggcctgcgccttccaaaaaatgtcaaattcatgaggtctagggaagactgagaaattattcaaaaaaataagtaaaagatatcaaggagat

SEQ ID NO: 52494 - DNA, 110 bp, synthetic construct
  source 1..110: mol_type = other DNA
gcagtaaaggaaacacaattgagggttagaaactcagatgttagaaaaccatccccatggctaagctccccaggcttcagtcatttcctctgtgaaatgagaattctcag

SEQ ID NO: 52495 - DNA, 110 bp, synthetic construct
  source 1..110: mol_type = other DNA
taaaataaaataaagttccctaggcatttttcaggcctctagcagaaaaagccatcccagaaatggtatgtacattcaaatgaacaagctcgcgctcctcttctcctctc

SEQ ID NO: 52496 - DNA, 110 bp, synthetic construct
  source 1..110: mol_type = other DNA
aaattcccagggaaggtttaaaagataaattgcacttgattcctgtcattttcagctcttagctcaccagcagttacccatctccaccccagccccatggaagacagccc

SEQ ID NO: 52497 - DNA, 110 bp, synthetic construct
  source 1..110: mol_type = other DNA
ctcttagctcaccagcagttacccatctccaccccagccccatggaagacagccctgtacctattcttagagcagctggcacaaagtttgcagaagtcagaatgggcaat

SEQ ID NO: 52498 - DNA, 110 bp, synthetic construct
  source 1..110: mol_type = other DNA
ccttccctattctggactcagtatttctggctttcctggctgtgcactttaagacggaagtcctccaaagtcactctagctgaaatattccaggatcatattcctaattt

SEQ ID NO: 52499 - DNA, 110 bp, synthetic construct
  source 1..110: mol_type = other DNA
ggaagtcctccaaagtcactctagctgaaatattccaggatcatattcctaattttatcaaagcgtgagttggacatttcctgattctgaatgttcatcaatgaaaattt

SEQ ID NO: 52500 - DNA, 110 bp, synthetic construct
  source 1..110: mol_type = other DNA
gaagaagactcagcagctgaaactatctttcaccccatgctagtgggctctaggatggcctcctggttggggaacttgcgacagcagggcctttcagtagaagccatgct

SEQ ID NO: 52501 - DNA, 110 bp, synthetic construct
  source 1..110: mol_type = other DNA
ctaccctgtagaacaggatgttatcgctagagcagattaataaggcctcagacgcaaggtaggccatcattgatttggcaaactcatcattttctattctaatcagaaaa

SEQ ID NO: 52502 - DNA, 110 bp, synthetic construct
  source 1..110: mol_type = other DNA
aaggtaggccatcattgatttggcaaactcatcattttctattctaatcagaaaagaagacccaaaacagtctgcattcacttggatcaaacaacagtattctcttacag

SEQ ID NO: 52503 - DNA, 110 bp, synthetic construct
  source 1..110: mol_type = other DNA
ttttcagccttttgtttaattttgagagagaaaggaggctggaaacccatcatggtttgcgcgttgacaaaaactgcctatgtggtaaaaacttgctgtttttatcctag

SEQ ID NO: 52504 - DNA, 110 bp, synthetic construct
  source 1..110: mol_type = other DNA
tcagatctgactccaaactctatacttgttatcatcaggctttgtctcccactcagaaggaattaaagatgataaaacatcacctcattaagttaagtgtggttttattt

SEQ ID NO: 52505 - DNA, 110 bp, synthetic construct
  source 1..110: mol_type = other DNA
gaaggaattaaagatgataaaacatcacctcattaagttaagtgtggttttattttaactggttaagaaagaagcatattcgttcacatatctttttcctacgccgcagc

SEQ ID NO: 52506 - DNA, 110 bp, synthetic construct; identical to SEQ ID NO: 52504
  source 1..110: mol_type = other DNA

SEQ ID NO: 52507 - DNA, 110 bp, synthetic construct; identical to SEQ ID NO: 52505
  source 1..110: mol_type = other DNA

SEQ ID NO: 52508 - DNA, 110 bp, synthetic construct
  source 1..110: mol_type = other DNA
agtagacttaattattcaaataattaccacttattaagagcttactgtgagccgggcactgtgctaaacactttgaacgtgctaatccacacatcttttttcttttcttt

SEQ ID NO: 52509 - DNA, 110 bp, synthetic construct
  source 1..110: mol_type = other DNA
ggagttgaaatagtttctcctttgaggagtccctccaaagcaaggagtaatactcacatcattttgcccacacatcagggccctggattttatgttaatccctagatttt

SEQ ID NO: 52510 - DNA, 110 bp, synthetic construct
  source 1..110: mol_type = other DNA
atcactttatctaaagccccacttaattggatagtagacctgctgatccatcctcccatgccttttgtcttcttgttcttgatactttgggttggaaattgcaagactga

SEQ ID NO: 52511 - DNA, 110 bp, synthetic construct
  source 1..110: mol_type = other DNA
aggtgtggccctaaaaagacaaaagacaaaaacacaaaaaacaagggcacgtctaaactgttgggtctccaccatctggcacggaatctagtacagcttggccctgggta

SEQ ID NO: 52512 - DNA, 110 bp, synthetic construct
  source 1..110: mol_type = other DNA
aactgttgggtctccaccatctggcacggaatctagtacagcttggccctgggtacaccaaatctgaagagggcagtgagagtggggaggtgagtgaatgcatttgaagg

SEQ ID NO: 52513 - DNA, 110 bp, synthetic construct
  source 1..110: mol_type = other DNA
cttgagctgtactttgtacaaagcctcctgtatagagagctttctctttttacttagcttatggatgagtttcaaccattgatgagttggcaggcatgtgtaaataaata

SEQ ID NO: 52514 - DNA, 110 bp, synthetic construct
  source 1..110: mol_type = other DNA
agcttatggatgagtttcaaccattgatgagttggcaggcatgtgtaaataaatataggaggtgaagttagagatgaccacagggttggaaagatgctggtgcactgaca

SEQ ID NO: 52515 - DNA, 110 bp, synthetic construct
  source 1..110: mol_type = other DNA
aagcagcaggtgcagcctttcaaaaggaagggaaaaaacaaacaggaaaagatagcgcacaagttttgagagaatctgggccccaagtatattatgttccattaaattgt

SEQ ID NO: 52516 - DNA, 110 bp, synthetic construct
  source 1..110: mol_type = other DNA
cagtgaaatacccttttctcatgtcttaggtattttcaattttatcagaagaactctaattggaaatatagaggccaccaccttcagggaagatactcccgatttaccca

SEQ ID NO: 52517 - DNA, 110 bp, synthetic construct
  source 1..110: mol_type = other DNA
ccaaagtggaaagtttgtttttcatttagtgttgataccaagatatttaaattccctatgctggtgtatggcttttatttttttcaagtccataggttagtaagcatata

SEQ ID NO: 52518 - DNA, 110 bp, synthetic construct
  source 1..110: mol_type = other DNA
tggaggagatgctgcctgagctgggcactgcagggaacacattcagagaagagcttggtgggccaagggcctggcacaggcaaaggtcagaaaggacatgtggccagagc

SEQ ID NO: 52519 - DNA, 110 bp, synthetic construct
  source 1..110: mol_type = other DNA
aaaaatccaagatgaaataaacgtggatttttgcagaaagactccaccgggtttaagagaaagtcataccctggcatctgaatccgtagacataaatgccagttgttggg

SEQ ID NO: 52520 - DNA, 110 bp, synthetic construct
  source 1..110: mol_type = other DNA
tcctcatggatactagttggattcgtttctgccacgccacgaggggaactcctgtatatgagatcttgatgtggggaacatccgtagaagcatactatcaaaggcaaaag

SEQ ID NO: 52521 - DNA, 110 bp, synthetic construct
  source 1..110: mol_type = other DNA
atatgagatcttgatgtggggaacatccgtagaagcatactatcaaaggcaaaagctatataaatatttacagagctaatattaaaactgaaattgaaaagtgaccaatc

SEQ ID NO: 52522 - DNA, 110 bp, synthetic construct
  source 1..110: mol_type = other DNA
agaagggcaacgagctttaaagcaagagggcaatcaaacattcaaattgcaccggactttgactcaatgaaaggacagctgcccaagcctgcctggagacacagaggaaa

SEQ ID NO: 52523 - DNA, 110 bp, synthetic construct
  source 1..110: mol_type = other DNA
catgcgggttggcttgcagatggcgttttgcttggcctgccccttgctcttgtacagtgtggattagctgccaatatttacaaatgaggggatcacacataaaaaatatg

SEQ ID NO: 52524 - DNA, 110 bp, synthetic construct
  source 1..110: mol_type = other DNA
tgtgtaacctaaaacagacacaggactcgttctcagctttccaggtgatgtgcaaatactcaccaaaggtggagccttcgccgagctccctcccatatttgagcatgcag

SEQ ID NO: 52525 - DNA, 110 bp, synthetic construct
  source 1..110: mol_type = other DNA
cagagtcctactgtgcagtaggaaagaagtatttattggcaaaaataaaaccaattcccatgtttgtacagagctgagacctctgtacaaataagacaaatatgaaagac

SEQ ID NO: 52526 - DNA, 110 bp, synthetic construct
  source 1..110: mol_type = other DNA
ggagccataaccttatcagacggtggttagttgtctgttatttacttacatttccaagtctttttacagcacagtaacacctctggtcttgtcttagcagctcatatgaa

SEQ ID NO: 52527 - DNA, 110 bp, synthetic construct
  source 1..110: mol_type = other DNA
aagtctttttacagcacagtaacacctctggtcttgtcttagcagctcatatgaatagtgttgagggcaaaaatgtttttgcagtttggattctttgagatcccggatcg

SEQ ID NO: 52528 - DNA, 110 bp, synthetic construct
  source 1..110: mol_type = other DNA
cgtgcaggagctttcgtgtggagaacaaatcggtggggcacttgtgtggaggcagcacttcagatggtgggctgagccaaggtggtgctgggaggcagggagaagtaaac

SEQ ID NO: 52529 - DNA, 110 bp, synthetic construct
  source 1..110: mol_type = other DNA
cacttcagatggtgggctgagccaaggtggtgctgggaggcagggagaagtaaacaggttccagagacatcctcgggtaaaagcaataaggcttggtgattgactgaatg

SEQ ID NO: 52530 - DNA, 110 bp, synthetic construct
  source 1..110: mol_type = other DNA
agaacacctatcaccatcagacaactttaggtcacaaatatcttaggtcaggaaagcaaatgccaaatactttggaaaacgcgtggcttacaccatagctttcacctaaa

SEQ ID NO: 52531 - DNA, 110 bp, synthetic construct
  source 1..110: mol_type = other DNA
gcaaatgccaaatactttggaaaacgcgtggcttacaccatagctttcacctaaaagaaactatttattgaaaaaaggaaatcttggagttcccgttatggctcagtggg

SEQ ID NO: 52532 - DNA, 110 bp, synthetic construct
  source 1..110: mol_type = other DNA
cagctcaggtcgctgctatggtgagggttcagtctctggcccaggagcttacacatgccacaggcacggccaaaaaaattacacatttggaagcgggacttactcaaact

SEQ ID NO: 52533 - DNA, 110 bp, synthetic construct
  source 1..110: mol_type = other DNA
tgccacaggcacggccaaaaaaattacacatttggaagcgggacttactcaaacttaggtcaacacttttagcccctctccatgtgacatttatcaaaaacataagctta

SEQ ID NO: 52534 - DNA, 110 bp, synthetic construct
  source 1..110: mol_type = other DNA
ctcttcctggtgacttctctctccagggcaggaggaggaaagaaaactgggtttcttcatgttaaaagactctcttagctcactgtctgttggtatggtgtggacaatgg

SEQ ID NO: 52535 - DNA, 110 bp, synthetic construct
  source 1..110: mol_type = other DNA
ttcatgttaaaagactctcttagctcactgtctgttggtatggtgtggacaatggtgaggggttagcatttctgccactaggagacttggccacatcttcaggatgatcc

SEQ ID NO: 52536 - DNA, 110 bp, synthetic construct
  source 1..110: mol_type = other DNA
aactaatctgtccaccccttcccacccaggtattcctgtttttgtcaaagattactattcagccagtcacccaaaaaacaaagaccttaaattattcctagattctcctt

SEQ ID NO: 52537 - DNA, 110 bp, synthetic construct
  source 1..110: mol_type = other DNA
tattcagccagtcacccaaaaaacaaagaccttaaattattcctagattctcctttttctttacctccaatatcttgttgatcacctaatgatgtcaagattatacaaat

SEQ ID NO: 52538 - DNA, 110 bp, synthetic construct
  source 1..110: mol_type = other DNA
agtaacatctttaaagctctgcctggcagctgagggggaccatagttcagaaaaaggagtcatgggacacaagaaaatcaattaggagccttattctagcaagagatgct

SEQ ID NO: 52539 - DNA, 110 bp, synthetic construct
  source 1..110: mol_type = other DNA
agtacataaaatagggcttataataactggtgtcctggatttagtaagatacagtattaactgatttatcccatacagtgatctacagaagtagacatttttgtctatgc

SEQ ID NO: 52540 - DNA, 110 bp, synthetic construct
  source 1..110: mol_type = other DNA
actggtgtcctggatttagtaagatacagtattaactgatttatcccatacagtgatctacagaagtagacatttttgtctatgcttgaaaagtgatgaagtgtagagaa

SEQ ID NO: 52541 - DNA, 110 bp, synthetic construct
  source 1..110: mol_type = other DNA
tagcatgctttccttgataagtaacagaaatctaactcaatctggctcaaacagtaaagggatttgttagctcacatacctggaaagtccagaggcaggatttacatagg

SEQ ID NO: 52542 - DNA, 110 bp, synthetic construct
  source 1..110: mol_type = other DNA
gtactgtcgattctgcccggcagtaattctagtatccaaacactctctttacctacttcctccgcctactcaaagttctcgttatcatcccctggaacgaaggaatgcaa

SEQ ID NO: 52543 - DNA, 110 bp, synthetic construct
  source 1..110: mol_type = other DNA
tgattgatttatttatcttctgggagacgtggtgacactgcaattgtagtaacgctttctttctctgtgcttttgagctagactctcctcaggtcttgcgaggatgctgc

SEQ ID NO: 52544 - DNA, 110 bp, synthetic construct
  source 1..110: mol_type = other DNA
gagctctatcgtatcactttccccatttacacaggaagaaactgagtcccaggtggtacagtgagtccttgccgaaggtcacatggctggtaaatttcccactggccccc

SEQ ID NO: 52545 - DNA, 110 bp, synthetic construct
  source 1..110: mol_type = other DNA
gtacagtgagtccttgccgaaggtcacatggctggtaaatttcccactggcccccactgcctacctttcctcagagctgcagctgcagtctctttcagaaccttcccaga

SEQ ID NO: 52546 - DNA, 110 bp, synthetic construct
  source 1..110: mol_type = other DNA
ggcggagttccttcacctccaagttctcctcccgcagtcccaggacgtgatcaatgactttaagttcctccggactttcacacgaatcatagtagacaacttcatcctgt

SEQ ID NO: 52547 - DNA, 110 bp, synthetic construct
  source 1..110: mol_type = other DNA
gactttaagttcctccggactttcacacgaatcatagtagacaacttcatcctgtttatctagaaacagtgatttttatttttcctttttctctttttagggccacacct

SEQ ID NO: 52548 - DNA, 110 bp, synthetic construct
  source 1..110: mol_type = other DNA
tttcagtatcctctagtatttgcatcacagcagcctgctccgccaatagcttcagcggaatggtttaagggcctacccagcttctcacagcgaataaaggttgttgatgt

SEQ ID NO: 52549 - DNA, 110 bp, synthetic construct
  source 1..110: mol_type = other DNA
tgatttcagccattttcaaagcacacaggagaagcaaccacccttcatggtgggaacctccccagcatgaggggagtggtgatgagccccgaggtgcccggttcagtttg

SEQ ID NO: 52550 - DNA, 110 bp, synthetic construct
  source 1..110: mol_type = other DNA
acctccccagcatgaggggagtggtgatgagccccgaggtgcccggttcagtttgaaagttttaagaaaaggatgccttagagtatgtgtgcacaggctcagtgcacgaa

SEQ ID NO: 52551 - DNA, 110 bp, synthetic construct
  source 1..110: mol_type = other DNA
actttagctcaggttagtcttcccaagagagccaattggaagacaggatttccagggccagaagcgcaagagccaatcagatcgcggcccgactgcctgcgttctcctag

SEQ ID NO: 52552 - DNA, 110 bp, synthetic construct
  source 1..110: mol_type = other DNA
tggagtccaggggaggggccagcagtgacaggcacttatgggagaatatgtgtcccaggagatgtggtctgtacttcctcccaaaggttggtgatgccagtctgtgccag

SEQ ID NO: 52553 - DNA, 110 bp, synthetic construct
  source 1..110: mol_type = other DNA
aaggtaagaagaggcagatgaagaagaggaagaaggtgccagagggacaagaaggcggctcgtcctcagatgagggcagcgactccagcagcagctcgtcggagtctgag

SEQ ID NO: 52554 - DNA, 110 bp, synthetic construct
  source 1..110: mol_type = other DNA
cggctcgtcctcagatgagggcagcgactccagcagcagctcgtcggagtctgagatgacatccgagactgaggaggagcaggtggaacctgcctcctggaggaaaaaaa

SEQ ID NO: 52555 - DNA, 110 bp, synthetic construct
  source 1..110: mol_type = other DNA
tttacctccatcctatttcactccagtccctcatcagccagaagtgtcccacataagaaatgctaagcttcaacagcctgaccaatgtacctatcctgccagttctctgg

SEQ ID NO: 52556 - DNA, 110 bp, synthetic construct
  source 1..110: mol_type = other DNA
tcagttgagtcttcttatctgcagcccaaagcactctaccttacattcaaggctgccaaatctccgtccctttttatttttcattttttcctttttagggccataccctg

SEQ ID NO: 52557 - DNA, 110 bp, synthetic construct
  source 1..110: mol_type = other DNA
tacatccagaagcttaccacttcattccccaccaccaagctggctcatcgccaccatctcacacctcagtttctgcaacaacctcctaggcgacctcactatgtccatcc

SEQ ID NO: 52558 - DNA, 110 bp, synthetic construct
  source 1..110: mol_type = other DNA
gaccctaaatagggctgcggacctacagtggaaagccagccatggctcccttgatctatccgtggatatcacatgctcaagtaaatacatggctggcagctccaggacca

SEQ ID NO: 52559 - DNA, 110 bp, synthetic construct
  source 1..110: mol_type = other DNA
ctatccgtggatatcacatgctcaagtaaatacatggctggcagctccaggaccaaacagcaggactgccaaatcacaaacagatccagccctgcaacagctagggcttt

SEQ ID NO: 52560 - DNA, 110 bp, synthetic construct
  source 1..110: mol_type = other DNA
tcctacttcataaatctccccagatttaccctctcttcatctccacagccatcctttagctgaatccttcagagtctcaactggactatcacacttgcttcttaaccagt

SEQ ID NO: 52561 - DNA, 110 bp, synthetic construct
  source 1..110: mol_type = other DNA
aaaaaaaaaaaaagagtccatgatggagactgagaatgacaagctggaaagaggcaagttggaaaatgggaccttgaggtttcagtcagttattttatgactttcagcca

SEQ ID NO: 52562 - DNA, 110 bp, synthetic construct
  source 1..110: mol_type = other DNA
gggctggggtgtcactccttacttagagctcatccaaaacattcttctcgagagcagcccctatctgattggccacccctttgtattttagggtttattccctgaaagag

SEQ ID NO: 52563 - DNA, 110 bp, synthetic construct
  source 1..110: mol_type = other DNA
gcttaaaacgtcctagggaaagtccgtgtcaggcgtagcttgggttacccacacacttcctgacaaattgtcacacgcaaggtggccttgttctgcgatggcctcagtgt

SEQ ID NO: 52564 - DNA, 110 bp, synthetic construct
  source 1..110: mol_type = other DNA
agttaaattttttaaagccctattaagtggactgaacatggagagataccaacctttttcctgcatgtaatatctgaaactttgtcctgtttagatggctctggggagtt

SEQ ID NO: 52565 - DNA, 110 bp, synthetic construct
  source 1..110: mol_type = other DNA
cccatccccctgctcctttcttcctccatcatttattgaggactttcatgtgtcctcccgcccctagagcttctcccaccagccaagccacagttggtttctccttcgcc

SEQ ID NO: 52566 - DNA, 110 bp, synthetic construct
  source 1..110: mol_type = other DNA
ggagctgaattccaagaagatgagaagctagtatagtgagacaagagaacctgcttctccctgaatatccggaagctaatgcagcttatgtagggccggatggtgaggtg

SEQ ID NO: 52567 - DNA, 110 bp, synthetic construct
  source 1..110: mol_type = other DNA
tctccctgaatatccggaagctaatgcagcttatgtagggccggatggtgaggtgacagggcacctcttcctgatggaagagctgagcttccctgacgctccctggacag

SEQ ID NO: 52568 - DNA, 110 bp, synthetic construct
  source 1..110: mol_type = other DNA
accagcttctattcagaattcaccagctattcctttctgtaagcaagaccattcgacccgagtcctctggaagccagtaaggaagtcctctgtttaatggtttccaagag

SEQ ID NO: 52569 - DNA, 110 bp, synthetic construct
  source 1..110: mol_type = other DNA
aagacagcgctttcctcttccctcaatagccacccacaggcatccgctcccagcgcctctgcccttcacccttcactccgcctcttctccctcagcaacccatctctttc

SEQ ID NO: 52570 - DNA, 110 bp, synthetic construct
  source 1..110: mol_type = other DNA
accattgtcatttcccccttgagatcacttatagtagatcaagtccaaaagctaacttccttggatgtaagttaaaacaaaacactacccattataatagaaatactaat

SEQ ID NO: 52571 - DNA, 110 bp, synthetic construct
  source 1..110: mol_type = other DNA
cgaggactcttaacagcctgcttgttcaagtcagcacacaggactggagaaaggacaggtttgggttgggctggagggaggaaggagaattcagccatggccgttctgga

SEQ ID NO: 52572 - DNA, 110 bp, synthetic construct
  source 1..110: mol_type = other DNA
caggtttgggttgggctggagggaggaaggagaattcagccatggccgttctggagtgcaggggagaagtcggagctggaagtacagatgtggatgttttctgcaaacag

SEQ ID NO: 52573 - DNA, 110 bp, synthetic construct
  source 1..110: mol_type = other DNA
ttgaaccaaggtacagggtgggaggcagagaaaacaacgtgaatacaggaagatcctcgagcttcactcagctaggctcaagctgcctatccagtgtgatagccactagc

SEQ ID NO: 52574 - DNA, 110 bp, synthetic construct
  source 1..110: mol_type = other DNA
ggcagggcttgattccttgctggctctaggccaagagggcaccctcagtccctggcctgagctcctggatgtggcagcttgcatcttcaaagtgcgggagccaaaagccg

SEQ ID NO: 52575 - DNA, 110 bp, synthetic construct
  source 1..110: mol_type = other DNA
gcatggctagtacagacaatttgttttggaaagctggtctctaaggtggggtggtcccagggttactctcaggacaggccaaggctttctacatcccaggggccaaattc

SEQ ID NO: 52576 - DNA, 110 bp, synthetic construct
  source 1..110: mol_type = other DNA
gtctccgaccccctgcggtaaccctgggagggttattatcatcctcaataaacagatcatgagctggacctcggaggggcaccgctcaggccctcccagcctggaaacca

SEQ ID NO: 52577 - DNA, 110 bp, synthetic construct
  source 1..110: mol_type = other DNA
atcatgagctggacctcggaggggcaccgctcaggccctcccagcctggaaaccactgagcagggctggcctccagccccctgccttcagggtcctgccctttctacagc

SEQ ID NO: 52578 - DNA, 110 bp, synthetic construct
  source 1..110: mol_type = other DNA
attgaagtttcactataagtgaaataatcaaagaccataaaatgtctcttttctaccaggtcaaatgatcttaccagacaaacttttaaaaactcctcttcaatgtttag

SEQ ID NO: 52579 - DNA, 110 bp, synthetic construct
  source 1..110: mol_type = other DNA
tcacctcctatcaataattaattcttgagccaggattttgtgacttgagagagagctaggagactaactattttctgcaaacgagaggcaggcagtgaacgtggtgggag

SEQ ID NO: 52580 - DNA, 110 bp, synthetic construct
  source 1..110: mol_type = other DNA
ctaggagactaactattttctgcaaacgagaggcaggcagtgaacgtggtgggagaggtctgtcccaggaacacctgatagcgtcctgctcagtctctctgccaccccag

SEQ ID NO: 52581 - DNA, 110 bp, synthetic construct
  source 1..110: mol_type = other DNA
agcagccctgccagtcactttgaccccaggagacctggtgagctgctgccctgagcaataagcaatggccacagcctcaggtagcagcaccgatgtcctcattttactag

SEQ ID NO: 52582 - DNA, 110 bp, synthetic construct
  source 1..110: mol_type = other DNA
gtcccaggggacctctggaagggatggaggtccacccccacttcacctcgctttcttcttctgaacagatttcaaacaaacaaattctccctcagacagagccgggtcca

SEQ ID NO: 52583 - DNA, 110 bp, synthetic construct
  source 1..110: mol_type = other DNA
ttcttctgaacagatttcaaacaaacaaattctccctcagacagagccgggtccagagggccagactgccattgcccagtcctgcagtatctgaactgacccctaaagga

SEQ ID NO: 52584 - DNA, 110 bp, synthetic construct
  source 1..110: mol_type = other DNA
cttcattttcagtcattttcagacactttgccctcttggccattgctctctggctgctttccgagctgtcaccttccttgtaagacactgcggctggggcctgggtagga

SEQ ID NO: 52585 - DNA, 110 bp, synthetic construct
  source 1..110: mol_type = other DNA
agtgcctcggcaagctttcctatttgctgctcctgggccttggcaaagtcctgtccatctccatctctgagcaatgcagcttccagtcttcctagccctgagttccatcc

SEQ ID NO: 52586 - DNA, 110 bp, synthetic construct
  source 1..110: mol_type = other DNA
tggacccttcttccctacagccctccaagactctgagaaattgatacatggggatctttgactcggctgggagcggggaattacaaggcttttctccttagggtgccaga

SEQ ID NO: 52587 - DNA, 110 bp, synthetic construct
  source 1..110: mol_type = other DNA
agatactgagcgagtacctcacaccacccaaccccagccccttgggcaaagggtctcagggaagaacagcctccctaaagctcctctcagctacccaaaaagagcccgcg

SEQ ID NO: 52588 - DNA, 110 bp, synthetic construct
  source 1..110: mol_type = other DNA
tcagggaagaacagcctccctaaagctcctctcagctacccaaaaagagcccgcgaaagctttgaaatgactgcttgtaaaggtgattgcattcttagccagggtggccc

SEQ ID NO: 52589 - DNA, 110 bp, synthetic construct
  source 1..110: mol_type = other DNA
gagcagctccaccctttgtaggcttaatactagagttccatgtaaggtttgatctggaaaagcttcagcttcccccgccacccagcatatggaagttcccaggctaggga

SEQ ID NO: 52590 - DNA, 110 bp, synthetic construct
  source 1..110: mol_type = other DNA
cccgaaatcccccagtgtctccctggagctggggatgaaggctctaacccatgggaacgcttcgccctcgaaccctaactcaggtcccagcggaagggggagccttgctt

SEQ ID NO: 52591 - DNA, 110 bp, synthetic construct
  source 1..110: mol_type = other DNA
acgttatgttttcttccttagaccagtcatttccccaagaaagcttttacccaatgagcttagcatccattgctgctccttgcctgaatcaactgcttcactaaggatta

SEQ ID NO: 52592 - DNA, 110 bp, synthetic construct
  source 1..110: mol_type = other DNA
gaattatgagaagagttaaaattctctgagaactagctttagaagcattactcattatagaagtgcttttctctgtttccagagatttaaagctgtctttgagaattgga

SEQ ID NO: 52593 - DNA, 110 bp, synthetic construct
  source 1..110: mol_type = other DNA
agaagcctgctgtgcggtctcaggagcaggcagctgccaccagccctggaggcatttgccatggaagcgaaagtctctcagtcaatcatcgatcatcggctggtgccctc

SEQ ID NO: 52594 - DNA, 110 bp, synthetic construct
  source 1..110: mol_type = other DNA
ctcatcaaagccatcaatgaagtggtaagctcctgttcttttatctatagctgggcccaaactgtagtaaatcatgttcatttcgacatggagatcaatgacaaccattc

SEQ ID NO: 52595 - DNA, 110 bp, synthetic construct
  source 1..110: mol_type = other DNA
gaagttccagggccagggatcaaacccgtgccagagcagcgacccaaacagctgcagtgacgacgcacatccacaagagaacgcctcacttctacttagcagcagcatta

SEQ ID NO: 52596 - DNA, 110 bp, synthetic construct
  source 1..110: mol_type = other DNA
agtgacgacgcacatccacaagagaacgcctcacttctacttagcagcagcattatgacaattaacctttactgagagcctactgtgtgccaggcactatgctgagtgct

SEQ ID NO: 52597 - DNA, 110 bp, synthetic construct
  source 1..110: mol_type = other DNA
gggaaggcacacacctcctcctcacctctcctgagggatctgacttcagacccaataaaaagcagaggggctcgctcgtagggctgagctagaatgcctgggcaggacct

SEQ ID NO: 52598 - DNA, 110 bp, synthetic construct
  source 1..110: mol_type = other DNA
taaaaagcagaggggctcgctcgtagggctgagctagaatgcctgggcaggacctggtggagtgaggagcctctgggcttaagatcctttgccagagactgggggacagt

SEQ ID NO: 52599 - DNA, 110 bp, synthetic construct
  source 1..110: mol_type = other DNA
ctccacagaagcaaaaatctctgcattacaaaaccaccacaagcaatgtcaaaaggaaaacttcatactgggggggaaatcagacttatcttgatcactgttggagctca

SEQ ID NO: 52600 - DNA, 110 bp, synthetic construct
  source 1..110: mol_type = other DNA
gaaaacttcatactgggggggaaatcagacttatcttgatcactgttggagctcagaggtgggaactttaggaattcattatattggtcttgttacttttgaagatctag

SEQ ID NO: 52601 - DNA, 110 bp, synthetic construct
  source 1..110: mol_type = other DNA
gagccacgacgggaactacagttcttgcatttttaacatttattcctgggtatattacggaactttttgctattatgagtgggcccttttaaatattatatttataatat

SEQ ID NO: 52602 - DNA, 110 bp, synthetic construct
  source 1..110: mol_type = other DNA
ccaggatggtgactgaggaataaaaagggaaggagtgtggcagctgggattccaaggcaggggtgtgagatcaggggactttggccatcattggctcaggtcccttcata

SEQ ID NO: 52603 - DNA, 110 bp, synthetic construct
  source 1..110: mol_type = other DNA
gaggatacggcgtcaacggggggaccaatttgatgtcttttaagagacagagaatcattgagcaccacctgtcctagtgtgctgtatatttgttttctaaattggagtca

SEQ ID NO: 52604 - DNA, 110 bp, synthetic construct
  source 1..110: mol_type = other DNA
cattgagcaccacctgtcctagtgtgctgtatatttgttttctaaattggagtcacttcttaagaaggaggcagggggatctttcggggctaaggagtccagttcaggtc

SEQ ID NO: 52605 - DNA, 110 bp, synthetic construct
  source 1..110: mol_type = other DNA
actgcagggagagagcagtgcctggcgtggtcccccagggcagtcccaggccctgagaacagcacatcatccctccacatagccctcccaggcagccaggcttaacttgc

SEQ ID NO: 52606 - DNA, 110 bp, synthetic construct
  source 1..110: mol_type = other DNA
cacttcctttctggagcccagccctgggatttcactgctgaagcaggaaacctcggggcacagggcccttcttccagctctgtggtctccatgaatccccccctagtctc

SEQ ID NO: 52607 - DNA, 110 bp, synthetic construct
  source 1..110: mol_type = other DNA
agctgatgttttctggcctgatcctgctggggcctgtggatctgctctggtgcgtgcccgcccggagccacggtggagggaaaggtggggtggggctctgagtcacagcc

SEQ ID NO: 52608 - DNA, 110 bp, synthetic construct
  source 1..110: mol_type = other DNA
tcgtaagtagtactgatgtggtgcattgtttgatgcttctatagcttatggggtttttttcgtagaatggagataatgttaataattgtgcacctgttactgcaattatg

SEQ ID NO: 52609 - DNA, 110 bp, synthetic construct
  source 1..110: mol_type = other DNA
acgtccaccccatatccactagtctgttattttctctaaaacacacttgaggagttctcatcgtggctcagcagaaaggcatccagctagtattcatgaggatgtgggtt

SEQ ID NO: 52610 - DNA, 110 bp, synthetic construct
  source 1..110: mol_type = other DNA
aagcctttacctctcaccgctgcttcaatacgcctttttattcctgtaaaatcttgattactaagttccaaggtacagagttggtagaatacctggagcttggtgtggag

SEQ ID NO: 52611 - DNA, 110 bp, synthetic construct
  source 1..110: mol_type = other DNA
gattactaagttccaaggtacagagttggtagaatacctggagcttggtgtggagtagttactctgaaggattacttaaaatgaagagagttcgtctcattgtcataagc

SEQ ID NO: 52612 - DNA, 110 bp, synthetic construct
  source 1..110: mol_type = other DNA
gcggcggctgtgatcgccgcggctcctcctctgcagacccacgaagcaccttcgtgttgagtaacctagcggaggtggtggagcgtgtcctcactttcctgcccgccaag

SEQ ID NO: 52613 - DNA, 110 bp, synthetic construct
  source 1..110: mol_type = other DNA
gttgagtaacctagcggaggtggtggagcgtgtcctcactttcctgcccgccaaggcgttgctgcgggtggccgggtgaggggggaggaggtgggaagcttaacttggga

SEQ ID NO: 52614 - DNA, 110 bp, synthetic construct
  source 1..110: mol_type = other DNA
gtattaaatggtattagtttgctaaggcggctgtaacaaattgccacaaacttaagtagcttaaaacaacatttattctgtcccagtatagaaggccccacaagtttgga

SEQ ID NO: 52615 - DNA, 110 bp, synthetic construct
  source 1..110: mol_type = other DNA
agaactcctagatgaagccactcttactgaatgaaaaacagtcctgtagagcttcctaggtaaaagccaagtattgaaattggaagttcagactgatctgtcagttatgg

SEQ ID NO: 52616 - DNA, 110 bp, synthetic construct
  source 1..110: mol_type = other DNA
atattttgaaggcagagccagtagaattagttgatagattggatgtggagtgggagagagagaagagtcaaggttgacttgaaggttttgggtttgagcaactaaacgaa

SEQ ID NO: 52617 - DNA, 110 bp, synthetic construct
  source 1..110: mol_type = other DNA
cctcctgcttgttcctggcccctgttaccatccagcttgcctgtattccattctagctgagtcacttccatctctcccataaggcttcaagttccttgacacaaggtctg

SEQ ID NO: 52618 - DNA, 110 bp, synthetic construct
  source 1..110: mol_type = other DNA
tggcagaaacatacaagtaaacatagcattgctattaggaaaagagattctccgaatcggtggtatttaagctgggttctgaaagatggaccctcctgagcacaaacagg

SEQ ID NO: 52619 - DNA, 110 bp, synthetic construct
  source 1..110: mol_type = other DNA
agaggtgattaagtttaaatgaggctgttagggtgggggccctaatccaatacaattggtgtccttacaagagaagaagagataccacaaatgcatgtaccgagagaaaa

SEQ ID NO: 52620 - DNA, 110 bp, synthetic construct
  source 1..110: mol_type = other DNA
ttggtgtccttacaagagaagaagagataccacaaatgcatgtaccgagagaaaaaggctacctgaggacacatcaagaaagtgaccatttacaaaccaaggagagaggc

SEQ ID NO: 52621 - DNA, 110 bp, synthetic construct
  source 1..110: mol_type = other DNA
taaaagagagttgatttgtataaggttacagttgctataggctcatttgtgctgcagaaaaatgaacataactatgtaaaaatacattcatctttttgcatctattcaca

SEQ ID NO: 52622 - DNA, 110 bp, synthetic construct
  source 1..110: mol_type = other DNA
gagtttcacataagtccccacctaagattcacaggccactctggcccagcttctgtcctgccaacaccagaaagagtatggctcctttaagagttggctgggtcctccgt

SEQ ID NO: 52623 - DNA, 110 bp, synthetic construct
  source 1..110: mol_type = other DNA
gggtcatggtggtctgcacggcgtagggccgcacagtagtagagcctgtgctgatggtctgcagtggttctcactctgacccagaagaggatggaaattgaccctggaac

SEQ ID NO: 52624 - DNA, 110 bp, synthetic construct
  source 1..110: mol_type = other DNA
tcaaatgagacaaagtatgtagagcatatgtgtacactacaaagctgtagaaacgtaacgttgataatgataacaattgacttctaaatattaaaagcaatgcattatag

SEQ ID NO: 52625 - DNA, 110 bp, synthetic construct
  source 1..110: mol_type = other DNA
actaccaatctccccagaaaaaatgttaagtattaggaagcttatggtagcagatccaagttttcaaaaattcttattttgcttgaaagtttgagttttctcattgacaa

SEQ ID NO: 52626 - DNA, 110 bp, synthetic construct
  source 1..110: mol_type = other DNA
ttcatttctctgctcaaaaatcctacaatggcatcccgtctcagagtcttagggtaaaggtcaatgtgcttacaacaacctataagataactgttctggccctccatttg

SEQ ID NO: 52627 - DNA, 110 bp, synthetic construct
  source 1..110: mol_type = other DNA
aaatcttttcccccaggggcaagggattcaagctctatatgaggcaccccaacccctacatcctgcatggggagaggaggcctcaaaacacatggctttgaaaaccaaca

SEQ ID NO: 52628 - DNA, 110 bp, synthetic construct
  source 1..110: mol_type = other DNA
tctgatacataattttgcattatttttcttacagagccccccagattctatacagttcaggcccacttcaacataccccagttggtctgttggaaagcctgacctgcttt

SEQ ID NO: 52629 - DNA, 110 bp, synthetic construct
  source 1..110: mol_type = other DNA
tctttcccgaggcttctaggcccctgctctgtaaggcgggagggcaagtctaaactctcctgcctcatctctgctcccactgtggccctggtcccacggggcccttacca

SEQ ID NO: 52630 - DNA, 110 bp, synthetic construct
  source 1..110: mol_type = other DNA
tctcctgcctcatctctgctcccactgtggccctggtcccacggggcccttaccagagcctgtcaccctagctgggttccagatggcccgatcccgtccctcacatgccc

SEQ ID NO: 52631 - DNA, 110 bp, synthetic construct
  source 1..110: mol_type = other DNA
ctgtgcactggaagggctgaggcccctatgcgctgagcaatgctttgcatttccgggcatctcccagacctccattggcccctgaatcccaaaaatgcctcctgaccagc

SEQ ID NO: 52632 - DNA, 110 bp, synthetic construct
  source 1..110: mol_type = other DNA
ggcatctcccagacctccattggcccctgaatcccaaaaatgcctcctgaccagccctgctacctggaccctcctttcatcctgctctggtagaggaaggtgggctgagg

SEQ ID NO: 52633 - DNA, 110 bp, synthetic construct
  source 1..110: mol_type = other DNA
ctgggagagcaggtaggctgggactaaaacactggggcatccctcagtctccgtggccctcaaagtccccagcttagccttcccagataccagaaaccacctgacgtgac

SEQ ID NO: 52634 - DNA, 110 bp, synthetic construct
  source 1..110: mol_type = other DNA
aaccaatctgagccctgaccccaatctgagtcctgttcctggtcacacactgagccttcaaccagtcaccagctactgcagccagttcccgccagagaccaatgtcatag

SEQ ID NO: 52635 - DNA, 110 bp, synthetic construct
  source 1..110: mol_type = other DNA
cttcaaccagtcaccagctactgcagccagttcccgccagagaccaatgtcatagctggccctaaggagggctgtcaggtcccctcttcttgtagaaaagctgctgagtc

SEQ ID NO: 52636 - DNA, 110 bp, synthetic construct
  source 1..110: mol_type = other DNA
agcttggatctatctcaggcccaagtcagaaaagtcaggccagtgagctctggcagtgatgaggggcttggggatgggtgcctggcaagcccgcccatccaggcaagacc

SEQ ID NO: 52637 - DNA, 110 bp, synthetic construct
  source 1..110: mol_type = other DNA
gcatgcctgctccataccctcctcgccacccacacatagggtggcagatggccgaggtgttaataggatgacagggtgcccagacagggcagggaccatgtctgctgggt

SEQ ID NO: 52638 - DNA, 110 bp, synthetic construct
  source 1..110: mol_type = other DNA
cagaatgataccgacatcccagtacctatgattataggaatcagctttgcaaatcattaagcagagcccaggcagactctggccccaaatctaagcggcaaaggttaaca

SEQ ID NO: 52639 - DNA, 110 bp, synthetic construct
  source 1..110: mol_type = other DNA
aaggcgacaaaaccacactctgcactcactccaaccagcaggcacagtgagggcccccacagaccagccgggtgagctgggagccccagaagcccttcgtgggaccaaaa

SEQ ID NO: 52640 - DNA, 110 bp, synthetic construct
  source 1..110: mol_type = other DNA
cctggcacgaagcagagactcatatgcattttaccttgagaggaaaggacgtgactgacactgtgtatcttacgtgacctgcatcacatcacaggtggagctgtaacccc

SEQ ID NO: 52641 - DNA, 110 bp, synthetic construct
  source 1..110: mol_type = other DNA
acagatagcggtgcctaggagaggccttaaaacgggccttggcagagtctggtagcagctatttctcccaggggccaaaggccaagctgttaaactggacttgagccaca

SEQ ID NO: 52642 - DNA, 110 bp, synthetic construct
  source 1..110: mol_type = other DNA
ctggcctggggctgttgcgttgcatgaatggaggactcagtgggatggttcccgggaagagcaaggaaactctggttccaggccagagaaggtagagctgggacccagtg

SEQ ID NO: 52643 - DNA, 110 bp, synthetic construct
  source 1..110: mol_type = other DNA
gatgaaaaaatctagactcaggaattttgtgcaactggcccaggattagcgggtgagctgggctttagacctgtctttgtgagccagcctcctgcctcatcccctttccc

SEQ ID NO: 52644 - DNA, 110 bp, synthetic construct
  source 1..110: mol_type = other DNA
gaactccaatttattgccagttttaatttaagattttaagctctggagttcccgtcgtggcctcacgaaaataaatttgactagtatccatgaggacggacatagattcg

SEQ ID NO: 52645 - DNA, 110 bp, synthetic construct
  source 1..110: mol_type = other DNA
ccccaaagctgtcaggaagggacagccagaggtcaaatgtccagtgggggactcgagtgataagccctaacctgcaagggagtggcctgacggcctctgggaaggtggcc

SEQ ID NO: 52646 - DNA, 110 bp, synthetic construct
  source 1..110: mol_type = other DNA
tccatctcctcaccgcgccgggtcgcccctgcactcgctgaagcacatgcggggaaggccggacagctgcattagagtccattcctagctagccctgccattcacaacat

SEQ ID NO: 52647 - DNA, 110 bp, synthetic construct
  source 1..110: mol_type = other DNA
tgatctccaaaccctaggggaaggtaaatgtatggtgtgagatgaggcctcagttacgctggcatttaaaaacattttggcaggtgctctgccaggcagtctataattag

SEQ ID NO: 52648 - DNA, 110 bp, synthetic construct
  source 1..110: mol_type = other DNA
ggcactggagagggagcatgcatctccactaaaacccctcgccccttcagtgagatcccctctcctggtgacaatggctggattaacctgtaccgtttctggaaggagaa

SEQ ID NO: 52649 - DNA, 110 bp, synthetic construct
  source 1..110: mol_type = other DNA
ggcaccccgacccttggctgctgggtgctagcataggactctatatggttgggggtctctggcctctgtcagtggtgtaggggggatcttactctcttcctctgtaggcc

SEQ ID NO: 52650 - DNA, 110 bp, synthetic construct
  source 1..110: mol_type = other DNA
atcaccaggctttgggcagtggctcttgaagctttgagcaacaatgtttgattattgatttaaacaatggaagaatcgatggttctggacccaggtctggtgctgccttc

SEQ ID NO: 52651 - DNA, 110 bp, synthetic construct
  source 1..110: mol_type = other DNA
gggcgatagttaccagaacaagccatggctttgccaagccccattgagaaagtccctttggccccagagccgtatattgtgcaccaggagaaggagggaggaggaggaga

SEQ ID NO: 52652 - DNA, 110 bp, synthetic construct
  source 1..110: mol_type = other DNA
ctttggccccagagccgtatattgtgcaccaggagaaggagggaggaggaggagaagaggcaggctctgccctcaggagctcagagccagggctgagagtcaggattcac

SEQ ID NO: 52653 - DNA, 110 bp, synthetic construct
  source 1..110: mol_type = other DNA
tctgcttgtgtaagggaaagctatatcacgatgggctgtctcagaaggtgatgagatccctgtcactgggagttatgtggccattgttggaggctgcaaagggggtcctg

SEQ ID NO: 52654 - DNA, 110 bp, synthetic construct
  source 1..110: mol_type = other DNA
atagaactcaccttctcatgaatactagtcgggttcattaccggtgagccacaactggaaaaaaactgtggggtttttaacaggaggggaatctggtcccagagaaggag

SEQ ID NO: 52655 - DNA, 110 bp, synthetic construct
  source 1..110: mol_type = other DNA
ggcttggggcccacggtcagtgttcacattctgaccttgccctcgctggctggatagccccggatctcagcttccttactagtaaaaagtgggcaatgatggtgtctgtc

SEQ ID NO: 52656 - DNA, 110 bp, synthetic construct
  source 1..110: mol_type = other DNA
aatgaggcaacattctgtttgctagagggataaatgctgttggccccaggcccatcctaatggcatgggcttttcttcccagctccagcccaatgcagttcattctctta

SEQ ID NO: 52657 - DNA, 110 bp, synthetic construct
  source 1..110: mol_type = other DNA
gggggaagacatttcaggtaccctccatgatcccaccttggagcccgagtcaccttatccatgatgtccctgctggctgaaagtggcactcccgcttgttagctggtgac

SEQ ID NO: 52658 - DNA, 110 bp, synthetic construct
  source 1..110: mol_type = other DNA
tatccatgatgtccctgctggctgaaagtggcactcccgcttgttagctggtgaccttgggcaaatccggaaccgtcagccccctcatctgtaaaatggaaataataata

SEQ ID NO: 52659 - DNA, 110 bp, synthetic construct
  source 1..110: mol_type = other DNA
ggcaccacatcctgtccacaagggccacctcggcccagaggaaacactggcaggcagcggaatcgcagggactgagggttaagaagctccagagtccaagtctcccttcc

SEQ ID NO: 52660 - DNA, 110 bp, synthetic construct
  source 1..110: mol_type = other DNA
agcggaatcgcagggactgagggttaagaagctccagagtccaagtctcccttcctttctttcacccgcagacaggaccaaggactgcccgttcttcctgggcctgcttc

SEQ ID NO: 52661 - DNA, 110 bp, synthetic construct
  source 1..110: mol_type = other DNA
tttttactccatagacgttgcggaagtccggaggaccaaaagcaggggagactttaccctggctctgctagaagcttgttgactggtagttgttgagatcgaaggggaat

SEQ ID NO: 52662 - DNA, 110 bp, synthetic construct
  source 1..110: mol_type = other DNA
accctggctctgctagaagcttgttgactggtagttgttgagatcgaaggggaatcagtaacgaagaactcccaagttccttggacagggatggttgctagacactgctc

SEQ ID NO: 52663 - DNA, 110 bp, synthetic construct
  source 1..110: mol_type = other DNA
cagtgcttatctcctcatacttatgtttacgtacccacaagaaaatccagcttcgccttccaggaagcactgggcccgctaaatgctgatgcacaggtttgaatggcatc

SEQ ID NO: 52664 - DNA, 110 bp, synthetic construct
  source 1..110: mol_type = other DNA
atggataagcatgtgacataaatgagaagagctaagcaaattctgaaatattcaccagaactgggaaggaggaacactctttccatcaggattgcagggattaaaaaaag

SEQ ID NO: 52665 - DNA, 110 bp, synthetic construct
  source 1..110: mol_type = other DNA
cagaggttcctccatacttctaggaaagcagcctggattctaggcttgcccccacctagactgataactgagctcaggtttcagcatggctttagtgaggaagtattgtc

SEQ ID NO: 52666 - DNA, 110 bp, synthetic construct
  source 1..110: mol_type = other DNA
ctgaaggaaagaaacaagtagaaacaaaaaaattctcactacagaatttgaaaatttcacaggtaactgtgcataatcttatttgcaaaggaagtcaggaaagaagattt

SEQ ID NO: 52667 - DNA, 110 bp, synthetic construct
  source 1..110: mol_type = other DNA
ttgcttcgtgaaattgtgacatgaattttaaggcttgacaggttcatactattctccttctaggtttattgtgacagaaacagcaatttatttgaggcctactttagatc

SEQ ID NO: 52668 - DNA, 110 bp, synthetic construct
  source 1..110: mol_type = other DNA
tccacatggaggaagggcaagggagatgggaattgagaaaagactatgtgtacgtgtcattgtcatggtctttgatttctgaatcagagaacctataagggagatgctgt

SEQ ID NO: 52669 - DNA, 110 bp, synthetic construct
  source 1..110: mol_type = other DNA
tctggtttctggagtggtaaagctaatgtgaacttgagaattgctgacagataagtttctagaactggtgtgagtcaagaaagccaacatgcagagaaaaacagacccgg

SEQ ID NO: 52670 - DNA, 110 bp, synthetic construct
  source 1..110: mol_type = other DNA
agttttaaaaatcctgatgcctaggtcccacccatagagattctgacttctcttgtctaggatgtggcccaagcatcaggatttttaaggccagtgctatgcacattgtc

SEQ ID NO: 52671 - DNA, 110 bp, synthetic construct
  source 1..110: mol_type = other DNA
gaatggctgtgggctgagacagctgggagttgaaggtctacttccaaggcagtaccttcaatgtcatccctggcacttgggcttggttggttggaggtcgggttcagctg

SEQ ID NO: 52672 - DNA, 110 bp, synthetic construct
  source 1..110: mol_type = other DNA
cgccggtgtagggctgataccttcacttgggctcctcggccattctgtgctattgaattccagcttctccttcaaaacccagtgtgaggaccatctctacttcaagaagt

SEQ ID NO: 52673 - DNA, 110 bp, synthetic construct
  source 1..110: mol_type = other DNA
aattccagcttctccttcaaaacccagtgtgaggaccatctctacttcaagaagtcagaagtgctccttatgccctacaatacagccatctcctacctcccccgacaact

SEQ ID NO: 52674 - DNA, 110 bp, synthetic construct
  source 1..110: mol_type = other DNA
ctttttaggccacacccacagcacatagaagctcctgggccccaggatggaaagggcacctctaaagagacagccagatcattaacccactgtgccaaagtatttttagg

SEQ ID NO: 52675 - DNA, 110 bp, synthetic construct
  source 1..110: mol_type = other DNA
gagccactatgggaactccaaatttcagcatttttaagttaaagtatatctggaaaatggaattctattcagcactaacaactaacaatgtagctctatatattattgac

SEQ ID NO: 52676 - DNA, 110 bp, synthetic construct
  source 1..110: mol_type = other DNA
ggccggcaggaagcccggttggtaaccagacagccatgtgaggaaggaggcctgttccttcctgtgagctgtgtcatgaggcagcgtggtcaagtcctaccagggagcca

SEQ ID NO: 52677 - DNA, 110 bp, synthetic construct
  source 1..110: mol_type = other DNA
tttgaatactttagttgtatttcctataaaccaggatagtctcacataaccccgctacaacttttaaaatcagatttgaggagttcccttcatggctcagtggttaacga

SEQ ID NO: 52678 - DNA, 110 bp, synthetic construct
  source 1..110: mol_type = other DNA
aagctggcagtttctcccatcttcttcctctagcccagctctgataaagggcctgatatctttatggtggtatgccagctttagttgagcaagaagacatgaacagcttg

SEQ ID NO: 52679 - DNA, 110 bp, synthetic construct
  source 1..110: mol_type = other DNA
tgtttcaccagaatagtccacatctggtccacaggaaatcctcccacattcttagccccatggtgggaaggcagagctgtttctttctagattaagcagcagatcttcac

SEQ ID NO: 52680 - DNA, 110 bp, synthetic construct
  source 1..110: mol_type = other DNA
cccagttttattgagaagtatttgatttggatagctgtagagtttaaggtgtacggcatgatggtttgatatatgtatattatgacatgatcacttctgtaggtttagtt

SEQ ID NO: 52681 - DNA, 110 bp, synthetic construct
  source 1..110: mol_type = other DNA
ttatcaagagcaagatattaggagggtttatactgcatgtggaaatgtcagctgtggtgttctgatgtctcagtgaatgtttactataatcattattcagtagtcacttg

SEQ ID NO: 52682 - DNA, 110 bp, synthetic construct
  source 1..110: mol_type = other DNA
gctggaaaaaggatgcctgtgaggtcataggggagatatgaccaggaggccaagctggggtcatgtcacagagaggtttgccaaccatacctgggagtttggcgattaac

SEQ ID NO: 52683 - DNA, 110 bp, synthetic construct
  source 1..110: mol_type = other DNA
attaggggccattcttcttacataaaaataaaaaaaaaatcaaaggggcatccagaattcttgccttaaattaaaccaagctctgaagggtttttcacagatgctacaag

SEQ ID NO: 52684 - DNA, 110 bp, synthetic construct
  source 1..110: mol_type = other DNA
aattcttgccttaaattaaaccaagctctgaagggtttttcacagatgctacaaggtccagagagatagtataaatgcatgaagccaagcagagtggggtctgtggtgaa

SEQ ID NO: 52685 - DNA, 110 bp, synthetic construct; identical to SEQ ID NO: 52683
  source 1..110: mol_type = other DNA

SEQ ID NO: 52686 - DNA, 110 bp, synthetic construct; identical to SEQ ID NO: 52684
  source 1..110: mol_type = other DNA

SEQ ID NO: 52687 - DNA, 110 bp, synthetic construct
  source 1..110: mol_type = other DNA
ttaattggtgatcatgtcctaggttagtaatcaggcttttagggagttggggtaggggaaaagttaagtagcagctctcaatgtggcaagtggagagggaaagatctgag

SEQ ID NO: 52688 - DNA, 110 bp, synthetic construct
  source 1..110: mol_type = other DNA
gggaaaagttaagtagcagctctcaatgtggcaagtggagagggaaagatctgagagctgcaggtggtatcaataaactgtatttgaattctgaaacatggctgaagaca

SEQ ID NO: 52689 - DNA, 110 bp, synthetic construct
  source 1..110: mol_type = other DNA
tttaagaattttttccttggttctttcatacttcactttcaaagtcattgttatttgtgtgctctgctataaatccaaactgtagtgttgccagagttgctggctctaga

SEQ ID NO: 52690 - DNA, 110 bp, synthetic construct
  source 1..110: mol_type = other DNA
ggaatgactgtgtggcctgctctctactccctcttctcacacccagcctcacctacaccaggccctacctgttctaggcagtagcaaggggtgagccccggggtaggggg

SEQ ID NO: 52691 - DNA, 110 bp, synthetic construct
  source 1..110: mol_type = other DNA
caccaggccctacctgttctaggcagtagcaaggggtgagccccggggtagggggtggcagggacataatacttcacttgaccttgaggaagcagcctgtatggctcctt

SEQ ID NO: 52692 - DNA, 110 bp, synthetic construct; identical to SEQ ID NO: 52690
  source 1..110: mol_type = other DNA

SEQ ID NO: 52693 - DNA, 110 bp, synthetic construct; identical to SEQ ID NO: 52691
  source 1..110: mol_type = other DNA

SEQ ID NO: 52694 - DNA, 110 bp, synthetic construct
  source 1..110: mol_type = other DNA
gtgagatatgataatgtgtagtccaggaatccacacagcaagtgtgtcagtccgtgctgcaggcaacaacacaaggaagcaaacaccccagatgagcaaagaggtagaaa

SEQ ID NO: 52695 - DNA, 110 bp, synthetic construct
  source 1..110: mol_type = other DNA
tatattgaaacgtaatccccagtatattggcatttggaggtgaggctttggggaggctgatttggttatgagggcagagttctcatgaatgagatgagtgcccttatgta

SEQ ID NO: 52696 - DNA, 110 bp, synthetic construct
  source 1..110: mol_type = other DNA
gctgatttggttatgagggcagagttctcatgaatgagatgagtgcccttatgtaagagaccctaaagggctcctttgccccttctgccctgtggggatacaggaatata

SEQ ID NO: 52697 - DNA, 110 bp, synthetic construct
  source 1..110: mol_type = other DNA
attttgaccatgcctatggcatgcaaaagttcccaggtcagggactgaacatgctcttcagcagggactccagcctctgcagtgacactgtaagatccataacccactga

SEQ ID NO: 52698 - DNA, 110 bp, synthetic construct
  source 1..110: mol_type = other DNA
agcttcatcacagaggtcaagcagacttgtcacaggggtcaggaaactaactgatctaacttgggaaaggataagagctaaaataaggcaatggcagtagaagcagaatg

SEQ ID NO: 52699 - DNA, 110 bp, synthetic construct
  source 1..110: mol_type = other DNA
ctaacttgggaaaggataagagctaaaataaggcaatggcagtagaagcagaatggaaagacatctctgagaaaaaaaaaattaagaggcaaaactgacaggattaaatg

SEQ ID NO: 52700 - DNA, 110 bp, synthetic construct; identical to SEQ ID NO: 52698
  source 1..110: mol_type = other DNA

SEQ ID NO: 52701 - DNA, 110 bp, synthetic construct; identical to SEQ ID NO: 52699
  source 1..110: mol_type = other DNA

SEQ ID NO: 52702 - DNA, 110 bp, synthetic construct
  source 1..110: mol_type = other DNA
ggattgtacaaaggttgctggattaaaacagacaatggtgtgactatgttttactgtctgtagtgaattaaaggtccgagacaggttaaggccttttagccaaaaacacc

SEQ ID NO: 52703 - DNA, 110 bp, synthetic construct
  source 1..110: mol_type = other DNA
gtctgtagtgaattaaaggtccgagacaggttaaggccttttagccaaaaacaccttcacaagttcccgttactatactactatgttcatacaatttttaaatctaacta

SEQ ID NO: 52704 - DNA, 110 bp, synthetic construct
  source 1..110: mol_type = other DNA
gattagaaagagctgctaaaaaaaagtggaactagctgacaggtaaatataagtagtgctaccacaagagtcattccaactacaaagtgtcatttgtcagttattatttt

SEQ ID NO: 52705 - DNA, 110 bp, synthetic construct
  source 1..110: mol_type = other DNA
ctgctgtgccagggcgggaactctgaaaaagaatatattttttttaatgtatacatgtgtgtgtaattgaatcactttatcatacagcaaaattaacacaacattataaa

SEQ ID NO: 52706 - DNA, 110 bp, synthetic construct
  source 1..110: mol_type = other DNA
gcaaaactctatcgcaccggtctttaaatactcttctatccagcacaacggttctttgttgcgtgctgcaggcatccaacttacttctaagtttcaaggctcctagaatc

SEQ ID NO: 52707 - DNA, 110 bp, synthetic construct
  source 1..110: mol_type = other DNA
ttgttgcgtgctgcaggcatccaacttacttctaagtttcaaggctcctagaatctggccctacttctagcacagcagttaagaatgtagactctggagtcagactgcct

SEQ ID NO: 52708 - DNA, 110 bp, synthetic construct
  source 1..110: mol_type = other DNA
ccatggccaggtataccaatttaaaaggtattatacctctaaagaaatggtaaacttcttcctaaaaagccagtgaccaggagaggtccagtgattgattgtttacaaat

SEQ ID NO: 52709 - DNA, 110 bp, synthetic construct
  source 1..110: mol_type = other DNA
tgggtagagatcagagatgctgctaaacaagccacacggcaaaggacacagcccacaacaaagaatcaaccagtctttttttcttttaatcattattatttaaaaattat

SEQ ID NO: 52710 - DNA, 110 bp, synthetic construct
  source 1..110: mol_type = other DNA
aacaagccacacggcaaaggacacagcccacaacaaagaatcaaccagtctttttttcttttaatcattattatttaaaaattatagttgatttacaatgttctgccaat

SEQ ID NO: 52711 - DNA, 110 bp, synthetic construct
  source 1..110: mol_type = other DNA
agggatggagcctacatcctcacagatactacatctggtccttaacccattgagctacaatgtgaattcctaatttctatttcatattttaatttgctttaaatgtgtgt

SEQ ID NO: 52712 - DNA, 110 bp, synthetic construct
  source 1..110: mol_type = other DNA
tggtccttaacccattgagctacaatgtgaattcctaatttctatttcatattttaatttgctttaaatgtgtgtgaattctgaacatctatcattagtgaactgagact

SEQ ID NO: 52713 - DNA, 110 bp, synthetic construct
  source 1..110: mol_type = other DNA
gaaatgaaaatatacatctatacagaaacatatagacaaatgtttatagcggcattattaataatagcctagggagttccctttgttgctcagtggttaacaaacctgac

SEQ ID NO: 52714 - DNA, 110 bp, synthetic construct
  source 1..110: mol_type = other DNA
ctgtgttagctatcattcaaaacctttggttagatgtatatccttctccttcccctggacaaccaagaactttttaagctaaggcagataatatcaatacagatactcaa

SEQ ID NO: 52715 - DNA, 110 bp, synthetic construct
  source 1..110: mol_type = other DNA
tggacaaccaagaactttttaagctaaggcagataatatcaatacagatactcaagaaggactagtcactaaactatcacaactatgtaaatgatgtaacaatagttatt

SEQ ID NO: 52716 - DNA, 110 bp, synthetic construct
  source 1..110: mol_type = other DNA
cagaggcaaacttgttcatatgagcctcatttgtgatgccaattaaggtgttgttcatagatatcttttttattcatgccttctcttcaatatgtttttactgaataaca

SEQ ID NO: 52717 - DNA, 110 bp, synthetic construct; identical to SEQ ID NO: 52716
  source 1..110: mol_type = other DNA

SEQ ID NO: 52718 - DNA, 110 bp, synthetic construct
  source 1..110: mol_type = other DNA
ttaaagttggtggagacaagaaactcttttggtgcttattttttaaataacaaaataatttggaagtcttgctgctgctgctagctagaaagacactgggagattaccag

SEQ ID NO: 52719 - DNA, 110 bp, synthetic construct
  source 1..110: mol_type = other DNA
ttatgtgaaaaaaagatacaaaactgtatggtatgatatcagctatgaaaataaaggatgtaagcattaaaaccccaaaatgttaatagtagttgtctccaggtagtagg

SEQ ID NO: 52720 - DNA, 110 bp, synthetic construct; identical to SEQ ID NO: 52719
  source 1..110: mol_type = other DNA

SEQ ID NO: 52721 - DNA, 110 bp, synthetic construct
  source 1..110: mol_type = other DNA
tttgtttttacccttaattattgtagcacagaattcctaagaattgtcagtttgaactccatatatctgcaaaatggtgagactttttgaagtctagaattctttggtct

SEQ ID NO: 52722 - DNA, 110 bp, synthetic construct
  source 1..110: mol_type = other DNA
actccatatatctgcaaaatggtgagactttttgaagtctagaattctttggtctatgatttgctttaaatcctgatgtgagttctgataaatgactataaaaattcaac

SEQ ID NO: 52723 - DNA, 110 bp, synthetic construct
  source 1..110: mol_type = other DNA
cagtcacctggagggccagttaaaacactgacgtcttgaccccacccagggttgctgattcagctggtctgggtggggccccatgatttgcatttctgacgaggatgctg

SEQ ID NO: 52724 - DNA, 110 bp, synthetic construct
  source 1..110: mol_type = other DNA
tgattcagctggtctgggtggggccccatgatttgcatttctgacgaggatgctgatgtcagtgttcttgaaagccacagggctgcacctttctggattggcacttgacc

SEQ ID NO: 52725 - DNA, 110 bp, synthetic construct
  source 1..110: mol_type = other DNA
atctttagtgtccatcaaaatgcttcacttatcaaagcaaaatttcagtatccgtttcaagctgttctctggtcacataatctgtacattaagcacttcataaagacttg

SEQ ID NO: 52726 - DNA, 110 bp, synthetic construct
  source 1..110: mol_type = other DNA
ctgttcagttaccaggagacaactatgatttcaacacaccacatcattttcataacaaccatggccagctgtggggaaagcaatgctgggctgctcttatttgccttgtg

SEQ ID NO: 52727 - DNA, 110 bp, synthetic construct
  source 1..110: mol_type = other DNA
ttgaggtttttgggttttttttacctgtacctatcactgtatcagctcaaaccaaaagaataatgactcctaaaagtaaagcatcatcccacagagtggcagactggcac

SEQ ID NO: 52728 - DNA, 110 bp, synthetic construct
  source 1..110: mol_type = other DNA
caatttccacctctgcctcaagttggaacacaaagttttcctgtgcctctttgaccagtagcttcaggaaaaagtgtcctgtccccagtcaccatttgtggtgagcttat

SEQ ID NO: 52729 - DNA, 110 bp, synthetic construct
  source 1..110: mol_type = other DNA
agtgaacaaaacataaaattctgccctctcggagcttgtgttagagtggggaaacaggcaataaataagcaaatgtacagaatgtcaaggggtaataatgatttgcagaa

SEQ ID NO: 52730 - DNA, 110 bp, synthetic construct
  source 1..110: mol_type = other DNA
tgtaggagttccacaggactggaagaaaagactcatttcttagacaatgcacatagggtttcaggtatactggataccagagcaaagcaataactccagaggatcctggg

SEQ ID NO: 52731 - DNA, 110 bp, synthetic construct
  source 1..110: mol_type = other DNA
atgtaattaaaatctccatctgaagttaccattgccactggctcccaaaggactcaaatgacaggaaatggcaaagaatatggcattttctttgagatgctttaaaaaat

SEQ ID NO: 52732 - DNA, 110 bp, synthetic construct
  source 1..110: mol_type = other DNA
aaatgacaggaaatggcaaagaatatggcattttctttgagatgctttaaaaaatactgctaagaagacaatagtttgggtagtagcttttagctccaaatgataagcaa

SEQ ID NO: 52733 - DNA, 110 bp, synthetic construct
  source 1..110: mol_type = other DNA
ctgcggtgccataggtgtctgaatgcatctgtagcttccctctcactcatcagggtaattgttgccatgttattccattttttgattagtctagtccctcaagctcaatg

SEQ ID NO: 52734 - DNA, 110 bp, synthetic construct
  source 1..110: mol_type = other DNA
taaagctaaagcttcaactgtgagtcaggctggttgaagatgccctgaggcaaagccccaggcactaactgaaggtggagggagcaggagaagagcaactgagctaagtg

SEQ ID NO: 52735 - DNA, 110 bp, synthetic construct
  source 1..110: mol_type = other DNA
ccccaggcactaactgaaggtggagggagcaggagaagagcaactgagctaagtggaaaaacacaaaaaatcaagcattaccaatttgatttcggtcctagcaaagcaaa

SEQ ID NO: 52736 - DNA, 110 bp, synthetic construct
  source 1..110: mol_type = other DNA
agcagactgctagactcacgaaccattgagacctacagcttacacttaccattcctggctaacaaaaaatgttctatcactcctttaaaagtgtgaaaatgaagactgag

SEQ ID NO: 52737 - DNA, 110 bp, synthetic construct
  source 1..110: mol_type = other DNA
tggctaacaaaaaatgttctatcactcctttaaaagtgtgaaaatgaagactgagggagcaacatggggtcagcagcagacacatctgaggaacctcaagtcctaacaag

SEQ ID NO: 52738 - DNA, 110 bp, synthetic construct; identical to SEQ ID NO: 52736
  source 1..110: mol_type = other DNA

SEQ ID NO: 52739 - DNA, 110 bp, synthetic construct; identical to SEQ ID NO: 52737
  source 1..110: mol_type = other DNA

SEQ ID NO: 52740 - DNA, 110 bp, synthetic construct
  source 1..110: mol_type = other DNA
aaaaagcaaatataggaattccctccgtggcacaatgggattggcggcatcttgggagcactgggacgcaagtttgatccctagtggggcacagtgggttaaggatctag

SEQ ID NO: 52741 - DNA, 110 bp, synthetic construct
  source 1..110: mol_type = other DNA
gagcactgggacgcaagtttgatccctagtggggcacagtgggttaaggatctagcattgccgaagctgcagcttaggtcccagctgtggctcagatgtgatcccaggtt

SEQ ID NO: 52742 - DNA, 110 bp, synthetic construct
  source 1..110: mol_type = other DNA
tttggaaggcatccttgacttcagagaagttagaccatgtcacagatgtcatttctttctctgaggcaggctaacagagatactgggccccgtgggacagaagaagctaa

SEQ ID NO: 52743 - DNA, 110 bp, synthetic construct
  source 1..110: mol_type = other DNA
tttctctgaggcaggctaacagagatactgggccccgtgggacagaagaagctaaagaaagcgagggattcctttggacacttaagggaattattggcaaggctcaccag

SEQ ID NO: 52744 - DNA, 110 bp, synthetic construct; identical to SEQ ID NO: 52742
  source 1..110: mol_type = other DNA

SEQ ID NO: 52745 - DNA, 110 bp, synthetic construct; identical to SEQ ID NO: 52743
  source 1..110: mol_type = other DNA

SEQ ID NO: 52746 - DNA, 110 bp, synthetic construct
  source 1..110: mol_type = other DNA
aaggacatagtcttttccttatccaaataatgagcattatctaaaaggagacaaagatgtaacaggtaattgcaataaaacaagagaagtgctataaagtaatgaagatg

SEQ ID NO: 52747 - DNA, 110 bp, synthetic construct
  source 1..110: mol_type = other DNA
ctgccaatcccattgcaccacagcccgaactctattcttctgtcttattgttttacagagagagttgtttttaaataagtgaaaccttcttattgttatatccatccttt

SEQ ID NO: 52748 - DNA, 110 bp, synthetic construct
  source 1..110: mol_type = other DNA
gatctggtgttgctgcaaattgtggcataaggtcaggtcacagttgcagcttggatcccatgttgctgaggccatggtgtaggctttcagtggaagctccaattcaagcc

SEQ ID NO: 52749 - DNA, 110 bp, synthetic construct
  source 1..110: mol_type = other DNA
tcctcaaaggccagcctcacaatcttcctcgtctctcggcccttaacagcccgaacgcagtggcatctgcagcagcagtacctgccgactttctgagggatggcacttat

SEQ ID NO: 52750 - DNA, 110 bp, synthetic construct
  source 1..110: mol_type = other DNA
tcatgcttctcttcctgtggccccctcatgtagctcagtcacttttccatattcgcctctctgtgttcaagctaatataaatgcaagtaggcagagtcatttctctgggt

SEQ ID NO: 52751 - DNA, 110 bp, synthetic construct
  source 1..110: mol_type = other DNA
acgacaaagctcaggatgtagcagctctggctgaacagtgagaagggaggtagagttcaacccagctccctggccagacgtgacccaatcaggtgctccctcaggggacg

SEQ ID NO: 52752 - DNA, 110 bp, synthetic construct
  source 1..110: mol_type = other DNA
ttcaacccagctccctggccagacgtgacccaatcaggtgctccctcaggggacggagggcaagaacctggttctgtttgcatctttctcataccgaacctaagccccaa

SEQ ID NO: 52753 - DNA, 110 bp, synthetic construct
  source 1..110: mol_type = other DNA
ataaatggccttaagtttactaatattgagttaaagatgggggcccaaggaagagcagaaaaagcttagctcaaactactccagggcaccatcttgtggctgagaggtct

SEQ ID NO: 52754 - DNA, 110 bp, synthetic construct
  source 1..110: mol_type = other DNA
cagaaaaagcttagctcaaactactccagggcaccatcttgtggctgagaggtctctattagtagcagttctctgaaaaggatgcaaacaaaggagattagaggaaagac

SEQ ID NO: 52755 - DNA, 110 bp, synthetic construct
  source 1..110: mol_type = other DNA
agacaaaaaaggattcctagagatcttccacgtcagtaacccattgaacaatgaagcctaaagatcaatctgaaagtaagatccacacacagcaggttctgcctgaattt

SEQ ID NO: 52756 - DNA, 110 bp, synthetic construct
  source 1..110: mol_type = other DNA
gaacctgcatccttatggatattagttggatattcttctagatattatcacatctagaagctgaagaatgttttaaggttacgtacgagctagattagtatcttccgact

SEQ ID NO: 52757 - DNA, 110 bp, synthetic construct
  source 1..110: mol_type = other DNA
agaagctgaagaatgttttaaggttacgtacgagctagattagtatcttccgactagtatcttagatagctgctgagaaggaggtaactaactcctaaatgtttcttctt

SEQ ID NO: 52758 - DNA, 110 bp, synthetic construct
  source 1..110: mol_type = other DNA
cagctgtggtataggtcatggctgtggcttggagtcagtccctggcctgaggacttctatatgacatggatgtggaaaaaaaatcaccaaaattattaactgagataatc

SEQ ID NO: 52759 - DNA, 110 bp, synthetic construct
  source 1..110: mol_type = other DNA
acaaaacaaaacttattagcattaaccattaaccaaagaattattgccaacacctctatggcaaaacatggactcatactatatgctacgcactacctataaactgcctc

SEQ ID NO: 52760 - DNA, 110 bp, synthetic construct
  source 1..110: mol_type = other DNA
agttatgaagttgaagatattctttgtatgtatttttaagacatcattctcagctatacttgtataactgcaacttagaggtgagggacatgaagtgttatatttgttag

SEQ ID NO: 52761 - DNA, 110 bp, synthetic construct
  source 1..110: mol_type = other DNA
atacttgtataactgcaacttagaggtgagggacatgaagtgttatatttgttagatatgttaaccgaagcacggagataggatttgtcagctcttcaattagatttaag

SEQ ID NO: 52762 - DNA, 110 bp, synthetic construct
  source 1..110: mol_type = other DNA
acagctgctggcctacgtcactgccactgccacagcaatgagagagatccaagccacatctgtgacctgcaccgcagctcgcagcaataccacaacgggaactccaattt

SEQ ID NO: 52763 - DNA, 110 bp, synthetic construct; identical to SEQ ID NO: 52762
  source 1..110: mol_type = other DNA

SEQ ID NO: 52764 - DNA, 110 bp, synthetic construct
  source 1..110: mol_type = other DNA
taaagcatgtctctctgtctctttttttttccttttttttttttttagagctgcaccattggcataggtcatatggaagtttgaaggctaggggtctaatcggagctaca

SEQ ID NO: 52765 - DNA, 110 bp, synthetic construct; identical to SEQ ID NO: 52764
  source 1..110: mol_type = other DNA

SEQ ID NO: 52766 - DNA, 110 bp, synthetic construct
  source 1..110: mol_type = other DNA
aatagtggaaggcgtggaacaccaataagactgcccagcaataatccgtgtgagtgtagcctgagatgaggaacagactaagaagtagcgaagaagaagaagtgaagccc

SEQ ID NO: 52767 - DNA, 110 bp, synthetic construct
  source 1..110: mol_type = other DNA
cagcaataatccgtgtgagtgtagcctgagatgaggaacagactaagaagtagcgaagaagaagaagtgaagccctggaaagaagacagagagaggtaggagaagaacat

SEQ ID NO: 52768 - DNA, 110 bp, synthetic construct
  source 1..110: mol_type = other DNA
ataaccttcctgccttaatcttgtaaagggccatgacccaccacttgtctgtcgcatgtaaatctaggttgtggaaacaatagccctttttctcaaaaacttatataact

SEQ ID NO: 52769 - DNA, 110 bp, synthetic construct
  source 1..110: mol_type = other DNA
caggtcaaatgaataatactttgtcctttccgcagagaaatcgcaaaacagtcgctgttcagcttcgtcggcaatgtctctcaacaccatttcttttttttttttttttt

SEQ ID NO: 52770 - DNA, 110 bp, synthetic construct
  source 1..110: mol_type = other DNA
aggagctcgttttcttgagtagagttaggttgtatgcagatcttaccaaagaaagcaaacctgagatacttaggagaatgactccatgtcgcttagggacagacatcagg

SEQ ID NO: 52771 - DNA, 110 bp, synthetic construct
  source 1..110: mol_type = other DNA
gtgctgtttcttgaggacttagtcaacagttaagtagctaaagagttacaggggatacccatacagacagtggctcatatgaaggaggtgcatatctgtggcttaggctt

SEQ ID NO: 52772 - DNA, 110 bp, synthetic construct
  source 1..110: mol_type = other DNA
tttatgagggtacaataggctggcccctctgcctcaagctgggatgcttctgccgtacgatttatgctgcagagaccatggatcaggccaaactgtgtgttaccagagac

SEQ ID NO: 52773 - DNA, 110 bp, synthetic construct
  source 1..110: mol_type = other DNA
tgtggtcacatttgcacaactctgtaaagcttatgaaactcattaaaacactataatttaaacactcatttcgtgtttaaattgtaggtcttccagccaagggaattgag

SEQ ID NO: 52774 - DNA, 110 bp, synthetic construct
  source 1..110: mol_type = other DNA
gccatttcaaagtgggacctggagccttgagctctgatgaggacatccaggcaggtacaagatgggcagcatctcctgtgagttacactaagagactgtgtcagagacct

SEQ ID NO: 52775 - DNA, 110 bp, synthetic construct
  source 1..110: mol_type = other DNA
aaaatttaggctgggcatcctgtcgctctcagcaatgtaggagctctgccagtaagcaaggggagactcagtactgccccaaatatgatgcctctaccctctaaatgagc

SEQ ID NO: 52776 - DNA, 110 bp, synthetic construct
  source 1..110: mol_type = other DNA
ctcctccaaaactagaatataagctccaggaagacagggactttagcttgttcgctgttgtcttcccagcacatcaaacaaccctgggcacaaggaggggctcattcaac

SEQ ID NO: 52777 - DNA, 110 bp, synthetic construct
  source 1..110: mol_type = other DNA
gaagcgcatacatctaagagaccatgccctgttggcccttcaccacccgatttcccatgagttgcctccaacagctcagcttcccaaatgcttgcttgttttatcatgtc

SEQ ID NO: 52778 - DNA, 110 bp, synthetic construct
  source 1..110: mol_type = other DNA
tactcaggggttggtgtgctgcctttagacatttattggctaatgtttactggaaggagttattgagaatgccatcccaaatggttagttgtgaagttagctcttcacaa

SEQ ID NO: 52779 - DNA, 110 bp, synthetic construct
  source 1..110: mol_type = other DNA
ggagttattgagaatgccatcccaaatggttagttgtgaagttagctcttcacaactctattttggtttcatatgagtagaaacatcacattagaagctgtggtaatatg

SEQ ID NO: 52780 - DNA, 110 bp, synthetic construct
  source 1..110: mol_type = other DNA
gaaagttttagaatttagcagaatccttcttcctcctaaaaaagcctggaattgtcttgctgtgaatttaagaaattcagcttgacaggctaagctgagtaatggctttg

SEQ ID NO: 52781 - DNA, 110 bp, synthetic construct
  source 1..110: mol_type = other DNA
tcaaattcagctgtttctaactaaggtatctaagtctgtgtgcctcagtttccacctctgtaaccctgcctcagctccctctaagattctgtgataacccatttaaaagt

SEQ ID NO: 52782 - DNA, 110 bp, synthetic construct
  source 1..110: mol_type = other DNA
attattttcatcagcttgcaacagcactgtcttgagccccactaggctgcaggcctatggcacatacagctgccttgggagcaggatgtgaatggatgagtcaagacaag

SEQ ID NO: 52783 - DNA, 110 bp, synthetic construct
  source 1..110: mol_type = other DNA
tatggcacatacagctgccttgggagcaggatgtgaatggatgagtcaagacaagggccctttaagtcaccaggtccaggggcagaacctctgatttaaaggcaatattc

SEQ ID NO: 52784 - DNA, 110 bp, synthetic construct
  source 1..110: mol_type = other DNA
tgtggaggagacaagcgataaattaataactataataacatgttgtgaacattgcagtagaagtctatagactaagtacaaagagcttacagaagggaatggaattaata

SEQ ID NO: 52785 - DNA, 110 bp, synthetic construct
  source 1..110: mol_type = other DNA
cagtttgaatggaaatgaggggggcaggagcagggatgtaattggagcatgattggttgatacttggtctgatgcttcaaaagactcaccaagggtcagctgaggaagtg

SEQ ID NO: 52786 - DNA, 110 bp, synthetic construct
  source 1..110: mol_type = other DNA
gttgatacttggtctgatgcttcaaaagactcaccaagggtcagctgaggaagtgggcagacctgaagctgctggtctaaagcttgtcaaggctcctgtatgggctgtac

SEQ ID NO: 52787 - DNA, 110 bp, synthetic construct
  source 1..110: mol_type = other DNA
ttggcttcgcggacacatttgcctttgttctatttggagtatttggcttctctctgaagcccaggctgtgaagcatgctgccccctgcagctcctgtgagcaaccaggat

SEQ ID NO: 52788 - DNA, 110 bp, synthetic construct
  source 1..110: mol_type = other DNA
gaagcccaggctgtgaagcatgctgccccctgcagctcctgtgagcaaccaggatcattcatagataacgtcatttgagcgcaggtgtgatgttatagaatatagatctg

SEQ ID NO: 52789 - DNA, 110 bp, synthetic construct
  source 1..110: mol_type = other DNA
aggtactggcttaagatctatgtcagctctgcctttcagaagccgagaaaacctgaccagtccattacaatctgagttaaagatttacctcttgtttagaaaatggagta

SEQ ID NO: 52790 - DNA, 110 bp, synthetic construct
  source 1..110: mol_type = other DNA
ctatcatcttaaattcaacattagactgccatctgaaggaatttctacatggatcataactgctagtttccttgccctgggtaaaacgtgatattaaatgaatttatcct

SEQ ID NO: 52791 - DNA, 110 bp, synthetic construct
  source 1..110: mol_type = other DNA
tggaagaagtactttgacagagagaaaggtaatgtagaagtcctgaagcagggggagcccggtgtgttcgcatagcaaggaggtgggtgagccagaaaaggcaggtggag

SEQ ID NO: 52792 - DNA, 110 bp, synthetic construct
  source 1..110: mol_type = other DNA
attaatacaatcaaagcattgaggtcagaaagccagggggactgggtatgtgctttaaataactatccaaaatatcagggctaatgtccattgtttccctactggttgtg

SEQ ID NO: 52793 - DNA, 110 bp, synthetic construct
  source 1..110: mol_type = other DNA
taaataactatccaaaatatcagggctaatgtccattgtttccctactggttgtgggatcctgtatacccctttgcacctcacttttttcatctgtaaaatggatataac

SEQ ID NO: 52794 - DNA, 110 bp, synthetic construct
  source 1..110: mol_type = other DNA
ggatatcaacttccttcccttaaaaatgtccatgggattacttacactcattaaccctgtaagtccacttgagagacactaagcatctctgtgtaatactttgtaaatat

SEQ ID NO: 52795 - DNA, 110 bp, synthetic construct
  source 1..110: mol_type = other DNA
accttctaagattttggttgactgaaatgtacactctccaggcagacgttctcaaccaccattgccagccctacgtcttactctttccttacacagaccatcctcccgcc

SEQ ID NO: 52796 - DNA, 110 bp, synthetic construct
  source 1..110: mol_type = other DNA
gaaagaaacaatctcttccatgattttgttttatctaccaaggagctatgactctggtttatattcctatctcttaagcaaagagtatagtatgtaatacatagtcctta

SEQ ID NO: 52797 - DNA, 110 bp, synthetic construct
  source 1..110: mol_type = other DNA
agcaggggctaaagattttagttgtggagttacgtcatggtgactgctggactttcctgacaacaggatgttggatgaatatgcccaaagctcaggagaaatgagacagt

SEQ ID NO: 52798 - DNA, 110 bp, synthetic construct
  source 1..110: mol_type = other DNA
agaaagcaactctctacagaacatggtttcaatatggacatttactatacagtttccaacttcctttaaaaaggttacttgtgtacaagttaaaacacttggccccagat

SEQ ID NO: 52799 - DNA, 110 bp, synthetic construct
  source 1..110: mol_type = other DNA
taaagtaactaaaatataagagagtgtataagaagagacatgagggtagatggggaactagacttaaacaatggaaagggagatgagaaatcagcatgtagcctatattt

SEQ ID NO: 52800 - DNA, 110 bp, synthetic construct
  source 1..110: mol_type = other DNA
gagatcatgttataaagcagcagctgcgtaaaagggcaaatcgggactctaaaggaaatgggagcttgtgaaatgtaagagcgcaaaccattctagagtttgtattttgc

SEQ ID NO: 52801 - DNA, 110 bp, synthetic construct
  source 1..110: mol_type = other DNA
cccagctcctcccctttgcccccgacagcttctcagccctctcccctttaactatagcggctgctcatagaatgccacctccttgaagaagtgttcccaaatgccctgat

SEQ ID NO: 52802 - DNA, 110 bp, synthetic construct
  source 1..110: mol_type = other DNA
gtttactgctatcactccatcacccacacagtggctagctcacagtagataattagtaaatactttaaaggataatagtttactatagtaactctgttgtgctaaatata

SEQ ID NO: 52803 - DNA, 110 bp, synthetic construct
  source 1..110: mol_type = other DNA
tttttctcttataccctagttcccacttcccccatttgtgacagtaatacagagaaggaagacacattcagcagtcaaggccaactaacaatttggatgaatcacacatt

SEQ ID NO: 52804 - DNA, 110 bp, synthetic construct
  source 1..110: mol_type = other DNA
ttcttgtctaagaacttggaaataagcttgataagaacagtctctgatagggacttctcctgtggtgcagtgggtaaaggattgggcattatcactgcagcggctttggt

SEQ ID NO: 52805 - DNA, 110 bp, synthetic construct
  source 1..110: mol_type = other DNA
aaagcttggctcattgtccatgatggggctgatgtgcccccaaagcaacagaactcaagcagcagcacagaagccagaagaataaaattactgcagtgactggcacagct

SEQ ID NO: 52806 - DNA, 110 bp, synthetic construct
  source 1..110: mol_type = other DNA
aagaaaagtgataagggaggtgttttaaaacaagaacaacaaagaattcttattcaagaagtgctgtggataatattaataatagtagcagcaggagtaataataacagt

SEQ ID NO: 52807 - DNA, 110 bp, synthetic construct
  source 1..110: mol_type = other DNA
accactatggttcagtcaggtggttataaagtatggcatctggaggaaagcttcctgggttctgaagcttggctgatccctttctagctggtggtcttggggaaattatt

SEQ ID NO: 52808 - DNA, 110 bp, synthetic construct
  source 1..110: mol_type = other DNA
cataatggtaatgaaaacagcatccattacatcacacttacagggtgccagtgattaagtttttaatgcatttagcctatgctatgatcctttgtgaagctattgctgtc

SEQ ID NO: 52809 - DNA, 110 bp, synthetic construct
  source 1..110: mol_type = other DNA
taagtttttaatgcatttagcctatgctatgatcctttgtgaagctattgctgtcttcatttcacagatgaggaaacagaggcacaaaaaataatataacaaaaatctgc

SEQ ID NO: 52810 - DNA, 110 bp, synthetic construct
  source 1..110: mol_type = other DNA
tgttcgtctctagcacagggccctgtatgttacaaacccttgtattcgtttgccagggctacttgccatagccaagtaccaccaactggtacttgatttaaacaacagaa

SEQ ID NO: 52811 - DNA, 110 bp, synthetic construct
  source 1..110: mol_type = other DNA
aagtacccctgcagtagtgcttggccaggggtggggggttaatgatacagtcactgtcccctttgtaaagggcagtggaactgaggttgccagtgcaggctgcacatcct

SEQ ID NO: 52812 - DNA, 110 bp, synthetic construct
  source 1..110: mol_type = other DNA
ccataggggaaatagacttatctactgttgacagttaaactgaaggagaaaccaaccacccaagaagttaccaaaaatgtgtttggctccttcagtaactatttacccat

SEQ ID NO: 52813 - DNA, 110 bp, synthetic construct
  source 1..110: mol_type = other DNA
ccatacctagttacaatacctagagattcttagtaacaatgctttccatataataggttaatatccaagcttagttttagacatacattcattctggagaccagttttat

SEQ ID NO: 52814 - DNA, 110 bp, synthetic construct
  source 1..110: mol_type = other DNA
atcaatattttcttcttttttcctctggataattttcttatgcacaaatacactgtgggttatggagtatctagattctggtctattaccctgtgcaaactttattaatt

SEQ ID NO: 52815 - DNA, 110 bp, synthetic construct
  source 1..110: mol_type = other DNA
ctagttttgtctaactccaaaatctgagttcctaaatactaccaactcctcatactaaggaaccggctattaagaacttcacaaatacttttttaaaaacaaaactataa

SEQ ID NO: 52816 - DNA, 110 bp, synthetic construct
  source 1..110: mol_type = other DNA
cttcaaaaccatcagctcagcatattttaacaatctgctgttgcttctactcccaggctggaagtaaatataacagaataaactgctcagaattttaaatctacacaatg

SEQ ID NO: 52817 - DNA, 110 bp, synthetic construct
  source 1..110: mol_type = other DNA
tatacatagaaacagttgtgaaggtttgttcatgtacctctgtatctctatatagaagtttctttctaatctgaatttattgtggtttctcatagattcagagaggatta

SEQ ID NO: 52818 - DNA, 110 bp, synthetic construct; identical to SEQ ID NO: 52817
  source 1..110: mol_type = other DNA

SEQ ID NO: 52819 - DNA, 110 bp, synthetic construct
  source 1..110: mol_type = other DNA
aaagaaacactaagggagttacctggtagcttagcctttaagaatccagtgttgacacctctgtggtaccggttcaatccctgacccaggaactttgacctgctgtgggc

SEQ ID NO: 52820 - DNA, 110 bp, synthetic construct
  source 1..110: mol_type = other DNA
cgggtactgccctcaaagagacaaaagaccaaaaaaaaaaaataccacccccatacctggtttgcttgtcctggcctgcttgtgtcagaacagaaagctattactaattc

SEQ ID NO: 52821 - DNA, 110 bp, synthetic construct
  source 1..110: mol_type = other DNA
aatgaccatcatccaacccactaaaggacagagttactttgatgtttttacaggtatttttaaaaagctactaaatatatggcacatttaaaattggaggaaaaatagtt

SEQ ID NO: 52822 - DNA, 110 bp, synthetic construct
  source 1..110: mol_type = other DNA
atcaacatgagcttctttatgttaaatgcatgatcttaaagctacattatgtaatgcatgtgaaatagcatagactttataatcaggacagaccaacatttggtttttgc

SEQ ID NO: 52823 - DNA, 110 bp, synthetic construct
  source 1..110: mol_type = other DNA
ggctcttacttagaaaattatggctccaataacccattctttttgcagctcatcactttaaaaaaaaccaaacacatggagttcctgtcatggtgcagtggttaacgaat

SEQ ID NO: 52824 - DNA, 110 bp, synthetic construct
  source 1..110: mol_type = other DNA
cattggtttgtttctggctttctgtttctttgatctatttgtctgttattgcatcagtcactgtcttaatgtttatagcttaataataagtgttaatgtttggcaagagc

SEQ ID NO: 52825 - DNA, 110 bp, synthetic construct
  source 1..110: mol_type = other DNA
tgagaaacgatgacataaaagacaggatatataaatgatcaaagttttctcagactgttgcactgtctggggaatggggaccagtcctctatgaatgataacttccattt

SEQ ID NO: 52826 - DNA, 110 bp, synthetic construct
  source 1..110: mol_type = other DNA
ggcaccatatttcatggaacattaagcaagaattaacactgtcgatattatacgcaccatcaattttaaaatgctatgatttcagagatggtgaaaggtgaaaaactgag

SEQ ID NO: 52827 - DNA, 110 bp, synthetic construct
  source 1..110: mol_type = other DNA
ttcatttccactgtgccacaacaggaactccgaattataatttaaactatatatttgagtgattaacatgtgtcaatgtaaattcatcattataacaaatgtaccactct

SEQ ID NO: 52828 - DNA, 110 bp, synthetic construct
  source 1..110: mol_type = other DNA
gagcaaactgcagaaatacagttaggaacagagttctaatttctgaatttattctcttccagctttagctatcaaagaatttactgctaatcctctactatttcttagcc

SEQ ID NO: 52829 - DNA, 110 bp, synthetic construct
  source 1..110: mol_type = other DNA
taggagggacataaacctaccccaaacagatcatctggcaaagtaaacactttgtcaaatctatgaacccgtgctgggaaactactgatttaaataattaacttcatttt

SEQ ID NO: 52830 - DNA, 110 bp, synthetic construct
  source 1..110: mol_type = other DNA
tggcaaagtaaacactttgtcaaatctatgaacccgtgctgggaaactactgatttaaataattaacttcatttttaaacaaagatatactatggagggaaaaattcaga

SEQ ID NO: 52831 - DNA, 110 bp, synthetic construct
  source 1..110: mol_type = other DNA
cccatcttgttggcttgtcatttttttttttttttttttttggtcttctagggccacatggtgacatatggaggtttccaggccaatccaagctatagctgctggcctat

SEQ ID NO: 52832 - DNA, 110 bp, synthetic construct
  source 1..110: mol_type = other DNA
ttttttttttttttttggtcttctagggccacatggtgacatatggaggtttccaggccaatccaagctatagctgctggcctatgccaggaccacagcaacgcgggatc

SEQ ID NO: 52833 - DNA, 110 bp, synthetic construct
  source 1..110: mol_type = other DNA
ccatatagtgtcaattattaatctttgttgaataagtgagtggccaagcaaggacacaagcttgtctaactcactaaaggagctatttgctgagccatttgcctggaact

SEQ ID NO: 52834 - DNA, 110 bp, synthetic construct
  source 1..110: mol_type = other DNA
atggatgatgttagaatgaaataactttagagcatggaaaaatattattgtcccgatttaaagcatggtaaagaactaaattgtgggtaagccaaatgatttattcagga

SEQ ID NO: 52835 - DNA, 110 bp, synthetic construct
  source 1..110: mol_type = other DNA
ctaaatcatgataaatatttatcaggctgtaaattacttccaaaagtgatttctagtgacttcatggaagttcagctaaacaggtgatttttctcccctgatggtgagga

SEQ ID NO: 52836 - DNA, 110 bp, synthetic construct
  source 1..110: mol_type = other DNA
catgggtgtgtcagagtagtgtggatttaaaaaataatctctggaatagcaggaccatgttaatcaggggtgttttctttgaaggattaaattgtgaaatattcaaaaga

SEQ ID NO: 52837 - DNA, 110 bp, synthetic construct
  source 1..110: mol_type = other DNA
ccagtagatggcaggtacagtacttcaaacctctcataatgtgaaaaaatccaacagctcaatgcataaatataaattgttattgtgttttaaatctcaagagcaataaa

SEQ ID NO: 52838 - DNA, 110 bp, synthetic construct
  source 1..110: mol_type = other DNA
actccttaaggtgagaacaagaatgaccttggaatgtagaaatttatcaagggctctctgcaaaataagctttaaagctcacacatgaaggctttttgtccaaaaacttt

SEQ ID NO: 52839 - DNA, 110 bp, synthetic construct
  source 1..110: mol_type = other DNA
gagggtccctgggtacaaggaacagcatcctgctttcttctccatctttgcaatcccacaacctcattgtacctaagctctacttttttgcaatccaatctttacgttcc

SEQ ID NO: 52840 - DNA, 110 bp, synthetic construct
  source 1..110: mol_type = other DNA
ggagagcactagcttaaagcctcccagccctctcctagctggccacacttcctgtagtcattcccctaaatgccaccaactggagacctttcgagaatcctagtgtttgt

SEQ ID NO: 52841 - DNA, 110 bp, synthetic construct
  source 1..110: mol_type = other DNA
tgttccataaaagcacatcccaacaagatcacaacttttcctccaaagtcaggtttggatctggccacatgaaccgttgttgcccctaagttctgcacatgcttcatgtt

SEQ ID NO: 52842 - DNA, 110 bp, synthetic construct
  source 1..110: mol_type = other DNA
cagggtggccctaaaaaacaaaaacaacaacaaaaaaagcattatatcctagacggcaaaaccctgaaagggagaaagatttgatatgagggaggaaggtaatggtctgg

SEQ ID NO: 52843 - DNA, 110 bp, synthetic construct
  source 1..110: mol_type = other DNA
tgttccaaccaggtctgctatcagccttagcagtccatgtagacttctttcttatatctttcatagtttacttaccaacatatgagtgttacatagcttccattaaaaac

SEQ ID NO: 52844 - DNA, 110 bp, synthetic construct
  source 1..110: mol_type = other DNA
tattttaggtgatagcagtatggcgttttaaatcttgtgttgagaatctagtaccttatgcagagcaaatcttctggttgcttgtgatttctctagtatctcaggtagcc

SEQ ID NO: 52845 - DNA, 110 bp, synthetic construct
  source 1..110: mol_type = other DNA
ttatgcagagcaaatcttctggttgcttgtgatttctctagtatctcaggtagccagcttccatctccagtgcctagaagaaactattgctgaagaaatgttagatttgg

SEQ ID NO: 52846 - DNA, 110 bp, synthetic construct
  source 1..110: mol_type = other DNA
ctagaaatttaaacaaaaattaaactctattcccactgaaaccatggatttgtctctttcctttcctttactaaccagagtgtcaaacagtttagtctttctctcttcaa

SEQ ID NO: 52847 - DNA, 110 bp, synthetic construct
  source 1..110: mol_type = other DNA
tggttcagtttgtaattccctagtagctagtgatcttgtacatattttaatacgcttatttgccaattgtatgaaagatttcttttttaagttttgaggtaaagggttgc

SEQ ID NO: 52848 - DNA, 110 bp, synthetic construct
  source 1..110: mol_type = other DNA
caggttatgaactaggtttaaaatttgaagaatcaaagaaaagagatatagaactggatttttttttcatccagttagacacaaagttgatttgtagtgctcttaccata

SEQ ID NO: 52849 - DNA, 110 bp, synthetic construct
  source 1..110: mol_type = other DNA
aaatctacaaagaatttttaaaactcaacaataaggagacaaatagctcaattaaaacacccacaaagacctcaatagaaacttcaccagagcagagatacagatggcaa

SEQ ID NO: 52850 - DNA, 110 bp, synthetic construct
  source 1..110: mol_type = other DNA
ttcaaatgttgcaccagccttgcatatatggaataaatcccactaggtcatggggaaatacaatgactttaataaaaaaatattttcaaatgaattttagatgactctga

SEQ ID NO: 52851 - DNA, 110 bp, synthetic construct
  source 1..110: mol_type = other DNA
aaggtaagggtaatttagtatccatctgaaacaaagaacatatcaggatgataattacagaaggtgctcaactacagcctgtctttcccaccccaactgatgcaaaaaaa

SEQ ID NO: 52852 - DNA, 110 bp, synthetic construct; identical to SEQ ID NO: 52851
  source 1..110: mol_type = other DNA

SEQ ID NO: 52853 - DNA, 110 bp, synthetic construct; identical to SEQ ID NO: 52851
  source 1..110: mol_type = other DNA

SEQ ID NO: 52854 - DNA, 110 bp, synthetic construct; identical to SEQ ID NO: 52851
  source 1..110: mol_type = other DNA

SEQ ID NO: 52855 - DNA, 110 bp, synthetic construct
  source 1..110: mol_type = other DNA
atatttgaggcttaaggagaaatttttgttatcaaatgcatgtaaaaattgggccacctgtttgtttagcaacatgtaatttttagccacctccatatatgttaagtaca

SEQ ID NO: 52856 - DNA, 110 bp, synthetic construct; identical to SEQ ID NO: 52855
  source 1..110: mol_type = other DNA

SEQ ID NO: 52857 - DNA, 110 bp, synthetic construct
  source 1..110: mol_type = other DNA
gatcacggtgttgagttatgctgatggtgactggaaatcaattccatagatactaaatggccaaattaggaggacaggtatatttccatgttaaaagtaagcatatacat

SEQ ID NO: 52858 - DNA, 110 bp, synthetic construct
  source 1..110: mol_type = other DNA
taattcaatttcaagaatactgagacatagtcagtgctctgttttatctaatcctccccaaatatggaaggcatgaatgtcttcagagttgcttctttgttttcaacttt

SEQ ID NO: 52859 - DNA, 110 bp, synthetic construct
  source 1..110: mol_type = other DNA
ccccaaatatggaaggcatgaatgtcttcagagttgcttctttgttttcaactttaaaggtagtttaaatacttgcattaaaaatgtcaagaaagccaaagtcactgaat

SEQ ID NO: 52860 - DNA, 110 bp, synthetic construct
  source 1..110: mol_type = other DNA
aaacaggtttttattaccttattttcactttccaaatacctaccttgttgatttaaggagaatggttttaaatagaccaatacaacaagcaggaagaccaaattgaggat

SEQ ID NO: 52861 - DNA, 110 bp, synthetic construct
  source 1..110: mol_type = other DNA
aggagaatggttttaaatagaccaatacaacaagcaggaagaccaaattgaggattataattctggatagagaaagagtaattagcattatagtagataccatacaggta

SEQ ID NO: 52862 - DNA, 110 bp, synthetic construct
  source 1..110: mol_type = other DNA
ggcacttagcaaagaaagatatctaaattgtcaacaaacctataaaatggtgttcaagatcatcagtcatctgtagacacagacaagcttattttaaatgtaggtattat

SEQ ID NO: 52863 - DNA, 110 bp, synthetic construct; identical to SEQ ID NO: 52862
  source 1..110: mol_type = other DNA

SEQ ID NO: 52864 - DNA, 110 bp, synthetic construct
  source 1..110: mol_type = other DNA
ctaatagcaaccccaattctgagtttctagacaaaataattgaaagcagtatcttgaagaaatatttgcatatctttgatcacagcagcattattcacaatagccaagag

SEQ ID NO: 52865 - DNA, 110 bp, synthetic construct
  source 1..110: mol_type = other DNA
gaagaaatatttgcatatctttgatcacagcagcattattcacaatagccaagaggtggaagcaacccaaatatctactgacggatgaatgaacaaaatgtaatacatat

SEQ ID NO: 52866 - DNA, 110 bp, synthetic construct
  source 1..110: mol_type = other DNA
gaggactgacctgatgatttccctttttaaatctattctcttgctaaaatccccaaatcctcttagttattttgcatttgcattagatgaatacattaatattaaggtat

SEQ ID NO: 52867 - DNA, 110 bp, synthetic construct
  source 1..110: mol_type = other DNA
ttaaactggagcaagaccaaactgattatcctttcatttctaagctccaaagccagcataaaactagtgcagttatttcatggagactagaaacctctgggaaagagatg

SEQ ID NO: 52868 - DNA, 110 bp, synthetic construct
  source 1..110: mol_type = other DNA
ctgctgggggttactaaatagtatgacaattaaaatattgctatcatagggctttgctaagtgaaaaacagttacgtgaaagttaacccgaggtcaattttccatataaa

SEQ ID NO: 52869 - DNA, 110 bp, synthetic construct
  source 1..110: mol_type = other DNA
ggcctaggtgagataggccaggttgttcaagaagcagttcatcactaagtgatcattactgaaacatgttcctttctggaatccagaagacataatccaaagacattgct

SEQ ID NO: 52870 - DNA, 110 bp, synthetic construct
  source 1..110: mol_type = other DNA
ctcccaataatggaagagcttttcttaaggcaaatgatcagccagtttgtatgggaagggaagaataactatggacttatggacaaggtcaaatggcttgactgattgaa

SEQ ID NO: 52871 - DNA, 110 bp, synthetic construct
  source 1..110: mol_type = other DNA
gaaattatccactgaacaattatttcctataatctcagttgctaggaatacaaagacacatagaacacaattcttgtccatacaaagattaccttctagtggcaaagata

SEQ ID NO: 52872 - DNA, 110 bp, synthetic construct
  source 1..110: mol_type = other DNA
gaatacaaagacacatagaacacaattcttgtccatacaaagattaccttctagtggcaaagataaatacataagcctgtaacaaatattgaatatgataagtgtgctga

SEQ ID NO: 52873 - DNA, 110 bp, synthetic construct
  source 1..110: mol_type = other DNA
agtctgtgggtttccatatatatccaccatgatagtatcatatggggtaattgcactgccctaaggatcccctgtgctttttatttctccctccctccccatagggtata

SEQ ID NO: 52874 - DNA, 110 bp, synthetic construct
  source 1..110: mol_type = other DNA
aatatacctatatttgttcatattgtggctttgggaaataatgtatacttctagagagttggtttcaacttaaggaatctgaaacttaatgttgccatggtctagtaatg

SEQ ID NO: 52875 - DNA, 110 bp, synthetic construct
  source 1..110: mol_type = other DNA
gagttggtttcaacttaaggaatctgaaacttaatgttgccatggtctagtaatggttctgaactacacaaaagcatataaactagttctggtaaaaaagatacatgggt

SEQ ID NO: 52876 - DNA, 110 bp, synthetic construct
  source 1..110: mol_type = other DNA
tggggggggtgcacctgtgcttaagtctaggttagctccacgtgcctcattacagtgcctgggttgtatgggcagtggtatcttgagatatgttttccgcatagtgcagt

SEQ ID NO: 52877 - DNA, 110 bp, synthetic construct
  source 1..110: mol_type = other DNA
acctcaccctctttctaagattttccagtctttcatattctttaaatgttttccatactagtgatcccaaattgaaatccaagtgtttgacaaccctggcatctgaaagg

SEQ ID NO: 52878 - DNA, 110 bp, synthetic construct
  source 1..110: mol_type = other DNA
tttcttcagaatgcaaatctgctcaaagttttctaatcataaaaagcttgtacactacatatccctctagcttccctgtggttactgctctatttgtttatccctctgga

SEQ ID NO: 52879 - DNA, 110 bp, synthetic construct
  source 1..110: mol_type = other DNA
aataccaacatctatcttcttattctggatgagccactcatgcttcaaaaactcttaggtggaatttttcctccagataaaagctcaatatctcctaactcacaaattta

SEQ ID NO: 52880 - DNA, 110 bp, synthetic construct
  source 1..110: mol_type = other DNA
gtttgagaaatgctaggtttatttagtttatttccctcaagaatttgtggtgtgcatttttaaactaaatgttcagagccaataaacaattctgtttgatgattatacct

SEQ ID NO: 52881 - DNA, 110 bp, synthetic construct
  source 1..110: mol_type = other DNA
tcaagacatgttatgaataaaaacagcaaaaaacctctcccttttttgtcgatataaatttaggctttaaaacaagatgaagtccttgcttaaaatcagtagggtaaagc

SEQ ID NO: 52882 - DNA, 110 bp, synthetic construct
  source 1..110: mol_type = other DNA
tctgagttagtgggggactgacttcaatgtatgaatttcagggaaacactgttcggtccattaacagccaccttccatgaaaattctctagcagtagtgaggaacttagc

SEQ ID NO: 52883 - DNA, 110 bp, synthetic construct
  source 1..110: mol_type = other DNA
gtccattaacagccaccttccatgaaaattctctagcagtagtgaggaacttagctatgatcttgagaagcaagcactcctttccagatgtcagtgatttgccaaattgt

SEQ ID NO: 52884 - DNA, 110 bp, synthetic construct
  source 1..110: mol_type = other DNA
gaagcttcttaatggattactattaatatctctttcgctagaagtctgacacacgcccattactaatcctatccttggcaagaagaatttgaatgaccatagcatgcatt

SEQ ID NO: 52885 - DNA, 110 bp, synthetic construct
  source 1..110: mol_type = other DNA
aaacttgtattaatgaaacacaaactgcccaaatagtcttcctatatcaaactttactgagctgcaataactctttcctggtcaagggctgatcccaaagcatctgggaa

SEQ ID NO: 52886 - DNA, 110 bp, synthetic construct; identical to SEQ ID NO: 52885
  source 1..110: mol_type = other DNA

SEQ ID NO: 52887 - DNA, 110 bp, synthetic construct
  source 1..110: mol_type = other DNA
actaagtaactgttaactgaataacctccacttcatcttaagaccgaactgagtgcccttcatctatgacaccttatgtgttcccctaatacagaattaatagaaccata

SEQ ID NO: 52888 - DNA, 110 bp, synthetic construct
  source 1..110: mol_type = other DNA
cccctatttacacactcacaagctcctaccccattaggagaagctaggtgaggcagataggggagatgggttcctcatctcctccagtttatgctccttagtacctccta

SEQ ID NO: 52889 - DNA, 110 bp, synthetic construct
  source 1..110: mol_type = other DNA
aaacagtcatcattacataccctctaattgccccaaccctctaatttaaaaaggctggtaaagtcaaaggttttgctcagtagtaactttggatatttgcatattggaaa

SEQ ID NO: 52890 - DNA, 110 bp, synthetic construct
  source 1..110: mol_type = other DNA
agaggaccatttgtagggacacaaattatctaagttttggtttgctgacattgtaccccaagcgggagctgatccatcttgggcctagagatttatttctacaatgcgta

SEQ ID NO: 52891 - DNA, 110 bp, synthetic construct
  source 1..110: mol_type = other DNA
tcttgacccatataaattagagtggtggtacgaagatgtatgcctgcatctaagaacttgaaaggatagacgagaaaaaaaatcaaggtaggtttaaatagtagattgaa

SEQ ID NO: 52892 - DNA, 110 bp, synthetic construct
  source 1..110: mol_type = other DNA
acttgaaaggatagacgagaaaaaaaatcaaggtaggtttaaatagtagattgaacacataggagttacttacgctctgtaaaataaatctgaggtggagttccccgtcg

SEQ ID NO: 52893 - DNA, 110 bp, synthetic construct; identical to SEQ ID NO: 52891
  source 1..110: mol_type = other DNA

SEQ ID NO: 52894 - DNA, 110 bp, synthetic construct; identical to SEQ ID NO: 52892
  source 1..110: mol_type = other DNA

SEQ ID NO: 52895 - DNA, 110 bp, synthetic construct
  source 1..110: mol_type = other DNA
catttcttaaccacatttacataattggcattttacacatatttttagtgagacgtctttttagcttcctctccctttatttaggcacagtatagtaattgctgccaggg

SEQ ID NO: 52896 - DNA, 110 bp, synthetic construct
  source 1..110: mol_type = other DNA
tctgaagactgtaactatgagaaataagtgcttgttgtctcagttacccagtatatggaatttattagacagcctgaactggatcatacaatgagctggccaaatgactg

SEQ ID NO: 52897 - DNA, 110 bp, synthetic construct
  source 1..110: mol_type = other DNA
tggaatttattagacagcctgaactggatcatacaatgagctggccaaatgactggacatggggaagaaagataaggaggaaccaacatttcttccagttttcttcaaca

SEQ ID NO: 52898 - DNA, 110 bp, synthetic construct
  source 1..110: mol_type = other DNA
tagccttcagccaaggacacaaggtgaacctttatgcaggcttccaggatgccttccctatgcagcttcttgactttccatactctgtttcccctccagttctagctgcc

SEQ ID NO: 52899 - DNA, 110 bp, synthetic construct
  source 1..110: mol_type = other DNA
atcagggagacttcactaaagaataatggtctatttaagatattatgggtgcaagatgtccatttgaaattctttataacttacctaattattgcacatataacttacct

SEQ ID NO: 52900 - DNA, 110 bp, synthetic construct
  source 1..110: mol_type = other DNA
atttacatacttgtaattgatcatacacactttttaaaattggctttgcctcaacttttcataagaaatttcagattgaacttttagaaggcttcccaaggccgggaaag

SEQ ID NO: 52901 - DNA, 110 bp, synthetic construct; identical to SEQ ID NO: 52900
  source 1..110: mol_type = other DNA

SEQ ID NO: 52902 - DNA, 110 bp, synthetic construct
  source 1..110: mol_type = other DNA
catgggtatacttactagttctacaagaatcagaagtaaagtaaaactgtggcatattcctctagagattcccaacctaaactaagaaaatgatgtttactaggagatgt

SEQ ID NO: 52903 - DNA, 110 bp, synthetic construct
  source 1..110: mol_type = other DNA
ccgtgtttatactgttagagataggcgcatccatattgacgctccagctactgagaatttaaaaggacaggagcagttaaagaccgattagccatggagaacattagctt

SEQ ID NO: 52904 - DNA, 110 bp, synthetic construct
  source 1..110: mol_type = other DNA
aatttaaaaggacaggagcagttaaagaccgattagccatggagaacattagcttcgatacctctcctacagagccagacattacgtcaagcatgacaagccactctagc

SEQ ID NO: 52905 - DNA, 110 bp, synthetic construct; identical to SEQ ID NO: 52903
  source 1..110: mol_type = other DNA

SEQ ID NO: 52906 - DNA, 110 bp, synthetic construct; identical to SEQ ID NO: 52904
  source 1..110: mol_type = other DNA

SEQ ID NO: 52907 - DNA, 110 bp, synthetic construct
  source 1..110: mol_type = other DNA
tggaaaaagccctctgagactgcaggtggcccgaagcaagtgacagagtttgtcatttttaaagaagacatctaccgatatctgttctaccttgtagggattaaaggaga

SEQ ID NO: 52908 - DNA, 110 bp, synthetic construct
  source 1..110: mol_type = other DNA
ttacaccttctatctcatttaatcatttaaaatttttttgaaataggcagtttaattagccccatcttaaagatgaagatggtgaagcttactgagtaaggtcacgcagt

SEQ ID NO: 52909 - DNA, 110 bp, synthetic construct
  source 1..110: mol_type = other DNA
gtgagaaaagacaaaagtccaaatctctctctctctcttcccctctccccccccacaaaatttagatgaaaaaagagattatgtaggggtcagaagacaaatttcaaaaa

SEQ ID NO: 52910 - DNA, 110 bp, synthetic construct
  source 1..110: mol_type = other DNA
ggttgaagttctttgttccttgctctttcttgtcacacacagtcacttcccagagagcaggccagcccccagggatgctgtctgggactaattccaacatccaccatgtg

SEQ ID NO: 52911 - DNA, 110 bp, synthetic construct
  source 1..110: mol_type = other DNA
gtctctgagtagaagctgttagagggaggagaagttggccttggagtaggaccaagctgaaggtgaaatgtagctccaccatgaatttgctgtgggaacccaggcgaggt

SEQ ID NO: 52912 - DNA, 110 bp, synthetic construct
  source 1..110: mol_type = other DNA
aataaaatatgaattttaaagttccatcaggcaacagtttggcaagttaataataaccgtcagtgattgcttaacaacctaatggaatttatctcaccaagcacatggct

SEQ ID NO: 52913 - DNA, 110 bp, synthetic construct
  source 1..110: mol_type = other DNA
aaatagcgtagccctgagattggatttgactttgtgtgactgtgtgtttcagagatggtctttactctccgttcccctttctttattgctcctcacttctagtgtccggc

SEQ ID NO: 52914 - DNA, 110 bp, synthetic construct
  source 1..110: mol_type = other DNA
tggtctttactctccgttcccctttctttattgctcctcacttctagtgtccggctcagctactcttagttattaacacccgctgcttccctgagcctctctttgcaacc

SEQ ID NO: 52915 - DNA, 110 bp, synthetic construct
  source 1..110: mol_type = other DNA
ctataaaacaatggaaataagtttcagggttgttgcaacgtccaaccaggatgcaagcgatgaggccctgcagacttcagtgctcagctcatggtgtcctctggagctgg

SEQ ID NO: 52916 - DNA, 110 bp, synthetic construct
  source 1..110: mol_type = other DNA
ctggctgctaggaaagatggcactgattactcacacttacatatcacttcttaaaaggtttccttggtctcttaaggcatcacggccactaaacctccctgttcttggta

SEQ ID NO: 52917 - DNA, 110 bp, synthetic construct
  source 1..110: mol_type = other DNA
aggtttccttggtctcttaaggcatcacggccactaaacctccctgttcttggtaaagatccacaattccctatcaaaaccttagtcccaagtgtgttttcaaattcaga

SEQ ID NO: 52918 - DNA, 110 bp, synthetic construct
  source 1..110: mol_type = other DNA
tggaaagtaaccctggcttagcttttggttggttggttgaatttgggttttgttctagcttcatataacatccaaaggtgaggctacgataggttctgtgaaccattcag

SEQ ID NO: 52919 - DNA, 110 bp, synthetic construct
  source 1..110: mol_type = other DNA
atctctctctgcgaagctgagctggcactgcctcgcccagctggggctccccttagcaccagtcctacctgcatgggagtggtaaccaaggcctggtgtaagcagcagca

SEQ ID NO: 52920 - DNA, 110 bp, synthetic construct
  source 1..110: mol_type = other DNA
agggtctgaaccaacctgtgagagagtctgggaaatgtagtcttcctttgtgcctagaaaaaaagaaatggattggcaaacagctaacacatgacaggaccacttacaaa

SEQ ID NO: 52921 - DNA, 110 bp, synthetic construct
  source 1..110: mol_type = other DNA
agaaaaaaagaaatggattggcaaacagctaacacatgacaggaccacttacaaaggagatgtactttgtttccaccttacaccatttgctgcttggggccatttaaaga

SEQ ID NO: 52922 - DNA, 110 bp, synthetic construct
  source 1..110: mol_type = other DNA
ggtacccgtgtggtcactgcctgattctcacacaaccacccagccaacgtcatcaggcagatggactgggggcgggacagcattcatagaaagccttctcggatgaagca

SEQ ID NO: 52923 - DNA, 110 bp, synthetic construct
  source 1..110: mol_type = other DNA
ggcagatggactgggggcgggacagcattcatagaaagccttctcggatgaagcaccacaaaaccagagggcaacccgaggtccctgagcccacctgtgcctccttcctc

SEQ ID NO: 52924 - DNA, 110 bp, synthetic construct
  source 1..110: mol_type = other DNA
cccctccgtgtcaacatctccccaaaacaaatgtttaccccacacatccagctattgtgagacaccacatgcatgaagagtagggaaaagaccccagtctacctcgactc

SEQ ID NO: 52925 - DNA, 110 bp, synthetic construct
  source 1..110: mol_type = other DNA
aggagactggctcagctttggagaaataaaactacttagaggcccagccagagcgacacagtgctgacctccagctggagcccgctctgtgggcagcagcagctgggagg

SEQ ID NO: 52926 - DNA, 110 bp, synthetic construct
  source 1..110: mol_type = other DNA
cctcctgaagccctccaaccggccctaagggaccacggatgcccaacctctggaaagccaagctccagccctcagcaaacatgcagagcaatctcttgcacacacgcaca

SEQ ID NO: 52927 - DNA, 110 bp, synthetic construct
  source 1..110: mol_type = other DNA
atgatttggggaccaaagaaccagactgtacctctgtccctattcaataccatttgatcaaatctgggccctcaaattatgtgtaggtccagatcccattgaccagcact

SEQ ID NO: 52928 - DNA, 110 bp, synthetic construct
  source 1..110: mol_type = other DNA
ttaaaatcttgttctatgacttttaaacctctcacccagtttaaggacacaaagaagaaatcagtatgggagagggacatactctgtttctgaagagatttgtgaggata

SEQ ID NO: 52929 - DNA, 110 bp, synthetic construct
  source 1..110: mol_type = other DNA
ctttctgggtttatttccctcttaatttaaggtaagtgtgtgtgtgtgtgtggggggggggtcatcagagccactcagagagtttgtcatgcaccctgtgaaattgggga

SEQ ID NO: 52930 - DNA, 110 bp, synthetic construct
  source 1..110: mol_type = other DNA
agagcagccttgcccaggaggaccagagcttaaatagctggaactgagtccattgttgccaggtctgcaaggaggcattggacaagggcaagggaggaaagggtggggca

SEQ ID NO: 52931 - DNA, 110 bp, synthetic construct
  source 1..110: mol_type = other DNA
cctggggacctcagccctcagcacctcacagagctgggccacaattgcagacttagctgtgagctccgtgtacttagtgcagggttctgagacacttgctgccccagcat

SEQ ID NO: 52932 - DNA, 110 bp, synthetic construct
  source 1..110: mol_type = other DNA
aattaaatctgggatggaaaactgaagccaggacttcggagactccctatcttagcaccattgaggcgcctccactaggcagggctgtgtaacctgaggggggtgctggc

SEQ ID NO: 52933 - DNA, 110 bp, synthetic construct
  source 1..110: mol_type = other DNA
ttttcagtgctcctcacatgggtcaactgttcgagtgtgcggtgggccacccgagttcaagacgttttcacagctggcaagctcctggccctgggcctgatcatcatcat

SEQ ID NO: 52934 - DNA, 110 bp, synthetic construct
  source 1..110: mol_type = other DNA
aggaagtttaaagatgaatttggtgacaaaggtatccagttggtgaggtccagaaggcagttggaattgataaaaattttattaaaatcgtcgtctcaatttttatctat

SEQ ID NO: 52935 - DNA, 110 bp, synthetic construct
  source 1..110: mol_type = other DNA
gtatggacaggacaacacatctaagcccttcataccaggttacaacactgagatacctcctaagagcataggccagcaagagcaatcaccacccaacctattgttttttt

SEQ ID NO: 52936 - DNA, 110 bp, synthetic construct
  source 1..110: mol_type = other DNA
acagatcattaagataacagaaaatgagagtttgcttgtagctgatacattaatttccataccaataactccatgaaaataactctgagatcttggaagagatgtaaatt

SEQ ID NO: 52937 - DNA, 110 bp, synthetic construct
  source 1..110: mol_type = other DNA
gcatacaggccatttaactcaattatgggcatttattgtgcaacacttaaaacgaagcctctctccactcacagctctgggtctatcaccatccaactcatgattttcaa

SEQ ID NO: 52938 - DNA, 110 bp, synthetic construct
  source 1..110: mol_type = other DNA
atgagccagagcaagagtgtgtgtgtgtgtatgtgtgtgtgtgtgcacacatacacacgcacacttctaattttaaagcagagaaggaaaccaactctctttggcctggg

SEQ ID NO: 52939 - DNA, 110 bp, synthetic construct
  source 1..110: mol_type = other DNA
cacgcacacttctaattttaaagcagagaaggaaaccaactctctttggcctggggaaagagcattaataaagagcccaagcagatgcacaggattaaagtatttttcaa

SEQ ID NO: 52940 - DNA, 110 bp, synthetic construct
  source 1..110: mol_type = other DNA
agttataggattcttgggagacaccataagccatgggacctctgtgtacatgtatgtagctctgtgtgcactggtgtgtggttaaagtgaagctttcagaagtcaagaac

SEQ ID NO: 52941 - DNA, 110 bp, synthetic construct
  source 1..110: mol_type = other DNA
tctcagcatcagtgtgtgacaattcagagtactgtcaactcaggaagctcacccaagctttggtgtccagagtttttagtatgtagacaagattgattgattgtccacat

SEQ ID NO: 52942 - DNA, 110 bp, synthetic construct
  source 1..110: mol_type = other DNA
atttttaaaaagtgtgctttgattcattcatttccaggggggaagtgacagggatatttatgtaatttcagagttgaagtgcccaagccaggagtatgaatggggctctg

SEQ ID NO: 52943 - DNA, 110 bp, synthetic construct
  source 1..110: mol_type = other DNA
ctgatctccttttcatctctagatctcgtccttttgagaatgttgtataagtagaatcttacattatgaatgggatcataatcatccaataagtgtaatcatgcactgtg

SEQ ID NO: 52944 - DNA, 110 bp, synthetic construct
  source 1..110: mol_type = other DNA
atcttacattatgaatgggatcataatcatccaataagtgtaatcatgcactgtggagccttctaagattgactttttttccactctgagaatgtccctgagatccatcc

SEQ ID NO: 52945 - DNA, 110 bp, synthetic construct
  source 1..110: mol_type = other DNA
agtaaacattaagactctaaattgagctttgtgatgtttgtgactgtgggatgttgcccaatatatcatgaccatctgttcacaaaatgagtaaaaacccaagatacagg

SEQ ID NO: 52946 - DNA, 110 bp, synthetic construct
  source 1..110: mol_type = other DNA
gagacatttggttgttttctgacttctaaatgctcctcactgcagctgtggctacacacctctgtcggctctgtaaaggaggagctaaagaaatcaatactgtctttata

SEQ ID NO: 52947 - DNA, 110 bp, synthetic construct
  source 1..110: mol_type = other DNA
ctttagttaccatcttctctcctacacactgtcacatgaagggtcagctataagcttactgctaggagttgccattgtggctcagccataatgaacccaactagtatcca

SEQ ID NO: 52948 - DNA, 110 bp, synthetic construct
  source 1..110: mol_type = other DNA
gttgcacattttaaaagcctcatctctgcagtgacctaagatgtcaccaagacacagtctgaaaaacctgttttccagccctgtttctactcagtttccctgaccagaac

SEQ ID NO: 52949 - DNA, 110 bp, synthetic construct
  source 1..110: mol_type = other DNA
tacaaaacgtttgaggtcagcagaattgctcctggacctgtgggcacttaatatcattacctagaaaaaacatctttccctgttcgttttgttttagggaccaatcctaa

SEQ ID NO: 52950 - DNA, 110 bp, synthetic construct
  source 1..110: mol_type = other DNA
attacctagaaaaaacatctttccctgttcgttttgttttagggaccaatcctaacatgggtaagtctagtgtctttcaccaaatagactcctactgtttcatcacactc

SEQ ID NO: 52951 - DNA, 110 bp, synthetic construct
  source 1..110: mol_type = other DNA
ctgcagcctacacgacaactcagggcaacgccagattcttaacccactaatcgaggccagggactaaaactgcgtcctcatggatcctagtccagatcattactgctgag

SEQ ID NO: 52952 - DNA, 110 bp, synthetic construct
  source 1..110: mol_type = other DNA
gccagggactaaaactgcgtcctcatggatcctagtccagatcattactgctgagccacgacaggaactcctgtagatgtttttcttgactttgtactgtaagtcagaga

SEQ ID NO: 52953 - DNA, 110 bp, synthetic construct
  source 1..110: mol_type = other DNA
tccttacaaattcacagatggtacatggtagaaacaaagttaccactgtttcttttctgatatatgaggaagaatggttgtgtctcatatactgcttctagtgaaatcta

SEQ ID NO: 52954 - DNA, 110 bp, synthetic construct
  source 1..110: mol_type = other DNA
tctgatatatgaggaagaatggttgtgtctcatatactgcttctagtgaaatctagaaggaggctcaaaggagtcaacatttagacctggaaggggcaagtcatgccttg

SEQ ID NO: 52955 - DNA, 110 bp, synthetic construct
  source 1..110: mol_type = other DNA
gggacacagccctacccatcagtactcagactgctttaggcccaaagcccacagccccctctgcacccagctctacccattagtgggcaggcacaaatcccagaatcccc

SEQ ID NO: 52956 - DNA, 110 bp, synthetic construct
  source 1..110: mol_type = other DNA
gtccaagcaaccatcaccttgcagctggcttactcagtaccctctaccctcctgtatacccacatccactgtgatccttttccaatcccatctccacacatcagccatag

SEQ ID NO: 52957 - DNA, 110 bp, synthetic construct
  source 1..110: mol_type = other DNA
gggtcaccatcttcctgtaaaaactcttctatgttcaacttactagaatacattttcagatgtgtaaacgtatttacattatcctcatagaaattttcgttggctaaact

SEQ ID NO: 52958 - DNA, 110 bp, synthetic construct
  source 1..110: mol_type = other DNA
gcacctgaggtaagaggacctttcctctgattgatagatctcattcttttcttcgtcctgcaagcatgtgtttgaagctccccatgccattaaccttgtcccttcccttg

SEQ ID NO: 52959 - DNA, 110 bp, synthetic construct
  source 1..110: mol_type = other DNA
ttcctcacttctgtgctctcctcccaatgcaggagcgtttgcaaaagcgagcttcttctttcttccgcttacgagtcctcagagtaggggacggagaggatgtgatgtac

SEQ ID NO: 52960 - DNA, 110 bp, synthetic construct
  source 1..110: mol_type = other DNA
ttctttcttccgcttacgagtcctcagagtaggggacggagaggatgtgatgtacaatacataaggccaagcccaatgttgcaatgagaattgactcttggagaaaatat

SEQ ID NO: 52961 - DNA, 110 bp, synthetic construct
  source 1..110: mol_type = other DNA
agctgtgcgtcacatccctgtagctgaaaggggacatcagagggaaagaaatggggtgataaagaagacagaactggagttcccgaggtggctcagcaattaacaaaccc

SEQ ID NO: 52962 - DNA, 110 bp, synthetic construct
  source 1..110: mol_type = other DNA
aagactgactcacaccaaccaatcccaaaataaaaagagctacactgaaaaaacatgcagtgaaaaataaacctgccccaaaccacaaagtttagtgagcaggagtgttg

SEQ ID NO: 52963 - DNA, 110 bp, synthetic construct
  source 1..110: mol_type = other DNA
ttccactctcagaaaatttaagtctggcggggaaggcagaaattcatcataagcatacctactagtacatcctgagattagagctatgggggtaacaacattcaatgtga

SEQ ID NO: 52964 - DNA, 110 bp, synthetic construct
  source 1..110: mol_type = other DNA
tgtctccctccttcatgagaccacgaagcctggagaggacggcatgttttatatattttacatgctatccttgtatgtcatacacgcttaacaaatgtttattgacttaa

SEQ ID NO: 52965 - DNA, 110 bp, synthetic construct
  source 1..110: mol_type = other DNA
ctttgtcaaatagtaacttcaaatttaggctaattgccggacattttaagctatagtttcttgatcagtaaaatggagataaggatcgtgcttacctcacagtgctgtca

SEQ ID NO: 52966 - DNA, 110 bp, synthetic construct
  source 1..110: mol_type = other DNA
gtttcttgatcagtaaaatggagataaggatcgtgcttacctcacagtgctgtcatgagcatttcatgggcagagtaggtaacaactattgctgacacaggagaagcgct

SEQ ID NO: 52967 - DNA, 110 bp, synthetic construct
  source 1..110: mol_type = other DNA
gaattgtggatttttcagtctgtttagctttttacttgttaggatagactggcgactttaagctcctaatatgtagaaccagaaaccctgtgtttttctttcagatattc

SEQ ID NO: 52968 - DNA, 110 bp, synthetic construct
  source 1..110: mol_type = other DNA
aaaatcttagcatttgcaataatacagatggaccttgaggacattatgctgaggaaaaataagttagacagagaaggacaaatactgtgtgaccttacttttatgtggac

SEQ ID NO: 52969 - DNA, 110 bp, synthetic construct
  source 1..110: mol_type = other DNA
agaattgccttaagttttgttttgtgtcgaaaagcaatcttagtaagccacggtaagaacagtgtgaaagaattattcaacagaccatgttaaagcaggtctgtgcttag

SEQ ID NO: 52970 - DNA, 110 bp, synthetic construct; identical to SEQ ID NO: 52969
  source 1..110: mol_type = other DNA

SEQ ID NO: 52971 - DNA, 110 bp, synthetic construct
  source 1..110: mol_type = other DNA
ggcatcttttaataaatatttagaaaatggtaaacttattaatgatgaccattctggtacctcattgtagttttgatttgcataaatgctagagatggtgtagagaaacg

SEQ ID NO: 52972 - DNA, 110 bp, synthetic construct
  source 1..110: mol_type = other DNA
gcagagaaaggattgcctaaggtcttgtgctgcttcatttccatggagcttcataggaggtaactgcctctttgcaagggcaccttgaaagggattagttttgaacaaga

SEQ ID NO: 52973 - DNA, 110 bp, synthetic construct
  source 1..110: mol_type = other DNA
aaatgtttttgtaaatagttgctatagctaaattggaattataacaagctcttctagggatcagaatagtattgtataaaaagcatttgactctaaaaggccacctgtga

SEQ ID NO: 52974 - DNA, 110 bp, synthetic construct
  source 1..110: mol_type = other DNA
ttactatgtgaggactcctgtctttcagaggaagtctccagtcaactaatgatttttaaaggcagtgtctctttacagcctccagtgtgaatgcagacttggaggaaagg

SEQ ID NO: 52975 - DNA, 110 bp, synthetic construct
  source 1..110: mol_type = other DNA
ttaaaggcagtgtctctttacagcctccagtgtgaatgcagacttggaggaaagggattctagattgattggaattgatgggcacctagctgtgtgattttaagattgcc

SEQ ID NO: 52976 - DNA, 110 bp, synthetic construct
  source 1..110: mol_type = other DNA
caccaaaaccttggtgtatttggttctttctcattctaaccagaaaacacctttttcctttccccttaacttataccagtaatgcgtggatttacgtatattctctgctg

SEQ ID NO: 52977 - DNA, 110 bp, synthetic construct
  source 1..110: mol_type = other DNA
tcctttccccttaacttataccagtaatgcgtggatttacgtatattctctgctgtagaagctgtgaaatcttgggtgcgttgatgtatgtgtgtgttgaatatttacat

SEQ ID NO: 52978 - DNA, 110 bp, synthetic construct
  source 1..110: mol_type = other DNA
atcacaaactctgtacctagtgtgatataaattgacctgccacctctctgtgtgagtcactttttctctgcttcagggagtccaaatatgaatgagtcaaaatccctgac

SEQ ID NO: 52979 - DNA, 110 bp, synthetic construct
  source 1..110: mol_type = other DNA
gtcactttttctctgcttcagggagtccaaatatgaatgagtcaaaatccctgacttctggaagcttagagtctagagttcccatcatggttcagtggttaatggatcca

SEQ ID NO: 52980 - DNA, 110 bp, synthetic construct
  source 1..110: mol_type = other DNA
ttatgaaccaattatactataattaaaacattaaaaatcatttaaaaatgtttctgggaaacagacctgcaaatacagggttttgcaactgccttggtcttgtccttgga

SEQ ID NO: 52981 - DNA, 110 bp, synthetic construct
  source 1..110: mol_type = other DNA
gggaaacagacctgcaaatacagggttttgcaactgccttggtcttgtccttggaagtcattacagtgatgagctccttgcaaatgtgaaataagatgctatgaatccca

SEQ ID NO: 52982 - DNA, 110 bp, synthetic construct
  source 1..110: mol_type = other DNA
ctgaatccaagtgattcctttatttttggagtttatgcagttaatgggatgtgtagaggacaaggctgtgctttttatttaaaacatatttatattttctaatctctttt

SEQ ID NO: 52983 - DNA, 110 bp, synthetic construct
  source 1..110: mol_type = other DNA
gacattaaaggtcacatattattttgattccttttgtataaaatatccagaatctgttaatccctagagacagaaagaagattagttatggccagggactaaaaacgagg

SEQ ID NO: 52984 - DNA, 110 bp, synthetic construct
  source 1..110: mol_type = other DNA
accaagaaaataaaacccaattaaatagagagctaacatattttcagagaatactgtatagaactatgcagacgatattgaatatgtgtatactctgaaaatgtggaagc

SEQ ID NO: 52985 - DNA, 110 bp, synthetic construct
  source 1..110: mol_type = other DNA
tagagagctaacatattttcagagaatactgtatagaactatgcagacgatattgaatatgtgtatactctgaaaatgtggaagcacaatgtaattgcctttacaaactt

SEQ ID NO: 52986 - DNA, 110 bp, synthetic construct
  source 1..110: mol_type = other DNA
cacagtagccaagaggtggaagcaacctaaatgtccattgataaaggaatgtccactggataaaggaaatgagtcatatacacacagtggaatactattcagccttaaaa

SEQ ID NO: 52987 - DNA, 110 bp, synthetic construct
  source 1..110: mol_type = other DNA
ggaatgtccactggataaaggaaatgagtcatatacacacagtggaatactattcagccttaaaaagaaggaaatcctatcatatgttacaacatagttgaactttgagg

SEQ ID NO: 52988 - DNA, 110 bp, synthetic construct
  source 1..110: mol_type = other DNA
gaaaagaggtctgtgctgcagaatctaaacagggacgagctaatgcaatgtaaaaagcaaaattctatgtgattgacgtttgtagatcattgttcttgccatgttgccat

SEQ ID NO: 52989 - DNA, 110 bp, synthetic construct
  source 1..110: mol_type = other DNA
tttaagtatgtgcaaatgtgtaaatcttaaaattcactttggacatccttttgagggttttcataagtggttttctccaaaccctcagaaattatttaggatgatcattt

SEQ ID NO: 52990 - DNA, 110 bp, synthetic construct
  source 1..110: mol_type = other DNA
ggttttcataagtggttttctccaaaccctcagaaattatttaggatgatcattttagaccatttacttctgctgaaaactcggtagagatagaaattattattactcac

SEQ ID NO: 52991 - DNA, 110 bp, synthetic construct
  source 1..110: mol_type = other DNA
taatggtctgaaagtactgcagaagccaggacgcttcatcacagagctcaacacacatctggcccacaagtcagagaagctaaagaaggatccttaggaagatgtggtag

SEQ ID NO: 52992 - DNA, 110 bp, synthetic construct
  source 1..110: mol_type = other DNA
attcagcatatgactgaacttctacttcacagagtaagctgttatttagaaaacacctcttctcagattcttaccaccatctgtactgacatctatcctttaccttctta

SEQ ID NO: 52993 - DNA, 110 bp, synthetic construct
  source 1..110: mol_type = other DNA
ttttaattttgctgtcttgttggttacatagcacttaattttctgccagattcgtgtctgcttgataaagttttattaagtttaaattcatgtattcttcgtaaaaccac

SEQ ID NO: 52994 - DNA, 110 bp, synthetic construct
  source 1..110: mol_type = other DNA
ttcaaaaacaaaattgatactataaaactcctttaggaaaatgtaagtgaaacaagctctcacataaatcacggcaatgtaagaccagatactgtaaaattcctatagga

SEQ ID NO: 52995 - DNA, 110 bp, synthetic construct
  source 1..110: mol_type = other DNA
gctctcacataaatcacggcaatgtaagaccagatactgtaaaattcctataggaaagcataggcagaacatttgacataaatggcaacaacttttttagatgtgtctcc

SEQ ID NO: 52996 - DNA, 110 bp, synthetic construct; identical to SEQ ID NO: 52994
  source 1..110: mol_type = other DNA

SEQ ID NO: 52997 - DNA, 110 bp, synthetic construct
  source 1..110: mol_type = other DNA
agtgaaacaagctctcacataaatcacggcaatgtaagaccagatactgtaaaattcctataggaaagcataggcagaacatttgacataaatggcaacaacttttttag

SEQ ID NO: 52998 - DNA, 110 bp, synthetic construct
  source 1..110: mol_type = other DNA
tgaattcaggctgttcctgtagatgtacagtagaaaatattgggtatcgtattaattttagaccttgacttccctctattctcaaccagagaaatagttatttagctgtt

SEQ ID NO: 52999 - DNA, 110 bp, synthetic construct
  source 1..110: mol_type = other DNA
ttttagaccttgacttccctctattctcaaccagagaaatagttatttagctgttctgtaagttcatgtagtgaaagcagctctcagataattttctcatctgttaaaca

SEQ ID NO: 53000 - DNA, 110 bp, synthetic construct
  source 1..110: mol_type = other DNA
tattaacctcttgcattagtatggaacttttgctacaattaatgaaccaatattgatatattgttactgactgaaagctatgctgtcatttttgttttgtagtagacaag

SEQ ID NO: 53001 - DNA, 110 bp, synthetic construct
  source 1..110: mol_type = other DNA
agacctaccgccttctgctttgtccttgccagccttgcttctttggtcaaatttgggaatacttcttttagctttctttcatagcttgaacaaccttgaacctaattcta

SEQ ID NO: 53002 - DNA, 110 bp, synthetic construct
  source 1..110: mol_type = other DNA
ctaatgaattttggaaagttcttcccaaatagggattctagtcactgagcttcagggactccgtttttccctttgccatcagcaagcacatcagtacaccatcattgtac

SEQ ID NO: 53003 - DNA, 110 bp, synthetic construct
  source 1..110: mol_type = other DNA
tgtggggctgagtccttaaccttagggatctgatgctatctctgaggtagatagtgtcagaattgtgttaaattgtaggagacgcagctggtgttgcagagaattgcttg

SEQ ID NO: 53004 - DNA, 110 bp, synthetic construct
  source 1..110: mol_type = other DNA
gtcagaattgtgttaaattgtaggagacgcagctggtgttgcagagaattgcttggtgtggggaaaaacctccacacatttggtgattggaagtggagtgatgtttccga

SEQ ID NO: 53005 - DNA, 110 bp, synthetic construct
  source 1..110: mol_type = other DNA
atttcagtcttcgaactcacctttaggtatttggcttgccatgggtgtgtgcagggaggtgacaatcccttccttattggggctgaactgtatcccgggccaaccctgac

SEQ ID NO: 53006 - DNA, 110 bp, synthetic construct
  source 1..110: mol_type = other DNA
gttcaagaagatgaggctttgcagtaacttgattttaatgagtcaggctctgaaagagtcaggttgcccacgtggtacctccctgcactgactctggctcagctgagggg

SEQ ID NO: 53007 - DNA, 110 bp, synthetic construct
  source 1..110: mol_type = other DNA
gagtcaggttgcccacgtggtacctccctgcactgactctggctcagctgagggggcatgtcctggaagtgcaggagggctggatggtgggaagtagagcatgcagggac

SEQ ID NO: 53008 - DNA, 110 bp, synthetic construct
  source 1..110: mol_type = other DNA
ttgatttagaggaaagagttctaatgctcattatttctctccctctttcacaaaaatttgagtgtcctccatgtattaagctttgggttttaaatctttctatgaaataa

SEQ ID NO: 53009 - DNA, 110 bp, synthetic construct
  source 1..110: mol_type = other DNA
atttgagtgtcctccatgtattaagctttgggttttaaatctttctatgaaataaacaatcaaaagcaaaatgcttgggattcctagttcagagttcaagttctccagct

SEQ ID NO: 53010 - DNA, 110 bp, synthetic construct
  source 1..110: mol_type = other DNA
acgtgcaatttcactcctcgaaggggctcttcctcttgggttctcggcatctccgtgaatagcaccagctcacactcactctccaagccagaaacacaggaatcttccct

SEQ ID NO: 53011 - DNA, 110 bp, synthetic construct
  source 1..110: mol_type = other DNA
ctttgatgttttatgtaggcggggaggagaggggaatgcattctgctgcaaattctctaagtcacaaatggcatattcacattttaatccccagggtatggcacatagta

SEQ ID NO: 53012 - DNA, 110 bp, synthetic construct
  source 1..110: mol_type = other DNA
gactgagaaaatggagctttgtacccctggaagcaatactgttgaaaattctgcagattttaattagctcccatgaaccagcggcagagcagcataaatgaaccagggta

SEQ ID NO: 53013 - DNA, 110 bp, synthetic construct
  source 1..110: mol_type = other DNA
gattttaattagctcccatgaaccagcggcagagcagcataaatgaaccagggtagagaggttaaaaacaatacattttctagaattcggtaggctcgccatgtatctgt

SEQ ID NO: 53014 - DNA, 110 bp, synthetic construct
  source 1..110: mol_type = other DNA
ctgaggccgtcccctgcctctatgcatgggcctctgtcctcccagtttaaaattcagactgaagcattaaaacctccaatgataaaaataaaaaattctaaagaaaggtc

SEQ ID NO: 53015 - DNA, 110 bp, synthetic construct
  source 1..110: mol_type = other DNA
agactgaagcattaaaacctccaatgataaaaataaaaaattctaaagaaaggtctccgaccattaagaaatcacctactttttgggcaatttgaccttcttgagctcct

SEQ ID NO: 53016 - DNA, 110 bp, synthetic construct
  source 1..110: mol_type = other DNA
gatgtgtacatttgcagtcctactaaggttttactagaatggttcttcatttgttacaaggacctcaaacagtgaaaatgcccaatttcaatatattgtatccatctaca

SEQ ID NO: 53017 - DNA, 110 bp, synthetic construct
  source 1..110: mol_type = other DNA
acaaggacctcaaacagtgaaaatgcccaatttcaatatattgtatccatctacatgggtatgttcataaatatgtctgtatatgtgtgtaggtatgtaggtgtgcatat

SEQ ID NO: 53018 - DNA, 110 bp, synthetic construct
  source 1..110: mol_type = other DNA
actccactgtaacaggagacctgggtgtgctgacttacctgtggcatgttcccgtagacctacatcaaaggcaagtttatctgtctgggatcttgatgtagtcaaacatg

SEQ ID NO: 53019 - DNA, 110 bp, synthetic construct
  source 1..110: mol_type = other DNA
taatttacctaggaaatcaggtagagagcaaaaaccacagtgctcatttttcagcttgaaaggtgatcagaggcggttctggaaacttcctcctgaaaatcaaaacgttc

SEQ ID NO: 53020 - DNA, 110 bp, synthetic construct
  source 1..110: mol_type = other DNA
ctaagacctttaaaacaataaaaatcttccttgtttctttgctctgccatttgttttaatgtgactttgtcctgccagcactagccccacacgcccctgacagatgtctg

SEQ ID NO: 53021 - DNA, 110 bp, synthetic construct
  source 1..110: mol_type = other DNA
ttaatgtgactttgtcctgccagcactagccccacacgcccctgacagatgtctgtactcatggatcaatgacctaatgggagggaggcagggtgatggagaggagaggg

SEQ ID NO: 53022 - DNA, 110 bp, synthetic construct
  source 1..110: mol_type = other DNA
tgtaagactagagtaattgagaccaaagagctgatttctatggatttttctaccgtcactgcatatgagccacacactgaaaaactgtgtgtggaattcaatgtggaatt

SEQ ID NO: 53023 - DNA, 110 bp, synthetic construct
  source 1..110: mol_type = other DNA
actggagaccctgctagatctgacaccttcctacctctaactccacgtcctgcggtcttccccttgctcattccacaccagcttctcagccttaaggcctctaccctatc

SEQ ID NO: 53024 - DNA, 110 bp, synthetic construct
  source 1..110: mol_type = other DNA
ccttaagagcgccccttctcctcttcaaagcccagtcagtacgttttacaaaatccctccattgtccattgctgccaggcagagtaacgtccctgcaccccaggaagctt

SEQ ID NO: 53025 - DNA, 110 bp, synthetic construct
  source 1..110: mol_type = other DNA
tcagggaactcattgctcataaattgtttttattattctgttttatgcacatttccattcctagctctgagtcttgcacattgatgtcatgtcttacaggtttatttaaa

SEQ ID NO: 53026 - DNA, 110 bp, synthetic construct
  source 1..110: mol_type = other DNA
cattcctagctctgagtcttgcacattgatgtcatgtcttacaggtttatttaaaggctgattgataaatttacatttaaataggagcattcatgtcttaacccaaagac

SEQ ID NO: 53027 - DNA, 110 bp, synthetic construct
  source 1..110: mol_type = other DNA
tccatccaagccggcttcctcgcctccatccgcagctctgcctcattgcgtctgagttcaccccagtacagctgttgaattgcgctaatagcccctggatcttcattttg

SEQ ID NO: 53028 - DNA, 110 bp, synthetic construct
  source 1..110: mol_type = other DNA
aaatggagaggggtctctcacatctcactgcagaaatagaaatatcaacatttcagtccacatcacatgctgatcttccatctggtaatctgttctctccacttacatga

SEQ ID NO: 53029 - DNA, 110 bp, synthetic construct
  source 1..110: mol_type = other DNA
tgtccttaaactgtggaatgattatggtttcacccccaccattactccccattcgaattctgaatgaaatcaatacaagtaagaaaggtcaataaaatctggatttttcc

SEQ ID NO: 53030 - DNA, 110 bp, synthetic construct
  source 1..110: mol_type = other DNA
cactttattctgtataactgcaatattttgcctgtacgtgtctcctaccccggcatttcagacattgatttcatttcagccattcccctttgtgaggctgctaagtatag

SEQ ID NO: 53031 - DNA, 110 bp, synthetic construct
  source 1..110: mol_type = other DNA
tttcagacattgatttcatttcagccattcccctttgtgaggctgctaagtataggctagactctgatcctatgggaaaatctctctgtggtccagaatccttttaggga

SEQ ID NO: 53032 - DNA, 110 bp, synthetic construct
  source 1..110: mol_type = other DNA
tgtgtatcttcacatgagacatgttccaacagggctcagccttgggcagctatttgtgttgagatcatcattctccttatcttggtgtttatggttggaaaatgagtctt

SEQ ID NO: 53033 - DNA, 110 bp, synthetic construct
  source 1..110: mol_type = other DNA
gtgttgagatcatcattctccttatcttggtgtttatggttggaaaatgagtcttaattaagttctgctgcaagtgtactttgagtactttgcattagttactgtgacca

SEQ ID NO: 53034 - DNA, 110 bp, synthetic construct
  source 1..110: mol_type = other DNA
agtcactgtaaagaggcacaagcaagcatggcctgccttccacaagcaattggaagtggtgagagagagcttcaggtagagacagggccattgtttttgggaactgcctt

SEQ ID NO: 53035 - DNA, 110 bp, synthetic construct
  source 1..110: mol_type = other DNA
gtggtgagagagagcttcaggtagagacagggccattgtttttgggaactgccttcagagccagtttctggaaaatcaaccttgcttccttaaatccattacaagttgtt

SEQ ID NO: 53036 - DNA, 110 bp, synthetic construct
  source 1..110: mol_type = other DNA
taccagtttggttcttaacccattgagctatgatgggaactcccacaccttacctccttaattcaaaatgaatcataagccaaaatataaaacacatgactataaacctc

SEQ ID NO: 53037 - DNA, 110 bp, synthetic construct
  source 1..110: mol_type = other DNA
acccaaaaggatttcctgacctcaatatcatagtccacgaaaatttccagttgccttgatgacgtgttctccacgctcatgcctcctttcgcttcggtttcattttcttt

SEQ ID NO: 53038 - DNA, 110 bp, synthetic construct
  source 1..110: mol_type = other DNA
aggtcctgaaatgctctattgagaatgactcagcagctgagtcattgggatccttgggcacagctgccagagggtctgcgaccgggtggcagagccctgagctgtcctga

SEQ ID NO: 53039 - DNA, 110 bp, synthetic construct
  source 1..110: mol_type = other DNA
gggcacagctgccagagggtctgcgaccgggtggcagagccctgagctgtcctgaatttgccatacaacacatcctatttcaggttagcagctctgctctctatggctgc

SEQ ID NO: 53040 - DNA, 110 bp, synthetic construct
  source 1..110: mol_type = other DNA
aagtcaaaatcctcccataactaatcacggaggatgccccccttgtagttgatccagtttccccaacagcttcctccaaacaggatgcactacttttttccactatgaag

SEQ ID NO: 53041 - DNA, 110 bp, synthetic construct
  source 1..110: mol_type = other DNA
tctaccagttgtgcgcagaacagatttcaaaatgccggaagtgaacctgatgcagccaagtgtcagagttgaggatgtctgcctttgcctgcatatgaaacaactttgat

SEQ ID NO: 53042 - DNA, 110 bp, synthetic construct
  source 1..110: mol_type = other DNA
gagagagatggctttcccgtcccattgcacagtgcttgggacactgactcaaccacaggcacggggaccaaaactgtgacaaagttgcaggaagctgagttgaaaagtgt

SEQ ID NO: 53043 - DNA, 110 bp, synthetic construct
  source 1..110: mol_type = other DNA
caggcacggggaccaaaactgtgacaaagttgcaggaagctgagttgaaaagtgttcttctcctgtacttttttgagttttcaagcaatgagtcctcagtcttgggttct

SEQ ID NO: 53044 - DNA, 110 bp, synthetic construct
  source 1..110: mol_type = other DNA
tctcagaaaagagaggatgggcaatcctaatgcatttacttactgtttactacttcttccctgggcccttcattaccaagagctgggcaggaatccaccttaaaacagct

SEQ ID NO: 53045 - DNA, 110 bp, synthetic construct
  source 1..110: mol_type = other DNA
ggatatgttgatggaggtcctcaggcacaggctcgttgctctcccactgctgagttgcctccagctcttatatcaatactggcatgcatatgaagttttttattttattt

SEQ ID NO: 53046 - DNA, 110 bp, synthetic construct
  source 1..110: mol_type = other DNA
tcagagactttaaggaaaatatgcctatggttggccggcagtggaggtgggcacctgacctgatcctcctgatcaccacccctatatttttatacttctcgacatagctc

SEQ ID NO: 53047 - DNA, 110 bp, synthetic construct
  source 1..110: mol_type = other DNA
tgacctgatcctcctgatcaccacccctatatttttatacttctcgacatagctcctttcttattttcttttgagtaattggccctcattattgtgccaactccagtaca

SEQ ID NO: 53048 - DNA, 110 bp, synthetic construct
  source 1..110: mol_type = other DNA
cactcaggtgtgtgcaaacccaggtgtggaggcggctgtgggtttatggcctacgccttcatttcctctctttcagatcacattagcttggagaggagaggcatggcctg

SEQ ID NO: 53049 - DNA, 110 bp, synthetic construct
  source 1..110: mol_type = other DNA
gggtgtacatctgtggtggcttcttatggatcaattcagcagagctggaaatatgattcccagaattaccttcccactgtgatttaagattggccacatagaaatttgtg

SEQ ID NO: 53050 - DNA, 110 bp, synthetic construct
  source 1..110: mol_type = other DNA
attattctgacatagccatgaccttctaccaagttgtgcaaatttctgctcacaattaagtgctcttgtttaatttactttcaaagcacatcattttttctctctgtggt

SEQ ID NO: 53051 - DNA, 110 bp, synthetic construct
  source 1..110: mol_type = other DNA
caggctggcatggtagagacctatcctgcagaaacttcacttggctgcatccttacaatcctctaggaagctctcataaatggctgggaaacactgaaattggaggagaa

SEQ ID NO: 53052 - DNA, 110 bp, synthetic construct
  source 1..110: mol_type = other DNA
caattcttgaagctaaaataagctcacctaatacataaagtgtctttactttctctcattcattcatattatgattcatgagatgtgggacctgtgatgagaaggatacc

SEQ ID NO: 53053 - DNA, 110 bp, synthetic construct
  source 1..110: mol_type = other DNA
tttaaaagtcacttccacaagactatcccaatcattgctttttttttctccgaatcttattgccgacagtggtacctgctcaagccctttaatgtaaaaatacacacaga

SEQ ID NO: 53054 - DNA, 110 bp, synthetic construct
  source 1..110: mol_type = other DNA
tggggtttgagaagccctggaccaatcctaaagattctcaaagctgcttactccagggagatatgaaatgtcaaaatctatgtcatctcaattgtcataacacatcttgc

SEQ ID NO: 53055 - DNA, 110 bp, synthetic construct
  source 1..110: mol_type = other DNA
aagtcatgtgtatactctgtttttgcacaaggggtgggagctaacaactctacatttcagcacagaagagcaggtgacaatcaaaggaagttagcaggaatggtaacaaa

SEQ ID NO: 53056 - DNA, 110 bp, synthetic construct
  source 1..110: mol_type = other DNA
attacagagactctgtccttcccattgcaccacagcaggaactcccctgtggggttttcttaaccaaagtcttcatttctctcccagtaattgctccctctagcctcttc

SEQ ID NO: 53057 - DNA, 110 bp, synthetic construct
  source 1..110: mol_type = other DNA
ttgttaaaatattgttttaatcagcttgcatgcaaaagtcgaatgtgcctgagaaaatagtaagaaaaagtgttcagactaagtaaaattatttatacacacaccctccc

SEQ ID NO: 53058 - DNA, 110 bp, synthetic construct
  source 1..110: mol_type = other DNA
gaggacacactttttgctgggatctattgaggatagctctaacctccctgaccacccagatgcactgaaataacaaggttactccatggtgaacagttgccctacaaaga

SEQ ID NO: 53059 - DNA, 110 bp, synthetic construct
  source 1..110: mol_type = other DNA
aagcaggctaggatagaaattttcttgggctccactgcccctacaatctctggcagctcatttctgaaactgcaataccaccatcactgatctcaacactcctgaaatca

SEQ ID NO: 53060 - DNA, 110 bp, synthetic construct
  source 1..110: mol_type = other DNA
gctcatttctgaaactgcaataccaccatcactgatctcaacactcctgaaatcaaattaaattatttctaaaatgcccctgtatctttgcatcactccttcaacacaca

SEQ ID NO: 53061 - DNA, 110 bp, synthetic construct
  source 1..110: mol_type = other DNA
caatatttcaattgtgtgtctctccctgacatgatttttcctgtccatgtgaaacctaggtaaaggacaacgagctttgaatagaactgtcataaagtagtctaccaatt

SEQ ID NO: 53062 - DNA, 110 bp, synthetic construct
  source 1..110: mol_type = other DNA
gataattatccaaatccctggactgggaaaaaagtactagtgggcgccaagacatatgaagcaactctcatcaagggcatctgagcttttgcctgccgatgttctaccct

SEQ ID NO: 53063 - DNA, 110 bp, synthetic construct
  source 1..110: mol_type = other DNA
agtttcaacatgttcaaagtgtacattttccctgcctaaggttcacagttgtttatgtaacttttctgaagtgtgtccctgaagtctaaccttccgagagctggggctct

SEQ ID NO: 53064 - DNA, 110 bp, synthetic construct
  source 1..110: mol_type = other DNA
tgtaacttttctgaagtgtgtccctgaagtctaaccttccgagagctggggctctggaatgtgtaaggattataaagtatcacaaactgcattagctgctgaaatgtgct

SEQ ID NO: 53065 - DNA, 110 bp, synthetic construct
  source 1..110: mol_type = other DNA
tgcatgccttattacatacattatacacgcagtatacatgtatcattaaaaaatagcttttttcaacacacccatttagagaattagaggctccttcaagggccattcat

SEQ ID NO: 53066 - DNA, 110 bp, synthetic construct
  source 1..110: mol_type = other DNA
atttggtccaggaattgaggaccaatgtgctctatagctgtttaccatctgacttcagactaattgactggtaggctgtcccaagaggctatgaaataatttcacatttt

SEQ ID NO: 53067 - DNA, 110 bp, synthetic construct
  source 1..110: mol_type = other DNA
ggccaggaattgactctgcacagcctcggatcctttaaactgctgggccacagtgagaactccttgactttttttcaagcgtcattgatttacaatgtgttactttctag

SEQ ID NO: 53068 - DNA, 110 bp, synthetic construct
  source 1..110: mol_type = other DNA
ccttctccccaagagcaattcccaactttctcctcagctttttaactcagctgcctctcactcacttcacagaaccttagattcaaccaccactctgaggggcctcacac

SEQ ID NO: 53069 - DNA, 110 bp, synthetic construct
  source 1..110: mol_type = other DNA
catgtactgtttaatcatggagcaaggtgggaagacagctgagagcaaactgtgtatgttgggtatacgaagtgcactggtttcccacttccttctcctcaccctgggtc

SEQ ID NO: 53070 - DNA, 110 bp, synthetic construct
  source 1..110: mol_type = other DNA
atggagatgataataatacctgtctcagagttccctcacggctccacaggttagagatccagctctgttactgccatggctcaggttgctgctgtgacgagggttccatc

SEQ ID NO: 53071 - DNA, 110 bp, synthetic construct
  source 1..110: mol_type = other DNA
gatccagctctgttactgccatggctcaggttgctgctgtgacgagggttccatctggcccagaaactactacatgccgaaggcatgacctaaaacaaaaacaaaagcct

SEQ ID NO: 53072 - DNA, 110 bp, synthetic construct
  source 1..110: mol_type = other DNA
ggcagtggatatacaactctgatcaatagctaatccctagggaatatgtgcagcctacagcccaatctgatttccctatctccgaatctgcccacccaccacaggtgaaa

SEQ ID NO: 53073 - DNA, 110 bp, synthetic construct
  source 1..110: mol_type = other DNA
gacgcaaacagaaccacaaccaggcacagagagcaaagctgtagaccctgggtatgtttgcttaactccagagcccctccaggctggcacattaaagaaagcaaggagca

SEQ ID NO: 53074 - DNA, 110 bp, synthetic construct
  source 1..110: mol_type = other DNA
atttaaagtgaaggatttcccaaccatctcctacagatctggagctgataggcacaaactacagggctgccatgaagtcagaggtgttttactcagtgttttaggactca

SEQ ID NO: 53075 - DNA, 110 bp, synthetic construct
  source 1..110: mol_type = other DNA
ttctttctttacaaattgaggcgcgttatccaaactgtgatgacgctgtcaccaagtcaccagcttattacaaatatgatcaggggtgccaactgcttagaaactctcaa

SEQ ID NO: 53076 - DNA, 110 bp, synthetic construct
  source 1..110: mol_type = other DNA
gtcaccagcttattacaaatatgatcaggggtgccaactgcttagaaactctcaattgctttgcattagctttaaggtagcgtccaaaattcttactatggtctcaggag

SEQ ID NO: 53077 - DNA, 110 bp, synthetic construct
  source 1..110: mol_type = other DNA
tctgtgcccactgtgacttctcaggtggtcttaacagggtgtcttgctagttgcagcatttctgaggggagattcttataacctcacaatgccaggtcagaagtttcttt

SEQ ID NO: 53078 - DNA, 110 bp, synthetic construct
  source 1..110: mol_type = other DNA
gggcttatcaaagtttttgtcaagtagacagaggaatggaacctttgtgggcctcattggacaagatcacttctcaggtcctgttgagccctaatagtctataatattag

SEQ ID NO: 53079 - DNA, 110 bp, synthetic construct
  source 1..110: mol_type = other DNA
attggacaagatcacttctcaggtcctgttgagccctaatagtctataatattagaatctatgagccacacttgctttcacttctgggctcattccctgaggggtgggaa

SEQ ID NO: 53080 - DNA, 110 bp, synthetic construct
  source 1..110: mol_type = other DNA
ttaccagccctggacagcagcattagtttgtgagcttcctcctttctggtccttttacctgagcacagcccttcttcattcctgctacacagataccggaggcggccatt

SEQ ID NO: 53081 - DNA, 110 bp, synthetic construct
  source 1..110: mol_type = other DNA
gagaagagtgcagattcaagcaggccaagaacatggaagctgatgtgtagttatgatgggtggtggggagaagggttgcagtctgcactctgtgggggtggtccatcaga

SEQ ID NO: 53082 - DNA, 110 bp, synthetic construct
  source 1..110: mol_type = other DNA
cacttcactgtctggaggaaagctactctcccggtggagccaagaaatttagctaagggtctaaacattctgtatgtgcatacgtcataggacgaaatgttctgtaagtg

SEQ ID NO: 53083 - DNA, 110 bp, synthetic construct
  source 1..110: mol_type = other DNA
agggtctaaacattctgtatgtgcatacgtcataggacgaaatgttctgtaagtgaatgacctagacttctgccttgaggagatcatgtgggttgggttggaattgtctt

SEQ ID NO: 53084 - DNA, 110 bp, synthetic construct
  source 1..110: mol_type = other DNA
atgctgcttcagactcgaagaccatcctatgtggacagaccagctgaggagccttgggaaatcctgaaggagatccggagatgtgaaggaggggacctaggaccagaaat

SEQ ID NO: 53085 - DNA, 110 bp, synthetic construct
  source 1..110: mol_type = other DNA
tctttgcagctaaaatgctgcaaatgcttcaactccaaagctccattttggggcatgacctgtctcaccctaaatcatttggtagatagggaaactttcgaatgtgctta

SEQ ID NO: 53086 - DNA, 110 bp, synthetic construct
  source 1..110: mol_type = other DNA
caaaatctgtgagcactatgcaacatcagggtgttactggagctgcatcatgccagtttgaaacatgtgaacttaaatgagtaaatgaaaatgtacacatacacacacaa

SEQ ID NO: 53087 - DNA, 110 bp, synthetic construct
  source 1..110: mol_type = other DNA
aatctctttggagatgaattctggaatatgaatgtgtcttgatcaagccaatctttctctcacttaagtcagctcaagttccaatctttaattgaatgtctttgatagaa

SEQ ID NO: 53088 - DNA, 110 bp, synthetic construct
  source 1..110: mol_type = other DNA
tcagtgcccaggacttgtccatttaacaaagacgggttttcctaagatttcttcagaagctaggcgaattctgagcttgcgcttccaatggtaaatcaccctttttggtg

SEQ ID NO: 53089 - DNA, 110 bp, synthetic construct
  source 1..110: mol_type = other DNA
gaaatcaaagagtccatggtccctttgtttccatttgacatcatgtctggaacatcactgtgccttaaatattttttaaacataagattgttgatgatttcttgatatag

SEQ ID NO: 53090 - DNA, 110 bp, synthetic construct; identical to SEQ ID NO: 53089
  source 1..110: mol_type = other DNA

SEQ ID NO: 53091 - DNA, 110 bp, synthetic construct
  source 1..110: mol_type = other DNA
atttgatgcaaatatcaaattaaagagaacaatcttggacactttgtgacatacttaacatttttacgtttatcaaaataacacgttaagtaacacaatccagctgcctt

SEQ ID NO: 53092 - DNA, 110 bp, synthetic construct
  source 1..110: mol_type = other DNA
aaaacttggagaagcaccaatctggggtaaattactctattttttcggccctgagcaatggtttctcctatatcagctgaaccatcacagcctagatcactgtaatactc

SEQ ID NO: 53093 - DNA, 110 bp, synthetic construct
  source 1..110: mol_type = other DNA
cagggagaagtagttttaagttttattaacactaattattgtgattatgatgtttaagctaaggcacaatttgcttgtgacttgaggtctagcctagtcacttcacctac

SEQ ID NO: 53094 - DNA, 110 bp, synthetic construct
  source 1..110: mol_type = other DNA
aagctaaggcacaatttgcttgtgacttgaggtctagcctagtcacttcacctacacaaactggtatttgtgtttctgaatgatgtgcaaggcacagccctcacacagag

SEQ ID NO: 53095 - DNA, 110 bp, synthetic construct
  source 1..110: mol_type = other DNA
agccactgtgcatttttagcctcttgtgctattgtaatatcctttatgccatctcaaaactatttttaaaccatgtattattattaaaaaaaaaaggagtccaacatggg

SEQ ID NO: 53096 - DNA, 110 bp, synthetic construct; identical to SEQ ID NO: 53095
  source 1..110: mol_type = other DNA

SEQ ID NO: 53097 - DNA, 110 bp, synthetic construct
  source 1..110: mol_type = other DNA
ctgggatgcaggttcaatccctggcccagcacagcatgttaggaatccattgttgttgcagctgtgggtaggtggcaactgcagcttacatctgatccctggtgtgggaa

SEQ ID NO: 53098 - DNA, 110 bp, synthetic construct; identical to SEQ ID NO: 53097
  source 1..110: mol_type = other DNA

SEQ ID NO: 53099 - DNA, 110 bp, synthetic construct; identical to SEQ ID NO: 53097
  source 1..110: mol_type = other DNA

SEQ ID NO: 53100 - DNA, 110 bp, synthetic construct; identical to SEQ ID NO: 53097
  source 1..110: mol_type = other DNA

SEQ ID NO: 53101 - DNA, 110 bp, synthetic construct
  source 1..110: mol_type = other DNA
tttattaatttgccaaagttgcactcttcatgaatctgctcttcaaaatatcagtttttcagtgttataagaatcctctcagctctggaccatcatatgtttttctctct

SEQ ID NO: 53102 - DNA, 110 bp, synthetic construct
  source 1..110: mol_type = other DNA
agtggattattttttcccttttggggaagacgttgtttggcttcattatcctgccaagttctttggatcatgacttatagctcgttttcactaaagatgcaaaatgcaaa

SEQ ID NO: 53103 - DNA, 110 bp, synthetic construct
  source 1..110: mol_type = other DNA
aagttctttggatcatgacttatagctcgttttcactaaagatgcaaaatgcaaatagaatgtaagacagaagcagggcgatgttgcaaggagaggagctccctgccttc

SEQ ID NO: 53104 - DNA, 110 bp, synthetic construct
  source 1..110: mol_type = other DNA
cgacgtggataactctaagttctgtatttcattttcttctcctttaaaaataactctggactggacaaacaacctcagagcagggagaacattttgctgtgaaatcattc

SEQ ID NO: 53105 - DNA, 110 bp, synthetic construct
  source 1..110: mol_type = other DNA
gtggttacttctgctgcaaacttcaaaaaaattcaggagaaaattcatgtaactttaccacttttatccaaaaattctaatgtgtatgttcagctttatatgtgtttgtc

SEQ ID NO: 53106 - DNA, 110 bp, synthetic construct
  source 1..110: mol_type = other DNA
aggctctgtctaccagcgccagtgtcacagagacagagcttagggcaaataaaaaatgagtagattttattgcttggccagataaaggaggtcacaacagactaatgccc

SEQ ID NO: 53107 - DNA, 110 bp, synthetic construct
  source 1..110: mol_type = other DNA
gcgccagtgtcacagagacagagcttagggcaaataaaaaatgagtagattttattgcttggccagataaaggaggtcacaacagactaatgccctaaagactgtgccct

SEQ ID NO: 53108 - DNA, 110 bp, synthetic construct
  source 1..110: mol_type = other DNA
cttaaattataggtcttacacagattaaaagtccagctaatacaactggattgcgaatggagtttggtggtgaaatttgcgattgggaaattatatcaatagggaaagat

SEQ ID NO: 53109 - DNA, 110 bp, synthetic construct
  source 1..110: mol_type = other DNA
gttaattaatgagtaagtattattaagtcttgactcaacaccagtttgggctgttgatttaattctttctagtccatgctaattcagagaactctccttggtttaaaaaa

SEQ ID NO: 53110 - DNA, 110 bp, synthetic construct
  source 1..110: mol_type = other DNA
gatttaattctttctagtccatgctaattcagagaactctccttggtttaaaaaaaaaataaggcaattcagcatgagactaatctttcagagtagataatgtgaaatac

SEQ ID NO: 53111 - DNA, 110 bp, synthetic construct
  source 1..110: mol_type = other DNA
ttctcccagtggagttatgcagaccgtgctttttcccagaagctctgttgcaacgcatggatctttggcaaaatgacttaaaccttggtgtccagcttttcaccagcctt

SEQ ID NO: 53112 - DNA, 110 bp, synthetic construct
  source 1..110: mol_type = other DNA
ctttccattcattcagacaagcaccactattaaaaagctctcatgtataacaggctttactgaaggacaagaaatgacagaggactattttggtataatacagacccaga

SEQ ID NO: 53113 - DNA, 110 bp, synthetic construct
  source 1..110: mol_type = other DNA
ttgacacaggctagaagcagatgaccttagaaccctcaggacagaatgagcctgtatccctgaatcactataggaagacagctgctccctgcatgagattgtttcttgag

SEQ ID NO: 53114 - DNA, 110 bp, synthetic construct
  source 1..110: mol_type = other DNA
caggaggctctcaggaacaggagagaagaagaggagagaagtcatcagaactcatcaatgctccaggtaacaagtgatttcattagctcctactcaaaggtgacattaac

SEQ ID NO: 53115 - DNA, 110 bp, synthetic construct
  source 1..110: mol_type = other DNA
agtttaaagcggattttgaaaaaaatagagcttgaataagaacatgcagccctagatagttatacgatctcaagcaactgacttgatttctctaaagcaagatttcttca

SEQ ID NO: 53116 - DNA, 110 bp, synthetic construct; identical to SEQ ID NO: 53115
  source 1..110: mol_type = other DNA

SEQ ID NO: 53117 - DNA, 110 bp, synthetic construct
  source 1..110: mol_type = other DNA
ccctgccacatgccatctcctggtttccaggaagaaaacctaacactagtgccgcaagctactttctctttgtttccatatgttttcctaggggctctctcatcacaaca

SEQ ID NO: 53118 - DNA, 110 bp, synthetic construct
  source 1..110: mol_type = other DNA
gacgggaactcctccactatctttttaaaatattccttcaaatgctggacccgggtctctgatcttgagctccattgccattttcacaccattatgcttccaaaccctaa

SEQ ID NO: 53119 - DNA, 110 bp, synthetic construct
  source 1..110: mol_type = other DNA
atagtgtggtgttagaaggcccagaacaaagttttcctgattctggaacttgcgagggctcacatcctggaacggactctctgcctacacgaactaaagcacatactgcc

SEQ ID NO: 53120 - DNA, 110 bp, synthetic construct
  source 1..110: mol_type = other DNA
caatgaaacacagcacctctgtgtatgtgtgcatgtgcatgtacctacacccactttggcaaagcctttctctgagttggacgagcaccagcttccatatgtagctcagt

SEQ ID NO: 53121 - DNA, 110 bp, synthetic construct
  source 1..110: mol_type = other DNA
ttggcaaagcctttctctgagttggacgagcaccagcttccatatgtagctcagttcatatgtttaaaatatttccatgcttacgatttaatttgatctccaaagggcaa

SEQ ID NO: 53122 - DNA, 110 bp, synthetic construct
  source 1..110: mol_type = other DNA
ctcatggatacgagttggatttgtttccgctgcaccacaacaggaaccccctagtctacttttgttaagaaagtggtacattcgtgtttagcaaagttccaagctggctt

SEQ ID NO: 53123 - DNA, 110 bp, synthetic construct
  source 1..110: mol_type = other DNA
ctacttttgttaagaaagtggtacattcgtgtttagcaaagttccaagctggctttgatccactaaaatcaaatgtggggaacatgcactttttcaggatcatgttgacc

SEQ ID NO: 53124 - DNA, 110 bp, synthetic construct
  source 1..110: mol_type = other DNA
agaagaagaaaaattaataagaaccctgctttaaagaagcaaaaggataccaacccataaggatatcctttatcaggtcttttcctttgaggctgccatttgcatactca

SEQ ID NO: 53125 - DNA, 110 bp, synthetic construct
  source 1..110: mol_type = other DNA
cataaggatatcctttatcaggtcttttcctttgaggctgccatttgcatactcagtttcagatgtgagaaccaccttccaatgtgtgaggcaactcttggcagtaaaag

SEQ ID NO: 53126 - DNA, 110 bp, synthetic construct
  source 1..110: mol_type = other DNA
gcaaaggagactgaaatgccatagccagagaagaacaaatagtgtggtgtcaccttacgacaaacaaaactcaaaacagagaagacaaaagaaggatgtgttatggagga

SEQ ID NO: 53127 - DNA, 110 bp, synthetic construct
  source 1..110: mol_type = other DNA
cactacacaaacacacaccgacaggccacctcagctctgacactaggttcatcgcagattaggtctgcctttgtccagaacatcaaataaatgggataatatatttgtac

SEQ ID NO: 53128 - DNA, 110 bp, synthetic construct
  source 1..110: mol_type = other DNA
taaatctcaagtccaaaacctagagttcttgagtagaggagaatttgagacaatttctctaataaagggacatagaacaagaaaaatttttctctgcaggcagaacagac

SEQ ID NO: 53129 - DNA, 110 bp, synthetic construct
  source 1..110: mol_type = other DNA
tctctaataaagggacatagaacaagaaaaatttttctctgcaggcagaacagacaatatgaaaaactagggaagctttcccagaagtgccttacctttggtggttgtcc

SEQ ID NO: 53130 - DNA, 110 bp, synthetic construct
  source 1..110: mol_type = other DNA
tactggggaggaaggcacaccccaagagtcacagtggagatacacttatctggagcagaagctgctagagctgtgaactggtaggaaaactgaaagggaatgtggatgaa

SEQ ID NO: 53131 - DNA, 110 bp, synthetic construct
  source 1..110: mol_type = other DNA
cagaagctgctagagctgtgaactggtaggaaaactgaaagggaatgtggatgaatgtctggagacagtgtggactagtgcaagggaactccttggggctgcaggcttgg

SEQ ID NO: 53132 - DNA, 110 bp, synthetic construct
  source 1..110: mol_type = other DNA
cttctgggtctttattgtgaaagcagttcaataaatgtcaaatgttattaaccgtccaagtgagaggtgggaaaagcaaagggcttgggaagactgaagaatggaataaa

SEQ ID NO: 53133 - DNA, 110 bp, synthetic construct
  source 1..110: mol_type = other DNA
gataaagcctattgccctctcctgctagcttctttccctggctgcagcattcaatctatttgcttggagcttcttttcttgttatctaaggctactccccacccccacct

SEQ ID NO: 53134 - DNA, 110 bp, synthetic construct
  source 1..110: mol_type = other DNA
tggaaaagaaacttaagaaattcttcagcttaatttttgctgttttaagccacttagacacgtcaagagctaaggaaaagggagtccgttagttcctggagtgggtatca

SEQ ID NO: 53135 - DNA, 110 bp, synthetic construct
  source 1..110: mol_type = other DNA
agacacgtcaagagctaaggaaaagggagtccgttagttcctggagtgggtatcagtcggttccccaacattcagccctccttttctccactgtgtggcagacggatggt

SEQ ID NO: 53136 - DNA, 110 bp, synthetic construct
  source 1..110: mol_type = other DNA
atgtaaagactttggatgcctcctctgctgctctttcattctgggtgtcaatagaggccctaggccataggtaaaagtctctgctctaaagaaacaaatcgaaaaaatta

SEQ ID NO: 53137 - DNA, 110 bp, synthetic construct
  source 1..110: mol_type = other DNA
ggccctaggccataggtaaaagtctctgctctaaagaaacaaatcgaaaaaattacaaagactacatttttcatgtagaggtcaatgaattcttgtctcatcttttccaa

SEQ ID NO: 53138 - DNA, 110 bp, synthetic construct; identical to SEQ ID NO: 53136
  source 1..110: mol_type = other DNA

SEQ ID NO: 53139 - DNA, 110 bp, synthetic construct; identical to SEQ ID NO: 53137
  source 1..110: mol_type = other DNA

SEQ ID NO: 53140 - DNA, 110 bp, synthetic construct
  source 1..110: mol_type = other DNA
tgtctttctaaattttagataaaccaacaaagaagcatagagaagctgccaagtgccaggcactctgcaaggtaagggctttgctcagtcttgcaggaagcaactccagc

SEQ ID NO: 53141 - DNA, 110 bp, synthetic construct
  source 1..110: mol_type = other DNA
gcgctgcacattgtaaaaaaaaacctaacaacatgatttaatcctttagctgaaggattatgttcataaaccacgtaatagcacattaacttattttagccatttgagta

SEQ ID NO: 53142 - DNA, 110 bp, synthetic construct
  source 1..110: mol_type = other DNA
ttagctgaaggattatgttcataaaccacgtaatagcacattaacttattttagccatttgagtactttgaaagggaaatttcattcatttgaacaatcatatgccaatc

SEQ ID NO: 53143 - DNA, 110 bp, synthetic construct
  source 1..110: mol_type = other DNA
ttccagggccaggttgttcccactttctttaaggccacttctcagaattgtgtaagatgcagcagcttacgtcatggcaacagtctggtcaccatgcttcttccacctag

SEQ ID NO: 53144 - DNA, 110 bp, synthetic construct
  source 1..110: mol_type = other DNA
ggggagaaaaatgtgtgtcaaatgagtgtgtcttacaacatcaaattcggaaggcatggccagaaggtgtactgggagctgtaggacagaaaaactaaattcaagataag

SEQ ID NO: 53145 - DNA, 110 bp, synthetic construct
  source 1..110: mol_type = other DNA
gttatttcatgcaactggtaacagcttgtgtacctaactcttttcttcatcaatagactgctggttaaaaaaatataacccccaaaagtgccttgtacttgccctccagg

SEQ ID NO: 53146 - DNA, 110 bp, synthetic construct
  source 1..110: mol_type = other DNA
cccttccccctaactgcctcattcccaccggtttgcatcctgattggctgagaagagctcagaaagagcagagacagagttatagcagttgcttcctcaggggttgttgt

SEQ ID NO: 53147 - DNA, 110 bp, synthetic construct
  source 1..110: mol_type = other DNA
agctcagaaagagcagagacagagttatagcagttgcttcctcaggggttgttgtggaaatccaatcagaggctgagtatcagaggacctggcccagggtatttatgtaa

SEQ ID NO: 53148 - DNA, 110 bp, synthetic construct
  source 1..110: mol_type = other DNA
actcattgtttcttcagctaagaaaaaatgaagttagtggcctggctccatgtgcagctgtggactctttcctgaccatagctcattggtttcagcatgcttggacctgg

SEQ ID NO: 53149 - DNA, 110 bp, synthetic construct
  source 1..110: mol_type = other DNA
agctgtggactctttcctgaccatagctcattggtttcagcatgcttggacctggctttgcctttccatgtaagagaggagagtatcaagagaaaagctgttgggcaggt

SEQ ID NO: 53150 - DNA, 110 bp, synthetic construct
  source 1..110: mol_type = other DNA
aacctgactagtatccatgaggatatacaggtacgatccctggccttcctccagaggttaagaatccggtgttgccgcgacctgcagtgtaggtcacagatgcagctcag

SEQ ID NO: 53151 - DNA, 110 bp, synthetic construct; identical to SEQ ID NO: 53150
  source 1..110: mol_type = other DNA

SEQ ID NO: 53152 - DNA, 110 bp, synthetic construct
  source 1..110: mol_type = other DNA
aatttttctctatctagttaaaggcacgtttcagggaggtaggagatggtgcaagctctctttcatctcccacaccatcctgcatgtatcccccagcaacaggagcttgg

SEQ ID NO: 53153 - DNA, 110 bp, synthetic construct
  source 1..110: mol_type = other DNA
ctttgagccctaagcctggcctgccccacacctcctccaaggcccgccatagttagagttctggagcaggagctgcttcagggcagttacaaacagtggcagctgcagct

SEQ ID NO: 53154 - DNA, 110 bp, synthetic construct
  source 1..110: mol_type = other DNA
agagctcccagcctcaaagtcctaaagcccttgtgttgaatactatctctaactgcttagtcagttaagtctcagatattcactgtagctgagacagtttcctccgttgc

SEQ ID NO: 53155 - DNA, 110 bp, synthetic construct
  source 1..110: mol_type = other DNA
gacagggcaggcgcatagagggcatcataggaattctgaggagggctcctcagccatccatgggggaggtgacatgttacaaagggcttccaggaaggagagacgcctga

SEQ ID NO: 53156 - DNA, 110 bp, synthetic construct
  source 1..110: mol_type = other DNA
atccatgggggaggtgacatgttacaaagggcttccaggaaggagagacgcctgagctgagccctaaagcctgggttctcaatcctggctgcacactgcaggcacctgag

SEQ ID NO: 53157 - DNA, 110 bp, synthetic construct
  source 1..110: mol_type = other DNA
actcagagttacccctaatgacccctttgcaaaatttttgcttcctgttcccacgactttatgttctgctggcccagaggtcttagttccaaaagaaggaatgttttcac

SEQ ID NO: 53158 - DNA, 110 bp, synthetic construct
  source 1..110: mol_type = other DNA
cctgcctttatatttttcacattctcttcttacagctccatcactgatgcccatggcaaacctcacttgcctaccgaatgcacattcggcagctcagtgctggggcctgg

SEQ ID NO: 53159 - DNA, 110 bp, synthetic construct
  source 1..110: mol_type = other DNA
caaggacacagggactccaagtgcagagttagaaagtgtggaattggccctcgacactatgaataacgccatcatcagtggcgtgacttttcaaaatcgtgaacagctct

SEQ ID NO: 53160 - DNA, 110 bp, synthetic construct
  source 1..110: mol_type = other DNA
actatgaataacgccatcatcagtggcgtgacttttcaaaatcgtgaacagctctgtaaagctacatgcaaaacaaaagtgcatgctttcttccatttacatgcctttgg

SEQ ID NO: 53161 - DNA, 110 bp, synthetic construct
  source 1..110: mol_type = other DNA
accccctgagctctcagagcatgaacaacttcatagagctccacctgctgctcgaccccagtataccaggccactacaaggaagcccatctccactgaccgggacctgtc

SEQ ID NO: 53162 - DNA, 110 bp, synthetic construct
  source 1..110: mol_type = other DNA
tgtctttcccagagaagggttcatatatgggatcaacaaggagaatgttagacgtgtgtattcctaggtcccattccctaatattctaattcactagaaatatgcatttt

SEQ ID NO: 53163 - DNA, 110 bp, synthetic construct
  source 1..110: mol_type = other DNA
gtaatacagccaatcagaattcaatgtgaatacacagaaagaacttttgctcttgctttagatacactttaggaagttgctctttaaaagaaaattgctgttaacatgtt

SEQ ID NO: 53164 - DNA, 110 bp, synthetic construct; identical to SEQ ID NO: 53163
  source 1..110: mol_type = other DNA

SEQ ID NO: 53165 - DNA, 110 bp, synthetic construct
  source 1..110: mol_type = other DNA
tgccagctgctccctcccctacttcatggaagtgttccaccttcagacgagaaccacggattgggaaatgtcagatccattgtgacttgattcccagagctgggccccac

SEQ ID NO: 53166 - DNA, 110 bp, synthetic construct
  source 1..110: mol_type = other DNA
acggattgggaaatgtcagatccattgtgacttgattcccagagctgggccccaccctttttgctgtcagcctcctgcaagccacctgggaacctcataactcttttgtt

SEQ ID NO: 53167 - DNA, 110 bp, synthetic construct
  source 1..110: mol_type = other DNA
gggtttcacatcatgaaaagctgggagattgtcaggtcctgcctctctttccaataactaaaatcatgctgcccattagctgtggacattgttatcagtgacaaataatt

SEQ ID NO: 53168 - DNA, 110 bp, synthetic construct
  source 1..110: mol_type = other DNA
gactttaaccttacccaccttgctacctgcctctttgttgcctctgagggcccctcatgtaccacctgtttcttttcttttccttggttctgctaccagaagaggcaata

SEQ ID NO: 53169 - DNA, 110 bp, synthetic construct
  source 1..110: mol_type = other DNA
ggaggagcgggagtatttgccagatctcccgggagccgggctgggggcagcagtgtggcttatgtcagtgggtattgccgagttctcaggaatgtgcttcccctcttcca

SEQ ID NO: 53170 - DNA, 110 bp, synthetic construct
  source 1..110: mol_type = other DNA
gacgcttgccaatcagcttgggatggaagactatgattaaaccatgacatctagctgctaagacttaaggggcgccagttttagatagcacttggttaactgtctccagg

SEQ ID NO: 53171 - DNA, 110 bp, synthetic construct
  source 1..110: mol_type = other DNA
tgctaagacttaaggggcgccagttttagatagcacttggttaactgtctccagggtaaccttgctaaactatgcagacagcagtgggaagagatgaaaatttattgtga

SEQ ID NO: 53172 - DNA, 110 bp, synthetic construct
  source 1..110: mol_type = other DNA
acgctgttcatgtctcctggggcatattttcaagaatttttctaggattgttttatagcaaagaatcagcttgatatttggccccggtcctggcacagagtttcagaaac

SEQ ID NO: 53173 - DNA, 110 bp, synthetic construct
  source 1..110: mol_type = other DNA
ctctgtcccaggttctagggggttcttttgaagtcagaatatgacctgtccattgtgtctcctccaaccttctctccagagctgcggaggctggtctgggacagatggga

SEQ ID NO: 53174 - DNA, 110 bp, synthetic construct
  source 1..110: mol_type = other DNA
gagctgggaatagaccccaaagggagggcaacaggctgagaagctgatcttgatattgagccagggccactgccactgacctgggtgagcaggtgccatttcctccctgg

SEQ ID NO: 53175 - DNA, 110 bp, synthetic construct
  source 1..110: mol_type = other DNA
cacgatggaaacttctgtgtattccctttaatatgctgctgtacattgtgaaacacaaagagagactctgacttgcagcatactccccaaatctatttggccacatttcc

SEQ ID NO: 53176 - DNA, 110 bp, synthetic construct
  source 1..110: mol_type = other DNA
caaagagagactctgacttgcagcatactccccaaatctatttggccacatttccatgctcaaaatatcatttatagataggctatagcagttgagagcctcagataatt

SEQ ID NO: 53177 - DNA, 110 bp, synthetic construct
  source 1..110: mol_type = other DNA
ttctggtggctgagtactgagacctactggtcttgcagccaaagacaagtctcacatgtaagctctcttgcttattaaacccaccatctaccaacctagaatgacctgcc

SEQ ID NO: 53178 - DNA, 110 bp, synthetic construct
  source 1..110: mol_type = other DNA
cctaaatgtcccatacattggctgaacccagccaatttccagagagcaagcaagccctgataacacacagagctggaaaatgcagatcagagggcccaataaagagaaga

SEQ ID NO: 53179 - DNA, 110 bp, synthetic construct
  source 1..110: mol_type = other DNA
gagttctccctctgggccatcagcaggcacatggcttcccttttatgccaatgccattcatccattgtctcctaaggcttgttgagagctgacccagtcatgctcaggcc

SEQ ID NO: 53180 - DNA, 110 bp, synthetic construct
  source 1..110: mol_type = other DNA
gtcagcctggccttggtggtagaaactcgcatttctatcattctctgtcctaaaggctgcccgggtatttgagacctaccttaccaaccagtgtcttctcccagctcccc

SEQ ID NO: 53181 - DNA, 110 bp, synthetic construct
  source 1..110: mol_type = other DNA
gctgcccgggtatttgagacctaccttaccaaccagtgtcttctcccagctccccaacaaatgcctttcttaactgaaaaagggccaactggtggaatggccatggcaac

SEQ ID NO: 53182 - DNA, 110 bp, synthetic construct
  source 1..110: mol_type = other DNA
aagaaggcctagtgtccggcctcgaggagaagactgccatggagaggaactggcatcttgcaggccaaccatgctgcagctttgatgctccagcctcagagtctcacaca

SEQ ID NO: 53183 - DNA, 110 bp, synthetic construct
  source 1..110: mol_type = other DNA
tcttgcaggccaaccatgctgcagctttgatgctccagcctcagagtctcacacagaaaagaggacaggtattggctctgggtacataaggcctctctgtaattccttcg

SEQ ID NO: 53184 - DNA, 110 bp, synthetic construct
  source 1..110: mol_type = other DNA
ggtgcttgctggctctggaattctggcatttcacaagccctgattaaaggggggcatggctggcatgctgggggcaggatactgcctggacatccgccttctcaccccag

SEQ ID NO: 53185 - DNA, 110 bp, synthetic construct
  source 1..110: mol_type = other DNA
attttaactcattgagtaaaaggagaaaaactcaaagaatgagtcctgcttattctttaactctatagccaggttagagctcctggacctcttaagaataaatagtagaa

SEQ ID NO: 53186 - DNA, 110 bp, synthetic construct
  source 1..110: mol_type = other DNA
tttaactctatagccaggttagagctcctggacctcttaagaataaatagtagaaagggcaggatttgatctcagtttcccagtctgcggaataatactcccacttccca

SEQ ID NO: 53187 - DNA, 110 bp, synthetic construct
  source 1..110: mol_type = other DNA
ttctcatggatgggccactgcaagtgggggcaccctgaggtctggggctccatgggtgttagaactcactctcgctggttggttgtaattcgggcatcggggagctcccc

SEQ ID NO: 53188 - DNA, 110 bp, synthetic construct
  source 1..110: mol_type = other DNA
gtgttagaactcactctcgctggttggttgtaattcgggcatcggggagctccccagggagggagaattcagtttgctgcctttcaccaggtgctggtcgaaactcaaat

SEQ ID NO: 53189 - DNA, 110 bp, synthetic construct; identical to SEQ ID NO: 53187
  source 1..110: mol_type = other DNA

SEQ ID NO: 53190 - DNA, 110 bp, synthetic construct; identical to SEQ ID NO: 53188
  source 1..110: mol_type = other DNA

SEQ ID NO: 53191 - DNA, 110 bp, synthetic construct
  source 1..110: mol_type = other DNA
agctgtgtggggcaagtccaggaatgaaatccagtgtgtctgacaaagttcaagctctctgccaacatcctcctgccagcaggatctctgaaggtccttttggacgccac

SEQ ID NO: 53192 - DNA, 110 bp, synthetic construct
  source 1..110: mol_type = other DNA
tctctgccaacatcctcctgccagcaggatctctgaaggtccttttggacgccacgattttatgatgggtctatgtctcagctggatttaaaaccaagtaatgaagtctg

SEQ ID NO: 53193 - DNA, 110 bp, synthetic construct
  source 1..110: mol_type = other DNA
ggtcctgggttgggttttaggctctttctccccaggatctagccgcagcagggaaacagaaaggatctttctctaagatgatacagacgccaagttccctgctgcttgtt

SEQ ID NO: 53194 - DNA, 110 bp, synthetic construct
  source 1..110: mol_type = other DNA
acagaaaggatctttctctaagatgatacagacgccaagttccctgctgcttgttcagacaaggttaaagagctctcaatgccagaggctgtttcccattgccagatgag

SEQ ID NO: 53195 - DNA, 110 bp, synthetic construct
  source 1..110: mol_type = other DNA
cccaagtcacctgtcatcaaggtctgttcaacataaggactttctatgcttttaaccttttttgggtcacaaacctccctgaaaatccagtgaaagcttccccacaagag

SEQ ID NO: 53196 - DNA, 110 bp, synthetic construct
  source 1..110: mol_type = other DNA
ccttttttgggtcacaaacctccctgaaaatccagtgaaagcttccccacaagagcacacatacatctgcctacaactttgaaaggttgtggatccctcccctaaagcac

SEQ ID NO: 53197 - DNA, 110 bp, synthetic construct
  source 1..110: mol_type = other DNA
aactcacgaagagaatttagcatcagactccacacacaaagctggtccatcaacgtaagggcacatcagaaacaaactcagcctagagaaagggactgcaaggaaactct

SEQ ID NO: 53198 - DNA, 110 bp, synthetic construct
  source 1..110: mol_type = other DNA
ctctctcaggtatttgtgtattaattagataaggtgctcttttacaagccttcaaatgcctgctgggaacacctatgttgcagtttattttgagctccaacaggccagta

SEQ ID NO: 53199 - DNA, 110 bp, synthetic construct
  source 1..110: mol_type = other DNA
agaccttagttcctggactccctattcccttccatctttgcttaagctccaggcaatccttgctagagctcagtttttctcgaaataccttgtgaggagcaaccatcaca

SEQ ID NO: 53200 - DNA, 110 bp, synthetic construct
  source 1..110: mol_type = other DNA
ctgggcaactccaatgatgaaaaaatcacagtgtctttagacggttccttccactttaggccctgataaaagaaagatgaacttattactgactgtctgcaggtcagcct

SEQ ID NO: 53201 - DNA, 110 bp, synthetic construct
  source 1..110: mol_type = other DNA
ctacctaaactcacagtgcctcatcttggccctgggctggttgtcctcctgtcttgtcttgtatctacctttcccatgagatcacgagctgcctcctgcagatgggatgt

SEQ ID NO: 53202 - DNA, 110 bp, synthetic construct
  source 1..110: mol_type = other DNA
gctatctcatacattttaataagagccggcagaagcaaggaatgcttgtataagtagaactgcacatagcccattcatgtcttccactttccccaacagcatgaaggcct

SEQ ID NO: 53203 - DNA, 110 bp, synthetic construct
  source 1..110: mol_type = other DNA
agaactgcacatagcccattcatgtcttccactttccccaacagcatgaaggccttaagcactggcatacccaggcattagagagctaagtgttctttggggctgcacca

SEQ ID NO: 53204 - DNA, 110 bp, synthetic construct; identical to SEQ ID NO: 53202
  source 1..110: mol_type = other DNA

SEQ ID NO: 53205 - DNA, 110 bp, synthetic construct; identical to SEQ ID NO: 53203
  source 1..110: mol_type = other DNA

SEQ ID NO: 53206 - DNA, 110 bp, synthetic construct
  source 1..110: mol_type = other DNA
tttgtcatttgtaaaaagtgtagctatcccttcttctggagagtgatagtattgtttttctgcatggcctcctctggcccagtgtgcatgtgcgagtgtgaggcagggag

SEQ ID NO: 53207 - DNA, 110 bp, synthetic construct
  source 1..110: mol_type = other DNA
ctttttcaaagtcttggttgcctaagctacacctttgactgatcctatcaaaacctctgaagataggaccagatcatcccataaatcaaagtgcccacaactgagggaaa

SEQ ID NO: 53208 - DNA, 110 bp, synthetic construct
  source 1..110: mol_type = other DNA
tggattattttaagaggcattgccagagagaaaaacatttactcagactagactttgcacctttacatttaaaaactctaccttgatggagttctcgtggtggctcagcg

SEQ ID NO: 53209 - DNA, 110 bp, synthetic construct
  source 1..110: mol_type = other DNA
gactagactttgcacctttacatttaaaaactctaccttgatggagttctcgtggtggctcagcggcaacaaaccccactagtatccacgaggatgtgggttcaacccct

SEQ ID NO: 53210 - DNA, 110 bp, synthetic construct
  source 1..110: mol_type = other DNA
cagctcttaactggggactaagctgagcctgtgacaagcattacctcatttattctcacagccaatagtgaagcaagattattctctccatttcacaaagaaactgaggc

SEQ ID NO: 53211 - DNA, 110 bp, synthetic construct
  source 1..110: mol_type = other DNA
aatacatggttacaagagaaaattcaagagaagactggactctctaactgaagcccagagcagtggaaacagataatccatcctggcatactttaaactgtccttgggta

SEQ ID NO: 53212 - DNA, 110 bp, synthetic construct
  source 1..110: mol_type = other DNA
cagagcagtggaaacagataatccatcctggcatactttaaactgtccttgggtaccaaagtgaactctgagagagctttgtcctggagtcctgagcaggacagaagata

SEQ ID NO: 53213 - DNA, 110 bp, synthetic construct
  source 1..110: mol_type = other DNA
caatggaaactcacaaccatataatttaaaggcagctcagtattccaccttctgcagatatgaaatagaggtttgaccagttgtcactgcccacataaatagaacactgt

SEQ ID NO: 53214 - DNA, 110 bp, synthetic construct
  source 1..110: mol_type = other DNA
atcactcaaagacaaaacaagcaactagaagcagcagaaaggatagagagggagccagaaccagtggtgccagctctgtagccagtctgctggcagagaacaaacaggga

SEQ ID NO: 53215 - DNA, 110 bp, synthetic construct
  source 1..110: mol_type = other DNA
ttgcatcctatttccaacaaaccaagtgtaaatacacatgcatgcatacgctcgcacaagcacacatgagctcacgtgtacacacacacaagacaatcacggaaatttgg

SEQ ID NO: 53216 - DNA, 110 bp, synthetic construct
  source 1..110: mol_type = other DNA
ctgtatatattttaccccaattttaaaaaaagaagaaaagctattatgaagctgagtatagctacagatagctcctagcctgaaggcatagcttgagaggaccagggctg

SEQ ID NO: 53217 - DNA, 110 bp, synthetic construct; identical to SEQ ID NO: 53216
  source 1..110: mol_type = other DNA

SEQ ID NO: 53218 - DNA, 110 bp, synthetic construct
  source 1..110: mol_type = other DNA
cagtcctacagggtcagtactattgctgttttacagatgaggaaacagaggttcaaagcgatcaatttgcccaccatcacacgattattcagataagctgactcgaaaac

SEQ ID NO: 53219 - DNA, 110 bp, synthetic construct
  source 1..110: mol_type = other DNA
aagcgatcaatttgcccaccatcacacgattattcagataagctgactcgaaaacccatactttttctactacacctggcttcttttcttgtgaactagatccagaacca

SEQ ID NO: 53220 - DNA, 110 bp, synthetic construct
  source 1..110: mol_type = other DNA
gtgatataaactgtatatgatgacatttacccctgccgcacttcaatgtgtttattctagttgttttgaaagttactaccaaactattaaatagggactcttaaattttt

SEQ ID NO: 53221 - DNA, 110 bp, synthetic construct
  source 1..110: mol_type = other DNA
ctagagatttagattgtacatgtttgaaatcctgtttcaacatgatctctgctttataggagttaaaaccttgttcttcatttctccatgccttcatctattctgcttta

SEQ ID NO: 53222 - DNA, 110 bp, synthetic construct
  source 1..110: mol_type = other DNA
ataggagttaaaaccttgttcttcatttctccatgccttcatctattctgctttaatatgagtaaagaaacctagtcattagaaatgttggagtttgttgttcttccttt

SEQ ID NO: 53223 - DNA, 110 bp, synthetic construct
  source 1..110: mol_type = other DNA
ctctacatctcttttattctaatacaatctttcaggactcaggaagtatctttttctggcctatgacaaactcttttaagtcaggcattgatggtgtctctgtatcttgg

SEQ ID NO: 53224 - DNA, 110 bp, synthetic construct
  source 1..110: mol_type = other DNA
ctggcctatgacaaactcttttaagtcaggcattgatggtgtctctgtatcttgggctgttaatttttttctttgctgttatttattttatatcatgtagtctgaagttc

SEQ ID NO: 53225 - DNA, 110 bp, synthetic construct
  source 1..110: mol_type = other DNA
gtcggggtggcagatagagaaaaacctttgaaaaggctccttgggggttgacagtgaataaaaggttgagatacactgccttagagtaataagctggattattacaggtc

SEQ ID NO: 53226 - DNA, 110 bp, synthetic construct
  source 1..110: mol_type = other DNA
gaataaaaggttgagatacactgccttagagtaataagctggattattacaggtcagatttttccttaacattaattagtccccccccccaaatgtacatgattcctctg

SEQ ID NO: 53227 - DNA, 110 bp, synthetic construct
  source 1..110: mol_type = other DNA
agataatttttccacccattttatttcagagttgacttgatttggaaaaagctcggcagtaatttcatttaagggcatctagggtcagctcaatgcctgaggcttctttg

SEQ ID NO: 53228 - DNA, 110 bp, synthetic construct
  source 1..110: mol_type = other DNA
tcaaaacaaggtgtacttaaaagagaatctgggagtgattctgacctctttcattcacccattgaagaagtggacagcattatcttctccaaggtactgtttgcctcagt

SEQ ID NO: 53229 - DNA, 110 bp, synthetic construct
  source 1..110: mol_type = other DNA
ccattgtaactggtgtgttaggaaaagacctgtgaaccaagtaagcattgaggaaggaatgggaaaaaaagctttggggtctagggttctggcagtctccattctagtat

SEQ ID NO: 53230 - DNA, 110 bp, synthetic construct
  source 1..110: mol_type = other DNA
ggaatgggaaaaaaagctttggggtctagggttctggcagtctccattctagtatcctgtagcccatacctctgagccagcagagcattgtggctcatgattagtgggtc

SEQ ID NO: 53231 - DNA, 110 bp, synthetic construct
  source 1..110: mol_type = other DNA
tggccaggaaaatggtcccatcttagccagttcagctcaacaaaccagttaccaagcgcctgcctgtgaggacagctcctggggtcagtgtgtgtaatgagccccgtgca

SEQ ID NO: 53232 - DNA, 110 bp, synthetic construct
  source 1..110: mol_type = other DNA
cgatttcacctagtttgcatacatctacccctcattcaccactgaacacagatagactagggacctccggcctgcagaccctgggatgaatgggcccaggctctctgggg

SEQ ID NO: 53233 - DNA, 110 bp, synthetic construct
  source 1..110: mol_type = other DNA
actagggacctccggcctgcagaccctgggatgaatgggcccaggctctctggggttgtcagctgtgatctttaatgtctatgaagtatacagccaccatgactcactaa

SEQ ID NO: 53234 - DNA, 110 bp, synthetic construct
  source 1..110: mol_type = other DNA
cagagggatgggatttagggggacagatgaaataagtgaaggggattaacaggtacaaagttccagctataaaatgtcaaggggatgtaatgtacacatagtgaatattt

SEQ ID NO: 53235 - DNA, 110 bp, synthetic construct
  source 1..110: mol_type = other DNA
tttttgattcacccctttttttaactctccccctcaaatcacttggttcattttacctcgcataggtctttcatacctaccccttcctccccattattaattattatgaa

SEQ ID NO: 53236 - DNA, 110 bp, synthetic construct
  source 1..110: mol_type = other DNA
tctccccctcaaatcacttggttcattttacctcgcataggtctttcatacctaccccttcctccccattattaattattatgaattggcctaatattactttattttat

SEQ ID NO: 53237 - DNA, 110 bp, synthetic construct
  source 1..110: mol_type = other DNA
tttctccctggtctccctgctgccagctggttcccatttagaccctcccgtgtgctcttgccccatttacgggtcttgatgtggacccgtgagcctctttctcccacgtt

SEQ ID NO: 53238 - DNA, 110 bp, synthetic construct
  source 1..110: mol_type = other DNA
tagctgaaaaattatactggtaaaaataacatcttgcatttgaagggtacaatgagttaccttgtgggggaaaaattaaataaatctaagttctaggaactgtgcttttg

SEQ ID NO: 53239 - DNA, 110 bp, synthetic construct
  source 1..110: mol_type = other DNA
aggatggtgacaaaggtgtgagggaagagactttttacttgctacatttatgtaccttatttatttactttttgttttttctgtttttctttggcagaagttccagggcc

SEQ ID NO: 53240 - DNA, 110 bp, synthetic construct
  source 1..110: mol_type = other DNA
cttatttatttactttttgttttttctgtttttctttggcagaagttccagggccaaggattgaatccatgccatagcagcaacctgagccacagcagtgacaacaccag

SEQ ID NO: 53241 - DNA, 110 bp, synthetic construct
  source 1..110: mol_type = other DNA
gcagccagcatcacttatcctcaggggcacatagaacaatacaattaagtggtaataggtggtaccatctgaatgtgctggagaagctccttagaaggaaagtcccccgg

SEQ ID NO: 53242 - DNA, 110 bp, synthetic construct
  source 1..110: mol_type = other DNA
ctcattgacctctacagagatgctggcattcacggttgatgtcctggctggtggcgcctgatggttcacccggttctttggtcctgtgtcagctctgctggttctgtaca

SEQ ID NO: 53243 - DNA, 110 bp, synthetic construct
  source 1..110: mol_type = other DNA
gcctgatggttcacccggttctttggtcctgtgtcagctctgctggttctgtacatacaaacctgcctctgttccaggtctctgcatgttttccagctctgttccagcca

SEQ ID NO: 53244 - DNA, 110 bp, synthetic construct
  source 1..110: mol_type = other DNA
tgttggggtggtggggacagtgaggtgtgcgaaagtggtcctcccactgaaactagatgccaggggctttccttgctttccaaggccaggccgagggagttttctggact

SEQ ID NO: 53245 - DNA, 110 bp, synthetic construct
  source 1..110: mol_type = other DNA
cccgggcggcctcgtgggccctctttgaccacccgggaccaggccagactggtgctggggacccagctcctatcaccgatgccgagttccgcccatcttcagaaattgtg

SEQ ID NO: 53246 - DNA, 110 bp, synthetic construct
  source 1..110: mol_type = other DNA
tctgcctgagatggcactaaggatgggaaggggaggctcagtggagatgtttgaaggcaggggttggaagaaaggtacagctggtcatatttgaatcccataaaattagg

SEQ ID NO: 53247 - DNA, 110 bp, synthetic construct
  source 1..110: mol_type = other DNA
ggcaggggttggaagaaaggtacagctggtcatatttgaatcccataaaattaggactgttcaatgaacagttatgttgggcttctctaagatctcatttaaagaaagga

SEQ ID NO: 53248 - DNA, 110 bp, synthetic construct
  source 1..110: mol_type = other DNA
tacgcccatgcacctctgcccccctttgtggtcctcccagaaatctctctgccatcaccaaagctgctccttctgtcatgagaacacaaatacagactggagatccggca

SEQ ID NO: 53249 - DNA, 110 bp, synthetic construct
  source 1..110: mol_type = other DNA
aaaagcaagagagagggaagaatggaggaaccagaagagactaggattacccatagggcaaaatttagcacttaccattgggccaaaactttccagacccttgataggat

SEQ ID NO: 53250 - DNA, 110 bp, synthetic construct
  source 1..110: mol_type = other DNA
gtcgaaaaatccttccttaatcctggctaatccttgaactttcatcattttttcccctccctttattgccaaatttctcagaagatcagccattatttattatgtccctt

SEQ ID NO: 53251 - DNA, 110 bp, synthetic construct
  source 1..110: mol_type = other DNA
ctaggaagggccaatgtgatatcgctgggcagacgtgaacatgaataattcactgcttgcaggaaaccagagccccaaaggtctgcagggaggaaaaaagggagggaggg

SEQ ID NO: 53252 - DNA, 110 bp, synthetic construct
  source 1..110: mol_type = other DNA
cttgcaggaaaccagagccccaaaggtctgcagggaggaaaaaagggagggagggatgcaggattgactcttacttgccccggcaagcggttttgagttggcacagacat

SEQ ID NO: 53253 - DNA, 110 bp, synthetic construct
  source 1..110: mol_type = other DNA
tccccttatacatcctgcccccagctttctacaagtacagacagattaaatcccggctcttccctctcaccatcatgaccagtcatcatttaattaggagggagaaaaag

SEQ ID NO: 53254 - DNA, 110 bp, synthetic construct
  source 1..110: mol_type = other DNA
cgtgaactgtggcatagattgccacgtaggccggcagctgcagctctcatttgacctgtagccctggaaacttccatatgccatggatatggctgtaaaaagaaaaaaaa

SEQ ID NO: 53255 - DNA, 110 bp, synthetic construct
  source 1..110: mol_type = other DNA
ctgtagccctggaaacttccatatgccatggatatggctgtaaaaagaaaaaaaaaaactatacctcaattaaaaattatatatatgaggagttcccactgcagtgggct

SEQ ID NO: 53256 - DNA, 110 bp, synthetic construct
  source 1..110: mol_type = other DNA
ttcacgctggttgccttgaaaggcttggactttcacagtgtccccactgtggtatgtggcagtgagggcaagcaagtcagaggccaaagcaccagaacgtgggggctgag

SEQ ID NO: 53257 - DNA, 110 bp, synthetic construct
  source 1..110: mol_type = other DNA
caagacaatacaatccggagggccaaaaggaagatctagcacagccaaggaccccttcctcctcttctcatttttcagagggctgggaacttccaagccttctcctgcct

SEQ ID NO: 53258 - DNA, 110 bp, synthetic construct
  source 1..110: mol_type = other DNA
ctctcatttgaggatataaaggtgacctcatgaaaactgagctaaaaaggaaggtctcaagctggaaacactgggtctgtctgctgacaccacgagtaagttctggggcg

SEQ ID NO: 53259 - DNA, 110 bp, synthetic construct
  source 1..110: mol_type = other DNA
ctcaagctggaaacactgggtctgtctgctgacaccacgagtaagttctggggcgtggaatgcatcattgcatctccacaccttccaggaacagtctggggaggaagagg

SEQ ID NO: 53260 - DNA, 110 bp, synthetic construct; identical to SEQ ID NO: 53258
  source 1..110: mol_type = other DNA

SEQ ID NO: 53261 - DNA, 110 bp, synthetic construct; identical to SEQ ID NO: 53259
  source 1..110: mol_type = other DNA

SEQ ID NO: 53262 - DNA, 110 bp, synthetic construct
  source 1..110: mol_type = other DNA
atcctggattatccaggtaggaccagtggaatcacaaaggtccctataaaagggaggcaggagagtcagaagctgagagatgcgatgtgataccagaggtgagactggat

SEQ ID NO: 53263 - DNA, 110 bp, synthetic construct
  source 1..110: mol_type = other DNA
ggcaggagagtcagaagctgagagatgcgatgtgataccagaggtgagactggattgattccttttgaagatggagatgaaggggcctcaagccaagaaatccaggtggt

SEQ ID NO: 53264 - DNA, 110 bp, synthetic construct
  source 1..110: mol_type = other DNA
cacatgtgtgctgatcagtattcagctgaagactcatggggaagcccctgctgatgccccaaactctctctgcatgactttcccttttctggtgatttactctagtactt

SEQ ID NO: 53265 - DNA, 110 bp, synthetic construct
  source 1..110: mol_type = other DNA
gccccaaactctctctgcatgactttcccttttctggtgatttactctagtacttctacacaatctgaattcttaactccatctcttcaactcaggaaaactgcaaggct

SEQ ID NO: 53266 - DNA, 110 bp, synthetic construct
  source 1..110: mol_type = other DNA
ccttaggaaatggacatgctgcttcatttaggctaattagaatctcttttctaataacttttgataacttgcaactgagatgtaatttcaagtctgtgttgggcacttga

SEQ ID NO: 53267 - DNA, 110 bp, synthetic construct
  source 1..110: mol_type = other DNA
gttttcctaatagtgtgctacttgggaggaaaagcttgaggcctttaaatctctggattgagtatacttgacctatcctagtaatataattgcctatccttgaattaaaa

SEQ ID NO: 53268 - DNA, 110 bp, synthetic construct
  source 1..110: mol_type = other DNA
tgacatttgagccacagctcataaaagtgagctaggagttcaaacagtttgaccgcctactaaaatagataatttacatagaaagcagagtttcataactcatcatcatg

SEQ ID NO: 53269 - DNA, 110 bp, synthetic construct
  source 1..110: mol_type = other DNA
taaggcagcatttcagcggagatctaagggaagtaagagataaaatcaggtggatatccgggagaggaatgcttaacaatcacagctaatacttattgagcatttactac

SEQ ID NO: 53270 - DNA, 110 bp, synthetic construct
  source 1..110: mol_type = other DNA
atccgggagaggaatgcttaacaatcacagctaatacttattgagcatttactacatgtcacgtatcttctaatctcttcacactgcttaatttatttagttcttaagaa

SEQ ID NO: 53271 - DNA, 110 bp, synthetic construct
  source 1..110: mol_type = other DNA
ttcctttctttgccccaagaagaggatgaagtgtgggctagatccagggcaccgcttctgggctttcctgtgagactgtggaattcagagcatgcagagaaaataatgtt

SEQ ID NO: 53272 - DNA, 110 bp, synthetic construct
  source 1..110: mol_type = other DNA
ttcctgtgttatcatggcggctgaaacgaagttgtgctttgttaaaccatcaccacaaaagtttgttcctttttcatgttccatgttcaatgtgggccagagtgacagaa

SEQ ID NO: 53273 - DNA, 110 bp, synthetic construct
  source 1..110: mol_type = other DNA
caaaagtttgttcctttttcatgttccatgttcaatgtgggccagagtgacagaacagcccttgccagaaggagagagagaaagagagggttggagtttcctggtggctc

SEQ ID NO: 53274 - DNA, 110 bp, synthetic construct; identical to SEQ ID NO: 53272
  source 1..110: mol_type = other DNA

SEQ ID NO: 53275 - DNA, 110 bp, synthetic construct; identical to SEQ ID NO: 53273
  source 1..110: mol_type = other DNA

SEQ ID NO: 53276 - DNA, 110 bp, synthetic construct
  source 1..110: mol_type = other DNA
acaggtatggagtagctgagggcacagggctacctcagcttctccatcattctgctgctgtgccagaaatttgtactacgcttactgactctcagagaaaaacccaagca

SEQ ID NO: 53277 - DNA, 110 bp, synthetic construct
  source 1..110: mol_type = other DNA
aacggtgccatcccagaactgactttgcagatggctgagtttggtgtcaagctgaatcattcaggaagcttccctgctcacccgcagagggacccgaggaggctgtcggg

SEQ ID NO: 53278 - DNA, 110 bp, synthetic construct
  source 1..110: mol_type = other DNA
atcattcaggaagcttccctgctcacccgcagagggacccgaggaggctgtcgggaacaagtccaacggggaagctgggtttatcttagcctccccctttgcagaggctc

SEQ ID NO: 53279 - DNA, 110 bp, synthetic construct
  source 1..110: mol_type = other DNA
agtaagtgcagaattatgtaccccaggagagagggacaaggaggaaataagctctggcacagaaggcaagactaaactgggacgagagaaggccatttcaggctgtgttt

SEQ ID NO: 53280 - DNA, 110 bp, synthetic construct
  source 1..110: mol_type = other DNA
ggcacagaaggcaagactaaactgggacgagagaaggccatttcaggctgtgtttgttgtttgacttcagcttgacacttgatagcattgcttcttgaccattttcccat

SEQ ID NO: 53281 - DNA, 110 bp, synthetic construct
  source 1..110: mol_type = other DNA
ttttttttgttgttgttctgacagaagcaagctcacaaaactcccccctactgcgggctttaattggcagtctcttttgtgtatatgtgtgaagatatttttctgccttc

SEQ ID NO: 53282 - DNA, 110 bp, synthetic construct
  source 1..110: mol_type = other DNA
tgactccccaccctttacagcttcagtgaggcccaactcccaacagatacacactttctacctgggtgaacttgcagcataagtctgccggtatatttctttgactgtct

SEQ ID NO: 53283 - DNA, 110 bp, synthetic construct
  source 1..110: mol_type = other DNA
cagactcccacccatccctgacctctgagtgatccagaagagccctgccagccgccacctagctgtgtaggatagggcacataagccctccttctatgcactacacaaga

SEQ ID NO: 53284 - DNA, 110 bp, synthetic construct
  source 1..110: mol_type = other DNA
ttgcctctctccctcccacccttttctcctgcagacaggccactgtctgcctgttctaggaaaaagatctcttttctgttcatctctcatgtccctctgctattccaggt

SEQ ID NO: 53285 - DNA, 110 bp, synthetic construct
  source 1..110: mol_type = other DNA
tttgagtgtattagttcagggtctccctagagtatacttcattccagagttcaacctggaatcctccccagcccccaaagagctcttcagattgagtgtggcctggatta

SEQ ID NO: 53286 - DNA, 110 bp, synthetic construct
  source 1..110: mol_type = other DNA
ctttttacctatgcaggaagtcactttctcagtttgctaaagatatacttcatgatagtttccctgaacacaggacccaaagaaaaagcttggactgatatctctcagtt

SEQ ID NO: 53287 - DNA, 110 bp, synthetic construct
  source 1..110: mol_type = other DNA
tagtttccctgaacacaggacccaaagaaaaagcttggactgatatctctcagttgtctttcaattttcctttttgttgggagatactggtatgtcctaacagacagcaa

SEQ ID NO: 53288 - DNA, 110 bp, synthetic construct
  source 1..110: mol_type = other DNA
tctacctccttctcctttcttttcctaggaaggctctagctaacatcaaaaacaggtttatagttcttactctttgtaaaagttagcatactgaatgccagcagtgatat

SEQ ID NO: 53289 - DNA, 110 bp, synthetic construct
  source 1..110: mol_type = other DNA
agaattcaagtgtgccttatacttatgcctacactgcttgcacaatagcattgccaaagccaggaacattctgagctctttcctgcctactacaattatgaaacaagtca

SEQ ID NO: 53290 - DNA, 110 bp, synthetic construct
  source 1..110: mol_type = other DNA
aaagccaggaacattctgagctctttcctgcctactacaattatgaaacaagtcattcaatgaacagttgactctgctataaggcatagtgaagtatattaatatagcag

SEQ ID NO: 53291 - DNA, 110 bp, synthetic construct
  source 1..110: mol_type = other DNA
ttttgaggctgactgggcttttctgtgcctttaaattatccagtgtaggaactcctttacctctaggaatgcctagtacagccttgtaccttccagtgactctggaggtg

SEQ ID NO: 53292 - DNA, 110 bp, synthetic construct
  source 1..110: mol_type = other DNA
ttaatatgtatgtctctgatttcttcccatcttattccataaaggcttgattagcttataacataacacacagcacaaagcttaaataaacagatgaataaatcgaggga

SEQ ID NO: 53293 - DNA, 110 bp, synthetic construct
  source 1..110: mol_type = other DNA
cccatcttattccataaaggcttgattagcttataacataacacacagcacaaagcttaaataaacagatgaataaatcgagggagtgggaggcatcgggagcttgggct

SEQ ID NO: 53294 - DNA, 110 bp, synthetic construct
  source 1..110: mol_type = other DNA
agctcttgctagatgtttcatcaagtctcaatgcctttttcgcttctccccccgcccgccaagaatatagtttatctgcctcatttactttctaatttgagctggaacaa

SEQ ID NO: 53295 - DNA, 110 bp, synthetic construct
  source 1..110: mol_type = other DNA
tcgtggtgtcagtttggtcaggttcttgtgaggaccctctctggtttgcggacgttggacttctgttcctcacatgaaaaatggagctagctagctccctggccttttgt

SEQ ID NO: 53296 - DNA, 110 bp, synthetic construct
  source 1..110: mol_type = other DNA
tgtgaacaagaaggaaattgtctgaagtggaattaattgagctcccagttatcactaggtgggaagattactatgttttaattttctttgtgtatgcatccctaaagaat

SEQ ID NO: 53297 - DNA, 110 bp, synthetic construct
  source 1..110: mol_type = other DNA
ataaaagaacttctatggaaataatatatcatttgtgagaaagagatgatgtacaagataaggaagacctttctaatcacatggtctggctaaggctttcttttcacatc

SEQ ID NO: 53298 - DNA, 110 bp, synthetic construct
  source 1..110: mol_type = other DNA
attgactgacagtttggagcttctgcaaatggaagtttttagttgaattgtagatgggagacctatggaaggaaagaaggggagggagaaagctggactttaaccactat

SEQ ID NO: 53299 - DNA, 110 bp, synthetic construct
  source 1..110: mol_type = other DNA
gtcaattcagtgaatatgtctgaagcagctgctgggtttagtttaaaattattaaactaaatttaataaagtgcagtgaccaggaatttatagactactgagggatatat

SEQ ID NO: 53300 - DNA, 110 bp, synthetic construct
  source 1..110: mol_type = other DNA
tcatatgtactaaaaatagagaggggttgagtaaaaataggagaagaatgctgccaatggcggtgagcctagttccgtcacctctacatccaggcattgaggagtactgt

SEQ ID NO: 53301 - DNA, 110 bp, synthetic construct
  source 1..110: mol_type = other DNA
tttatgagtttaacccaattttcttggttgtgttagaactttacattgtaggatgggtctccagtaaataaggaattgccttgggctggaacactttttgttatagcaga

SEQ ID NO: 53302 - DNA, 110 bp, synthetic construct
  source 1..110: mol_type = other DNA
ggtctccagtaaataaggaattgccttgggctggaacactttttgttatagcagatatttttacggtcattactatgactacagcagaattaacacatttgatccaagaa

SEQ ID NO: 53303 - DNA, 110 bp, synthetic construct
  source 1..110: mol_type = other DNA
acaggaggagccaaaaacacacacagacacaccattcacacacacacacacatgcacacacagaccatacagctaggagtcattgaggtcggcagtggtactaggctcct

SEQ ID NO: 53304 - DNA, 110 bp, synthetic construct
  source 1..110: mol_type = other DNA
actgtggccttagaggaacatacaacctaccaaactacacagctgcacaggatgctggcagaataaaggactcagccactctctcttttccaatgggctgaacttccccc

SEQ ID NO: 53305 - DNA, 110 bp, synthetic construct
  source 1..110: mol_type = other DNA
acatagcaggtatagcaagtgctccaaaaaggatggctttcgtttctggcacagagccaggcttcctctccctcccacccgaagtggggtcattctgcagccttccgtgc

SEQ ID NO: 53306 - DNA, 110 bp, synthetic construct
  source 1..110: mol_type = other DNA
gccaggcttcctctccctcccacccgaagtggggtcattctgcagccttccgtgccaagcaggtcaggtcttcacctccacccagagcaccaacctggcagccaagcgac

SEQ ID NO: 53307 - DNA, 110 bp, synthetic construct
  source 1..110: mol_type = other DNA
tcctcctcaagtgattactgtctctcaagccatcttgcttaactattgcaatcttgcaaaaaagagaactccttgggagcaggtaccacctctggactaagtgtaggagg

SEQ ID NO: 53308 - DNA, 110 bp, synthetic construct
  source 1..110: mol_type = other DNA
gcaaaaaagagaactccttgggagcaggtaccacctctggactaagtgtaggaggcatccagggcatatctggtaaacctgtgacctccagccaatattcgttcaaagaa

SEQ ID NO: 53309 - DNA, 110 bp, synthetic construct; identical to SEQ ID NO: 53307
  source 1..110: mol_type = other DNA

SEQ ID NO: 53310 - DNA, 110 bp, synthetic construct; identical to SEQ ID NO: 53308
  source 1..110: mol_type = other DNA

SEQ ID NO: 53311 - DNA, 110 bp, synthetic construct
  source 1..110: mol_type = other DNA
ctttgctgctcaggtaagtgtgagtgacctccagtggaaggagtggtttccacccttttgggaattccctgggtttctcctggagctgctgtcacctttgagctggttgt

SEQ ID NO: 53312 - DNA, 110 bp, synthetic construct
  source 1..110: mol_type = other DNA
taatgttttggactgtcgtgcaaggacgagctccatctgtatgctgggtggaaccagggagcagagcagcggcccgtgagcgggataaagtacaggagcacaaacgtcac

SEQ ID NO: 53313 - DNA, 110 bp, synthetic construct
  source 1..110: mol_type = other DNA
tttcaggtgtgacagtgctatcagtacagtaggcattagaggagaaagctgctgttagaagctacgtcaggggacttcctgtcatggctcaacagtaacgaacatgacta

SEQ ID NO: 53314 - DNA, 110 bp, synthetic construct
  source 1..110: mol_type = other DNA
caattactacattattatactgtaatatccattagatatattcacccatgttcccaggcttcatggccaccttcaatatttgcatacttgtattctctgatactagtttc

SEQ ID NO: 53315 - DNA, 110 bp, synthetic construct
  source 1..110: mol_type = other DNA
aggcttcatggccaccttcaatatttgcatacttgtattctctgatactagtttcttcagatgactcttgaagaggtagattaactttacccagaataatcaactacaag

SEQ ID NO: 53316 - DNA, 110 bp, synthetic construct
  source 1..110: mol_type = other DNA
tttctcacattatcatgttccaagcactcattcttctaagcctaccttttagcctccgggccagttcctgggtgaagagaacattggctaacttgctgttacagtaggcc

SEQ ID NO: 53317 - DNA, 110 bp, synthetic construct
  source 1..110: mol_type = other DNA
ccgggccagttcctgggtgaagagaacattggctaacttgctgttacagtaggccagacccgcatggtagaacttctcaccctgcaggttatggaagtggatccttccca

SEQ ID NO: 53318 - DNA, 110 bp, synthetic construct
  source 1..110: mol_type = other DNA
acaaagagcacagggcatttgagaggactgaagtggagcaaacaaaactaactgatgaaggaaagaggcccggaggaggggctgttgaaccaagttagcctgtggagggg

SEQ ID NO: 53319 - DNA, 110 bp, synthetic construct
  source 1..110: mol_type = other DNA
tgaaggaaagaggcccggaggaggggctgttgaaccaagttagcctgtggagggggtggagggctgagcagagcagaccaggcatggatctgaaggcacaggatgtgatg

SEQ ID NO: 53320 - DNA, 110 bp, synthetic construct
  source 1..110: mol_type = other DNA
tcaggttgggccagtaaaccaaagctgttacttttctaaggaaacttacatttgaaaggtggctaggagttcccgttgtggcacattggaaaggaatccgactaggaacc

SEQ ID NO: 53321 - DNA, 110 bp, synthetic construct
  source 1..110: mol_type = other DNA
aaaccaaagctgttacttttctaaggaaacttacatttgaaaggtggctaggagttcccgttgtggcacattggaaaggaatccgactaggaaccataaggttgccggtt

SEQ ID NO: 53322 - DNA, 110 bp, synthetic construct
  source 1..110: mol_type = other DNA
gattgcacagccagtcagtggattttttttttctccaccttctcaaggagagatcttcccacagggcagtcaggcccctgcccagaagccattccccacaggctgctcaa

SEQ ID NO: 53323 - DNA, 110 bp, synthetic construct
  source 1..110: mol_type = other DNA
tgtgcgggctggggggcctgcctcaggagatcccagagcacagagacagcttccgagttgagccaaggtggccagctctcctgcctctgatttctgtcaagcacagggtc

SEQ ID NO: 53324 - DNA, 110 bp, synthetic construct
  source 1..110: mol_type = other DNA
atggctgtagcacattttgtttatccaaccatcagttgatgggcacttggattgtttatagtttttgtccatcaggaaaaaactttggtagattcttaggaatggaatgg

SEQ ID NO: 53325 - DNA, 110 bp, synthetic construct
  source 1..110: mol_type = other DNA
tagatgcacagtttagaatattgatgatcactgggaaggaggcagagagatgggattcaggaggggcccgtgtataacttcactgggtttgggaatattctaatttataa

SEQ ID NO: 53326 - DNA, 110 bp, synthetic construct
  source 1..110: mol_type = other DNA
ttcaggaggggcccgtgtataacttcactgggtttgggaatattctaatttataaattgagtgatgggttcatagatatatgttttagcattatgcttcataacctacat

SEQ ID NO: 53327 - DNA, 110 bp, synthetic construct
  source 1..110: mol_type = other DNA
gatttattgcttggtttttagaatttcactaacttaattgcggtagtggtttcgcagtgtgtatccatgattcagagctcatcaaattgtgctctttaaatatgtgcagc

SEQ ID NO: 53328 - DNA, 110 bp, synthetic construct
  source 1..110: mol_type = other DNA
tttaactgcttgcttttcttttcactacagaaaaaaaagtgcctacctccacacggtaaggcctctgcttccattctcccatgcatctatctccctctcggcgctgttcc

SEQ ID NO: 53329 - DNA, 110 bp, synthetic construct
  source 1..110: mol_type = other DNA
gacacttggtagttagaatttctggataagtagaggttggtaacataacgaaatcagaagcatattttgccattttgttacactgcttttgtgcgcagcttaacatcata

SEQ ID NO: 53330 - DNA, 110 bp, synthetic construct
  source 1..110: mol_type = other DNA
agaagcatattttgccattttgttacactgcttttgtgcgcagcttaacatcataaaacaacatctttaacagcaatggctcctagcaaaattagtgtggcttagaatag

SEQ ID NO: 53331 - DNA, 110 bp, synthetic construct
  source 1..110: mol_type = other DNA
agggacctgggttctcatttttgtagaatgatctcatttttgtagcacgatcttgtctttgagaatgatccttgctgccggccagttccacagtaatctaattccatgtg

SEQ ID NO: 53332 - DNA, 110 bp, synthetic construct
  source 1..110: mol_type = other DNA
tgaggtatcattatctccctgtgagatggggaagctctggctcagagagtaacgtgcccaaggacacacagtcataagccgaagaaccagaatcaaacccagggcttttt

SEQ ID NO: 53333 - DNA, 110 bp, synthetic construct
  source 1..110: mol_type = other DNA
ttaccaatcacaccatctgcacttccaaagtcatgacttcaggtatccttttctctgaccactaccgcctatatttatagctaatttattctgttacccccactccaaaa

SEQ ID NO: 53334 - DNA, 110 bp, synthetic construct
  source 1..110: mol_type = other DNA
tgaccactaccgcctatatttatagctaatttattctgttacccccactccaaaaacccttcaagctcctgaagatcctaactgtgtcatggtccatggcggtaatcaca

SEQ ID NO: 53335 - DNA, 110 bp, synthetic construct
  source 1..110: mol_type = other DNA
tatgagagacgcctctgccctgctcctcgtgtgcagtgtgagtctcagcaagatgcgtcacctcaaccagaccctgtagctgtacagcccgagtgagatccatgctccat

SEQ ID NO: 53336 - DNA, 110 bp, synthetic construct
  source 1..110: mol_type = other DNA
tgttgacaccacatggcatcagcctgcatcttctgcctcagctcttcctcccgtggtgctttcttagggccgccttcccagaccctgtgaccacttctggtttgtggcct

SEQ ID NO: 53337 - DNA, 110 bp, synthetic construct
  source 1..110: mol_type = other DNA
cttaagtcccttctaaagagcatttgcatctcttttctgttcccctggggaagcaggcccaagggcatggtgtcttccatgattaccaggatgcagagctgcaccacaag

SEQ ID NO: 53338 - DNA, 110 bp, synthetic construct
  source 1..110: mol_type = other DNA
ggaggggtcgtttctgatgtaagtaagtgagtaggtcatggattactaaatggttagtccacaaggaccagcaggcctggcgggagacaagagctggccttgttcaggac

SEQ ID NO: 53339 - DNA, 110 bp, synthetic construct
  source 1..110: mol_type = other DNA
agtcgtgtgagccactctagcaaattagttgaacccaaagaggggatattgggaacctctaatttatagccagtcagtcaaaagcacaggtataacctaagcttgcagct

SEQ ID NO: 53340 - DNA, 110 bp, synthetic construct
  source 1..110: mol_type = other DNA
cctctaatttatagccagtcagtcaaaagcacaggtataacctaagcttgcagctggcatccgaagtggtaggcagtcctatgggactgagccctttacctgtagaatgt

SEQ ID NO: 53341 - DNA, 110 bp, synthetic construct
  source 1..110: mol_type = other DNA
atagctttctcacatagcatcatggaagaatgcagtccagagctggtgtggcgccttggccccatatgttggtccagggattgcggctcttagctcactgctccatcatt

SEQ ID NO: 53342 - DNA, 110 bp, synthetic construct
  source 1..110: mol_type = other DNA
gaccaagattattgcagtcgtgaagaacgatgacagatacaggagtgaaagggaaaagggagagttaggagctccagagttcgctaaaggagggatggggaggttgtgga

SEQ ID NO: 53343 - DNA, 110 bp, synthetic construct
  source 1..110: mol_type = other DNA
aagggagagttaggagctccagagttcgctaaaggagggatggggaggttgtggatgggagaagagtcctatagtctgaggattcactgtggcttttacaggatgaggag

SEQ ID NO: 53344 - DNA, 110 bp, synthetic construct
  source 1..110: mol_type = other DNA
aacagtcctgtttaggatttgctaaagcagggaggtcaccttgaaaaaacagacgagggtcccctttgccctagagtgacacggagggctccatctgctttgaaatctaa

SEQ ID NO: 53345 - DNA, 110 bp, synthetic construct
  source 1..110: mol_type = other DNA
agggtcccctttgccctagagtgacacggagggctccatctgctttgaaatctaagatctcaagtgcaagtagattcagggaacagaaatccacttgtgcacaaaaatgg

SEQ ID NO: 53346 - DNA, 110 bp, synthetic construct
  source 1..110: mol_type = other DNA
tggtagagctgggattaaaacagcagaactgtattctcccatagttctggaggccagaagtctgatatcaaggtgccagcaaagccggttccttctggaagctccgaggg

SEQ ID NO: 53347 - DNA, 110 bp, synthetic construct
  source 1..110: mol_type = other DNA
agaagtctgatatcaaggtgccagcaaagccggttccttctggaagctccgagggacaatcagtcccaggcctctctgcccgcttctggccgttgcccaccgcctttggc

SEQ ID NO: 53348 - DNA, 110 bp, synthetic construct
  source 1..110: mol_type = other DNA
tctgcttcaagcacccgattttgtacctaaaccaaatgcctctgactgtctccggttgggggttagagagcagctgtgcgagacctgcagagccccaggaatgaaggatg

SEQ ID NO: 53349 - DNA, 110 bp, synthetic construct
  source 1..110: mol_type = other DNA
cttgtccagctggtggcaattagctgatgagctgactcagcaagaatggccagcgcttggccagggagtggtcagtggaggcgtctaggggctaaaagaggaagccagag

SEQ ID NO: 53350 - DNA, 110 bp, synthetic construct
  source 1..110: mol_type = other DNA
taagtatagcctaggtgtgggactcctggatcacggcatagttttagctttagcggatgttgtcaaacagttttcccaagtggctgtacctatttatactcccagcagtg

SEQ ID NO: 53351 - DNA, 110 bp, synthetic construct
  source 1..110: mol_type = other DNA
gatgttgtcaaacagttttcccaagtggctgtacctatttatactcccagcagtggtgcatgagagttccaagctgctcactatgctcaccagcacttgaatatgtcagg

SEQ ID NO: 53352 - DNA, 110 bp, synthetic construct
  source 1..110: mol_type = other DNA
ctctctttttgttcctctagaaccttgtgtataaagccataaaggacttttcagaatatttaaatcctactctgttaattcagtgattcaaatggaacaagcttctaagg

SEQ ID NO: 53353 - DNA, 110 bp, synthetic construct
  source 1..110: mol_type = other DNA
atatttaaatcctactctgttaattcagtgattcaaatggaacaagcttctaaggagggaaggaatttaatactgcttggggaccaacactgttggatgacttcacgtgc

SEQ ID NO: 53354 - DNA, 110 bp, synthetic construct
  source 1..110: mol_type = other DNA
ccccgatgggccctgagaagaaggaccgagcgagcagctctcaccagtcacccaatatctggtttccacgaatgacagacacttaattacccaccattccaacaagcggg

SEQ ID NO: 53355 - DNA, 110 bp, synthetic construct
  source 1..110: mol_type = other DNA
cagccacacctcccccatccttgcctgggccccccactagagacacaacgtagtccatgcgttttcaggttttcagctacctagacgttgatgggaagcccaactctgcc

SEQ ID NO: 53356 - DNA, 110 bp, synthetic construct
  source 1..110: mol_type = other DNA
gggagcctggggacagggggtaggagtggaacttattgcacagcatttttagctttattttttcttttgagggctgtacccatggcatatggaagtttccaggcgaggag

SEQ ID NO: 53357 - DNA, 110 bp, synthetic construct
  source 1..110: mol_type = other DNA
gggggtaggagtggaacttattgcacagcatttttagctttattttttcttttgagggctgtacccatggcatatggaagtttccaggcgaggagtcagattggagctgc

SEQ ID NO: 53358 - DNA, 110 bp, synthetic construct
  source 1..110: mol_type = other DNA
tgccgtgcctctggcctgagcctgtaggtttgagcagcgcatggatctgctgaacgcatcctgcagaaaccttcctcccacccggagctggagcccaatgtcacctggcc

SEQ ID NO: 53359 - DNA, 110 bp, synthetic construct
  source 1..110: mol_type = other DNA
gcatcctgcagaaaccttcctcccacccggagctggagcccaatgtcacctggcccagttatcaagtgcagtcaggtcaaaccttcaggtgagcccctgcggcgtgcctg

SEQ ID NO: 53360 - DNA, 110 bp, synthetic construct
  source 1..110: mol_type = other DNA
gtgcttgctcttctctaaatcagccaatggccatgtgtctacgcctttgtccaagctgttctaacttctccctgtagagttccgctcgtctctcaaacgcaactcaaaac

SEQ ID NO: 53361 - DNA, 110 bp, synthetic construct
  source 1..110: mol_type = other DNA
catttttggctcttttccctggcttcttaacaggaggatgtctcagtctttggtctccttctcttgactggctaagctcatttactcactggtgatctcaatcaatggtg

SEQ ID NO: 53362 - DNA, 110 bp, synthetic construct
  source 1..110: mol_type = other DNA
taacaaaaacagcattccctaaggccggggagtcatgtaaacatttgtgctctccatctaagtgaattctatcaaatagtgtatatcagttagaagaaatatgagcctgc

SEQ ID NO: 53363 - DNA, 110 bp, synthetic construct
  source 1..110: mol_type = other DNA
tgagatgcctctgagacttccgagaattaacaagtggcctgagctcagatgcatggtaaactctggggtcattgatatggaggtgatggcctaaacaagaatattcagga

SEQ ID NO: 53364 - DNA, 110 bp, synthetic construct
  source 1..110: mol_type = other DNA
aggaacattcacatttgccaaatagcttgattattccaatcaaatgaagtatagctgcagcaaaaacaaggtagtctgaagtgaatagtcattaccgtagttgatttaat

SEQ ID NO: 53365 - DNA, 110 bp, synthetic construct
  source 1..110: mol_type = other DNA
cagggcccccctgtcgcctgcctttggtggaaattgcccttcaagccacgtgcgtagccctcggcaggcttggttgagtttttggctgagaaactggtccccaggttgcg

SEQ ID NO: 53366 - DNA, 110 bp, synthetic construct
  source 1..110: mol_type = other DNA
cttgaagcatgtgaatttttatttacttttaggaagtcataccttcataagattctaaaaccaaagagtataaaaggagataccaggcaaagttttactccaggaagttc

SEQ ID NO: 53367 - DNA, 110 bp, synthetic construct
  source 1..110: mol_type = other DNA
taaaaccaaagagtataaaaggagataccaggcaaagttttactccaggaagttctattctccatctgctcacttttgactcagtgccctccaacttctgttattttcat

SEQ ID NO: 53368 - DNA, 110 bp, synthetic construct
  source 1..110: mol_type = other DNA
ccaggatcaaggatgccttccgcgcccgatcccagctcaagtgagtggccttgggcaagacatcagcccgctccccggttcaagccctcgtagagtcccatccagatgat

SEQ ID NO: 53369 - DNA, 110 bp, synthetic construct
  source 1..110: mol_type = other DNA
caagacatcagcccgctccccggttcaagccctcgtagagtcccatccagatgatatgagtctccaccttccattgcgcctctgtctgccccccatgggaacgcctaagc

SEQ ID NO: 53370 - DNA, 110 bp, synthetic construct
  source 1..110: mol_type = other DNA
gagccctcaccaagtaagcactggtgatgtgggggctcacacggattgagctttcctgagctgaagagggccaccatgcaccgtttctcatttggtgcccacacccctga

SEQ ID NO: 53371 - DNA, 110 bp, synthetic construct
  source 1..110: mol_type = other DNA
actgaggaacagaaaggtaataataagcaaggttacaatggccaattactaccgtatttttaaaaccccaaagtataactgcctaaatgagggcgcagatgtccacatgt

SEQ ID NO: 53372 - DNA, 110 bp, synthetic construct
  source 1..110: mol_type = other DNA
gatttagaatttttatttgtagtgtccatcattattctggatggtacgtatccctcagttatcttaaatggtactacttcaccgcctcaattttgtggtctgcaaacctc

SEQ ID NO: 53373 - DNA, 110 bp, synthetic construct
  source 1..110: mol_type = other DNA
cagttatcttaaatggtactacttcaccgcctcaattttgtggtctgcaaacctcaaaaactctcttctgctcctgcttttaaaacttgtctcagggagttcccattgtg

SEQ ID NO: 53374 - DNA, 110 bp, synthetic construct
  source 1..110: mol_type = other DNA
tactgcatagagcatagttataatagctgctttaaagtcttttgagtgttctggtatatgaattatcttggagttgggttgactgtcttttcccttaataattggttagg

SEQ ID NO: 53375 - DNA, 110 bp, synthetic construct
  source 1..110: mol_type = other DNA
gtgttctggtatatgaattatcttggagttgggttgactgtcttttcccttaataattggttaggttttcctgtttctttttatgtaattttggattgtatcctggacat

SEQ ID NO: 53376 - DNA, 110 bp, synthetic construct
  source 1..110: mol_type = other DNA
aagggagggcatttgcttacagttgtgccaaatgccaactggtcaatgtggagacagttgctgttggaaaatcatttttgcagcttttagagtaaaaatcaactcaggcc

SEQ ID NO: 53377 - DNA, 110 bp, synthetic construct
  source 1..110: mol_type = other DNA
agttgctgttggaaaatcatttttgcagcttttagagtaaaaatcaactcaggccagaatcatcaatgaacgttaaatctaggggatatacttcaatttgcttattaatt

SEQ ID NO: 53378 - DNA, 110 bp, synthetic construct
  source 1..110: mol_type = other DNA
ccacccagcagggctggaggagaaaagatcgcttgctcagtagcacatgggctagtgactcgagctgcggggctgcagcctctgggatgtagaacaacagagcagcgatg

SEQ ID NO: 53379 - DNA, 110 bp, synthetic construct
  source 1..110: mol_type = other DNA
tgactcgagctgcggggctgcagcctctgggatgtagaacaacagagcagcgatgcagaggcagtcagaatcctgcggaggagttaggggcaccaggcatgagctgtgtg

SEQ ID NO: 53380 - DNA, 110 bp, synthetic construct
  source 1..110: mol_type = other DNA
gtcctgtgcttggtggcatgctctgctgtagctgtcttcaaattgttaacactattggaatgagaagccatgcattttcagtttgcactaggcacaacaagtttcataac

SEQ ID NO: 53381 - DNA, 110 bp, synthetic construct
  source 1..110: mol_type = other DNA
ccgggctgcctgtctcaggcttattaggccctcttcccattctgttctcagctggtaaatactctggcctcagtctgcctaaaaacacagtggcttaagtttgtttaaat

SEQ ID NO: 53382 - DNA, 110 bp, synthetic construct
  source 1..110: mol_type = other DNA
catctatggcaacagcaagcaagcaaactatgtgaactttgagcttgagttacaggttgttttcagcaccagaagcctgccatgcctgtcatcgtttttacgagcagctt

SEQ ID NO: 53383 - DNA, 110 bp, synthetic construct
  source 1..110: mol_type = other DNA
cctaagatcaggccttgcaccctggggcagatttgagttgggagggaaaatgaggatattgagaggggagaaggagctgagacgagccagaaggctgatctgaggccagg

SEQ ID NO: 53384 - DNA, 110 bp, synthetic construct
  source 1..110: mol_type = other DNA
atattgagaggggagaaggagctgagacgagccagaaggctgatctgaggccaggagcgtgggggaacagaagccagtgggggtatcctggtgggacttgcctttgggga

SEQ ID NO: 53385 - DNA, 110 bp, synthetic construct
  source 1..110: mol_type = other DNA
cggtcctatagtcaccaccacaatcaagacagttgcatcacttcccaaaattcctttgtaatccttgtaacaaccactccccaactctagcccctggcagctactaatct

SEQ ID NO: 53386 - DNA, 110 bp, synthetic construct
  source 1..110: mol_type = other DNA
ttgtaatccttgtaacaaccactccccaactctagcccctggcagctactaatctgttttctatcttttaaaagttttgcttttatagaatgtcatataaacagaatcat

SEQ ID NO: 53387 - DNA, 110 bp, synthetic construct
  source 1..110: mol_type = other DNA
gcaaagtcggggatcgaacctgcgtccccatggatactagttgggttctttaccactgagccatgatgggaacttcaggtcagagcttcttttcctgcccgcttgcatct

SEQ ID NO: 53388 - DNA, 110 bp, synthetic construct; identical to SEQ ID NO: 53387
  source 1..110: mol_type = other DNA

SEQ ID NO: 53389 - DNA, 110 bp, synthetic construct
  source 1..110: mol_type = other DNA
gcccccccaaactaggctgccagagaaaatacaggacgcccagtcaactgaggatttcagattgggaatgaggaacttcagtataagtatgtcccaaatattgcatgagg

SEQ ID NO: 53390 - DNA, 110 bp, synthetic construct
  source 1..110: mol_type = other DNA
acgcccagtcaactgaggatttcagattgggaatgaggaacttcagtataagtatgtcccaaatattgcatgagggtgtaattatactaaaaaaaaaaaattcattgttt

SEQ ID NO: 53391 - DNA, 110 bp, synthetic construct
  source 1..110: mol_type = other DNA
tagaaggatgactggctgctgggggaggctggatagtgggcaaagggagtgggcaaaactgaatgcaggagatggctgggaagtgtgtttacacaacccaggagagaagc

SEQ ID NO: 53392 - DNA, 110 bp, synthetic construct
  source 1..110: mol_type = other DNA
aaactgaatgcaggagatggctgggaagtgtgtttacacaacccaggagagaagctggaagggagcagagctaacctttgttaggacctctcaggctctcagggaggagg

SEQ ID NO: 53393 - DNA, 110 bp, synthetic construct
  source 1..110: mol_type = other DNA
cgtcttgccttggcttattcccactctgaagcctgtgcctgggtcctgaccccatggagcttgggggtacctgggctgagatagtcattacctggatgtgaaagatgaac

SEQ ID NO: 53394 - DNA, 110 bp, synthetic construct
  source 1..110: mol_type = other DNA
tttaaattttcttttgccatggagcctgggaagctataatttcttctttctttctttctctctccctctcttttttttggccacgcccatggcacgcagacgctcccagg

SEQ ID NO: 53395 - DNA, 110 bp, synthetic construct
  source 1..110: mol_type = other DNA
gtatctgcaaagaggcagagacaaatgggagctggcgggaggctgagacggggagcacctatgtttgagaaggtccaaaaggcggctggggccggcaggttgagcctggg

SEQ ID NO: 53396 - DNA, 110 bp, synthetic construct
  source 1..110: mol_type = other DNA
cacctatgtttgagaaggtccaaaaggcggctggggccggcaggttgagcctgggaatgagaggcggggggcttggcagcacccccgcccccccagctctgccatcagta

SEQ ID NO: 53397 - DNA, 110 bp, synthetic construct
  source 1..110: mol_type = other DNA
cccatatcagccattcagctttgtgtggtcaaaaattcagatgatgttcccagatagttgtcctgtgaatatccacgctggtcacagaaagtagttagagggctcagaat

SEQ ID NO: 53398 - DNA, 110 bp, synthetic construct
  source 1..110: mol_type = other DNA
gaaactatggtgctttgacacttgttaatgttgttactagattaattagtctccgttatagttacaggtgagagcaggaagtagctgcatatgtgaagtggttcctatta

SEQ ID NO: 53399 - DNA, 110 bp, synthetic construct
  source 1..110: mol_type = other DNA
cagcaggccggatgtttgcctgtcacgtacccacaactccctttggggtgtttctctgccacccaagagcttggagccttgctcccagctgcagcctgcctttctgataa

SEQ ID NO: 53400 - DNA, 110 bp, synthetic construct
  source 1..110: mol_type = other DNA
ctgccacccaagagcttggagccttgctcccagctgcagcctgcctttctgataaactagccccaacttcagcctttctgcccaggaggccaaaccaccaaacgttcagt

SEQ ID NO: 53401 - DNA, 110 bp, synthetic construct
  source 1..110: mol_type = other DNA
ccatagctcatggcaagccggatccccaacccactgagtgagactagggaccagggaaataaaccctcacttaaaaagacaaagagagaggagttcccattgtggggcag

SEQ ID NO: 53402 - DNA, 110 bp, synthetic construct; identical to SEQ ID NO: 53401
  source 1..110: mol_type = other DNA

SEQ ID NO: 53403 - DNA, 110 bp, synthetic construct
  source 1..110: mol_type = other DNA
agagacaggggaaatgatataaatttaccttgacacttggatactaagcattactcttttactaatgaattatacaacactaggcaagtgatttgagccatctggacact

SEQ ID NO: 53404 - DNA, 110 bp, synthetic construct
  source 1..110: mol_type = other DNA
cttttactaatgaattatacaacactaggcaagtgatttgagccatctggacactaattctcccataagcaataatgaaaaggcgagaccaaacagtctacatgttttct

SEQ ID NO: 53405 - DNA, 110 bp, synthetic construct
  source 1..110: mol_type = other DNA
cccaaaaaccaaaaaactgctaaggccaatgtcaaagaatgtactgtttatgtctcctcctagatgttttatgatttcagggcttacattgaagtctttaatttgagttt

SEQ ID NO: 53406 - DNA, 110 bp, synthetic construct
  source 1..110: mol_type = other DNA
aaaggtgaggtgatattatactttaaaaatatttagtgactagaacaaacaacacaacatcagagttctgctctgctctagtcaggaaatcctgaaaatacctgtggcta

SEQ ID NO: 53407 - DNA, 110 bp, synthetic construct
  source 1..110: mol_type = other DNA
atgaactatcatttttccttcttaagtctttggtattctattataggtaactggggagaacaaccttttcctcctcattcctgtagatatcagttttccaaaactttttt

SEQ ID NO: 53408 - DNA, 110 bp, synthetic construct
  source 1..110: mol_type = other DNA
aaacagaagcgtggggggggggggtggattttattcttattgaagtaaaaaagctggatataacccgccttcactgaacccaatgcttctgccaaagataccagccatgg

SEQ ID NO: 53409 - DNA, 110 bp, synthetic construct
  source 1..110: mol_type = other DNA
catccacatcccacccaccgctcttacacactctcagaccctagaccatcttcaccaccttttcacttccagaatgcaagctccttgaggccaggacatttttttttccg

SEQ ID NO: 53410 - DNA, 110 bp, synthetic construct
  source 1..110: mol_type = other DNA
atgtggcctaatggacaacagctttacttaatacaagaggatctgggtttgaatcctgacttcccaatctctacgagcttctatttccatgatagcatgggagtgataaa

SEQ ID NO: 53411 - DNA, 110 bp, synthetic construct
  source 1..110: mol_type = other DNA
ctgacttcccaatctctacgagcttctatttccatgatagcatgggagtgataaaatgcagcacacaggattaggatggtgattgaaattaaaggacccagtgcatgcct

SEQ ID NO: 53412 - DNA, 110 bp, synthetic construct
  source 1..110: mol_type = other DNA
aggcgagcgtgtgcacagacacggcggttcacctggacacacctctgcgtgtgagcaaccggcgtgagtaaggcctgagtgacggagggtgcaaggcctgggcggaagtg

SEQ ID NO: 53413 - DNA, 110 bp, synthetic construct
  source 1..110: mol_type = other DNA
caaccggcgtgagtaaggcctgagtgacggagggtgcaaggcctgggcggaagtgtgcctgatgagtgtatctatactcacgctgggacgagaggccaggttccggctac

SEQ ID NO: 53414 - DNA, 110 bp, synthetic construct; identical to SEQ ID NO: 53412
  source 1..110: mol_type = other DNA

SEQ ID NO: 53415 - DNA, 110 bp, synthetic construct; identical to SEQ ID NO: 53413
  source 1..110: mol_type = other DNA

SEQ ID NO: 53416 - DNA, 110 bp, synthetic construct
  source 1..110: mol_type = other DNA
taagatgcattgcctgccttcccacctgaacttcatataccagtgatttggcttatgttgtttactcctctgagaccttaggcagagtttttcaccttttggttttcagt

SEQ ID NO: 53417 - DNA, 110 bp, synthetic construct
  source 1..110: mol_type = other DNA
atcagaaaattggtgaagttataagctgtcaattttgttgaaaactatggcaaaatcacctttgctgtcccatggaggatctcttcttaaagtcctttgtcaagaaacaa

SEQ ID NO: 53418 - DNA, 110 bp, synthetic construct; identical to SEQ ID NO: 53417
  source 1..110: mol_type = other DNA

SEQ ID NO: 53419 - DNA, 110 bp, synthetic construct; identical to SEQ ID NO: 53417
  source 1..110: mol_type = other DNA

SEQ ID NO: 53420 - DNA, 110 bp, synthetic construct; identical to SEQ ID NO: 53417
  source 1..110: mol_type = other DNA

SEQ ID NO: 53421 - DNA, 110 bp, synthetic construct
  source 1..110: mol_type = other DNA
tgttgtcagtattagcaagcattctttgtgagaatttctaatgcatttgagaatctaagacacatgctttctctagcaacaacagaatagagctgccaagattgaaccaa

SEQ ID NO: 53422 - DNA, 110 bp, synthetic construct
  source 1..110: mol_type = other DNA
taagacacatgctttctctagcaacaacagaatagagctgccaagattgaaccaatctttttttcagtacattaatgatgtgtctacactgccttctggtttgtatggtt

SEQ ID NO: 53423 - DNA, 110 bp, synthetic construct
  source 1..110: mol_type = other DNA
ggttacaacaaaggcttcagttaaaatccatcaggaggagatctggagctggggtggcctttctgagatgtcctgaggacacatcttggcgggaggcagtactcctgaca

SEQ ID NO: 53424 - DNA, 110 bp, synthetic construct
  source 1..110: mol_type = other DNA
ggcctttctgagatgtcctgaggacacatcttggcgggaggcagtactcctgacagcttgcaggaatgatcgtctccatcctagactggaatctgggcagagcaccacaa

SEQ ID NO: 53425 - DNA, 110 bp, synthetic construct
  source 1..110: mol_type = other DNA
tggaggagggacgtgtgtggtgtcccctcttttggtgacctgaggtgatggtgggagctgtctgttcctgctcaaagcagatgtgagaggacagagccagcaagcaggtg

SEQ ID NO: 53426 - DNA, 110 bp, synthetic construct
  source 1..110: mol_type = other DNA
agctgtctgttcctgctcaaagcagatgtgagaggacagagccagcaagcaggtggtaggcagcagatctgagaaacccacagcaagtgccccctcccagagccgggatc

SEQ ID NO: 53427 - DNA, 110 bp, synthetic construct; identical to SEQ ID NO: 53425
  source 1..110: mol_type = other DNA

SEQ ID NO: 53428 - DNA, 110 bp, synthetic construct; identical to SEQ ID NO: 53426
  source 1..110: mol_type = other DNA

SEQ ID NO: 53429 - DNA, 110 bp, synthetic construct
  source 1..110: mol_type = other DNA
agcccctggctctgttctgagtgccccaggggatttgctgggttttggagggcaagggccagctgagtcctgcgaccacaactctgaagcagagcccaagaaaggagagc

SEQ ID NO: 53430 - DNA, 110 bp, synthetic construct
  source 1..110: mol_type = other DNA
gggccagctgagtcctgcgaccacaactctgaagcagagcccaagaaaggagagcatacccaaaggctcttgttcaagaactttcaggctctttggtgaaatgtccttca

SEQ ID NO: 53431 - DNA, 110 bp, synthetic construct
  source 1..110: mol_type = other DNA
tttggggtggtatattcatttcctgtggatcccataacaaattaccataaacttgatgacttaaaacaatagaaaattattgctatggttgtgaaggccgaacatcctaa

SEQ ID NO: 53432 - DNA, 110 bp, synthetic construct
  source 1..110: mol_type = other DNA
atgacttaaaacaatagaaaattattgctatggttgtgaaggccgaacatcctaaatcaggatcactgcgctgaaatggaagggtcagcagggccagcctccctcaggat

SEQ ID NO: 53433 - DNA, 110 bp, synthetic construct
  source 1..110: mol_type = other DNA
tttactattagtctctcatcgcataggcaggtgatgcaatttcttgaccaataggttatggcagaagtgacatcaggctgattctgggcccaggccttaagggacagtgg

SEQ ID NO: 53434 - DNA, 110 bp, synthetic construct
  source 1..110: mol_type = other DNA
gagaagccatataaaacatcaaagtaggccatgtgtcatttctagcccagaaagacttcatttctttaaaaaacgagagaaagagggagcaccatatgcatccaaaggac

SEQ ID NO: 53435 - DNA, 110 bp, synthetic construct
  source 1..110: mol_type = other DNA
ggagtatcggtatgattttatggaaacactgtatttcggcatccttttggagagaggcctgcgctgatcacgttggtactcaaatcctattctgcagagcagaatgtgtt

SEQ ID NO: 53436 - DNA, 110 bp, synthetic construct
  source 1..110: mol_type = other DNA
cgatgactcacgtggcagagcagccttgtgatttggatggtttatttttagagactttaatattcccttttaatatattcaattcctgttctatggggggaggagggact

SEQ ID NO: 53437 - DNA, 110 bp, synthetic construct
  source 1..110: mol_type = other DNA
aatgcggactaaatataattattcagacagctggtgaaaaacaaatatagctcagtggattcctagtggaaacagctacatggtctagaaattaggtaatttattttaag

SEQ ID NO: 53438 - DNA, 110 bp, synthetic construct
  source 1..110: mol_type = other DNA
gtggcagggcctggctcctgcatttgctctttcatgaactaagagtctgtttgtaaaagcccaccttccaagggaagcatttaaagaccaatgctgtctttgcccttagc

SEQ ID NO: 53439 - DNA, 110 bp, synthetic construct
  source 1..110: mol_type = other DNA
aaagcccaccttccaagggaagcatttaaagaccaatgctgtctttgcccttagcaccgggcattgtggatgaatcctgaggcgtgcttttcctttgcctttggttgcta

SEQ ID NO: 53440 - DNA, 110 bp, synthetic construct
  source 1..110: mol_type = other DNA
tgggcattaactggccggagggcttgtttcaagaatggccctgaggtgtcctgctctaacagctaggctccaaagtaggcttgccaagagcttctggcaggagtcgtttc

SEQ ID NO: 53441 - DNA, 110 bp, synthetic construct
  source 1..110: mol_type = other DNA
caatgacgggaacgccttcactgctgaaatcttcagtttcaagatgtttagatgtctcatttctttgtaaatagtattcatggttctttttgcatgaatgaaatcatgat

SEQ ID NO: 53442 - DNA, 110 bp, synthetic construct
  source 1..110: mol_type = other DNA
tgtgggtgcatgtatctctatgtggttcaaggcctgcagagttgtcaccttcaaggaccagccccccacatacacacagttgtgtctggggaggggccacagaggaagga

SEQ ID NO: 53443 - DNA, 110 bp, synthetic construct
  source 1..110: mol_type = other DNA
gaccagccccccacatacacacagttgtgtctggggaggggccacagaggaaggaggtgacaccccattcccattgtggagtggaaagagttgagggactaatgcagtaa

SEQ ID NO: 53444 - DNA, 110 bp, synthetic construct
  source 1..110: mol_type = other DNA
tcggcagaagaaaggaaggaggaagtcctggcctggcagagctcatgggcttctggtggagttgggggtggacgaaggctgcctctttccttttttacgtcttgctcaag

SEQ ID NO: 53445 - DNA, 110 bp, synthetic construct
  source 1..110: mol_type = other DNA
atgttatttatggtgctaaggaataggaagctctctagtggcccataactaagagagaacagatacccaccttaaaacatgtaccatgtctttaagatgacaatactcac

SEQ ID NO: 53446 - DNA, 110 bp, synthetic construct
  source 1..110: mol_type = other DNA
tcaagaaagatcctcacataactggggaggatgaacagaaaaacaagaaaaggaagatgggactgcactcctaggaggagctataaaagaggaaagcttccttcagcctg

SEQ ID NO: 53447 - DNA, 110 bp, synthetic construct
  source 1..110: mol_type = other DNA
gatgggactgcactcctaggaggagctataaaagaggaaagcttccttcagcctgggaacgtcctttactgactgggtccactgggactgatagggagcttaagaggctc

SEQ ID NO: 53448 - DNA, 110 bp, synthetic construct
  source 1..110: mol_type = other DNA
caagaacaccctccttggctgtctgttaatcctacttcttaggaagtactctttcctcttccctgaccacggctctccttttcagctgtcttagttccaatcttttccct

SEQ ID NO: 53449 - DNA, 110 bp, synthetic construct
  source 1..110: mol_type = other DNA
ggtctttgaaatccattggctgagaaaaaaatgagcccacatacccaagacagctcagcatccttatcatccagacccccccccacacacacacactgttaacggcagct

SEQ ID NO: 53450 - DNA, 110 bp, synthetic construct
  source 1..110: mol_type = other DNA
cagcatccttatcatccagacccccccccacacacacacactgttaacggcagctgcccagcagccctgcaccccagtgtatcagctctagcgacagccctgtggctgta

SEQ ID NO: 53451 - DNA, 110 bp, synthetic construct
  source 1..110: mol_type = other DNA
ttgtgaaatgagtggccaagacagctcagaagccttatcatcccggctccaaagccaaggatttaattttgattgctgctgtgttcacagttcactgtagaataattatg

SEQ ID NO: 53452 - DNA, 110 bp, synthetic construct
  source 1..110: mol_type = other DNA
gcttaagtttaaatgatgcaggctaaacattaaccagaccagaccacaagccagatgtgaacaaagatgaccccagctgtgcctgggtcagtgttgccccagaagcgagg

SEQ ID NO: 53453 - DNA, 110 bp, synthetic construct
  source 1..110: mol_type = other DNA
tgtgaacaaagatgaccccagctgtgcctgggtcagtgttgccccagaagcgaggaatccacagactccaggcaaggatcaagaggccaagtttgcattgtctggctcaa

SEQ ID NO: 53454 - DNA, 110 bp, synthetic construct
  source 1..110: mol_type = other DNA
gttagaagacaatgttttataccaggtgtgttctggagtcttgcatcagaatggcctggggtgcttgtttagaaggcagctttctggtcctgtgccccagtttctgcatc

SEQ ID NO: 53455 - DNA, 110 bp, synthetic construct
  source 1..110: mol_type = other DNA
ctggggtgcttgtttagaaggcagctttctggtcctgtgccccagtttctgcatcagtaggtcggttaggaattggcattttagcatggtctctgggaagtttgtaggca

SEQ ID NO: 53456 - DNA, 110 bp, synthetic construct
  source 1..110: mol_type = other DNA
gtttctcaacgtagttgtgtcatttcaggggagaagacttatccccagggtgctgtaacaccagtgtcatgagctgggcagtgatggaagtttattctggtctccaactt

SEQ ID NO: 53457 - DNA, 110 bp, synthetic construct
  source 1..110: mol_type = other DNA
ctcagtttcttaccagatcatccttcccatcgtggcaacttggttcatcaaagccagtagagcagggaatctgctctcaagacgggagctatagttctatgtatgatagt

SEQ ID NO: 53458 - DNA, 110 bp, synthetic construct
  source 1..110: mol_type = other DNA
agtagagcagggaatctgctctcaagacgggagctatagttctatgtatgatagtcacagaagagacgtcctatcacctttgtcatattctgctggtgagaaaaaagtca

SEQ ID NO: 53459 - DNA, 110 bp, synthetic construct
  source 1..110: mol_type = other DNA
atcccagcattacattgtgttttcaagtaaatgttgacaaagtggctgaagtatccattcagctccatcatttgagttgtgtatcctgtacttttcattgtttgggtaat

SEQ ID NO: 53460 - DNA, 110 bp, synthetic construct
  source 1..110: mol_type = other DNA
taaatatgatttattcaatgtacttcttaagtctagttctgatcctggtttctaggaagaagctattctttacccatcattacgaatgatctagggaattcctgtagtgg

SEQ ID NO: 53461 - DNA, 110 bp, synthetic construct
  source 1..110: mol_type = other DNA
cttaagtctagttctgatcctggtttctaggaagaagctattctttacccatcattacgaatgatctagggaattcctgtagtggctcagcagaaacaaatctgactagt

SEQ ID NO: 53462 - DNA, 110 bp, synthetic construct
  source 1..110: mol_type = other DNA
cagccttagacaggagatattcctgcatggaacacacagcctcctttgactggcctcacgtccagctctaagcaagattgtgaaggaaaaaagcaaagttcatgttcagt

SEQ ID NO: 53463 - DNA, 110 bp, synthetic construct
  source 1..110: mol_type = other DNA
accgaggcttagccagcctggcttggctaccttccaacacaggaaaaagatggcttttacccaacttcaaattattaggcagctctggcattccagaggctccaaaggct

SEQ ID NO: 53464 - DNA, 110 bp, synthetic construct
  source 1..110: mol_type = other DNA
gagtaaggattacaagggtccaagcccccacttcaaacaaagtggcaggagagatgctggaagacctcagacccatctcttgtgggttaaggactctgagagcctcccaa

SEQ ID NO: 53465 - DNA, 110 bp, synthetic construct
  source 1..110: mol_type = other DNA
gctggaagacctcagacccatctcttgtgggttaaggactctgagagcctcccaactagctctaccttcagacgaaggccctctgtgtggtggtgatggcaactgggctc

SEQ ID NO: 53466 - DNA, 110 bp, synthetic construct
  source 1..110: mol_type = other DNA
aagacctttgcaacctaattaaaacacactcattgaatgatgagtgaatccaatagccccagaacaagcattgctttgcaccatcttctattttagtgtctattcaacta

SEQ ID NO: 53467 - DNA, 110 bp, synthetic construct
  source 1..110: mol_type = other DNA
gccccccccccaccactaagcccaatatctcagcccctagatggatggctctgcaggtagcagaggcctcgagggtcttcaggaaaaatcctgtgccaactctctcatcc

SEQ ID NO: 53468 - DNA, 110 bp, synthetic construct
  source 1..110: mol_type = other DNA
ggtagcagaggcctcgagggtcttcaggaaaaatcctgtgccaactctctcatcctgtccccacgtctccccatcagagcaagccacaccccgatctgcaggagcacccg

SEQ ID NO: 53469 - DNA, 110 bp, synthetic construct
  source 1..110: mol_type = other DNA
cagtagcagaaaatcacctaagaaaaaacagtttttaaaggaggaatggaggggcaatgcccctgtcccaaagcagctgttgtcattcttgatggtggggctgctccggc

SEQ ID NO: 53470 - DNA, 110 bp, synthetic construct
  source 1..110: mol_type = other DNA
aatgcccctgtcccaaagcagctgttgtcattcttgatggtggggctgctccggccaggcacagccacaaagcctgcttcctggggtctgaaggaccctcctcagcccag

SEQ ID NO: 53471 - DNA, 110 bp, synthetic construct
  source 1..110: mol_type = other DNA
aacaggccccagattagcagctgggagctgcagtgcctgcacaccggggcattcattctgaagacatcccagttggattggcttcctggggcctgaggtcatggggccac

SEQ ID NO: 53472 - DNA, 110 bp, synthetic construct
  source 1..110: mol_type = other DNA
aggaagaattgtggagatccacaaagggtctccttcaagttttcagctcagtactgatcagtgcaagcttgtgaggaaactactccatgccgaggaaagagccacttgga

SEQ ID NO: 53473 - DNA, 110 bp, synthetic construct
  source 1..110: mol_type = other DNA
ccagcaaagcaccagaagccaagagagacctagaacagcttctccctcacagtcctcggcaggaaccaaccctgccaacacctgatctcggacttctggcctccagaaca

SEQ ID NO: 53474 - DNA, 110 bp, synthetic construct
  source 1..110: mol_type = other DNA
tcggcaggaaccaaccctgccaacacctgatctcggacttctggcctccagaacagtggggcaatgagtttctgttgtttcagccacccagtctgtggtatggtgttaca

SEQ ID NO: 53475 - DNA, 110 bp, synthetic construct
  source 1..110: mol_type = other DNA
ccttgcccaggggacagactgtacgggcctgagcaatactcccacacacgtctattcaaagtcagcttctctcaggttctgtttatttagaggcagaacagcttgacggc

SEQ ID NO: 53476 - DNA, 110 bp, synthetic construct
  source 1..110: mol_type = other DNA
agaattcttccactaaattctgctttgactggcactagcctgactggttttctagtgctttgcacaaagatgaatgattagggcattcatccacctgtaagcctcagtcc

SEQ ID NO: 53477 - DNA, 110 bp, synthetic construct
  source 1..110: mol_type = other DNA
aaccaccttggaagttataaacacactccatctttcattcaaaaccaccagatgccgactaatgcccacttcatccgtgtgaagctgggaccaagaaaccagcgcttaag

SEQ ID NO: 53478 - DNA, 110 bp, synthetic construct
  source 1..110: mol_type = other DNA
gagtgtgctggtttaataaagagaagttagagaaatgtagacagaccactagatgtgataataagacatcttcatttcccataatctcaacaagatggtaaagtgctcat

SEQ ID NO: 53479 - DNA, 110 bp, synthetic construct; identical to SEQ ID NO: 53478
  source 1..110: mol_type = other DNA

SEQ ID NO: 53480 - DNA, 110 bp, synthetic construct
  source 1..110: mol_type = other DNA
tggcacatgtttataatatttttgtatcattgtgtacctttaaggtaaattcctgaaagtactattgctgggtcagagggttaatgtacatgcagtttttggttttttgg

SEQ ID NO: 53481 - DNA, 110 bp, synthetic construct
  source 1..110: mol_type = other DNA
cctgcattttttattgggaagtcagtcttcctctgcatagtggaaggcaactcattgatgcgcagggatagctggcgtttaaagggtgacatcttctggctaagagcagg

SEQ ID NO: 53482 - DNA, 110 bp, synthetic construct
  source 1..110: mol_type = other DNA
agaggaaaacgaaaaagaaaaaaaaaaaaaggaacacaaggccaatgctttcattggagctgagaaaacaaatacatctaagaaccaaatcacacctgtgaaccacaact

SEQ ID NO: 53483 - DNA, 110 bp, synthetic construct
  source 1..110: mol_type = other DNA
ctgaaaatgaaagacaagccacaaacgaggagaacatatgccacacacataaataaaatattaggagttcccgctgtggtacagcagaaatgcatctgactagtatccat

SEQ ID NO: 53484 - DNA, 110 bp, synthetic construct
  source 1..110: mol_type = other DNA
aagccacaaacgaggagaacatatgccacacacataaataaaatattaggagttcccgctgtggtacagcagaaatgcatctgactagtatccatgaggatgtggctttg

SEQ ID NO: 53485 - DNA, 110 bp, synthetic construct
  source 1..110: mol_type = other DNA
gactgaatgggggctgatagagtgggatgagattacacagaagtgaatgcacaggtatcactaaaatggaattgggtaatacggattcagtccagctcagctgctgctgg

SEQ ID NO: 53486 - DNA, 110 bp, synthetic construct
  source 1..110: mol_type = other DNA
tatcactaaaatggaattgggtaatacggattcagtccagctcagctgctgctggtttttttttttttttttttttttttttttgcttttaaggaccacaccaacaaagg

SEQ ID NO: 53487 - DNA, 110 bp, synthetic construct
  source 1..110: mol_type = other DNA
tcattgtaagaacaccagtgataacccctcactaactaggtctactggaggagaaaataaagaccaaaagaataagaacattcagtaaaggaatacaccattagtgttat

SEQ ID NO: 53488 - DNA, 110 bp, synthetic construct
  source 1..110: mol_type = other DNA
gcagctataggcatcagggaatgctacctccactgagaccacaaggtcaatgagagtgatcccttctcagtttaggtccatcgcaacattctatccaggggaaactatgt

SEQ ID NO: 53489 - DNA, 110 bp, synthetic construct
  source 1..110: mol_type = other DNA
gattcatcataaaatgcagagttgggaaaaattagcttgttttgttgtaatgaagagttccttgggaaagggaaagtacctggcaaaggaattaggtgacttctagagtg

SEQ ID NO: 53490 - DNA, 110 bp, synthetic construct
  source 1..110: mol_type = other DNA
cgtgtgttgagaggagaaagggaggtacagatatgggaagtgaggacacacacgtgtgcaagaaaaatctcttggcacatataccaatattagcctgtataaataaatgt

SEQ ID NO: 53491 - DNA, 110 bp, synthetic construct
  source 1..110: mol_type = other DNA
cagctgtactgtgtgccaagacctgagctgggcatggactcacacatgaacaggacggtcctgtccttaaagaactttcatttgcatagtcttagtcctgctatcacagg

SEQ ID NO: 53492 - DNA, 110 bp, synthetic construct
  source 1..110: mol_type = other DNA
cggtcctgtccttaaagaactttcatttgcatagtcttagtcctgctatcacaggccaacctactggtgctgtccaagcttaccacccctggcttacacgcctccctgcc

SEQ ID NO: 53493 - DNA, 110 bp, synthetic construct
  source 1..110: mol_type = other DNA
catcagtaggctcaggcctagttcaacgaagctgaacacaaatccttctccaactgcaggcccataagccacttgccccttgattgtcactcactgcctcaaactacatg

SEQ ID NO: 53494 - DNA, 110 bp, synthetic construct
  source 1..110: mol_type = other DNA
gctgatggggagggaagtctctgtcacctttaaaccagcttcccgccacagggcaagggggggcccgggtgctgggctttgaggccctaaatccccttcccaccctcacc

SEQ ID NO: 53495 - DNA, 110 bp, synthetic construct
  source 1..110: mol_type = other DNA
gagtagctagctgccatgtccttaggcagccctgtagacaggaattgaggcctgccaacaaccacatgagttagcttgggaaaggttacctccccctacccccaagccaa

SEQ ID NO: 53496 - DNA, 110 bp, synthetic construct
  source 1..110: mol_type = other DNA
caacaaccacatgagttagcttgggaaaggttacctccccctacccccaagccaatcgagccttcggatgagaacttcaaccccagcctagagctgcctcatgagagtcc

SEQ ID NO: 53497 - DNA, 110 bp, synthetic construct
  source 1..110: mol_type = other DNA
gggcaatttgcatgctgggttaggtcttcaaggtagcagggtggttcaaagtcttggttcccttcaggccatatcacactagattctgtttctctctctctccccaccac

SEQ ID NO: 53498 - DNA, 110 bp, synthetic construct
  source 1..110: mol_type = other DNA
ttaattataaagaggggaatgtggcagaaaaactccatgagttatgcccggctggagtggatgtttactttgacaatgttggtggtgacatcagtgatacagtgataagt

SEQ ID NO: 53499 - DNA, 110 bp, synthetic construct
  source 1..110: mol_type = other DNA
agtggatgtttactttgacaatgttggtggtgacatcagtgatacagtgataagtcaggtggtttattgacttgtttgttataaatttgagtaccacatttaaaaaaaat

SEQ ID NO: 53500 - DNA, 110 bp, synthetic construct
  source 1..110: mol_type = other DNA
aagcaggtacatacatacatacacaaacaaacaaacaaatcaagccagagttcctgttgtggctcagtggttaacaaacctggctagtatccatgaggacatggcttcca

SEQ ID NO: 53501 - DNA, 110 bp, synthetic construct; identical to SEQ ID NO: 53500
  source 1..110: mol_type = other DNA

SEQ ID NO: 53502 - DNA, 110 bp, synthetic construct
  source 1..110: mol_type = other DNA
tagtgcctgcctaattgcttactagttcaaatatcaagacactcaggctgagtttaacctcgggctggcagctcttgagtcaaatgtccagctttgaactattagctgag

SEQ ID NO: 53503 - DNA, 110 bp, synthetic construct
  source 1..110: mol_type = other DNA
aacctcgggctggcagctcttgagtcaaatgtccagctttgaactattagctgaggctgggatcacataggtagggcttctcctctagggcctgtgggcgagacaggcat

SEQ ID NO: 53504 - DNA, 110 bp, synthetic construct
  source 1..110: mol_type = other DNA
gctacctaccaaagttttttgcccactttcatagaagaaccctcagctctagctcagtggttctcaaactttagcatgcatcagaatcacctggacggcttgttaaagta

SEQ ID NO: 53505 - DNA, 110 bp, synthetic construct
  source 1..110: mol_type = other DNA
ggaaattgggagctaccctaatgttcctttgttcatgctatcctcttggctggttcctcccccaataatcaaatacttcacaccaattcatgtggaaggagtattttttt

SEQ ID NO: 53506 - DNA, 110 bp, synthetic construct
  source 1..110: mol_type = other DNA
ttatttgacttcagaaataattcattgttctgcatgaaatgcttaaaagcagagcccttcctccatctggaaaaattaagtctcaagggcatcttgggttcattgttcta

SEQ ID NO: 53507 - DNA, 110 bp, synthetic construct
  source 1..110: mol_type = other DNA
aatagttcatctacttttggccactcctgctgctgcttatgtgctcatgcggtactagcctggtacctcctctgtgaagtggcagctgaggagacaccactgtttcccat

SEQ ID NO: 53508 - DNA, 110 bp, synthetic construct
  source 1..110: mol_type = other DNA
cctagctgggtgacactgataggttctttaagcctctgagtctcagtttgctcatctatgaaatggagcttataatgcctacatgatgagctagagaatgtctgaactta

SEQ ID NO: 53509 - DNA, 110 bp, synthetic construct
  source 1..110: mol_type = other DNA
ctatgaaatggagcttataatgcctacatgatgagctagagaatgtctgaacttaaagagctaggcacatgaggggctcccaacaaataacagctgctattattaaacaa

SEQ ID NO: 53510 - DNA, 110 bp, synthetic construct
  source 1..110: mol_type = other DNA
attcctgccttattttccaatggttattaagaggaataacctaatattcattgagtacctaatctgtgccaggcattgtgctgagagcttcccaaatgttaactcagcac

SEQ ID NO: 53511 - DNA, 110 bp, synthetic construct
  source 1..110: mol_type = other DNA
tacctaatctgtgccaggcattgtgctgagagcttcccaaatgttaactcagcacttaatttgtacagaaaccttgaaaagtagaaacaaaaagtattgctattttacct

SEQ ID NO: 53512 - DNA, 110 bp, synthetic construct
  source 1..110: mol_type = other DNA
gagctaggtcagggcgctttcacacccccagctgggtagagtggacgagacaatagctgctatcactttaccattggaagtgacccccgaatttgcacttctttcatctc

SEQ ID NO: 53513 - DNA, 110 bp, synthetic construct
  source 1..110: mol_type = other DNA
gctgctatcactttaccattggaagtgacccccgaatttgcacttctttcatctcgggactgcagcacttgagggtgggcgatttcctggggggagtggcttaagccgct

SEQ ID NO: 53514 - DNA, 110 bp, synthetic construct
  source 1..110: mol_type = other DNA
tgatctgccctaaaaagaaacacaagcaaacaaaaagcacttattgagcgcctactatataccagacaccatgccgggtttttaacgatgttaaccaatataatctaatt

SEQ ID NO: 53515 - DNA, 110 bp, synthetic construct
  source 1..110: mol_type = other DNA
taaaatattgattcttaggtcccaggaaacttgttagctggaaaaggaaatagtaaaacacaaagaatgtccaaagaagtttaaggttgtatgagtaatctcagggacaa

SEQ ID NO: 53516 - DNA, 110 bp, synthetic construct
  source 1..110: mol_type = other DNA
gtcaactttaagacttttcctgggttatcagaaaggaggtggtttttatttttctattttctgggtgagtttgcaaggctaggaggatataggcctggagtatctggtgg

SEQ ID NO: 53517 - DNA, 110 bp, synthetic construct
  source 1..110: mol_type = other DNA
attttctgggtgagtttgcaaggctaggaggatataggcctggagtatctggtggccacttttttttggtctttttatggtcccacctatggcatatggaagctcccgag

SEQ ID NO: 53518 - DNA, 110 bp, synthetic construct
  source 1..110: mol_type = other DNA
tactgagtcactaaatcaagatctctggcccccggggagggggtacatggaagtggggaagagggataggagagggccctgcatggaatgggaatccctcaaatgtgggc

SEQ ID NO: 53519 - DNA, 110 bp, synthetic construct
  source 1..110: mol_type = other DNA
gccatgtcgccagcacaccaggtatggcctctggggaagggcctgggaggtccactggacttggggtgcctccaaaaagcctttcagtgaggattccgagtcctcttcag

SEQ ID NO: 53520 - DNA, 110 bp, synthetic construct
  source 1..110: mol_type = other DNA
tcttcctaggcctgcttcctgtttgcctgctccagatgcaagcccttgtttcaaggctacatggctctgaaattgatcattttaaggcacctattaccctctaattccgt

SEQ ID NO: 53521 - DNA, 110 bp, synthetic construct
  source 1..110: mol_type = other DNA
aaggcctagacaattgcctttctagtttctcagtagccagtctggcctctagagtatccggctcgccacagccacttagtctctctaagacagagctttgcttgtgtcac

SEQ ID NO: 53522 - DNA, 110 bp, synthetic construct
  source 1..110: mol_type = other DNA
atccggctcgccacagccacttagtctctctaagacagagctttgcttgtgtcactcagtcaccaagagatctttttttgcctcctatcccctatgtcacagaaatcaca

SEQ ID NO: 53523 - DNA, 110 bp, synthetic construct
  source 1..110: mol_type = other DNA
tttcagtcactgtcccttcattgtcctgaattctaacactatatatcaacttcggctatttttcaactcatatgtgtgaaaacacacagtttatattcttttctgtctag

SEQ ID NO: 53524 - DNA, 110 bp, synthetic construct
  source 1..110: mol_type = other DNA
ctatttttcaactcatatgtgtgaaaacacacagtttatattcttttctgtctagcttcttttgctcaacattgtttgcaagattcatctgagttgtttcatgtagttat

SEQ ID NO: 53525 - DNA, 110 bp, synthetic construct
  source 1..110: mol_type = other DNA
ggtattctttaagtgttgtaattcagtgatgaagccttctgggtttgagcttttctttgttggcagtttcttgactactaattaaatttcttcacttatagttctattct

SEQ ID NO: 53526 - DNA, 110 bp, synthetic construct
  source 1..110: mol_type = other DNA
atcagatttgcacttcaaaagcatctttgacacaggtgtggaggatgagttaaagaaagtgagtagaagctcaggttagttgggaagctttcaaaataatccagccgaag

SEQ ID NO: 53527 - DNA, 110 bp, synthetic construct
  source 1..110: mol_type = other DNA
gcaggaccttgagcccaatggccaggacttggagaaccagacaggctcatccctgacactggctggttggacaaaacccagcccgtcctacacccttcaggctccacacc

SEQ ID NO: 53528 - DNA, 110 bp, synthetic construct
  source 1..110: mol_type = other DNA
gggtggcccgtgggttcccaatactccctctaccctcctctggggaagcaccggactccctatttcccaccagactttgaactgcacaccctcatcccgctttgagggcg

SEQ ID NO: 53529 - DNA, 110 bp, synthetic construct
  source 1..110: mol_type = other DNA
ctccctatttcccaccagactttgaactgcacaccctcatcccgctttgagggcgaacagccctcccagctgcagatggacctcccctttctctcccttccccggggcca

SEQ ID NO: 53530 - DNA, 110 bp, synthetic construct
  source 1..110: mol_type = other DNA
attccaaaggactgtcctcagtagtctagataaaagcagttactaaatgaagagccatttcaccagggatagaaactatttgttttaaaaatatcaatctgtgtataaat

SEQ ID NO: 53531 - DNA, 110 bp, synthetic construct
  source 1..110: mol_type = other DNA
ttcatggaaagacaaaagattcttcttcctcagaaacaggagcgaaagaagttaaaatggagggaggcaccctgggaaattctgccagactggaggggagcttagggagt

SEQ ID NO: 53532 - DNA, 110 bp, synthetic construct
  source 1..110: mol_type = other DNA
aatggagggaggcaccctgggaaattctgccagactggaggggagcttagggagttgatgacagacaagccccatgctgagataattagggccttgagaagagtgggaaa

SEQ ID NO: 53533 - DNA, 110 bp, synthetic construct
  source 1..110: mol_type = other DNA
gagtaatactgtggccctttagaaacaatgcaagcagcatcactgctgaagcatttttactaaaacgtttgacttcaatctaatcaagcttaagtctaacttccagttta

SEQ ID NO: 53534 - DNA, 110 bp, synthetic construct
  source 1..110: mol_type = other DNA
gattcttcccactgtctgttcaccacagcacagcttcagcattattcaaacacgagtgaaaccacaaaaccacagaccacctgagtccagaccatatagtctcttgcaca

SEQ ID NO: 53535 - DNA, 110 bp, synthetic construct
  source 1..110: mol_type = other DNA
ggtgtcatgtatgaacacactgctgttcactcgctggctgatacttcctggtcacctcctccccgccccggatgcctccctcgtttgtaagagtgacctttctcctcctc

SEQ ID NO: 53536 - DNA, 110 bp, synthetic construct
  source 1..110: mol_type = other DNA
ctcctccccgccccggatgcctccctcgtttgtaagagtgacctttctcctcctcccaggaatatccctgactcttctctcacctctgcatccaggccccaagtaggtcc

SEQ ID NO: 53537 - DNA, 110 bp, synthetic construct; identical to SEQ ID NO: 53535
  source 1..110: mol_type = other DNA

SEQ ID NO: 53538 - DNA, 110 bp, synthetic construct; identical to SEQ ID NO: 53536
  source 1..110: mol_type = other DNA

SEQ ID NO: 53539 - DNA, 110 bp, synthetic construct
  source 1..110: mol_type = other DNA
caaatgaaggagcaaattcgcacctactctgtgaagtttcccattcccggcaaacagactggagaaagcaaaaattcctcacccacagacaccctctgggacaggtgacc

SEQ ID NO: 53540 - DNA, 110 bp, synthetic construct
  source 1..110: mol_type = other DNA
agactggagaaagcaaaaattcctcacccacagacaccctctgggacaggtgacctataatttattccaaaccacttgattaagagaaaggaagaaaatggttttgccaa

SEQ ID NO: 53541 - DNA, 110 bp, synthetic construct
  source 1..110: mol_type = other DNA
ctcttcccgcagcagggtgagcatcacgccgtgcatttgctgtgtggtttggacgagcttgctgagttttctgccttttgttatgatactatcagctgttccctcatagt

SEQ ID NO: 53542 - DNA, 110 bp, synthetic construct
  source 1..110: mol_type = other DNA
tgtgtggagctggtggtccccaaactgcagcccccaactttcctggctaattttgcctccctgggagtgtgtctccagcaagactgggctcccaagctgggcgcccgcca

SEQ ID NO: 53543 - DNA, 110 bp, synthetic construct
  source 1..110: mol_type = other DNA
cctccctgggagtgtgtctccagcaagactgggctcccaagctgggcgcccgccagtcagtctggccagggaaggaactattttgggaatttttatgatggaacaatatt

SEQ ID NO: 53544 - DNA, 110 bp, synthetic construct
  source 1..110: mol_type = other DNA
cacaccccttaattctcctttgcacagttgtaattatttagtcaattagctaattattcactcaccggagaactgggccatctttgattgtggttgtattgccgcggccc

SEQ ID NO: 53545 - DNA, 110 bp, synthetic construct
  source 1..110: mol_type = other DNA
attcactcaccggagaactgggccatctttgattgtggttgtattgccgcggccctgtccacataaccaaatatttgttgaatgaatgaatgaagaaatgaatgaaaatc

SEQ ID NO: 53546 - DNA, 110 bp, synthetic construct
  source 1..110: mol_type = other DNA
gtttgaacatacacaccgtttgtaactactgatctgtgcgtgcaaggaaaagagaagacaggaataatttggatgccgaagctgtcagaaacttgcagctgtcctccata

SEQ ID NO: 53547 - DNA, 110 bp, synthetic construct
  source 1..110: mol_type = other DNA
agacaggaataatttggatgccgaagctgtcagaaacttgcagctgtcctccataacctctgagttaaaggttttgcatccatcacagctcatttaatgtacccattgaa

SEQ ID NO: 53548 - DNA, 110 bp, synthetic construct; identical to SEQ ID NO: 53546
  source 1..110: mol_type = other DNA

SEQ ID NO: 53549 - DNA, 110 bp, synthetic construct; identical to SEQ ID NO: 53547
  source 1..110: mol_type = other DNA

SEQ ID NO: 53550 - DNA, 110 bp, synthetic construct
  source 1..110: mol_type = other DNA
gccggggtgggggtcgcaatgtaacccaagctccagaaggatgggactctggaggagaggtcaacacttttttcttttggacgaagtttttttcagtcggtggtcttcac

SEQ ID NO: 53551 - DNA, 110 bp, synthetic construct
  source 1..110: mol_type = other DNA
agttggcactggcctttctcctttctggaagacagatgcaatagaggaggtggggaaaccattttgggaccatgagacaagcgtgtacacaaaggaggaaaaaggattcc

SEQ ID NO: 53552 - DNA, 110 bp, synthetic construct
  source 1..110: mol_type = other DNA
aaaccattttgggaccatgagacaagcgtgtacacaaaggaggaaaaaggattccagagctctggtaatgctgaagaaatgtattgatacatcctctggaaggcttgccc

SEQ ID NO: 53553 - DNA, 110 bp, synthetic construct; identical to SEQ ID NO: 53551
  source 1..110: mol_type = other DNA

SEQ ID NO: 53554 - DNA, 110 bp, synthetic construct; identical to SEQ ID NO: 53552
  source 1..110: mol_type = other DNA

SEQ ID NO: 53555 - DNA, 110 bp, synthetic construct
  source 1..110: mol_type = other DNA
cattgtctttatccatttgtctattgatgggcattcaggttgcttccatgtgctggctactgtaaacgatgccacagtgaatataggagtgcatacatatgtatttgaat

SEQ ID NO: 53556 - DNA, 110 bp, synthetic construct
  source 1..110: mol_type = other DNA
gctactgtaaacgatgccacagtgaatataggagtgcatacatatgtatttgaatcaatgttttcatttccttgggataactgcccagaaatggaattgctggatcatat

SEQ ID NO: 53557 - DNA, 110 bp, synthetic construct
  source 1..110: mol_type = other DNA
ggtcacaaaggccatagggcttggaatcagaaagggtgggtcctagtgccagttttcttagtgactaaagctacagacaggacagttaactgctctcagccctggaagat

SEQ ID NO: 53558 - DNA, 110 bp, synthetic construct
  source 1..110: mol_type = other DNA
tcttagtgactaaagctacagacaggacagttaactgctctcagccctggaagataagagtgggctacctcatagagttgttggaaggaatgagagataatagatacgaa

SEQ ID NO: 53559 - DNA, 110 bp, synthetic construct
  source 1..110: mol_type = other DNA
ttttaaatgatgttctttattaagttccttaatagaggaccattctgggttttttgttcatatgtttgtttgttttgggccacggcatgtggaagttcccgggcctggga

SEQ ID NO: 53560 - DNA, 110 bp, synthetic construct
  source 1..110: mol_type = other DNA
tttattaagttccttaatagaggaccattctgggttttttgttcatatgtttgtttgttttgggccacggcatgtggaagttcccgggcctgggatcaaacctgagccac

SEQ ID NO: 53561 - DNA, 110 bp, synthetic construct
  source 1..110: mol_type = other DNA
ataacgagtattgctgaaaaggtcaaaagttagttatcaagatgcctttccatagattgtgtatacaaagagaaaaataaaccatagttcttgaccataggacttgtgta

SEQ ID NO: 53562 - DNA, 110 bp, synthetic construct
  source 1..110: mol_type = other DNA
attgtgtatacaaagagaaaaataaaccatagttcttgaccataggacttgtgtatggtcaaagttacttctaaggctctggagagacaaattacactcccatttcttgg

SEQ ID NO: 53563 - DNA, 110 bp, synthetic construct
  source 1..110: mol_type = other DNA
gtgaagtggggattaataatagtacttgtcggtagaattatgacagtttgagtgagatgcatgtattgtgctcgtttacacacagctttgtacattttaagttctgctta

SEQ ID NO: 53564 - DNA, 110 bp, synthetic construct
  source 1..110: mol_type = other DNA
gatgcatgtattgtgctcgtttacacacagctttgtacattttaagttctgcttaatagtaactgctactataatagtcacctcattaataatctcaattgtttttttag

SEQ ID NO: 53565 - DNA, 110 bp, synthetic construct
  source 1..110: mol_type = other DNA
aaaagagagaaacttaatgttagacttgcttaggatatggtattgctataccactgagtttaggaattggccattgctcatgtgcagtgtcatatcttatcatagcagga

SEQ ID NO: 53566 - DNA, 110 bp, synthetic construct
  source 1..110: mol_type = other DNA
gagtttaggaattggccattgctcatgtgcagtgtcatatcttatcatagcaggaaagcaagttacacttagtcacaatgctgaggtttatgttatttgtttttattgtg

SEQ ID NO: 53567 - DNA, 110 bp, synthetic construct
  source 1..110: mol_type = other DNA
taaggtcctgccacaaaatttgcgtctaggaaggcgaagttatttttgttcagtatctatggcagggcttacctacattttgtggctacatgtaagttgaacacaaaaca

SEQ ID NO: 53568 - DNA, 110 bp, synthetic construct
  source 1..110: mol_type = other DNA
tatcagtctatactctgtggttattcatcccatgaacccacacatcgtgctgccagcttcaatgagatgcttgttataggcacatacctttgcttcaccgtgcttatatc

SEQ ID NO: 53569 - DNA, 110 bp, synthetic construct
  source 1..110: mol_type = other DNA
gcttcaatgagatgcttgttataggcacatacctttgcttcaccgtgcttatatccttaggacataattgctcctaaaagttctaaagaacgaaaactgcatgctaagcc

SEQ ID NO: 53570 - DNA, 110 bp, synthetic construct
  source 1..110: mol_type = other DNA
agacaggaagtgtcctgacaccagtggtggtttaggagtaatgatcagaagcatgggtatgaaagaagctcagagacctggggttcggtcaccaggatgtaagggctcat

SEQ ID NO: 53571 - DNA, 110 bp, synthetic construct
  source 1..110: mol_type = other DNA
ggtatgaaagaagctcagagacctggggttcggtcaccaggatgtaagggctcatccttgctaagcactttgatgagaagttagtctagaaagggctctagggtcataga

SEQ ID NO: 53572 - DNA, 110 bp, synthetic construct
  source 1..110: mol_type = other DNA
tgttttgttttgttttgttttttaatatatcacaaggtatattctattggacatcccagaaataaggatgttttagaggtagaaggtgaaaaggatcgttgtggtgataa

SEQ ID NO: 53573 - DNA, 110 bp, synthetic construct
  source 1..110: mol_type = other DNA
ggagccgggtggcaggtggggagaaggtacccctacctgtggctttggctgggcagcttggactttggcttttattgagccagaactccagccgctggcactcaccacat

SEQ ID NO: 53574 - DNA, 110 bp, synthetic construct
  source 1..110: mol_type = other DNA
tcctcggtgcagtccatccacattttatgtgcatggaaacaggattagagaggtgcagtgacatgacacagaggccgtacaaggggaggcaacagagctgatttgaagga

SEQ ID NO: 53575 - DNA, 110 bp, synthetic construct
  source 1..110: mol_type = other DNA
cagtgacatgacacagaggccgtacaaggggaggcaacagagctgatttgaaggagttcattccatttatgtagcatttactgaaaaccagaagatgaatagacatgctt

SEQ ID NO: 53576 - DNA, 110 bp, synthetic construct
  source 1..110: mol_type = other DNA
ctcatctcttcgtcttggaaatgcctgcctgcccctaaccatctcttctcctgtgctctctcttgatcagttaccttgctcagtatagcttctcactcctgacacgtagg

SEQ ID NO: 53577 - DNA, 110 bp, synthetic construct
  source 1..110: mol_type = other DNA
ctccctcatgaagccttccttttcattgaggcgagatcactgcctcaactctcgccttgttttctccacagctctagaaaaaaggaagcttccattccagtggtacctgg

SEQ ID NO: 53578 - DNA, 110 bp, synthetic construct
  source 1..110: mol_type = other DNA
cttcctggctctggggaagcaagctgctgggttgtgaggtgccctgtggagaaactttagggaattgagggcggcctctggtcaacagcccctgaggaactgcaacctgc

SEQ ID NO: 53579 - DNA, 110 bp, synthetic construct
  source 1..110: mol_type = other DNA
acggcccagccttcagtggccgcacggtcggtcctgccattgttcagccggcccgggtcccagcaggtgttccctaattagcaatctcttcatttccaatcaaagcacaa

SEQ ID NO: 53580 - DNA, 110 bp, synthetic construct
  source 1..110: mol_type = other DNA
aaaaaccaaaaaactcaaggcccagaggggttaagtaatttgtccagagttgcacagctattaagtgatgcagccaggactcgaagccggcttctgctggctctaaggtc

SEQ ID NO: 53581 - DNA, 110 bp, synthetic construct
  source 1..110: mol_type = other DNA
agctattaagtgatgcagccaggactcgaagccggcttctgctggctctaaggtccagggcatctcctgtaggcccactttgaggtcaaggactccaagcaaacagttta

SEQ ID NO: 53582 - DNA, 110 bp, synthetic construct
  source 1..110: mol_type = other DNA
tcccatcccgtgtcctccccttgttcttccatcacctgcttaacaactcctacatctgaagctcaggttctgactctggtgtccaccttaggctcctgggggtacctcac

SEQ ID NO: 53583 - DNA, 110 bp, synthetic construct
  source 1..110: mol_type = other DNA
gatgtttacctccagtgctgtcggaaaatgcgagattcagtgtacaaaaagcagaattgcagctgcttcctaacaagccttcatcagtgttagctgccagtgtgtgttga

SEQ ID NO: 53584 - DNA, 110 bp, synthetic construct
  source 1..110: mol_type = other DNA
attgcagctgcttcctaacaagccttcatcagtgttagctgccagtgtgtgttgagcacctactgtgtgccggggactgggactacagagaggagctggtctgggaggaa

SEQ ID NO: 53585 - DNA, 110 bp, synthetic construct
  source 1..110: mol_type = other DNA
gagtgtggccttacagcttctaagccgggaggacctggaaaaacatttgctgcatttcacaggggcccccatgcttgagatttcagctcctctccctgcacagacagccc

SEQ ID NO: 53586 - DNA, 110 bp, synthetic construct
  source 1..110: mol_type = other DNA
tctgaggtccgggacctccactgtgccacacacagctgaaataaggccaagcacggttagaacctcagagcaacttgaagcaccatcaagttttatttactgacaatttt

SEQ ID NO: 53587 - DNA, 110 bp, synthetic construct
  source 1..110: mol_type = other DNA
gtcagattcatttccactatgccatgatgggaactcctgacaagtgtccttataacagaagacacagaaacacagagatggccatgtgaggatggaggcagaaattggat

SEQ ID NO: 53588 - DNA, 110 bp, synthetic construct; identical to SEQ ID NO: 53587
  source 1..110: mol_type = other DNA

SEQ ID NO: 53589 - DNA, 110 bp, synthetic construct
  source 1..110: mol_type = other DNA
ataataaaaatttttaattaaataaatcgcaaatgttataatgccattagggttctgctctttgttttttaatttacagggaagtggtccaagtctgcctcaatccctgc

SEQ ID NO: 53590 - DNA, 110 bp, synthetic construct
  source 1..110: mol_type = other DNA
tgctctttgttttttaatttacagggaagtggtccaagtctgcctcaatccctgcgaggccctgcgccacctcccacagcccgaggcctctgtggggcctgagtttcctc

SEQ ID NO: 53591 - DNA, 110 bp, synthetic construct
  source 1..110: mol_type = other DNA
accatgttcgatcaaagccaatgagctgcctgggaataagagacagaacgtagtagggaaacattcggcaacgtcggtcatgtacgcatctccaacgtgtgcagcaaaac

SEQ ID NO: 53592 - DNA, 110 bp, synthetic construct
  source 1..110: mol_type = other DNA
gaagaccagcactgatgtagaaatgggtttttcagggccttttggggggacccaacttgccaccccacagctgtgtctcatctgtcaaccccatagttgtgtcctagctg

SEQ ID NO: 53593 - DNA, 110 bp, synthetic construct
  source 1..110: mol_type = other DNA
ggcgagagaggaaatgcgtgctggttgagccagccaatctgtggtatttcgttatgacagcccgagctgaccaagacacgcggctctccacccccggcagaaagccccgt

SEQ ID NO: 53594 - DNA, 110 bp, synthetic construct
  source 1..110: mol_type = other DNA
tgccagccctgctcgtggggattcacctggacttggtctcctgagacaaagcccaaaccctgggaagccgagcttagcagggaatggggtaaagggagaggaaggaagag

SEQ ID NO: 53595 - DNA, 110 bp, synthetic construct
  source 1..110: mol_type = other DNA
aaccctgggaagccgagcttagcagggaatggggtaaagggagaggaaggaagaggtcagaatgcccacctcactccctatcccagcaaaaggggcttcagcttggtcat

SEQ ID NO: 53596 - DNA, 110 bp, synthetic construct
  source 1..110: mol_type = other DNA
tctaagctgtgatgctgcaggagcaaaccagtgggtggggagacaggttccagccgagccctgctgctccgagaccttaagctaaggccttaaaactcttgggcttgagg

SEQ ID NO: 53597 - DNA, 110 bp, synthetic construct
  source 1..110: mol_type = other DNA
gagccctgctgctccgagaccttaagctaaggccttaaaactcttgggcttgagggctcatctcgcagatggaagatgctttccagcgctgccctaaggcttgcgagtca

SEQ ID NO: 53598 - DNA, 110 bp, synthetic construct
  source 1..110: mol_type = other DNA
caacctggaacagagtgcatgggctccgggccagttaaagagcgatgattccactgcagggagagaagccttcaccacagagggtcaggagactggatgcatcctaggtc

SEQ ID NO: 53599 - DNA, 110 bp, synthetic construct
  source 1..110: mol_type = other DNA
gcagggagagaagccttcaccacagagggtcaggagactggatgcatcctaggtcaggacgggcagggtttgacacggagcatggaggggatgtgtgggaaagaggcaat

SEQ ID NO: 53600 - DNA, 110 bp, synthetic construct
  source 1..110: mol_type = other DNA
cattcaacctccggatcctgcctttggagaagaggccatgaacgtgcttcccgtgcaattctcccacgagctgatggcctggcccctctggcgtcccttccacagaggcc

SEQ ID NO: 53601 - DNA, 110 bp, synthetic construct
  source 1..110: mol_type = other DNA
aattctgtgctgaggcttttttatttccaggtctgtgagtagtgccttaaatacggctctagtgtcaacatttttggcccaagggattctggctgggtcagcatcctgag

SEQ ID NO: 53602 - DNA, 110 bp, synthetic construct
  source 1..110: mol_type = other DNA
gagagagaggtccggggatctctgatgttcccagttgagctctccagcagcttcgggctaaaactctgggcaacgaacatgaccctctgccttggtctccaccctggagg

SEQ ID NO: 53603 - DNA, 110 bp, synthetic construct
  source 1..110: mol_type = other DNA
gagtctccgacatctcttttccatgaaagaagaagttgttgcgtgtgggctcttggccgagaacattttgctgtcatcaataaaactgatcctagatagagttcttttct

SEQ ID NO: 53604 - DNA, 110 bp, synthetic construct
  source 1..110: mol_type = other DNA
tcatgtccaggcagggccttcctggagctctggccgctccagctctgagggccgcgtctcaccccaggtagatgcagagcaatattatagcgagctggaggagcagctga

SEQ ID NO: 53605 - DNA, 110 bp, synthetic construct
  source 1..110: mol_type = other DNA
agccctaagcagagactgaaggctgggggacttttctgggtcacgatggagaaggtgtgtgtaaggaaggaggcaggaagaaacccaccggagactccctgcagtctttg

SEQ ID NO: 53606 - DNA, 110 bp, synthetic construct
  source 1..110: mol_type = other DNA
tgtgtgtaaggaaggaggcaggaagaaacccaccggagactccctgcagtctttgccacccttctaccagctgccctgcccgaggagctgcggctgctgccctccccccc

SEQ ID NO: 53607 - DNA, 110 bp, synthetic construct
  source 1..110: mol_type = other DNA
ggtctgaatctggtaagttaacgagctgatggccatggctagtaagtggtggagccagcacttgctccacctttctagagccgggaggaagcaggaggagagagctaatt

SEQ ID NO: 53608 - DNA, 110 bp, synthetic construct
  source 1..110: mol_type = other DNA
cagcacttgctccacctttctagagccgggaggaagcaggaggagagagctaattgcactctaacctccgcttcccttagcgaaaggcccaagaccctggctgggtctcc

SEQ ID NO: 53609 - DNA, 110 bp, synthetic construct
  source 1..110: mol_type = other DNA
aggtggccagtaggcctggggggcttcctgcttgttagactgtattagccagctcaggccaggccacccagcccaccagggccttgtctccacagttctccaaagaattc

SEQ ID NO: 53610 - DNA, 110 bp, synthetic construct
  source 1..110: mol_type = other DNA
aggccaggccacccagcccaccagggccttgtctccacagttctccaaagaattccaggccctgaatcccatgaagcaggtgccggccctgaagattgatggaatcaccc

SEQ ID NO: 53611 - DNA, 110 bp, synthetic construct
  source 1..110: mol_type = other DNA
ccctgtccctttaaccatcactctttacctctgaaaaagctgctcagggagtaggtagaagcaggtttggggagcggtgtataggaggagaagctgtttcggctctttag

SEQ ID NO: 53612 - DNA, 110 bp, synthetic construct
  source 1..110: mol_type = other DNA
tcagcagagattggagtaaacatttccattaggttctcgagctagctcctttggtttcctccctagaaaagatttaatctacagcaaaagggggtgcaacagcatgttct

SEQ ID NO: 53613 - DNA, 110 bp, synthetic construct
  source 1..110: mol_type = other DNA
ttgttttcttccggttataggacttacaacagcctgatagtctggcatatgcccatgtgcttatttacggtctgcccctctcactggatggtactatattctaatgctca

SEQ ID NO: 53614 - DNA, 110 bp, synthetic construct
  source 1..110: mol_type = other DNA
gtgtctgttacttgtcgtcaaatacctcccatttcacacagacgtacatactatccattgtgaatcttaaggaacccaaagatagctgctctcaaaggtcaggaagcagg

SEQ ID NO: 53615 - DNA, 110 bp, synthetic construct
  source 1..110: mol_type = other DNA
cattgtgaatcttaaggaacccaaagatagctgctctcaaaggtcaggaagcaggaagcagagacctgtcacacccttagcgagtttctcttccagactcatctctgctt

SEQ ID NO: 53616 - DNA, 110 bp, synthetic construct
  source 1..110: mol_type = other DNA
cagttttcaagtagctggcacacacctgccagtcctccatagaacagggctctactactgagtctctggggaggtcagctgggagaggtgtctctaggcagcaaggaagg

SEQ ID NO: 53617 - DNA, 110 bp, synthetic construct
  source 1..110: mol_type = other DNA
tactgagtctctggggaggtcagctgggagaggtgtctctaggcagcaaggaaggcttccccctttgggactgggaaggaccctggggactgcatggttcaataagcggc

SEQ ID NO: 53618 - DNA, 110 bp, synthetic construct
  source 1..110: mol_type = other DNA
tcccctgtctctttccatcatttattgagcgctgattatgtcctgggccccgtgctaagctcttttttatgcgttgcttctttcttttttttaatttatattttatttat

SEQ ID NO: 53619 - DNA, 110 bp, synthetic construct
  source 1..110: mol_type = other DNA
tgaagtcaggggccggagtggagccctgaaacctttgtagggacttcgcttgtggagctcccttggggtggggacctagacgtgaccttgttttgtaactccccctagca

SEQ ID NO: 53620 - DNA, 110 bp, synthetic construct
  source 1..110: mol_type = other DNA
agctcccttggggtggggacctagacgtgaccttgttttgtaactccccctagcacccagggacaaatgctcggtgttctgatggaccatctgactgagtgaccatgaga

SEQ ID NO: 53621 - DNA, 110 bp, synthetic construct
  source 1..110: mol_type = other DNA
gctttgcctgtgtgtattcgagccacagttggcagcctcttcctcctccttccgtagcaatagctcactcctcacggtccaaggctcccccaacctgagtccccagacct

SEQ ID NO: 53622 - DNA, 110 bp, synthetic construct
  source 1..110: mol_type = other DNA
caggctggctaagtggtaaagtgatgggtttcaagccccactctctctcaatatttcagctcccttctccctgatcagtgcttttcaaacctccagatataactgaacaa

SEQ ID NO: 53623 - DNA, 110 bp, synthetic construct
  source 1..110: mol_type = other DNA
tgctggcctatgccacagccgctgcagtctatgccacagccgctgcagtctataccacagccacagtgacgccagatacgagccacatctgcggcctacaccactaccca

SEQ ID NO: 53624 - DNA, 110 bp, synthetic construct
  source 1..110: mol_type = other DNA
acaatgtggcccctggcatctctaagctaacatcattcctagatgtcatctctcttagggaaagaatttctccttatcaaagttccagcacacacctgagattgtatgtg

SEQ ID NO: 53625 - DNA, 110 bp, synthetic construct
  source 1..110: mol_type = other DNA
tattgccacaaggacagcctatggctagcgttttagcggctgaaaacttacaagtaatgttggaaataagggagaggattaactcccaacagcctagtgtctagtctctg

SEQ ID NO: 53626 - DNA, 110 bp, synthetic construct
  source 1..110: mol_type = other DNA
aatgttggaaataagggagaggattaactcccaacagcctagtgtctagtctctgtgacacatgcacatagatatgccaggcagacagtgtttcctgttgctgggtttgt

SEQ ID NO: 53627 - DNA, 110 bp, synthetic construct
  source 1..110: mol_type = other DNA
gcaaagaggtactgaaaacccaagtacacgctgggataaagctatgaagaaggggtatgggagctgttagaacttcatgggaggtccatgtttgttgagtacattggaga

SEQ ID NO: 53628 - DNA, 110 bp, synthetic construct
  source 1..110: mol_type = other DNA
tatgggagctgttagaacttcatgggaggtccatgtttgttgagtacattggagaagacttccctgtgggagaaacgctttgaactgatggatgaatcggaaggttctga

SEQ ID NO: 53629 - DNA, 110 bp, synthetic construct
  source 1..110: mol_type = other DNA
cttgcctagccgaaatctcctggccaaggatcacatgtgaagccagtggatttagggctgagtttagcttaaggcccagttctaaccatcctgttgcatatggcctcagt

SEQ ID NO: 53630 - DNA, 110 bp, synthetic construct
  source 1..110: mol_type = other DNA
tttggcatattgtgttaaaggatctggtgttgcccggcagctgcagcataggtcgcagctacagcgtagatctgatccctgtccaggaaactccagatgccacagggagg

SEQ ID NO: 53631 - DNA, 110 bp, synthetic construct
  source 1..110: mol_type = other DNA
gagaattgtggataaaacgtgggaccagaggcccaaaaccgttgtttgaatcaaaatccttcctgtattggtctggtgaacattggacagtcccgtatctctgtttcttc

SEQ ID NO: 53632 - DNA, 110 bp, synthetic construct
  source 1..110: mol_type = other DNA
aaggctgctccttactgtgtgtatggtttgccagacccaccttcagaagctgcgttcagggttttctttttctgatgtgcctcagttcctctgtgccccatgtgtccctg

SEQ ID NO: 53633 - DNA, 110 bp, synthetic construct
  source 1..110: mol_type = other DNA
ggcctacctctggggttctgatttggtgggtctagcatactccagatagttttgatataagtggtctgagagccatactttaagatacactgtcctaggcatgatctaac

SEQ ID NO: 53634 - DNA, 110 bp, synthetic construct
  source 1..110: mol_type = other DNA
tataagtggtctgagagccatactttaagatacactgtcctaggcatgatctaacttagtcacagtctcttgaattcatataattgaatccccagcagcaggagttcagt

SEQ ID NO: 53635 - DNA, 110 bp, synthetic construct
  source 1..110: mol_type = other DNA
agttggccatgtagacatttggggaggtaaggccagcctgtctggagcagagtgaagaaggagagtgaaccactgggagtcagggcatgtagggtgtttgggatcattga

SEQ ID NO: 53636 - DNA, 110 bp, synthetic construct
  source 1..110: mol_type = other DNA
ccaaatgtcttaaatttttatggttgtctcttccttttttccccatttctgtctctcatacacactctgagctggccattttctcatgataataaatttcctgagcttct

SEQ ID NO: 53637 - DNA, 110 bp, synthetic construct
  source 1..110: mol_type = other DNA
atcagacaagtggccctggactgaggctgtgaggagtcctctgccaggtgaggaggcccttctctgatgcctgatgctcttttgagtgtgcaaacagaccatttctttga

SEQ ID NO: 53638 - DNA, 110 bp, synthetic construct
  source 1..110: mol_type = other DNA
agtgggtggtggtggtggttattggtatttgggaataaccaatatggaggaagacgaaaggacttagcttatggcgcttgatgttgcattgggagctgagtcggatgata

SEQ ID NO: 53639 - DNA, 110 bp, synthetic construct
  source 1..110: mol_type = other DNA
aacttgagtcaggtcaaggagcccaacttcacttctactgctgttagagctggattagataatgtggctttgatctgcagtcctactgggcttccttataatttcacccc

SEQ ID NO: 53640 - DNA, 110 bp, synthetic construct
  source 1..110: mol_type = other DNA
ttttgatttggtttcattttacagggcagcctggtggcccaagccattgttgatgccaagacatgtcatccaccaggtggcatggggcataggaagttgtaagattcagg

SEQ ID NO: 53641 - DNA, 110 bp, synthetic construct
  source 1..110: mol_type = other DNA
ccaagacatgtcatccaccaggtggcatggggcataggaagttgtaagattcaggtagagctatgttgtggaattaacagacctgtcaaattaggggtgtggatcttaag

SEQ ID NO: 53642 - DNA, 110 bp, synthetic construct
  source 1..110: mol_type = other DNA
actgagcccaatggcctgatcctcttcactcatggtaagccccaagagaggaaagatgctcggagccagaagaacaccaaagtggacttctttgctgtggaactccttga

SEQ ID NO: 53643 - DNA, 110 bp, synthetic construct
  source 1..110: mol_type = other DNA
ttgggaaaactgctgttgacaaatgatggccactgtgggctgtcgatcctggtatccaagtttctaatcccccttccattaccatggatattccagcaaagtggaatcac

SEQ ID NO: 53644 - DNA, 110 bp, synthetic construct
  source 1..110: mol_type = other DNA
ctcgtttctgctgtgtcatgaagggagctcctacaggcttaatttgaagcaacaattttaaaataaagatgcacatcttttttatgttttcaataatatcttttatagat

SEQ ID NO: 53645 - DNA, 110 bp, synthetic construct
  source 1..110: mol_type = other DNA
attgaataggaacaaaacaaaacatgagttcttcaaactaatctaaaagtctatacctttagaggtattgacctttaaagtgttgtggatacgtaccgagggcaatgtag

SEQ ID NO: 53646 - DNA, 110 bp, synthetic construct
  source 1..110: mol_type = other DNA
gccacaagatcactggatgatatagcttctgcaaaaagcatgctcttgtgatatggatgtaaggcagccaggaggtgggcccttgccttgagggtaggaaaaaggagtga

SEQ ID NO: 53647 - DNA, 110 bp, synthetic construct
  source 1..110: mol_type = other DNA
gcctttggaacaagtgtcagctgcatgaagtccacttggaaaggggaagtagtggagccccgattgccaagaattcatgggaaagcgggtgtgtggtcccaggcaccgct

SEQ ID NO: 53648 - DNA, 110 bp, synthetic construct
  source 1..110: mol_type = other DNA
agtgaatgcttcagtgccatcatatagccatgattatttccaccttacctttcagcagtaaagaaagaaaaaatcaggagctttcattaaccctttgttggaaatgtggg

SEQ ID NO: 53649 - DNA, 110 bp, synthetic construct
  source 1..110: mol_type = other DNA
cagtaaagaaagaaaaaatcaggagctttcattaaccctttgttggaaatgtgggtataaaattccgagttgtcttgcatgtctttgacattaaaaatgatttaatgaat

SEQ ID NO: 53650 - DNA, 110 bp, synthetic construct; identical to SEQ ID NO: 53648
  source 1..110: mol_type = other DNA

SEQ ID NO: 53651 - DNA, 110 bp, synthetic construct; identical to SEQ ID NO: 53649
  source 1..110: mol_type = other DNA

SEQ ID NO: 53652 - DNA, 110 bp, synthetic construct
  source 1..110: mol_type = other DNA
caaacaataattcatcttacatttaaatgtagacaaggcttttaaatgtttgcttaatccaaagagtgggtatgctgtcatcaactgtaactttcaggagtataagaaag

SEQ ID NO: 53653 - DNA, 110 bp, synthetic construct
  source 1..110: mol_type = other DNA
atgctttagcccatttaatcttcttaaccactttatgaggtaggtgataatatgcctacagaccagggagctggaaagtccagtatctttcccaaagggcattaagagga

SEQ ID NO: 53654 - DNA, 110 bp, synthetic construct
  source 1..110: mol_type = other DNA
ctacagaccagggagctggaaagtccagtatctttcccaaagggcattaagaggaggaagcaagggtggtggctggtactacagaagaaacaggtcacataatcatggaa

SEQ ID NO: 53655 - DNA, 110 bp, synthetic construct
  source 1..110: mol_type = other DNA
aacccaatttcagcttcatccttaattcccctttgacgtgtaacccaaggtgttcacaggttctagagattaggatttgaacattttaggggcaccattactctaccaca

SEQ ID NO: 53656 - DNA, 110 bp, synthetic construct
  source 1..110: mol_type = other DNA
acaggttctagagattaggatttgaacattttaggggcaccattactctaccacaggttatctgcatctgagcaacatgactccccagtaggactgcatagaaagagcag

SEQ ID NO: 53657 - DNA, 110 bp, synthetic construct
  source 1..110: mol_type = other DNA
ggaggtagtgagtaaggggctatctggctgaagatggcgttggagaattagatataagctaggtctatataaggctataatatagagttagactaagtccagagtgcagt

SEQ ID NO: 53658 - DNA, 110 bp, synthetic construct
  source 1..110: mol_type = other DNA
aagctaggtctatataaggctataatatagagttagactaagtccagagtgcagtgggaatccatctggaggacgaaatcaaggagtggttagattaaatgggaattacc

SEQ ID NO: 53659 - DNA, 110 bp, synthetic construct
  source 1..110: mol_type = other DNA
agtgtcagcaaagagactagggcagctctcattggctttcttgttcagatgtcggagtgtcatcactggatgcacagaagaaaatgtgaactgtgaaaataaaaataatg

SEQ ID NO: 53660 - DNA, 110 bp, synthetic construct
  source 1..110: mol_type = other DNA
accatccacactcattgaaggaagtgtcttcttagataagaggatagagctggaactgatagagacattagtttggtaaaaagtcatatcaactaagatttacctcaaga

SEQ ID NO: 53661 - DNA, 110 bp, synthetic construct
  source 1..110: mol_type = other DNA
aagcaataagccatggatttttctgtccagcattcagaatgacctctgaccactgcctctgtgtgtctaaagtgacctatgatgtcactcagagaggtgctacttttcta

SEQ ID NO: 53662 - DNA, 110 bp, synthetic construct
  source 1..110: mol_type = other DNA
cctctgtgtgtctaaagtgacctatgatgtcactcagagaggtgctacttttctattgcctgctactgctctaaaaggtgcctgtaaccaggtcaaactattgagattat

SEQ ID NO: 53663 - DNA, 110 bp, synthetic construct
  source 1..110: mol_type = other DNA
gtaaaatgtaaattgttcacttgagtagattttcagagaatggaattcttctctgaagagttggtccaaaattaaaataaggacaatgattgacaatctctgctcttcaa

SEQ ID NO: 53664 - DNA, 110 bp, synthetic construct
  source 1..110: mol_type = other DNA
ggggggtgtttggtattttgtgaatgaagcagcagctttggttttgtctgtgcataggcagaattagggactggctttgtttaggaactgacagcatgaactagatggtt

SEQ ID NO: 53665 - DNA, 110 bp, synthetic construct
  source 1..110: mol_type = other DNA
tcaattgccctgcctccaacaggaaagagcttacctccaagctggctctcatggctatgggatgtttcaagcttcaaaaagtacactgtcagctgttcagagactgtact

SEQ ID NO: 53666 - DNA, 110 bp, synthetic construct
  source 1..110: mol_type = other DNA
aaacttatgcctttctcctccaatcagctctggcctctaattgtgttttagaaatgttatccccatgttactaagtcttaccattttcaaaggaactcaacaatctaagt

SEQ ID NO: 53667 - DNA, 110 bp, synthetic construct
  source 1..110: mol_type = other DNA
attgctgttctggctatcacatttacaataggacctaatgtttaagtcatgacataaactgtgagatttacttctaattaccgacaagtatgtatcgcttgagttgtcag

SEQ ID NO: 53668 - DNA, 110 bp, synthetic construct
  source 1..110: mol_type = other DNA
cttagctggtcactatggtgatttaaataaatacttttttcgagacccattggggaatcaagtctggcattttgatttcctctataaggtgagtcatgggaagatactca

SEQ ID NO: 53669 - DNA, 110 bp, synthetic construct
  source 1..110: mol_type = other DNA
tttctttgattcttacaggtttaagccttctttctctgaaaatagcctgagttcccatcctttttgttggtgagcttttcctcttacctcccatttgccctctccaatcc

SEQ ID NO: 53670 - DNA, 110 bp, synthetic construct
  source 1..110: mol_type = other DNA
caattttaggactgaggtccccatttctttgctgactattggctagggccacatttagctcccaaatgctgctctctggttctcacgtgtgcatcactacatttcagagc

SEQ ID NO: 53671 - DNA, 110 bp, synthetic construct
  source 1..110: mol_type = other DNA
agttagtactatgtaattcaatttctctgtttctacccggagtaggtagctgacttaggctgggctcatgccttccataatattcggggctgagatcaggaaattctagt

SEQ ID NO: 53672 - DNA, 110 bp, synthetic construct
  source 1..110: mol_type = other DNA
tctcagtttgtgtggaaagaagtagtagaaagatactgcttctgagccaactcttacagctctactcggccctgcaggcgactatgacactttctgggtcacattaccat

SEQ ID NO: 53673 - DNA, 110 bp, synthetic construct
  source 1..110: mol_type = other DNA
cattctccttttctgagagagaaactcctgccttctccccaggcctgctgcatgtgtgtgtccacatgttgcaacccagctcttggtgtcccagcaaaggcttagatttt

SEQ ID NO: 53674 - DNA, 110 bp, synthetic construct
  source 1..110: mol_type = other DNA
cctggcttgcagacacaccttctagttgtgtccttacatggcagagagagagacagagacagaggggagctccggtctctttctcttcttctgaggacattatgcccatc

SEQ ID NO: 53675 - DNA, 110 bp, synthetic construct
  source 1..110: mol_type = other DNA
tttaaggcaggggaagatgggtatcccagctccaggagtgaataaatttgcccttcctctacctttttgttgtgctatgcccttagcaggtcagatattgtccaccagca

SEQ ID NO: 53676 - DNA, 110 bp, synthetic construct
  source 1..110: mol_type = other DNA
gtttactctgtcctattgtagaaaaagttcactaaattccacaaagcagatcaaaggcattctttagacaccaggtcaccacattacctacctttgtgatataccttcat

SEQ ID NO: 53677 - DNA, 110 bp, synthetic construct
  source 1..110: mol_type = other DNA
ggcattctttagacaccaggtcaccacattacctacctttgtgatataccttcattaaatttgccaaaacaaaatcaccaaggtaacagtaaagaaatgtggatttatat

SEQ ID NO: 53678 - DNA, 110 bp, synthetic construct
  source 1..110: mol_type = other DNA
tcaaatcccgaaagaaggtctctgaaatttccctcagcaatccactctggtataaaggaggtaataatgctggccactgtcactgtgtacactctctcaggcatgcagga

SEQ ID NO: 53679 - DNA, 110 bp, synthetic construct
  source 1..110: mol_type = other DNA
aggaggtaataatgctggccactgtcactgtgtacactctctcaggcatgcaggaccacgtccaaaacatcacatgcaaccccagccttctacaacaacttctcacaaaa

SEQ ID NO: 53680 - DNA, 110 bp, synthetic construct
  source 1..110: mol_type = other DNA
tacgtactctttcattcatgctgatgtaataactaggcctctgacctcattcctcatgctatgtcataaagaagtaatatttattgagagcttactatacactcagcatg

SEQ ID NO: 53681 - DNA, 110 bp, synthetic construct
  source 1..110: mol_type = other DNA
ctcattcctcatgctatgtcataaagaagtaatatttattgagagcttactatacactcagcatgtttctaagcactttatgtgaaactatttatttaatcctcacaagg

SEQ ID NO: 53682 - DNA, 110 bp, synthetic construct
  source 1..110: mol_type = other DNA
cacacagctagcctctgcaattcgggtttagagggaagagaattgcaatgctctcgctgcctgctgtaccgtgacttttacaccgttctctccttccaatctcttctacc

SEQ ID NO: 53683 - DNA, 110 bp, synthetic construct
  source 1..110: mol_type = other DNA
gctgcctgctgtaccgtgacttttacaccgttctctccttccaatctcttctaccacagctattctagggcttggtatccagtctttctctacctcagacaaaataaaaa

SEQ ID NO: 53684 - DNA, 110 bp, synthetic construct; identical to SEQ ID NO: 53682
  source 1..110: mol_type = other DNA

SEQ ID NO: 53685 - DNA, 110 bp, synthetic construct; identical to SEQ ID NO: 53683
  source 1..110: mol_type = other DNA

SEQ ID NO: 53686 - DNA, 110 bp, synthetic construct
  source 1..110: mol_type = other DNA
agagttcttatggcaaggaagacaatctttgtaactatgcatgggaaataactggtcacattgcaagattagatattagatggggacagaggttgtgagagatagcctta

SEQ ID NO: 53687 - DNA, 110 bp, synthetic construct
  source 1..110: mol_type = other DNA
caaaggcatccctgactgttactaccggcttaatttacatctttcaattgcactagagcagcaattctcaagggacgtgtgtggatgatccaagaccccttaataataac

SEQ ID NO: 53688 - DNA, 110 bp, synthetic construct
  source 1..110: mol_type = other DNA
gagcagcaattctcaagggacgtgtgtggatgatccaagaccccttaataataacattgttaactgtctttttcatattcaatttccatgaatataaaatgtcgatattt

SEQ ID NO: 53689 - DNA, 110 bp, synthetic construct
  source 1..110: mol_type = other DNA
tcaattcatccaacatctgtagttgctgtttttccttgttctctaattcacatgttaaattctaggaataaagcaagtgaaatatcaggaactcattcttgacaaaattg

SEQ ID NO: 53690 - DNA, 110 bp, synthetic construct
  source 1..110: mol_type = other DNA
ctgtttttccttgttctctaattcacatgttaaattctaggaataaagcaagtgaaatatcaggaactcattcttgacaaaattggatgtgtatcatcaaagaagaatca

SEQ ID NO: 53691 - DNA, 110 bp, synthetic construct
  source 1..110: mol_type = other DNA
ccttaaatttactcattcacaaatggagaagagttgtttgccctctgaattactttctagctataaagtgctagactccatagattcacagatatgaacatatatgaaag

SEQ ID NO: 53692 - DNA, 110 bp, synthetic construct
  source 1..110: mol_type = other DNA
tctagctataaagtgctagactccatagattcacagatatgaacatatatgaaaggtccttaatatttaatgagaatagaggactcttcataactaggctgctaactatt

SEQ ID NO: 53693 - DNA, 110 bp, synthetic construct; identical to SEQ ID NO: 53691
  source 1..110: mol_type = other DNA

SEQ ID NO: 53694 - DNA, 110 bp, synthetic construct; identical to SEQ ID NO: 53692
  source 1..110: mol_type = other DNA

SEQ ID NO: 53695 - DNA, 110 bp, synthetic construct
  source 1..110: mol_type = other DNA
gagacacacaaccatctagaataattaagaacacaaagaaaaatataagagatctaactcaggtcattcatactggttcatcttttttagggactgggagtaataactga

SEQ ID NO: 53696 - DNA, 110 bp, synthetic construct
  source 1..110: mol_type = other DNA
aggaaagaagattttctgaagataactgctccatttatatcaagtattttctaggtatatgccagatttcaggccacatgttattactttatttgcttgcggtattaagg

SEQ ID NO: 53697 - DNA, 110 bp, synthetic construct
  source 1..110: mol_type = other DNA
tcacatgaaggtgccaggtgtgctgcttttggtcccgaaggccatcaaaaccatcttctgaaataagtttttttgaggagctggaccatgtcttatttacatctatatcc

SEQ ID NO: 53698 - DNA, 110 bp, synthetic construct
  source 1..110: mol_type = other DNA
ttctgaaataagtttttttgaggagctggaccatgtcttatttacatctatatcctttgactctaatagaacacggagtgggtgcttcagaacatctctggaatgacagc

SEQ ID NO: 53699 - DNA, 110 bp, synthetic construct
  source 1..110: mol_type = other DNA
gtctataatatgggattactgctttactaaagggtcccctatgtgggtcacagtatgctttgtgaatcaatgtcagaacacctagcttcccttcccagctctgtctaacc

SEQ ID NO: 53700 - DNA, 110 bp, synthetic construct
  source 1..110: mol_type = other DNA
catttcacagatgaggaagggcagctccagagagaagagacagaggttggtgagaatctgctccacagcctcaggggcattcagttgatcctgagtgacccattcagcct

SEQ ID NO: 53701 - DNA, 110 bp, synthetic construct
  source 1..110: mol_type = other DNA
atctgctccacagcctcaggggcattcagttgatcctgagtgacccattcagccttgaaatagggctctcacggaggctgtccactgccctaggcctggtactgggcaga

SEQ ID NO: 53702 - DNA, 110 bp, synthetic construct
  source 1..110: mol_type = other DNA
tgggttatctttgaagatatttgcaagcattaaaaaaaaattgaattttggagttcctcccatcgcacagtaggataagagtccaacggcaggagtttccgtcatggctc

SEQ ID NO: 53703 - DNA, 110 bp, synthetic construct
  source 1..110: mol_type = other DNA
gatatttgcaagcattaaaaaaaaattgaattttggagttcctcccatcgcacagtaggataagagtccaacggcaggagtttccgtcatggctcagtggaagtgaatct

SEQ ID NO: 53704 - DNA, 110 bp, synthetic construct
  source 1..110: mol_type = other DNA
tttgtgacctctgcacattaggccacctctctgtggggcttaccctgcgaggacatcacagctgctcagctggactatctgggtcctatacaaatgcctgcgggaaagga

SEQ ID NO: 53705 - DNA, 110 bp, synthetic construct
  source 1..110: mol_type = other DNA
tttttctctcctgtcctctacacctcccgctttaattttccctcctaatatatgtgtattaggcagctcagccataacaaaatctcacagactgcgtggcttaaagacag

SEQ ID NO: 53706 - DNA, 110 bp, synthetic construct
  source 1..110: mol_type = other DNA
atagtagcctagtgactgctccctcctggtcttcctggagagcccaggctatgttcctacatttcagcttctgtcttcccttctcccctatgtcaactgggtcaacatga

SEQ ID NO: 53707 - DNA, 110 bp, synthetic construct
  source 1..110: mol_type = other DNA
cccatattcacttgaccacactgtctccaccccaggggactcttgctgaatgtaaacagctgtgccagggggtggggcctgcctgagagctctctagggaatcaccactt

SEQ ID NO: 53708 - DNA, 110 bp, synthetic construct
  source 1..110: mol_type = other DNA
cgcaaccttttctttcgagttacctctatcttttgtgctggagaccctccctggcccagtggacagagctcagggtctgatcttagacttgaaagaatgaatgggtttct

SEQ ID NO: 53709 - DNA, 110 bp, synthetic construct
  source 1..110: mol_type = other DNA
gcagtggtttctcacaaaggctaatacttctggacaaatatggttccaagccactggaggttggttaggattttctgagcttctactttgttacaggcagtgtgttaatt

SEQ ID NO: 53710 - DNA, 110 bp, synthetic construct
  source 1..110: mol_type = other DNA
tttgtccgtttgaccttgagcaacccactaacctcttgttgctttagttcttttgtgagtaaaaggaatagggatggaacattcctcacagggtaattgcaaggattaca

SEQ ID NO: 53711 - DNA, 110 bp, synthetic construct
  source 1..110: mol_type = other DNA
gaaattcaggtgactctctccttggggatagaactatggagtcagaggagttgtttaggatagcttctctcacttttcctgcatggttggtggttccttaaaggtgaaca

SEQ ID NO: 53712 - DNA, 110 bp, synthetic construct
  source 1..110: mol_type = other DNA
taggatagcttctctcacttttcctgcatggttggtggttccttaaaggtgaacactttgatacttcccttaccttgtgtgccttgcacacataggtaagtgcacatcga

SEQ ID NO: 53713 - DNA, 110 bp, synthetic construct
  source 1..110: mol_type = other DNA
gtcttaaactacttcataagtttggtggtgttgttggtcagagtgtgatagagggaggaaaaaggactgagctatgaagtcgattgaataaaacctacatttcctgcttc

SEQ ID NO: 53714 - DNA, 110 bp, synthetic construct
  source 1..110: mol_type = other DNA
catgagtttatttttgtgcatggtgtgagggtgtgttcccacgaactttacatactctgaggacagagatcgactccattgctatcactgggtccctcatgctaagtaca

SEQ ID NO: 53715 - DNA, 110 bp, synthetic construct
  source 1..110: mol_type = other DNA
tctgaggacagagatcgactccattgctatcactgggtccctcatgctaagtacagtgcatgacgtagactgcatgctcagtaaatttttgttgaattaatttaattcca

SEQ ID NO: 53716 - DNA, 110 bp, synthetic construct
  source 1..110: mol_type = other DNA
tgtcacattctctctcttacagatgaaaataggaagctcagagaggcatagtggcttgtgtaaggttagcattcagttggggatggggacagaatgtgagttcagacctg

SEQ ID NO: 53717 - DNA, 110 bp, synthetic construct
  source 1..110: mol_type = other DNA
gttaagaatatacacttataaccaaggatctgtagaactgcttcccacttctatcacaatgtggtaaccacatgggagaaataagtgggcttaacagctatcaagataag

SEQ ID NO: 53718 - DNA, 110 bp, synthetic construct
  source 1..110: mol_type = other DNA
acaatgtggtaaccacatgggagaaataagtgggcttaacagctatcaagataagagtttagtacttgttgcttaagccactttcttgaattgaaagattatttctatta

SEQ ID NO: 53719 - DNA, 110 bp, synthetic construct; identical to SEQ ID NO: 53717
  source 1..110: mol_type = other DNA

SEQ ID NO: 53720 - DNA, 110 bp, synthetic construct; identical to SEQ ID NO: 53718
  source 1..110: mol_type = other DNA

SEQ ID NO: 53721 - DNA, 110 bp, synthetic construct
  source 1..110: mol_type = other DNA
tcttattgatgatcaactgccattgctttctttcctctcaggattccagggaagaaaatcagccaacaagctatagtaagttcattttaacttggattcatatgcaattt

SEQ ID NO: 53722 - DNA, 110 bp, synthetic construct
  source 1..110: mol_type = other DNA
aggttctataaaatgagagtaggggagctcatgagaatgtcttagtttcccttccctttggagacttgaatgtttataagaggggggaaaaaaaggtgctgccacaggtg

SEQ ID NO: 53723 - DNA, 110 bp, synthetic construct
  source 1..110: mol_type = other DNA
tgttttccccctattttaaaaattcttcgcttctggaaaatggagcagactacataaaaatagcccgtgagagaatttacctggagggaattcttgaaagattgtatgag

SEQ ID NO: 53724 - DNA, 110 bp, synthetic construct; identical to SEQ ID NO: 53723
  source 1..110: mol_type = other DNA

SEQ ID NO: 53725 - DNA, 110 bp, synthetic construct
  source 1..110: mol_type = other DNA
gagaatgcattttacccaggggaatcataatgataagccattgctggcaagagatgactttaggatgaaccatccatcttcgcagaaggtgtttcaatgtggtaaggaca

SEQ ID NO: 53726 - DNA, 110 bp, synthetic construct
  source 1..110: mol_type = other DNA
tacttggtgatctattttacgtaattcattcacaaattctgtccgttatttcaataccacccactttcttcctccctcccgatgaagcatccatctgcagtcttattacc

SEQ ID NO: 53727 - DNA, 110 bp, synthetic construct
  source 1..110: mol_type = other DNA
accacccactttcttcctccctcccgatgaagcatccatctgcagtcttattaccctgtttcctcttggacacatgctgctatagactttgcaccctgccaagtttaatt

SEQ ID NO: 53728 - DNA, 110 bp, synthetic construct
  source 1..110: mol_type = other DNA
tcagtggtattaatgactatttgccctttcggttacccaaagacacatctgtactgataggcatttgtagctttaatattcaacttgttttgctttgtatatagatctat

SEQ ID NO: 53729 - DNA, 110 bp, synthetic construct
  source 1..110: mol_type = other DNA
tatttctctgttcttgtaccaatatcctctgttactatgcttcataacgcaactgtagctggttttggtttaaaatgtgagacaggaatttcattttttccatgtggcta

SEQ ID NO: 53730 - DNA, 110 bp, synthetic construct
  source 1..110: mol_type = other DNA
tagctggttttggtttaaaatgtgagacaggaatttcattttttccatgtggctaaccatttgtactgtttattgagtggtctaaaatttctataatctgaaatatcaac

SEQ ID NO: 53731 - DNA, 110 bp, synthetic construct
  source 1..110: mol_type = other DNA
caagtcacctggttttggcagaaaattaaccactaatcctcattattcaacataggtgcagaaattgaaaactgattctctagtttgttctcttggatcccacaaggtat

SEQ ID NO: 53732 - DNA, 110 bp, synthetic construct
  source 1..110: mol_type = other DNA
gttatttatctaccccatccacccagtttatacctccccgctatggtttcccccttgataaccctaagtttgacctcaaaaactttgagtctgtctctgtcctataaaca

SEQ ID NO: 53733 - DNA, 110 bp, synthetic construct
  source 1..110: mol_type = other DNA
ccaacctaaagtcctgattcgaataatttctgcctctatcttcacagtcagcacttagtggagaaaggaaacagctggataggatcttatatgtgattgctctaggaact

SEQ ID NO: 53734 - DNA, 110 bp, synthetic construct
  source 1..110: mol_type = other DNA
tagtggagaaaggaaacagctggataggatcttatatgtgattgctctaggaactgacttacttttggcaacaaagttgtttaatcattggctgtgggagaggttttagg

SEQ ID NO: 53735 - DNA, 110 bp, synthetic construct
  source 1..110: mol_type = other DNA
catcagactgcctgtgactatgggggctgaagcttgtttcaacttttatcctctaagtttcctgtagtaagagaggcccaccagaaacctggagaatgtatgaaggagaa

SEQ ID NO: 53736 - DNA, 110 bp, synthetic construct
  source 1..110: mol_type = other DNA
acccaaatatgcaaaacatctggggtaaaaccatacatattgcacattaacgcctattctcacagcatttgcgttctacttcaaaaggttttctaagtgctgtcccagtt

SEQ ID NO: 53737 - DNA, 110 bp, synthetic construct
  source 1..110: mol_type = other DNA
attctcacagcatttgcgttctacttcaaaaggttttctaagtgctgtcccagttgaatatgatactttaatttccactaatgtatgcattgtacattttctattctaat

SEQ ID NO: 53738 - DNA, 110 bp, synthetic construct
  source 1..110: mol_type = other DNA
ggaaataagaaaccacagaggaaattggagagatttgggtattgttggagtcatgatacatgaattatctactgccagatggatgtgaagagttttgagatgtcacagta

SEQ ID NO: 53739 - DNA, 110 bp, synthetic construct
  source 1..110: mol_type = other DNA
cttacagcattatgtttgcaagattcattcatgttgttctgtacagtaatttaccacagctatatatcatgccatgtgtaaataaatcatacaccagtaaaacatctatt

SEQ ID NO: 53740 - DNA, 110 bp, synthetic construct
  source 1..110: mol_type = other DNA
tggagacactctgttgccaggagaacatgctcattcactaaaatcgaataaagcagaaaattgtttattaatattattgaattataattttggggggaaatggaatcatt

SEQ ID NO: 53741 - DNA, 110 bp, synthetic construct
  source 1..110: mol_type = other DNA
tgtctctcttacagattcaaaaaatattcagtcattgatgtagctgacaacttttttttccaccggatcaccttgctgctaaaattcaagaggacaccaaacaaacacaa

SEQ ID NO: 53742 - DNA, 110 bp, synthetic construct
  source 1..110: mol_type = other DNA
aatactcatatatttttgtaatagcccatctgaaactatatggcccacaaagacaagctctgtttttcttgtttggctctttttattctatattcgttataacatcacca

SEQ ID NO: 53743 - DNA, 110 bp, synthetic construct
  source 1..110: mol_type = other DNA
gttacagtctttctccttggctggttactctctgcatgctgatgtgtggacactgttccaggtcccattatttaaatctgtcccatttcattccaatgaacttcatttat

SEQ ID NO: 53744 - DNA, 110 bp, synthetic construct
  source 1..110: mol_type = other DNA
cactggagtttgaggtgtgtgcttttacacaaattgattaagagctgatacttccactacagggaagtgagaaacagcaaatgtatcataggtcctcactggtccttcac

SEQ ID NO: 53745 - DNA, 110 bp, synthetic construct
  source 1..110: mol_type = other DNA
agcaaatcaaaatatagaatcttattcctccagactgcaaaaaagctataattatatccccacttgtgtcatgaggtgtcatttaaaccttttctacattactccagtta

SEQ ID NO: 53746 - DNA, 110 bp, synthetic construct; identical to SEQ ID NO: 53745
  source 1..110: mol_type = other DNA

SEQ ID NO: 53747 - DNA, 110 bp, synthetic construct
  source 1..110: mol_type = other DNA
taactgtatcctgggataaatcaactcagaggccacaagaggtcttaaaagcaatgatagtggcaataacaacaataataatgaaaataaagataaggcagagttgatca

SEQ ID NO: 53748 - DNA, 110 bp, synthetic construct
  source 1..110: mol_type = other DNA
caagaggtcttaaaagcaatgatagtggcaataacaacaataataatgaaaataaagataaggcagagttgatcatagttttggagaagaaatcttgctgtttgctttat

SEQ ID NO: 53749 - DNA, 110 bp, synthetic construct
  source 1..110: mol_type = other DNA
tgttagacgtaatgacattggactggcaggagataggctcatgtatcttttggatgtcaaaattcagtgctccccaggctggataaagtgaggctcaaacatcattaagc

SEQ ID NO: 53750 - DNA, 110 bp, synthetic construct
  source 1..110: mol_type = other DNA
gtcaaaattcagtgctccccaggctggataaagtgaggctcaaacatcattaagctgaatgattttcccttaaaattctacttaaaatgaatttaattttttttaacgtg

SEQ ID NO: 53751 - DNA, 110 bp, synthetic construct
  source 1..110: mol_type = other DNA
ggtccctgcagtttccttaaggattaagtgaaacaatatacaaatgacagtatataagatgcgtcaccttcaatgagtgttcaataaataggtattaatggttcaaaatc

SEQ ID NO: 53752 - DNA, 110 bp, synthetic construct
  source 1..110: mol_type = other DNA
gaggaaacatggtgcgtgtgtgcgtatgttaattttacatgtcaacttgaccattctaaaggatgcccacctagctgggaaaacattgtttctgggtatgcctgtaaggc

SEQ ID NO: 53753 - DNA, 110 bp, synthetic construct
  source 1..110: mol_type = other DNA
tagttggtaaggatctcgatatacagaggtggtgtgctgaagctaaaccaatttgtcctcctctgggaagagggtgcgcaatcagctcaaaagaaattgggtttgtgaag

SEQ ID NO: 53754 - DNA, 110 bp, synthetic construct
  source 1..110: mol_type = other DNA
tcctcctctgggaagagggtgcgcaatcagctcaaaagaaattgggtttgtgaagctggaagggatgaagggaagaggggagcagaatgcaaggtgccattaaaacatag

SEQ ID NO: 53755 - DNA, 110 bp, synthetic construct
  source 1..110: mol_type = other DNA
agattacctggcactcactctgtggccgccaggtggtaaactcagctgtcagtactgctaatctaggaaacaggagagctctcgctctactcctgcattatgtggaggag

SEQ ID NO: 53756 - DNA, 110 bp, synthetic construct
  source 1..110: mol_type = other DNA
tgctaatctaggaaacaggagagctctcgctctactcctgcattatgtggaggagtaccccctctttcagaaggggagttacttaaacacataaactcaaaaatcttccc

SEQ ID NO: 53757 - DNA, 110 bp, synthetic construct
  source 1..110: mol_type = other DNA
tacttttttttttttgtatgtaattttcattttgtctctgtttttgcaagtgattaatcccttcagtgtataaagctgttttctaaaacatacagtttctccccctaccc

SEQ ID NO: 53758 - DNA, 110 bp, synthetic construct
  source 1..110: mol_type = other DNA
aatcccttcagtgtataaagctgttttctaaaacatacagtttctccccctacccccaggaaaatttgcctagacttatgtccttaagaactttttaaatattttaatgg

SEQ ID NO: 53759 - DNA, 110 bp, synthetic construct; identical to SEQ ID NO: 53757
  source 1..110: mol_type = other DNA

SEQ ID NO: 53760 - DNA, 110 bp, synthetic construct; identical to SEQ ID NO: 53758
  source 1..110: mol_type = other DNA

SEQ ID NO: 53761 - DNA, 110 bp, synthetic construct
  source 1..110: mol_type = other DNA
tgactactctactggctggctgttttcctctctctccctctcttcaaacctccctattccctgagacccaacaatattgaaacttgatcaattaacagtcttataatagt

SEQ ID NO: 53762 - DNA, 110 bp, synthetic construct
  source 1..110: mol_type = other DNA
aaacctccctattccctgagacccaacaatattgaaacttgatcaattaacagtcttataatagtctttatgtggttaagtaaaagaaagggtttcactttattgtttta

SEQ ID NO: 53763 - DNA, 110 bp, synthetic construct
  source 1..110: mol_type = other DNA
tctctaaggctcatctatggaatttttaggtgtatatggacattagaaaagagctcctggtgtagaggaaagggatggagaacagacaaggcatcaaagaattgtagggc

SEQ ID NO: 53764 - DNA, 110 bp, synthetic construct
  source 1..110: mol_type = other DNA
cctggtgtagaggaaagggatggagaacagacaaggcatcaaagaattgtagggcaaatgtccaaggtaacaggaagctctgagagatgaatttagcattgggtgtttct

SEQ ID NO: 53765 - DNA, 110 bp, synthetic construct
  source 1..110: mol_type = other DNA
gcccaagtttgtgttctctagattaggtcaccatgtatccagctaagccaaaggtgcaagggtgtggaacgatcacaagagcctgtggctgaaagaacatggatgtgatg

SEQ ID NO: 53766 - DNA, 110 bp, synthetic construct
  source 1..110: mol_type = other DNA
catctcaaatccttttgggtgtagattttttttaaagaaaattatcattgtaccgtctcaaaacactcaaggtaataatatacttaaggctgaagaaaagcctcaagaag

SEQ ID NO: 53767 - DNA, 110 bp, synthetic construct
  source 1..110: mol_type = other DNA
aaaaaaaattttttgttgtcaagcaagttttttttttttttttgtttgacctatggcatatgggattcctaggtgggggatcagatctgagctgcagttatgacctatac

SEQ ID NO: 53768 - DNA, 110 bp, synthetic construct
  source 1..110: mol_type = other DNA
gcatatgggattcctaggtgggggatcagatctgagctgcagttatgacctatactagaaccttaaccctctgtgccaagccagggatcaaaactatgtcccagtgctcc

SEQ ID NO: 53769 - DNA, 110 bp, synthetic construct
  source 1..110: mol_type = other DNA
acctgcgagaagaattcacacacaaaaaaaatcacaaaaatcagtgaaagctagtatactaatggttatgatttattacaaggaatgcataaaaattaaagtcagccaaa

SEQ ID NO: 53770 - DNA, 110 bp, synthetic construct
  source 1..110: mol_type = other DNA
ggacctgctcaggcctgatcacacatatacctcttccatttgttgctgaagtgctgctgtgtgtgcaccacccttatggtttcatgggttgcataacaccaagttcataa

SEQ ID NO: 53771 - DNA, 110 bp, synthetic construct
  source 1..110: mol_type = other DNA
gctgtgtgtgcaccacccttatggtttcatgggttgcataacaccaagttcataatggacagctcagatcacatggtaacttgatgactcatggttaatcattcagtatc

SEQ ID NO: 53772 - DNA, 110 bp, synthetic construct
  source 1..110: mol_type = other DNA
attgctataatttctatcttatctgactggaaaccaaggcttgggaagtttaaatgacttgctcaactattgcaaaaccagcaagtgagaatgtcaagattggaaactgg

SEQ ID NO: 53773 - DNA, 110 bp, synthetic construct
  source 1..110: mol_type = other DNA
gacttgctcaactattgcaaaaccagcaagtgagaatgtcaagattggaaactggtactgtgatattaggaagcaaaaattttaaccactgaatataaatcaagagcata

SEQ ID NO: 53774 - DNA, 110 bp, synthetic construct
  source 1..110: mol_type = other DNA
tggctgtcttacattgggatttttcaattggatcttcagaccttcatctgattgttatacaagcttttgagacagcttcatgacagcatttaaccctcacatcttttcta

SEQ ID NO: 53775 - DNA, 110 bp, synthetic construct
  source 1..110: mol_type = other DNA
ccatctacactagctctaacagctttcatccagttccatagtttaaatacagtatatgtcaatggctcccaaatgcctacctccagccctgacttcttcactgacctcag

SEQ ID NO: 53776 - DNA, 110 bp, synthetic construct
  source 1..110: mol_type = other DNA
atgtcaatggctcccaaatgcctacctccagccctgacttcttcactgacctcagactcatatatccgacttctacttatatatccatatccatctggtttactgataaa

SEQ ID NO: 53777 - DNA, 110 bp, synthetic construct
  source 1..110: mol_type = other DNA
ggtaaaggtcacttgataatagaggcagatattgaagtggcgtacctacaagcaaaggcatgccaaggactgctggccactatcggaagaagacaaggctgtgtcttccc

SEQ ID NO: 53778 - DNA, 110 bp, synthetic construct
  source 1..110: mol_type = other DNA
aggcatgccaaggactgctggccactatcggaagaagacaaggctgtgtcttccctagaaactttggatagagcatggtcctgatgaaaacttaaccttgtactagcagc

SEQ ID NO: 53779 - DNA, 110 bp, synthetic construct
  source 1..110: mol_type = other DNA
agtgttaattctgcctcttaaagaccacgattacaggcacaagcaaagaaaaagctttcagagcagactttttaggccatgatatttctctgtctctgatgctccattca

SEQ ID NO: 53780 - DNA, 110 bp, synthetic construct
  source 1..110: mol_type = other DNA
tttcctttttaaacgtatagctgctatttacaagaggaggtgtttaaactatagtctgttccattattagcatgcttcattactttgcagctctgttatttatgccataa

SEQ ID NO: 53781 - DNA, 110 bp, synthetic construct
  source 1..110: mol_type = other DNA
tatttttctccatttccccttttctgcatatcgttcattcctattattttaataacacataacttttaagcagaaaacaaccgtctgctatttttttgacctcataggac

SEQ ID NO: 53782 - DNA, 110 bp, synthetic construct
  source 1..110: mol_type = other DNA
cacataacttttaagcagaaaacaaccgtctgctatttttttgacctcataggacaggctgaaaatatgttcatattaaaatagaattagagtaggctttacttcaaatt

SEQ ID NO: 53783 - DNA, 110 bp, synthetic construct
  source 1..110: mol_type = other DNA
ctctccagaaattgttaacttagcaatggtctcccaaatttccttaagtttcctctctatctatggtcccttattaggacgtatacaaactgcttgtgtaactatctact

SEQ ID NO: 53784 - DNA, 110 bp, synthetic construct
  source 1..110: mol_type = other DNA
tctatctatggtcccttattaggacgtatacaaactgcttgtgtaactatctactccatctttatcagtactaccatatataagttgagtctcacttcatacacctgtat

SEQ ID NO: 53785 - DNA, 110 bp, synthetic construct
  source 1..110: mol_type = other DNA
aaaggacctcatgagatcaaagctgtgcgaaaatggtctgggaactgagaccaccagggggagcccaagcagctagtgagaacgtgtcctacaagctggatgagagctcc

SEQ ID NO: 53786 - DNA, 110 bp, synthetic construct
  source 1..110: mol_type = other DNA
agggggagcccaagcagctagtgagaacgtgtcctacaagctggatgagagctcctggaagtgggaggagttctgcaggaacaaaagtgacccattaaaaaagggtaggc

SEQ ID NO: 53787 - DNA, 110 bp, synthetic construct
  source 1..110: mol_type = other DNA
cacttcctccccaaaattaatccatcaactgaaatccaaccttgccatttgttctattcttctttatttcctgcctcacttggcccactcactgctcaagaatgtccata

SEQ ID NO: 53788 - DNA, 110 bp, synthetic construct
  source 1..110: mol_type = other DNA
attcttctttatttcctgcctcacttggcccactcactgctcaagaatgtccatactaaaggtaccaatccaggtgcttcctgcaagacctgtcctgagcctggcaaaac

SEQ ID NO: 53789 - DNA, 110 bp, synthetic construct
  source 1..110: mol_type = other DNA
gcagtcatactaaactctttttcctaaaggcttcttaaaaaaacatactctataaatgttcttagagtgtacaagcccaaatactatcaaaatcttgtttcacttgtaac

SEQ ID NO: 53790 - DNA, 110 bp, synthetic construct
  source 1..110: mol_type = other DNA
gcattttgacatctgtacctctctgcccctgggtacctcaaaattatcatgaaaaaatgtgcacccttaacatgcattttacacacataccctaaaatctagaaaccgct

SEQ ID NO: 53791 - DNA, 110 bp, synthetic construct
  source 1..110: mol_type = other DNA
aatgtgcacccttaacatgcattttacacacataccctaaaatctagaaaccgctgtaaaaacagttacctgaccctctcttattctccacatcagaataaaagacattg

SEQ ID NO: 53792 - DNA, 110 bp, synthetic construct
  source 1..110: mol_type = other DNA
catcaaaggatggaatattagctaagcggtctctctttctattagaaaagcaattaagacatcaaggagaaattgacattggttatctgagaccacaaaataaatcccca

SEQ ID NO: 53793 - DNA, 110 bp, synthetic construct; identical to SEQ ID NO: 53792
  source 1..110: mol_type = other DNA

SEQ ID NO: 53794 - DNA, 110 bp, synthetic construct
  source 1..110: mol_type = other DNA
cagtttcaagagaactgacacatttaatctttttcattaatggccaagggtactctctccttacctaggtgctaaattcgtctgtagagtcattcagaccaaaatcaaat

SEQ ID NO: 53795 - DNA, 110 bp, synthetic construct
  source 1..110: mol_type = other DNA
tgagggatctacaacataattttttaatctttcattgctaagtctttctcacacttaaaacttgtcaagcttacagttagcatttaggtaactatgccatgagtctgtgg

SEQ ID NO: 53796 - DNA, 110 bp, synthetic construct
  source 1..110: mol_type = other DNA
taaaacttgtcaagcttacagttagcatttaggtaactatgccatgagtctgtgggcagtaacaatagagtgctaagcatttttgctttttttaaaatctcttttccaaa

SEQ ID NO: 53797 - DNA, 110 bp, synthetic construct; identical to SEQ ID NO: 53795
  source 1..110: mol_type = other DNA

SEQ ID NO: 53798 - DNA, 110 bp, synthetic construct; identical to SEQ ID NO: 53796
  source 1..110: mol_type = other DNA

SEQ ID NO: 53799 - DNA, 110 bp, synthetic construct
  source 1..110: mol_type = other DNA
gcctgcatacacaacttatcttttctccctagactgtgtacactatgttcagcggctacatagagtttagttcaaataacagtgagcacacaatcctcggagctatgatt

SEQ ID NO: 53800 - DNA, 110 bp, synthetic construct
  source 1..110: mol_type = other DNA
tattctaaacatcttttgaaatgattccttctcagttatttcctctcaattcccaggtcagtactcttggtcaagctatgcttagatgatgttacattgtgccaccatat

SEQ ID NO: 53801 - DNA, 110 bp, synthetic construct
  source 1..110: mol_type = other DNA
tttgcctcaggaaagaactgatgaaaaagggaggcaaccttacacaggttttcagggcactttcacctttcaagcatgtttcgtattagcctgttggcattaaagtgcca

SEQ ID NO: 53802 - DNA, 110 bp, synthetic construct
  source 1..110: mol_type = other DNA
ggcactttcacctttcaagcatgtttcgtattagcctgttggcattaaagtgccatgacttgagcccgttacagaaatcccagcaacttaatctatcaggtttcctaata

SEQ ID NO: 53803 - DNA, 110 bp, synthetic construct
  source 1..110: mol_type = other DNA
taatacaggctgttcgaagttgtattttattaagctcattccccagcacctccttattctcctatctatgaaagcacggctacagttcatttccttcttcactgttttac

SEQ ID NO: 53804 - DNA, 110 bp, synthetic construct
  source 1..110: mol_type = other DNA
gatacaaatttctaaggggacgcaaaatttcggttcacaacaattgcatttcaaatgactctccacattctaatgtcatttcatgaagtatatgtctcagatttcattcc

SEQ ID NO: 53805 - DNA, 110 bp, synthetic construct
  source 1..110: mol_type = other DNA
tgactctccacattctaatgtcatttcatgaagtatatgtctcagatttcattccatgccactttctgctttgttcattatgcactaacacactggctttattttagatt

SEQ ID NO: 53806 - DNA, 110 bp, synthetic construct
  source 1..110: mol_type = other DNA
ttcgaagaggacaagtgttctaggggaccagtaaaaggtgtctccctggataatatttaggaaatttccagaaatgagtgcatgacctaaacatacagcaagtcagaacc

SEQ ID NO: 53807 - DNA, 110 bp, synthetic construct
  source 1..110: mol_type = other DNA
catggcctgcacctttgttgaatgaatgagtggataatcaggaccttattacacgagaggctccagtggactgatatttcagtgggtgttctgattgaggtatacataga

SEQ ID NO: 53808 - DNA, 110 bp, synthetic construct
  source 1..110: mol_type = other DNA
cactatacagggtaaggtctccaacaataaggcttatatgtcatagcatcagctcatcagacccaagtacaaccatgaatataacaaactaaaggatccaaggactggca

SEQ ID NO: 53809 - DNA, 110 bp, synthetic construct
  source 1..110: mol_type = other DNA
atcagacccaagtacaaccatgaatataacaaactaaaggatccaaggactggcaagaacttgctctcttattctttcctagaatgataaagagggaaaagcaatttaca

SEQ ID NO: 53810 - DNA, 110 bp, synthetic construct
  source 1..110: mol_type = other DNA
tttcacctaaggggaggttaggtaggatcagagcataagctaaactgaaacatattccattcatcactgaacagccaacatcgagcataatgtcaaacacctatttgatg

SEQ ID NO: 53811 - DNA, 110 bp, synthetic construct
  source 1..110: mol_type = other DNA
tccattcatcactgaacagccaacatcgagcataatgtcaaacacctatttgatgctcaaaaatgtttatacttgaaccaattaatgagtttgtcttccaccaatttccc

SEQ ID NO: 53812 - DNA, 110 bp, synthetic construct
  source 1..110: mol_type = other DNA
gaaaaaaaacgggcttctgataaaaggaatgggactatgagaattactttttgcaatcagtccaaaaagacgaaatagcatagatgtgatatcttgtgttttttgtttgt

SEQ ID NO: 53813 - DNA, 110 bp, synthetic construct
  source 1..110: mol_type = other DNA
gatgaagatggctgtatctttttttacaattttgggaagagtcttatattacatatattctcctaaactatctgttccatgagtgaataaatgaaatcacacaagagcca

SEQ ID NO: 53814 - DNA, 110 bp, synthetic construct
  source 1..110: mol_type = other DNA
tattctcctaaactatctgttccatgagtgaataaatgaaatcacacaagagccagaagtgacaactgtttctttgcttgtgaggacttcacttacagaaatccccttga

SEQ ID NO: 53815 - DNA, 110 bp, synthetic construct
  source 1..110: mol_type = other DNA
tgatttaattgggcttattttaggatacatggaatacaccatctgagcctctcctgatgtattagtgaaagctgattctcagcttaaccttcgacgttgagctaatgcct

SEQ ID NO: 53816 - DNA, 110 bp, synthetic construct
  source 1..110: mol_type = other DNA
ttatctatcctcagttctagcacactcttacttaagactgagttgactctaaaggttggatgaggtttatcccaaggctaatattatatttctatacagaaagttgacat

SEQ ID NO: 53817 - DNA, 110 bp, synthetic construct
  source 1..110: mol_type = other DNA
actctaaaggttggatgaggtttatcccaaggctaatattatatttctatacagaaagttgacattttatatggtagaccctgatgatgaaagataactgataattgctt

SEQ ID NO: 53818 - DNA, 110 bp, synthetic construct
  source 1..110: mol_type = other DNA
tttatgtttaatagtttgtatctgttaatcctatactcttaatgtctctcccctccctccatctcccctttggtaactataggtttgtcttccatgtctttgagtctgat

SEQ ID NO: 53819 - DNA, 110 bp, synthetic construct
  source 1..110: mol_type = other DNA
cctccatctcccctttggtaactataggtttgtcttccatgtctttgagtctgattctgtttggttttggctttgacatgtaaagagctcagaatcatcactccagtcct

SEQ ID NO: 53820 - DNA, 110 bp, synthetic construct
  source 1..110: mol_type = other DNA
actgctaagccacaatgggaactccagtatatagttttttaaactgtactttacctgctattcctattactaatattttctgctagagagctgatctatcatataaatac

SEQ ID NO: 53821 - DNA, 110 bp, synthetic construct
  source 1..110: mol_type = other DNA
tgctattcctattactaatattttctgctagagagctgatctatcatataaatactctttgcacaatacatcctctgatgatctttctcacacgtaaattttgcaccaag

SEQ ID NO: 53822 - DNA, 110 bp, synthetic construct
  source 1..110: mol_type = other DNA
agcagagggaagaaaataaaagtggatcaataatattgaaaacattcaaaagataaactcaaaggctttttgcaatcaactgggctggtttcagtcacatggatcctatg

SEQ ID NO: 53823 - DNA, 110 bp, synthetic construct; identical to SEQ ID NO: 53822
  source 1..110: mol_type = other DNA

SEQ ID NO: 53824 - DNA, 110 bp, synthetic construct
  source 1..110: mol_type = other DNA
ctgcagcttgtggcaactctagattcttaaccccctgaccaagcccaggaatctacccggcctcttcacaaagacaacgttgggtccttaacctgcagggccacaatggg

SEQ ID NO: 53825 - DNA, 110 bp, synthetic construct
  source 1..110: mol_type = other DNA
cccggcctcttcacaaagacaacgttgggtccttaacctgcagggccacaatgggaactccaagtcactcatttttatttttattttttgtcctttttttttttttttgt

SEQ ID NO: 53826 - DNA, 110 bp, synthetic construct
  source 1..110: mol_type = other DNA
ggaatacattcttctttcattcccaaacatgaaatcagttccaactgaaaattctttagagaacatgctatgcgaatagagtggatttagcatttactgaatgaatcaaa

SEQ ID NO: 53827 - DNA, 110 bp, synthetic construct
  source 1..110: mol_type = other DNA
ttagagaacatgctatgcgaatagagtggatttagcatttactgaatgaatcaaatctgggttctctgtaggaggctggatctggaaccacatactgaaacctgaagact

SEQ ID NO: 53828 - DNA, 110 bp, synthetic construct
  source 1..110: mol_type = other DNA
atggcttttctgtagccatatttacagagaagtggagaaaaatgtgttcaccaataaggggaagcaaagcagatataaatatgggtggagaaataaatttggccccaaat

SEQ ID NO: 53829 - DNA, 110 bp, synthetic construct
  source 1..110: mol_type = other DNA
aaggggaagcaaagcagatataaatatgggtggagaaataaatttggccccaaatttgacagtttatattccctgtcctaatattacttgtataagatcaactcatccat

SEQ ID NO: 53830 - DNA, 110 bp, synthetic construct
  source 1..110: mol_type = other DNA
tctgctcaggtagatatatatttccctagcagtaatgccatttatttcaaagagcttcaaaattcttaggaaactgcatattaaccttcttctcttgagactcctttctg

SEQ ID NO: 53831 - DNA, 110 bp, synthetic construct
  source 1..110: mol_type = other DNA
cccttaattgaaaattcctgaaaagttgaaaaaaaaggttcctaatatttagtcacaacctaaatttagctgaatagtttgtcataattgaaagtattgcacacgccgaa

SEQ ID NO: 53832 - DNA, 110 bp, synthetic construct; identical to SEQ ID NO: 53831
  source 1..110: mol_type = other DNA

SEQ ID NO: 53833 - DNA, 110 bp, synthetic construct
  source 1..110: mol_type = other DNA
tgggttctttacccactgggccacaatgagaactcctgtcacttcttcaaatacggtgccttgctgttattgttgctctagtgatttttcacttgttaattgaaacacat

SEQ ID NO: 53834 - DNA, 110 bp, synthetic construct
  source 1..110: mol_type = other DNA
taggaggacatatgtcagccttctttcccatcagttcatcccatcagaatatatggaatctgattaatgatctatcccagcagctgcacaatggcagaccctacagagca

SEQ ID NO: 53835 - DNA, 110 bp, synthetic construct
  source 1..110: mol_type = other DNA
gaaagtccttgaaataatatatatagaccacaattttttttttttcttttttcccttcttgaggacagggatcagagagaaagaatggagtgtagaataacaagagtttg

SEQ ID NO: 53836 - DNA, 110 bp, synthetic construct; identical to SEQ ID NO: 53835
  source 1..110: mol_type = other DNA

SEQ ID NO: 53837 - DNA, 110 bp, synthetic construct
  source 1..110: mol_type = other DNA
tatagaatgagacatgtgttaggcatgaacctcccaggtcacaagctcaggagttccaagaacggaactttctattagtttctgtctggaatcttcgcttctcctgaagt

SEQ ID NO: 53838 - DNA, 110 bp, synthetic construct
  source 1..110: mol_type = other DNA
ccaagaacggaactttctattagtttctgtctggaatcttcgcttctcctgaagtggaaaaaaattctaaccttaagtcagttcttggtaaagtcagttaactcctaatc

SEQ ID NO: 53839 - DNA, 110 bp, synthetic construct
  source 1..110: mol_type = other DNA
gtagaggctggaaccaagacccattatgggtagaggtgctaaaaggaacaggctggaaagcagaccaataataaccaaaggagttcacggttattgctgggtttgttgtc

SEQ ID NO: 53840 - DNA, 110 bp, synthetic construct
  source 1..110: mol_type = other DNA
gaaagcagaccaataataaccaaaggagttcacggttattgctgggtttgttgtcatgtacatgagaacgaaagagaacaactgactccacagtttgaggccaaactgca

SEQ ID NO: 53841 - DNA, 110 bp, synthetic construct
  source 1..110: mol_type = other DNA
ttaaagaagtatacataaacaggttcagcagggaaagttgaccatttgttttaaaatttgagaattaaaactcataatctctgtaaattggtagagccgctatagaaagc

SEQ ID NO: 53842 - DNA, 110 bp, synthetic construct; identical to SEQ ID NO: 53841
  source 1..110: mol_type = other DNA

SEQ ID NO: 53843 - DNA, 110 bp, synthetic construct
  source 1..110: mol_type = other DNA
taattcaaaatgcaagtggctagggagaataaactcctttagatttttttcctaaaaggaagaaggacttcattgttgctaaagctttcctatacataagtgccagtaaa

SEQ ID NO: 53844 - DNA, 110 bp, synthetic construct
  source 1..110: mol_type = other DNA
aaggaagaaggacttcattgttgctaaagctttcctatacataagtgccagtaaataagattcaagtctttcaaaatgaaaaaaaaaataaacttatgtgccactgagtc

SEQ ID NO: 53845 - DNA, 110 bp, synthetic construct
  source 1..110: mol_type = other DNA
tcagtttgagttttgaaatgaatcatttttcaaattttggccgtgaaaatccctaagcctcaggtataaatttgctagttagaaaattctaagcatttgctcttaccttg

SEQ ID NO: 53846 - DNA, 110 bp, synthetic construct; identical to SEQ ID NO: 53845
  source 1..110: mol_type = other DNA

SEQ ID NO: 53847 - DNA, 110 bp, synthetic construct
  source 1..110: mol_type = other DNA
tatacagtggctgatgggagcagggaggtggaggggaggaatgagggccggctgaaatccatgttgctccctgcaattccaggtttctccttctctgtctttctaaaata

SEQ ID NO: 53848 - DNA, 110 bp, synthetic construct
  source 1..110: mol_type = other DNA
aatccatgttgctccctgcaattccaggtttctccttctctgtctttctaaaatacatatttacttttattttgaaaggcgtatcttctcttggcgaaagcaaagacaga

SEQ ID NO: 53849 - DNA, 110 bp, synthetic construct
  source 1..110: mol_type = other DNA
gcccgagtccatttaactgcaggctctcttgcccattgtcttcagaataaaacccaagtggctggtgaaagccttaaggccctgcatggccaggcctatcagaacccttg

SEQ ID NO: 53850 - DNA, 110 bp, synthetic construct
  source 1..110: mol_type = other DNA
aagtggctggtgaaagccttaaggccctgcatggccaggcctatcagaacccttgacccccactcatgtcattcctcgcaaaatgtccccagcccccttggtcttttagt

SEQ ID NO: 53851 - DNA, 110 bp, synthetic construct
  source 1..110: mol_type = other DNA
aattttgcaagcatggcttattatcccctcttgagatgaaaaaagtgaagttccgagaggttaagccaagctccctttgtcaagctgttaatgggtgtgagctaagccca

SEQ ID NO: 53852 - DNA, 110 bp, synthetic construct
  source 1..110: mol_type = other DNA
atagtagtttaaataatttttttgattacttgatgcctacacatcgatttgatttgaaagcttcagatggaatcaagtatgtacacatctccagagccgagagaatgatg

SEQ ID NO: 53853 - DNA, 110 bp, synthetic construct
  source 1..110: mol_type = other DNA
gaaagcttcagatggaatcaagtatgtacacatctccagagccgagagaatgatgaaaaaggcttcggtcaggttatttttagtaatgaatttgcttcatacttgagagg

SEQ ID NO: 53854 - DNA, 110 bp, synthetic construct
  source 1..110: mol_type = other DNA
atgcattgtaccgatgtagctaattgacactcagtattcattcccatatcctactggattccatcttgtactaaagaaactataagcttaaaatgcttttctggagttcc

SEQ ID NO: 53855 - DNA, 110 bp, synthetic construct
  source 1..110: mol_type = other DNA
tagtttgcaggtatggctccatcctggcattgccatgaccatggcataggccagtggctacagctccaattcgactccttgcttggaaaccctcatatgctatgggtgtg

SEQ ID NO: 53856 - DNA, 110 bp, synthetic construct
  source 1..110: mol_type = other DNA
ggctacagctccaattcgactccttgcttggaaaccctcatatgctatgggtgtggacctaaatagacaaaaaagaaaaaaaaaattctaattcttgagagttcccattg

SEQ ID NO: 53857 - DNA, 110 bp, synthetic construct
  source 1..110: mol_type = other DNA
gaagagactttctacctctgtatgttccgcctccattctcatagattagttgactatgggtgtgtgggtgtatttctgggctttctagccttttccattgatctatgttc

SEQ ID NO: 53858 - DNA, 110 bp, synthetic construct; identical to SEQ ID NO: 53857
  source 1..110: mol_type = other DNA

SEQ ID NO: 53859 - DNA, 110 bp, synthetic construct
  source 1..110: mol_type = other DNA
ttgcccaaggccacctagcaggaagtagtagaaatgaaagtcaaacacaggtcagctgatctgtataacctcccctccttcattgcatgggactttctgctctattaaga

SEQ ID NO: 53860 - DNA, 110 bp, synthetic construct
  source 1..110: mol_type = other DNA
ctgatctgtataacctcccctccttcattgcatgggactttctgctctattaagaggcattagttgtctgagatacattggttgtgacgtcccttcacctctcaagagaa

SEQ ID NO: 53861 - DNA, 110 bp, synthetic construct
  source 1..110: mol_type = other DNA
tggactaatgggccatggtttgcgtttagtgacattttctgtgacaacaaatttaaaataataataaagaaaacagacatgggtaacttttgaccagaaatcaattggcc

SEQ ID NO: 53862 - DNA, 110 bp, synthetic construct
  source 1..110: mol_type = other DNA
aaataataataaagaaaacagacatgggtaacttttgaccagaaatcaattggccttcattcacactttcaagacaaatacattcacaggtccaacccttaacactcttc

SEQ ID NO: 53863 - DNA, 110 bp, synthetic construct
  source 1..110: mol_type = other DNA
aacagggcttgccatgtattgaatgcgaataataaataaagaaaagagtgcatcaaggatggccccaagtttggggtttgagcagctgagtaagtggaagtgccatttgt

SEQ ID NO: 53864 - DNA, 110 bp, synthetic construct
  source 1..110: mol_type = other DNA
aggatggccccaagtttggggtttgagcagctgagtaagtggaagtgccatttgttgcaataggaagtacacagtcataagggaaaatcaagagttttgtgtggaataag

SEQ ID NO: 53865 - DNA, 110 bp, synthetic construct
  source 1..110: mol_type = other DNA
agtgcttgtgtgtatgtgtggaggaggtggggttgagtattcatgtctgcttataaatataactacctttccacacaagctcctcattcatggacagacatgatgaatgc

SEQ ID NO: 53866 - DNA, 110 bp, synthetic construct
  source 1..110: mol_type = other DNA
gtgcccagcacagaacctggctcaagtaggaacgccatagacagcagatgatggaatgaatggaatgaaggatggagatcagtaaatgactgagagttatgttttgctca

SEQ ID NO: 53867 - DNA, 110 bp, synthetic construct
  source 1..110: mol_type = other DNA
atgaatggaatgaaggatggagatcagtaaatgactgagagttatgttttgctcagctctgaatcaaatgccttggaacattgaaacactgtttagtctttgtgcccaca

SEQ ID NO: 53868 - DNA, 110 bp, synthetic construct
  source 1..110: mol_type = other DNA
cagctctctatttcacctttacctccaaaactttcctgccataatttccagaacaatcaatccagaatcatccaaaaaagccttatcattagcttcttcagttctatgcc

SEQ ID NO: 53869 - DNA, 110 bp, synthetic construct
  source 1..110: mol_type = other DNA
atcaatccagaatcatccaaaaaagccttatcattagcttcttcagttctatgccagaagtgacacttgactctcagcagaagataccactttaacctgccctcttaaat

SEQ ID NO: 53870 - DNA, 110 bp, synthetic construct
  source 1..110: mol_type = other DNA
cccttgagtatttgaatgttttggtagaattagtgaagccatctgttcctggacatttgggggagaggttttttattattaagtcaatctctgacgagtaattgttcaga

SEQ ID NO: 53871 - DNA, 110 bp, synthetic construct
  source 1..110: mol_type = other DNA
tttgggggagaggttttttattattaagtcaatctctgacgagtaattgttcagattttccatttcactatgattcagtttgtataggtagtatgtttctaggtatttat

SEQ ID NO: 53872 - DNA, 110 bp, synthetic construct
  source 1..110: mol_type = other DNA
aggtattacagccccatataagtggtgggaatacatatctacaattttccccccaaaaaagctattgagataaattatattttcctacatgagggatgtattgcaacact

SEQ ID NO: 53873 - DNA, 110 bp, synthetic construct
  source 1..110: mol_type = other DNA
taaaatgttatccttactaaggtaattcaacttctgtacatatacattattcccagatggtatggtccacatggagaaatgaatcttttggtccatggccctgctcatct

SEQ ID NO: 53874 - DNA, 110 bp, synthetic construct
  source 1..110: mol_type = other DNA
gatggtatggtccacatggagaaatgaatcttttggtccatggccctgctcatctgcaaatatgaagattcaatttatgcaagtacagaataattgcttcataattatta

SEQ ID NO: 53875 - DNA, 110 bp, synthetic construct
  source 1..110: mol_type = other DNA
actgaagggccttcttgcaggctgggtctaagaagccactactaaagtgtataatagatgaaaccgtgaatattctatatttaaggataatagatatcaccacgctgttc

SEQ ID NO: 53876 - DNA, 110 bp, synthetic construct
  source 1..110: mol_type = other DNA
agatgaaaccgtgaatattctatatttaaggataatagatatcaccacgctgttcatggattaaggaaaggttgactgacatttacacaaaatacacattcatcatcaac

SEQ ID NO: 53877 - DNA, 110 bp, synthetic construct
  source 1..110: mol_type = other DNA
tgcagtctatgccatgaattggctcaccccagactttaccataccactctaatgtatatgttaaatccactgatgggctgcaccattcttgatttgaaaagagggggcta

SEQ ID NO: 53878 - DNA, 110 bp, synthetic construct
  source 1..110: mol_type = other DNA
atatgttaaatccactgatgggctgcaccattcttgatttgaaaagagggggctaagaaaaaaggtgctagtttgacttgctgtatttacgggatcataatattttcatt

SEQ ID NO: 53879 - DNA, 110 bp, synthetic construct
  source 1..110: mol_type = other DNA
tcttagggatgtatacttattcctctttccatctccccttcttccatttgaagtcttcttctccaaatgagaagaagctgatgtcatcatgagtctgaattctcttttta

SEQ ID NO: 53880 - DNA, 110 bp, synthetic construct
  source 1..110: mol_type = other DNA
agcataattacctccaaaggcctcgcctcctaataccacccccttgggtgtcagggtttcaatatatagatgtgtgtgttgggtgcaggggccacaaacatgcagtctgt

SEQ ID NO: 53881 - DNA, 110 bp, synthetic construct
  source 1..110: mol_type = other DNA
gtttcaatatatagatgtgtgtgttgggtgcaggggccacaaacatgcagtctgtaatatcatcagaccacaaaactgtcaaactgaaaaaaaattcttctttctctaca

SEQ ID NO: 53882 - DNA, 110 bp, synthetic construct
  source 1..110: mol_type = other DNA
ttttctcacttctcttattaaacttattatttgactgaagtttctctacagataaaaggcaggcaaaggacaagctgggaaaggaccatagggtcccgctctgttcagtt

SEQ ID NO: 53883 - DNA, 110 bp, synthetic construct; identical to SEQ ID NO: 53882
  source 1..110: mol_type = other DNA

SEQ ID NO: 53884 - DNA, 110 bp, synthetic construct
  source 1..110: mol_type = other DNA
tgacattctgagatgcattttttttctttctgttagttaatttgtgacatgtttgctgtttttcagtgataggaccagaccatgggcacagtgagaggcccatcttctac

SEQ ID NO: 53885 - DNA, 110 bp, synthetic construct
  source 1..110: mol_type = other DNA
ctgtttttcagtgataggaccagaccatgggcacagtgagaggcccatcttctacccttggacattttttcaaggaaaaaacaaaaacaggagttcccttcatggctcag

SEQ ID NO: 53886 - DNA, 110 bp, synthetic construct
  source 1..110: mol_type = other DNA
gtgtgcatttcaaaggtactgtccttcatcagaaggtaccttaaagcattaatagttctcttgctgtaaagttctttttatatttacttaatgagttgttgttaccttcg

SEQ ID NO: 53887 - DNA, 110 bp, synthetic construct
  source 1..110: mol_type = other DNA
ttctcttgctgtaaagttctttttatatttacttaatgagttgttgttaccttcgttacttattaagggctgagctagaagacaatgtgaagtgtaatcactgctacctg

SEQ ID NO: 53888 - DNA, 110 bp, synthetic construct
  source 1..110: mol_type = other DNA
agaggggcatggtaccgaaggggattcctgcatgaatcagatgaatttctaccgctagggagctttaaacctagtgaagcggaatagacacacatagacagacatgaagg

SEQ ID NO: 53889 - DNA, 110 bp, synthetic construct
  source 1..110: mol_type = other DNA
tggacaactatccagtggggacaggactagatttcatgaatttctctgttgtaattccacccaggataagcagctccattccagctgccacgcaaggaagagcatcagaa

SEQ ID NO: 53890 - DNA, 110 bp, synthetic construct
  source 1..110: mol_type = other DNA
gggtttgaagtaagttggtggttaattttaatttctaaaaaagtggaagtgtctttgttatggcctcttttccacatagataggggttgatattgatgtgtatttatcaa

SEQ ID NO: 53891 - DNA, 110 bp, synthetic construct
  source 1..110: mol_type = other DNA
tgttatggcctcttttccacatagataggggttgatattgatgtgtatttatcaatgtctagcaaaatttgcatctatatccctctgtctatctctatctctctgtatat

SEQ ID NO: 53892 - DNA, 110 bp, synthetic construct
  source 1..110: mol_type = other DNA
tcaaccaagcaagtgggaaatcaaggccatgacaccaaactttcttccaccttatatttgattagctgttccaagtattcttccatttgggccattgttttcttttctgc

SEQ ID NO: 53893 - DNA, 110 bp, synthetic construct
  source 1..110: mol_type = other DNA
tcatgtctgattaaagattaggtggttttctcaagaatgattttctctggttcatgatgaggcattttaatcactgtagctcagttagacatccttttaatctttggaaa

SEQ ID NO: 53894 - DNA, 110 bp, synthetic construct
  source 1..110: mol_type = other DNA
accactgtgccacaatgggaactccaattctgtcatttttgtgtcacacatttattttagcttaattccattcatgtgttagttcattaattcactcattcattcatttg

SEQ ID NO: 53895 - DNA, 110 bp, synthetic construct; identical to SEQ ID NO: 53894
  source 1..110: mol_type = other DNA

SEQ ID NO: 53896 - DNA, 110 bp, synthetic construct
  source 1..110: mol_type = other DNA
aatgctctcattttatcaaatttatctttgtttatagcaggagaaagtatctgtgctttttttcaggccacatgaaataagaacctcaaatacagctttactttaggaaa

SEQ ID NO: 53897 - DNA, 110 bp, synthetic construct; identical to SEQ ID NO: 53896
  source 1..110: mol_type = other DNA

SEQ ID NO: 53898 - DNA, 110 bp, synthetic construct
  source 1..110: mol_type = other DNA
ctatttttcacatgtccaagttgctttatttctgcagttccttagttgtatttgagtccatctgtttgtgactctgtagcagtctatttagctcaacacttacacaccca

SEQ ID NO: 53899 - DNA, 110 bp, synthetic construct
  source 1..110: mol_type = other DNA
gtccatctgtttgtgactctgtagcagtctatttagctcaacacttacacacccaaaacataaagccaggaaaaatgctttgtagttaaagacaaatattttaacaggct

SEQ ID NO: 53900 - DNA, 110 bp, synthetic construct
  source 1..110: mol_type = other DNA
ccccttaaaacctttcctaaccttatatttaacacttgtacagcaataagctaagcatctccaaattatttttccaaaattgatatcaattttcatctgccctgttctcc

SEQ ID NO: 53901 - DNA, 110 bp, synthetic construct
  source 1..110: mol_type = other DNA
taacttatgcaaatattttaacctattttcagactagactcttctttctctgggcccttcactttgtcttttgcaattcccctggtatcttgtacacatacagtctggtt

SEQ ID NO: 53902 - DNA, 110 bp, synthetic construct
  source 1..110: mol_type = other DNA
ccttcactttgtcttttgcaattcccctggtatcttgtacacatacagtctggttctcgcttcagtgcctacactgatgtttgaagtctcagttttgatgacacttgctt

SEQ ID NO: 53903 - DNA, 110 bp, synthetic construct
  source 1..110: mol_type = other DNA
tgaacaaatgacttggagaatgaagacaattttttgagggaaaaccttagtaacaggaaatttggttggattttaggtgctgtctcccaggaaactggatcaaggaaaaa

SEQ ID NO: 53904 - DNA, 110 bp, synthetic construct
  source 1..110: mol_type = other DNA
acagtgggaacttctgggcatttatttttaacaaatattgtttccttcctttttcagctcttctgtgtcataaccattcaaagatgaactaatgggttaatggtgatgat

SEQ ID NO: 53905 - DNA, 110 bp, synthetic construct
  source 1..110: mol_type = other DNA
atgcagacagaaaactaaaaaatatcgtaggcttctctgaaagatttccttatctcttagagccattggactaaaagccaaatccaagacacagagtttgcttctgcatg

SEQ ID NO: 53906 - DNA, 110 bp, synthetic construct
  source 1..110: mol_type = other DNA
cttagagccattggactaaaagccaaatccaagacacagagtttgcttctgcatgttgccaaattatgatattaattgaattcacagcctctcataggacatttagggat

SEQ ID NO: 53907 - DNA, 110 bp, synthetic construct
  source 1..110: mol_type = other DNA
cattggatgaagcaggagcaagttcaagtcagcttgtcacccttatcatctggatgtcacagtctagtgagcatttctcaatgagatgtagtccatctatactatccacc

SEQ ID NO: 53908 - DNA, 110 bp, synthetic construct
  source 1..110: mol_type = other DNA
tgaagtagtgttattgcccttattttagaaaaattgagattcagagatcttaagaatttggttcattttaacatagtgtccactgtaggcacatgctctgagtcacatac

SEQ ID NO: 53909 - DNA, 110 bp, synthetic construct
  source 1..110: mol_type = other DNA
atttggttcattttaacatagtgtccactgtaggcacatgctctgagtcacatacagtagacctctacaaaagactgatgttgcttacctatcaaaaatgtagatttttt

SEQ ID NO: 53910 - DNA, 110 bp, synthetic construct
  source 1..110: mol_type = other DNA
ttgcctctttctatccctccatgctcatgtatggatgttcctcactctcaatctgcatcccatctacactgagatagtggtaaggaaggtccccaaacacacaacgctct

SEQ ID NO: 53911 - DNA, 110 bp, synthetic construct
  source 1..110: mol_type = other DNA
tccatttactatgttccaggtaatgtgtgaaacaatattttactagttgtattcagcatgtacaaaagacaacaaaatggccagtgtgattgaaaaggagagatatggaa

SEQ ID NO: 53912 - DNA, 110 bp, synthetic construct; identical to SEQ ID NO: 53911
  source 1..110: mol_type = other DNA

SEQ ID NO: 53913 - DNA, 110 bp, synthetic construct
  source 1..110: mol_type = other DNA
tttgctttttggaactttctggaattatttttttcaaagtagttttgatccttggttggttgaatctacaaatttacagctacggagagcagtctacgctgtgataagta

SEQ ID NO: 53914 - DNA, 110 bp, synthetic construct
  source 1..110: mol_type = other DNA
ttggttgaatctacaaatttacagctacggagagcagtctacgctgtgataagtatagatcttgccatgccgtgccttcatctttgtctacatcaaacatccttttcact

SEQ ID NO: 53915 - DNA, 110 bp, synthetic construct
  source 1..110: mol_type = other DNA
ttagtattgcggttggcatcttgggattgagcccttaacctgtggaatctcgtgctttccccaaataaatagtgtcataatttagttagactgtgggacactcagctgtt

SEQ ID NO: 53916 - DNA, 110 bp, synthetic construct
  source 1..110: mol_type = other DNA
tttccccaaataaatagtgtcataatttagttagactgtgggacactcagctgttgtcttataattgcttggtgtcagggagaatgcccagacctcatctctatcccaaa

SEQ ID NO: 53917 - DNA, 110 bp, synthetic construct
  source 1..110: mol_type = other DNA
gcctcacatctactctcaggatactcacagcctactcgcaggttttaagagctacctgtgcattcccactttatgaccctggactgtgtttcctctgctggaatactctc

SEQ ID NO: 53918 - DNA, 110 bp, synthetic construct
  source 1..110: mol_type = other DNA
tcttcaaaaggatattagcttttcttatcctagggcattagagttgctactatgatcagcatcgtggttttcacaattgtttatcacttgtaccacccattgcataaagc

SEQ ID NO: 53919 - DNA, 110 bp, synthetic construct
  source 1..110: mol_type = other DNA
tcagcatcgtggttttcacaattgtttatcacttgtaccacccattgcataaagcataaagccatccaagagatagctggatcctaaggatgcccatctccctttccaca

SEQ ID NO: 53920 - DNA, 110 bp, synthetic construct
  source 1..110: mol_type = other DNA
acataaatgcacaaaggaatactatacaacaataaaactaagctactgcctcaaacaataccatagatgaattcaccattacagtgtgagtcaaagcagacagaaacact

SEQ ID NO: 53921 - DNA, 110 bp, synthetic construct
  source 1..110: mol_type = other DNA
atcagctatgtataccagacatgcttgctaactggcttattttagattctgccagtcataagagggaaaaatgaaagataaccgaagggagaaaaaggggacttccttgt

SEQ ID NO: 53922 - DNA, 110 bp, synthetic construct
  source 1..110: mol_type = other DNA
tcataagagggaaaaatgaaagataaccgaagggagaaaaaggggacttccttgttaagtcatgcatatgcttgtatgtgcatgcatgcttgtatgatgtatatattttg

SEQ ID NO: 53923 - DNA, 110 bp, synthetic construct
  source 1..110: mol_type = other DNA
tataagtacacaattacattgggttaacacctgctttaaagcctcattttaatctaatttacactagcacacccaaaagatcaaacacttaggtataaatctaacaaaat

SEQ ID NO: 53924 - DNA, 110 bp, synthetic construct
  source 1..110: mol_type = other DNA
cctggcgtgaactggttatatggccccactttaattgaacagggggctgggaagtatcttgcaacaactctaccctgtgtaactacccatttttattggatagctagtat

SEQ ID NO: 53925 - DNA, 110 bp, synthetic construct
  source 1..110: mol_type = other DNA
gtcccttatccaaggcaatacattcaaaaatataagctttaatttccagaataagttttaaaaatagtttaatattttgcacttctgatccaagggtgtagggacacaaa

SEQ ID NO: 53926 - DNA, 110 bp, synthetic construct
  source 1..110: mol_type = other DNA
ccagaataagttttaaaaatagtttaatattttgcacttctgatccaagggtgtagggacacaaatcatatctaagagcagaaaaccaggacaattctttgaaattcttt

SEQ ID NO: 53927 - DNA, 110 bp, synthetic construct
  source 1..110: mol_type = other DNA
caatacttgttctgtgttttacagggactcatacacaggcaaacctaatcagacttggcagactttgagaagagagctgttctccaaaatgtatagaaattgcagataca

SEQ ID NO: 53928 - DNA, 110 bp, synthetic construct
  source 1..110: mol_type = other DNA
tctaacacacaactttcaaagattcttttccaatgtcataaccttattttcgagcagagctctatatacagattagaaatccaaggataggactccagacactttggccc

SEQ ID NO: 53929 - DNA, 110 bp, synthetic construct
  source 1..110: mol_type = other DNA
ttgtggctacgagcagcatgaaatgaaaactcatgaaaatgacatgggtacatatgctcactctttccctctgccatgacaatgttgtggcccagactgattctccagct

SEQ ID NO: 53930 - DNA, 110 bp, synthetic construct
  source 1..110: mol_type = other DNA
gctcactctttccctctgccatgacaatgttgtggcccagactgattctccagctcagactccagaatgaaggggacatgaggaatagagcagcttctaactcagagact

SEQ ID NO: 53931 - DNA, 110 bp, synthetic construct
  source 1..110: mol_type = other DNA
ttcctagcctagggatagaatcagaactgtagcttctggcctataccacagtcacagcaatgctggatccaagccacctttgtgggctacaccacagcacatggcaatgc

SEQ ID NO: 53932 - DNA, 110 bp, synthetic construct; identical to SEQ ID NO: 53931
  source 1..110: mol_type = other DNA

SEQ ID NO: 53933 - DNA, 110 bp, synthetic construct
  source 1..110: mol_type = other DNA
tcataaaagatgttcatgttcatgatttaggcctttggactcctatcttacatgctttctaataaatacctttccacagatgctaatagaggctagacccccagatgtga

SEQ ID NO: 53934 - DNA, 110 bp, synthetic construct
  source 1..110: mol_type = other DNA
gcttcagagtcaaggaggagctgagatttcaattcaagtctaaaggcaggaaaaagttaattttccagttgaaaggcaattcggcaagaggaattctctcttcctcgggg

SEQ ID NO: 53935 - DNA, 110 bp, synthetic construct
  source 1..110: mol_type = other DNA
gttaattttccagttgaaaggcaattcggcaagaggaattctctcttcctcggggcagagtcttttcattttattcagccctccaactgattggatgaggcccatctggg

SEQ ID NO: 53936 - DNA, 110 bp, synthetic construct
  source 1..110: mol_type = other DNA
tcacgaataggaacatgcacacagaaatgtgaaggaacatttctctatcaaagatctaatgaatttaaacctttaagcacctgacagcttataagatttgcaatgtaaat

SEQ ID NO: 53937 - DNA, 110 bp, synthetic construct
  source 1..110: mol_type = other DNA
ctaatgaatttaaacctttaagcacctgacagcttataagatttgcaatgtaaatgaaaagaaatgggaatattctagaaaatattaaagcagaatgagggccagacaca

SEQ ID NO: 53938 - DNA, 110 bp, synthetic construct
  source 1..110: mol_type = other DNA
cattaactgagtcatctttggcagccgggtctccttctctgtgaaatgctgtctggagtgactgcctgcagctgaagtaccacggagaagcccactgtggacctctcctg

SEQ ID NO: 53939 - DNA, 110 bp, synthetic construct
  source 1..110: mol_type = other DNA
gagtgactgcctgcagctgaagtaccacggagaagcccactgtggacctctcctgagctcagaaggaaatagtcccatggttgattataaaatctgtcttggaccaggta

SEQ ID NO: 53940 - DNA, 110 bp, synthetic construct
  source 1..110: mol_type = other DNA
tgaggtctgcagtccatacctgcagccctatagaaagaaccaattcttgtaggacaaattcctgaagaactctctccgctttatttccctcctgccttgctgggcaggac

SEQ ID NO: 53941 - DNA, 110 bp, synthetic construct
  source 1..110: mol_type = other DNA
aaattcctgaagaactctctccgctttatttccctcctgccttgctgggcaggacctcccacaccttgctgtatattgtgttacggatcaaggaaaggaaagaaatctgc

SEQ ID NO: 53942 - DNA, 110 bp, synthetic construct
  source 1..110: mol_type = other DNA
attcagtgcacctgcttcatttgcaatttctagccttagctctcttcgcctcttgtgccacaagctctcttagacaacccctagtgcccttcctggggaaatctgaaaga

SEQ ID NO: 53943 - DNA, 110 bp, synthetic construct
  source 1..110: mol_type = other DNA
tgccacaagctctcttagacaacccctagtgcccttcctggggaaatctgaaagagatcccaaatggtccattgccagcagaattcgagacaagaagcagagaaccactg

SEQ ID NO: 53944 - DNA, 110 bp, synthetic construct
  source 1..110: mol_type = other DNA
atctggcattgcctcaagctgcagcattgggttgcagatgcagcttggatctggatctggtgttgttgtggctgtggcctgggctgacagctgcaggtcagatacaaccc

SEQ ID NO: 53945 - DNA, 110 bp, synthetic construct; identical to SEQ ID NO: 53944
  source 1..110: mol_type = other DNA

SEQ ID NO: 53946 - DNA, 110 bp, synthetic construct
  source 1..110: mol_type = other DNA
agaagaaaaggcaggggacatctgcatgcagggatggggcagcagccccccacagcagctctgaccactctggtggggcagtcggccaaacccagcaccttccccaccaa

SEQ ID NO: 53947 - DNA, 110 bp, synthetic construct
  source 1..110: mol_type = other DNA
cagctctgaccactctggtggggcagtcggccaaacccagcaccttccccaccaagtctccattggctcacgcttcattttcttcgtccctcaaaaacaggccattccag

SEQ ID NO: 53948 - DNA, 110 bp, synthetic construct
  source 1..110: mol_type = other DNA
ggcagtgagtttctatgagaaggaggtgccctcggatgctgtgcttcctgctaaggagaagagacaccaggaggagcaggcagaggtgtgtaatggctgagaggacccac

SEQ ID NO: 53949 - DNA, 110 bp, synthetic construct
  source 1..110: mol_type = other DNA
cgccaccagcagcatcaggctctccccgctgttcacactcccagccctaagcctattctcccctgcttttcttatcactatcacgctggccagtccttctcagtctcctt

SEQ ID NO: 53950 - DNA, 110 bp, synthetic construct
  source 1..110: mol_type = other DNA
caaataagcccttgaaaagatgctcagcagctaatgcacctactacaaactcatgagaaagggttaaacttagaaagaataataggaggaagcattgacaagaatgcaga

SEQ ID NO: 53951 - DNA, 110 bp, synthetic construct
  source 1..110: mol_type = other DNA
agaaagggttaaacttagaaagaataataggaggaagcattgacaagaatgcagagcaagtgaaattctcaaacatttctaatgggagtgtaaaatcacacaattatctt

SEQ ID NO: 53952 - DNA, 110 bp, synthetic construct
  source 1..110: mol_type = other DNA
cctctcattccaaatctgcaaaagagaaagtcaaaaaatgagaattgaaagtttttgtgtcagaaagtaaatattatcaagacgcctcttctctcatcatcttttgtatc

SEQ ID NO: 53953 - DNA, 110 bp, synthetic construct
  source 1..110: mol_type = other DNA
tgtgtcagaaagtaaatattatcaagacgcctcttctctcatcatcttttgtatcaccctaaaagccatttttcttactttatggaatatcctgttattgaatatataga

SEQ ID NO: 53954 - DNA, 110 bp, synthetic construct
  source 1..110: mol_type = other DNA
cttcatcagcagattaggctcttaccctgtctgccccacagagaagctggaactgggcagaaccacattctcttccttttttcctcgtgggtagccctggtgccctgtca

SEQ ID NO: 53955 - DNA, 110 bp, synthetic construct
  source 1..110: mol_type = other DNA
ttgattgatggacaggtctgagatgcagtttttaatggcctctcgggagatggatacacagaattgagtaatcagtcagtcttacctagtggcagcctgcttgctgacaa

SEQ ID NO: 53956 - DNA, 110 bp, synthetic construct
  source 1..110: mol_type = other DNA
acacagaattgagtaatcagtcagtcttacctagtggcagcctgcttgctgacaaatcctcattttggctttccgtacatctattttccctttgtcctgatctctgggat

SEQ ID NO: 53957 - DNA, 110 bp, synthetic construct
  source 1..110: mol_type = other DNA
gaaaaaagaagaaaaagtctatattcattctttttctttctccaatgtcattattccttgaaccctctccaaacaggctttcttcttcaccatttcattgaagcagctct

SEQ ID NO: 53958 - DNA, 110 bp, synthetic construct; identical to SEQ ID NO: 53957
  source 1..110: mol_type = other DNA

SEQ ID NO: 53959 - DNA, 110 bp, synthetic construct
  source 1..110: mol_type = other DNA
tagcgaccccaaattcttttcatagtcatccattgtgaggaataagagccctttgaccagaggcttctgtgcctaccagaagcactcaaaactctccaagcaacattaga

SEQ ID NO: 53960 - DNA, 110 bp, synthetic construct
  source 1..110: mol_type = other DNA
accagaggcttctgtgcctaccagaagcactcaaaactctccaagcaacattagatctgaccagaagccctcctttcaatcaacgcaaataatttatgattcatctttgt

SEQ ID NO: 53961 - DNA, 110 bp, synthetic construct
  source 1..110: mol_type = other DNA
tgtggctattcgtaataattgcatgcaagttagcatggtagagttcaagctgaattagtagttgcctgggagacctagaataaaggagcaacttagaagggttgagggct

SEQ ID NO: 53962 - DNA, 110 bp, synthetic construct
  source 1..110: mol_type = other DNA
accaaaatctgagaagttgtggaggtttgactgggtcctctccatgtggctaatgaatgagagcaaaaagaagcaacaccctttcctgtttggagctgattttacacctg

SEQ ID NO: 53963 - DNA, 110 bp, synthetic construct
  source 1..110: mol_type = other DNA
aatgagagcaaaaagaagcaacaccctttcctgtttggagctgattttacacctgcaaatacccttcaaaaacaactcacccaggaaatgccaatcttccaaaaagagag

SEQ ID NO: 53964 - DNA, 110 bp, synthetic construct
  source 1..110: mol_type = other DNA
accagaattccatagccttctggttctgttaacctctgttcccaggcatatagtccccatctccccatgaatactgctgtgcctgactcaccaagtctctactcactgcc

SEQ ID NO: 53965 - DNA, 110 bp, synthetic construct
  source 1..110: mol_type = other DNA
cccatctccccatgaatactgctgtgcctgactcaccaagtctctactcactgcccacacattctggcgacccagctggtggttccagagttcatcatttgggaagcctc

SEQ ID NO: 53966 - DNA, 110 bp, synthetic construct
  source 1..110: mol_type = other DNA
ttgccttgacccctaccctttgccagggctcccctcacacactgtgatccttccaacctcccccacagctcaccccagatttgggttctcttcctctgctcatacgctct

SEQ ID NO: 53967 - DNA, 110 bp, synthetic construct
  source 1..110: mol_type = other DNA
ctccccagacacaagcatccaggagcttactctaagaaagaatgttaactgtgaaaagcttaaaatttttttaagtaattttttcaagtatagttgacctataacacata

SEQ ID NO: 53968 - DNA, 110 bp, synthetic construct
  source 1..110: mol_type = other DNA
ataagaaaaagagtctcttttaagtctttagttgatccattcctgccactaagaacatgaaatattatattggccactgttttgaacataaaccgcggcatcccagaatt

SEQ ID NO: 53969 - DNA, 110 bp, synthetic construct
  source 1..110: mol_type = other DNA
catgaaatattatattggccactgttttgaacataaaccgcggcatcccagaatttgaaatccaggtgcatgggaggtgtctttgtttgtggtttaaatcggcctaattg

SEQ ID NO: 53970 - DNA, 110 bp, synthetic construct
  source 1..110: mol_type = other DNA
aagaacagaaggtaccaaataatatgagccaaacagactcacatcaagatatatcaaaattaaaatggcaaaacttaaagacagagaattcaaaaggcagcaagagaaaa

SEQ ID NO: 53971 - DNA, 110 bp, synthetic construct
  source 1..110: mol_type = other DNA
gagccaaacagactcacatcaagatatatcaaaattaaaatggcaaaacttaaagacagagaattcaaaaggcagcaagagaaaaacaaagagttatattcaaaggaccc

SEQ ID NO: 53972 - DNA, 110 bp, synthetic construct
  source 1..110: mol_type = other DNA
agttacagctcgtgtgttacacaccgatgcagctcctcagtaaacacgtgctatcaatagaatcactgtcatttattaaatgcctcccatgtgtcgggcactatgttcca

SEQ ID NO: 53973 - DNA, 110 bp, synthetic construct
  source 1..110: mol_type = other DNA
ttttccccaaacgaatatgttattattcaacaacaaagggtctgacaaaatgccacagagctcgtgcagcaacgctaactcaaagcaggagatgatgaatgttaagtgca

SEQ ID NO: 53974 - DNA, 110 bp, synthetic construct
  source 1..110: mol_type = other DNA
caagaagctgcagtcggatccttaaccctctctgtgccacagcaggaactcctccaagtatcccttttttttttcctttttatggccacacctgtggcatatgcagtttc

SEQ ID NO: 53975 - DNA, 110 bp, synthetic construct
  source 1..110: mol_type = other DNA
ccctctctgtgccacagcaggaactcctccaagtatcccttttttttttcctttttatggccacacctgtggcatatgcagtttcctgagctaagggttgaattagagct

SEQ ID NO: 53976 - DNA, 110 bp, synthetic construct
  source 1..110: mol_type = other DNA
gggcaaggtttaatttgaactcctgacttcaaccttagtttcacttttttaatctcactacatgtcctaaaaacaggcagcacgatattccttacctggtaatctcctgc

SEQ ID NO: 53977 - DNA, 110 bp, synthetic construct
  source 1..110: mol_type = other DNA
cactacatgtcctaaaaacaggcagcacgatattccttacctggtaatctcctgctgcagctgtgaaactgaaggcacataaaacacgactccaaaatagacagtaggtt

SEQ ID NO: 53978 - DNA, 110 bp, synthetic construct
  source 1..110: mol_type = other DNA
attgccttaaaaaaacaaatacagcagctccactgtgcttaatctgactagacttgaagattataaaatcaaggaaatcactttcatggttaaaattctaaagagataca

SEQ ID NO: 53979 - DNA, 110 bp, synthetic construct
  source 1..110: mol_type = other DNA
atttctctcttctcccctaatgcccccatcaagctgtttcttctggcccagagcacttcctgccccccttccctttgtctaaaccttctgtttccctccaagcctcaact

SEQ ID NO: 53980 - DNA, 110 bp, synthetic construct
  source 1..110: mol_type = other DNA
cttcctgccccccttccctttgtctaaaccttctgtttccctccaagcctcaactcagagctctgcttccaagacaactcgctaactaccccattccacagtgatcccca

SEQ ID NO: 53981 - DNA, 110 bp, synthetic construct
  source 1..110: mol_type = other DNA
tcttcgacctggattttgtgttcagtggggcttcggcagtattaaaatgagtgttacagaccgtctctgtgtctccattaacgttagggtgggctggtggttgtgggtgt

SEQ ID NO: 53982 - DNA, 110 bp, synthetic construct
  source 1..110: mol_type = other DNA
acagaccgtctctgtgtctccattaacgttagggtgggctggtggttgtgggtgttttggtattagctttgcagacattgttgagactgttctctgtctttagcactgta

SEQ ID NO: 53983 - DNA, 110 bp, synthetic construct
  source 1..110: mol_type = other DNA
aaccgttaacaattcctcatgtctaaaggttcatcattattttttgcatacaggcctggtatcttcagtcaaaatggaggatatatttttgatgttttataaacttcaaa

SEQ ID NO: 53984 - DNA, 110 bp, synthetic construct
  source 1..110: mol_type = other DNA
agctatactaagtcaaactttcgtccaatggtaagttatttaaattcttacctctaatatcccagtcaatatgggttatgtaactggtagctcctttgcatactcctact

SEQ ID NO: 53985 - DNA, 110 bp, synthetic construct; identical to SEQ ID NO: 53984
  source 1..110: mol_type = other DNA

SEQ ID NO: 53986 - DNA, 110 bp, synthetic construct
  source 1..110: mol_type = other DNA
tattagtatctaaaacaaaatgcttctaaaacagctcatgatcttccttttcttccaaagcagaaaatttattcttcccacagtctttgctaagtcagtaattggcaact

SEQ ID NO: 53987 - DNA, 110 bp, synthetic construct
  source 1..110: mol_type = other DNA
taagaagagtagaggagatcttgactcctttccttgtatgtaggaagaacagggtgaacaaattaagtactttgtttaaaatacccaattttgtttagtttcttatatag

SEQ ID NO: 53988 - DNA, 110 bp, synthetic construct
  source 1..110: mol_type = other DNA
gaacggaaaatgctgcggtccttcttcctgtccaccagagggtgctgtgcaaagaatatgccctcttgaaaaattaaagtcatcggataacttgcagggcagcgtgaact

SEQ ID NO: 53989 - DNA, 110 bp, synthetic construct
  source 1..110: mol_type = other DNA
atatgccctcttgaaaaattaaagtcatcggataacttgcagggcagcgtgaactgtgagaactttagataaatcagaattaacttatttccatctttagagttaaatta

SEQ ID NO: 53990 - DNA, 110 bp, synthetic construct
  source 1..110: mol_type = other DNA
acacgcacttctgttttgaaaataaaacaagcttttattcgtaagttgtcatcgttgagtgtttgtaagtgctggccactgttccaggtgatctatatacctcccattct

SEQ ID NO: 53991 - DNA, 110 bp, synthetic construct
  source 1..110: mol_type = other DNA
gtgaagtcagcaagaggagggggtccttgcctgtgacctgcatccttggtaccaccaaaccgtaatgaggtcagttaaccccgtggcaagcatggtatgaatggatagtg

SEQ ID NO: 53992 - DNA, 110 bp, synthetic construct
  source 1..110: mol_type = other DNA
caaaccgtaatgaggtcagttaaccccgtggcaagcatggtatgaatggatagtgtgtgtgtgtgtgtgtgtaaatggtgacatagccccagattgaagtggaatcaaag

SEQ ID NO: 53993 - DNA, 110 bp, synthetic construct
  source 1..110: mol_type = other DNA
ctaggtcacatggagagaaaggtgcagcccagcagaggaagcaggggtgagagaatggaggtgatggagatagatgcttcctcgagcaggggagcatctgtgcatgcaag

SEQ ID NO: 53994 - DNA, 110 bp, synthetic construct
  source 1..110: mol_type = other DNA
tggaggtgatggagatagatgcttcctcgagcaggggagcatctgtgcatgcaagagacagaaaattactatctaccctgattgttgcctccttggaagcagaagaatga

SEQ ID NO: 53995 - DNA, 110 bp, synthetic construct
  source 1..110: mol_type = other DNA
ctgcacagccgcctgtcattgcaaaagttgaaaatgccagaaacatgcttctgtaggctcccctgcagctagaacatggggctccccaacttggccagtgacacccaagg

SEQ ID NO: 53996 - DNA, 110 bp, synthetic construct
  source 1..110: mol_type = other DNA
ggctcccctgcagctagaacatggggctccccaacttggccagtgacacccaaggagaaggctattgggggcttctaggaagttttccttcctcagtaaaacgtgacaaa

SEQ ID NO: 53997 - DNA, 110 bp, synthetic construct
  source 1..110: mol_type = other DNA
tctgcagacgggggcagtaaaataagaaattccacctgcttgttgcctgtctctcgacttccttctgctgtggggctttgccgtcatgtaggaagcctgtgatggctgac

SEQ ID NO: 53998 - DNA, 110 bp, synthetic construct
  source 1..110: mol_type = other DNA
gacttccttctgctgtggggctttgccgtcatgtaggaagcctgtgatggctgacgtagctgaggctggtccagacagttcaaggatggagttacaggagagaaacattt

SEQ ID NO: 53999 - DNA, 110 bp, synthetic construct; identical to SEQ ID NO: 53997
  source 1..110: mol_type = other DNA

SEQ ID NO: 54000 - DNA, 110 bp, synthetic construct; identical to SEQ ID NO: 53998
  source 1..110: mol_type = other DNA

SEQ ID NO: 54001 - DNA, 110 bp, synthetic construct
  source 1..110: mol_type = other DNA
atgggaaaataccatgggctctgcaggaatctcgtcagcctgctgttgggtgaagaaagcaaatttcaaaacaaaactacaatgttattccattcataggacattcaaaa

SEQ ID NO: 54002 - DNA, 110 bp, synthetic construct
  source 1..110: mol_type = other DNA
ttgggtgaagaaagcaaatttcaaaacaaaactacaatgttattccattcataggacattcaaaaataagccaaaatagataacgtatcactcagatatacacggaactg

SEQ ID NO: 54003 - DNA, 110 bp, synthetic construct
  source 1..110: mol_type = other DNA
acaaataatttaaatatccaagaataacatggaatacagtgcatccatgaaaaagacatcagctattcacaaatgttggtgaggatgtggagaaaagggaacacgcttgc

SEQ ID NO: 54004 - DNA, 110 bp, synthetic construct; identical to SEQ ID NO: 54003
  source 1..110: mol_type = other DNA

SEQ ID NO: 54005 - DNA, 110 bp, synthetic construct
  source 1..110: mol_type = other DNA
cattcattaaaatgaacgtgtgatctggtggaaatgcctgccaattcgtagttctagctgagtttctaccttgcatacagcgatgaggttagcataaactaaagccacct

SEQ ID NO: 54006 - DNA, 110 bp, synthetic construct
  source 1..110: mol_type = other DNA
cggaccaaaatggtgcaacccaagcaccatcaccttcaggatctgccactcgagctgtgtttgcggctggtgtgatggacgcgtgtgggctgtgtacacacgcatgactc

SEQ ID NO: 54007 - DNA, 110 bp, synthetic construct
  source 1..110: mol_type = other DNA
tgtgtttgcggctggtgtgatggacgcgtgtgggctgtgtacacacgcatgactctttccccactacttgctccacacctcgccgggtgaaggatgtgtattcgtgggct

SEQ ID NO: 54008 - DNA, 110 bp, synthetic construct
  source 1..110: mol_type = other DNA
gctcagagtaaccgagcacctgcaatgtgccaagggctgttccagtgctgggggtacagcaatgaatgaaaaagaaaggccttgcctttaggagctgatattctaggggt

SEQ ID NO: 54009 - DNA, 110 bp, synthetic construct
  source 1..110: mol_type = other DNA
tgcttgttctgagaatcataagccttgacacgtggaccagggaaattcttgcagagaagagaaacagcacagggataccccattcagaggatgctagccctgtgttccca

SEQ ID NO: 54010 - DNA, 110 bp, synthetic construct
  source 1..110: mol_type = other DNA
gaagagaaacagcacagggataccccattcagaggatgctagccctgtgttcccaagattcatagtcacgaaatgttacaataactaactcggaattgagcatgttctcc

SEQ ID NO: 54011 - DNA, 110 bp, synthetic construct
  source 1..110: mol_type = other DNA
gtttgttatgcagcagaagctaaatgatacaaagttctctacagcaggacctgcatggcaaaccaagatccagagatgatgatgtagcttttaggattaagatgtagctt

SEQ ID NO: 54012 - DNA, 110 bp, synthetic construct
  source 1..110: mol_type = other DNA
tggcaaaccaagatccagagatgatgatgtagcttttaggattaagatgtagctttacctggtgatgctaatggatgcctgctgcaaataaaggaaacagcgatcttgac

SEQ ID NO: 54013 - DNA, 110 bp, synthetic construct
  source 1..110: mol_type = other DNA
tctgtgacaaactccaataggtagataaccagctgcattaaaaccccagcacacgcttccacgtcaaatcacaaatgatttggagttcccttcatggctcagcggtaatg

SEQ ID NO: 54014 - DNA, 110 bp, synthetic construct
  source 1..110: mol_type = other DNA
ctaagtgccaagggccagagagagagagtaatcaggtcaggagtagattccattaaggagatgggctttaaacggagctcctaggaaagcgactggttggggtgcacaaa

SEQ ID NO: 54015 - DNA, 110 bp, synthetic construct
  source 1..110: mol_type = other DNA
aggagatgggctttaaacggagctcctaggaaagcgactggttggggtgcacaaaagggagaaggaagagcaagtccaggtcaagaggcacgagcagaggaccacgcctg

SEQ ID NO: 54016 - DNA, 110 bp, synthetic construct
  source 1..110: mol_type = other DNA
cacagcatcaacacacacacgggaccagactccccgccacccaactgactggcatttgatcagaaacgtgtcattacaggtcagtgcggccaggaaggcagaattcaaca

SEQ ID NO: 54017 - DNA, 110 bp, synthetic construct
  source 1..110: mol_type = other DNA
ttgatcagaaacgtgtcattacaggtcagtgcggccaggaaggcagaattcaacatttcataagattaccaatctcaagcccttaaaaccatgccctttcgacaggcgct

SEQ ID NO: 54018 - DNA, 110 bp, synthetic construct
  source 1..110: mol_type = other DNA
tttcctttcctcctgtgtaaaaagaaaagagacccaggaccacagctagaagatcttccatctctcagtgcgtttcaaggcttggtcctgcatcctttgggctttccagg

SEQ ID NO: 54019 - DNA, 110 bp, synthetic construct
  source 1..110: mol_type = other DNA
ccctctttcctctgtatcttggttgctgaaatgccaaccattccccggagcccaatccaacccaccacaagcctgccttagagctccgtccccttagatggaccctggga

SEQ ID NO: 54020 - DNA, 110 bp, synthetic construct
  source 1..110: mol_type = other DNA
agagctattggtaagtttttctgctctctctgcttcaagtacacagttgtctcacatgttcccatctcgctgaagctaggtgcggccacgtggccaagaaaatgtgagtg

SEQ ID NO: 54021 - DNA, 110 bp, synthetic construct
  source 1..110: mol_type = other DNA
atgttcccatctcgctgaagctaggtgcggccacgtggccaagaaaatgtgagtgggacacgtgtcactcctggacagcgttaagaacgagtgatgcttggccattttct

SEQ ID NO: 54022 - DNA, 110 bp, synthetic construct
  source 1..110: mol_type = other DNA
ttagagccagcgccttagaccttagaatctgacatcacctgctgccaccagacatcatgacagaaacggaggccaaagaagccggtcaaggtcccgtaagtttagggagc

SEQ ID NO: 54023 - DNA, 110 bp, synthetic construct
  source 1..110: mol_type = other DNA
ccacctgtaatctctaaacggcgtggagaaaaaagcgtgcccgagagcccttcgtcacacagcatggatgccacctgtactcacgttcccaaccaagcagtgagccagat

SEQ ID NO: 54024 - DNA, 110 bp, synthetic construct
  source 1..110: mol_type = other DNA
cacacagcatggatgccacctgtactcacgttcccaaccaagcagtgagccagatgccacaagtacaggttctgggggacaagagctagggggcccagagttcccactgt

SEQ ID NO: 54025 - DNA, 110 bp, synthetic construct
  source 1..110: mol_type = other DNA
gtgcgcgggggtgtctttcatgcattaatgtcaatcaaactcatccaggctgtggtacagctacagtttatttttattggcagagctttttatttacataaatataccac

SEQ ID NO: 54026 - DNA, 110 bp, synthetic construct
  source 1..110: mol_type = other DNA
caggctgtggtacagctacagtttatttttattggcagagctttttatttacataaatataccacaaagtgtgtgtgcacatgcacattaatttttttgtttatttcttt

SEQ ID NO: 54027 - DNA, 110 bp, synthetic construct
  source 1..110: mol_type = other DNA
agagtttttactgaaaatttgtggccacaagacaatcctcacatgggttttgaggaggaattatgtcgttggtccccagaacttctagttaaggattttaaagtccttgc

SEQ ID NO: 54028 - DNA, 110 bp, synthetic construct
  source 1..110: mol_type = other DNA
aggaattatgtcgttggtccccagaacttctagttaaggattttaaagtccttgctttgcagattggtgatgatcccagacacttggcagaaacgaatgcaaaatctaat

SEQ ID NO: 54029 - DNA, 110 bp, synthetic construct
  source 1..110: mol_type = other DNA
tagcccttgtggctagtcattaccatattagctgcacaaatagagaactttttcattatgatggaatgttctattgcacagtgtcttcgcgtcttactactgcataatag

SEQ ID NO: 54030 - DNA, 110 bp, synthetic construct
  source 1..110: mol_type = other DNA
taaaactgggcttggaagtagcaagagacactctggcagatcagctgagtgccatacgtattcctcccctggttatgtaacagcagccctgccttcccgtgatgatcagg

SEQ ID NO: 54031 - DNA, 110 bp, synthetic construct
  source 1..110: mol_type = other DNA
ggctggaaatgaagtgcaaatttgaatatcatctgtatataagtgataattaaagctgggagactcaatgtgcgccaagagagaaagtcaataaaaatgaggaacaacag

SEQ ID NO: 54032 - DNA, 110 bp, synthetic construct
  source 1..110: mol_type = other DNA
ctgggagactcaatgtgcgccaagagagaaagtcaataaaaatgaggaacaacagtgtcccaagccctgtgatccttcggaaatggagttttttggttttgtttttttta

SEQ ID NO: 54033 - DNA, 110 bp, synthetic construct
  source 1..110: mol_type = other DNA
ccgttgagccacgaggggaactcctatgcctatgtttttaaatgtgaattatcagcctgaaaaatggagttctacacagtgatgggaagagtcaagaattaaagagtgta

SEQ ID NO: 54034 - DNA, 110 bp, synthetic construct
  source 1..110: mol_type = other DNA
cctgaaaaatggagttctacacagtgatgggaagagtcaagaattaaagagtgtactggagcctaatcaactaggtctgaagcatgcctgatttcaacacttagtcacct

SEQ ID NO: 54035 - DNA, 110 bp, synthetic construct
  source 1..110: mol_type = other DNA
ttctttcctgctccctctctgcctccgttcttccttctggtagtggctactgccctccaaactcagattctaccctcctccactgctccagctctccctgggctccaata

SEQ ID NO: 54036 - DNA, 110 bp, synthetic construct
  source 1..110: mol_type = other DNA
tccaaactcagattctaccctcctccactgctccagctctccctgggctccaataataacctcccgttccttgccccttcgggactggcggtggtgacaactgcctagcc

SEQ ID NO: 54037 - DNA, 110 bp, synthetic construct
  source 1..110: mol_type = other DNA
tccggaattaagcccaagtacaactcgggagctctccacatcaggggtgagtgaggcggggagtctgagatgtaccgggctgtccttgggagggtcccccttgggagaac

SEQ ID NO: 54038 - DNA, 110 bp, synthetic construct
  source 1..110: mol_type = other DNA
gcggggagtctgagatgtaccgggctgtccttgggagggtcccccttgggagaacaggagggcagcctagaaatgctctccaaggacccttctcagtcactctcgggggc

SEQ ID NO: 54039 - DNA, 110 bp, synthetic construct
  source 1..110: mol_type = other DNA
cagggtcacgcagcccatcaagggctgagcccagaaaagaaacccggtcttgcagttgtcagctcagcgctgtttcctacaccaagctgcagccagggtggaagttgaga

SEQ ID NO: 54040 - DNA, 110 bp, synthetic construct
  source 1..110: mol_type = other DNA
catcgggccaattttcagaaaatttgaatctgatgaaacatttatctccggttatgattgtaatgtcatttccattaatgaaaggtccttgaggatgatggccttacaga

SEQ ID NO: 54041 - DNA, 110 bp, synthetic construct
  source 1..110: mol_type = other DNA
gattgtaatgtcatttccattaatgaaaggtccttgaggatgatggccttacagatgtcatcaaaaccattgtcgtcatcacttacaccatacagtcccaaccctctcat

SEQ ID NO: 54042 - DNA, 110 bp, synthetic construct
  source 1..110: mol_type = other DNA
tgtgcagcgatgaccagctgagagcagaaacgtggcccttgactgtaattgtcatgaccgttggtctctccagcttagaacaagggctgcgcttggttagattctctctg

SEQ ID NO: 54043 - DNA, 110 bp, synthetic construct
  source 1..110: mol_type = other DNA
cttcagcaggcaaatttgaacccctggtgtcacttctctaaatcctgatgtttaaaaagctcagtggagctctgccttaatggcagtagcccttccctgtccttgggacc

SEQ ID NO: 54044 - DNA, 110 bp, synthetic construct
  source 1..110: mol_type = other DNA
tgggactacagaccagtaattaataccccctccccagcacgagcatgaggagttgttggtacctggcagagggccggcctttgataacgcctgtgtccttttcctccgcc

SEQ ID NO: 54045 - DNA, 110 bp, synthetic construct
  source 1..110: mol_type = other DNA
cggatgctagtcaggtttgtcacccctgagccaggacgggaacgcctatggttggtatttctatgtggtttttttggtttttcccctgagctatactttgtaagatttgt

SEQ ID NO: 54046 - DNA, 110 bp, synthetic construct
  source 1..110: mol_type = other DNA
tatttctatgtggtttttttggtttttcccctgagctatactttgtaagatttgttttgaaatttttagcccgactcaggaaagagtctggtttttgtccttcctcggcc

SEQ ID NO: 54047 - DNA, 110 bp, synthetic construct
  source 1..110: mol_type = other DNA
tcgtggctcagcagtagaaaaccccactttatctaggaggacgcgggttctatccctggcctcacttggtgggttgaggatgcggtgttgctgtgaactgtggtataggt

SEQ ID NO: 54048 - DNA, 110 bp, synthetic construct; identical to SEQ ID NO: 54047
  source 1..110: mol_type = other DNA

SEQ ID NO: 54049 - DNA, 110 bp, synthetic construct
  source 1..110: mol_type = other DNA
accgggcagcctgtgcccggcgtggatggaccggtgagggcttgtggcccaaccccaagaaatggcatctagagacgtccatccgcagctcaagaccgccatctaccaag

SEQ ID NO: 54050 - DNA, 110 bp, synthetic construct
  source 1..110: mol_type = other DNA
tcctctgcccttgccaaacccttccattcattccctctggaaatggtatatccggacaccccttgtcagtgttacccagctgtgggcacagggactcctgtccactaggc

SEQ ID NO: 54051 - DNA, 110 bp, synthetic construct
  source 1..110: mol_type = other DNA
cccctttatgtttaaaggggatggtgggcaagggctgttcagtaactacttcctgctgagatagggcggagtcctgcctagggaagcagcaaaacaccggctaactgtcc

SEQ ID NO: 54052 - DNA, 110 bp, synthetic construct
  source 1..110: mol_type = other DNA
ctacttcctgctgagatagggcggagtcctgcctagggaagcagcaaaacaccggctaactgtcccttttcggttgggacggctgtaagccaatgtcgctctggttaaca

SEQ ID NO: 54053 - DNA, 110 bp, synthetic construct
  source 1..110: mol_type = other DNA
caatgcagggactcggaccccaggatccaagtggctttgatataacactgttcttggctgttttcatataaggcccagcatgcagtagggtttaacacattatagctggg

SEQ ID NO: 54054 - DNA, 110 bp, synthetic construct
  source 1..110: mol_type = other DNA
ggctgttttcatataaggcccagcatgcagtagggtttaacacattatagctgggtttttaaaaaatatacatatcacactataactatctgacttctctcttattttct

SEQ ID NO: 54055 - DNA, 110 bp, synthetic construct
  source 1..110: mol_type = other DNA
tacctcatagtggaatcatataatatctgccttttcgagacaagcttatttcacttagcataatgtcctcaagtttcatccacattgtatcatagtcggaattgccttcc

SEQ ID NO: 54056 - DNA, 110 bp, synthetic construct
  source 1..110: mol_type = other DNA
tagcataatgtcctcaagtttcatccacattgtatcatagtcggaattgccttcctttgtaaggctgaatactattccttttgatgtatatgcaacattttatctgttca

SEQ ID NO: 54057 - DNA, 110 bp, synthetic construct
  source 1..110: mol_type = other DNA
ccagagaagccgccccagcccctggcctgccgcccacctgcccagtcgggacagggacactgaaagtcccattgtgtcctccgacctcccccagctctggtctccaagtc

SEQ ID NO: 54058 - DNA, 110 bp, synthetic construct
  source 1..110: mol_type = other DNA
gacactgaaagtcccattgtgtcctccgacctcccccagctctggtctccaagtcaccgcgatgaaaagaaccaaagcctttgagcaaaacaagcctcagtaaccttttc

SEQ ID NO: 54059 - DNA, 110 bp, synthetic construct
  source 1..110: mol_type = other DNA
cgtgggaactcgtgtctgagtccccagagacctgtgtgcccaggaatccagtaggcacccagtaaatgctgcttgactgaaaggcagtgcaggtccctggcccatgcttg

SEQ ID NO: 54060 - DNA, 110 bp, synthetic construct
  source 1..110: mol_type = other DNA
cacccagtaaatgctgcttgactgaaaggcagtgcaggtccctggcccatgcttgtatactgtaggcgctcactagatggttgcgcgtgggtgtcatctcccagctctgt

SEQ ID NO: 54061 - DNA, 110 bp, synthetic construct
  source 1..110: mol_type = other DNA
ctggaccccaaccccatgagtcccagactcaacaccattcctcgagctcatcagagaccctctcatcccccagcctgtgttcgtggggttccctccacctgcctggaagg

SEQ ID NO: 54062 - DNA, 110 bp, synthetic construct
  source 1..110: mol_type = other DNA
gcccgccagatagcggatttaaccaccaaaagcagagcctggcatgcctgtgtcttcacagctgatgctccaactgaccaaagcaccagggtctttgctgtgaggagtcg

SEQ ID NO: 54063 - DNA, 110 bp, synthetic construct
  source 1..110: mol_type = other DNA
caatgcacagtggcctgaaatacagcccgtgatctcaagcagcttttcatctggcacagggaaggtggcaggtacacacactatcagataccagcccctagtgcaggaca

SEQ ID NO: 54064 - DNA, 110 bp, synthetic construct
  source 1..110: mol_type = other DNA
acagggaaggtggcaggtacacacactatcagataccagcccctagtgcaggacacagacaggactgcaggaaagtggccttggggatgaaggaaggcatcctggaagaa

SEQ ID NO: 54065 - DNA, 110 bp, synthetic construct
  source 1..110: mol_type = other DNA
tgagtaaatcctggtccatgcgcccagatcctacttgttgtctgccccctctgaaggctgtgcccggcccagcaggtccctttacatcgagcgctgccacctcctatgac

SEQ ID NO: 54066 - DNA, 110 bp, synthetic construct
  source 1..110: mol_type = other DNA
gcaagttcacacttcttctgcgatccctgacctccaacgtaatctcacaaagacccaaatttcagggcccaggccgctcggaaggctctgcgcatacgcgagcttcccag

SEQ ID NO: 54067 - DNA, 110 bp, synthetic construct
  source 1..110: mol_type = other DNA
caaatttcagggcccaggccgctcggaaggctctgcgcatacgcgagcttcccagcgaagacgcggctcccacgccccctggcggcaaaggctggcactgcaagaaaacg

SEQ ID NO: 54068 - DNA, 110 bp, synthetic construct
  source 1..110: mol_type = other DNA
taaagagagaggctcagagaagctgagtaacccacttgaggcctgatgagcagtaagtgtcagacccagccagggtctgaacgcaggtctaacagggcaaaatccactgc

SEQ ID NO: 54069 - DNA, 110 bp, synthetic construct
  source 1..110: mol_type = other DNA
gcaccattgtccttcagtctgaggcacaagctgtgtggagggaagtgagtcacgtcccaggtcagacagtcctccggctcctcacgggggtcacaggagtaatgaaccag

SEQ ID NO: 54070 - DNA, 110 bp, synthetic construct
  source 1..110: mol_type = other DNA
cctgctgagccacaccagtaactccttctccctcccttatgatctctccagggctggtttcttctagagccttcaggccatggcaggggttctttcaagaagggtaatga

SEQ ID NO: 54071 - DNA, 110 bp, synthetic construct
  source 1..110: mol_type = other DNA
ggtttcttctagagccttcaggccatggcaggggttctttcaagaagggtaatgagtgggcagctagaggaccagacctttagagaactttgtgtaggaaaagcttcctc

SEQ ID NO: 54072 - DNA, 110 bp, synthetic construct
  source 1..110: mol_type = other DNA
attcacggagtatacataaattattgaggataaaaatattttaaatgtgtgcagtggcgtcaagggagacagtatcgcttctgcctacagcagaaccttgaacaatgtgg

SEQ ID NO: 54073 - DNA, 110 bp, synthetic construct; identical to SEQ ID NO: 54072
  source 1..110: mol_type = other DNA

SEQ ID NO: 54074 - DNA, 110 bp, synthetic construct
  source 1..110: mol_type = other DNA
agaggattagtgtcctaagagaaagagaccccagagagctggctcttgctctctctctaagcacatgcactgaggtgaggtcatgtaaggacacagtgaacagatggctg

SEQ ID NO: 54075 - DNA, 110 bp, synthetic construct
  source 1..110: mol_type = other DNA
tctaagcacatgcactgaggtgaggtcatgtaaggacacagtgaacagatggctgtttgcaacccaagggagaagccctcgccagataccaacggggctggcaccttggc

SEQ ID NO: 54076 - DNA, 110 bp, synthetic construct
  source 1..110: mol_type = other DNA
ttcggacttggactggaattgcaccatggctttcttgggtctctagcttgcaggtggcagatcgtgggacttcttagccatcataatcctgtgagctgattccttacagt

SEQ ID NO: 54077 - DNA, 110 bp, synthetic construct
  source 1..110: mol_type = other DNA
ggcagatcgtgggacttcttagccatcataatcctgtgagctgattccttacagtcagtctccttttatagatacatgtgtacatcctattgtttctacttccctgtgga

SEQ ID NO: 54078 - DNA, 110 bp, synthetic construct
  source 1..110: mol_type = other DNA
cttcagcaaccaccaccctcatcagtcagcagccatcaacatcaaggcaagatcctccaccagctaaaagattatgattcaccgaagactccggtaatggttggcatttt

SEQ ID NO: 54079 - DNA, 110 bp, synthetic construct
  source 1..110: mol_type = other DNA
tccaccagctaaaagattatgattcaccgaagactccggtaatggttggcatttttagcaagagcgcatttttaaattaaggtatgcaccgttttaagacatgctattta

SEQ ID NO: 54080 - DNA, 110 bp, synthetic construct; identical to SEQ ID NO: 54079
  source 1..110: mol_type = other DNA

SEQ ID NO: 54081 - DNA, 110 bp, synthetic construct; identical to SEQ ID NO: 54079
  source 1..110: mol_type = other DNA

SEQ ID NO: 54082 - DNA, 110 bp, synthetic construct
  source 1..110: mol_type = other DNA
gaatgaggaccgaatgaatcaatcagtataaagctcttcacaaagtacgtggcaagtaatgagctctccataagtgctagtgttttttaaaaatactatgtcctgtgtaa

SEQ ID NO: 54083 - DNA, 110 bp, synthetic construct
  source 1..110: mol_type = other DNA
gtaatgagctctccataagtgctagtgttttttaaaaatactatgtcctgtgtaaaaacaactaatttacattcccaacagcagggtaacagagaatggtttttctaaat

SEQ ID NO: 54084 - DNA, 110 bp, synthetic construct
  source 1..110: mol_type = other DNA
ctgcttttttaccatcatctgtcctagggctgcaggcaatgaggatcttttcagatgctgccatggaggccctctattcccagtgtgccgtgtactgataactagctgac

SEQ ID NO: 54085 - DNA, 110 bp, synthetic construct
  source 1..110: mol_type = other DNA
gttatagtttatttgcaaaacaccatcctacttgcatctgctgccttgtagagtaataatgggggagggggagggctaacagttacctgagggtaagggttagggttagg

SEQ ID NO: 54086 - DNA, 110 bp, synthetic construct
  source 1..110: mol_type = other DNA
ataatgggggagggggagggctaacagttacctgagggtaagggttagggttagggtttgatcccaaggcctcattgcattgggtttgggatcaatgccatcctctcctc

SEQ ID NO: 54087 - DNA, 110 bp, synthetic construct
  source 1..110: mol_type = other DNA
gtgccagcaagtggcgtagggagtgctgttggccaagtggaggcacgggcgccccctttcccatcaacggtggactagatgggagtggacagggtttgacgaagtgactg

SEQ ID NO: 54088 - DNA, 110 bp, synthetic construct
  source 1..110: mol_type = other DNA
gtgatgtgcttgtcccagaggcccttgcacctccattacaaggaggtaacggccacgttctccatggcgcagggcagatagacttagtctcgcttcagatccaagcatcc

SEQ ID NO: 54089 - DNA, 110 bp, synthetic construct
  source 1..110: mol_type = other DNA
cgttctccatggcgcagggcagatagacttagtctcgcttcagatccaagcatcccatttgaagcagtgggcatcattcagacgaggtacaggaagatgagtgcttaaag

SEQ ID NO: 54090 - DNA, 110 bp, synthetic construct
  source 1..110: mol_type = other DNA
cctcctccctgctcccttccctgcattctttgcattgcccactggggtcactggcccacagctatctctctgcaggactctcattcctgggccagtgcctggctcacccc

SEQ ID NO: 54091 - DNA, 110 bp, synthetic construct
  source 1..110: mol_type = other DNA
gtttctccagaggctgatgaggcaacaaggggaagcgaagcaagttcacgctggagatgaaagtcaggggctgagagctgctgtaatcagaccccagcctgcctcgacct

SEQ ID NO: 54092 - DNA, 110 bp, synthetic construct
  source 1..110: mol_type = other DNA
gatgaaagtcaggggctgagagctgctgtaatcagaccccagcctgcctcgacctgtcaggctgcaggatgagtcagcagctcaggaaccacctgccaacaactcctagt

SEQ ID NO: 54093 - DNA, 110 bp, synthetic construct
  source 1..110: mol_type = other DNA
ctgcctgccgctgggtctccagctgcactaactccaatcactaagggtgactttgatttacttccttttggggacggtctggtgtcccaggcagcgggaagcagcaggcc

SEQ ID NO: 54094 - DNA, 110 bp, synthetic construct
  source 1..110: mol_type = other DNA
taaggtctaactgatggcagtcagaacacagcgacttacagcccagggcgttaaagctaagtaccacggtgacgggcggcttcgtggctctaggtcaggcctgatgggct

SEQ ID NO: 54095 - DNA, 110 bp, synthetic construct
  source 1..110: mol_type = other DNA
gctaagtaccacggtgacgggcggcttcgtggctctaggtcaggcctgatgggctgtgagaagcctgtaaagtaactcatgaatcgcagctcaacccacgccataagcac

SEQ ID NO: 54096 - DNA, 110 bp, synthetic construct
  source 1..110: mol_type = other DNA
cccagcagtgtccacttaaggtgtacacactctgcctgtttctaagtgtgggtttacttctttctttttcgtttgtttttgtcttttcagggccgcacccacagcatacg

SEQ ID NO: 54097 - DNA, 110 bp, synthetic construct
  source 1..110: mol_type = other DNA
ttaaggtgtacacactctgcctgtttctaagtgtgggtttacttctttctttttcgtttgtttttgtcttttcagggccgcacccacagcatacggaagttcccaggcta

SEQ ID NO: 54098 - DNA, 110 bp, synthetic construct
  source 1..110: mol_type = other DNA
tgtggtgtgttcacattctgcctcatcagtcaactccccagaggaagcaaaaagcagctaagtgacagccaacaaaattagacggatcagcaaatagtcctcaaaatgta

SEQ ID NO: 54099 - DNA, 110 bp, synthetic construct
  source 1..110: mol_type = other DNA
agcaaaaagcagctaagtgacagccaacaaaattagacggatcagcaaatagtcctcaaaatgtacactgatggagttcccgtggtggcgcagcggaaacgaatccaact

SEQ ID NO: 54100 - DNA, 110 bp, synthetic construct
  source 1..110: mol_type = other DNA
tctcccggagtcctcgcacaggagtctctctcgggtatacacctaggcgtgaaattaactgggccggagggcatgtggatactgaacttgaggctttaatgccacactgt

SEQ ID NO: 54101 - DNA, 110 bp, synthetic construct
  source 1..110: mol_type = other DNA
taactgggccggagggcatgtggatactgaacttgaggctttaatgccacactgttttccaaagtgcctgccccagtttgcaccccgtccggtagtggaagggacacgga

SEQ ID NO: 54102 - DNA, 110 bp, synthetic construct
  source 1..110: mol_type = other DNA
aaagggagagactcctttttcttcctttgtaaaaacttgggaactcgacttcccgccttccggtcacaaaaggaatgttttcgtgaccaaagatgaccactgcccaccac

SEQ ID NO: 54103 - DNA, 110 bp, synthetic construct
  source 1..110: mol_type = other DNA
cgcctgatggtgaagagttgctcagctagtttttaggtctttttcagtggaaacggtttcaaatgtagctgtggattcagggtgtcccagggaggaggtgagtgtcgcct

SEQ ID NO: 54104 - DNA, 110 bp, synthetic construct
  source 1..110: mol_type = other DNA
ttttcttggaagaagctgggtaaaaggtactgggatccctctgtattatttataatgatctcaaaataaaatttcaataatggtcttaggaagcaaacaactgcgtaact

SEQ ID NO: 54105 - DNA, 110 bp, synthetic construct
  source 1..110: mol_type = other DNA
tgatctcaaaataaaatttcaataatggtcttaggaagcaaacaactgcgtaactaccttttagattggtcagcatctaagaagcctctgtgtgccttgtcccattcaaa

SEQ ID NO: 54106 - DNA, 110 bp, synthetic construct
  source 1..110: mol_type = other DNA
ttgtgacccttctgaattaagctgtcattgctgtggccaaacactgaggtgacaaaaagccagtttagagtttatctggagcttctctgaagtagattaccagttgaggt

SEQ ID NO: 54107 - DNA, 110 bp, synthetic construct
  source 1..110: mol_type = other DNA
gatgttgcctcttgtcaagttcccagttgagggcctttctacctctgtctgacatatttgttgaaatcatttcttcatatcattggagtttctgcttatatgcagttgga

SEQ ID NO: 54108 - DNA, 110 bp, synthetic construct
  source 1..110: mol_type = other DNA
aatcctttcatggttagagaaaaaccacagactttggcctaagatcagctttgcccattgagacatctgatctttgaaaagttacttaacttcttggagttcactttcta

SEQ ID NO: 54109 - DNA, 110 bp, synthetic construct
  source 1..110: mol_type = other DNA
gtctcgtcctgagcagtcgtggtctccccaggttctctccgcctcccttctcaaacaacaaccaagtttacctaccatcttaaggcaagcaacagcaatcacacaaggtt

SEQ ID NO: 54110 - DNA, 110 bp, synthetic construct
  source 1..110: mol_type = other DNA
caacaaccaagtttacctaccatcttaaggcaagcaacagcaatcacacaaggttctaaacagagttattgccacttttcaaaggaagggtttgaggaattaaatcaatg

SEQ ID NO: 54111 - DNA, 110 bp, synthetic construct
  source 1..110: mol_type = other DNA
gcttgctcaaaaattaaagagtggtgacccagaagacaaattccacagcatcagaaagtgaaaattattatattctaaaatatatacctcattcagtgacttagcccagc

SEQ ID NO: 54112 - DNA, 110 bp, synthetic construct
  source 1..110: mol_type = other DNA
aagtgaaaattattatattctaaaatatatacctcattcagtgacttagcccagcatggaatcaagtatcttttagccatctgagaagacacacagctctttctttctag

SEQ ID NO: 54113 - DNA, 110 bp, synthetic construct
  source 1..110: mol_type = other DNA
gcaaattgatcaaagaaagcattaaggtcatcgagactttaagttcgtcccaaatggataaagaaaaatctttatggatacacagctcttcttttctaacagatggacac

SEQ ID NO: 54114 - DNA, 110 bp, synthetic construct
  source 1..110: mol_type = other DNA
ggataaagaaaaatctttatggatacacagctcttcttttctaacagatggacacctgatccaaatgctgacatcttgacctgaaaacatgcatagagtcactatcacat

SEQ ID NO: 54115 - DNA, 110 bp, synthetic construct
  source 1..110: mol_type = other DNA
atgctggaatcctcatcgcttctctctctgcatcacatgctgtagactgaagaggccgcagctcattttctacccaaggctcttgaagtctttctttttccaatgatgca

SEQ ID NO: 54116 - DNA, 110 bp, synthetic construct
  source 1..110: mol_type = other DNA
ccgcagctcattttctacccaaggctcttgaagtctttctttttccaatgatgcacagtctatctcaacactcatttgaattgccacatgcctctggcctctttgtggtt

SEQ ID NO: 54117 - DNA, 110 bp, synthetic construct
  source 1..110: mol_type = other DNA
gacttggtttcaaacctgtatattaaagaaataagccgaaaagctgccctaagaactctagtcctcgccttatctgctggggacaattgccacattggcacaacttctcg

SEQ ID NO: 54118 - DNA, 110 bp, synthetic construct
  source 1..110: mol_type = other DNA
tttgctttatttgtatcaaagaaccaatctaatacccatcactatggtagtaaaaacattatgaccagctgcttggccttcatacccaacacaagataatgtgcctgagt

SEQ ID NO: 54119 - DNA, 110 bp, synthetic construct
  source 1..110: mol_type = other DNA
attacctgctgtttccactcttccattttctttacctgttgttttaacttgtcgcgttcttgcagaagctcctcaaactgattgctgttaacacctcccacctcatcgct

SEQ ID NO: 54120 - DNA, 110 bp, synthetic construct
  source 1..110: mol_type = other DNA
agctgtacttagcaggaggagtaggggtaagtaccagttcattcctttttatcgctaaatagtagcccgttgtttggatgtaatacagtttgtgcatctattccccagct

SEQ ID NO: 54121 - DNA, 110 bp, synthetic construct
  source 1..110: mol_type = other DNA
taaatagtagcccgttgtttggatgtaatacagtttgtgcatctattccccagctgaaggacaacatttaagcagtttccagtttggggcaattatgaacaaagctgcta

SEQ ID NO: 54122 - DNA, 110 bp, synthetic construct
  source 1..110: mol_type = other DNA
acccaccgagccaccagggaactccataatggttttttttttaacagaaaagttttaaattttgataaagtacaatgtcttggtttttaaaactggtttgtgctctatgt

SEQ ID NO: 54123 - DNA, 110 bp, synthetic construct; identical to SEQ ID NO: 54122
  source 1..110: mol_type = other DNA

SEQ ID NO: 54124 - DNA, 110 bp, synthetic construct
  source 1..110: mol_type = other DNA
cataccttacaaataggaacacgctaagtcaatgtatttttaactttgactaatttgtttcaagaactgttgcttaaacaaccaccttgtgtaagatgtgctgctgtagt

SEQ ID NO: 54125 - DNA, 110 bp, synthetic construct
  source 1..110: mol_type = other DNA
tgtttcaagaactgttgcttaaacaaccaccttgtgtaagatgtgctgctgtagtaaggatgcaaaaatagatcaaacccagtcctgtactcggagggctctcccaagtg

SEQ ID NO: 54126 - DNA, 110 bp, synthetic construct
  source 1..110: mol_type = other DNA
atgaattttagccttatatgaaatcacaaacataattaactctcagaatgtggtggttatgcactccgtagtgccttccccaccctctgcttgggtctgtgataaccacc

SEQ ID NO: 54127 - DNA, 110 bp, synthetic construct
  source 1..110: mol_type = other DNA
agatggatgaatggtcagatgagtcagtaggtggctgaataggtaaatagataaaggaatgaacgcgtgaaattatgactccgtaagtagaggaggccagcctagaaata

SEQ ID NO: 54128 - DNA, 110 bp, synthetic construct
  source 1..110: mol_type = other DNA
ggaatgaacgcgtgaaattatgactccgtaagtagaggaggccagcctagaaatatttggattggtcaatatcaacccaacctcttctataccaatattgtactgggtgg

SEQ ID NO: 54129 - DNA, 110 bp, synthetic construct
  source 1..110: mol_type = other DNA
aaacaaaattctgcaaacacaaaattctgcaagtgcttttcctgccacaggcaagtatgcttggtagaggtccccaatacaggaggagattttcaaaggtaaagctgctc

SEQ ID NO: 54130 - DNA, 110 bp, synthetic construct
  source 1..110: mol_type = other DNA
gctgctgcaagcctcagaccacatgatgcatccaaatgtttaaggcacacccagcacaggagctgccgccatcatcgtcacactggctggcaccattctgccatgtgtag

SEQ ID NO: 54131 - DNA, 110 bp, synthetic construct
  source 1..110: mol_type = other DNA
acaggagctgccgccatcatcgtcacactggctggcaccattctgccatgtgtaggtgctgttcggagtgctttctgtgtatgaacaaactcgcttctcataacaactct

SEQ ID NO: 54132 - DNA, 110 bp, synthetic construct
  source 1..110: mol_type = other DNA
agagtggcttagagtcaggtgtcagcaggcttctgtggtccagctaaggagttcaggtttcttgctgaggcagtggcagtcggggaaggcttccaggccaagggatggct

SEQ ID NO: 54133 - DNA, 110 bp, synthetic construct
  source 1..110: mol_type = other DNA
actgtatgccagatggtggcagccagcaaggaacccacaagaagaggctgtcagcctagctggatttctcttagccaaaccctagttaatgaaatttggggtatgttggt

SEQ ID NO: 54134 - DNA, 110 bp, synthetic construct
  source 1..110: mol_type = other DNA
gcagaggccaggatgctggcaaacatcctgcagtgctcagaacagccccgtagacaaaggcccttctggagccaagtgtcagggccaggttgagatccatgtgccaaatg

SEQ ID NO: 54135 - DNA, 110 bp, synthetic construct
  source 1..110: mol_type = other DNA
aaaggcccttctggagccaagtgtcagggccaggttgagatccatgtgccaaatgcttctgtcaggagatgggtttataacatagagaaatgcccggggggaccattcct

SEQ ID NO: 54136 - DNA, 110 bp, synthetic construct
  source 1..110: mol_type = other DNA
tctttacaccatttacccctctcgaaccaaccttgtagctctggggagggcccggccccatcacatcatatggacaagaacagggaaagggtgttcccccaaggagaatg

SEQ ID NO: 54137 - DNA, 110 bp, synthetic construct
  source 1..110: mol_type = other DNA
gacagagttcctgctgcgtgtgctccgtgatctctactcacccccctccatgccagtttctagaggattggacccttgaactggggaatagacttgccccagctaccaac

SEQ ID NO: 54138 - DNA, 110 bp, synthetic construct
  source 1..110: mol_type = other DNA
gtttctagaggattggacccttgaactggggaatagacttgccccagctaccaactgccaactagggtaagggtgggagaggggaatctacctgcaagcaaccattgata

SEQ ID NO: 54139 - DNA, 110 bp, synthetic construct
  source 1..110: mol_type = other DNA
tcttattggcccagctttggtcatgtgttcatccataagccaatcactgggcccagtaagtgtagggctctgattggccagactagaatcatgtgttccctctaaaatgg

SEQ ID NO: 54140 - DNA, 110 bp, synthetic construct
  source 1..110: mol_type = other DNA
gtaagtgtagggctctgattggccagactagaatcatgtgttccctctaaaatggcggtagaatcttgttatcttcatctgaacccaattgaggagaggtgactccttaa

SEQ ID NO: 54141 - DNA, 110 bp, synthetic construct
  source 1..110: mol_type = other DNA
atctacttgtcagctgccctttgagtatgagaatgatattttctattcattttcccagaagaggaaacggagcctcagagctggtaaatgggccaccgggatgggaaggg

SEQ ID NO: 54142 - DNA, 110 bp, synthetic construct
  source 1..110: mol_type = other DNA
ctgctctttggaactcaggaaggcctaggagactaaagcctttacctacgaataagaaaagggaggcaaggaggagctttgggacccaggaaggccccacagagtcctac

SEQ ID NO: 54143 - DNA, 110 bp, synthetic construct; identical to SEQ ID NO: 54142
  source 1..110: mol_type = other DNA

SEQ ID NO: 54144 - DNA, 110 bp, synthetic construct
  source 1..110: mol_type = other DNA
cagcagcccgctgaggtaggtattacaaatatgcccatttcacagatgaggtaactgagatatgcaacggttcagtgacctccctgagaaagcagagtgagcaagtgcct

SEQ ID NO: 54145 - DNA, 110 bp, synthetic construct
  source 1..110: mol_type = other DNA
tgagatatgcaacggttcagtgacctccctgagaaagcagagtgagcaagtgcctgagctggcatttgaacccaggcagtgggggtgtccccgtgctgtattgtacacac

SEQ ID NO: 54146 - DNA, 110 bp, synthetic construct
  source 1..110: mol_type = other DNA
gaactgtggtgtaggttgcagactctgctcagatcccgtgttgctgtgtggggctgtggtgtaggccagcaactatagctccagttagactcctaacctgggaacctcca

SEQ ID NO: 54147 - DNA, 110 bp, synthetic construct; identical to SEQ ID NO: 54146
  source 1..110: mol_type = other DNA

SEQ ID NO: 54148 - DNA, 110 bp, synthetic construct
  source 1..110: mol_type = other DNA
cacctgggattttgtttgagataagcagtttggctgctacatattatggcttttgaacaacaaaaatctttcatttagaaagaaattcagagttcaaaaacttcaagagt

SEQ ID NO: 54149 - DNA, 110 bp, synthetic construct
  source 1..110: mol_type = other DNA
aatattttgagacaagcctagtacaagaaaaatacatgaagatctggagtcccctggtggctcggtgggttaaggatctggcattgtcaatggagcagctcggatcgttg

SEQ ID NO: 54150 - DNA, 110 bp, synthetic construct
  source 1..110: mol_type = other DNA
ggtggctcggtgggttaaggatctggcattgtcaatggagcagctcggatcgttgccgtggggagggtttgatccatccctggcccgggaacttctgcatgctgtgggtg

SEQ ID NO: 54151 - DNA, 110 bp, synthetic construct
  source 1..110: mol_type = other DNA
ttattagcatctcggggctcaagatgtcccccagctcctgagctcttggcaagagtagtgaagggtggagctgggaacactgaggccagggcccccagccctggtgtgcc

SEQ ID NO: 54152 - DNA, 110 bp, synthetic construct
  source 1..110: mol_type = other DNA
tgactccactccagcctgatggctttcttgcctttgcctctgcagttccctcttcctagaaagccctttccctgccaggcacgcagctagctcctgcccaaatgtcatct

SEQ ID NO: 54153 - DNA, 110 bp, synthetic construct
  source 1..110: mol_type = other DNA
ctagaaagccctttccctgccaggcacgcagctagctcctgcccaaatgtcatctcctgctcagaaaggctgtcctgggccagcagacctaaacagcacacaaacctcca

SEQ ID NO: 54154 - DNA, 110 bp, synthetic construct
  source 1..110: mol_type = other DNA
tttgattgtatctaaactatgaaaaatatttcagatgagccatgacatagtaactccatagaaatatagggcccaggtttggaagtgggcccaatgattccccccacccc

SEQ ID NO: 54155 - DNA, 110 bp, synthetic construct
  source 1..110: mol_type = other DNA
aagaaaataaaggcactgctggtcaaaggtggaatcattacaaacaagagctgtccactgtgggctcaggcatagttgtacctcaagatgtatgcacaacttcatatcct

SEQ ID NO: 54156 - DNA, 110 bp, synthetic construct
  source 1..110: mol_type = other DNA
cactgtgggctcaggcatagttgtacctcaagatgtatgcacaacttcatatcctactttgatatcataacagtatttaacaatatcgtactaaatacctcccacctaat

SEQ ID NO: 54157 - DNA, 110 bp, synthetic construct
  source 1..110: mol_type = other DNA
ggcagagcctgggcttcactcggggtcacagctaatgggttctgatgttttcactgctgtaggaagaacgggcctcaggtggccttctcatgcctcctgatgaaccattt

SEQ ID NO: 54158 - DNA, 110 bp, synthetic construct
  source 1..110: mol_type = other DNA
tctcctgcatgctaaccaagccagcttaaggctgggagacaccatcaattccgggtactctcggcgtgctctggattcttgtggcagcttcttttttaaaaaacagcttt

SEQ ID NO: 54159 - DNA, 110 bp, synthetic construct
  source 1..110: mol_type = other DNA
tgtttcacaaccacggcgcctcccagcggcacatccccagcctcttctgctggacgtcccgcctgttcactaccgtttctctcctgcatccctaccctgtctggctgctc

SEQ ID NO: 54160 - DNA, 110 bp, synthetic construct
  source 1..110: mol_type = other DNA
gaaaacccctcccacgagaggggaccagggccagtgggcaaatagctcacccatgaccctgctgctaaaggggccgccagcacttgtgtggtcaaggctggttccttgac

SEQ ID NO: 54161 - DNA, 110 bp, synthetic construct
  source 1..110: mol_type = other DNA
accctgctgctaaaggggccgccagcacttgtgtggtcaaggctggttccttgaccatggcaagatgctcgccacctctaagcagggtggggtcggggaggggcggtctg

SEQ ID NO: 54162 - DNA, 110 bp, synthetic construct; identical to SEQ ID NO: 54160
  source 1..110: mol_type = other DNA

SEQ ID NO: 54163 - DNA, 110 bp, synthetic construct; identical to SEQ ID NO: 54161
  source 1..110: mol_type = other DNA

SEQ ID NO: 54164 - DNA, 110 bp, synthetic construct
  source 1..110: mol_type = other DNA
ctacaactcagccttgcgtccccaaggcaaaacagcagcagcgggacccccatgaagatgggggggggtctgcctaaccatcggacaggcccaaggagaaagggcttgct

SEQ ID NO: 54165 - DNA, 110 bp, synthetic construct
  source 1..110: mol_type = other DNA
agatgggggggggtctgcctaaccatcggacaggcccaaggagaaagggcttgctttccatgtggctctcaaggcaccagcttggacccattctagaagctgaaccaaag

SEQ ID NO: 54166 - DNA, 110 bp, synthetic construct
  source 1..110: mol_type = other DNA
ggaatgaggctgagctcatcttgccccttcctccaggttagcactgctcctgtaacctgaaaggaggggatacttggagatggagcgtggtcctcaccagctcagtgatt

SEQ ID NO: 54167 - DNA, 110 bp, synthetic construct
  source 1..110: mol_type = other DNA
cctgaaaggaggggatacttggagatggagcgtggtcctcaccagctcagtgattgggtcagaggaaaacacgtgctcctccttgggccaatcagagaccatgaggatcc

SEQ ID NO: 54168 - DNA, 110 bp, synthetic construct
  source 1..110: mol_type = other DNA
ttactgctgagccacaacgagaaatccgctcccagattcttgatctgcagatcacctgttttcagcctttaaatttgggggcaatttgttgtgcagcaatagagaacaaa

SEQ ID NO: 54169 - DNA, 110 bp, synthetic construct; identical to SEQ ID NO: 54168
  source 1..110: mol_type = other DNA

SEQ ID NO: 54170 - DNA, 110 bp, synthetic construct
  source 1..110: mol_type = other DNA
tttttctgatgccccatggcatatggagttcctaggcccttgcctgcgaaattcagtttccttaatagcatgtactttgtaagctatagatttcagaatgtgtaacagga

SEQ ID NO: 54171 - DNA, 110 bp, synthetic construct
  source 1..110: mol_type = other DNA
ccagtcagattcatttccgctgagcttcgatgggaactcatgtttatttgtttttttctttttttaaaaattttttcatgtttatcaagattttagggagttctctggta

SEQ ID NO: 54172 - DNA, 110 bp, synthetic construct; identical to SEQ ID NO: 54171
  source 1..110: mol_type = other DNA

SEQ ID NO: 54173 - DNA, 110 bp, synthetic construct
  source 1..110: mol_type = other DNA
ctaagttgaacgaggatatcaacattttgaaaccttgagtcctccattccaaactctcctgtataaaggtagtgtaacaacgcagaaaacatgggcatatctataccagc

SEQ ID NO: 54174 - DNA, 110 bp, synthetic construct
  source 1..110: mol_type = other DNA
caacaacacgtatggacttgtggggcattacgctaaatgaaataagtcaaagacaaattctgtatatcacttatgtgtggaatctaaaaaatgaaacaaatttgtgaata

SEQ ID NO: 54175 - DNA, 110 bp, synthetic construct
  source 1..110: mol_type = other DNA
aattctgtatatcacttatgtgtggaatctaaaaaatgaaacaaatttgtgaatataacaaaaaagaaacagattcgcagatagaacaaactggtggttacccctgggga

SEQ ID NO: 54176 - DNA, 110 bp, synthetic construct
  source 1..110: mol_type = other DNA
agtagctaagttttatgtgggtctctattgaatctaaaatgttttatttctggaggtcctgtcatggctcagcggaaacaaatctcactagtatccgtgaggacacaggt

SEQ ID NO: 54177 - DNA, 110 bp, synthetic construct; identical to SEQ ID NO: 54176
  source 1..110: mol_type = other DNA

SEQ ID NO: 54178 - DNA, 110 bp, synthetic construct
  source 1..110: mol_type = other DNA
aaagctctgagtactgctctgcccattagagatcaaagcacagctatgttaagtttttgagacagagggttatacatcaaatgacgtattattggcagtttacacaatcc

SEQ ID NO: 54179 - DNA, 110 bp, synthetic construct
  source 1..110: mol_type = other DNA
cctcccctattgtcatctctagcttaggaccttattgacacacctgaactttctgatgttttcaaagtcaagaagcaaagggaaccataggagtctagctctttaaatga

SEQ ID NO: 54180 - DNA, 110 bp, synthetic construct
  source 1..110: mol_type = other DNA
gggaggagaaagaccagatgttgaggggccttcgaggggaagaaacttggcgatcactcactctgagcttgattgttttcctttctttctttctttcattctctttcttt

SEQ ID NO: 54181 - DNA, 110 bp, synthetic construct
  source 1..110: mol_type = other DNA
cgctctgctttcgaaagtcgcagaggagagttgcttgttcttgaaattcacatccgtgccatcacgccctgggtatttcggcatccttgattgagtgatgtttgtgtgat

SEQ ID NO: 54182 - DNA, 110 bp, synthetic construct
  source 1..110: mol_type = other DNA
gtgccatcacgccctgggtatttcggcatccttgattgagtgatgtttgtgtgattcacccacactgtcgcctatttcagcagtcccttcctttttgcagctgagtccta

SEQ ID NO: 54183 - DNA, 110 bp, synthetic construct
  source 1..110: mol_type = other DNA
agcaatacccctgaaggtttttgagacatccagacactggtcagtgagaggaagtggaggcctaagggagaggctactgtaacccatttcttctgtgtcctttgagacag

SEQ ID NO: 54184 - DNA, 110 bp, synthetic construct
  source 1..110: mol_type = other DNA
gtgctgccctcccggggctcttccaatgccccaccctctcctccagcctggggctgtgtcctctgcctggacacctcactcacgattgcatcctggctcctgacttcttc

SEQ ID NO: 54185 - DNA, 110 bp, synthetic construct
  source 1..110: mol_type = other DNA
gtgtcctctgcctggacacctcactcacgattgcatcctggctcctgacttcttcacatttcagctgaagcccttcatctgcaaggtttctccgattcttcccccagctt

SEQ ID NO: 54186 - DNA, 110 bp, synthetic construct
  source 1..110: mol_type = other DNA
ggcactccatccatgcttgttgaatgcacaggttaatgcagacccctctctcctcccctctctcccggtggtcccataaccaggctgactcccctttctacccgcctcgc

SEQ ID NO: 54187 - DNA, 110 bp, synthetic construct
  source 1..110: mol_type = other DNA
ccctctctcccggtggtcccataaccaggctgactcccctttctacccgcctcgccttcccaacttcctctcagtaccaacaagcccacttgacgggatccttcccctct

SEQ ID NO: 54188 - DNA, 110 bp, synthetic construct
  source 1..110: mol_type = other DNA
agcatgtagacccaaggaaaggtctcagctcccaggattggcagggaggagccagcagaggccatgtggccctctcaatgctagagtttgtcaaaggcgctggcagcggt

SEQ ID NO: 54189 - DNA, 110 bp, synthetic construct
  source 1..110: mol_type = other DNA
cagaggccatgtggccctctcaatgctagagtttgtcaaaggcgctggcagcggtcacgagctctgtatcagctacatgggggctgcgagttccacagagaaagtgaatt

SEQ ID NO: 54190 - DNA, 110 bp, synthetic construct; identical to SEQ ID NO: 54188
  source 1..110: mol_type = other DNA

SEQ ID NO: 54191 - DNA, 110 bp, synthetic construct; identical to SEQ ID NO: 54189
  source 1..110: mol_type = other DNA

SEQ ID NO: 54192 - DNA, 110 bp, synthetic construct
  source 1..110: mol_type = other DNA
tgttcttagaagggagaaagttccagagaggcaggccagcaggagcaggttcagggcgtgcaggagcccaggcaggatggggctggggtggtttgaggccagtctcccag

SEQ ID NO: 54193 - DNA, 110 bp, synthetic construct
  source 1..110: mol_type = other DNA
gcgtgcaggagcccaggcaggatggggctggggtggtttgaggccagtctcccagcagagaataatggggaaggtggctcatgggctggcgctgggttatggagggacca

SEQ ID NO: 54194 - DNA, 110 bp, synthetic construct
  source 1..110: mol_type = other DNA
ccccaggaagggtgcacaattggcccggccctggctgaatgcaggtggcaagcgggcatcttaatagcagagggaactgacaaatacaagagtcttcctcatgcctgcca

SEQ ID NO: 54195 - DNA, 110 bp, synthetic construct
  source 1..110: mol_type = other DNA
tttgcttggatcacatatcatgtttggggacagacctttaaggcctgcagcacggagctgccagagcccaatccttccagcttggtccctgactgccctgaagttctctg

SEQ ID NO: 54196 - DNA, 110 bp, synthetic construct
  source 1..110: mol_type = other DNA
gatcgggtttggattccagatctcatgtaactgcttttgtggcagtagcaggtcctgcttaatcctctgaaccgcatgttttttgaaggcagagaggtttatactagcta

SEQ ID NO: 54197 - DNA, 110 bp, synthetic construct
  source 1..110: mol_type = other DNA
ctagttcttggcagtcaccaccttttggctttatccttacacgatattggtgtgtggtaatcaggtcaggaataattgcaaaatcggttatatccttgtatatggatgtg

SEQ ID NO: 54198 - DNA, 110 bp, synthetic construct
  source 1..110: mol_type = other DNA
ccatgacgtatttgcagaaatagaaaaatccatgctaacattcctacaggatctaaagggacctcaaatagccaaacagtaagtttacgtgaaagctatataagaacaaa

SEQ ID NO: 54199 - DNA, 110 bp, synthetic construct
  source 1..110: mol_type = other DNA
aagggacctcaaatagccaaacagtaagtttacgtgaaagctatataagaacaaagctggaggtctcacatttcctgatttccaaatttgccatgaagctacaataatca

SEQ ID NO: 54200 - DNA, 110 bp, synthetic construct
  source 1..110: mol_type = other DNA
gacacccaaacacctttataccaggttgtcacctgctgctttattgagctgaacacagctctgttacagtccaggtggtaagaaaagtggaagcagagggaaaccagcag

SEQ ID NO: 54201 - DNA, 110 bp, synthetic construct
  source 1..110: mol_type = other DNA
cagctctgttacagtccaggtggtaagaaaagtggaagcagagggaaaccagcagaatgagatgggctgggacctgggacctgagacctgggctccttggctacaggggc

SEQ ID NO: 54202 - DNA, 110 bp, synthetic construct
  source 1..110: mol_type = other DNA
taaggaggacaccagggtgtagggtggctgatcttagcggcctgaccactcggtgagcttgagcaggtggtacagatcaagtctttctctttagcagggacatgcgacct

SEQ ID NO: 54203 - DNA, 110 bp, synthetic construct
  source 1..110: mol_type = other DNA
tctcctccctcccgactccccagaccacagtccagcttccaaaccctgactttttccggtgagctggctgaacgggcatctccggagggctctacatctgctcacagctt

SEQ ID NO: 54204 - DNA, 110 bp, synthetic construct
  source 1..110: mol_type = other DNA
ccggtgagctggctgaacgggcatctccggagggctctacatctgctcacagcttggagacctgccctccattcctcctgggcattccttcccctccccgtgcctcagtc

SEQ ID NO: 54205 - DNA, 110 bp, synthetic construct
  source 1..110: mol_type = other DNA
tcaggcctaagataatagtgttgcccttcaggtagaattttttgttgttgtttgtttgtttcaattagatgtctgggattcagggtgatccggatgtaatttcaagacct

SEQ ID NO: 54206 - DNA, 110 bp, synthetic construct; identical to SEQ ID NO: 54205
  source 1..110: mol_type = other DNA

SEQ ID NO: 54207 - DNA, 110 bp, synthetic construct
  source 1..110: mol_type = other DNA
aacccatcttacccaagttagattaggaatcttttacactaaaagggggggtgtgtggctgatagttgcaaacttcttggttctggaatcctctgctatccacttgggtc

SEQ ID NO: 54208 - DNA, 110 bp, synthetic construct
  source 1..110: mol_type = other DNA
tggctgatagttgcaaacttcttggttctggaatcctctgctatccacttgggtctggtcacaatgttcctgtaaacctccagcaagacaaaggttatctttgttctgca

SEQ ID NO: 54209 - DNA, 110 bp, synthetic construct
  source 1..110: mol_type = other DNA
cagcatcagggcacttccttcaaggggacagttgcaccttgtgtggcactaggaagacggaggcagaatcacccaattcaggccctgcccaccaggaagcaactccagcc

SEQ ID NO: 54210 - DNA, 110 bp, synthetic construct
  source 1..110: mol_type = other DNA
cttcagagcagggagggtagctccagctccagcggaggcgttggtatggaccctgcttgtctctgctccctctgtccccttttcctgtcagggtctccacacacacacat

SEQ ID NO: 54211 - DNA, 110 bp, synthetic construct
  source 1..110: mol_type = other DNA
cattctttttctcataaagtcttccatcatgttctatcaaaaggggctgtgtgtaactccctgtgctacacagtaggacctccttgcatatccatcctaaatgtgatagc

SEQ ID NO: 54212 - DNA, 110 bp, synthetic construct
  source 1..110: mol_type = other DNA
aaagtcttccatcatgttctatcaaaaggggctgtgtgtaactccctgtgctacacagtaggacctccttgcatatccatcctaaatgtgatagcttgcatctactaacc

SEQ ID NO: 54213 - DNA, 110 bp, synthetic construct
  source 1..110: mol_type = other DNA
cctcagatccctatagctgtcaacaaatagacatttcaagtcaaattccaccacctccagggagcctccctgactcctagcagttagaagaggctacacccttcccaccc

SEQ ID NO: 54214 - DNA, 110 bp, synthetic construct
  source 1..110: mol_type = other DNA
tccagggagcctccctgactcctagcagttagaagaggctacacccttcccacccccacttacttgacctgtgcatttcctagggtgcagatcacagggtgtttggtgcc

SEQ ID NO: 54215 - DNA, 110 bp, synthetic construct; identical to SEQ ID NO: 54213
  source 1..110: mol_type = other DNA

SEQ ID NO: 54216 - DNA, 110 bp, synthetic construct; identical to SEQ ID NO: 54214
  source 1..110: mol_type = other DNA

SEQ ID NO: 54217 - DNA, 110 bp, synthetic construct
  source 1..110: mol_type = other DNA
atctccacatgcccatgatgcagccctaaaaagggggaaaaaaaaattccagggattgtgacatggtccccagggtaaataacggcacaaatgcaggactgggctggttg

SEQ ID NO: 54218 - DNA, 110 bp, synthetic construct
  source 1..110: mol_type = other DNA
ttgtgacatggtccccagggtaaataacggcacaaatgcaggactgggctggttgtgggaagccaggaaaccaatatccggagcaagagagagaccatgtttttttcatg

SEQ ID NO: 54219 - DNA, 110 bp, synthetic construct
  source 1..110: mol_type = other DNA
agtgctcatctgtgtgtggggtgggggtggcggtttgaattgcttcttcagcagcatctgtgatggcaatggttttagctgcgtaggagggacctcagcaaaggacacag

SEQ ID NO: 54220 - DNA, 110 bp, synthetic construct
  source 1..110: mol_type = other DNA
atctgtgatggcaatggttttagctgcgtaggagggacctcagcaaaggacacagagatctcagcacccagaaggcaactcttagggtgggaaccaaaaaggagtatcag

SEQ ID NO: 54221 - DNA, 110 bp, synthetic construct
  source 1..110: mol_type = other DNA
aagctgccagcgcacaactccgccgtcgtctccagcaacaccgacttcgccttcagcctctacaagcagctggctctggccgaacgcagagaaaatgtcatcttctcccc

SEQ ID NO: 54222 - DNA, 110 bp, synthetic construct
  source 1..110: mol_type = other DNA
aactccgccgtcgtctccagcaacaccgacttcgccttcagcctctacaagcagctggctctggccgaacgcagagaaaatgtcatcttctccccgctgagcgtctccat

SEQ ID NO: 54223 - DNA, 110 bp, synthetic construct
  source 1..110: mol_type = other DNA
acttgtgatggctctgtggtgacaagcaagtgactaaagctctctgagccccagatcccatttctgtgcaacatgttgaatggctcaggtgacataaatgatgcctggcc

SEQ ID NO: 54224 - DNA, 110 bp, synthetic construct
  source 1..110: mol_type = other DNA
tcacagtcagccctccctgcaggggatctctgggggccaagcccttcccgggaccctctatttcccagcatctcccatgacccgtggactctagtctccaggtgtttgcc

SEQ ID NO: 54225 - DNA, 110 bp, synthetic construct
  source 1..110: mol_type = other DNA
caagtgtctttggggacccgcctgcctggcccttcctcctgctgcccttcgttatggattcaccctaagagctggctttgcccgtccctgaccttgaggtgtccttagac

SEQ ID NO: 54226 - DNA, 110 bp, synthetic construct
  source 1..110: mol_type = other DNA
ggattcaccctaagagctggctttgcccgtccctgaccttgaggtgtccttagactcctccctgagccaatcacagccctccatccatgacaacccttggcgacctctgg

SEQ ID NO: 54227 - DNA, 110 bp, synthetic construct
  source 1..110: mol_type = other DNA
tcaggatccgacgggtgtccacatgagtcccgctccagccaggggcctcctctgttactgacataatgctacctctgtgcctgaagcacagtgaaaagaaacgtatccaa

SEQ ID NO: 54228 - DNA, 110 bp, synthetic construct
  source 1..110: mol_type = other DNA
tcgaacctgcatcctcacagacactacatcagattcttaatccactgagttacaatgggaactcccttcttttaggaaggatccgatttatagggagcaagtcacggaca

SEQ ID NO: 54229 - DNA, 110 bp, synthetic construct; identical to SEQ ID NO: 54228
  source 1..110: mol_type = other DNA

SEQ ID NO: 54230 - DNA, 110 bp, synthetic construct
  source 1..110: mol_type = other DNA
gcacccaagagtggtcagcctgcaggtcacattcgtgtctcttcggccacacctgtgtacgctggcaggccgactgtcacctttgaacctgagggttgatgcctccggat

SEQ ID NO: 54231 - DNA, 110 bp, synthetic construct
  source 1..110: mol_type = other DNA
atgtctcacccaacacttgatattgtcgatcttacgctttagccattccagtggactgttagaatggcatcctgaatttagtgtgcacctccctgatgactaattcaaga

SEQ ID NO: 54232 - DNA, 110 bp, synthetic construct
  source 1..110: mol_type = other DNA
ctgttagaatggcatcctgaatttagtgtgcacctccctgatgactaattcaagagaacacttttttacatgtccattggccatttgggtgtcttcctttatgaaatacc

SEQ ID NO: 54233 - DNA, 110 bp, synthetic construct
  source 1..110: mol_type = other DNA
tcttctgtctgtccgcatgaatgtgtccactcttggtatgtcatataaatagaatcatacagaatttttctttttgtgattggctgatctcactcagcataatctcctca

SEQ ID NO: 54234 - DNA, 110 bp, synthetic construct
  source 1..110: mol_type = other DNA
catacagaatttttctttttgtgattggctgatctcactcagcataatctcctcaaggttcatccatgtggcagcatattgcagaattttcttcttcttattcaaaaagg

SEQ ID NO: 54235 - DNA, 110 bp, synthetic construct
  source 1..110: mol_type = other DNA
tctggatcccctgcaccccactcagttcctgtatgatggaatatatgggccctcaacatccccccatttccttctgtaagagtatctgctggagaatggattatcaaagc

SEQ ID NO: 54236 - DNA, 110 bp, synthetic construct
  source 1..110: mol_type = other DNA
acatccccccatttccttctgtaagagtatctgctggagaatggattatcaaagctttgggggttggagggcttttgtgtccagaaagggcatggaattggggtgaaggg

SEQ ID NO: 54237 - DNA, 110 bp, synthetic construct
  source 1..110: mol_type = other DNA
caaagctctgcatagtaggtgctcgctgggtgttttactgaatgaatgcatgaatgcatgaacactgcatgtttggagacacggacgaatggcgtggaatttcatcattg

SEQ ID NO: 54238 - DNA, 110 bp, synthetic construct
  source 1..110: mol_type = other DNA
gcatgaacactgcatgtttggagacacggacgaatggcgtggaatttcatcattgcgggaactccgcacgtctgaatgcatgagtcatatgctaaagtccttttcctccc

SEQ ID NO: 54239 - DNA, 110 bp, synthetic construct
  source 1..110: mol_type = other DNA
caatttccccatcatatctctttttctcttccaagatcctgaccagcttcccccatgacagttaattatttctcttgagtctcctgcaatctgaccatttcatctttcct

SEQ ID NO: 54240 - DNA, 110 bp, synthetic construct
  source 1..110: mol_type = other DNA
tgacagttaattatttctcttgagtctcctgcaatctgaccatttcatctttcctcggcttttctgaccttgacacttttgaaaagtatcaaagtgcaattttgtcaaat

SEQ ID NO: 54241 - DNA, 110 bp, synthetic construct
  source 1..110: mol_type = other DNA
agaaagtaactacccgttggtttggccacggcccgtcttgccctcggggccccactgcgatgtgacagcctgtgaggaggccgaggcctccacgctcctcaccgctctgc

SEQ ID NO: 54242 - DNA, 110 bp, synthetic construct
  source 1..110: mol_type = other DNA
tgcgatgtgacagcctgtgaggaggccgaggcctccacgctcctcaccgctctgccctcagtgccccagagaagagggtaccccacgaagacttaggtgaaggggtgaac

SEQ ID NO: 54243 - DNA, 110 bp, synthetic construct
  source 1..110: mol_type = other DNA
ttcttaacttggccttaatgaagcgctctgaacgcctgctggtaagtaaaagttctccagtttcatagactgactgactacgattaactgctttagcagagccaacagag

SEQ ID NO: 54244 - DNA, 110 bp, synthetic construct
  source 1..110: mol_type = other DNA
tccagtttcatagactgactgactacgattaactgctttagcagagccaacagagtaattaatccacaggactatttttcaatcacaggttttaaattcctggtcaaaca

SEQ ID NO: 54245 - DNA, 110 bp, synthetic construct
  source 1..110: mol_type = other DNA
ctcgccctggacttgcgttctctactccctctccaacagcctcccgaagtcctttccccgctcgtcatttaatgtcatcccacgtcagcgactgtggctttaggggaagc

SEQ ID NO: 54246 - DNA, 110 bp, synthetic construct
  source 1..110: mol_type = other DNA
ccccgctcgtcatttaatgtcatcccacgtcagcgactgtggctttaggggaagcagagtaactccgttcatatcctcaaacctcagtccttctgaggcagcacaggggt

SEQ ID NO: 54247 - DNA, 110 bp, synthetic construct; identical to SEQ ID NO: 54245
  source 1..110: mol_type = other DNA

SEQ ID NO: 54248 - DNA, 110 bp, synthetic construct; identical to SEQ ID NO: 54246
  source 1..110: mol_type = other DNA

SEQ ID NO: 54249 - DNA, 110 bp, synthetic construct
  source 1..110: mol_type = other DNA
tcctgactcctggctctcattctagggaacaggatggctggccagcgaaactgtcatgatctagttctgagctctggcctcagactcacaggaaacacggggccttgact

SEQ ID NO: 54250 - DNA, 110 bp, synthetic construct
  source 1..110: mol_type = other DNA
ggcattgtcactgctgtggcttgggttcggttcctggcctgggaactgccgcatgccgcaggctcagctgaaaaaaaacaacaaaaaaaatatagcccttagtgatcata

SEQ ID NO: 54251 - DNA, 110 bp, synthetic construct; identical to SEQ ID NO: 54250
  source 1..110: mol_type = other DNA

SEQ ID NO: 54252 - DNA, 110 bp, synthetic construct
  source 1..110: mol_type = other DNA
gtatgaataaatcaattgtctttaacttcaccaaacagtaactctaaaaactctttgagccctggactcctcaagagagccaggatcccttttatatcttaggaatgcca

SEQ ID NO: 54253 - DNA, 110 bp, synthetic construct
  source 1..110: mol_type = other DNA
tgagccctggactcctcaagagagccaggatcccttttatatcttaggaatgccaggtgtctgcctatctcctcatttttttcctgctaaattttcccggttaattgcca

SEQ ID NO: 54254 - DNA, 110 bp, synthetic construct
  source 1..110: mol_type = other DNA
tggaccagggctggagcaggcaggagaccagtggtcagagatattttaaagacgtcgccaatagaatttgccaacgtgggtataaggaggaagaaaaaactaaaagtgac

SEQ ID NO: 54255 - DNA, 110 bp, synthetic construct
  source 1..110: mol_type = other DNA
gacctctgtgcagcttgtcccctgtcttgaggaggagggccacgctgtgtgctgaccccctcgcccggactgggatatggaaggccaccagcctcacctttgtcctcccc

SEQ ID NO: 54256 - DNA, 110 bp, synthetic construct
  source 1..110: mol_type = other DNA
ccccctcgcccggactgggatatggaaggccaccagcctcacctttgtcctcccctcccgcatcgtatctcatttaatctcctaatagacctgaactgaatgtctcattg

SEQ ID NO: 54257 - DNA, 110 bp, synthetic construct
  source 1..110: mol_type = other DNA
caggaagatcccgctgaagcccattctcggcctggatcctgattcggaggtccaagagctttttctgcaggggttcaaaagccgccccgaaatctttgtgctgagcgagc

SEQ ID NO: 54258 - DNA, 110 bp, synthetic construct
  source 1..110: mol_type = other DNA
gagctttttctgcaggggttcaaaagccgccccgaaatctttgtgctgagcgagcgagctctgcggggacagaacaggcagcaggctaatcagctttcctgcagggctcc

SEQ ID NO: 54259 - DNA, 110 bp, synthetic construct
  source 1..110: mol_type = other DNA
gtggggcacccaggacagggcgctctctacccaggctccaagccaagcccttggggactcacttgatggaagtcctctctcagcttccagggctggttcaccttggcctc

SEQ ID NO: 54260 - DNA, 110 bp, synthetic construct
  source 1..110: mol_type = other DNA
tctctcaattctctccaagggctgggcgttgccttgttctctccgttacatcatttttagggactcaagttgactccagggttgcagtgatgccctaaaattactgagta

SEQ ID NO: 54261 - DNA, 110 bp, synthetic construct
  source 1..110: mol_type = other DNA
tttagggactcaagttgactccagggttgcagtgatgccctaaaattactgagtagctctgggcatcatggagaaaggtctcaggttccagctcaggttgatggaaatct

SEQ ID NO: 54262 - DNA, 110 bp, synthetic construct
  source 1..110: mol_type = other DNA
gagtccagtgggcagacgtgtgcttatcttcactccacaccaacccatccttaaagtcacaccagccacagtggcagacaacgtccacatcccagcagctcggcacaact

SEQ ID NO: 54263 - DNA, 110 bp, synthetic construct
  source 1..110: mol_type = other DNA
gtcacaccagccacagtggcagacaacgtccacatcccagcagctcggcacaacttaaaagttacttctcatccccaaaggcccaaacaagcatttctgatccactggca

SEQ ID NO: 54264 - DNA, 110 bp, synthetic construct
  source 1..110: mol_type = other DNA
ttccatcacaagtaattcgataaatggttcccttgctgcccagcaggatcccgtcatttatattcgaacggctctgacattgacatctttattttttaaagagttttatt

SEQ ID NO: 54265 - DNA, 110 bp, synthetic construct
  source 1..110: mol_type = other DNA
catcggtcaagagctgcccttcggtgttgacgtcccacacttccggttgtgcacatatgactgcccaggagcatgacacccatgagagaagccctgggatgtgtggccca

SEQ ID NO: 54266 - DNA, 110 bp, synthetic construct
  source 1..110: mol_type = other DNA
tatgactgcccaggagcatgacacccatgagagaagccctgggatgtgtggcccaaagctgagaccaaaggacacttgcccagagctggtcacagctcagcagaatggcc

SEQ ID NO: 54267 - DNA, 110 bp, synthetic construct
  source 1..110: mol_type = other DNA
cattgcatgtcagactttacaaggctgaattgtatggcatgtgaaccatatctcgataaagctgttaaaaaaataagaaggagttcccatcatggctcagtggttaacaa

SEQ ID NO: 54268 - DNA, 110 bp, synthetic construct
  source 1..110: mol_type = other DNA
tcagtctgacttcagggcagccgtgtttggggagtggcacggtgcttagacatgtgagctagcctggttcctgccccctccagatcgcagacatctccagggcagggacg

SEQ ID NO: 54269 - DNA, 110 bp, synthetic construct
  source 1..110: mol_type = other DNA
ctgcaaggtgcttgctgatggccagaaacagcctgggcctgaatctcatctctgcctcatatgatctaggtgaccacaagcagttcacaccagctctgtgagcctcaatt

SEQ ID NO: 54270 - DNA, 110 bp, synthetic construct
  source 1..110: mol_type = other DNA
ctcatatgatctaggtgaccacaagcagttcacaccagctctgtgagcctcaattttcctcatctgtaaatggggggtgctaatgcccccccccaagtcccatcaggtag

SEQ ID NO: 54271 - DNA, 110 bp, synthetic construct
  source 1..110: mol_type = other DNA
gctcttctgtagaacagaagcctggaggtgttctcctgggtgaatttccaccaatggaccagcaagtccaccttcaagttcaaaccccaaaggaacccttcacagctgct

SEQ ID NO: 54272 - DNA, 110 bp, synthetic construct
  source 1..110: mol_type = other DNA
ggaccagcaagtccaccttcaagttcaaaccccaaaggaacccttcacagctgctcaaggagacagattcaaagatgttcactgcactaatgtttatagtgacaaaggac

SEQ ID NO: 54273 - DNA, 110 bp, synthetic construct; identical to SEQ ID NO: 54271
  source 1..110: mol_type = other DNA

SEQ ID NO: 54274 - DNA, 110 bp, synthetic construct; identical to SEQ ID NO: 54272
  source 1..110: mol_type = other DNA

SEQ ID NO: 54275 - DNA, 110 bp, synthetic construct
  source 1..110: mol_type = other DNA
aggagaatatgcatggatttctgtgaggacacaggattcctgaggctaagaggtctataccccagctcctggtcaagtccctggtctggacctaggatattatggtggag

SEQ ID NO: 54276 - DNA, 110 bp, synthetic construct
  source 1..110: mol_type = other DNA
tataccccagctcctggtcaagtccctggtctggacctaggatattatggtggagtggactattatcttccctagatatgagtgtgcctggcttagaaatgcctctctgt

SEQ ID NO: 54277 - DNA, 110 bp, synthetic construct
  source 1..110: mol_type = other DNA
ctgattgggtaaggcccaccatattctggctttcctcaaaatctattgagttaaatgctaagagctacacaacaccttcacagcaacattgacaatggcgtttgactaaa

SEQ ID NO: 54278 - DNA, 110 bp, synthetic construct
  source 1..110: mol_type = other DNA
tgctaagagctacacaacaccttcacagcaacattgacaatggcgtttgactaaacaactgagccaccatagaccacccagggtgacacagaagtctatccataagagag

SEQ ID NO: 54279 - DNA, 110 bp, synthetic construct; identical to SEQ ID NO: 54277
  source 1..110: mol_type = other DNA

SEQ ID NO: 54280 - DNA, 110 bp, synthetic construct; identical to SEQ ID NO: 54278
  source 1..110: mol_type = other DNA

SEQ ID NO: 54281 - DNA, 110 bp, synthetic construct
  source 1..110: mol_type = other DNA
cgaactgatgccgaatagaaacgcagagacagagttggaggaaacagaagaagtagctttagtggccaggcaaggaggggcaaacagcaggcgagggcctcaaggactgt

SEQ ID NO: 54282 - DNA, 110 bp, synthetic construct
  source 1..110: mol_type = other DNA
gctttagtggccaggcaaggaggggcaaacagcaggcgagggcctcaaggactgtgccctccccccttagagggggcagtgaggagtcttatagcatcaaggagcaggtg

SEQ ID NO: 54283 - DNA, 110 bp, synthetic construct
  source 1..110: mol_type = other DNA
ttaacacagcagccagtcatctgttgacaggttaggtcagagctgtctctcctccgctcagaaccctctgggggtccccttctttcccacttggagtaaaagacagagag

SEQ ID NO: 54284 - DNA, 110 bp, synthetic construct
  source 1..110: mol_type = other DNA
gtttccactgttttggaaagaacaaaatacataggcacggacaacctataaaacataaatggtgttatttcggtgattttgcttggagctaaatgggctgatgtttgcac

SEQ ID NO: 54285 - DNA, 110 bp, synthetic construct
  source 1..110: mol_type = other DNA
taaatggtgttatttcggtgattttgcttggagctaaatgggctgatgtttgcacttaaagcagcctgggttatataaaggtgagcagcaaaacacctgctaataattta

SEQ ID NO: 54286 - DNA, 110 bp, synthetic construct
  source 1..110: mol_type = other DNA
cccaatgtcacttgagtttttcaaatgatatcaaatattactactaatatcaatagctgctggattttgcccacatattatctgccagggaaatattgagctaaaactag

SEQ ID NO: 54287 - DNA, 110 bp, synthetic construct; identical to SEQ ID NO: 54286
  source 1..110: mol_type = other DNA

SEQ ID NO: 54288 - DNA, 110 bp, synthetic construct
  source 1..110: mol_type = other DNA
ctggaggagacacaaacaggccacggggtgactgggaagagagggacaggtggaaaagagaaggaagaagctaggaggacgcggaaatccctgctacagaatcaacagga

SEQ ID NO: 54289 - DNA, 110 bp, synthetic construct
  source 1..110: mol_type = other DNA
aagagaaggaagaagctaggaggacgcggaaatccctgctacagaatcaacaggacgatgagtcctgagcccgggttactgtgtgtaaacgagaggggcaagcaggtggg

SEQ ID NO: 54290 - DNA, 110 bp, synthetic construct
  source 1..110: mol_type = other DNA
ttgcatacctaagaaacctcaagttatgtaaactgctgaaatgaaaaaaggagacactcattagggaatattttcagaattgcaacaacaaagtaagcttttccttcagg

SEQ ID NO: 54291 - DNA, 110 bp, synthetic construct
  source 1..110: mol_type = other DNA
actcattagggaatattttcagaattgcaacaacaaagtaagcttttccttcaggaatttcaataataaaaggcttgtgttagcagggtggtgttttatagctacaaacc

SEQ ID NO: 54292 - DNA, 110 bp, synthetic construct
  source 1..110: mol_type = other DNA
ctagtcagattaatttctgctgagccatggtaggagctctactagttgtgttaacccactgactcacaatgggaactccaactttattcaggtttactttcgaaacagtt

SEQ ID NO: 54293 - DNA, 110 bp, synthetic construct; identical to SEQ ID NO: 54292
  source 1..110: mol_type = other DNA

SEQ ID NO: 54294 - DNA, 110 bp, synthetic construct
  source 1..110: mol_type = other DNA
tgattcagtaaactacgttacacccacctctgcgtttagtttccatggcctcatacccaccaacctccaagcttcaggttcaccccaataggcacccgcccaggtcctgg

SEQ ID NO: 54295 - DNA, 110 bp, synthetic construct
  source 1..110: mol_type = other DNA
aagtcttgcgggaagaaactacaccaatgttaggaagtgttagtgtgataccgatacatggacaaacttgttgatcagaattgagtcctgtggttgtgattgcatgtctt

SEQ ID NO: 54296 - DNA, 110 bp, synthetic construct
  source 1..110: mol_type = other DNA
acatggacaaacttgttgatcagaattgagtcctgtggttgtgattgcatgtctttacattaatatctagggaactgttttcatagtttgtcttactggcttcatccctg

SEQ ID NO: 54297 - DNA, 110 bp, synthetic construct
  source 1..110: mol_type = other DNA
cagaaacatcaagagcaacgtctcactgggtgtggctgttccattgcaagctctatgaagtcaagcgccatagttgttgggcccctggtgtgtccccagtgtcccctata

SEQ ID NO: 54298 - DNA, 110 bp, synthetic construct
  source 1..110: mol_type = other DNA
acctgtgtcctcacaaagtgctctgacggctccatgaagcagcactgcatcctcatcctccccactttaatgacaggcgaactatgactcagaaaggagacatggccccc

SEQ ID NO: 54299 - DNA, 110 bp, synthetic construct
  source 1..110: mol_type = other DNA
tcctccccactttaatgacaggcgaactatgactcagaaaggagacatggcccccgtaaggacgcctccactctgcctcaccgcttagccaccagaaggcctcaggactt

SEQ ID NO: 54300 - DNA, 110 bp, synthetic construct
  source 1..110: mol_type = other DNA
cccagaccagactctcttctgttcttccaacaagctcagctcttatcccagtgtccctgcctggaccacttcccttcatcacactcctgctcatccccctaagaccccgt

SEQ ID NO: 54301 - DNA, 110 bp, synthetic construct
  source 1..110: mol_type = other DNA
ctcacacatctctcgtgtttatttcgcctctcttttctgcttctctgctcttgttccggagtcccttcaagattcctcactatagcgactcagatgtggggtggggggga

SEQ ID NO: 54302 - DNA, 110 bp, synthetic construct
  source 1..110: mol_type = other DNA
ccggagtcccttcaagattcctcactatagcgactcagatgtggggtgggggggagcattcccctggtgttgggatgcaggtcgtcactgcatcacaccacatgagtccc

SEQ ID NO: 54303 - DNA, 110 bp, synthetic construct
  source 1..110: mol_type = other DNA
gcaggggcctcttatttagagtcactggatgcctttgcccgggcagagcggggagtttgctagtctcgcctctgtagaaagagatggccgaatccttcatcgttggttcg

SEQ ID NO: 54304 - DNA, 110 bp, synthetic construct
  source 1..110: mol_type = other DNA
ttccatttcatgttgatgacactttggagtctttagacttgaaagttagctgagtatagaatctttggttcatgtcttttttcccttgagccttaaatatgttgcttgta

SEQ ID NO: 54305 - DNA, 110 bp, synthetic construct
  source 1..110: mol_type = other DNA
ttagctgagtatagaatctttggttcatgtcttttttcccttgagccttaaatatgttgcttgtatttttttttttttctttttctggcataaagtgttgctgtcaaagt

SEQ ID NO: 54306 - DNA, 110 bp, synthetic construct
  source 1..110: mol_type = other DNA
gggcttgccaatttgggttttaaaagcagcttattagatggaggtaaattatttcttttatactgcccaatacgcagtgtttttttcaaaatagagtcaagattttatga

SEQ ID NO: 54307 - DNA, 110 bp, synthetic construct
  source 1..110: mol_type = other DNA
aggcatactgctacgtgaaagaagccaatgtgaagaggccacagactgcaggagtccagctatatgacattctggaaaaggcaagattatggagacagtaacaagaccaa

SEQ ID NO: 54308 - DNA, 110 bp, synthetic construct
  source 1..110: mol_type = other DNA
gtaaatgttaactgagcttgaactgtgtgtaggtcccatacgtttgtgggtgaggaggacagggcctggtttctgccttcagggagcttcctgggttgactcaaaacaga

SEQ ID NO: 54309 - DNA, 110 bp, synthetic construct
  source 1..110: mol_type = other DNA
aggacagggcctggtttctgccttcagggagcttcctgggttgactcaaaacagaggttgggttaagatgacttgtttcccacaccctgtgccatggagccctggggttc

SEQ ID NO: 54310 - DNA, 110 bp, synthetic construct
  source 1..110: mol_type = other DNA
ggcaccaggagagggctggtgggcggccaggactggagctcatggggaagcagtagctccactctgggtcacggtcaccctcccttactcctggccaaagatgcataatc

SEQ ID NO: 54311 - DNA, 110 bp, synthetic construct
  source 1..110: mol_type = other DNA
gaggaggtgaatagcaggtgcaaaagtccagaggcagagaggacagtaggagcaaagggccagaggtgagcacctacttgtgcatgaagagcagggaggaggtcacacag

SEQ ID NO: 54312 - DNA, 110 bp, synthetic construct
  source 1..110: mol_type = other DNA
agggccagaggtgagcacctacttgtgcatgaagagcagggaggaggtcacacagccgtatgtattcctcagacccaccatggggtagtgtcgcagagaagacagaggct

SEQ ID NO: 54313 - DNA, 110 bp, synthetic construct
  source 1..110: mol_type = other DNA
atgaattgtcatcctcagccaacaaggtgtggggtcctgagactcaaggacatggaaggactccttaggatgaccacgggagagagctcaacggggtggcatgggttgcg

SEQ ID NO: 54314 - DNA, 110 bp, synthetic construct
  source 1..110: mol_type = other DNA
aaggactccttaggatgaccacgggagagagctcaacggggtggcatgggttgcgggaggcatttatggctgggcagcccttagcaggtcctttcatccctctgagcctc

SEQ ID NO: 54315 - DNA, 110 bp, synthetic construct
  source 1..110: mol_type = other DNA
cttctctgaacctcggtgttgctgttaagaacacaggaatgatcattgtattatctcctcggattatagcgtccataaatgactgatgcttcataacactgatgctactt

SEQ ID NO: 54316 - DNA, 110 bp, synthetic construct
  source 1..110: mol_type = other DNA
tcctcggattatagcgtccataaatgactgatgcttcataacactgatgctactttgtgtttcttgtctttttgcttgatttttgtctcttttctccactagaatatgaa

SEQ ID NO: 54317 - DNA, 110 bp, synthetic construct
  source 1..110: mol_type = other DNA
tagcccggagcaggggacattctgctggcataattcaactgcatgttaccagcactgtttttaagcatccagcttgagagaggaagtggacaagatgttgagaatatagc

SEQ ID NO: 54318 - DNA, 110 bp, synthetic construct
  source 1..110: mol_type = other DNA
gggggatcaagagggccggggtttgcagactgcctattcagcaaaggtctcaacgtagacttttgatcatctcaccaaatggagacatactgtccttgtcaaggtaaaaa

SEQ ID NO: 54319 - DNA, 110 bp, synthetic construct
  source 1..110: mol_type = other DNA
tagacttttgatcatctcaccaaatggagacatactgtccttgtcaaggtaaaaaggcacttctcatcgctgggtacattgtgcttcccaatgcagtcacctgcctgaaa

SEQ ID NO: 54320 - DNA, 110 bp, synthetic construct
  source 1..110: mol_type = other DNA
tttgtggctgcccactgcagattctccccagatttcttcatcagtatagaaccttgaaatctgttacgagctctcagttgatacaggcagttcaacagtatccccagcct

SEQ ID NO: 54321 - DNA, 110 bp, synthetic construct
  source 1..110: mol_type = other DNA
aagaagaaaaaaaaatcttcggaaagctctgattatggaagggagagcaaccatacaggcaggggtgataacttcggtgttagccattggcccagtaacgctctgtaaca

SEQ ID NO: 54322 - DNA, 110 bp, synthetic construct
  source 1..110: mol_type = other DNA
tcttttccacaggtcctgggcacggaggggatgagagacagggcagctctgccacatggtcacaggggtcagactctccatcacagcaggagaggatgtccttgctggga

SEQ ID NO: 54323 - DNA, 110 bp, synthetic construct
  source 1..110: mol_type = other DNA
tgagaaaatgttgcattaaaatagtatctatcgtaaggacaggttctcaatttgttcttaacagttctgcagccccggtaggcgtctgactctctgaccatcccgtcccc

SEQ ID NO: 54324 - DNA, 110 bp, synthetic construct
  source 1..110: mol_type = other DNA
tcttaacagttctgcagccccggtaggcgtctgactctctgaccatcccgtccccacccctgccgtgccagtctcagccctgccagaatcagacccttctgcttccgcgg

SEQ ID NO: 54325 - DNA, 110 bp, synthetic construct; identical to SEQ ID NO: 54323
  source 1..110: mol_type = other DNA

SEQ ID NO: 54326 - DNA, 110 bp, synthetic construct; identical to SEQ ID NO: 54324
  source 1..110: mol_type = other DNA

SEQ ID NO: 54327 - DNA, 110 bp, synthetic construct
  source 1..110: mol_type = other DNA
actcaaggtccctagggcccaggctcagaatggacatggtgtcacttctgctcatacagtattggccaaaacaagtatgacggccaagactaaattcaaaggcagagaaa

SEQ ID NO: 54328 - DNA, 110 bp, synthetic construct
  source 1..110: mol_type = other DNA
acagtattggccaaaacaagtatgacggccaagactaaattcaaaggcagagaaatccgtcctacccttgaggaggcagggaaggagaagggtaaagaattgcagccaac

SEQ ID NO: 54329 - DNA, 110 bp, synthetic construct
  source 1..110: mol_type = other DNA
attaactgatgtggaacagagagtgatgtgtttttcacgaattaaaaactgaagcaatcacgtgtacgtggagtctaaagtctggcacaaataatctctctacagagcag

SEQ ID NO: 54330 - DNA, 110 bp, synthetic construct
  source 1..110: mol_type = other DNA
aatcacgtgtacgtggagtctaaagtctggcacaaataatctctctacagagcagaaacagatcatggacatgggggcagaggtgggtttgctggcggggggctgggggg

SEQ ID NO: 54331 - DNA, 110 bp, synthetic construct
  source 1..110: mol_type = other DNA
gtcatcatgtagttaaattcgtccacccagtgcaggtttcagtatctaccaaacagctcaaaggatgtgagctggaattttctccatagctcttggaggggaactttagt

SEQ ID NO: 54332 - DNA, 110 bp, synthetic construct
  source 1..110: mol_type = other DNA
gatgcatcctcaccggatgctttgaatcacaggaacccctgttcatgaagcaccgaagaggttccaggcaaggcccatgcgttttcttatttgatcctcgctgccacccc

SEQ ID NO: 54333 - DNA, 110 bp, synthetic construct
  source 1..110: mol_type = other DNA
aggtactcagtggggtgggtgcacagcacttcaaagcttgcaatgctcacatcctcctgccacttccggccagtgtcacacccagcaagggaggccaaggagattgggat

SEQ ID NO: 54334 - DNA, 110 bp, synthetic construct
  source 1..110: mol_type = other DNA
aacaatcacaaaaattctcctaaggtcataaatgagtagtcattattctgaagtagacagttcccacagtagaatagctctcctgccaacctcatgtccatattcagctg

SEQ ID NO: 54335 - DNA, 110 bp, synthetic construct
  source 1..110: mol_type = other DNA
ccatacttgttcttcctctgaatactcccaaaaatattaggatacgaaactcccttcttgacccaacatctcccaaaaagtcgtggaactcattgtaggaaataccattt

SEQ ID NO: 54336 - DNA, 110 bp, synthetic construct
  source 1..110: mol_type = other DNA
tcttgacccaacatctcccaaaaagtcgtggaactcattgtaggaaataccattttatttaaaagttcatttcatgtgctttcagcttctactaagtctctaggtattgc

SEQ ID NO: 54337 - DNA, 110 bp, synthetic construct
  source 1..110: mol_type = other DNA
ttttttttttttatgccgtcacttggtttaatttgcagttttctgaatgcttgtgagtgggctcactagcatggactatttttccgtgcttattggccattgaggtttct

SEQ ID NO: 54338 - DNA, 110 bp, synthetic construct
  source 1..110: mol_type = other DNA
agtgggctcactagcatggactatttttccgtgcttattggccattgaggtttcttccacaaatatcttctaaattcattgacaattttctattatgttatttttctgtc

SEQ ID NO: 54339 - DNA, 110 bp, synthetic construct; identical to SEQ ID NO: 54337
  source 1..110: mol_type = other DNA

SEQ ID NO: 54340 - DNA, 110 bp, synthetic construct; identical to SEQ ID NO: 54338
  source 1..110: mol_type = other DNA

SEQ ID NO: 54341 - DNA, 110 bp, synthetic construct
  source 1..110: mol_type = other DNA
cctcttctggtccaggccagagctaggggaggctctgccaaggatgggaccaggccactccttctcctgtgtttcactgcgagaccagtagtctggacaaagtcatgagc

SEQ ID NO: 54342 - DNA, 110 bp, synthetic construct
  source 1..110: mol_type = other DNA
tcaagttgtcctgttctgtgaatgaccgttgccacatcatattaatagttacgcgatgctgatggtcccccagagatggcaggtgtctttccccttctccttttgctgtc

SEQ ID NO: 54343 - DNA, 110 bp, synthetic construct
  source 1..110: mol_type = other DNA
atctggaaaacacaggtctctggctgccttgccatcacctgggctttgagatgaccaccagaagagggcattcttggcaaccgctcagctttcagcagacagcctggaac

SEQ ID NO: 54344 - DNA, 110 bp, synthetic construct
  source 1..110: mol_type = other DNA
caaagagaactcaggggtctcacgcagagctgcaagtgaatcttagcggcttatagcaaagtacatcatgcaaggacttgtgctccattttcatggattacggcctccgc

SEQ ID NO: 54345 - DNA, 110 bp, synthetic construct
  source 1..110: mol_type = other DNA
gttttgagggtctgggtatattattgaaatagtcaatatagaatgaaaattataaagacattaccactgaccttctcgtgttcataatctactgtggctatgtcaactgg

SEQ ID NO: 54346 - DNA, 110 bp, synthetic construct
  source 1..110: mol_type = other DNA
agacattaccactgaccttctcgtgttcataatctactgtggctatgtcaactggctaattagtcggaaaacttaagcacaaaacaattaacctttgactactcttgtca

SEQ ID NO: 54347 - DNA, 110 bp, synthetic construct
  source 1..110: mol_type = other DNA
gtgggtagcgaaagagtggctgtatgtcatgactgaatcataacattcatccatttagagcgtggttatttttaaagtggatttaattttattattccagtttcttaaag

SEQ ID NO: 54348 - DNA, 110 bp, synthetic construct
  source 1..110: mol_type = other DNA
ctgttccctgagcctggccttgacctctcacagctcttgactcacaggtcagctgcagcggctttggcatcccgccttctcctggaggttctgggtcccacagccctggc

SEQ ID NO: 54349 - DNA, 110 bp, synthetic construct
  source 1..110: mol_type = other DNA
gaaacagcaggtaaaacttgaaaacaagaagaaaaaccctgtggcaggagaagtaaaagcaggatctcagctgagaatacataggcttccttccacctcgtgggccaaaa

SEQ ID NO: 54350 - DNA, 110 bp, synthetic construct
  source 1..110: mol_type = other DNA
aaagctggctggaggctgcacgatgggatcaagactaaatcctcctaagaagacaaggcagcatcccggggcccctgtctgtgctgtactcacacagtaacaccctcctc

SEQ ID NO: 54351 - DNA, 110 bp, synthetic construct
  source 1..110: mol_type = other DNA
tttaaaattgagtaaagacttatcagagtattagaatgacctacagaaatgtttttaaggcgatcccactgtggcaaagctggtctgacgttatttctgcagcaagtggg

SEQ ID NO: 54352 - DNA, 110 bp, synthetic construct; identical to SEQ ID NO: 54351
  source 1..110: mol_type = other DNA

SEQ ID NO: 54353 - DNA, 110 bp, synthetic construct
  source 1..110: mol_type = other DNA
actcagttgttggaatgtccagtcaaagttgcctactggctgagctagattttctgaaaatccccaacttacggcatgaggcctgatggcagccctgtgaggttataggg

SEQ ID NO: 54354 - DNA, 110 bp, synthetic construct
  source 1..110: mol_type = other DNA
gaaaatccccaacttacggcatgaggcctgatggcagccctgtgaggttataggggctgggttcccatggagattatatgaagccagtgtagcgggagaggaggagcagg

SEQ ID NO: 54355 - DNA, 110 bp, synthetic construct
  source 1..110: mol_type = other DNA
caccagataaatgaagtttgccattccatccggggcttctcctggaattctccatggcacacaaggaagggattgaggcaaggattgctggattccgatttggccaagga

SEQ ID NO: 54356 - DNA, 110 bp, synthetic construct
  source 1..110: mol_type = other DNA
atcaggagtgggaacaggcggggccgtccctgctcagagcccagaagcctgcatgtgtccagacaggctgcccaccttcctcttcttggtacaacctggtcacaggtcaa

SEQ ID NO: 54357 - DNA, 110 bp, synthetic construct
  source 1..110: mol_type = other DNA
gttccttgctgcctctcagagctcacaggctgaactccgtctactcccggggtggtgctagcttcatccgggttccctttgcacagaggccagtatgttaggtgtgacac

SEQ ID NO: 54358 - DNA, 110 bp, synthetic construct
  source 1..110: mol_type = other DNA
tgctagcttcatccgggttccctttgcacagaggccagtatgttaggtgtgacacgttagcaaagtctagattaacagaattctacctgcccccctcccattatggaaat

SEQ ID NO: 54359 - DNA, 110 bp, synthetic construct
  source 1..110: mol_type = other DNA
tgcttctgtttcgcctcagaagtccttgatccctcacctctctcagcctcggaaggcagcgagtgcttcctgcccccatcccagccaacgtggcccaagaagaggtccgg

SEQ ID NO: 54360 - DNA, 110 bp, synthetic construct
  source 1..110: mol_type = other DNA
gcagcgagtgcttcctgcccccatcccagccaacgtggcccaagaagaggtccggctggtcttcccaccagcaccccctgggctggctgttcccactcatccctctacca

SEQ ID NO: 54361 - DNA, 110 bp, synthetic construct
  source 1..110: mol_type = other DNA
tggtgataaaggggacactggaagttcctttcagagtaagagtcactttctgcatggggtcaaggctgagtgcacattcgccattaggcaatgtgaggatactttctgtg

SEQ ID NO: 54362 - DNA, 110 bp, synthetic construct
  source 1..110: mol_type = other DNA
taggccagtctcatggctatcaggaagcccccacaccatgtccaaagtcactaagccattgaacaaggacaacattcaaatttggtcattccactttaccatgccactgc

SEQ ID NO: 54363 - DNA, 110 bp, synthetic construct
  source 1..110: mol_type = other DNA
ccattgaacaaggacaacattcaaatttggtcattccactttaccatgccactgccggccacatcacgctgcagacagactgaagtggtagccaaagccacccagtgtgc

SEQ ID NO: 54364 - DNA, 110 bp, synthetic construct
  source 1..110: mol_type = other DNA
gactacaaagtaaatattgaccctgtaattttagtccagattcttaaactaaagtgtcttatgtttagggagatgtaaaggccctggattctcatctcttttaatctgag

SEQ ID NO: 54365 - DNA, 110 bp, synthetic construct
  source 1..110: mol_type = other DNA
tctgcaacgttcattaataagagtcccatgaaacatacatcccatccctggagagctgggctagctccccatgtcataaacacaaacaaacaaaaaaatcaaacaaatta

SEQ ID NO: 54366 - DNA, 110 bp, synthetic construct
  source 1..110: mol_type = other DNA
ctgggctagctccccatgtcataaacacaaacaaacaaaaaaatcaaacaaattattcactaccatgaaagcctgcctctccagccacaagcagcctcagtgcctcctga

SEQ ID NO: 54367 - DNA, 110 bp, synthetic construct
  source 1..110: mol_type = other DNA
ctccgcagtgacccaggctgctgctgtcagtttctgaacacactgtgccacagcgggaaccctcacacttttaaaagactatgagtaaataggtgcaattaatgaatgac

SEQ ID NO: 54368 - DNA, 110 bp, synthetic construct
  source 1..110: mol_type = other DNA
tattgaatatcctgtgataaatcatagcataaaaaagtataaaggagttcccactgtgacacagtaggtaaaagatccatgttgtctctgtggcagcgcaggttcaatcc

SEQ ID NO: 54369 - DNA, 110 bp, synthetic construct; identical to SEQ ID NO: 54368
  source 1..110: mol_type = other DNA

SEQ ID NO: 54370 - DNA, 110 bp, synthetic construct
  source 1..110: mol_type = other DNA
caaggtccaaagagattgtaccagctctggttaccctcatgtaatttgtatttaacaggttttggaagatacacgttatgttctgtggtttgggattgtgacgtttcccc

SEQ ID NO: 54371 - DNA, 110 bp, synthetic construct
  source 1..110: mol_type = other DNA
tcttttctccggttgtctcagttcctgatgcggctttgcccacggtcagcccatgaggtgaaaatcagcaaggttagagactcaggcatttaggaaacagacaggaagaa

SEQ ID NO: 54372 - DNA, 110 bp, synthetic construct
  source 1..110: mol_type = other DNA
ttacacaggaaagaagcaaagctgctaggattttatgaagcatcaatttgtcatgctcagggaaggtggaagagaaatgcagcagcaacacctacgaaaagaacagatct

SEQ ID NO: 54373 - DNA, 110 bp, synthetic construct
  source 1..110: mol_type = other DNA
tagaaataaaatatggcggacctatcaaacagctatgaacaagagaagagctaaaaagtcaccagagagaaaagacaggaaggactgaattacaacagtcttcttgtcat

SEQ ID NO: 54374 - DNA, 110 bp, synthetic construct
  source 1..110: mol_type = other DNA
tagtaagtgaatatgagtaataacagccaccaaatgccacggtaacatcttaagggagtagcacaataagattttttcaattgtcatcaatattagaaaaagattttttc

SEQ ID NO: 54375 - DNA, 110 bp, synthetic construct
  source 1..110: mol_type = other DNA
agtaataacagccaccaaatgccacggtaacatcttaagggagtagcacaataagattttttcaattgtcatcaatattagaaaaagattttttcaactcaagtcaatta

SEQ ID NO: 54376 - DNA, 110 bp, synthetic construct
  source 1..110: mol_type = other DNA
ggcactgtgattattcccgcttttacaaataaggaaaccgaggtacagccagcttaagggattgagccaagatccccagctccgaagtgctggaaccaagctctaagctc

SEQ ID NO: 54377 - DNA, 110 bp, synthetic construct
  source 1..110: mol_type = other DNA
aagggattgagccaagatccccagctccgaagtgctggaaccaagctctaagctcaggcagcctgcaccctgaccgtctgatcttagtgactatgctgtgccgttgcttc

SEQ ID NO: 54378 - DNA, 110 bp, synthetic construct; identical to SEQ ID NO: 54376
  source 1..110: mol_type = other DNA

SEQ ID NO: 54379 - DNA, 110 bp, synthetic construct; identical to SEQ ID NO: 54377
  source 1..110: mol_type = other DNA

SEQ ID NO: 54380 - DNA, 110 bp, synthetic construct
  source 1..110: mol_type = other DNA
gagctttgtcatcccagtttcaggaagcccacagctgagctggtgccaagcactgaaaggccggttgcactgcacggtcagtgccagggctcgagatgctggcacatcgg

SEQ ID NO: 54381 - DNA, 110 bp, synthetic construct
  source 1..110: mol_type = other DNA
cggggaagcatcagagagacagaagaaaaacatcaccaagatgacgggcaccttggcccccagcccgctctaccagggacaccccccccaatgctgctcagtgcccccca

SEQ ID NO: 54382 - DNA, 110 bp, synthetic construct
  source 1..110: mol_type = other DNA
catctcatttagtcccgagcatgaagtcacaaagtacgtgcagacggggacaccgaagctcagaaaagtgaagtgacttgccagggtgggcagaagcccagacgccaccc

SEQ ID NO: 54383 - DNA, 110 bp, synthetic construct
  source 1..110: mol_type = other DNA
cctcaccagaacacaaaacctgagccacagcatgatctcaacaaaacaaacacataaaagaaaatatcttatgatttgtttttggctgtgcctgtggcatgtggaagttc

SEQ ID NO: 54384 - DNA, 110 bp, synthetic construct
  source 1..110: mol_type = other DNA
tccccaggctcacagagtccaccaagggcggggccagcacggcgagttcaagctgctctactgcaggactctcgggtgattctccttctttcatcagctcagtctccatc

SEQ ID NO: 54385 - DNA, 110 bp, synthetic construct
  source 1..110: mol_type = other DNA
agccgagatgtctaaatttggtgtcctgagtttgggtcctgacatttctcaactgtgaagctgcgggataatgtttcacagcaggtgggagatcctaatgcaggtagcgc

SEQ ID NO: 54386 - DNA, 110 bp, synthetic construct
  source 1..110: mol_type = other DNA
gccataaccccatcattcaggcattttctgtatcaggaattgaagtgagtattttacacactggataaaggaaatattatgctcactttacaggcgagaaagctcaagtt

SEQ ID NO: 54387 - DNA, 110 bp, synthetic construct
  source 1..110: mol_type = other DNA
acacactggataaaggaaatattatgctcactttacaggcgagaaagctcaagtttagaggagttagtaagcttaggcaacgtgattagacagctggtggcaaaacctca

SEQ ID NO: 54388 - DNA, 110 bp, synthetic construct
  source 1..110: mol_type = other DNA
caggggcccacccgccaggggccggcgtgtctcccttcccagagtcagcagataaatgcagctgttcgtgtgagctcgtcagtctcgccagactcctctcttcttagact

SEQ ID NO: 54389 - DNA, 110 bp, synthetic construct
  source 1..110: mol_type = other DNA
tgatgtccccccagcagacaggccactggccagtggggtgtttgctcagctgcaccaggcgatattccaaaaaggtgcatgtgacccggcgtggcacatcaccccctgcc

SEQ ID NO: 54390 - DNA, 110 bp, synthetic construct
  source 1..110: mol_type = other DNA
accccacatggctgctatgggcacagaaggagctctgcaaagccagtgacacttcctgggtgagggatcagcaaaggacaagtctggtctcctgcggcgtatccctctgc

SEQ ID NO: 54391 - DNA, 110 bp, synthetic construct
  source 1..110: mol_type = other DNA
aggagagccaggctcagggacagacgcccctctccccaagtccagagctggacatgcgaccagctgaataagtggagttagtggcctaggaccttgggggagtctctttg

SEQ ID NO: 54392 - DNA, 110 bp, synthetic construct
  source 1..110: mol_type = other DNA
ccaggtcctcatgccatgtaggcagttggtaaatgttggatttatccctctgtctgctgggtgcgttgcttttccagtaggctgggagttcccgggcctctgtaactttg

SEQ ID NO: 54393 - DNA, 110 bp, synthetic construct
  source 1..110: mol_type = other DNA
gctgggtgcgttgcttttccagtaggctgggagttcccgggcctctgtaactttgctttatcgatacctgttgccaccctgcaatacagttcatcctgggaacccagccc

SEQ ID NO: 54394 - DNA, 110 bp, synthetic construct
  source 1..110: mol_type = other DNA
ttcgttctagcatccatctttcagattacactttcaaaggttctcgcataaagaatcacgctgcatgtcacttacttgggaagatgctgcagctccagtgcacaaacatc

SEQ ID NO: 54395 - DNA, 110 bp, synthetic construct
  source 1..110: mol_type = other DNA
tcacgctgcatgtcacttacttgggaagatgctgcagctccagtgcacaaacatcctttccaagtgcgttacaggcactagagaactagcccgtcaatttgtattgtttg

SEQ ID NO: 54396 - DNA, 110 bp, synthetic construct
  source 1..110: mol_type = other DNA
catcacacagagcgtctcaaggataactatgtgaatccatcctctttatatcctgcagctaatttcatgcatgcttcaccagagaaacccatgaaaccatttattcaccc

SEQ ID NO: 54397 - DNA, 110 bp, synthetic construct
  source 1..110: mol_type = other DNA
ctgccctccagatggggagagacagaacaacagagaagataaagccggcagggcatcaggagcagggccgcagcttggagactcagaggacagacccagccaggcactgg

SEQ ID NO: 54398 - DNA, 110 bp, synthetic construct
  source 1..110: mol_type = other DNA
cactagatgcttaacccactgccccactcaaagcactggggattttaaaatgctttttctttctaccctttcaaaattttaggaactgccccagtcttgagcttcacgtt

SEQ ID NO: 54399 - DNA, 110 bp, synthetic construct
  source 1..110: mol_type = other DNA
tttctttctaccctttcaaaattttaggaactgccccagtcttgagcttcacgttcgactcagctaacgcttccacgcgaagcgcctccagtgtgccaggagggagagca

SEQ ID NO: 54400 - DNA, 110 bp, synthetic construct
  source 1..110: mol_type = other DNA
cctgccctgtgcctaggaatgtgccctgcctcgtgaaggcctagaaaggactgggaaaaaaagggtccctgccggtgtgctccccccaaagtcgaaacaggagagctcag

SEQ ID NO: 54401 - DNA, 110 bp, synthetic construct
  source 1..110: mol_type = other DNA
aaaaaaagggtccctgccggtgtgctccccccaaagtcgaaacaggagagctcagagctggtggccccagatcgtgatgggcttctcctgagctctgcaaacacagcaag

SEQ ID NO: 54402 - DNA, 110 bp, synthetic construct
  source 1..110: mol_type = other DNA
tggtagcattaattaaagtaggaactattagaggaaaagctaggactagagattgtgaaagagtaattcctcccggccagcgtgtggatacctcctagggcggcggtacc

SEQ ID NO: 54403 - DNA, 110 bp, synthetic construct
  source 1..110: mol_type = other DNA
ccacttagggcagctttttcttttcctctgtgtgaagtttccctctaaacacaggctccccctgaaacagctaagtttagaccgcaggtataaatggcaggtcgcatctc

SEQ ID NO: 54404 - DNA, 110 bp, synthetic construct
  source 1..110: mol_type = other DNA
ctccccctgaaacagctaagtttagaccgcaggtataaatggcaggtcgcatctcagtggcagaaggagacaagaaatacggccaccagacagcagggtacacgcgctgc

SEQ ID NO: 54405 - DNA, 110 bp, synthetic construct
  source 1..110: mol_type = other DNA
gtcctggagtgccgtgtcctacactgagccccttctcacccaagactgctttttttttttctttttccggctgcacctgcagcttatggacatttccaggctaggagtgg

SEQ ID NO: 54406 - DNA, 110 bp, synthetic construct
  source 1..110: mol_type = other DNA
tttttctttttccggctgcacctgcagcttatggacatttccaggctaggagtggaattggagcttcagctgccgcccatgccacagccatcgcaacagaatgcccaatc

SEQ ID NO: 54407 - DNA, 110 bp, synthetic construct
  source 1..110: mol_type = other DNA
aaaaaaaaaagcaaaaaaaaaaaaaaaaaaagataatacaacacagcccagctgggttaatcccaagagtgcaaggagattcgttcagtattgaaaaactcagcatcact

SEQ ID NO: 54408 - DNA, 110 bp, synthetic construct
  source 1..110: mol_type = other DNA
gttaatcccaagagtgcaaggagattcgttcagtattgaaaaactcagcatcactctattattattgtattaatattatgttaacctttaaaaaaagagagagaagtcgt

SEQ ID NO: 54409 - DNA, 110 bp, synthetic construct
  source 1..110: mol_type = other DNA
tccactttttaaccctgcctctggacctgtagtatgcgctcaacctttccattaagttccttattagcttttttttgactgtgaacgtttcaagtctctttgttttgcct

SEQ ID NO: 54410 - DNA, 110 bp, synthetic construct
  source 1..110: mol_type = other DNA
tgaaggagcagccacgctgtgtagcactggcctgcgctgacgctggccactaatgacttcagacggccttcttctcacccggcttattccgcggggcatggatataccag

SEQ ID NO: 54411 - DNA, 110 bp, synthetic construct
  source 1..110: mol_type = other DNA
aatgaggcggtgccgagcggtccactcatcatgctgttttcagagaggagatgaaaggtggacatctctctttgccctccacatgtcctttctacatcaagcacatttct

SEQ ID NO: 54412 - DNA, 110 bp, synthetic construct
  source 1..110: mol_type = other DNA
aggtggacatctctctttgccctccacatgtcctttctacatcaagcacatttctcagtttttaattacaggctttcatttaatttttttttaaaaaagctctggttatc

SEQ ID NO: 54413 - DNA, 110 bp, synthetic construct
  source 1..110: mol_type = other DNA
atacttttagaaaaacattcatcttaaacgtgcagaatggtgttttttatttttgtctttttagggccacatgcgtgacatatggaggttcccagactaggggtcaaatc

SEQ ID NO: 54414 - DNA, 110 bp, synthetic construct; identical to SEQ ID NO: 54413
  source 1..110: mol_type = other DNA

SEQ ID NO: 54415 - DNA, 110 bp, synthetic construct
  source 1..110: mol_type = other DNA
gcggtgtccaaggagacatggacccctgcccagggaccagaatgctgcccaccctgtttggccatcgacacacctgggtcttcctccttcaggctggtcctattatctca

SEQ ID NO: 54416 - DNA, 110 bp, synthetic construct
  source 1..110: mol_type = other DNA
atggtgcggcccctcaccccttcggctgcagggtgactgggcctgctgttacccctccggttcccccgcgccctgcccacgtctctgtaaatagccctggattaaactct

SEQ ID NO: 54417 - DNA, 110 bp, synthetic construct
  source 1..110: mol_type = other DNA
agccaaacctgttagcctaaaaattcctgacacataaactcactcaaatcattttccggctaaaatgaaaggccttagaatagtagaaaattttgatcatgtcacccctc

SEQ ID NO: 54418 - DNA, 110 bp, synthetic construct
  source 1..110: mol_type = other DNA
ccggctaaaatgaaaggccttagaatagtagaaaattttgatcatgtcacccctccaagtcgggaaattacatatatttttttaacatgtacacattagataaactcact

SEQ ID NO: 54419 - DNA, 110 bp, synthetic construct
  source 1..110: mol_type = other DNA
gaataacgacgtgtaagtggacgatgaccaatgaggcatgtctgcaaggaaacaaggattgctattaaatacactatttcctgggggagttccccttgtggctcagtgga

SEQ ID NO: 54420 - DNA, 110 bp, synthetic construct
  source 1..110: mol_type = other DNA
agtggacgatgaccaatgaggcatgtctgcaaggaaacaaggattgctattaaatacactatttcctgggggagttccccttgtggctcagtggaaacgaatccgactag

SEQ ID NO: 54421 - DNA, 110 bp, synthetic construct
  source 1..110: mol_type = other DNA
tttgtgcctcttcatccccagccctgcattgccctccactttcctctcccaactggtaaccactagcttgttctctatgtctgtgagtctgcttctttgtttgtttgttt

SEQ ID NO: 54422 - DNA, 110 bp, synthetic construct
  source 1..110: mol_type = other DNA
ccccagccctgcattgccctccactttcctctcccaactggtaaccactagcttgttctctatgtctgtgagtctgcttctttgtttgtttgttttattcactagtttat

SEQ ID NO: 54423 - DNA, 110 bp, synthetic construct
  source 1..110: mol_type = other DNA
cgctagcccgggaacgtccatatgctgcaggtacggccctaaaaagacaacagcaacaaaaaagattatgtaggcccttacctataataagggtagagggtctgtagctg

SEQ ID NO: 54424 - DNA, 110 bp, synthetic construct
  source 1..110: mol_type = other DNA
acaaaaaagattatgtaggcccttacctataataagggtagagggtctgtagctggacaggagcagttgtcatggttcttatttttgaacgatgcgctcaaacgtgttca

SEQ ID NO: 54425 - DNA, 110 bp, synthetic construct
  source 1..110: mol_type = other DNA
ttcagtttcagttggggaggaacattcgagaacatcggaatcaagagaaacttcctgcctcagggagaaggtggtttccttctaccatttggatcgaggctgcgccctct

SEQ ID NO: 54426 - DNA, 110 bp, synthetic construct
  source 1..110: mol_type = other DNA
acaccgttggactagaaagctctcatcaaggccgggcccggaaagagaggtaagtgttggcgctgtttggcaacccgcaatcggtaacctctccggcggactccgcagga

SEQ ID NO: 54427 - DNA, 110 bp, synthetic construct
  source 1..110: mol_type = other DNA
gttggcgctgtttggcaacccgcaatcggtaacctctccggcggactccgcaggaaaacgtccgagctggttcctcctggtctctgctccaagtttgtgtgggagttgga

SEQ ID NO: 54428 - DNA, 110 bp, synthetic construct
  source 1..110: mol_type = other DNA
cgaacccgcaacctcatggttcctagttgggtttgtttgcactgagccacaatgggaatgccaagagtacagcatctttaaaaatttttttttgaatttttggctgaggc

SEQ ID NO: 54429 - DNA, 110 bp, synthetic construct; identical to SEQ ID NO: 54428
  source 1..110: mol_type = other DNA

SEQ ID NO: 54430 - DNA, 110 bp, synthetic construct
  source 1..110: mol_type = other DNA
ggcgggaggggaaacgtgcgcgtacggcttaaaacccacatgcacaagcaggacaggcggatgtgttagagccgtgccccacaagtcacatctgtccaaaggaattagcc

SEQ ID NO: 54431 - DNA, 110 bp, synthetic construct
  source 1..110: mol_type = other DNA
ggcggatgtgttagagccgtgccccacaagtcacatctgtccaaaggaattagccgtccgacaggtcacccagtcctacgtctctgtgtgtctcgagagacggattctgg

SEQ ID NO: 54432 - DNA, 110 bp, synthetic construct
  source 1..110: mol_type = other DNA
ttttaatgctattactactgtgtaaaatactacacacactaatgactaccaaagcagaaatcttgtcatatttgtcctactcagtaaaaatcatcagcacactactgact

SEQ ID NO: 54433 - DNA, 110 bp, synthetic construct
  source 1..110: mol_type = other DNA
cacatgggaacttcaaagatacatttttttcccttctctttggggctgcacctgggggttatggaaagttcccaggctagggattgaatcagaactgcagctgcgggtct

SEQ ID NO: 54434 - DNA, 110 bp, synthetic construct
  source 1..110: mol_type = other DNA
gggttatggaaagttcccaggctagggattgaatcagaactgcagctgcgggtctgtgccacagccacagcagtgtgggggattcgagccgcatctgtgacctgcgctac

SEQ ID NO: 54435 - DNA, 110 bp, synthetic construct
  source 1..110: mol_type = other DNA
gattttccacgtctgggaaggggcgtgtcggcttcatgtagaacttcggggtggcccgctcctccttcgcatctgccattgcttgattcgcggatttggggacagcgtta

SEQ ID NO: 54436 - DNA, 110 bp, synthetic construct
  source 1..110: mol_type = other DNA
ttggcggtccttcccgagaacagggagtttcccgtttgttccagtctgctttgtctctcaggattgctttaagttttctcccctaagtttttcgcatttactcttaagct

SEQ ID NO: 54437 - DNA, 110 bp, synthetic construct
  source 1..110: mol_type = other DNA
tctcaggattgctttaagttttctcccctaagtttttcgcatttactcttaagcttagtctaagttcttaatcctccttggttttcatttcagcggattttgcttccgtt

SEQ ID NO: 54438 - DNA, 110 bp, synthetic construct
  source 1..110: mol_type = other DNA
cccggaagctggaagacaacgggccaaagctccctgttctggagtgaaatgctgctaagccagaattccacactcagccacactattcctcaggagtgagggtagaacac

SEQ ID NO: 54439 - DNA, 110 bp, synthetic construct
  source 1..110: mol_type = other DNA
gacacggggagggtgagggatggtgaaggtgaggtcttaggatcacaacgggcttgaagggaggctgagctggacaccaggaaaggctgatggagagcacacgcctggct

SEQ ID NO: 54440 - DNA, 110 bp, synthetic construct
  source 1..110: mol_type = other DNA
gaagggaggctgagctggacaccaggaaaggctgatggagagcacacgcctggctctgagattgaagagggcccaggtactaggaaaggggaggtctctagggcgtgacc

SEQ ID NO: 54441 - DNA, 110 bp, synthetic construct
  source 1..110: mol_type = other DNA
aaaacggctttctttcccctctgccttcgtatgtgggtataatgtaccaccagggaatagtgtaccaagcaggcttccttataacgctgtagagcttagacagcgaggtg

SEQ ID NO: 54442 - DNA, 110 bp, synthetic construct
  source 1..110: mol_type = other DNA
aatagtgtaccaagcaggcttccttataacgctgtagagcttagacagcgaggtgaggataagtggcctagaaacgctgatgaaaatggaagcacggctttctgcctaga

SEQ ID NO: 54443 - DNA, 110 bp, synthetic construct
  source 1..110: mol_type = other DNA
atgataaacccaaggaacagcaaaagggtaaacatgaaaatgttaaaaaggacatcagagtcttaagatgggggcgttcccgctgtggctcagtggtagtgaacctgacc

SEQ ID NO: 54444 - DNA, 110 bp, synthetic construct
  source 1..110: mol_type = other DNA
gaaaatgttaaaaaggacatcagagtcttaagatgggggcgttcccgctgtggctcagtggtagtgaacctgaccagcagccatgaggatgcaggttcagtcctggcctg

SEQ ID NO: 54445 - DNA, 110 bp, synthetic construct
  source 1..110: mol_type = other DNA
ggtcaggaaggtgccccggcacttggtggtgcttttaagcccaagggtcatgcacctgtgctgagagccgcccggattctcactgacaccccttttcttctgtgtggatc

SEQ ID NO: 54446 - DNA, 110 bp, synthetic construct
  source 1..110: mol_type = other DNA
ggaacttccatatgctgaaggcgcggccctaaaaaagaaaaacaaataccttctgtcttgttcctgcctcttttgtcgggatcctccatatgtgcagcccagccacactg

SEQ ID NO: 54447 - DNA, 110 bp, synthetic construct; identical to SEQ ID NO: 54446
  source 1..110: mol_type = other DNA

SEQ ID NO: 54448 - DNA, 110 bp, synthetic construct
  source 1..110: mol_type = other DNA
cttaacctgctggaccacagcgggagctctgggatcatccccttgctgttccaacatgaggccgtgtcccttgcacggctgcatgtgggatgcgcagactgagaagatgc

SEQ ID NO: 54449 - DNA, 110 bp, synthetic construct
  source 1..110: mol_type = other DNA
atgaggccgtgtcccttgcacggctgcatgtgggatgcgcagactgagaagatgcagtacctttgcttttagtctcttacccctccttcttgcctctcccttctgataga

SEQ ID NO: 54450 - DNA, 110 bp, synthetic construct
  source 1..110: mol_type = other DNA
aagttccgagcccccccgcctgagccgtctgttgaaaggccgcagaaggtgggaagggccacgcttctctcagaaacaagcctgggatgctcatgagggaggttgccatg

SEQ ID NO: 54451 - DNA, 110 bp, synthetic construct
  source 1..110: mol_type = other DNA
gggccacgcttctctcagaaacaagcctgggatgctcatgagggaggttgccatggaaactgcgagatgcagttggaaccctgactcctgccactttccacgggaccccg

SEQ ID NO: 54452 - DNA, 110 bp, synthetic construct
  source 1..110: mol_type = other DNA
ctttctagctgggtgggctggggtggacctgtctgcttctgcctggcctcagcccccaagtgatgatcctgctgaaaatgccgggatggttacctgggaagtcgccttga

SEQ ID NO: 54453 - DNA, 110 bp, synthetic construct
  source 1..110: mol_type = other DNA
tccaccctctgcacgtgactagctgagggccttggggacccctgagtcagcgtttctccctcttcagggcaggcaccaggaaacatttctgaaagtctgtttttacagca

SEQ ID NO: 54454 - DNA, 110 bp, synthetic construct
  source 1..110: mol_type = other DNA
ctccctcttcagggcaggcaccaggaaacatttctgaaagtctgtttttacagcaatttacacaattgctttctagtcccaaatttggggaggatgccacaggcgttgag

SEQ ID NO: 54455 - DNA, 110 bp, synthetic construct
  source 1..110: mol_type = other DNA
gtccctgccacgcagagcccccttccccgcctccagcctgggcactccccgagggcaggggttggcgccccgggagcattgatctcttcctggggtgacaaaaggcccag

SEQ ID NO: 54456 - DNA, 110 bp, synthetic construct
  source 1..110: mol_type = other DNA
caggggttggcgccccgggagcattgatctcttcctggggtgacaaaaggcccagtcagcctcgggtctgtctttgcacctgccgtggctggagaaagttcttccctaga

SEQ ID NO: 54457 - DNA, 110 bp, synthetic construct; identical to SEQ ID NO: 54455
  source 1..110: mol_type = other DNA

SEQ ID NO: 54458 - DNA, 110 bp, synthetic construct; identical to SEQ ID NO: 54456
  source 1..110: mol_type = other DNA

SEQ ID NO: 54459 - DNA, 110 bp, synthetic construct
  source 1..110: mol_type = other DNA
tgagatgcggaaggcagtgccaggcagcccaggccctcgggcaggtgggccccggcccattctccattctccagctctagaaaggtcgtgcaagctgagcctccaggcaa

SEQ ID NO: 54460 - DNA, 110 bp, synthetic construct
  source 1..110: mol_type = other DNA
tcgccagggcggaccggtcaccccttttgaattgttgttgacagcctcgtgtgacagactcatttgtcaccatggcccctgcgcatcccagcctgcctctggggctgttt

SEQ ID NO: 54461 - DNA, 110 bp, synthetic construct
  source 1..110: mol_type = other DNA
agactcatttgtcaccatggcccctgcgcatcccagcctgcctctggggctgtttaaccttaagacctgggatgtccttgccacggcatccagaccaggaaggcggctaa

SEQ ID NO: 54462 - DNA, 110 bp, synthetic construct
  source 1..110: mol_type = other DNA
tggggctcagaactgtacctcaggttaaccacgtgtgattacaggggggctggctgcacccccatgctggtggtcggggaaccgaacacccagcttttattccttccctc

SEQ ID NO: 54463 - DNA, 110 bp, synthetic construct
  source 1..110: mol_type = other DNA
gcacccccatgctggtggtcggggaaccgaacacccagcttttattccttccctccgactacagcttccctgctcttgccgtcagagagaaagagcgccagggggtacgt

SEQ ID NO: 54464 - DNA, 110 bp, synthetic construct
  source 1..110: mol_type = other DNA
tcacccccctcccacgtccctggtccaccgatctttttacagtctctctgattctggcctttttcagaatgtcatagagttggaatcataacctgtggctgtttcagggc

SEQ ID NO: 54465 - DNA, 110 bp, synthetic construct
  source 1..110: mol_type = other DNA
attggttttgaagattctgcattcattcatttatttattcaacaatttatgagtgtctaccctatgtcagcaccaagaccacatttgatgctagggttctgaggtggcag

SEQ ID NO: 54466 - DNA, 110 bp, synthetic construct
  source 1..110: mol_type = other DNA
tctaccctatgtcagcaccaagaccacatttgatgctagggttctgaggtggcagagagaacacggcagaaagcttttttttttttttttttgaaatgcaataggtgtca

SEQ ID NO: 54467 - DNA, 110 bp, synthetic construct
  source 1..110: mol_type = other DNA
agagtgctggatctttgaggtggccagactgatgtctccaaacctacgtctacgtcccaatcccggaagctgtaacgtgaacatctttggcaaaagtccctgcagacggg

SEQ ID NO: 54468 - DNA, 110 bp, synthetic construct
  source 1..110: mol_type = other DNA
cccaatcccggaagctgtaacgtgaacatctttggcaaaagtccctgcagacgggtttagttaaggaccttacctgggctgggggggtgcatcctggattatggaggtgg

SEQ ID NO: 54469 - DNA, 110 bp, synthetic construct
  source 1..110: mol_type = other DNA
tcttgcgatgctgcagcctgcatcacagtgtggaagccactcatgttatgagtagtacaaatgcagcctgcgccggactagacggaactgagcccgaaggatggcgggct

SEQ ID NO: 54470 - DNA, 110 bp, synthetic construct
  source 1..110: mol_type = other DNA
tacaaatgcagcctgcgccggactagacggaactgagcccgaaggatggcgggctctccccttggacaaggagccccgctcggcagcctgacagggaagacaaagcctcg

SEQ ID NO: 54471 - DNA, 110 bp, synthetic construct
  source 1..110: mol_type = other DNA
ggcttcactggcttcagaacaagaaaggctgttcccacggccgcctcctgcccccccagcgcaccctcaccttctcatcaggcgtgggagaaaacatcttctcctcctgg

SEQ ID NO: 54472 - DNA, 110 bp, synthetic construct
  source 1..110: mol_type = other DNA
ccagcgcaccctcaccttctcatcaggcgtgggagaaaacatcttctcctcctggggatgcttggagaagtcgaaggggtaggacaccaccaggtcgcccccgtggaggc

SEQ ID NO: 54473 - DNA, 110 bp, synthetic construct
  source 1..110: mol_type = other DNA
tgggcgacggaccccggtgccacccacgggccgctgttggaaagagggaacgtgcatcgagcttcatcaccttagaaacagacgcacacaggccatcgccctgttgaaaa

SEQ ID NO: 54474 - DNA, 110 bp, synthetic construct
  source 1..110: mol_type = other DNA
atcgagcttcatcaccttagaaacagacgcacacaggccatcgccctgttgaaaagatggcgaggcatgactggtgactcataccctcaggacagtggttcgatggggag

SEQ ID NO: 54475 - DNA, 110 bp, synthetic construct
  source 1..110: mol_type = other DNA
ctggacctggggacacttcactgggcgtcggcaggtctgcagctgtcctgcctggggaaggaagcgccctgtgacgggtgtcgcaggaggggcgcccacagcagagggtg

SEQ ID NO: 54476 - DNA, 110 bp, synthetic construct
  source 1..110: mol_type = other DNA
ggaaggaagcgccctgtgacgggtgtcgcaggaggggcgcccacagcagagggtgggccgggggatattctgcgtccccagctgcctgggatccctcctgcaacctgagc

SEQ ID NO: 54477 - DNA, 110 bp, synthetic construct
  source 1..110: mol_type = other DNA
tgggtggcctggctccccctgctcctaataagaccaaatagggttctggccctgagggcctcacctgggccgctgcccaccccgtccacacaggggcccaaaggttaaga

SEQ ID NO: 54478 - DNA, 110 bp, synthetic construct
  source 1..110: mol_type = other DNA
gggcctcacctgggccgctgcccaccccgtccacacaggggcccaaaggttaagaaagacaacaaagaaacactttaactttgggaaagtcacgttgttcatgtctttgt

SEQ ID NO: 54479 - DNA, 110 bp, synthetic construct
  source 1..110: mol_type = other DNA
ttttatagaagggaaaactgaggcccaagaaggggaggtggttgctgagacgctggctaattgataacaaaacctctaccactcattggcacaaattgtgtctaatcctc

SEQ ID NO: 54480 - DNA, 110 bp, synthetic construct
  source 1..110: mol_type = other DNA
gctaattgataacaaaacctctaccactcattggcacaaattgtgtctaatcctcaccgcatcctccagatgccctcccattgacatgcccactttgcggatgaaaaaaa

SEQ ID NO: 54481 - DNA, 110 bp, synthetic construct
  source 1..110: mol_type = other DNA
aaactgattgactcacacacacaatgatgagacttgtcaaagggacacaggggctgactgaagagctcccgatggccaaatcgcagaaaatctgagcaataaaataaagc

SEQ ID NO: 54482 - DNA, 110 bp, synthetic construct
  source 1..110: mol_type = other DNA
gactgaagagctcccgatggccaaatcgcagaaaatctgagcaataaaataaagccttattggattgtaacctcagatataaaatagccccaagttcacagtgattgaag

SEQ ID NO: 54483 - DNA, 110 bp, synthetic construct
  source 1..110: mol_type = other DNA
gacgccggtggcccctggtcaagagaggcctggctgtcatggcaggctgggcagtcctgcagacacccctgtcacgtgtcagcgaagcccagggcagaatcgaagagact

SEQ ID NO: 54484 - DNA, 110 bp, synthetic construct; identical to SEQ ID NO: 54483
  source 1..110: mol_type = other DNA

SEQ ID NO: 54485 - DNA, 110 bp, synthetic construct
  source 1..110: mol_type = other DNA
gctgggagagaagacatttctgttcctgaagccactcggggggtggtcctttgtcccagcagccacgggaaactcatccagttgggaactgggaaggaaagaagccgctt

SEQ ID NO: 54486 - DNA, 110 bp, synthetic construct
  source 1..110: mol_type = other DNA
ccagcagccacgggaaactcatccagttgggaactgggaaggaaagaagccgcttcccgagtgcgcgtcctgtaccaggcgaggagcctgggctttctcgcgtatcctct

SEQ ID NO: 54487 - DNA, 110 bp, synthetic construct
  source 1..110: mol_type = other DNA
ggtaaatggatgaatgaaccacaaagaagacctttgttgatcggtgtttggagttggcgtgctttggctttcagggtgaagcggaggtgacttgcagtggcttcccacct

SEQ ID NO: 54488 - DNA, 110 bp, synthetic construct
  source 1..110: mol_type = other DNA
ggcgtgctttggctttcagggtgaagcggaggtgacttgcagtggcttcccacctttcaggcgccgtgaaggtcagggcggttgctccggggcaggagaaggggctccct

SEQ ID NO: 54489 - DNA, 110 bp, synthetic construct
  source 1..110: mol_type = other DNA
gagctcccaaggtctgcgctcccagacaatccttttaaatacagtggtcccctcccctttgtcttttaaagtcagcttttaaaagcagcgatctgatggctttgcaacca

SEQ ID NO: 54490 - DNA, 110 bp, synthetic construct
  source 1..110: mol_type = other DNA
cctttgtcttttaaagtcagcttttaaaagcagcgatctgatggctttgcaaccattaacggagcaagcgtgtctgtagggagagtagaggaaattaaaccaggcagatc

SEQ ID NO: 54491 - DNA, 110 bp, synthetic construct
  source 1..110: mol_type = other DNA
gagccccagccccccttctggaaatggggtgagcgtctcctgcagccaggctgcgaggttaaaggagagggtgaggtggaagaatgggtgggggccgggccctgtgggag

SEQ ID NO: 54492 - DNA, 110 bp, synthetic construct
  source 1..110: mol_type = other DNA
ttgaacattggaaaaaattactaaacaacctgtgaccgtggacaagttattcaacctttctctgtctcagcttcctcccctgtaacatgcggatgaactggtcctggcgt

SEQ ID NO: 54493 - DNA, 110 bp, synthetic construct
  source 1..110: mol_type = other DNA
agaactgtaaatatattttcactgtgttcctcgatgtatttaatccataaagtaagaaaattttatccgaagaaactcgcattggcaatacgagttttcagtccatttgc

SEQ ID NO: 54494 - DNA, 110 bp, synthetic construct
  source 1..110: mol_type = other DNA
cagcacctggggaagtggcctggagaaaaacaggactgaagctgaatccgtcccggtggccttttgagtgggaggcagatcttcgagtccttgggaggagtgggtagagg

SEQ ID NO: 54495 - DNA, 110 bp, synthetic construct
  source 1..110: mol_type = other DNA
ggcatttaattttcctaagccccagtttcctcgtccgtaaaatgggacactgccaagacgagaaatcctatgtggaaagccacttatgggtgcctgtcccccggaggcac

SEQ ID NO: 54496 - DNA, 110 bp, synthetic construct
  source 1..110: mol_type = other DNA
agacgagaaatcctatgtggaaagccacttatgggtgcctgtcccccggaggcacttgggacagagcagcctgtcaccaggggctggggtggggggtgacaggaggggtg

SEQ ID NO: 54497 - DNA, 110 bp, synthetic construct
  source 1..110: mol_type = other DNA
ccagggctgccctcgggtggccccgcaaggccgccctaacaagctcatgtgttgttttaagcatctcacaacattaagggtccgagcctcagaaagaacacagggctttg

SEQ ID NO: 54498 - DNA, 110 bp, synthetic construct
  source 1..110: mol_type = other DNA
tttaagcatctcacaacattaagggtccgagcctcagaaagaacacagggctttggcaattcccccgccagcccacaatagggagcaccttggaagcaccgccggaaccg

SEQ ID NO: 54499 - DNA, 110 bp, synthetic construct
  source 1..110: mol_type = other DNA
caaattagaatccgcgcggagcctcttatacacgcctgtgtgagtcacaatgagcagaaacagctcccctggccgctgcttcgctctccggatgaacgcgtcctgctggg

SEQ ID NO: 54500 - DNA, 110 bp, synthetic construct
  source 1..110: mol_type = other DNA
tttacatttttgtccgaccattcggagaaagaccgtgctcggcccaacttcatgaggctggactttcagcggcggacgctgatggtcgtgatgcttctgagccaagtgtt

SEQ ID NO: 54501 - DNA, 110 bp, synthetic construct
  source 1..110: mol_type = other DNA
ggctggactttcagcggcggacgctgatggtcgtgatgcttctgagccaagtgtttgcacaagtgaaggaaacaccatggacagagaacttctcccacgcgcttcctggc

SEQ ID NO: 54502 - DNA, 110 bp, synthetic construct
  source 1..110: mol_type = other DNA
cgagccagatggtctggcttcaaatcctgctctgccatttcccagctgtgtgaccttagctatattactggacctctctgagcttgtctccttgtctgtagcagggggat

SEQ ID NO: 54503 - DNA, 110 bp, synthetic construct
  source 1..110: mol_type = other DNA
ttagctatattactggacctctctgagcttgtctccttgtctgtagcagggggatgacagtagttcctagtgcacggttcactgtggggattagtaataggcttagaaag

SEQ ID NO: 54504 - DNA, 110 bp, synthetic construct
  source 1..110: mol_type = other DNA
actggccgaatcccaacacgcagccatgcgccagtattaaaatcttgtttgctcgttgagatgtgacccccctccccggaaatgcgacagtctcaacttcatcagtgcac

SEQ ID NO: 54505 - DNA, 110 bp, synthetic construct
  source 1..110: mol_type = other DNA
ccactgagtttacctggacagccccagtggtcagcaatgcgcagcagtccttgcgctcagtaagctccaggcaggcctttgtccccgcaggacctgccaagttcggcaca

SEQ ID NO: 54506 - DNA, 110 bp, synthetic construct
  source 1..110: mol_type = other DNA
ctcagtaagctccaggcaggcctttgtccccgcaggacctgccaagttcggcacaccccgactcctctgagctcataatctgccatcagcgtcaccatcagaccctctgg

SEQ ID NO: 54507 - DNA, 110 bp, synthetic construct
  source 1..110: mol_type = other DNA
ttttcgtggggttttttttggacaattcgatgctcgtgcagtccctggttcaagagacccagtacgagccagctaatgtggaggaaatattcccaactctacacagtaga

SEQ ID NO: 54508 - DNA, 110 bp, synthetic construct
  source 1..110: mol_type = other DNA
gacccagtacgagccagctaatgtggaggaaatattcccaactctacacagtagactgatgtcattttcaacgtgcagcatttacttgccctggtttgtgtcgtttggag

SEQ ID NO: 54509 - DNA, 110 bp, synthetic construct
  source 1..110: mol_type = other DNA
acccaaccaaccccagacctcggctggctgactgcagccgcaaccctgacttgggaggagggtggcttaaagacacgaggggtggctgagccccatcgcagggggcactc

SEQ ID NO: 54510 - DNA, 110 bp, synthetic construct
  source 1..110: mol_type = other DNA
aggagggtggcttaaagacacgaggggtggctgagccccatcgcagggggcactcagacctctctgagccagacgtgactgtccccatgctacagatgacgaggctgagt

SEQ ID NO: 54511 - DNA, 110 bp, synthetic construct
  source 1..110: mol_type = other DNA
gaagaggcagtgagggactcagagagactgttctccctccagaaagtgccacctgtaaggcttaaagcacacgtcgataaccaaccccgaaggaccccccaggctggccg

SEQ ID NO: 54512 - DNA, 110 bp, synthetic construct
  source 1..110: mol_type = other DNA
taaggcttaaagcacacgtcgataaccaaccccgaaggaccccccaggctggccgtgggtcctgggaagggcctttccagagccattgagagggccacacaactctccag

SEQ ID NO: 54513 - DNA, 110 bp, synthetic construct
  source 1..110: mol_type = other DNA
agaggtcagacctacctactcaccaccatctgcccacctccgtgctcatcctgggttctccccgggcatagactcccgtgcttccccacctactgggccatctcctccag

SEQ ID NO: 54514 - DNA, 110 bp, synthetic construct
  source 1..110: mol_type = other DNA
ttctccccgggcatagactcccgtgcttccccacctactgggccatctcctccaggaaggcttccaggattctctaagttgctgccatctgataacatccggctttccca

SEQ ID NO: 54515 - DNA, 110 bp, synthetic construct
  source 1..110: mol_type = other DNA
gagcagttaaatcaccttgaaagaacaaaattatcactcaattagcaatgctgccgatgagcaattagtaacatttcgagtgtccaattagcacctccttcaatgcagct

SEQ ID NO: 54516 - DNA, 110 bp, synthetic construct
  source 1..110: mol_type = other DNA
gatgagcaattagtaacatttcgagtgtccaattagcacctccttcaatgcagctcattacctaattttgtcctgctgggaccggcaagagccaggccgcccatcaccac

SEQ ID NO: 54517 - DNA, 110 bp, synthetic construct
  source 1..110: mol_type = other DNA
caacattgtggctaattatgtaatgatccaaaacctacaaagacttttcctacattacaacacccagcaaatgcagttatggaaactcaactctcagaacattgtggggg

SEQ ID NO: 54518 - DNA, 110 bp, synthetic construct
  source 1..110: mol_type = other DNA
cccccaggcagctgtctgagagagcgctcaggaggtcgtgcacagccaaggagctgtttttcttcttttctggatgaattacttatggaaagaacttccaggctgcttgg

SEQ ID NO: 54519 - DNA, 110 bp, synthetic construct; identical to SEQ ID NO: 54518
  source 1..110: mol_type = other DNA

SEQ ID NO: 54520 - DNA, 110 bp, synthetic construct
  source 1..110: mol_type = other DNA
ggggctgagcaaggccaggcttggcatcagatggactcaggttcaaatccaggctctgctcctcaggcttggtgacctcaggacagctatgcggcctccccagcctcagt

SEQ ID NO: 54521 - DNA, 110 bp, synthetic construct
  source 1..110: mol_type = other DNA
ctgctcctcaggcttggtgacctcaggacagctatgcggcctccccagcctcagtcatgaaggggtgatgccatctcccaggcttggcagcagagatgaccctggggacc

SEQ ID NO: 54522 - DNA, 110 bp, synthetic construct
  source 1..110: mol_type = other DNA
taattacagagcacttcggggttcatagcaaggactgcattcagcaatcctgataaccctagttactaacaacaagctccacgccagcttctgggcactcacgttccccg

SEQ ID NO: 54523 - DNA, 110 bp, synthetic construct
  source 1..110: mol_type = other DNA
accctagttactaacaacaagctccacgccagcttctgggcactcacgttccccgtccttctcgcttttaacacactgagcctcagcgcgtgccccgctgtcgtccccgg

SEQ ID NO: 54524 - DNA, 110 bp, synthetic construct
  source 1..110: mol_type = other DNA
aaggcatctccgcatcctgtggaccccagggcccgggagaacggtcccccaaacttcaacaggaggtgagagctgagagcaattctatcagcccatcagccatcaatcag

SEQ ID NO: 54525 - DNA, 110 bp, synthetic construct
  source 1..110: mol_type = other DNA
tcaacaggaggtgagagctgagagcaattctatcagcccatcagccatcaatcagagttgcctcattcataaaacagggcctggatcttcaccgccagtaaacttgcacc

SEQ ID NO: 54526 - DNA, 110 bp, synthetic construct
  source 1..110: mol_type = other DNA
tcattgtaacggcgcgtcaaggtcacccatgaagcgctaaaaggcttacacttgaccctcttttgtctatactgtgagctccgtaagcaatttttaaagttctaggagtc

SEQ ID NO: 54527 - DNA, 110 bp, synthetic construct
  source 1..110: mol_type = other DNA
ccctcttttgtctatactgtgagctccgtaagcaatttttaaagttctaggagtcccgttaaaagcgtaagaagaaaacaggtgaaattagtttcggtaacatattttac

SEQ ID NO: 54528 - DNA, 110 bp, synthetic construct
  source 1..110: mol_type = other DNA
gagatgtgggtgctctcgtcccttgaacctcagcacccaagtcacgtaaaatgcatgccggccgaaatcgttggtctgctgatttgaaacaaacacggattaataagcag

SEQ ID NO: 54529 - DNA, 110 bp, synthetic construct
  source 1..110: mol_type = other DNA
tgccggccgaaatcgttggtctgctgatttgaaacaaacacggattaataagcagtttatcgctttcttacaggtaaaaggaaatactgactctggcacgttaagaagtg

SEQ ID NO: 54530 - DNA, 110 bp, synthetic construct
  source 1..110: mol_type = other DNA
aagaacagaggattatgaaatgaataattcacttccataggacttccagagggctgcagaggagacagaaaatcagacgagggcttttgaaagctggagaaggtgcaagt

SEQ ID NO: 54531 - DNA, 110 bp, synthetic construct
  source 1..110: mol_type = other DNA
gcagaggagacagaaaatcagacgagggcttttgaaagctggagaaggtgcaagtgagaccgggcgtcgctatcagggaaaaggatgtaagggaagaagggatgaagccg

SEQ ID NO: 54532 - DNA, 110 bp, synthetic construct
  source 1..110: mol_type = other DNA
taaatgcttataagcaggcactgtgctaaatccactaaacagatcatatgatataaaatgtaggttagggagtccccattgtagcacaatggaaacgaatctgactagta

SEQ ID NO: 54533 - DNA, 110 bp, synthetic construct
  source 1..110: mol_type = other DNA
ctaaatccactaaacagatcatatgatataaaatgtaggttagggagtccccattgtagcacaatggaaacgaatctgactagtagccatgaggattcgggttcaatccc

SEQ ID NO: 54534 - DNA, 110 bp, synthetic construct
  source 1..110: mol_type = other DNA
tgctgagtggctacggggtgaccggatgaccacagggtgaaaggtcactgtgatttctttgggcaaagccattaatgacccctgtggtccccaggataaaggccacagtc

SEQ ID NO: 54535 - DNA, 110 bp, synthetic construct
  source 1..110: mol_type = other DNA
tctttgggcaaagccattaatgacccctgtggtccccaggataaaggccacagtctttgcagtggcttgcgagccccaccctgtctgtaggacttcaaggcctcttccag

SEQ ID NO: 54536 - DNA, 110 bp, synthetic construct
  source 1..110: mol_type = other DNA
tctgcccatcgcatgtccctgcttcaaaaggggactcagaatccagtgacataagaaaccaggggtgggagttcctgtcgtggcacagcagaaacgaatttgactagctg

SEQ ID NO: 54537 - DNA, 110 bp, synthetic construct
  source 1..110: mol_type = other DNA
aaaccaggggtgggagttcctgtcgtggcacagcagaaacgaatttgactagctgcaggtgcatctttgaaaagaaaaaaaagaaagaaaaaagaaaccagggatgacag

SEQ ID NO: 54538 - DNA, 110 bp, synthetic construct
  source 1..110: mol_type = other DNA
gagaccccgccagggcgggcacactcccaagtaagtgtcctcagcattaggagagagacgaagaggaagaggcagaggccaggtaccacttttgttccgagtgacggggt

SEQ ID NO: 54539 - DNA, 110 bp, synthetic construct
  source 1..110: mol_type = other DNA
agacgaagaggaagaggcagaggccaggtaccacttttgttccgagtgacggggtattagaggctgtggctcaatcctgcagccacgtggcttctagcactgacttccgg

SEQ ID NO: 54540 - DNA, 110 bp, synthetic construct
  source 1..110: mol_type = other DNA
cccacgaggctcagcatgctgccagtaatgtctaagaggccagggcaccgatgaggccaggcccctgctaagcgtgaattgggcatattggtcctatgatcgtgtccatt

SEQ ID NO: 54541 - DNA, 110 bp, synthetic construct
  source 1..110: mol_type = other DNA
gccaggcccctgctaagcgtgaattgggcatattggtcctatgatcgtgtccatttaacggatgaggttgtctttgcttggggctcctttgctgttaggacttgaaccca

SEQ ID NO: 54542 - DNA, 110 bp, synthetic construct
  source 1..110: mol_type = other DNA
cttcactttgttcaggcccagtaggcacggatttctgtcaccgcagtttggttcagtaatgtccgccctccaggggcacagtccagacatcagctaccaggagaagataa

SEQ ID NO: 54543 - DNA, 110 bp, synthetic construct
  source 1..110: mol_type = other DNA
gtaatgtccgccctccaggggcacagtccagacatcagctaccaggagaagataactgtgagtaatttgcatgaactacaagctttgcgactccctcttcagtccacagt

SEQ ID NO: 54544 - DNA, 110 bp, synthetic construct
  source 1..110: mol_type = other DNA
atgtaggccggcagctatagctccaatgggacccctagcctagaactttcttatctcacaggtgcggccctaaaaatacaaaacaaaacaaaaagcagaatctaggtgtt

SEQ ID NO: 54545 - DNA, 110 bp, synthetic construct; identical to SEQ ID NO: 54544
  source 1..110: mol_type = other DNA

SEQ ID NO: 54546 - DNA, 110 bp, synthetic construct
  source 1..110: mol_type = other DNA
cactaacccctcccccataggcctgcatgctcctaaagagtgtcagaaaacactagaatctctctccttcctccccctccagcgttcagggctggagggtaggagtagat

SEQ ID NO: 54547 - DNA, 110 bp, synthetic construct
  source 1..110: mol_type = other DNA
gaatctctctccttcctccccctccagcgttcagggctggagggtaggagtagattggggtggtctggaaggttccaggaggagctggggctgaagctcggtttggctgg

SEQ ID NO: 54548 - DNA, 110 bp, synthetic construct
  source 1..110: mol_type = other DNA
agggatccctctgctgcctgtggagacagaccagggcggggaggggggctcaggagacagagggagagcaggaagctgggcgatggtgtttagagcagggtggtggccga

SEQ ID NO: 54549 - DNA, 110 bp, synthetic construct
  source 1..110: mol_type = other DNA
gacagagggagagcaggaagctgggcgatggtgtttagagcagggtggtggccgaggatggatgtggtgagaagctccagatcgccttggattctggccaggctgcatgt

SEQ ID NO: 54550 - DNA, 110 bp, synthetic construct
  source 1..110: mol_type = other DNA
gcccgcagcacgatgtccttggtgacgtcgtcctcctcggggctgcgggagccgttggcgccgctgtagggcatgcccacggtgatctcgaacttgtaccggtcgaactt

SEQ ID NO: 54551 - DNA, 110 bp, synthetic construct
  source 1..110: mol_type = other DNA
cgcacacacacacacacacacacacacaccaatgcacattttaatcaaactgcggaaaatcgggaataaagaagacagtcttaaaagcagccagagaaaatgttacatta

SEQ ID NO: 54552 - DNA, 110 bp, synthetic construct
  source 1..110: mol_type = other DNA
aggccagagataaaacccgtgtcctcacggatactagtcaggctcctaatccactgagccacaatgggaactcctgcccctccgctgttattctcccctttggcatctgg

SEQ ID NO: 54553 - DNA, 110 bp, synthetic construct; identical to SEQ ID NO: 54552
  source 1..110: mol_type = other DNA

SEQ ID NO: 54554 - DNA, 110 bp, synthetic construct
  source 1..110: mol_type = other DNA
accccagctcccagcttgaagttttcaaaccagacgcttctgtcctccgctgaaaagacagacttcctgtctgagggtgaccgtttccattgggcggcgcgcaagaggcc

SEQ ID NO: 54555 - DNA, 110 bp, synthetic construct
  source 1..110: mol_type = other DNA
agacagacttcctgtctgagggtgaccgtttccattgggcggcgcgcaagaggccctgtggggttgctcagccccacacccagcccgcctggaatgttctcatccctcct

SEQ ID NO: 54556 - DNA, 110 bp, synthetic construct
  source 1..110: mol_type = other DNA
ggttccttaaagtgcattcctataaatggggctgctgggccacaggacgggataaaaaaagagaagaccctgctttttgggcgccgtgtccaaggagggcttcctgctcc

SEQ ID NO: 54557 - DNA, 110 bp, synthetic construct
  source 1..110: mol_type = other DNA
aaaaagagaagaccctgctttttgggcgccgtgtccaaggagggcttcctgctcctggggctgccaaggccgaggctgattgctgagtgctgcagcagcgctgtagaagc

SEQ ID NO: 54558 - DNA, 110 bp, synthetic construct
  source 1..110: mol_type = other DNA
ccctatttctgggtgatgttcctctcatcgctcagaggctggtgtgttatttgacgtagatggaaatgcagagtgaggcagccgcgctctgtctccaaagaggacaggcc

SEQ ID NO: 54559 - DNA, 110 bp, synthetic construct
  source 1..110: mol_type = other DNA
gtagatggaaatgcagagtgaggcagccgcgctctgtctccaaagaggacaggccaccaggttttcacttggaagcgtaaatgtctcttatcccgttttctatgaatgaa

SEQ ID NO: 54560 - DNA, 110 bp, synthetic construct
  source 1..110: mol_type = other DNA
acctttgcccagatggttcgtggttaaaatcacttaccaagcggggttccgacctaagaaaggcagactcagtaatgacaactccactggcaaaccccgtttccatgcag

SEQ ID NO: 54561 - DNA, 110 bp, synthetic construct
  source 1..110: mol_type = other DNA
aagaaaggcagactcagtaatgacaactccactggcaaaccccgtttccatgcagatggagcacgggaggctgggctcagcacaggcgggagctctgggggagaaggccg

SEQ ID NO: 54562 - DNA, 110 bp, synthetic construct; identical to SEQ ID NO: 54560
  source 1..110: mol_type = other DNA

SEQ ID NO: 54563 - DNA, 110 bp, synthetic construct; identical to SEQ ID NO: 54561
  source 1..110: mol_type = other DNA

SEQ ID NO: 54564 - DNA, 110 bp, synthetic construct
  source 1..110: mol_type = other DNA
gtcctagggccgggggtaggacttcaacttagcaaagtctggggggacagagttcaacttatgacaggtaaccctggatgcactgctctgaggccccatgagctagcaga

SEQ ID NO: 54565 - DNA, 110 bp, synthetic construct
  source 1..110: mol_type = other DNA
aacttatgacaggtaaccctggatgcactgctctgaggccccatgagctagcagaactgtctgctccagttcctcgatggcttctttgctggcctcataggggtacaaat

SEQ ID NO: 54566 - DNA, 110 bp, synthetic construct
  source 1..110: mol_type = other DNA
aggagctttcagaatatgatgcgaggccaggagacggcaggggtcaggccaggaagagcctgggagggcgtcctttgtcctgtgtgtgtggacgagctggtgaagggttt

SEQ ID NO: 54567 - DNA, 110 bp, synthetic construct
  source 1..110: mol_type = other DNA
gagcctgggagggcgtcctttgtcctgtgtgtgtggacgagctggtgaagggttttaagaagaggcatgacatggctgcatctgtgtgtcagaaaggtcaaggctgctgt

SEQ ID NO: 54568 - DNA, 110 bp, synthetic construct; identical to SEQ ID NO: 54566
  source 1..110: mol_type = other DNA

SEQ ID NO: 54569 - DNA, 110 bp, synthetic construct; identical to SEQ ID NO: 54567
  source 1..110: mol_type = other DNA

SEQ ID NO: 54570 - DNA, 110 bp, synthetic construct
  source 1..110: mol_type = other DNA
ttgtaaacatcgtaagaactgacattttcccattctttccttaaacccaccccagctgctcgatctggaaatcatttccagcgtacgttcttataaaaaaaactctcaag

SEQ ID NO: 54571 - DNA, 110 bp, synthetic construct
  source 1..110: mol_type = other DNA
ctgctcgatctggaaatcatttccagcgtacgttcttataaaaaaaactctcaaggttaataaccacaaacgcacagttgaaattaggatttttttcactgttgatagag

SEQ ID NO: 54572 - DNA, 110 bp, synthetic construct
  source 1..110: mol_type = other DNA
gtccacctcctctgcccccatctccagggcctccatcctggagaccttctctcctccccatcagtttttcattatttgtgttctagggcggcacctgcagcatagggagg

SEQ ID NO: 54573 - DNA, 110 bp, synthetic construct
  source 1..110: mol_type = other DNA
ccccatctccagggcctccatcctggagaccttctctcctccccatcagtttttcattatttgtgttctagggcggcacctgcagcatagggaggttcccaggccagggg

SEQ ID NO: 54574 - DNA, 110 bp, synthetic construct
  source 1..110: mol_type = other DNA
gggctgggaggaggtgtgaggggtcctggccaagatctctttcttgatctggatggaggttccatggacgtgtttctcatgatcacttcttaatccataagtttatgtta

SEQ ID NO: 54575 - DNA, 110 bp, synthetic construct
  source 1..110: mol_type = other DNA
gctcctagaaagagaccagtgaagcctgagcagcatgaaggctactagcctagactgctgggtgtgagtcctgggtctatgatttactaacgctgtgactttaggtcctc

SEQ ID NO: 54576 - DNA, 110 bp, synthetic construct
  source 1..110: mol_type = other DNA
tgctgggtgtgagtcctgggtctatgatttactaacgctgtgactttaggtcctctgtctaatttatttgtactttggcattgtaatctggatgaaaatagtgcctggtc

SEQ ID NO: 54577 - DNA, 110 bp, synthetic construct
  source 1..110: mol_type = other DNA
gctaccagcctggcgctagaagagctgtgcgaacctaggtcatgtcattgcattgctctgggcagcagtctccgtgtaggccaagtgaaggcatcagcgtgtattccgtg

SEQ ID NO: 54578 - DNA, 110 bp, synthetic construct
  source 1..110: mol_type = other DNA
tgctgaatctggggcagagatctttggaagatgcatttatgccaaatacaccatatgaagagattagactctcatctggttacctcagctttttatttttactttcttcg

SEQ ID NO: 54579 - DNA, 110 bp, synthetic construct
  source 1..110: mol_type = other DNA
tgaagagattagactctcatctggttacctcagctttttatttttactttcttcgcttccttgttatactgctgatgattaataatgcggccacacgggaccccttcaga

SEQ ID NO: 54580 - DNA, 110 bp, synthetic construct
  source 1..110: mol_type = other DNA
gcacccggccgctcggagcagtctctgcgatttgtcttcctagcacggaaccgttttcacgccccagctcattttgcctcatgaaccttttgacagcggtatcattgtca

SEQ ID NO: 54581 - DNA, 110 bp, synthetic construct
  source 1..110: mol_type = other DNA
ttcacgccccagctcattttgcctcatgaaccttttgacagcggtatcattgtcaccccatcttacagatgaggaagttgaggcctgcagagaaacagacacttcccagg

SEQ ID NO: 54582 - DNA, 110 bp, synthetic construct
  source 1..110: mol_type = other DNA
tccattattattatggccattagttttctttacaacactgagagttgcattcctgaagtggccatttattgagcatctagtatgggctagaagctcttgaggtttcctca

SEQ ID NO: 54583 - DNA, 110 bp, synthetic construct
  source 1..110: mol_type = other DNA
aagtggccatttattgagcatctagtatgggctagaagctcttgaggtttcctcatatgcatcgttgactctgcaggaaagctgacatttatcaagcgcttgtcacagtc

SEQ ID NO: 54584 - DNA, 110 bp, synthetic construct
  source 1..110: mol_type = other DNA
atcaccccttctaattggtgtgaacgaaatacttgactcctagtcagcagccagttcatctttgtcaacctcaaacaagcgaaatgaggactcaccatgagggccatggg

SEQ ID NO: 54585 - DNA, 110 bp, synthetic construct
  source 1..110: mol_type = other DNA
tcatctttgtcaacctcaaacaagcgaaatgaggactcaccatgagggccatgggtcttgtgtcttgaagggtctgctctgggctgaaccccaccttaagctttacgggg

SEQ ID NO: 54586 - DNA, 110 bp, synthetic construct
  source 1..110: mol_type = other DNA
aaaataatgatggtgaattgtgtgtgtgtgttgccacaatcaaaaaatttaaaaaccaaaccaaaagccagaatttgacaaagagcacctaagtctttgcagacctcgct

SEQ ID NO: 54587 - DNA, 110 bp, synthetic construct
  source 1..110: mol_type = other DNA
ccaaaccaaaagccagaatttgacaaagagcacctaagtctttgcagacctcgctaaggctgcagcctcctccatccctcagacggagctatgattcttaaattttacgg

SEQ ID NO: 54588 - DNA, 110 bp, synthetic construct
  source 1..110: mol_type = other DNA
agtgtgttgtcacgatctttctggtaaggccctgagaaagcatatccacctcttcatttcccaacagtgaaatccagctgggcccacagaccacgttaaagaagctggga

SEQ ID NO: 54589 - DNA, 110 bp, synthetic construct
  source 1..110: mol_type = other DNA
atttcccaacagtgaaatccagctgggcccacagaccacgttaaagaagctgggatctttcatattaacctctcgagttggaaaactcctcaaaataatggatgaaatgg

SEQ ID NO: 54590 - DNA, 110 bp, synthetic construct
  source 1..110: mol_type = other DNA
acaacctctttatcggtaacaagcatgatatttgcacctccatcggtcttacttctgggttcaactggttccaagccggggcggggaggtaacagagagggaatggtatt

SEQ ID NO: 54591 - DNA, 110 bp, synthetic construct
  source 1..110: mol_type = other DNA
tgggttcaactggttccaagccggggcggggaggtaacagagagggaatggtattatttattagcctcaactcccaacagaaaagaacttgaattttattctggatggtt

SEQ ID NO: 54592 - DNA, 110 bp, synthetic construct; identical to SEQ ID NO: 54590
  source 1..110: mol_type = other DNA

SEQ ID NO: 54593 - DNA, 110 bp, synthetic construct; identical to SEQ ID NO: 54591
  source 1..110: mol_type = other DNA

SEQ ID NO: 54594 - DNA, 110 bp, synthetic construct
  source 1..110: mol_type = other DNA
tttttaaggccacacctgcgacacatggaagttctcagaccaggcgttgaatcagagttacaggtgcaacctaaactgcagcttgtggccacgtgccggatccttaatcc

SEQ ID NO: 54595 - DNA, 110 bp, synthetic construct
  source 1..110: mol_type = other DNA
gctgccttcccttccctcctttgcctgccctccctccaggtttcctgggatcatcttcttttttcgtttttttgttttgttttgttttttagggccacacctgcagcata

SEQ ID NO: 54596 - DNA, 110 bp, synthetic construct
  source 1..110: mol_type = other DNA
catatgcctgccgcaggttcggctctaaaaaagacaaaaagaccaaaataaataaataagaaagatatgatgccactgtatgatctttcgacaggcaaacacaaaaaagt

SEQ ID NO: 54597 - DNA, 110 bp, synthetic construct
  source 1..110: mol_type = other DNA
ataagaaagatatgatgccactgtatgatctttcgacaggcaaacacaaaaaagtccatggcactgaacattggcaaggaagtaagggtttggggtcctgccgggtagcc

SEQ ID NO: 54598 - DNA, 110 bp, synthetic construct
  source 1..110: mol_type = other DNA
caaatccaaaactagtcagatttttttcttcctgttgctggaccaccttcaaggaaacagaaggggagacagcaggagggaggtggtacaggagcaggagaggccagggg

SEQ ID NO: 54599 - DNA, 110 bp, synthetic construct
  source 1..110: mol_type = other DNA
aacagaaggggagacagcaggagggaggtggtacaggagcaggagaggccagggggaatccaccaggagggagaagagacggcagccatgcaaagtcccaagggaggagc

SEQ ID NO: 54600 - DNA, 110 bp, synthetic construct
  source 1..110: mol_type = other DNA
tcaggacaccaagaatccagggggcatgcaccttgcaaagggtggctctgagctgatgtgcccatgagcccacactcaggccatggtgcccagcaggctggtgctgccct

SEQ ID NO: 54601 - DNA, 110 bp, synthetic construct
  source 1..110: mol_type = other DNA
atgtgcccatgagcccacactcaggccatggtgcccagcaggctggtgctgccctggcagagaggaccccgaatgcccgtgatgcgccccttattttttgtctctctttt

SEQ ID NO: 54602 - DNA, 110 bp, synthetic construct
  source 1..110: mol_type = other DNA
cggcttgtaaaacaccttaaataaaatgcagcatcctcagaaggggctgacgacaccccggcaccttcttcgtattttccttttggaaagttaaatgatgtgtatttttt

SEQ ID NO: 54603 - DNA, 110 bp, synthetic construct
  source 1..110: mol_type = other DNA
ccatcttagtgccccagcagcaggaaggctcctgagaggaggtgacacacgtagaaagtgggttttttttttagggccgcaccggcggcatatggaggctcccgggctag

SEQ ID NO: 54604 - DNA, 110 bp, synthetic construct
  source 1..110: mol_type = other DNA
agcagcaggaaggctcctgagaggaggtgacacacgtagaaagtgggttttttttttagggccgcaccggcggcatatggaggctcccgggctaggggtctaatgggagc

SEQ ID NO: 54605 - DNA, 110 bp, synthetic construct
  source 1..110: mol_type = other DNA
caatggattcgaagctattcgggttcctgtagcttctgtctctctctcacttccgaaccctcaaaggggtgtgaggccaggggagtctcctgcaggtgcaatctccctgc

SEQ ID NO: 54606 - DNA, 110 bp, synthetic construct
  source 1..110: mol_type = other DNA
taatcaggaccctgcggtgggaatccatcccacagaaagctgcacagatggatggtttgaagggctgacgcttaaatgtgttcagtgttcacagacttccttggcctcca

SEQ ID NO: 54607 - DNA, 110 bp, synthetic construct
  source 1..110: mol_type = other DNA
tttgaagggctgacgcttaaatgtgttcagtgttcacagacttccttggcctccagggccctgaggccttcagcctccagtgtctgggcatcactcagaaaggcagaagg

SEQ ID NO: 54608 - DNA, 110 bp, synthetic construct
  source 1..110: mol_type = other DNA
ggcataacagtgggctcacagtcactgagcacttagaatgtgctggaacaaggattccagaagtattgacacatttaatcctcacaacaatctcataagagagctattaa

SEQ ID NO: 54609 - DNA, 110 bp, synthetic construct
  source 1..110: mol_type = other DNA
tccagaagtattgacacatttaatcctcacaacaatctcataagagagctattaaaaggtttcatcatccctttgcagatagagaagttgagacccagaggggttaggtg

SEQ ID NO: 54610 - DNA, 110 bp, synthetic construct
  source 1..110: mol_type = other DNA
ctaaccaggcttttgtccttagaggccaaagggtttcaaaacagggataaatacggagagttgcctaaaggaactttgtctcagcatcctggcagctgacctgcttccat

SEQ ID NO: 54611 - DNA, 110 bp, synthetic construct
  source 1..110: mol_type = other DNA
gacgggagttcccagcgatccctcccactgaaaagtttgcatcttggaactgatgcaggcacatgccccgcatcagctctttttcttccgcactggggggctctcctgcc

SEQ ID NO: 54612 - DNA, 110 bp, synthetic construct
  source 1..110: mol_type = other DNA
caggcacatgccccgcatcagctctttttcttccgcactggggggctctcctgcccaggagcccccagtgtgctctgagctgtgcatctcactcccattgagtccagctg

SEQ ID NO: 54613 - DNA, 110 bp, synthetic construct
  source 1..110: mol_type = other DNA
ccagggtgatatgatggtgtaacttgcccaaggtcactcagctactagagagggagggaggactttaatcttgcaaaaagaggaagttgttggagttcccatcatggctc

SEQ ID NO: 54614 - DNA, 110 bp, synthetic construct
  source 1..110: mol_type = other DNA
cgcatcctcatggatactagtcaggttcgtttaccactgagccacagtgggaattcctgtgattactttcatgcatccccttggcaaggctacagcctgctttttcttag

SEQ ID NO: 54615 - DNA, 110 bp, synthetic construct; identical to SEQ ID NO: 54614
  source 1..110: mol_type = other DNA

SEQ ID NO: 54616 - DNA, 110 bp, synthetic construct
  source 1..110: mol_type = other DNA
tccccgtgcaacatctctgcccacagttctcccaaccacacttgcacacccaccgtgatggggagctcactcccactggaggtgtcacgttctatctttggacggccctg

SEQ ID NO: 54617 - DNA, 110 bp, synthetic construct
  source 1..110: mol_type = other DNA
ctggttctgggggggtctgtttcagcctccatggtttacctgcctctgagacccccatcctggtccaggaacacaagctgaagtgagacattttggtgagttggagggaa

SEQ ID NO: 54618 - DNA, 110 bp, synthetic construct
  source 1..110: mol_type = other DNA
catcctggtccaggaacacaagctgaagtgagacattttggtgagttggagggaaagtgggcccaggcctgggtgtgtgccctccactgggtccctttaagcccttcgcc

SEQ ID NO: 54619 - DNA, 110 bp, synthetic construct
  source 1..110: mol_type = other DNA
tgtgtggacatacgccttcacctctcctgggtaactctcaagaagtagaatgcctaagtgttatgggagctgtatgtttaaattttcaagaatctgtcaagctgttttcc

SEQ ID NO: 54620 - DNA, 110 bp, synthetic construct
  source 1..110: mol_type = other DNA
aagtgttatgggagctgtatgtttaaattttcaagaatctgtcaagctgttttccagaatgtcacacttttgtgtccctaccagcagtgagtgagcataccagctgcctt

SEQ ID NO: 54621 - DNA, 110 bp, synthetic construct
  source 1..110: mol_type = other DNA
cagcctctactctaatttactctctgggctacactaggaaaaaggtgattgttgaccaatcagaaacttacttaaccatggcgttcccatggtgacgcagggggtgaaga

SEQ ID NO: 54622 - DNA, 110 bp, synthetic construct
  source 1..110: mol_type = other DNA
tgattgttgaccaatcagaaacttacttaaccatggcgttcccatggtgacgcagggggtgaagaacacaacatacagtgtccgtgaggatgcagatttgatccctggcc

SEQ ID NO: 54623 - DNA, 110 bp, synthetic construct
  source 1..110: mol_type = other DNA
tggatattagtcaggttcattaccgctgccccgcaaagggaactccttctttttatgactgaatgttattcctttgtatgtgtgtgtacctcatattttctttattcttc

SEQ ID NO: 54624 - DNA, 110 bp, synthetic construct; identical to SEQ ID NO: 54623
  source 1..110: mol_type = other DNA

SEQ ID NO: 54625 - DNA, 110 bp, synthetic construct
  source 1..110: mol_type = other DNA
aaatctccattttacaaatcaggacacagatgcactgcaagtttaagcaaagcgcccaaggtcacacagctggcccacgacagggctagaagtcgaacccaggcactctg

SEQ ID NO: 54626 - DNA, 110 bp, synthetic construct
  source 1..110: mol_type = other DNA
gggggccaggccagcgatgcatccaggcctcattttctaatggactcatcgcaggcctttcaaacttcagcttcctggatggctttgctttgaagttaagcgcagtggct

SEQ ID NO: 54627 - DNA, 110 bp, synthetic construct
  source 1..110: mol_type = other DNA
cctttcaaacttcagcttcctggatggctttgctttgaagttaagcgcagtggctgggtctcttggggagtccccttgacgttcccgcagtgagatatgtggtcggtgac

SEQ ID NO: 54628 - DNA, 110 bp, synthetic construct
  source 1..110: mol_type = other DNA
cccagggaccctcacctgggtagagattccagagaaataaccactcaggattaaagggaaaaagattgccctgaagcctcattcatggtggatgggttgggggcgatctg

SEQ ID NO: 54629 - DNA, 110 bp, synthetic construct
  source 1..110: mol_type = other DNA
gggaaaaagattgccctgaagcctcattcatggtggatgggttgggggcgatctggatgtccatccatcaccgggagggtggatggatgaactggggcaggaaccacctc

SEQ ID NO: 54630 - DNA, 110 bp, synthetic construct
  source 1..110: mol_type = other DNA
gggctaggatgggtttagccggtagacaggattgcagggcagccccacacagggatgggcctgaaagacagtgacagagggaattcctccgtgtggacagacctttggat

SEQ ID NO: 54631 - DNA, 110 bp, synthetic construct
  source 1..110: mol_type = other DNA
tgggcctgaaagacagtgacagagggaattcctccgtgtggacagacctttggataattcctctttgccttttgacttaaggtggtttttaaaggcaggatatttctctg

SEQ ID NO: 54632 - DNA, 110 bp, synthetic construct
  source 1..110: mol_type = other DNA
gaggctgtgaaagactagtctttctaagcaggaactcgagagaccctctggaccccgtctcattccttccctcatctaatccattggataggttcctctttctgtctcca

SEQ ID NO: 54633 - DNA, 110 bp, synthetic construct
  source 1..110: mol_type = other DNA
cgtctcattccttccctcatctaatccattggataggttcctctttctgtctccaccccatttggtagaccagcactccctccagcttcctgctgtgattacctgatgtt

SEQ ID NO: 54634 - DNA, 110 bp, synthetic construct
  source 1..110: mol_type = other DNA
tttggaatacactaaaagtattattctgagcttagtaccaaaaagacctttttttttttggttgtctttttagggctccacctgcagcatacggacgttcccaggttagg

SEQ ID NO: 54635 - DNA, 110 bp, synthetic construct
  source 1..110: mol_type = other DNA
aagtattattctgagcttagtaccaaaaagacctttttttttttggttgtctttttagggctccacctgcagcatacggacgttcccaggttaggggttgaattggagcc

SEQ ID NO: 54636 - DNA, 110 bp, synthetic construct
  source 1..110: mol_type = other DNA
cctggggggaagccccgtggacccctgctgttccagccaagagtaggctccccaggttcaaaatctctgcctcggtttccctcgactggaaaatggagctcatgacggtg

SEQ ID NO: 54637 - DNA, 110 bp, synthetic construct
  source 1..110: mol_type = other DNA
gttcaaaatctctgcctcggtttccctcgactggaaaatggagctcatgacggtgccagccccgggaggtttctgagcataaaatgagatcatagcataatgagcttgac

SEQ ID NO: 54638 - DNA, 110 bp, synthetic construct
  source 1..110: mol_type = other DNA
gaggttcaaatggcaggttggtactaaaaaactaaaaatcattatctgctttatttgctttcattctcggtacataagcattactggaaaagtcactaaaccatgacgcc

SEQ ID NO: 54639 - DNA, 110 bp, synthetic construct
  source 1..110: mol_type = other DNA
actaaaggataaggtcaagcttttaaaatgaactttttttatatctaaaaatcgaacccattctgccgatctcttcctttcacgactgcttgtaaaacatgtaatgaatt

SEQ ID NO: 54640 - DNA, 110 bp, synthetic construct
  source 1..110: mol_type = other DNA
acccattctgccgatctcttcctttcacgactgcttgtaaaacatgtaatgaattaaaacaactcaatttcgctttccaaagctgtatttttaagttaagaaaaaatata

SEQ ID NO: 54641 - DNA, 110 bp, synthetic construct
  source 1..110: mol_type = other DNA
agtacagaaagtcccggtatatcccttacttttcttctttagagagcagggcttgggcatcagagaatggagatttttgagctgaatagtaacacttttagactgatcat

SEQ ID NO: 54642 - DNA, 110 bp, synthetic construct
  source 1..110: mol_type = other DNA
ggcatcagagaatggagatttttgagctgaatagtaacacttttagactgatcatttttggggggtgggtgggaagctcctagaggacttctgctgttttggccaaacgt

SEQ ID NO: 54643 - DNA, 110 bp, synthetic construct
  source 1..110: mol_type = other DNA
gcctggcatgaggaaatgacgcctgcctttagtctgtcgggtaatttccagatcacgccaacaggaggctgctggctcgcacagagggtgcatgcaggagggcccgcagc

SEQ ID NO: 54644 - DNA, 110 bp, synthetic construct
  source 1..110: mol_type = other DNA
cgccaacaggaggctgctggctcgcacagagggtgcatgcaggagggcccgcagctgtgggcggcatcggtattacctacttgggttcagtgggcctgggctgaaacaat

SEQ ID NO: 54645 - DNA, 110 bp, synthetic construct
  source 1..110: mol_type = other DNA
attctcctcttggggcacttgtgatgctctttagtgcttcatctcctcagaggatgggcggtaaggagagctccctatttttccctaactcagatctcccaaaggtgttt

SEQ ID NO: 54646 - DNA, 110 bp, synthetic construct
  source 1..110: mol_type = other DNA
ggaccaaatttctgaggcagtgatagaagcactaagcttggctgggcttgaagctggaagcacgtggtttaaatcaaatgaagtgaatccaataatacttacttcacagg

SEQ ID NO: 54647 - DNA, 110 bp, synthetic construct
  source 1..110: mol_type = other DNA
ggaagcacgtggtttaaatcaaatgaagtgaatccaataatacttacttcacaggttatatccagtctcataaacgataatgtaaaagaactttgcaaacttggaaagaa

SEQ ID NO: 54648 - DNA, 110 bp, synthetic construct
  source 1..110: mol_type = other DNA
tttctaatatgcaaaagatgtaagtcactgattgcagctctgatgcagtttcatacacataagagagactagaaaagagaataacgttgaatacaatcactctattttat

SEQ ID NO: 54649 - DNA, 110 bp, synthetic construct
  source 1..110: mol_type = other DNA
cacataagagagactagaaaagagaataacgttgaatacaatcactctattttatgcatcctaattatagcaccgtgtgcctagactagaatgcctctgctgactgtacc

SEQ ID NO: 54650 - DNA, 110 bp, synthetic construct
  source 1..110: mol_type = other DNA
aggggtacacctagcactatcttggagcctaagcccccacagagggaagatgttagctacctgacgaagcattctttggtccagagcggtcacagcacgataaccctgag

SEQ ID NO: 54651 - DNA, 110 bp, synthetic construct
  source 1..110: mol_type = other DNA
gctacctgacgaagcattctttggtccagagcggtcacagcacgataaccctgagaaccacagaagttcatcaagaggccccctgaggccagattaaagaaatgtaggcc

SEQ ID NO: 54652 - DNA, 110 bp, synthetic construct
  source 1..110: mol_type = other DNA
cagagacacctgcttctcatggccagcagcaagcctctgccaaaacaactgcatgtacccttttatcacaatcatatataccgcctctcagagcaggtcctcggagctct

SEQ ID NO: 54653 - DNA, 110 bp, synthetic construct
  source 1..110: mol_type = other DNA
tacccttttatcacaatcatatataccgcctctcagagcaggtcctcggagctctcctgggctatcgtcctagtaagcccccaataaacctgaacgcacggctctcatgt

SEQ ID NO: 54654 - DNA, 110 bp, synthetic construct
  source 1..110: mol_type = other DNA
tcagctttgcccacccagtaaaatgtaactctctcctttcagacggtgcctatttttttagtcgacagggcttttacggggtggtttctgagctgtgtcttgctgcccgc

SEQ ID NO: 54655 - DNA, 110 bp, synthetic construct
  source 1..110: mol_type = other DNA
ttttagtcgacagggcttttacggggtggtttctgagctgtgtcttgctgcccgctgtggacccgtggggattctctaggaagctgcttgcttccctgggctgtgggtcc

SEQ ID NO: 54656 - DNA, 110 bp, synthetic construct
  source 1..110: mol_type = other DNA
ccttcgcccacctgacagatgacaaaaccgaggcaccaggaaggcaggtagtgcactcacagccatgcatctcacaaaaggctgggtggcacagctgctccaggaagcgt

SEQ ID NO: 54657 - DNA, 110 bp, synthetic construct
  source 1..110: mol_type = other DNA
ctcacagccatgcatctcacaaaaggctgggtggcacagctgctccaggaagcgtggtgcccagctctgcacccttcacccctgtacagcccaatttcctgactatttat

SEQ ID NO: 54658 - DNA, 110 bp, synthetic construct
  source 1..110: mol_type = other DNA
caaatgagagtcttcatcttccaagagcagaaatgcgatttcgaagtcactggagaataaaggagattctcaccgggtgaaactgttgttgggttgtttggatccacttg

SEQ ID NO: 54659 - DNA, 110 bp, synthetic construct
  source 1..110: mol_type = other DNA
aataaaggagattctcaccgggtgaaactgttgttgggttgtttggatccacttgaaggggcctgaacgcagatcttcttctattgttataagtcttttcctcctgggct

SEQ ID NO: 54660 - DNA, 110 bp, synthetic construct
  source 1..110: mol_type = other DNA
acttgtgtggaacaacctctaggacactgtactgacttgttcatttgctctgacacccagacccacctcctgtctccctgccctgctctgtgcccaggagctggccctct

SEQ ID NO: 54661 - DNA, 110 bp, synthetic construct
  source 1..110: mol_type = other DNA
cccagacccacctcctgtctccctgccctgctctgtgcccaggagctggccctctggaactgcacccacaagactcctggttttaccggcttccacttggtttgaccaac

SEQ ID NO: 54662 - DNA, 110 bp, synthetic construct
  source 1..110: mol_type = other DNA
atagcgatgactcaggcatgagacagctgtgctcttggatgggtgtttaggtacaaatatggaaaacttaagagagtggtgaaggtggcatgagagacagtgtgggggga

SEQ ID NO: 54663 - DNA, 110 bp, synthetic construct
  source 1..110: mol_type = other DNA
aatatggaaaacttaagagagtggtgaaggtggcatgagagacagtgtggggggattctgacccagacagaagcgtgggaattaactggatgtgtgtggacgtgtggtta

SEQ ID NO: 54664 - DNA, 110 bp, synthetic construct
  source 1..110: mol_type = other DNA
tggtgtgccctcgtgtcattttaaatatgcgtccgtctatccctacaggctaaagggaaagattcaatagcttggcaaaggtgaaagtgtctagagtgccattccacgca

SEQ ID NO: 54665 - DNA, 110 bp, synthetic construct
  source 1..110: mol_type = other DNA
acagcatcagcaacaaactcggtagacctcccagggatggagtgaggcaatctaacccaatggagcatcagctctcctcagcgggaatcctaatagcgtccccctgggac

SEQ ID NO: 54666 - DNA, 110 bp, synthetic construct
  source 1..110: mol_type = other DNA
cccaatggagcatcagctctcctcagcgggaatcctaatagcgtccccctgggactgcaggggacttgaggcaagtcacaacctttaatagaatgatgtagacactgcag

SEQ ID NO: 54667 - DNA, 110 bp, synthetic construct
  source 1..110: mol_type = other DNA
ggaagcggggtgagcggcctctgccgcgtctgggtagagtcccacgtggaagctggcaggtgcgctagagccacagctgcttcgcaatcctagcctgaactgcctccctg

SEQ ID NO: 54668 - DNA, 110 bp, synthetic construct
  source 1..110: mol_type = other DNA
gcaggtgcgctagagccacagctgcttcgcaatcctagcctgaactgcctccctggacttgaccatgtagtcagaagcctgtccagttcatcttaaaactggctacttcc

SEQ ID NO: 54669 - DNA, 110 bp, synthetic construct
  source 1..110: mol_type = other DNA
ggatcaataacatttgcattaaacattacccatgattctgggggggggtgtctatctagaagggggcagagctttcctagttgttcacccttggccgtaagcatggaagg

SEQ ID NO: 54670 - DNA, 110 bp, synthetic construct
  source 1..110: mol_type = other DNA
ggctaggggtcaaattggagctgtagcccctggcctatgtcacaaccgcaacgccagatccaagtcgcatctgcgacctgacctgcaccacagcttgcagcaattccgga

SEQ ID NO: 54671 - DNA, 110 bp, synthetic construct; identical to SEQ ID NO: 54670
  source 1..110: mol_type = other DNA

SEQ ID NO: 54672 - DNA, 110 bp, synthetic construct
  source 1..110: mol_type = other DNA
ttcctttctacacgtgcgtcttggcggctacctgggtagcatctttggcttttttgccctcctggttctctccacctggggaacacctacttcttctttgtccttagact

SEQ ID NO: 54673 - DNA, 110 bp, synthetic construct
  source 1..110: mol_type = other DNA
gccctcctggttctctccacctggggaacacctacttcttctttgtccttagactttcctccctgcccccacgctcttccagggactagtccctctttttcaaacaccta

SEQ ID NO: 54674 - DNA, 110 bp, synthetic construct
  source 1..110: mol_type = other DNA
caggtgtattgtaagacctctcctctatcccagggctataaaagccaacaggactacgggcttggggttggcgctccctgatcgtcaggaattcgtcccactgcattagc

SEQ ID NO: 54675 - DNA, 110 bp, synthetic construct
  source 1..110: mol_type = other DNA
ctataaaagccaacaggactacgggcttggggttggcgctccctgatcgtcaggaattcgtcccactgcattagcagcgtctcgtctctcaataaactcttctttctttt

SEQ ID NO: 54676 - DNA, 110 bp, synthetic construct
  source 1..110: mol_type = other DNA
ggagttggcattgcagatcggtgtagaaaggataggctttttaatacatgatgttgagtaagtcatatgtgtgaaaaaaaaaaaagatcctcctctacttcattttaccc

SEQ ID NO: 54677 - DNA, 110 bp, synthetic construct
  source 1..110: mol_type = other DNA
aatataagtaacttgttcaaagtcacattctagttaacagcagagccagaattcagatgcagccacgctcttaaccagtggcatcagtagcatatgtaacatacgataag

SEQ ID NO: 54678 - DNA, 110 bp, synthetic construct
  source 1..110: mol_type = other DNA
gatgcagccacgctcttaaccagtggcatcagtagcatatgtaacatacgataagcataggacagggtagtgggggcactggtgagcagtggaggtgggcagagaccaga

SEQ ID NO: 54679 - DNA, 110 bp, synthetic construct
  source 1..110: mol_type = other DNA
tgtcaagatcatccctagcctagaagctgttgaggactgtctgcagctttcaggccataatccattctgtctcacaaagcccgtccccacttgcttttcagcacaggatt

SEQ ID NO: 54680 - DNA, 110 bp, synthetic construct
  source 1..110: mol_type = other DNA
tgctttggttaagtcacatatccatgtatccatccatccatccagccagccagccagccagtcagccatccaaccacccatctagtgtatacggagctctttttccatgg

SEQ ID NO: 54681 - DNA, 110 bp, synthetic construct
  source 1..110: mol_type = other DNA
agccagtcagccatccaaccacccatctagtgtatacggagctctttttccatggcaggtacgatgctaagtgatactgttctgagcaagccggctcagtttgtctctac

SEQ ID NO: 54682 - DNA, 110 bp, synthetic construct
  source 1..110: mol_type = other DNA
ctaggggcatctggaaatgttatgtttccagctgtcacaatgcttggggggatatatctgacagctgggtgtgatccagggaaaagaaatctcttgtaacacataagcaa

SEQ ID NO: 54683 - DNA, 110 bp, synthetic construct
  source 1..110: mol_type = other DNA
atctgacagctgggtgtgatccagggaaaagaaatctcttgtaacacataagcaagtccagcagagaggctggtcctactgaatacatacatgggtcctctgttgaggac

SEQ ID NO: 54684 - DNA, 110 bp, synthetic construct
  source 1..110: mol_type = other DNA
atatgggattttacgatactaggggtcttgtcgattcccaagtggacaatgtaaactttagctggtactacatcaagatcctgctcgttaggataatctcattgaaacaa

SEQ ID NO: 54685 - DNA, 110 bp, synthetic construct
  source 1..110: mol_type = other DNA
ctttagctggtactacatcaagatcctgctcgttaggataatctcattgaaacaatacatgagaagtgtgtgatacatgtgaaaataagtgtgtttcaatagtgctaaaa

SEQ ID NO: 54686 - DNA, 110 bp, synthetic construct
  source 1..110: mol_type = other DNA
acaagccacccatctccttgcatagcctgcaataaacttttctgtgctccaaactctgacatttttgtttgtttggcattactgtgcattgagcacatgaacttgcatta

SEQ ID NO: 54687 - DNA, 110 bp, synthetic construct
  source 1..110: mol_type = other DNA
ctgacatttttgtttgtttggcattactgtgcattgagcacatgaacttgcattaacaaaggtgtcaacagggatggctcctgagggctgtgggggcatgtgtcagatct

SEQ ID NO: 54688 - DNA, 110 bp, synthetic construct
  source 1..110: mol_type = other DNA
cctgagactaagagagattaaataacttattcaatgttttaaagttagaaaatggcagagacagctttctaattcaagcttttcacattcagagaatgcaatctactttg

SEQ ID NO: 54689 - DNA, 110 bp, synthetic construct
  source 1..110: mol_type = other DNA
atgtgttagtattggagccagaagaagagtgtgaaggaccaggaatcagggcttcacgatgagatgttctgaatttgaatcccggcagagtcatttgctagtgttatgat

SEQ ID NO: 54690 - DNA, 110 bp, synthetic construct
  source 1..110: mol_type = other DNA
acgatgagatgttctgaatttgaatcccggcagagtcatttgctagtgttatgatcttaggcatactccatgcatcctaaattactaatttgtagctcagggagcagact

SEQ ID NO: 54691 - DNA, 110 bp, synthetic construct
  source 1..110: mol_type = other DNA
ttctgtagttatcctcagagatgctgattaagtcgacgaagggaggctggttgttctgaaagcactgggtattcattgcagctaagaaaggggctcagatctggaagaga

SEQ ID NO: 54692 - DNA, 110 bp, synthetic construct
  source 1..110: mol_type = other DNA
accttgaaaaagttacttatcttttctaaacctttgtattatcttcttatatgaaataggaatactgatactcttctaagagggtagctgtgaggaatcacatacagaat

SEQ ID NO: 54693 - DNA, 110 bp, synthetic construct
  source 1..110: mol_type = other DNA
ataggaatactgatactcttctaagagggtagctgtgaggaatcacatacagaatatcatatagtatatacagtgtctatagtatttagatatagtatctaaagctgctt

SEQ ID NO: 54694 - DNA, 110 bp, synthetic construct
  source 1..110: mol_type = other DNA
agggtaggggttgaattggacctgtaccggcaggcctacaccacagccacagcaactcagcaacttgggatccaagctgtgcctgcgacctacactgcagctcatagcaa

SEQ ID NO: 54695 - DNA, 110 bp, synthetic construct; identical to SEQ ID NO: 54694
  source 1..110: mol_type = other DNA

SEQ ID NO: 54696 - DNA, 110 bp, synthetic construct
  source 1..110: mol_type = other DNA
tatgagcaaaggatagaatgaaagggcaacttagtgaatatggttataagtggaaataagttaggtcctatctgaaacagcagaaagaccaacagaatatgcaaaacaat

SEQ ID NO: 54697 - DNA, 110 bp, synthetic construct
  source 1..110: mol_type = other DNA
ataagttaggtcctatctgaaacagcagaaagaccaacagaatatgcaaaacaattctttgtaagactttgaaaaacacgcaacacaggcgaatgacactgaatgacaaa

SEQ ID NO: 54698 - DNA, 110 bp, synthetic construct
  source 1..110: mol_type = other DNA
tacagtgaaaggaagattaaactggagcatgaacccagattaacatgtatcactccagcagcatatggtatctctacaatgtattacaattgtccattttctctgggata

SEQ ID NO: 54699 - DNA, 110 bp, synthetic construct
  source 1..110: mol_type = other DNA
cagcagcatatggtatctctacaatgtattacaattgtccattttctctgggataccaagtttgcattttcaagcactgaagaggcagttttatctccaaagtgccctga

SEQ ID NO: 54700 - DNA, 110 bp, synthetic construct
  source 1..110: mol_type = other DNA
attttatcgaagattagtttatttgcaatattgtaatcatttctgctgtacaacaaaggggttcagttatacaagtacacacatccattctgcttcagagacttttccca

SEQ ID NO: 54701 - DNA, 110 bp, synthetic construct
  source 1..110: mol_type = other DNA
aaggggttcagttatacaagtacacacatccattctgcttcagagacttttcccacatagattattgcataatattagatagagtttcctgtgctatacagcagttcccc

SEQ ID NO: 54702 - DNA, 110 bp, synthetic construct
  source 1..110: mol_type = other DNA
ttgccccccttgccccttcctcttgtgggtgtatccttggatctgacctttgacttactgaggccaacagaatgcaaaagacctttagatatggttgcacggtgcagcct

SEQ ID NO: 54703 - DNA, 110 bp, synthetic construct
  source 1..110: mol_type = other DNA
taacttagcttctaccatgatagttgttactgctattgttactgttactgatcacgagtcctctctgctcccggctccacaggcctgcaagtggagtggggcgtgcattc

SEQ ID NO: 54704 - DNA, 110 bp, synthetic construct
  source 1..110: mol_type = other DNA
gagtcctctctgctcccggctccacaggcctgcaagtggagtggggcgtgcattctttttttttgtttttggcttttgtctttttagggctgcacccacggcatatggag

SEQ ID NO: 54705 - DNA, 110 bp, synthetic construct; identical to SEQ ID NO: 54703
  source 1..110: mol_type = other DNA

SEQ ID NO: 54706 - DNA, 110 bp, synthetic construct
  source 1..110: mol_type = other DNA
tactgatcacgagtcctctctgctcccggctccacaggcctgcaagtggagtggggcgtgcattctttttttttgtttttggcttttgtctttttagggctgcacccacg

SEQ ID NO: 54707 - DNA, 110 bp, synthetic construct
  source 1..110: mol_type = other DNA
aggaaaggctggctaggaattttctctgctaagaaataatcttcacctgtttcctagaacagttctgatttctttgtggaccaatgaacttggaggttgtcccccaaaaa

SEQ ID NO: 54708 - DNA, 110 bp, synthetic construct
  source 1..110: mol_type = other DNA
agaacagttctgatttctttgtggaccaatgaacttggaggttgtcccccaaaaaaagtgggacacttttttttacacatcctttagctgctaaagggaggcagagatgg

SEQ ID NO: 54709 - DNA, 110 bp, synthetic construct
  source 1..110: mol_type = other DNA
ttgactatgtggtttcaggtatacatcatagagattctgtatatctatacattatgaaaagaacaccatcgtgggtctggttatcttctgtcaccatacaaaactactgc

SEQ ID NO: 54710 - DNA, 110 bp, synthetic construct; identical to SEQ ID NO: 54709
  source 1..110: mol_type = other DNA

SEQ ID NO: 54711 - DNA, 110 bp, synthetic construct
  source 1..110: mol_type = other DNA
gaatgagcacagaggcccactcccttccttcccatctttttcctcagcgcctctaacaaagacagtgtcaggctattcgccgcgttcccctcccaaactgccatttcaag

SEQ ID NO: 54712 - DNA, 110 bp, synthetic construct
  source 1..110: mol_type = other DNA
acaaagacagtgtcaggctattcgccgcgttcccctcccaaactgccatttcaagtcagagttttaccaaagtcattatctctttaatttgctccccaagatattagctc

SEQ ID NO: 54713 - DNA, 110 bp, synthetic construct
  source 1..110: mol_type = other DNA
agtcagagaactctccctggaatctccactctgtcacctatctcctgggcaacattgataactcaatttcagctttgtgggtcccccagctttttttttttttttttttt

SEQ ID NO: 54714 - DNA, 110 bp, synthetic construct
  source 1..110: mol_type = other DNA
acacaagtcatctaagggatctgacaaaacggacagaaagggagagactattttgtgatcgtccactgtgtgtcgggcggttggtaggaatgattccttctaatacttgt

SEQ ID NO: 54715 - DNA, 110 bp, synthetic construct
  source 1..110: mol_type = other DNA
tgatcgtccactgtgtgtcgggcggttggtaggaatgattccttctaatacttgtaacaatgcaaagaggtggttcttcctctttatgtatttttttatcattttatcta

SEQ ID NO: 54716 - DNA, 110 bp, synthetic construct
  source 1..110: mol_type = other DNA
attgcttctcatccatggaattcattttcatatttgaaatgctgcataatcaggtggatagagctctgaattggaaatccagggtacatggacttcacaaggactttgcc

SEQ ID NO: 54717 - DNA, 110 bp, synthetic construct
  source 1..110: mol_type = other DNA
ggatagagctctgaattggaaatccagggtacatggacttcacaaggactttgccgctgacacctaggtgggcatttaaacagcttaaagcctgagttaactcagtcgtg

SEQ ID NO: 54718 - DNA, 110 bp, synthetic construct
  source 1..110: mol_type = other DNA
tcagctttcaagcattattattattattattattattaatttttctctcctcttggcctaaatcacacgttccagagtaggaatcagaatggcatccagaatgaggattt

SEQ ID NO: 54719 - DNA, 110 bp, synthetic construct
  source 1..110: mol_type = other DNA
gcctaaatcacacgttccagagtaggaatcagaatggcatccagaatgaggatttagttcctgctccgcctctccttagctttgtgatcttaggaaaatgatttcccttt

SEQ ID NO: 54720 - DNA, 110 bp, synthetic construct
  source 1..110: mol_type = other DNA
tctaggaggaggtgagaacgaggacaaacatcctgagggtttgtgggacagaaaggagtgtggggccagagtccatgaggaggttggagacaggtgccaggcacttgaaa

SEQ ID NO: 54721 - DNA, 110 bp, synthetic construct
  source 1..110: mol_type = other DNA
gagtgtggggccagagtccatgaggaggttggagacaggtgccaggcacttgaaagcgatgctacagagcttgcattttattcttaagagcaaagggagaaattctgaaa

SEQ ID NO: 54722 - DNA, 110 bp, synthetic construct
  source 1..110: mol_type = other DNA
gagattaaaatgataaaaacccctcacatttctcatatctgtgcacacatatctttctacacatgttcacccacagaaacacacaggtgcatccatgtattcatatttcc

SEQ ID NO: 54723 - DNA, 110 bp, synthetic construct
  source 1..110: mol_type = other DNA
tctacacatgttcacccacagaaacacacaggtgcatccatgtattcatatttccatggagacacacccaaacatgtgcttacatcctcccaaaccacttgcacccacat

SEQ ID NO: 54724 - DNA, 110 bp, synthetic construct
  source 1..110: mol_type = other DNA
tgactctttcccacctcaccatccaagccaaccctcctggaggctaaacattccctgcaagggtcctgcatggggttgtttctgcattttagctcaaagaagtgcccttt

SEQ ID NO: 54725 - DNA, 110 bp, synthetic construct
  source 1..110: mol_type = other DNA
tgcaagggtcctgcatggggttgtttctgcattttagctcaaagaagtgccctttccctttctatatcaatcaacacgaacctcaaacaaaagtcacattcatcttgagt

SEQ ID NO: 54726 - DNA, 110 bp, synthetic construct; identical to SEQ ID NO: 54724
  source 1..110: mol_type = other DNA

SEQ ID NO: 54727 - DNA, 110 bp, synthetic construct; identical to SEQ ID NO: 54725
  source 1..110: mol_type = other DNA

SEQ ID NO: 54728 - DNA, 110 bp, synthetic construct
  source 1..110: mol_type = other DNA
tttaagcctgtgagtcagtttctgtcttgtaagaggacaagatcaccccaaactagggatgtgaagtaggcatggggttggggtggaggggaacaggatggctgatagaa

SEQ ID NO: 54729 - DNA, 110 bp, synthetic construct
  source 1..110: mol_type = other DNA
gggatgtgaagtaggcatggggttggggtggaggggaacaggatggctgatagaaagaaacacacaggtaaagagggcaggaccctcaactgacactctgcaatatgaaa

SEQ ID NO: 54730 - DNA, 110 bp, synthetic construct
  source 1..110: mol_type = other DNA
cgtcacttgaaaatggatcccaaaacaagatggattggcgaagccagtgatgaatagctaagcagacatgtaatacagcaaacgtaggaacatgctagtcataaactgtc

SEQ ID NO: 54731 - DNA, 110 bp, synthetic construct
  source 1..110: mol_type = other DNA
agctaagcagacatgtaatacagcaaacgtaggaacatgctagtcataaactgtcctttgggtttacaggcatttactgtaaagttctttcagctttgccatacatgtga

SEQ ID NO: 54732 - DNA, 110 bp, synthetic construct
  source 1..110: mol_type = other DNA
cttgaggacacttttggaagctctgtgtacctctgacttcctggtggtgattaaagcagccactgctaaaaccatcaatgacaacttgtccttattctcttctctatctg

SEQ ID NO: 54733 - DNA, 110 bp, synthetic construct
  source 1..110: mol_type = other DNA
gcagccactgctaaaaccatcaatgacaacttgtccttattctcttctctatctgctccctcacttccctttctgtatcatttcccaaatatgtccctgaatcctcatcc

SEQ ID NO: 54734 - DNA, 110 bp, synthetic construct
  source 1..110: mol_type = other DNA
gaaattgacagcactaacagcctgaacctacccagaacccagactggggacttgaacccagactaaacccagattgggacttaaacccacaattttcaattagaatccct

SEQ ID NO: 54735 - DNA, 110 bp, synthetic construct
  source 1..110: mol_type = other DNA
aacagcctgaacctacccagaacccagactggggacttgaacccagactaaacccagattgggacttaaacccacaattttcaattagaatccctcaccctgtgtctgga

SEQ ID NO: 54736 - DNA, 110 bp, synthetic construct
  source 1..110: mol_type = other DNA
tgtaaaactaaatttcgtattctaatcttaagagaaatagactatggggagttcctattgtggctcagtggttaatgaatccatccagggaccatgaggttgcaggttca

SEQ ID NO: 54737 - DNA, 110 bp, synthetic construct; identical to SEQ ID NO: 54736
  source 1..110: mol_type = other DNA

SEQ ID NO: 54738 - DNA, 110 bp, synthetic construct
  source 1..110: mol_type = other DNA
acaccgcatacccaagccacacattcataaagccaatctttcaactgaaaaatcagcttttgtgcaatgctaggctgcaaatcactagaattaaaaaaaaaaaaaaaatc

SEQ ID NO: 54739 - DNA, 110 bp, synthetic construct
  source 1..110: mol_type = other DNA
tgaaaaatcagcttttgtgcaatgctaggctgcaaatcactagaattaaaaaaaaaaaaaaaatccggggttcctattgtggtgcagcagaaaggaatccaactaggaac

SEQ ID NO: 54740 - DNA, 110 bp, synthetic construct
  source 1..110: mol_type = other DNA
aatattctgaatggatcatgggcggggcttgtgagaaccctgagctggcctgcacagctctgcaggggcactgagtttgaccccagaaacctgggtcaggaagccttaca

SEQ ID NO: 54741 - DNA, 110 bp, synthetic construct
  source 1..110: mol_type = other DNA
agctctgcaggggcactgagtttgaccccagaaacctgggtcaggaagccttacatttagtggtacttattgggaaacagcagggagtttgataagagatgctatcaata

SEQ ID NO: 54742 - DNA, 110 bp, synthetic construct
  source 1..110: mol_type = other DNA
acactattgaaatccagactttgcaagtcaattgattttctaagaactaattgggaagtctttgtgagatggccattaaaatgactcaatcttcgtattgctgaggactg

SEQ ID NO: 54743 - DNA, 110 bp, synthetic construct
  source 1..110: mol_type = other DNA
gatcccatatactgtctcatctgtgtaggagaaggttacagacagtacactgagcactgaactgatagtttgaaaacttgtactttagcctctgttcttccacctactac

SEQ ID NO: 54744 - DNA, 110 bp, synthetic construct
  source 1..110: mol_type = other DNA
cattttaaagtgaacaattcagtggcatttattacattcacaatattgtatggccaccacttctatctagttctgaaagttttgaaacgttttcgtcacccaaccgcttt

SEQ ID NO: 54745 - DNA, 110 bp, synthetic construct
  source 1..110: mol_type = other DNA
accacttctatctagttctgaaagttttgaaacgttttcgtcacccaaccgctttcggtatttcactcttaagtattgtgttagccgtggatttttctcttttgggacaa

SEQ ID NO: 54746 - DNA, 110 bp, synthetic construct
  source 1..110: mol_type = other DNA
gtaagtcacaatgcctattaggtaggcaactcacacatcagtcgcttatactaaggaccacatcatctacccttttcttgaagctgataagctttcagccaacgataatc

SEQ ID NO: 54747 - DNA, 110 bp, synthetic construct
  source 1..110: mol_type = other DNA
agagacagagttgggaggaaacagaaaaagaaggtttaattgccaggcaaagaggggaacatagcaggttagtggctcaaggccggttcccacccccttaaggtggggta

SEQ ID NO: 54748 - DNA, 110 bp, synthetic construct
  source 1..110: mol_type = other DNA
aaaagaaggtttaattgccaggcaaagaggggaacatagcaggttagtggctcaaggccggttcccacccccttaaggtggggtagtgaggagtcttacagtgtttgagg

SEQ ID NO: 54749 - DNA, 110 bp, synthetic construct
  source 1..110: mol_type = other DNA
ccaattagcgaaatcttaattcttggtatagtaaaatatttaagtccaagtaaacacatttaggactttaactcagaggcatttcttataaaaatgttgaccagagtcca

SEQ ID NO: 54750 - DNA, 110 bp, synthetic construct; identical to SEQ ID NO: 54749
  source 1..110: mol_type = other DNA

SEQ ID NO: 54751 - DNA, 110 bp, synthetic construct
  source 1..110: mol_type = other DNA
agcttgactgggccatagggtgctcaacagtggttcaaggttattctgaatgtgtcttgagggtgtttctgatgagattagcgtttgaattgataggaggaataaaccag

SEQ ID NO: 54752 - DNA, 110 bp, synthetic construct
  source 1..110: mol_type = other DNA
cttgagggtgtttctgatgagattagcgtttgaattgataggaggaataaaccagcttactctcccctaactggatgacctccatccaatccattgaaagcttacgtaga

SEQ ID NO: 54753 - DNA, 110 bp, synthetic construct
  source 1..110: mol_type = other DNA
tctgacttttaaccatatgcattaatttagagagctaatataaggtaagaatgcgtgtagagggggtggaagataaaatttggatgactgcatggttattttatgatttt

SEQ ID NO: 54754 - DNA, 110 bp, synthetic construct
  source 1..110: mol_type = other DNA
gtaaggaggtaaggactgaggccggggaggcagggaagatctcattaagacgagagtaaggaactggatttgactccaagcgggaaggtgaggtagacagacatctttga

SEQ ID NO: 54755 - DNA, 110 bp, synthetic construct
  source 1..110: mol_type = other DNA
gtaaggaactggatttgactccaagcgggaaggtgaggtagacagacatctttgaaaacccctgagataacaggaccctatccatcggtggtagaagccccatatagccc

SEQ ID NO: 54756 - DNA, 110 bp, synthetic construct
  source 1..110: mol_type = other DNA
gagccacaatgggaactcctgaaaatcgctctttaatagctcttttcctttccctgtatcacaccctgatccccaagctcctcccacaaacaaccaaaaaaactactttc

SEQ ID NO: 54757 - DNA, 110 bp, synthetic construct; identical to SEQ ID NO: 54756
  source 1..110: mol_type = other DNA

SEQ ID NO: 54758 - DNA, 110 bp, synthetic construct
  source 1..110: mol_type = other DNA
tcagtctctttcacataatgacccttgtgcatgttgtttcttttgcttgaaacgctcttcctctgggaccttacatagctgatccgactcctttcctcgtgctcatttca

SEQ ID NO: 54759 - DNA, 110 bp, synthetic construct
  source 1..110: mol_type = other DNA
gttttcaagcaagacaattcagttttcctaaacattctgatagtctctctctctctctctctctctctctcttttttaagggcttcatccatggcatatagaggttccaa

SEQ ID NO: 54760 - DNA, 110 bp, synthetic construct
  source 1..110: mol_type = other DNA
tctgatagtctctctctctctctctctctctctctcttttttaagggcttcatccatggcatatagaggttccaaggttaggggtcaaaacagagctgcagctgctggcc

SEQ ID NO: 54761 - DNA, 110 bp, synthetic construct
  source 1..110: mol_type = other DNA
attcacacagacacacacctctgtaagcacatacccaggatcagtcacttatgcatgcacacaaacccaagtgtgcccagctgcttgcccaaagaattgtgcacatgcct

SEQ ID NO: 54762 - DNA, 110 bp, synthetic construct
  source 1..110: mol_type = other DNA
cttaaagatagatacacatgcttccaatgccatatgtgctggcatcagagctgacattctttttcaaaggcacttttaatttgggacttcacagtacttaaccccaggat

SEQ ID NO: 54763 - DNA, 110 bp, synthetic construct
  source 1..110: mol_type = other DNA
attctttttcaaaggcacttttaatttgggacttcacagtacttaaccccaggatgctctgtgagtcattgacagtgccagagacagagccaggggaaccccgggctcat

SEQ ID NO: 54764 - DNA, 110 bp, synthetic construct
  source 1..110: mol_type = other DNA
aaatgcacgttctttctctctggaagatcagaaccgtacatcttcatggtcaccccacgtgagaagcttgaatacaacggagaaagactttcacattctgagtagaagga

SEQ ID NO: 54765 - DNA, 110 bp, synthetic construct
  source 1..110: mol_type = other DNA
cagcagaagggatcgaaaacaagtaacaggttcccttgctcactcccagagaggaggtgagctggtgctttatacagggcaaggggagaggcaggtccaggggttgggcc

SEQ ID NO: 54766 - DNA, 110 bp, synthetic construct
  source 1..110: mol_type = other DNA
ggtgagctggtgctttatacagggcaaggggagaggcaggtccaggggttgggccagagggatggtttaggtggtctgcccatccccttggtggtgctgtgtgcaggtac

SEQ ID NO: 54767 - DNA, 110 bp, synthetic construct
  source 1..110: mol_type = other DNA
caaggtgaagaggcagcttattcctgatacctttctttattcttctttagctgctccccactccccaattcagctcttcttagagtcatccatcatcacacctagcctac

SEQ ID NO: 54768 - DNA, 110 bp, synthetic construct
  source 1..110: mol_type = other DNA
ccccactccccaattcagctcttcttagagtcatccatcatcacacctagcctaccccacattcaagccctaataagttctttctttctttttttttttttttgccattt

SEQ ID NO: 54769 - DNA, 110 bp, synthetic construct
  source 1..110: mol_type = other DNA
atgtaagcaagagggtcacacacacacacacacacacacacaaataataacaagatctggttcataaaagaagaaaagagctcgctgccatgtatttcaatccatttgat

SEQ ID NO: 54770 - DNA, 110 bp, synthetic construct
  source 1..110: mol_type = other DNA
tctggttcataaaagaagaaaagagctcgctgccatgtatttcaatccatttgatcttacctctgcaccatctcagagaacattttttaaatgtcatttactcgtggcag

SEQ ID NO: 54771 - DNA, 110 bp, synthetic construct
  source 1..110: mol_type = other DNA
aataatcattattcactattgtgtatcaggctctgagtttggctgttccacgaatggttacatttaatctgccaatggtcccagatatgggagacatttatagttacact

SEQ ID NO: 54772 - DNA, 110 bp, synthetic construct
  source 1..110: mol_type = other DNA
ggttacatttaatctgccaatggtcccagatatgggagacatttatagttacactcatttcatggacaatgaaactgggtctcagagagattatttctgcaggattacat

SEQ ID NO: 54773 - DNA, 110 bp, synthetic construct
  source 1..110: mol_type = other DNA
ctgattcagcccctgtcctgggaacttccatatgctgcaggtacggccctaaaaaacaaaacaaaacaaaaaatacatatcatattgcttttttgtgtcattgggttaaa

SEQ ID NO: 54774 - DNA, 110 bp, synthetic construct; identical to SEQ ID NO: 54773
  source 1..110: mol_type = other DNA

SEQ ID NO: 54775 - DNA, 110 bp, synthetic construct
  source 1..110: mol_type = other DNA
agttgtgacagtctcattggcttggtcgttgccaggcgacgcagaaatcttccttcctcttgcagaggtgataaagtagtaatattgctcctattagagatgcaaggtac

SEQ ID NO: 54776 - DNA, 110 bp, synthetic construct
  source 1..110: mol_type = other DNA
cctcttgcagaggtgataaagtagtaatattgctcctattagagatgcaaggtacatctcttggatctacccagctccctggaaaactccataagacacattcactaatt

SEQ ID NO: 54777 - DNA, 110 bp, synthetic construct
  source 1..110: mol_type = other DNA
aactgacacagaggggggttggccacttgttcttggggaaagacaaagaaattgttacaggctgtgctggaacctaaattgtagaacctcagaatgaaagtaaagctcaa

SEQ ID NO: 54778 - DNA, 110 bp, synthetic construct
  source 1..110: mol_type = other DNA
ctttgtcataatgggaggacgtgtggagttatggaaatagcaagagtttggagtcagtcaggttcaaataaccacggtgtgacctgtgaccagtcactaaagctctctgg

SEQ ID NO: 54779 - DNA, 110 bp, synthetic construct
  source 1..110: mol_type = other DNA
agtcaggttcaaataaccacggtgtgacctgtgaccagtcactaaagctctctgggacttgatcatcatgtcattaaatttgggatgaccagaggcagaaaaacatagca

SEQ ID NO: 54780 - DNA, 110 bp, synthetic construct
  source 1..110: mol_type = other DNA
ctggtggagcacctgcaacaccttgaggtgagcacatttaccaaactggctccaggggtatctggtggggtaccagcaatacttgttacagtccacacttgcctcctcca

SEQ ID NO: 54781 - DNA, 110 bp, synthetic construct
  source 1..110: mol_type = other DNA
gggtatctggtggggtaccagcaatacttgttacagtccacacttgcctcctccaggtttgtgtcattctcacattaagttcatttcatcatgctgcatggacctgcaga

SEQ ID NO: 54782 - DNA, 110 bp, synthetic construct
  source 1..110: mol_type = other DNA
acatgcatccggctgacttagaaaggtctccaaggaggcgtgccactatcacagtgaagcagctgtcctctcagtcagtgagatgagccaaatcaaacagtactcagtaa

SEQ ID NO: 54783 - DNA, 110 bp, synthetic construct
  source 1..110: mol_type = other DNA
taaaggctctgagaagccctgcaaagaacccagcatatgccaagtcttgaccacaggtacctcagaacactgtctctcccaaatcctggagacctgctgttacttcaggt

SEQ ID NO: 54784 - DNA, 110 bp, synthetic construct
  source 1..110: mol_type = other DNA
ggtacctcagaacactgtctctcccaaatcctggagacctgctgttacttcaggttgactctaacagttatcactcatagcccccctactctggccccaattttctcata

SEQ ID NO: 54785 - DNA, 110 bp, synthetic construct
  source 1..110: mol_type = other DNA
atgcatcttcagatagaccctgcaagcagactcggttgtgccctgaacccaaaagtagggagaaacaagactgagctggtagctacaagcaggactgtctccctccaacc

SEQ ID NO: 54786 - DNA, 110 bp, synthetic construct
  source 1..110: mol_type = other DNA
tagggagaaacaagactgagctggtagctacaagcaggactgtctccctccaaccctgaatctgccaccctaagcctagcatggccaggtgcaacaaaaacattcctgct

SEQ ID NO: 54787 - DNA, 110 bp, synthetic construct
  source 1..110: mol_type = other DNA
gcactgggtcgtgttggtaggggaaagacctctttgctgttacccttttgtcccatcaggggcctgtcccacagcatcttgggcagggtaaggtggtggctagttctgac

SEQ ID NO: 54788 - DNA, 110 bp, synthetic construct
  source 1..110: mol_type = other DNA
tcaggggcctgtcccacagcatcttgggcagggtaaggtggtggctagttctgacccagctggtagcaccagggctttctctgtggacaaggcaatgaagaactctgacc

SEQ ID NO: 54789 - DNA, 110 bp, synthetic construct
  source 1..110: mol_type = other DNA
tgttattcttgaaacaggaagttgaacttccccacctgcaaatgaaactggaaacctcgtctccccaccccccaaaggactggggagaaaagagctttcaaccggaagaa

SEQ ID NO: 54790 - DNA, 110 bp, synthetic construct
  source 1..110: mol_type = other DNA
ctcgtctccccaccccccaaaggactggggagaaaagagctttcaaccggaagaacgccttctcaaatatacaaaatacttttctcctttcttagtactcagcaagagca

SEQ ID NO: 54791 - DNA, 110 bp, synthetic construct; identical to SEQ ID NO: 54789
  source 1..110: mol_type = other DNA

SEQ ID NO: 54792 - DNA, 110 bp, synthetic construct; identical to SEQ ID NO: 54790
  source 1..110: mol_type = other DNA

SEQ ID NO: 54793 - DNA, 110 bp, synthetic construct
  source 1..110: mol_type = other DNA
ggagggcatgcaaacattcagcccataacacttaaccttgtccaaaatgattctttttttttaatgatactcacagctatctgattcagcattgctgtattcagtctatt

SEQ ID NO: 54794 - DNA, 110 bp, synthetic construct
  source 1..110: mol_type = other DNA
tatggcaccaaatgggtgtgagtcaaaaccctgaccccatgatttagaatctgtgtgacagtctgtaagttactgcacctctttgactctgttttatcgtctgtaaaagg

SEQ ID NO: 54795 - DNA, 110 bp, synthetic construct
  source 1..110: mol_type = other DNA
ctcttgggttctattctctttacagtggccaagtattgatcaagagctcttacagttacaaataatcttccacaccatagttcctattatgagggaaaactccagtccca

SEQ ID NO: 54796 - DNA, 110 bp, synthetic construct
  source 1..110: mol_type = other DNA
cctctctaggtaataacttattatcatttttttggccacacctgcagcatgcagccgttcccggaccggggacggaacccgcatcacagaagtgacctgagccacagcag

SEQ ID NO: 54797 - DNA, 110 bp, synthetic construct
  source 1..110: mol_type = other DNA
acttattatcatttttttggccacacctgcagcatgcagccgttcccggaccggggacggaacccgcatcacagaagtgacctgagccacagcagtgacaaggctgggtc

SEQ ID NO: 54798 - DNA, 110 bp, synthetic construct
  source 1..110: mol_type = other DNA
ataaaccagccaatgaaagcgtcaagaaggtgggatgttacatgaagtcttagatcaaagaaagaaaagtttaaaaaacatccatgaaaatggcaaaacatcaagccttc

SEQ ID NO: 54799 - DNA, 110 bp, synthetic construct
  source 1..110: mol_type = other DNA
atcgggtttgatactgctaagccacgacgggagctccagttatgttttagactaagaaaaataacttacagggagttcccgttgtggcgcagtggttaatgaatctgact

SEQ ID NO: 54800 - DNA, 110 bp, synthetic construct; identical to SEQ ID NO: 54799
  source 1..110: mol_type = other DNA

SEQ ID NO: 54801 - DNA, 110 bp, synthetic construct
  source 1..110: mol_type = other DNA
aaaaaattaaatggaacaattttaggccaaaatgaaaagtcacatgttttaaaactttatctgcatccagttcagacttcaatcattcatcataaactgtccaccaggag

SEQ ID NO: 54802 - DNA, 110 bp, synthetic construct
  source 1..110: mol_type = other DNA
tttatctgcatccagttcagacttcaatcattcatcataaactgtccaccaggagatagaatgggaaaacccagagcatttataaaacactttctcacacacacacacac

SEQ ID NO: 54803 - DNA, 110 bp, synthetic construct
  source 1..110: mol_type = other DNA
aactcactgaaccacagcaggagcccccacaattatctcttttctaatgttagacatgcactgtgtgtccacagttggatggagctgacgtgcctggaggacacacctag

SEQ ID NO: 54804 - DNA, 110 bp, synthetic construct
  source 1..110: mol_type = other DNA
gctgtgtgaatcgggtcctcagtttcctccactggaaaatgaaccatttggacttaagacttcggaggttgtcttctgagtcgtagcttcctggagtcattggtttgtga

SEQ ID NO: 54805 - DNA, 110 bp, synthetic construct
  source 1..110: mol_type = other DNA
aagacttcggaggttgtcttctgagtcgtagcttcctggagtcattggtttgtgatgactttttctaaattgctctgaaaggttgatcaggaagttaactatactttcag

SEQ ID NO: 54806 - DNA, 110 bp, synthetic construct
  source 1..110: mol_type = other DNA
aacatgggcaaaatattaaatgtgtttatgtgtctcagttatatcatctgtaaaatggagctaataacattgcagatttcgtaggactgctcggagtttatacatgttct

SEQ ID NO: 54807 - DNA, 110 bp, synthetic construct; identical to SEQ ID NO: 54806
  source 1..110: mol_type = other DNA

SEQ ID NO: 54808 - DNA, 110 bp, synthetic construct
  source 1..110: mol_type = other DNA
agggatgatgtcacagagttttgagtttatttgctccttatctggctagaggtgcagggctgccctttcccctctaatctgaaagcagcttgctcccttgggcagctctg

SEQ ID NO: 54809 - DNA, 110 bp, synthetic construct
  source 1..110: mol_type = other DNA
gaaagacaggagtcttcaccataaggcagttatagatggatgactctgtgtgtgtgtgtgtgtgtgtgtgtgtggtgctcaccctcaatgtctcaaattctggaagctga

SEQ ID NO: 54810 - DNA, 110 bp, synthetic construct
  source 1..110: mol_type = other DNA
gtgtgtgtgtgtgtgtgtggtgctcaccctcaatgtctcaaattctggaagctgaggacacctgcatctacagctcattgttatttatttggagccatttagatcaatcg

SEQ ID NO: 54811 - DNA, 110 bp, synthetic construct; identical to SEQ ID NO: 54809
  source 1..110: mol_type = other DNA

SEQ ID NO: 54812 - DNA, 110 bp, synthetic construct; identical to SEQ ID NO: 54810
  source 1..110: mol_type = other DNA

SEQ ID NO: 54813 - DNA, 110 bp, synthetic construct
  source 1..110: mol_type = other DNA
aggagctgcatcctgaaggtgctggaatccttgtagagaagattctttgcatcccactagagtctaatggatgtggagagctgctcaagaagtctctatccaggagggta

SEQ ID NO: 54814 - DNA, 110 bp, synthetic construct
  source 1..110: mol_type = other DNA
actagagtctaatggatgtggagagctgctcaagaagtctctatccaggagggtaatgtgtatagatcctggagaactgctgggaaggtagatccctcttcattagcatc

SEQ ID NO: 54815 - DNA, 110 bp, synthetic construct
  source 1..110: mol_type = other DNA
ccgtctctggaggctggtgggggctcggagctcaggcctggaggctggctggcccatctgctgcttcctgtctttctgtgctctgctgctttgttctgctgtggtgctgg

SEQ ID NO: 54816 - DNA, 110 bp, synthetic construct
  source 1..110: mol_type = other DNA
ctcttttagttaaaacaaagtttgtatgtattcaggctagtatattagcttcctaggtttgctgtacccaaggaccacaagatggatgtattaacagaaattgattactt

SEQ ID NO: 54817 - DNA, 110 bp, synthetic construct
  source 1..110: mol_type = other DNA
ggtttgctgtacccaaggaccacaagatggatgtattaacagaaattgattactttacagttctagaggccagaaatcctaaatcaaagtgtcagcagggccatgttccc

SEQ ID NO: 54818 - DNA, 110 bp, synthetic construct
  source 1..110: mol_type = other DNA
tttgtaggagactcaggagtaatccaggtagagacattgaaaaatcaagagcagcataagcaaaggagcccaggagagagaggatggtttattcatcacagaagttccct

SEQ ID NO: 54819 - DNA, 110 bp, synthetic construct
  source 1..110: mol_type = other DNA
ataagcaaaggagcccaggagagagaggatggtttattcatcacagaagttccctttgcccagagcctaagtccggtgctggagtgccaggggaagaggcaagaaataca

SEQ ID NO: 54820 - DNA, 110 bp, synthetic construct
  source 1..110: mol_type = other DNA
aaaagtattttcaggacctggaaaggtggatctctttgaaggagctttaaaaacgtggggtttgaatctcattattgatgatacgactgggtgctgtgcaccaagtccat

SEQ ID NO: 54821 - DNA, 110 bp, synthetic construct
  source 1..110: mol_type = other DNA
tcagaagaaaaacaccattgaaaaggtagttcactactcatcgttcccaagagaagtggcacatcatacttaaggggccacacggggcagcatcagggtcagtcaagagg

SEQ ID NO: 54822 - DNA, 110 bp, synthetic construct
  source 1..110: mol_type = other DNA
gtggcacatcatacttaaggggccacacggggcagcatcagggtcagtcaagaggcagaggggcagaggagaaaatgtcgacaagaacctttcttgtggtttctgtggga

SEQ ID NO: 54823 - DNA, 110 bp, synthetic construct
  source 1..110: mol_type = other DNA
ttcacctgaagccagagcatttaccttaaggctgttacaaaacattccaagacctactgaccaagaacatgcaaactgatcttctcataaagaatcagagcttttgggtc

SEQ ID NO: 54824 - DNA, 110 bp, synthetic construct
  source 1..110: mol_type = other DNA
actgaccaagaacatgcaaactgatcttctcataaagaatcagagcttttgggtctgaacaatagcgagctgagtccaactgttactggggaagttaatgtgaaagagaa

SEQ ID NO: 54825 - DNA, 110 bp, synthetic construct
  source 1..110: mol_type = other DNA
gggtgtcattctcacatcctttgtgtccctgaggtagagtcagcagcatttcagctctctagcttatatgcataggcccactgtggttctaaagcacaacagctttgtga

SEQ ID NO: 54826 - DNA, 110 bp, synthetic construct
  source 1..110: mol_type = other DNA
tctctagcttatatgcataggcccactgtggttctaaagcacaacagctttgtgacagtaactgctaaaggggaatttcttttttgtttgtttgtttgtatttttagggt

SEQ ID NO: 54827 - DNA, 110 bp, synthetic construct
  source 1..110: mol_type = other DNA
aaagaggtctgcctgattgtctccatctgccaagctccaagtctgggaaacttatcaaacccagagctgtgcaatctctttcaataggctgctcatatagaggcgctgtg

SEQ ID NO: 54828 - DNA, 110 bp, synthetic construct
  source 1..110: mol_type = other DNA
actttcatagctggagaggagaaatcaatgcttggcttcaaagcttcaagacaagatggctctcttggtggtggttaatgtagctgataactttaaggtaaagccagtgc

SEQ ID NO: 54829 - DNA, 110 bp, synthetic construct
  source 1..110: mol_type = other DNA
ttgtgtttatcttaaagagaaaagcgtgcaagatgtggctctaaaagtttttctgcagagatagtaacatggtagaatttgcgttagaataatgttaacagctgtatgag

SEQ ID NO: 54830 - DNA, 110 bp, synthetic construct
  source 1..110: mol_type = other DNA
cagagatagtaacatggtagaatttgcgttagaataatgttaacagctgtatgaggtgtagattatgtgttgggggaagggcagtcagcaggcataatgatgctacaagg

SEQ ID NO: 54831 - DNA, 110 bp, synthetic construct
  source 1..110: mol_type = other DNA
ggaaaatggaagaaaccacacttctgctcacttggaaaaaaataaataagctaatgattttcctgaagtttctttacagaacatctcaactgtattctgaacatgatagg

SEQ ID NO: 54832 - DNA, 110 bp, synthetic construct
  source 1..110: mol_type = other DNA
gattttcctgaagtttctttacagaacatctcaactgtattctgaacatgataggaccctcgctcccaactaagacgtctttatttccctgaaacagtttctccttcggc

SEQ ID NO: 54833 - DNA, 110 bp, synthetic construct
  source 1..110: mol_type = other DNA
gcaaatcattacatgcaacctggattgtcagagtctgacagtcagtggggtataaaggagatgggatgacccctaatacctgtatattgatattaaaggctgactagagg

SEQ ID NO: 54834 - DNA, 110 bp, synthetic construct
  source 1..110: mol_type = other DNA
aggagatgggatgacccctaatacctgtatattgatattaaaggctgactagaggaagtcatccttcactctgtcccagctctttgcaccccactcaaaaccagatcatt

SEQ ID NO: 54835 - DNA, 110 bp, synthetic construct
  source 1..110: mol_type = other DNA
ctcctgtactaaatgataaaagagatgtagggctagaaaagagtcaggaaaacccacttgaactgttgggctgatgggtcaccgggctggacatcacagggctgttcctt

SEQ ID NO: 54836 - DNA, 110 bp, synthetic construct
  source 1..110: mol_type = other DNA
acttgaactgttgggctgatgggtcaccgggctggacatcacagggctgttccttttttgttacaagtgagctgagagcagtcccttcattcgagtgccatgtctgtccc

SEQ ID NO: 54837 - DNA, 110 bp, synthetic construct; identical to SEQ ID NO: 54835
  source 1..110: mol_type = other DNA

SEQ ID NO: 54838 - DNA, 110 bp, synthetic construct; identical to SEQ ID NO: 54836
  source 1..110: mol_type = other DNA

SEQ ID NO: 54839 - DNA, 110 bp, synthetic construct
  source 1..110: mol_type = other DNA
gtaaatattgtgcaatttcgaagcattcacacctagtttggttccatttaaagcgtttctccataactttcttgagccactttacctttgaaaataatctatctcacttt

SEQ ID NO: 54840 - DNA, 110 bp, synthetic construct
  source 1..110: mol_type = other DNA
gagtctgccacacctgagttgacaacctgtggtccttaactagctctctgacctctggcaagttacctaatatcatggagcttctgtttccctatttgtaaaatgaggat

SEQ ID NO: 54841 - DNA, 110 bp, synthetic construct
  source 1..110: mol_type = other DNA
tcagaattactgagaccatcaaagtgacttgccagggaaggtaccctttgggcattttcctctccaggatgatatgcttggaatcccacccaaaccttgtcctgcccttt

SEQ ID NO: 54842 - DNA, 110 bp, synthetic construct
  source 1..110: mol_type = other DNA
gatgagctgtctgctaattataacttgcccatgaagccacaggcccagtagcctgtgatgacacagcacgcagggatcccggctttgctgggattcctaatgagcttcat

SEQ ID NO: 54843 - DNA, 110 bp, synthetic construct
  source 1..110: mol_type = other DNA
gctagtggatagaagagctagatccaaatttacttttatttttatttattttattttttagggccatacctgcagcataggtgagttccccggctaggggttgaatcaga

SEQ ID NO: 54844 - DNA, 110 bp, synthetic construct
  source 1..110: mol_type = other DNA
agctagatccaaatttacttttatttttatttattttattttttagggccatacctgcagcataggtgagttccccggctaggggttgaatcagagctacagatgtcagc

SEQ ID NO: 54845 - DNA, 110 bp, synthetic construct
  source 1..110: mol_type = other DNA
gcagcgtctccagtgacagaagccaaaggagaacagatgctgtctccacttctgtgaatggaggataccaacacaagaaccacgcatcacctagtgatgctcacagccct

SEQ ID NO: 54846 - DNA, 110 bp, synthetic construct
  source 1..110: mol_type = other DNA
gacctctagcctgggaacttccataggccacaagtgtggccctgaattccttactttattgaatagaagaatatcattaggagagttggcattgctttctaatcaccaac

SEQ ID NO: 54847 - DNA, 110 bp, synthetic construct
  source 1..110: mol_type = other DNA
ggaaacatgggaattccaggaactatgaatcagatatctccactgaagaaaccattttctggtaatgtcatagcaccaccgaaattcacgcgctctactccatcactgac

SEQ ID NO: 54848 - DNA, 110 bp, synthetic construct
  source 1..110: mol_type = other DNA
accaaccatgcatactcttctccagattatgtcgttagctagaaaggcattatagcatagtgtagaactaatatgcctggatcgaatcctgccaatgccacctgcaagtg

SEQ ID NO: 54849 - DNA, 110 bp, synthetic construct
  source 1..110: mol_type = other DNA
catagtgtagaactaatatgcctggatcgaatcctgccaatgccacctgcaagtggtataaccttgggcaagctatttaaccttttgtggcaaaaagataatagtacctt

SEQ ID NO: 54850 - DNA, 110 bp, synthetic construct
  source 1..110: mol_type = other DNA
ccacttgtcttatagtttttctgctagttttgtgcacaatctatgagctcttcggtggctacactctagagagagaaagaagaaacagttcagaagaagtagcccaggat

SEQ ID NO: 54851 - DNA, 110 bp, synthetic construct
  source 1..110: mol_type = other DNA
tggctacactctagagagagaaagaagaaacagttcagaagaagtagcccaggatctaggtttctcatcctggttatggctagaacaggtatacttttaacttgaacaaa

SEQ ID NO: 54852 - DNA, 110 bp, synthetic construct
  source 1..110: mol_type = other DNA
gtcagtttgactctatctgcctccactatttacagctatgttgatggtgattgttgttttagtcccatcgtctacgtctttattcactgagtacccacttagagaaagac

SEQ ID NO: 54853 - DNA, 110 bp, synthetic construct
  source 1..110: mol_type = other DNA
gttttagtcccatcgtctacgtctttattcactgagtacccacttagagaaagacaggagtgtctccagcttctgccagtggtccatgtccataatcccttcaccagaca

SEQ ID NO: 54854 - DNA, 110 bp, synthetic construct
  source 1..110: mol_type = other DNA
catatcagttgggggggtggtgttggtggttatggcttcaacatgtgaatttgggaaggggctggtttggacacaaacattcagtccataacagctcccaaactggattt

SEQ ID NO: 54855 - DNA, 110 bp, synthetic construct
  source 1..110: mol_type = other DNA
aaggggctggtttggacacaaacattcagtccataacagctcccaaactggatttgcactgaaaattagataatttgcctcataggacaaaaatccaggaaaaacaggtc

SEQ ID NO: 54856 - DNA, 110 bp, synthetic construct
  source 1..110: mol_type = other DNA
gttttgctgagaatttccacatccacagactgggataagcactaggaacaccttggagttccccatgtggtacagtggaaacaaatccgactagtatccatgaggatgtg

SEQ ID NO: 54857 - DNA, 110 bp, synthetic construct
  source 1..110: mol_type = other DNA
tccacatccacagactgggataagcactaggaacaccttggagttccccatgtggtacagtggaaacaaatccgactagtatccatgaggatgtgaattcgatccctggt

SEQ ID NO: 54858 - DNA, 110 bp, synthetic construct
  source 1..110: mol_type = other DNA
gaaatttcacttacaaatcttcattctcccatcccttttatagggttgccagacttaacaaataaaaatatagacttctcagctgaatttcaggtaagatgtatatattt

SEQ ID NO: 54859 - DNA, 110 bp, synthetic construct
  source 1..110: mol_type = other DNA
atcaatgccagaccttcaaatttgtcaagaaaatccccatatctggatttttatgtgatgagttccttttataaaaagctcttcagagttcccattgtgattcagtgggt

SEQ ID NO: 54860 - DNA, 110 bp, synthetic construct
  source 1..110: mol_type = other DNA
ctccttcctttgccatctgggtatttgcccacagctggccatggctttgccaaccacggattgcaattctctgctgatcccaaataaaccaccctccttttttggttaga

SEQ ID NO: 54861 - DNA, 110 bp, synthetic construct
  source 1..110: mol_type = other DNA
agcattgttagtaaactcggccgtcggtgtttaacactggagtttaagggtgttaagacataagctttattaagtcaagtgtaaaactgtttctttgggaatgttgcttc

SEQ ID NO: 54862 - DNA, 110 bp, synthetic construct
  source 1..110: mol_type = other DNA
tatagccccaattcgatccctaacctgggaacgtccatatgtggagggtgtggccttaaaaagcaaataataataataatagcagctactggagttcccgctgtggcaga

SEQ ID NO: 54863 - DNA, 110 bp, synthetic construct
  source 1..110: mol_type = other DNA
ttaaaaagcaaataataataataatagcagctactggagttcccgctgtggcagagcagattaagaatccagcactgtccatccccagctcagcacagcgctgagttaag

SEQ ID NO: 54864 - DNA, 110 bp, synthetic construct
  source 1..110: mol_type = other DNA
ggcctatatctagacaaaactctaattcaaaaagaatcatacaccccagtattcatagcagcactctttacagtagccaagacgtagaaacaacctaaatgtctatcaat

SEQ ID NO: 54865 - DNA, 110 bp, synthetic construct
  source 1..110: mol_type = other DNA
aaaactctaattcaaaaagaatcatacaccccagtattcatagcagcactctttacagtagccaagacgtagaaacaacctaaatgtctatcaatggaggaatggataaa

SEQ ID NO: 54866 - DNA, 110 bp, synthetic construct
  source 1..110: mol_type = other DNA
ttgtgagcctcaaatgaaatcatacaggagcagtaaatgagagaagaagtgctcactataaaaagagactccaacaatacacatattctgaacaaaaagctcaagtcccc

SEQ ID NO: 54867 - DNA, 110 bp, synthetic construct
  source 1..110: mol_type = other DNA
ctataaaaagagactccaacaatacacatattctgaacaaaaagctcaagtcccccttcaggctctagctcccagtcccaccctccttggtgtactcactgtcaagacct

SEQ ID NO: 54868 - DNA, 110 bp, synthetic construct
  source 1..110: mol_type = other DNA
gctcccaatgttgaatttgctttagctgtatacatccacccatatcccaaaaatgttttgtctgtttggatttatgttgcctcccttatacgcaacagataattgtttca

SEQ ID NO: 54869 - DNA, 110 bp, synthetic construct
  source 1..110: mol_type = other DNA
ctcgggcaaggtggtgactcagctgcctgttccaggatactgtgaactgcttctgatccttcttcccaaaggagactgtaaataaggcattcaaagcagcccaagtgccc

SEQ ID NO: 54870 - DNA, 110 bp, synthetic construct
  source 1..110: mol_type = other DNA
cactgagaaagttttggcgtgaatttggggatgttctgggtgccttgaaaggcccacggggaatgactaacatacaaactttgcccgagttgcaatgagtgggctaaatg

SEQ ID NO: 54871 - DNA, 110 bp, synthetic construct
  source 1..110: mol_type = other DNA
acggggaatgactaacatacaaactttgcccgagttgcaatgagtgggctaaatgtgacatcagtaagggtgctttttctttttctttttttgcatttttgcatttattt

SEQ ID NO: 54872 - DNA, 110 bp, synthetic construct; identical to SEQ ID NO: 54870
  source 1..110: mol_type = other DNA

SEQ ID NO: 54873 - DNA, 110 bp, synthetic construct; identical to SEQ ID NO: 54871
  source 1..110: mol_type = other DNA

SEQ ID NO: 54874 - DNA, 110 bp, synthetic construct
  source 1..110: mol_type = other DNA
gaaattaaggagcacaaaggctgaaagatttgcccaagtttgcacagctcatctttctgactccacaaccaaatctcagaatactagacagcagagtggtctcaccaatt

SEQ ID NO: 54875 - DNA, 110 bp, synthetic construct
  source 1..110: mol_type = other DNA
ttggattttggctcgccaaatccagcctgccccggggctgcaggtacccggctgagagaaaaccccgtgtccagttccagaatgcttatgccagtgggggcagaaggaga

SEQ ID NO: 54876 - DNA, 110 bp, synthetic construct
  source 1..110: mol_type = other DNA
gagaaaaccccgtgtccagttccagaatgcttatgccagtgggggcagaaggagacctgcaccttgatgtttatggggcctgagatgctctgggaatcctcccacccgga

SEQ ID NO: 54877 - DNA, 110 bp, synthetic construct
  source 1..110: mol_type = other DNA
cttgcagggcctagtgtaaaacattaaggatcctgatcttcatgagatgttgagagtaagccgctgaggtgctttaagtgaaaggagtaaaggggactgacttacggaga

SEQ ID NO: 54878 - DNA, 110 bp, synthetic construct
  source 1..110: mol_type = other DNA
gtaagccgctgaggtgctttaagtgaaaggagtaaaggggactgacttacggagacagtcagtgtgtgcggaggagtgaacacagctgaggaataaacttgactcattgg

SEQ ID NO: 54879 - DNA, 110 bp, synthetic construct
  source 1..110: mol_type = other DNA
gagccccaccctacactgctgctggtgcacagcaggaagggcccttagatttgtgaaggctgatgtcccaacagcactccctcggggcaggagggcaagtgctcagggca

SEQ ID NO: 54880 - DNA, 110 bp, synthetic construct
  source 1..110: mol_type = other DNA
aaggctgatgtcccaacagcactccctcggggcaggagggcaagtgctcagggcacaattagaaacgcgtgcaccagctctatttgctggagggcccgcgatcaggccgg

SEQ ID NO: 54881 - DNA, 110 bp, synthetic construct
  source 1..110: mol_type = other DNA
cacttaaaacatttttttcccacagcagtactactatgggtgcactaggttttccaaactaacccccaaagtccacagcacaaggttgaagagctttctcgtggtgaacc

SEQ ID NO: 54882 - DNA, 110 bp, synthetic construct
  source 1..110: mol_type = other DNA
aaactaacccccaaagtccacagcacaaggttgaagagctttctcgtggtgaaccagctgccgtggaatgtgcaccagagcaggtgcaggaggtgtgcagtctagtctca

SEQ ID NO: 54883 - DNA, 110 bp, synthetic construct
  source 1..110: mol_type = other DNA
gaccaaaaaaaaaaaaagtaggggagagacaagagctacttttcacagggtggtctcttggaagtggtccttgagcagagacctaagttaatgaagttaataaatacctg

SEQ ID NO: 54884 - DNA, 110 bp, synthetic construct
  source 1..110: mol_type = other DNA
tgggttcatcacctctgagccacagcaggacctcctcagtcgtgaatttagagattgcaacgccttggactctgccttgaggatgtcaagcacccactagctgatgacat

SEQ ID NO: 54885 - DNA, 110 bp, synthetic construct
  source 1..110: mol_type = other DNA
tgcaacgccttggactctgccttgaggatgtcaagcacccactagctgatgacatgaccgagctcgtgtgcagccctctcgtgctgtgctgcacagaatggggacactgt

SEQ ID NO: 54886 - DNA, 110 bp, synthetic construct
  source 1..110: mol_type = other DNA
aacatctcattctacatctgtttctgatttttcacacatacctgaaagctaccgctgaatcaaaataaattcataagaagttattaaatggccatcacacgcacggtact

SEQ ID NO: 54887 - DNA, 110 bp, synthetic construct
  source 1..110: mol_type = other DNA
ggttcagcaaggaaactgcaggtcttcccaactgccgacccagaactctgttctagaagataacggtgaggcccccaatgccgaccctgtgagctgggggcgcagaagct

SEQ ID NO: 54888 - DNA, 110 bp, synthetic construct
  source 1..110: mol_type = other DNA
gaagataacggtgaggcccccaatgccgaccctgtgagctgggggcgcagaagctcattcccgttttgtacatgcatatgcatatggttctcagccaggcaggaactgaa

SEQ ID NO: 54889 - DNA, 110 bp, synthetic construct
  source 1..110: mol_type = other DNA
ccatttctcggtctgtggcgaaaggtgctaggctctccatatcccctttttactgatgtggacacaggcttagagagcctccgcagctgcccacaactcatcagctcatc

SEQ ID NO: 54890 - DNA, 110 bp, synthetic construct
  source 1..110: mol_type = other DNA
atgtggacacaggcttagagagcctccgcagctgcccacaactcatcagctcatccgtgctgggcggggctgccagatccttccgagaaggacaagtcttcacgagtttt

SEQ ID NO: 54891 - DNA, 110 bp, synthetic construct
  source 1..110: mol_type = other DNA
actagcttatgagagctgttccagtgattgggaaaggcaaagcttgtacattcattttataaggctgatcttgcctcaaaacaaaacagggaaaataggagaaataaaaa

SEQ ID NO: 54892 - DNA, 110 bp, synthetic construct
  source 1..110: mol_type = other DNA
ggtttattcttcttctctggggaatgtggtttggaggaaaaaagatattctttggagttagattctttacctccagctcgagtgctctttctcctgtaccatggacaacg

SEQ ID NO: 54893 - DNA, 110 bp, synthetic construct
  source 1..110: mol_type = other DNA
atatgacagtctattaaggatgaagacactaatatggatcatacatgttctaggataagctgttggttttgatgtactgtcttggggggaggagcaactttatgggcgtt

SEQ ID NO: 54894 - DNA, 110 bp, synthetic construct
  source 1..110: mol_type = other DNA
taagctgttggttttgatgtactgtcttggggggaggagcaactttatgggcgttctcttggcctttcttactatagctcttcttctaaggttaatctgagagttctgtc

SEQ ID NO: 54895 - DNA, 110 bp, synthetic construct
  source 1..110: mol_type = other DNA
tctaacatggaccatgttttcagcagatggacagccagcttccgctcttgaggaaaaggagttcaagagagcagcctgagtcggtggagaggttgggcattagaagagcg

SEQ ID NO: 54896 - DNA, 110 bp, synthetic construct
  source 1..110: mol_type = other DNA
ataggcaattcagcagtttttaaaggttggcaaatcattagaagtttttcaggcgactttgtgcaggcaccggtgggagattggattttcagttgacttgaacccattac

SEQ ID NO: 54897 - DNA, 110 bp, synthetic construct
  source 1..110: mol_type = other DNA
ctttggctcagagaagggagttactctcttttctgggtttgggtcagaaatgagtccccagagaggaaggtccagtgaaccaggttttgaactagaaaaggaatttttca

SEQ ID NO: 54898 - DNA, 110 bp, synthetic construct
  source 1..110: mol_type = other DNA
ccccagagaggaaggtccagtgaaccaggttttgaactagaaaaggaatttttcaggcagaaggaggagaaaatctcaagtggatgcgtagaaacatcaggtagaagcag

SEQ ID NO: 54899 - DNA, 110 bp, synthetic construct
  source 1..110: mol_type = other DNA
acaaggaatcccagtgagtaacaaaatggaccaaacgctcaattaatgcaattatccaagagctgacactcttgcagtgctacggctgggccccagtctctctttttcct

SEQ ID NO: 54900 - DNA, 110 bp, synthetic construct
  source 1..110: mol_type = other DNA
ccaagagctgacactcttgcagtgctacggctgggccccagtctctctttttcctcgcccttcttcttccccggcttcatccttcacaatgatcttcaaggttttaatta

SEQ ID NO: 54901 - DNA, 110 bp, synthetic construct
  source 1..110: mol_type = other DNA
cttcccaccaaactcttagaaggcaagaaggcagccttctgtgcccccggctaacactttgtagctggtcagtaaatagctgcggccaaggaatatacaaatatatttgg

SEQ ID NO: 54902 - DNA, 110 bp, synthetic construct
  source 1..110: mol_type = other DNA
tcacagctgcccgcttctccctgggactccggactcctggcttctgctgccacacttgttacccaaagaggcagctcaggctgcacatggccaaagctaaacccatccct

SEQ ID NO: 54903 - DNA, 110 bp, synthetic construct
  source 1..110: mol_type = other DNA
ttgttacccaaagaggcagctcaggctgcacatggccaaagctaaacccatccctattttcatgcagccccagcctattcccctgactcatttccatctcaataatttaa

SEQ ID NO: 54904 - DNA, 110 bp, synthetic construct
  source 1..110: mol_type = other DNA
gcatagaatagcctcctttagaggtttctccttgattaaaagggtttacactatccaaaatatttcacttaagtaccctgaactttgattaaggttaaataaaataaatc

SEQ ID NO: 54905 - DNA, 110 bp, synthetic construct; identical to SEQ ID NO: 54904
  source 1..110: mol_type = other DNA

SEQ ID NO: 54906 - DNA, 110 bp, synthetic construct
  source 1..110: mol_type = other DNA
tccagtatataatcaagagacccagaaaagccagcatttgactaatagaggaaaaagaggaggatgatactgatgaaatgatagggaaaggagggtatcttagttattcc

SEQ ID NO: 54907 - DNA, 110 bp, synthetic construct
  source 1..110: mol_type = other DNA
agaggaggatgatactgatgaaatgatagggaaaggagggtatcttagttattcctatctgataacattggatttcaacatcttatttgacaccgaaatagaaaggaatt

SEQ ID NO: 54908 - DNA, 110 bp, synthetic construct
  source 1..110: mol_type = other DNA
ttattgctaattccccacagactagcaaagagtctgatttaagaaatagttgacgaatgaatgaatgactttcgcagattcttatatgtcaaacattgagtgtgagtgta

SEQ ID NO: 54909 - DNA, 110 bp, synthetic construct
  source 1..110: mol_type = other DNA
ccgtggcatcttgttagagcagcccaagctgactgagacagggactgtaccttcagaaaaagcttcccacattgatctttcacagagcaaaatttgatgctatgatttct

SEQ ID NO: 54910 - DNA, 110 bp, synthetic construct
  source 1..110: mol_type = other DNA
gaaaaagcttcccacattgatctttcacagagcaaaatttgatgctatgatttcttgagaggaaattgccttgatttttccttcaatgctgtgtagcaaactccgcaaag

SEQ ID NO: 54911 - DNA, 110 bp, synthetic construct
  source 1..110: mol_type = other DNA
agtgctttctgtgcactatctcattgtgctgcacggtggcctgcgagataagcatccttatcagccccgtttaccaacgaagaaatgagggcggaagaggttaaggcatt

SEQ ID NO: 54912 - DNA, 110 bp, synthetic construct
  source 1..110: mol_type = other DNA
cacaatacggtaacaaccacagcagtcacaatgccctctctgactttggcatgtttcctgctttaaaacagcttttttaaaaaaaggagttcccattgtggctcagtggg

SEQ ID NO: 54913 - DNA, 110 bp, synthetic construct
  source 1..110: mol_type = other DNA
agggcacacacctggggatcagccagagaaggaaaggcagaggaaggaacccaagcgaggcctgtgtgagatgcttccttgcaccaaccagatcagggtttctggtagag

SEQ ID NO: 54914 - DNA, 110 bp, synthetic construct
  source 1..110: mol_type = other DNA
cgaggcctgtgtgagatgcttccttgcaccaaccagatcagggtttctggtagagccttacaaaggaggacatgcatgttgatattagaacgtccttatattctcgccta

SEQ ID NO: 54915 - DNA, 110 bp, synthetic construct
  source 1..110: mol_type = other DNA
gacaaattatttagcctctttgtgccttaatttcctcttctgtaaaagggggttcataatagtacctagtccacaaggtttggggagacataaataaggtaagatgcaga

SEQ ID NO: 54916 - DNA, 110 bp, synthetic construct
  source 1..110: mol_type = other DNA
ataatagtacctagtccacaaggtttggggagacataaataaggtaagatgcagaaaaggtttaaaagaaccgctcaataagtattaggtttcggagaatcttctcgttt

SEQ ID NO: 54917 - DNA, 110 bp, synthetic construct
  source 1..110: mol_type = other DNA
ctagtcaggttcattaaccactgagccatgacaggaattccatgtgctatattttggatttcacatataaataatattgtatggtatttgtctttctccttctgacttac

SEQ ID NO: 54918 - DNA, 110 bp, synthetic construct; identical to SEQ ID NO: 54917
  source 1..110: mol_type = other DNA

SEQ ID NO: 54919 - DNA, 110 bp, synthetic construct
  source 1..110: mol_type = other DNA
cccctccactgcccattgcacgccacatttactctcggttactcagatacatacagctacttgcccacggacacatactttttagagcctggattcagcctgaaatctct

SEQ ID NO: 54920 - DNA, 110 bp, synthetic construct
  source 1..110: mol_type = other DNA
gctacttgcccacggacacatactttttagagcctggattcagcctgaaatctctctcacgtcaaggctcccactcagccaagatcagctgcctacatcccctttcctcc

SEQ ID NO: 54921 - DNA, 110 bp, synthetic construct
  source 1..110: mol_type = other DNA
cccatgtgtacatgttgagccaaatttgttcacttcaagggaagggagaacggcagcttgaagtctcccagttatcattcccagcttgcaaaggagcccgaccacagccc

SEQ ID NO: 54922 - DNA, 110 bp, synthetic construct
  source 1..110: mol_type = other DNA
cattgtcacccacgcccagcctgtgacagaaaagaggtgggagagggagagaaaacgtcttgggagagaaccactggagcactgcggcccttcccttcccttctctgtga

SEQ ID NO: 54923 - DNA, 110 bp, synthetic construct
  source 1..110: mol_type = other DNA
cgtcttgggagagaaccactggagcactgcggcccttcccttcccttctctgtgagcgacaggaggcaaagacttatatctgcgcacagcccagatgtgcgctctgtggg

SEQ ID NO: 54924 - DNA, 110 bp, synthetic construct
  source 1..110: mol_type = other DNA
tgcttggtctttctccatccttggctccaactcccatcaacaggactaaaacatagcctttacctcccccagcttctacaaagagcattattgagtccatgttgactccc

SEQ ID NO: 54925 - DNA, 110 bp, synthetic construct
  source 1..110: mol_type = other DNA
ttgtactaacaggttgtaatgcctcgtgttttctatctgctggttcacgttctctcctttaaagcattggtttccaagggatatttgttatggagcccatcagtcgaaga

SEQ ID NO: 54926 - DNA, 110 bp, synthetic construct
  source 1..110: mol_type = other DNA
cctttaaagcattggtttccaagggatatttgttatggagcccatcagtcgaagattcgagctcataccattcaaaataggcacattcatttatgttacatgcagatact

SEQ ID NO: 54927 - DNA, 110 bp, synthetic construct; identical to SEQ ID NO: 54925
  source 1..110: mol_type = other DNA

SEQ ID NO: 54928 - DNA, 110 bp, synthetic construct; identical to SEQ ID NO: 54926
  source 1..110: mol_type = other DNA

SEQ ID NO: 54929 - DNA, 110 bp, synthetic construct
  source 1..110: mol_type = other DNA
tggagagggaccaccttggccagggtgggctcatggctgtttctcagctgagcttcagacctgctttcacttgaccttcatgccggggcctgggacattccaacactgag

SEQ ID NO: 54930 - DNA, 110 bp, synthetic construct
  source 1..110: mol_type = other DNA
ctgtaaagcctgtatcacaaggcacaataacgtttataagacaaggcgtttgatatttgtgacttccccttatccctcatgggaaaaaggcttcttgcaacagtgtagct

SEQ ID NO: 54931 - DNA, 110 bp, synthetic construct
  source 1..110: mol_type = other DNA
tttgtgacttccccttatccctcatgggaaaaaggcttcttgcaacagtgtagctattgtcctaggatcagatattccagccccttttacactggtttctaaagaaagct

SEQ ID NO: 54932 - DNA, 110 bp, synthetic construct
  source 1..110: mol_type = other DNA
aaatacacacacagagagggacaaatttaagaagtgtgtagaatttggatctaaaaatctttaaagctgagagacataaaagggtcaacaagaagacctactgtgtcact

SEQ ID NO: 54933 - DNA, 110 bp, synthetic construct
  source 1..110: mol_type = other DNA
aatctttaaagctgagagacataaaagggtcaacaagaagacctactgtgtcactgaacaagaacactcaatactgtaagatgtaaattctctctaaatcgatgcacaaa

SEQ ID NO: 54934 - DNA, 110 bp, synthetic construct
  source 1..110: mol_type = other DNA
gccaaagaggaagaagagcgggcctcagcttcgggcggccggggaacctgatacgcagggggaccctggcgacgtgctgcgggagaactggtggagaggggccgggcacc

SEQ ID NO: 54935 - DNA, 110 bp, synthetic construct
  source 1..110: mol_type = other DNA
aagattagaaaatgctgctctaaaaaatattttctgttatagcaagtaaaagacagaacgtgcctgagagctttggagaaaatcaagattcagctggaaaaaggaaataa

SEQ ID NO: 54936 - DNA, 110 bp, synthetic construct
  source 1..110: mol_type = other DNA
tgtattttaattgccaagatgatcagcttctgtagctttcctgaacaccttcacggtaatctgcattggtaaggatgggctaggtgatggtgcagtaacaaaaaatccaa

SEQ ID NO: 54937 - DNA, 110 bp, synthetic construct
  source 1..110: mol_type = other DNA
tctctgtaaaacgtaaaatcttccttaaaaaatgtattaaaaacatcctaggagaaaaagcggggaaaaggcagaagggcccgctctggtggtatgggtgtgcaggacag

SEQ ID NO: 54938 - DNA, 110 bp, synthetic construct
  source 1..110: mol_type = other DNA
aaaagcggggaaaaggcagaagggcccgctctggtggtatgggtgtgcaggacaggtcagacacaggtcaccttatgtcaatctgctaaaacaaagcctaagatgttgca

SEQ ID NO: 54939 - DNA, 110 bp, synthetic construct
  source 1..110: mol_type = other DNA
tctagacacataggcaactagctagattattcattccgtagcttctcttgcagctagagtggccatttgagcaagttctcaccagtgaaatgtaagcagaaataatgcta

SEQ ID NO: 54940 - DNA, 110 bp, synthetic construct
  source 1..110: mol_type = other DNA
agagtggccatttgagcaagttctcaccagtgaaatgtaagcagaaataatgctaccttttcctagttaaaacatgattgcaacctttttcagtattttgaggatgaaaa

SEQ ID NO: 54941 - DNA, 110 bp, synthetic construct
  source 1..110: mol_type = other DNA
atgccctgattggaggctgctgtcgtggggaagctggaggtgggctgtttacatgcagggcaactatgttattgattggtggaacataatggactttttctggttggtcc

SEQ ID NO: 54942 - DNA, 110 bp, synthetic construct
  source 1..110: mol_type = other DNA
aataatttgcttgcatctagtttcctaattatgtcaattctttttaaaattggaccgtcattcttgaatctgtttacctccttttcattttaactgctactgccctagct

SEQ ID NO: 54943 - DNA, 110 bp, synthetic construct; identical to SEQ ID NO: 54942
  source 1..110: mol_type = other DNA

SEQ ID NO: 54944 - DNA, 110 bp, synthetic construct
  source 1..110: mol_type = other DNA
gggtgcttagtgtatcctgtgagttgggtgtggaggttagggaaggctttctataatgggtgacttctctagtcttggagcatggacagaaaataggcaaaatggtctgg

SEQ ID NO: 54945 - DNA, 110 bp, synthetic construct
  source 1..110: mol_type = other DNA
cttatttcctactccgtttcagttgatggtgatttttgtcctgaggcagcttcaacgcagcatgtgcacaactcttccagggagaattgctttgtacttctgggtggctg

SEQ ID NO: 54946 - DNA, 110 bp, synthetic construct
  source 1..110: mol_type = other DNA
acactactccatcttacagctgaggaagctgacacccagggaggtaaatgactttcctgggacatataacaaatgcatgccaaaacctacactaaaatcctggtcttatt

SEQ ID NO: 54947 - DNA, 110 bp, synthetic construct
  source 1..110: mol_type = other DNA
cctgggacatataacaaatgcatgccaaaacctacactaaaatcctggtcttatttcattttccaacttgtgcacctaaaagagccctctactatctctgctgtggaaca

SEQ ID NO: 54948 - DNA, 110 bp, synthetic construct
  source 1..110: mol_type = other DNA
acaactagagctaattacaataaatgcaatgaaaaatatgctagaggtaatcagcaacagattaggcgttatagaagaatgcataagcaacctgaaagaaagaatagtag

SEQ ID NO: 54949 - DNA, 110 bp, synthetic construct
  source 1..110: mol_type = other DNA
cctccgttacttgccaagattcttcaggcaccagatactgtaaggtgaaatagctagtcagggtatcctggtaattcaatattaggtacagacatggtaatccactcctg

SEQ ID NO: 54950 - DNA, 110 bp, synthetic construct
  source 1..110: mol_type = other DNA
agctgtagcctcaagatgcttatatcatggatcagagatggtgggaacaacctctaggagtcaggggtagcttagcccatcctgacgaatgcattttgtaatggttcttt

SEQ ID NO: 54951 - DNA, 110 bp, synthetic construct
  source 1..110: mol_type = other DNA
agagagtgaacagcagaagatctgtgggaggaattactctccttcctcagaaacggatctgtaatgtgtaacttcaggtatagtgacacctgtggaggctttgaatttta

SEQ ID NO: 54952 - DNA, 110 bp, synthetic construct
  source 1..110: mol_type = other DNA
cctgttgtgaggagtctgagcaagggaaagtcttagaggagagcccacaaggctcatgtcaagacaccagacgcccatggaggaagtgtcttagacgtgcatctcccggc

SEQ ID NO: 54953 - DNA, 110 bp, synthetic construct
  source 1..110: mol_type = other DNA
atgtcaagacaccagacgcccatggaggaagtgtcttagacgtgcatctcccggccccagctcctttagctgaaaccgcttggagcagggccatttctaaattcacaatc

SEQ ID NO: 54954 - DNA, 110 bp, synthetic construct
  source 1..110: mol_type = other DNA
ctccctgaaaaacaaaccgtaagacagatagtaaataccctgataatttaactacctcttgaaacttaggataatttcagaggactttaaattgagttaacaatcttctt

SEQ ID NO: 54955 - DNA, 110 bp, synthetic construct
  source 1..110: mol_type = other DNA
aactctggaagagaagaattacaaagaagaaagaacctattcagaggaaaagtattttttgaaatttattcctctttctaaaatttttgcttcctggtgtcttggtccaa

SEQ ID NO: 54956 - DNA, 110 bp, synthetic construct
  source 1..110: mol_type = other DNA
gaggagagtggctaaaaagcttccttttgcccaatacacaggtttcagctgcttcaggtctgtgtacactggcagtgtgctacctcaggggcttccttatctctggtggc

SEQ ID NO: 54957 - DNA, 110 bp, synthetic construct
  source 1..110: mol_type = other DNA
cctatctgtaattggagcattcagtttctactctgtgttgcttcagggctgtactgtcatctcttagtatttattgcattctatactaattatttgttctcttgtgttta

SEQ ID NO: 54958 - DNA, 110 bp, synthetic construct
  source 1..110: mol_type = other DNA
gggctgtactgtcatctcttagtatttattgcattctatactaattatttgttctcttgtgtttatatcctaatagaatctgagtttcttaaggtctataccatgctttg

SEQ ID NO: 54959 - DNA, 110 bp, synthetic construct
  source 1..110: mol_type = other DNA
tccttaaaaaaatacctcatggagccatgataggatacaaggagtgggtttacccttctacttacaacaactagaaaactaaccacaacacgagaccacaatttttagac

SEQ ID NO: 54960 - DNA, 110 bp, synthetic construct
  source 1..110: mol_type = other DNA
ttctacttacaacaactagaaaactaaccacaacacgagaccacaatttttagacttggaaaactggaagcataggactgtggtctctgaaaaggaaaaaagattaagcc

SEQ ID NO: 54961 - DNA, 110 bp, synthetic construct
  source 1..110: mol_type = other DNA
actaaacgatgagaataaacaggagaatgcctactacaatgtctgggattcatagcagctaaaattatatatccttgctctaatttatctttcttcaactagtggagact

SEQ ID NO: 54962 - DNA, 110 bp, synthetic construct
  source 1..110: mol_type = other DNA
agttctcagagcaatagaaacaacaatgccagagctgtcgttgtggctcagtgataacaaaactgcctaggatccatgaagatgagggttagatcctggcctcacccagt

SEQ ID NO: 54963 - DNA, 110 bp, synthetic construct
  source 1..110: mol_type = other DNA
aaatacagtctaatgactgcatttatccctaatctaccaaaacttgttccgtagcagcttatattaggtaagtcatgttaatgatccacacaagagcataaattgaaaca

SEQ ID NO: 54964 - DNA, 110 bp, synthetic construct
  source 1..110: mol_type = other DNA
acatcaccttaagctatcaaagttcaccagcaaggggccaaacctctatcagctactttttcatatgatgcactaagaagaacacgatacaactttcattatatacataa

SEQ ID NO: 54965 - DNA, 110 bp, synthetic construct
  source 1..110: mol_type = other DNA
agtctcaaagaaactgaatgatttgctcatagttgccctacaagcgagtgaaactggggtttctccttaggcttttggctcttatcactaaataattcaatccccaaggc

SEQ ID NO: 54966 - DNA, 110 bp, synthetic construct
  source 1..110: mol_type = other DNA
ggggtttctccttaggcttttggctcttatcactaaataattcaatccccaaggctgatttggggtcattaggcattgtcttgactatttcacacatgtcctttctgaaa

SEQ ID NO: 54967 - DNA, 110 bp, synthetic construct
  source 1..110: mol_type = other DNA
ctgttgaagcttttcctgatcaaactaattgcagtctcctttagcaatccctaccctattgcttgccttattttttttcctttggagctaatcatgttactttaaggcac

SEQ ID NO: 54968 - DNA, 110 bp, synthetic construct
  source 1..110: mol_type = other DNA
ctaatgaacctttcctctctcttttagttataacttactcacaatttagatgcagttccgactgcttttcaagatgtcttcatccctcctctcattcagcatgactgtgt

SEQ ID NO: 54969 - DNA, 110 bp, synthetic construct
  source 1..110: mol_type = other DNA
aaaatatagtaactgggatatagcattcctggctgataattctaaccaaattctaggaagctatatgatatgcagaaaattactggattgcctgaagtcctcaaatatcc

SEQ ID NO: 54970 - DNA, 110 bp, synthetic construct
  source 1..110: mol_type = other DNA
ggaagctatatgatatgcagaaaattactggattgcctgaagtcctcaaatatccttctgtaaaacaaggttgttgtagggtaagcttttaaaattcctctttatttttc

SEQ ID NO: 54971 - DNA, 110 bp, synthetic construct
  source 1..110: mol_type = other DNA
cccttctcaatgtgatttaagcactgtggttaaagaaaataaggggaaacttctagtataaatatggtattggagacaaaattaataggatctcagcaacataggtagct

SEQ ID NO: 54972 - DNA, 110 bp, synthetic construct
  source 1..110: mol_type = other DNA
gtataaatatggtattggagacaaaattaataggatctcagcaacataggtagctgaatccaggaaatgcttcctacattttatctgcagatcagcatagaacagcatct

SEQ ID NO: 54973 - DNA, 110 bp, synthetic construct
  source 1..110: mol_type = other DNA
aacatagtgaactctgtaaatcccaagtgcctgcaatttgcttccatatagctcaagtctagtttattttgtagcatggctaatatttcttggacgtctcttctttaact

SEQ ID NO: 54974 - DNA, 110 bp, synthetic construct; identical to SEQ ID NO: 54973
  source 1..110: mol_type = other DNA

SEQ ID NO: 54975 - DNA, 110 bp, synthetic construct
  source 1..110: mol_type = other DNA
ttagacccaaagaggtaagagagaagcagtttcagaacccagagagatatctgtatgaagtgggctgcctgcctaacacagcacctttaatagaaggacagagtgcagcc

SEQ ID NO: 54976 - DNA, 110 bp, synthetic construct
  source 1..110: mol_type = other DNA
tgaagtgggctgcctgcctaacacagcacctttaatagaaggacagagtgcagccaattcatgatgacctgacaggacaggaaatgttggaacaagtattcaacacagac

SEQ ID NO: 54977 - DNA, 110 bp, synthetic construct
  source 1..110: mol_type = other DNA
gttactttgtggccgtataactaatcctagccaaagatccaaagacctgtgagcagaatcgacacatggtgctgaagccttggattgacatacggctgaagcattgaaga

SEQ ID NO: 54978 - DNA, 110 bp, synthetic construct
  source 1..110: mol_type = other DNA
gaatcgacacatggtgctgaagccttggattgacatacggctgaagcattgaagagctggtgtaccagatccatgccttttctttccatgccctagccagcccagaggtc

SEQ ID NO: 54979 - DNA, 110 bp, synthetic construct; identical to SEQ ID NO: 54977
  source 1..110: mol_type = other DNA

SEQ ID NO: 54980 - DNA, 110 bp, synthetic construct; identical to SEQ ID NO: 54978
  source 1..110: mol_type = other DNA

SEQ ID NO: 54981 - DNA, 110 bp, synthetic construct
  source 1..110: mol_type = other DNA
taccttggtatgacttctgcaaagatcatattactaagtgaaagcatttgtgtaggaataaaatacccttcaatgcaagttcagtatttttatcagtggctgaactgagc

SEQ ID NO: 54982 - DNA, 110 bp, synthetic construct
  source 1..110: mol_type = other DNA
gaataaaatacccttcaatgcaagttcagtatttttatcagtggctgaactgagctagagaacacttagagaaacataggtttccataaccttgcttagttatatattga

SEQ ID NO: 54983 - DNA, 110 bp, synthetic construct
  source 1..110: mol_type = other DNA
tatggaagaatataaagggagtaaaaggaaaagatcaaccactttggttgtcatttggaatacagagcagaaaagaagcactttcaaatgcgaaaaatggtccttgattg

SEQ ID NO: 54984 - DNA, 110 bp, synthetic construct
  source 1..110: mol_type = other DNA
agccaacaccagaggtcaaccaaatatggcctcacacatgtgtgcttatggccatgatctaagaacttttctttttacagtttttaaaaggttacacgctaggtggttat

SEQ ID NO: 54985 - DNA, 110 bp, synthetic construct
  source 1..110: mol_type = other DNA
tactcaaatatgcaatattattaaaaacgatgagttttataagtcactgtgtaggaatttataccttcagttttcagacccactgtgattctcttggaagtagtcaattg

SEQ ID NO: 54986 - DNA, 110 bp, synthetic construct
  source 1..110: mol_type = other DNA
attttttactagctttggtaaaattgtattcgttttacattttggactgaggtgaaggttgcaaatattaactgaattgaggcgaaagctgagatgtaatatttgtctag

SEQ ID NO: 54987 - DNA, 110 bp, synthetic construct
  source 1..110: mol_type = other DNA
aggttgcaaatattaactgaattgaggcgaaagctgagatgtaatatttgtctagcaatgaacaagttacaggaggaggcagcagataataatacatgtcagtaaactta

SEQ ID NO: 54988 - DNA, 110 bp, synthetic construct
  source 1..110: mol_type = other DNA
gtaatggttcctagtacaggactgttgaatcagactgccagggtctgaatcacttaatgggtcaacttaggaatgtcactcaattgcctgctttgtgtctagattctccc

SEQ ID NO: 54989 - DNA, 110 bp, synthetic construct
  source 1..110: mol_type = other DNA
aatgggtcaacttaggaatgtcactcaattgcctgctttgtgtctagattctccctcctgtaagaaagaggatgatggtagaacttacctcagggaggtgttgtgtaaat

SEQ ID NO: 54990 - DNA, 110 bp, synthetic construct
  source 1..110: mol_type = other DNA
attggcttctaaccactgctctcaggggacagtgtttgtaagaggaatcttctgcatcagtggattaagtaaataagtaccattttaaagatgattcacagttttgcaaa

SEQ ID NO: 54991 - DNA, 110 bp, synthetic construct
  source 1..110: mol_type = other DNA
aggtgacaaattaggagatggggccttgagagtgatcaggtttaggtgaggtcataagggtgggattagaagacacacaggaaagctggctttcccactctagcatatga

SEQ ID NO: 54992 - DNA, 110 bp, synthetic construct
  source 1..110: mol_type = other DNA
attctctgtgtataataactaagctgagtgtaggcatatatcattttatgcagtgcttttgtagcaaattgatttaagtgcctttttggagcagttgtgggcagaattga

SEQ ID NO: 54993 - DNA, 110 bp, synthetic construct
  source 1..110: mol_type = other DNA
ataatttgttttttcatcctcctgctatgtggtagtattacttaaaattttgtcttttcagtgacatttcttgtgtgtgtatttatgtcctacttgttgagggcagtaag

SEQ ID NO: 54994 - DNA, 110 bp, synthetic construct
  source 1..110: mol_type = other DNA
tttcagtgacatttcttgtgtgtgtatttatgtcctacttgttgagggcagtaagtgagctcatagaattgcatctaaactctgaaggaaacctcatgatccatttcctg

SEQ ID NO: 54995 - DNA, 110 bp, synthetic construct
  source 1..110: mol_type = other DNA
tagacctgtactctatctcaattgatatagagtattgataagatctatgggaaaaaaccagttatgggctattgtgctacactaagtgacatcaatatccataatgcaga

SEQ ID NO: 54996 - DNA, 110 bp, synthetic construct
  source 1..110: mol_type = other DNA
aaccagttatgggctattgtgctacactaagtgacatcaatatccataatgcagaatgaggggcggtctatgtggtaatgacactctccaacagactaataaattagtca

SEQ ID NO: 54997 - DNA, 110 bp, synthetic construct
  source 1..110: mol_type = other DNA
cgcattaccacatttcttcagaacggtcacacctagagaagctcagtaagcaccgagttacatcttctcctggcctctgaggaatcgcctctgctgagggaaatgggcag

SEQ ID NO: 54998 - DNA, 110 bp, synthetic construct
  source 1..110: mol_type = other DNA
atttctgggctccacctctactctgtgattcagatcttgactaagcccccagagtttcatttctgcaagcttcccagtgatgctctggtccagggaccacaatttgagaa

SEQ ID NO: 54999 - DNA, 110 bp, synthetic construct
  source 1..110: mol_type = other DNA
ggcataaagagcttgaaaacagaggagctgaattccagctcaggccctgcaggccacagggtctacgttcaagagagaaaggtggcagcttcgtaattactaccctctga

SEQ ID NO: 55000 - DNA, 110 bp, synthetic construct
  source 1..110: mol_type = other DNA
acagggtctacgttcaagagagaaaggtggcagcttcgtaattactaccctctgataagggacatttcagcctcaagccttatttccacagcttatttctatactgatca

SEQ ID NO: 55001 - DNA, 110 bp, synthetic construct
  source 1..110: mol_type = other DNA
aatgcacataaagtccccccagttatgtctggcatgtagtaaaagttcaatgaatagtagctgttctgatgtgattttcttagtaagataaataaatgagaccaagatcc

SEQ ID NO: 55002 - DNA, 110 bp, synthetic construct
  source 1..110: mol_type = other DNA
agtagctgttctgatgtgattttcttagtaagataaataaatgagaccaagatccaatgaggtttgaccaataagagagagtcaaagtatctactacaggagtgtcttaa

SEQ ID NO: 55003 - DNA, 110 bp, synthetic construct
  source 1..110: mol_type = other DNA
tagataacagtagttgctttctatttgagggaggggcagaagtatgattctggggcaaaagccttggtaacaggttgaagccagagaaggctgaaggggtgagggctgcc

SEQ ID NO: 55004 - DNA, 110 bp, synthetic construct
  source 1..110: mol_type = other DNA
caaaagccttggtaacaggttgaagccagagaaggctgaaggggtgagggctgccctaactagggctattatgctaactttggttcttaaaggtgatcttccttagcctg

SEQ ID NO: 55005 - DNA, 110 bp, synthetic construct
  source 1..110: mol_type = other DNA
agaaagaaagatgaatactttacatctgaatagcttagagtccttccttgtccttctgtctggctcagttgtaccctaaacacaatcacccataggctaaaaattaggca

SEQ ID NO: 55006 - DNA, 110 bp, synthetic construct
  source 1..110: mol_type = other DNA
tactttacatctgaatagcttagagtccttccttgtccttctgtctggctcagttgtaccctaaacacaatcacccataggctaaaaattaggcaccctgagcacaattg

SEQ ID NO: 55007 - DNA, 110 bp, synthetic construct
  source 1..110: mol_type = other DNA
atataatcaactgatctttgatgaggcgcaaaggcaatgcaatggaccaaagatagtcatttcatcaaataatactgtcaagtggacatgcacacgtaaaaaaatacatc

SEQ ID NO: 55008 - DNA, 110 bp, synthetic construct
  source 1..110: mol_type = other DNA
gtcatttcatcaaataatactgtcaagtggacatgcacacgtaaaaaaatacatctagagaaagccttaaacctttcagaaaaactggctcacaatggataatagaccta

SEQ ID NO: 55009 - DNA, 110 bp, synthetic construct
  source 1..110: mol_type = other DNA
tccactcctcttgagtagtcgtgagataacctctatcgctctaatttagaagataggagggcaggccctttaaccctagcaggctctctggcgtaacgtttccctttgca

SEQ ID NO: 55010 - DNA, 110 bp, synthetic construct
  source 1..110: mol_type = other DNA
ggagggcaggccctttaaccctagcaggctctctggcgtaacgtttccctttgcagaacccttaccaatgaatgtgaaaatccagttttatggctgcaactgcaaagggc

SEQ ID NO: 55011 - DNA, 110 bp, synthetic construct
  source 1..110: mol_type = other DNA
tggcttaaataattgaaatttatattttaccattctggaggctgggaatccaagatcaagggatcagcagatccagtgtctggtgagaaaccacttcctactttgtaggc

SEQ ID NO: 55012 - DNA, 110 bp, synthetic construct
  source 1..110: mol_type = other DNA
tcaagggatcagcagatccagtgtctggtgagaaaccacttcctactttgtaggctgtcttgtatcctcacatagtagaaagtagagataggaggcgagctttctcatgt

SEQ ID NO: 55013 - DNA, 110 bp, synthetic construct
  source 1..110: mol_type = other DNA
tggtgtgcaagggtgatgggaggaggtgtacatccgtaattatgttacattttataagactctgctttagcagagtggggaccctcttgctggctttaaagaagtgagct

SEQ ID NO: 55014 - DNA, 110 bp, synthetic construct
  source 1..110: mol_type = other DNA
aagactctgctttagcagagtggggaccctcttgctggctttaaagaagtgagcttccacgttatgaaagagtcttgggaaggccattggcaagggactataggtagcct

SEQ ID NO: 55015 - DNA, 110 bp, synthetic construct
  source 1..110: mol_type = other DNA
ttcagttgctccactgtgcagaactgatgggtccctggtcagagttctcacagccgaccacccactcatgtatgtaaacaaacaggaattacattatgacttgttcgtgc

SEQ ID NO: 55016 - DNA, 110 bp, synthetic construct
  source 1..110: mol_type = other DNA
gaccacccactcatgtatgtaaacaaacaggaattacattatgacttgttcgtgcccgtcttcctcattgtgagttccatgaagacaggagcaatgccttacagatctgc

SEQ ID NO: 55017 - DNA, 110 bp, synthetic construct
  source 1..110: mol_type = other DNA
tctctcactctcttcagtctttctcacttatttctgtcaccctctctgcctctatatccctctagctccatgtctatctgtctttgtgcttctgtgtgtctattggtatc

SEQ ID NO: 55018 - DNA, 110 bp, synthetic construct
  source 1..110: mol_type = other DNA
gcctttttgcaccatgttgaatggttctttaattggagctctgaaaagggactgtaagaattgtcagaaactcttaggaagattaaaaggtactcagggaggcatgccca

SEQ ID NO: 55019 - DNA, 110 bp, synthetic construct
  source 1..110: mol_type = other DNA
caattgtactgccttgtaatgatctggttttgactacctcggaggatagaaagcatcttaacgggaagaatctggagttttttgagcataacacctgacgcgctctcaat

SEQ ID NO: 55020 - DNA, 110 bp, synthetic construct
  source 1..110: mol_type = other DNA
tcttaacgggaagaatctggagttttttgagcataacacctgacgcgctctcaataaacactgagagaatgaactcaggagaaagcagttaatttttaaaaagcataaaa

SEQ ID NO: 55021 - DNA, 110 bp, synthetic construct
  source 1..110: mol_type = other DNA
cggattatgattatagctgggttagatcaatcacatgtcttagaactgtggagtagaaattcttttccagagtgctggccgttagggcgtccacaaatatctgttaaaac

SEQ ID NO: 55022 - DNA, 110 bp, synthetic construct
  source 1..110: mol_type = other DNA
gtcagatctatttcctccacatgtcttaccccaattttctcctttctgttttccccattcctctcccaggatatcaaattgtaatcatatctcctcctatccatatttct

SEQ ID NO: 55023 - DNA, 110 bp, synthetic construct
  source 1..110: mol_type = other DNA
cattcctctcccaggatatcaaattgtaatcatatctcctcctatccatatttcttacattttagataaattttctcattattttccaaatgtttagacttgagtcttgc

SEQ ID NO: 55024 - DNA, 110 bp, synthetic construct
  source 1..110: mol_type = other DNA
cgaacctcttgttattaaaagtgaagtaagagggtcacatcactccttatatacttcagcctagctcttctgaggggacattccataggagcacattaatcataactttt

SEQ ID NO: 55025 - DNA, 110 bp, synthetic construct
  source 1..110: mol_type = other DNA
gcaattaccttttaaattaaagcataaccttcccgaaataatatcttacttatattttgctgctccaccacaggctctggggtcagcctggctatctctgaatccacata

SEQ ID NO: 55026 - DNA, 110 bp, synthetic construct; identical to SEQ ID NO: 55025
  source 1..110: mol_type = other DNA

SEQ ID NO: 55027 - DNA, 110 bp, synthetic construct; identical to SEQ ID NO: 55025
  source 1..110: mol_type = other DNA

SEQ ID NO: 55028 - DNA, 110 bp, synthetic construct; identical to SEQ ID NO: 55025
  source 1..110: mol_type = other DNA

SEQ ID NO: 55029 - DNA, 110 bp, synthetic construct
  source 1..110: mol_type = other DNA
caaggccagggatggaacctgcatccttacggttcctaagtgggtttgttaacctttaagctatgaagggaactcctagctgacatttaaacacgggctcgtctgagttc

SEQ ID NO: 55030 - DNA, 110 bp, synthetic construct; identical to SEQ ID NO: 55029
  source 1..110: mol_type = other DNA

SEQ ID NO: 55031 - DNA, 110 bp, synthetic construct
  source 1..110: mol_type = other DNA
cacacacacacacacaagaatgtgatcttatttggatatagggtcttttcagatgaaattagctaagatgagctcatattggattagaatgggccccagatccatctggt

SEQ ID NO: 55032 - DNA, 110 bp, synthetic construct
  source 1..110: mol_type = other DNA
aaattagctaagatgagctcatattggattagaatgggccccagatccatctggtgtccttataaggagaagatatgaagacataccgatagagaagatggccatgcgaa

SEQ ID NO: 55033 - DNA, 110 bp, synthetic construct
  source 1..110: mol_type = other DNA
cctgggccttcaaagtacatggccaaatcctagtccagcaattactcagctcctgttggccttgatattcaaaataccaccaccactttctgcctttggcagagtcagga

SEQ ID NO: 55034 - DNA, 110 bp, synthetic construct
  source 1..110: mol_type = other DNA
tagtctccagaactgtgagagaataaatgtctgtgtttttgtttgtttgcttttttttttttttaagggctgcacctgcacttatagaatttcctaggctagaggtccaa

SEQ ID NO: 55035 - DNA, 110 bp, synthetic construct
  source 1..110: mol_type = other DNA
aatgtctgtgtttttgtttgtttgcttttttttttttttaagggctgcacctgcacttatagaatttcctaggctagaggtccaatgcgagctgaagctgctggcctaca

SEQ ID NO: 55036 - DNA, 110 bp, synthetic construct
  source 1..110: mol_type = other DNA
taagcaggtcggcttattgacccttcttttcttccgcagaactttgcttatacagcactcatactgttgaaagtgttgaattataatgaactgttttattatgtttccct

SEQ ID NO: 55037 - DNA, 110 bp, synthetic construct
  source 1..110: mol_type = other DNA
cactcatactgttgaaagtgttgaattataatgaactgttttattatgtttccctggtacactatgagctcattaaggccacagaccagatcctattcagcattacatcc

SEQ ID NO: 55038 - DNA, 110 bp, synthetic construct
  source 1..110: mol_type = other DNA
tcttagcccttccctttgcctcaagcagctcatttaagcctcacaacaatgctatgagatagggtgtggcatccacaggtcttggtgtggaaacccagacaacagaaaat

SEQ ID NO: 55039 - DNA, 110 bp, synthetic construct
  source 1..110: mol_type = other DNA
tgaggtcatgatcttcatagaaatggaaaataatccaggtaaagcaagcaagggagtgtctatttcaaagtgtgagctctggacttttactgcaaggatgctagctctga

SEQ ID NO: 55040 - DNA, 110 bp, synthetic construct
  source 1..110: mol_type = other DNA
gtgtctatttcaaagtgtgagctctggacttttactgcaaggatgctagctctgagcaacaccccatgtcaccagtgcagagcaggcaaggaagacccagttccaaaagg

SEQ ID NO: 55041 - DNA, 110 bp, synthetic construct
  source 1..110: mol_type = other DNA
gtcaaaatcaatatactcatttgttgtgacctcaaaaatcctcaaagaaaatctatcactgttgtcacgatgtagtcaacaaaacttttaaaaattatccactagagtaa

SEQ ID NO: 55042 - DNA, 110 bp, synthetic construct
  source 1..110: mol_type = other DNA
gatctgggattggttgaatcccacatgtagaaccatagatgaggagaaaccatgtatataggggggcaactatacattacacaaggatttttgaccgtgtggagttcaat

SEQ ID NO: 55043 - DNA, 110 bp, synthetic construct
  source 1..110: mol_type = other DNA
atataggggggcaactatacattacacaaggatttttgaccgtgtggagttcaatgcccttaattcctatgttgttcaagggtcaacttatattaaagaagttcctttaa

SEQ ID NO: 55044 - DNA, 110 bp, synthetic construct
  source 1..110: mol_type = other DNA
ggtctccttctagtcccatggaagtgttttccactggcaaaatatgccctgaaattggctggtaatagaaggtgggaaaggtgctttctggagttttaatcctagcttct

SEQ ID NO: 55045 - DNA, 110 bp, synthetic construct
  source 1..110: mol_type = other DNA
tggctggtaatagaaggtgggaaaggtgctttctggagttttaatcctagcttctcagaaaagaataagggaggggcttggaggcaattggcaacagatgcaaaggtgta

SEQ ID NO: 55046 - DNA, 110 bp, synthetic construct
  source 1..110: mol_type = other DNA
gggagggcacagtctttagggtggtagcctgccgtggcttcctctgcttggcaaagcaataaagctatttttcttctcctttaccccaaactctgtttccatgtttctat

SEQ ID NO: 55047 - DNA, 110 bp, synthetic construct
  source 1..110: mol_type = other DNA
gcaataaagctatttttcttctcctttaccccaaactctgtttccatgtttctatttggcaccggtgggcagaggcggagtttcagccatatttctccccatctccctct

SEQ ID NO: 55048 - DNA, 110 bp, synthetic construct
  source 1..110: mol_type = other DNA
ttcaggggcagcagttccttgtgtttttcggcttacagaaaaaagtgatcagagagcacttcaaggttgctggtgctcccctcacaaatttctttctcacagtcatgatg

SEQ ID NO: 55049 - DNA, 110 bp, synthetic construct
  source 1..110: mol_type = other DNA
gcacttcaaggttgctggtgctcccctcacaaatttctttctcacagtcatgatgagaggaccctcctaggatcggtgatcagaccttagtgacaaatccactttgacat

SEQ ID NO: 55050 - DNA, 110 bp, synthetic construct
  source 1..110: mol_type = other DNA
tgggaactccaaattctaacttttattttttgtttgcttgttctgttttcaagaagagccatagcttttcatacttgagaattcagaggtaagtaaaaattgtttacgac

SEQ ID NO: 55051 - DNA, 110 bp, synthetic construct
  source 1..110: mol_type = other DNA
ccattcagagtacaggcaacatccttacactacccacaccatttgtctccaactcctttctgactgcatctcagtggcacctcgctcattctggttcacacagaggtgat

SEQ ID NO: 55052 - DNA, 110 bp, synthetic construct
  source 1..110: mol_type = other DNA
ctttctgactgcatctcagtggcacctcgctcattctggttcacacagaggtgatgctccttaaaaaaaaaaaaaagactaacatgccttgcctcaaggattttgacctt

SEQ ID NO: 55053 - DNA, 110 bp, synthetic construct
  source 1..110: mol_type = other DNA
gaggttctcagctaggagatgcaccagctgggttgacagtggacttgcgacttgggcaaactgaacctcagttatctcatctctaagacagacccggaacaggatcatct

SEQ ID NO: 55054 - DNA, 110 bp, synthetic construct
  source 1..110: mol_type = other DNA
tgtcattttttttcccccccaaattttataaattaattgccacatatactactcgattctgagcagaagctgtaccactcatcaaattcatccttaaatgccctgagatg

SEQ ID NO: 55055 - DNA, 110 bp, synthetic construct
  source 1..110: mol_type = other DNA
cacattttacaattcaatggctcactgcagaacctccaatatgacatctcactggggaagactagggtcagagggccaagagtgatgctgtgaagataacaccgaggggg

SEQ ID NO: 55056 - DNA, 110 bp, synthetic construct
  source 1..110: mol_type = other DNA
ggaagactagggtcagagggccaagagtgatgctgtgaagataacaccgagggggtggaactagtggagactgtgaaactgagacaggcaaagctttgggggggagatag

SEQ ID NO: 55057 - DNA, 110 bp, synthetic construct
  source 1..110: mol_type = other DNA
acgttggctaaagcccctcatagagcccagacattctacattagtggggctccactatttcttcttttcactgtagacaactttgcaccaagccattctctgaactccct

SEQ ID NO: 55058 - DNA, 110 bp, synthetic construct
  source 1..110: mol_type = other DNA
tctcaagcaaaaaaatcaagtgtctatattgctacttctgacagtgtccccaaaatgttactctgtgaaaaaaaacttattcattggcaaaggcaacccagggtcaattc

SEQ ID NO: 55059 - DNA, 110 bp, synthetic construct
  source 1..110: mol_type = other DNA
tgttactctgtgaaaaaaaacttattcattggcaaaggcaacccagggtcaattctgcataattcctaagtggcttttagtaagtatgttatccataaacagcttatgaa

SEQ ID NO: 55060 - DNA, 110 bp, synthetic construct
  source 1..110: mol_type = other DNA
aatatatgctcaacaaaggatatcactgtcattgttagtaagtcttgcatttctgaggctctctgtgctgcctgtctctcgaggaatagcatatgagaaaattatctgtg

SEQ ID NO: 55061 - DNA, 110 bp, synthetic construct
  source 1..110: mol_type = other DNA
aggctctctgtgctgcctgtctctcgaggaatagcatatgagaaaattatctgtggtcagaatgactcaagatctcttctagaatgaaagcaagggccagtgtacttcca

SEQ ID NO: 55062 - DNA, 110 bp, synthetic construct
  source 1..110: mol_type = other DNA
ctgtgtaccaaccataaatacactgatttccactctgcaaacacttaaccaagtttatatgatgtgtcacgcactgtgacagatgataggatacacaacttcagaccatc

SEQ ID NO: 55063 - DNA, 110 bp, synthetic construct
  source 1..110: mol_type = other DNA
tatatgatgtgtcacgcactgtgacagatgataggatacacaacttcagaccatctctatagtttgtctaaattgcagcttgttgatatcagatatactgcatgtcagag

SEQ ID NO: 55064 - DNA, 110 bp, synthetic construct
  source 1..110: mol_type = other DNA
tgcttcctaaagtctagacaacttcaatgtcttcctagctgacctttccacctaaaccctccccttccttttctcctgcctttacagcaggacaagcaaaacttcctaag

SEQ ID NO: 55065 - DNA, 110 bp, synthetic construct
  source 1..110: mol_type = other DNA
ccactgctccaccttcacatgctgtgagccttcttgccttaggttctgaatgtattcaaagcattgatggtatccatggccagtccagcctctaatttccagtgaaatac

SEQ ID NO: 55066 - DNA, 110 bp, synthetic construct
  source 1..110: mol_type = other DNA
tcaaagcattgatggtatccatggccagtccagcctctaatttccagtgaaatacatgttgtgaagtcattgggatatttagcttgaagaaaggcagggacattattaca

SEQ ID NO: 55067 - DNA, 110 bp, synthetic construct
  source 1..110: mol_type = other DNA
gactataagctccgcaactgcaagattttttttttcagttcactgcttttcccttactgctgtagagtgcgttccacagtagatagaaaataaatatagcaaattaatgt

SEQ ID NO: 55068 - DNA, 110 bp, synthetic construct
  source 1..110: mol_type = other DNA
cagttcactgcttttcccttactgctgtagagtgcgttccacagtagatagaaaataaatatagcaaattaatgtaaaatgtcaattaaaatagttatagtccttgaaga

SEQ ID NO: 55069 - DNA, 110 bp, synthetic construct
  source 1..110: mol_type = other DNA
gctttgatgactgcctagaaagcctcacagaactcactaaaagctattttacttacaaatgtgatttattatagaaaaaaaaaaagatacaaattagaatgagtcaagga

SEQ ID NO: 55070 - DNA, 110 bp, synthetic construct
  source 1..110: mol_type = other DNA
agcatcttttggatgatatttagcatataaatgaggtgaggccaggctgaggagagggagagctggtgggataggcaaagcccgagacaaatatgagaagttacaacagt

SEQ ID NO: 55071 - DNA, 110 bp, synthetic construct
  source 1..110: mol_type = other DNA
gggagagctggtgggataggcaaagcccgagacaaatatgagaagttacaacagtttcctccagcatctatcctcccttccatctgaacctacctctttttttaaaactc

SEQ ID NO: 55072 - DNA, 110 bp, synthetic construct
  source 1..110: mol_type = other DNA
gcagtagcttcccccacttcctgctgctgatggacacccaagaacacacacatcactcacacagttatcacttttgaatgtcataagagctctataagactaactcatgt

SEQ ID NO: 55073 - DNA, 110 bp, synthetic construct
  source 1..110: mol_type = other DNA
acacacatcactcacacagttatcacttttgaatgtcataagagctctataagactaactcatgtgggtctaagattttcatttcataaaagaggaactagaaatataaa

SEQ ID NO: 55074 - DNA, 110 bp, synthetic construct
  source 1..110: mol_type = other DNA
ctaaggggagtgagtcactgcttgagcagttgcactcagaaggtcctaaatacacactcacatgtgcagtagaaaacctagctcattcccagaactgatcaggttttata

SEQ ID NO: 55075 - DNA, 110 bp, synthetic construct
  source 1..110: mol_type = other DNA
tttacttctctgcgcaacgctgatattttcagctattcatttcccgtctcccttacctccaaccaggatggcagttccccaagacaatgggttttcttccgcttgctcga

SEQ ID NO: 55076 - DNA, 110 bp, synthetic construct
  source 1..110: mol_type = other DNA
acaaatagcatttcagtcttttctgtacttctcttcaagagatcagccttgacctctgcgggcacagagaaaacgtgacctcacagggccaatcgttgcgtctttgtacc

SEQ ID NO: 55077 - DNA, 110 bp, synthetic construct
  source 1..110: mol_type = other DNA
ctgcgggcacagagaaaacgtgacctcacagggccaatcgttgcgtctttgtacctcagtttcaccatgagatcgatatggtactatcccaacataagagcttcatttgt

SEQ ID NO: 55078 - DNA, 110 bp, synthetic construct
  source 1..110: mol_type = other DNA
aaataaggtaaatcatcacacaggacacatcaggtatcaaagcctttattgaggttgaggttctccattctttagtagaagaatcacctgttttccatcagaagcggatc

SEQ ID NO: 55079 - DNA, 110 bp, synthetic construct
  source 1..110: mol_type = other DNA
tgaggttctccattctttagtagaagaatcacctgttttccatcagaagcggatcaagacagatcagtcctctggatcatagcaactgacctaccacactatgttagttg

SEQ ID NO: 55080 - DNA, 110 bp, synthetic construct
  source 1..110: mol_type = other DNA
agactagacgaactgaaaagacaagttacctacctcccttcaacaaacacatactggccagacaagaacaggataaccacaatggaccctcccattcaaaaggaggaaaa

SEQ ID NO: 55081 - DNA, 110 bp, synthetic construct
  source 1..110: mol_type = other DNA
ggccagacaagaacaggataaccacaatggaccctcccattcaaaaggaggaaaagcagggggttggggtagatggaataggtgaaagggatcaactgtatgacagtgga

SEQ ID NO: 55082 - DNA, 110 bp, synthetic construct
  source 1..110: mol_type = other DNA
gactgcccaaagcagatctaagctgtgccaatctttgcaggcgttgtcttacacattagaggggagccaatacacaaaggcatcagggcagaccccatctaactttcccg

SEQ ID NO: 55083 - DNA, 110 bp, synthetic construct
  source 1..110: mol_type = other DNA
ctggcagcacaaactatgaaatagttccaacatcacagaaagttctatcttcagcatcaacctaagaggaaatccactgagaagcttcaggatagaaattttttgtgtga

SEQ ID NO: 55084 - DNA, 110 bp, synthetic construct
  source 1..110: mol_type = other DNA
tggctctaagtattgcctttagtcctggcaatcctttgctctccccccttgggcacttgtgaaataattgtagcaggccatcaaagatcccttagccatcctggaccttg

SEQ ID NO: 55085 - DNA, 110 bp, synthetic construct
  source 1..110: mol_type = other DNA
cttgtgaaataattgtagcaggccatcaaagatcccttagccatcctggaccttgggagactctagtctgattcaattcaatatacacttgacccttgaacaacacatgt

SEQ ID NO: 55086 - DNA, 110 bp, synthetic construct
  source 1..110: mol_type = other DNA
tagttatcatatgcctgttctctgtgtggcccagagctttttcctgtcaaaaagccaatgccttactctaggggaaagaagttccaagaatacttgctggagagattctc

SEQ ID NO: 55087 - DNA, 110 bp, synthetic construct
  source 1..110: mol_type = other DNA
ccagggataaactcaggtcctcatggatcctactcgggttcattatctctgagtcgtaacagggactccaggacccacctttacactaagacgtaattgccattttcact

SEQ ID NO: 55088 - DNA, 110 bp, synthetic construct; identical to SEQ ID NO: 55087
  source 1..110: mol_type = other DNA

SEQ ID NO: 55089 - DNA, 110 bp, synthetic construct
  source 1..110: mol_type = other DNA
gaagactgttttgagaggtttctgatggaaatccctttttactgccagctggcatatagtagaaactatttgtagcaactacaatcattcctccacatgaaaacttcaga

SEQ ID NO: 55090 - DNA, 110 bp, synthetic construct
  source 1..110: mol_type = other DNA
ggcaggctgggtatgaatttgccaaaacgacaaatttagttagtgctgagttcagcctaggtctgtttgatgtcaaacatgcaggagctagagacattgacaacctcacc

SEQ ID NO: 55091 - DNA, 110 bp, synthetic construct
  source 1..110: mol_type = other DNA
tttcttctttgccagtggggaaagtttttgcattccacattttcactcccacattctcatgtgatggaagctacaagaccagactaggtaattggtaaggtctcgttctg

SEQ ID NO: 55092 - DNA, 110 bp, synthetic construct
  source 1..110: mol_type = other DNA
gtccttatcctttccatctgtactaaagcagtgattcaatgaagaacatcactggcagatccaagaaagcagcagctcatccttctgtcagtggagagttagctttcccg

SEQ ID NO: 55093 - DNA, 110 bp, synthetic construct
  source 1..110: mol_type = other DNA
cagatccaagaaagcagcagctcatccttctgtcagtggagagttagctttcccggggctagagttgcaatccagtggctaattcctccattacttttccagagctgccc

SEQ ID NO: 55094 - DNA, 110 bp, synthetic construct
  source 1..110: mol_type = other DNA
agtaattgattctcgaaggtgacaagaagtggaggtggttggggactgcataaaacatgtggggataagctacccccaaggaggggtgtgtaaatcctctctcagattga

SEQ ID NO: 55095 - DNA, 110 bp, synthetic construct
  source 1..110: mol_type = other DNA
catgtggggataagctacccccaaggaggggtgtgtaaatcctctctcagattgagaagactctgctagtgaaggcgttttcaaatcattagccctccctggccttgcac

SEQ ID NO: 55096 - DNA, 110 bp, synthetic construct
  source 1..110: mol_type = other DNA
tcaagcagacatgagtaggacttgtagtcatgttgaaacccagctggaatctatgttagcaggtgggctagtagtgggcttcttcctgttaggcaggtaggggatcatcc

SEQ ID NO: 55097 - DNA, 110 bp, synthetic construct
  source 1..110: mol_type = other DNA
agaacattgctgacctctggtgcctgttcccatgcctgttaggtagaaccattacccttatttccagctcttaatcagtcatcatagatcaatattccttcagatttggt

SEQ ID NO: 55098 - DNA, 110 bp, synthetic construct
  source 1..110: mol_type = other DNA
tgcaccatggtagggactactaaaatacctttagagatattagtcctaccatgtggtatttttctgtcggaagctagttatatatagtcttatttctcagtaacattaaa

SEQ ID NO: 55099 - DNA, 110 bp, synthetic construct
  source 1..110: mol_type = other DNA
gtatttttctgtcggaagctagttatatatagtcttatttctcagtaacattaaagcaatctttgtgcatgtcctgaaaggagaaatgaaatttattggatctgtacact

SEQ ID NO: 55100 - DNA, 110 bp, synthetic construct
  source 1..110: mol_type = other DNA
gaatctgccagatgctgtagctctctgcctctttaaagagagtgctctgagaccaggttatccgggggcagttggagtcttttggtatgaatactattttctctgatctt

SEQ ID NO: 55101 - DNA, 110 bp, synthetic construct
  source 1..110: mol_type = other DNA
gtgatgatggcacacctacacatgctttgtgcagctcccagggtttcatccagcgctcaaaaacagcagtggaaaaattggtgaaaagtgttttactttgggggcagaag

SEQ ID NO: 55102 - DNA, 110 bp, synthetic construct
  source 1..110: mol_type = other DNA
ttcaagctcacagtccatggacttatgtcattgcaccggttactaattagttttagtattgtctatcttgagtgatggatcacgtgtagtgtgggttacctattaatatc

SEQ ID NO: 55103 - DNA, 110 bp, synthetic construct
  source 1..110: mol_type = other DNA
gtattgtctatcttgagtgatggatcacgtgtagtgtgggttacctattaatatcagcgcaatggattagaaaaaaaagaactggtccttcagccttgacaggttgagaa

SEQ ID NO: 55104 - DNA, 110 bp, synthetic construct
  source 1..110: mol_type = other DNA
aatataggtgcctttgaatctggccaatcatttgcccccatattaacacttcaaaactaattcatacacttgatttatcccagccatattgtttatactacctaattaca

SEQ ID NO: 55105 - DNA, 110 bp, synthetic construct
  source 1..110: mol_type = other DNA
attaagtacaaatcaaagcatttaaaatgcatgcaagaaaaaaatttcaatcttgcaagacttagcaccatgcagagagcactatagggcatcaaaattttatagtgtta

SEQ ID NO: 55106 - DNA, 110 bp, synthetic construct
  source 1..110: mol_type = other DNA
caagacttagcaccatgcagagagcactatagggcatcaaaattttatagtgttattcctgtaccccttgcctggatccatctgactcaccactccctaatttgcacttg

SEQ ID NO: 55107 - DNA, 110 bp, synthetic construct
  source 1..110: mol_type = other DNA
gggctgtcactttagttgttcccttgataccaatgttgtttaaaacaaactcaaatgtgactctttgaagcattataccagcaccagactataaaataatcatctagaat

SEQ ID NO: 55108 - DNA, 110 bp, synthetic construct
  source 1..110: mol_type = other DNA
ataattatgaaaaaaatgaagtggggggatagcaatgttgaagaaatttaaagcataaagtggagtgatcatgggtcccgtaggactcaaagtgtcattgtgaagagtgt

SEQ ID NO: 55109 - DNA, 110 bp, synthetic construct
  source 1..110: mol_type = other DNA
ttcattttccctggagacatcattctggaaggtccccactcccttcttgacttatgtctgaggccaaccatgctgctttcactctgggactgcctttctcctctcttgat

SEQ ID NO: 55110 - DNA, 110 bp, synthetic construct
  source 1..110: mol_type = other DNA
gttaaagaggtcttggggggagagatcatacagggcccagtagatctttagaaagactatgattataagtgagataggaacacgctgtgtgttttgaggaaaggttgaca

SEQ ID NO: 55111 - DNA, 110 bp, synthetic construct
  source 1..110: mol_type = other DNA
actatgattataagtgagataggaacacgctgtgtgttttgaggaaaggttgacatgatcaaacatatttttaaagctcaagacttgggaaggagggaaggcataaacag

SEQ ID NO: 55112 - DNA, 110 bp, synthetic construct
  source 1..110: mol_type = other DNA
ccattttctcaaatccaatcaatccctactgtttcaatcacctaaatacacccctactccaaatttccaaagctggtatttgaatctctattctttctcaccatgatctt

SEQ ID NO: 55113 - DNA, 110 bp, synthetic construct
  source 1..110: mol_type = other DNA
caggggccatttcggtctctgttatattttttcttcttattttgacccaaagtggggattctaagttttgaataagtatataaatttgagccacctacaggacagtaaca

SEQ ID NO: 55114 - DNA, 110 bp, synthetic construct
  source 1..110: mol_type = other DNA
taaattttgtactcagtctactctcacacaagagcacagagaggattccttcctttgattaaatatggagcagcttaagaactctcccacctgtaacgtgcctgctctag

SEQ ID NO: 55115 - DNA, 110 bp, synthetic construct
  source 1..110: mol_type = other DNA
ggattaaaggtctggtgttaaccatgaactatggtgtaagttgaagacgcagctcagatctagcattgctgtggctgtggtgcaagctgctggagacaagtctgattcga

SEQ ID NO: 55116 - DNA, 110 bp, synthetic construct
  source 1..110: mol_type = other DNA
tgttaaccatgaactatggtgtaagttgaagacgcagctcagatctagcattgctgtggctgtggtgcaagctgctggagacaagtctgattcgacccctagcctgggaa

SEQ ID NO: 55117 - DNA, 110 bp, synthetic construct
  source 1..110: mol_type = other DNA
catccagtcggggttgttacctctgagccacaagagtacctccaactttgcatatttttagctataacaacgttgtcaaattaattgagaaaataaaattctacaaatgg

SEQ ID NO: 55118 - DNA, 110 bp, synthetic construct
  source 1..110: mol_type = other DNA
tagctatttgaatcacaaaaatgattgagtttttgtcagtttaagagagattatcaactccgcatatcatatctgtgaaatgccagtggactctctcccacaggattttt

SEQ ID NO: 55119 - DNA, 110 bp, synthetic construct; identical to SEQ ID NO: 55118
  source 1..110: mol_type = other DNA

SEQ ID NO: 55120 - DNA, 110 bp, synthetic construct
  source 1..110: mol_type = other DNA
atttttgtgtaatctcaaaaattgagaacaacctaaatatttatcaaaagggagtacctatttatacaatagaatcccctaaagctgcatttctcaacctagggcgattt

SEQ ID NO: 55121 - DNA, 110 bp, synthetic construct
  source 1..110: mol_type = other DNA
acctatttatacaatagaatcccctaaagctgcatttctcaacctagggcgattttgcaatccagggaacacttggcaatttctggagaggtttttggttttcattacta

SEQ ID NO: 55122 - DNA, 110 bp, synthetic construct
  source 1..110: mol_type = other DNA
ctaatatttcctaacatgtacactcactgtctgtctatagtatatgcacttggctcttagttatataatctactatgaattgagctaggttataagaagaatcaacagct

SEQ ID NO: 55123 - DNA, 110 bp, synthetic construct
  source 1..110: mol_type = other DNA
ggtcctattcaatgttaaggatgaaaacttcacagcactcttttggccattaattccccgtaggtcccttccacttcattttctaagcagaagatggctatatggacctc

SEQ ID NO: 55124 - DNA, 110 bp, synthetic construct
  source 1..110: mol_type = other DNA
tcagtccaccacctccatctgcacccgcagaatgaatcacaaactggggagagggcagggcttggggccacgactcggcatccaagggtggggatgcaaggagtggaagg

SEQ ID NO: 55125 - DNA, 110 bp, synthetic construct
  source 1..110: mol_type = other DNA
cagggcttggggccacgactcggcatccaagggtggggatgcaaggagtggaaggtcattacctgggccgccggctgtagggagatcttgaacgtgatctggcgcacagg

SEQ ID NO: 55126 - DNA, 110 bp, synthetic construct
  source 1..110: mol_type = other DNA
actcttgttttggcagaaactgtccatttctgtaaagtaccagcctgacagcaagatacagctatccttctagtagataatacaatggctgcatactttttaatgatgac

SEQ ID NO: 55127 - DNA, 110 bp, synthetic construct
  source 1..110: mol_type = other DNA
agtaccagcctgacagcaagatacagctatccttctagtagataatacaatggctgcatactttttaatgatgacgtatttaatctcgaaaaaaaaataaagttgctcta

SEQ ID NO: 55128 - DNA, 110 bp, synthetic construct
  source 1..110: mol_type = other DNA
atggtggaggaagatgtagccgttcccctaagaacgaggcagtgttttagcaacagactgaacacggagcacaaaggacagggaggcagaggcagtgaccctaaggctta

SEQ ID NO: 55129 - DNA, 110 bp, synthetic construct
  source 1..110: mol_type = other DNA
gactgaacacggagcacaaaggacagggaggcagaggcagtgaccctaaggcttatggtttgggggcaaaacagcaaactggtttctgatccctgggagcacacaaacaa

SEQ ID NO: 55130 - DNA, 110 bp, synthetic construct
  source 1..110: mol_type = other DNA
cctataaacactctgaaatgaaatcttattttatacaaaaccatcatggtgatgccactgtgaacaaagcatatttgggaaacaaacagaggaaaatgagtggacagctt

SEQ ID NO: 55131 - DNA, 110 bp, synthetic construct
  source 1..110: mol_type = other DNA
cactgtgaacaaagcatatttgggaaacaaacagaggaaaatgagtggacagctttaatgcctcctagcatagttttttttttaatttattttattcttaataagctaga

SEQ ID NO: 55132 - DNA, 110 bp, synthetic construct
  source 1..110: mol_type = other DNA
gttatattttagtgtctgggaccttatttagatgatgtcatccgaatgttgatccaaaacctctgttttatgtacttttcggtccccaaataagctatgaaatttctttt

SEQ ID NO: 55133 - DNA, 110 bp, synthetic construct
  source 1..110: mol_type = other DNA
aaaacctctgttttatgtacttttcggtccccaaataagctatgaaatttcttttcactcaaaataaagatcatttacaccccttctcacagcttcaagccggacaaagt

SEQ ID NO: 55134 - DNA, 110 bp, synthetic construct
  source 1..110: mol_type = other DNA
aactcttggcctttctgtatccccagggcttggtgccatgactggtacatagcgggtgctaaataaatgctcatgcgccatgaatgaatgtaaatccttagcgaaatcct

SEQ ID NO: 55135 - DNA, 110 bp, synthetic construct
  source 1..110: mol_type = other DNA
aaccacatccatctcactactgattgagcttatttttcctacatttaatgtaatccagctctgatgtgcagcaattctaagacgcacatcttttcaccttttgccatctg

SEQ ID NO: 55136 - DNA, 110 bp, synthetic construct
  source 1..110: mol_type = other DNA
cagctctgatgtgcagcaattctaagacgcacatcttttcaccttttgccatctgaaggtttgatgtctaaaattgggaagagtttaacaatcaatagtatgtcatttaa

SEQ ID NO: 55137 - DNA, 110 bp, synthetic construct
  source 1..110: mol_type = other DNA
tcatcggggaactgaaaattaattctgtgtgactagggctcgggaggagcatgagggctaagagatgaggttggagaagtccgcctggcttcgcccacatgacagttagg

SEQ ID NO: 55138 - DNA, 110 bp, synthetic construct
  source 1..110: mol_type = other DNA
ggctaagagatgaggttggagaagtccgcctggcttcgcccacatgacagttaggatttggacttatgcccagcaccactgcgtgtgtgtgtgcgtgcgcacgcgcgcgt

SEQ ID NO: 55139 - DNA, 110 bp, synthetic construct
  source 1..110: mol_type = other DNA
cttggggcaattacttcccttccctgggtctcactttcttatctaaaaaatggggatcacaccccattgggctaatgttctctgaggtcataatatgcatgtataacact

SEQ ID NO: 55140 - DNA, 110 bp, synthetic construct
  source 1..110: mol_type = other DNA
atcacaccccattgggctaatgttctctgaggtcataatatgcatgtataacactcggtctagggttatgactcaaagaaagggtaggactcaagtgggagctagttaaa

SEQ ID NO: 55141 - DNA, 110 bp, synthetic construct
  source 1..110: mol_type = other DNA
gtctatgctagagcacccagctaagtgcctcactcataggcgaaaaccaacctctgcagagtggttggaataatggagttcaatcaaactcaagagtttgtggtctcagg

SEQ ID NO: 55142 - DNA, 110 bp, synthetic construct
  source 1..110: mol_type = other DNA
gttcatcattttccagaagcattaccgaaataacatcataaacacacgagactacacagaaggaaagaaacgcatctgtaccgaatactttcttggaagagctaacaatg

SEQ ID NO: 55143 - DNA, 110 bp, synthetic construct
  source 1..110: mol_type = other DNA
acagaaggaaagaaacgcatctgtaccgaatactttcttggaagagctaacaatgagatctttattattatttttttaaatctgactttgtacaacatcatggcatgctc

SEQ ID NO: 55144 - DNA, 110 bp, synthetic construct
  source 1..110: mol_type = other DNA
tcaggtcatcacgaaacacttttttgaaatatgtctcaatctgtctttcagtgcgacaatgaaattaccagacagttcagcatgtgacatgactgaattaggctgtagct

SEQ ID NO: 55145 - DNA, 110 bp, synthetic construct
  source 1..110: mol_type = other DNA
aaaattcattctctccttctgcttaccaataaatctccaacttcacctggaacaccaaagtgcccagttgagtctcatttcatagcttcccttgtagctttccgtggaga

SEQ ID NO: 55146 - DNA, 110 bp, synthetic construct
  source 1..110: mol_type = other DNA
gactcccgaggcttgctaagaaggaggcaagcatagggcggaaaatagaaagaacgtattttctggaggttcacaacttcgccgtcacttgctacttccttaagctcaga

SEQ ID NO: 55147 - DNA, 110 bp, synthetic construct
  source 1..110: mol_type = other DNA
gtattttctggaggttcacaacttcgccgtcacttgctacttccttaagctcagaaaagttgctgttaacctctcagaaacagtttctggtctgtaaaatatgatatgat

SEQ ID NO: 55148 - DNA, 110 bp, synthetic construct
  source 1..110: mol_type = other DNA
tatatcagccctagatgccgggcatcaccaggcttgcacctatctttcagccccactgcactccctctgaagttccagaaggccccaaagtcctacggaaagccataaaa

SEQ ID NO: 55149 - DNA, 110 bp, synthetic construct
  source 1..110: mol_type = other DNA
ctgcatcttcatggatactcatcgggttcgtcaccactgagccacaaagggaactccatcaagaaggtttcttcaccctagcaatccagcttcttcattctgtaagactc

SEQ ID NO: 55150 - DNA, 110 bp, synthetic construct
  source 1..110: mol_type = other DNA
ccatcaagaaggtttcttcaccctagcaatccagcttcttcattctgtaagactcactgataccttccaccccggggaactcaagatctgagatgcaatgagtaacacaa

SEQ ID NO: 55151 - DNA, 110 bp, synthetic construct
  source 1..110: mol_type = other DNA
ttcttagggaggaatcaaattgtaataaaggcagtatataaggaaaggaagtttacattgttaaaaaatcaaggatccaggatttcccatcgtggcgcagtggtcaacga

SEQ ID NO: 55152 - DNA, 110 bp, synthetic construct
  source 1..110: mol_type = other DNA
caaattgtaataaaggcagtatataaggaaaggaagtttacattgttaaaaaatcaaggatccaggatttcccatcgtggcgcagtggtcaacgaatctgactaggaacc

SEQ ID NO: 55153 - DNA, 110 bp, synthetic construct
  source 1..110: mol_type = other DNA
agtattcaaaaatggtaggacaggagtcctattttggtgcagcaggttaaggatctgatgttgttactaaaccagcttgggacgcttgtgtgagtttgattcctggccgg

SEQ ID NO: 55154 - DNA, 110 bp, synthetic construct
  source 1..110: mol_type = other DNA
tgatgttgttactaaaccagcttgggacgcttgtgtgagtttgattcctggccgggaacttccacatgctgcatgggcagccaaaaaaaaaaaaaatcaaaatttgcaac

SEQ ID NO: 55155 - DNA, 110 bp, synthetic construct
  source 1..110: mol_type = other DNA
gaactcctaaaccaatagttctgattacatttggtgaattaaatatgctacaatgcaaagaggtatagtttttaatgttttcgtagctcctaaagcaccaaaatataact

SEQ ID NO: 55156 - DNA, 110 bp, synthetic construct
  source 1..110: mol_type = other DNA
caaagaggtatagtttttaatgttttcgtagctcctaaagcaccaaaatataactaatggttgagagcttaatgggacaaacggaatataaagactgcctgatgtctgga

SEQ ID NO: 55157 - DNA, 110 bp, synthetic construct
  source 1..110: mol_type = other DNA
gtacagagaccattattttcagaccatgtatgcagagcctaaagaaaacaagtaattgcgttgggattgtcaaccactgacgtgtttcagtgtggtagaaaagagatcaa

SEQ ID NO: 55158 - DNA, 110 bp, synthetic construct
  source 1..110: mol_type = other DNA
ttgcgttgggattgtcaaccactgacgtgtttcagtgtggtagaaaagagatcaataggtttaggtagttaccctgtagtctttaatttgaattgaaactattagtataa

SEQ ID NO: 55159 - DNA, 110 bp, synthetic construct
  source 1..110: mol_type = other DNA
gaagatgaggatgaagaatggggcaaactagctggggagggtggggccttggcaattcaggtctgctgtgagcttcgaaagacctggtcagaacactctccaaagcgatg

SEQ ID NO: 55160 - DNA, 110 bp, synthetic construct
  source 1..110: mol_type = other DNA
aacccactcctgtccaccccatgtgtgtctttcttctttgccactcacacagaatcctgtgcttccgacacttctggtcaccgaatgtgtctgcattttccccccaccaa

SEQ ID NO: 55161 - DNA, 110 bp, synthetic construct
  source 1..110: mol_type = other DNA
cctgtgcttccgacacttctggtcaccgaatgtgtctgcattttccccccaccaagaaattcgctgacccctgtgggatgtcctacaattgaattcaattctgacactgt

SEQ ID NO: 55162 - DNA, 110 bp, synthetic construct
  source 1..110: mol_type = other DNA
tatgtatccatacctggggtcctgagttttgtttgtttgagcctgagtgtggttggatgtgaggtttagacacttaccctgcgttagttaagagggggaattgggtagaa

SEQ ID NO: 55163 - DNA, 110 bp, synthetic construct
  source 1..110: mol_type = other DNA
gatgtgaggtttagacacttaccctgcgttagttaagagggggaattgggtagaaggcaagagtcagaagcataaccagccccccagggagtgggctggaaaatgagtga

SEQ ID NO: 55164 - DNA, 110 bp, synthetic construct; identical to SEQ ID NO: 55162
  source 1..110: mol_type = other DNA

SEQ ID NO: 55165 - DNA, 110 bp, synthetic construct; identical to SEQ ID NO: 55163
  source 1..110: mol_type = other DNA

SEQ ID NO: 55166 - DNA, 110 bp, synthetic construct
  source 1..110: mol_type = other DNA
tctcggcttcccagtactggcttctgttccaaatgaaacccaccagaggtcttcaagctcaacttcatacttaactcataagtaccatatgccttttgcatattttgcag

SEQ ID NO: 55167 - DNA, 110 bp, synthetic construct
  source 1..110: mol_type = other DNA
agctcaacttcatacttaactcataagtaccatatgccttttgcatattttgcaggaagataattaaagacttttttccttgtctttttagggccgcacccgcagcatat

SEQ ID NO: 55168 - DNA, 110 bp, synthetic construct
  source 1..110: mol_type = other DNA
cctcactctctggtggtggcttcttgtgcccattaaatatttaaactaaagacaaaggttttgtaggttgtgtagctcaggggagacctggggctccgtcatcatgaaaa

SEQ ID NO: 55169 - DNA, 110 bp, synthetic construct
  source 1..110: mol_type = other DNA
aggttttgtaggttgtgtagctcaggggagacctggggctccgtcatcatgaaaagaggttctggctgctttcagtgtgggaagcagaaggcgcagttagggtcagcacc

SEQ ID NO: 55170 - DNA, 110 bp, synthetic construct
  source 1..110: mol_type = other DNA
aactacagcaaatgtcaagaattggctgtgtgaggggaaagggagtttaaggctgaactggttaattcacctgaaagctgacatgtgacaatatcttgcacgtcacacag

SEQ ID NO: 55171 - DNA, 110 bp, synthetic construct
  source 1..110: mol_type = other DNA
aactggttaattcacctgaaagctgacatgtgacaatatcttgcacgtcacacagtttcttggctcaggacttgcagaaccccaggtgaatacacagaaagacaaacagc

SEQ ID NO: 55172 - DNA, 110 bp, synthetic construct
  source 1..110: mol_type = other DNA
tgaatgatgaccatagaacacctaccacagtgcctgttcacagtaggtactggttaaagtctggttacctcccctcgactccgtcctttcagtggcctctactcaaccac

SEQ ID NO: 55173 - DNA, 110 bp, synthetic construct
  source 1..110: mol_type = other DNA
aaagtctggttacctcccctcgactccgtcctttcagtggcctctactcaaccactcagatgacagctgagtggatctggccacagggctccttggacacagctggctcc

SEQ ID NO: 55174 - DNA, 110 bp, synthetic construct
  source 1..110: mol_type = other DNA
catatgttatcactggggtgctgggtgctggcgaaaacactgcagggaggggctccagtccaagaggcatgactcacttcgagcacctagaaattgcttcctttgccttg

SEQ ID NO: 55175 - DNA, 110 bp, synthetic construct
  source 1..110: mol_type = other DNA
cagtccaagaggcatgactcacttcgagcacctagaaattgcttcctttgccttgtctagggcagagctggctcactgttttccaaagatcatctgcagcagtggcagtt

SEQ ID NO: 55176 - DNA, 110 bp, synthetic construct
  source 1..110: mol_type = other DNA
tgttggaagggaaaggagagcttcccaggctaagacagagatgggactctcagctcggccctgcatcagctctgggatcttgtcaagagcgcaccctctcagaccctttc

SEQ ID NO: 55177 - DNA, 110 bp, synthetic construct
  source 1..110: mol_type = other DNA
cggccctgcatcagctctgggatcttgtcaagagcgcaccctctcagaccctttctcatctataaaagtaattttagagttttctcatctataaaatgggcattgtggca

SEQ ID NO: 55178 - DNA, 110 bp, synthetic construct
  source 1..110: mol_type = other DNA
gttagcaaagggttgtcctgtctggggggaagttagggaaaccaattgcaagaacaggtgatcaatgaaactgacacatgacgtatgcctccacttcttatgagacagtt

SEQ ID NO: 55179 - DNA, 110 bp, synthetic construct
  source 1..110: mol_type = other DNA
aggtgatcaatgaaactgacacatgacgtatgcctccacttcttatgagacagttagcccccctccattagctctccgaggaatagagaaaagaagtgtgcttgacttgc

SEQ ID NO: 55180 - DNA, 110 bp, synthetic construct; identical to SEQ ID NO: 55178
  source 1..110: mol_type = other DNA

SEQ ID NO: 55181 - DNA, 110 bp, synthetic construct; identical to SEQ ID NO: 55179
  source 1..110: mol_type = other DNA

SEQ ID NO: 55182 - DNA, 110 bp, synthetic construct
  source 1..110: mol_type = other DNA
tatgtggggacgttagcctgagcctgtttattggttaccagtcccggagcagcgctaagtaccgctctgcctaggatctggacggtactcttcagctcggtagacgtatt

SEQ ID NO: 55183 - DNA, 110 bp, synthetic construct
  source 1..110: mol_type = other DNA
taagtaccgctctgcctaggatctggacggtactcttcagctcggtagacgtattcgattttccagcaactcatcccatttgagcatgagttctgctcctatacttagtg

SEQ ID NO: 55184 - DNA, 110 bp, synthetic construct
  source 1..110: mol_type = other DNA
agggtttggctgggagagaggaagtgagggtttggtattggagatgctgactctgaaatgtccatgagccattcatgcaccaatgctgagttggcagccagctgaccagt

SEQ ID NO: 55185 - DNA, 110 bp, synthetic construct
  source 1..110: mol_type = other DNA
aaatgtccatgagccattcatgcaccaatgctgagttggcagccagctgaccagtggggatggtaaggaggaggtggggtggggggtggatagcaagtcattataacctg

SEQ ID NO: 55186 - DNA, 110 bp, synthetic construct
  source 1..110: mol_type = other DNA
cagcttggaaatcaatgtgtgaatccgcttctctccccccttcttttcattctgtcacgttctcagctcaaggtgttgggtttgcatcctgggtctgcatggaggatgaa

SEQ ID NO: 55187 - DNA, 110 bp, synthetic construct
  source 1..110: mol_type = other DNA
cacgttctcagctcaaggtgttgggtttgcatcctgggtctgcatggaggatgaatgcatcttctgggcacagggattggaatctgctgggtctttggacatagcgaacg

SEQ ID NO: 55188 - DNA, 110 bp, synthetic construct
  source 1..110: mol_type = other DNA
gcctgagaaggcagcctcttcagctaatggaagaattaaccttataaaccaaggggcttattaccggacacagtttgcagccctacaagccaatgccaaccctctccttt

SEQ ID NO: 55189 - DNA, 110 bp, synthetic construct
  source 1..110: mol_type = other DNA
gcttattaccggacacagtttgcagccctacaagccaatgccaaccctctccttttttcttattccatacagaaagtcacagtaatatacggatctgttttcacaagctt

SEQ ID NO: 55190 - DNA, 110 bp, synthetic construct
  source 1..110: mol_type = other DNA
ggaaaaacactccctcagtttttatctggtcaaaagctctgcgtacttcttaaaagttcctgtctctctaatgtggtccatgagacacatcaggccttcttcccatccga

SEQ ID NO: 55191 - DNA, 110 bp, synthetic construct
  source 1..110: mol_type = other DNA
gttcctgtctctctaatgtggtccatgagacacatcaggccttcttcccatccgagcatcagactcaattcctctgatttatcctagcggccctgtctgcctcctttttc

SEQ ID NO: 55192 - DNA, 110 bp, synthetic construct
  source 1..110: mol_type = other DNA
acttaagaatctgtatgctgtatagttggtacaatttataaagggatcttctttgaagtatgactgaatgactaaaattgctatggaaaacttctctttccttgtggagt

SEQ ID NO: 55193 - DNA, 110 bp, synthetic construct
  source 1..110: mol_type = other DNA
aagtatgactgaatgactaaaattgctatggaaaacttctctttccttgtggagtttactttagagcagtgtttctcagcctcgcactactgagatgtggggctgggtaa

SEQ ID NO: 55194 - DNA, 110 bp, synthetic construct
  source 1..110: mol_type = other DNA
tttcacccttcaaaaaaggcttgagaaggaatggcttccagctgagttcttgtctgcctctactgtgaaaaagataaagcctttgtggaagagatatagctagatgaaat

SEQ ID NO: 55195 - DNA, 110 bp, synthetic construct
  source 1..110: mol_type = other DNA
gcctctactgtgaaaaagataaagcctttgtggaagagatatagctagatgaaataacctctaaaaatatcattgtggtgaataagggcagagaataaaaaaaaaaaaat

SEQ ID NO: 55196 - DNA, 110 bp, synthetic construct
  source 1..110: mol_type = other DNA
gtgggggaaaagatccagcgttgctgcaagctcccgtataggttgctcagatccgttgttgctgtgactgtggcaagggctccgtttcgacccatagcctgggaacctcc

SEQ ID NO: 55197 - DNA, 110 bp, synthetic construct
  source 1..110: mol_type = other DNA
cagcgttgctgcaagctcccgtataggttgctcagatccgttgttgctgtgactgtggcaagggctccgtttcgacccatagcctgggaacctccatatgctgcagatgt

SEQ ID NO: 55198 - DNA, 110 bp, synthetic construct
  source 1..110: mol_type = other DNA
attaacttactttggcctttgccatccgatttccatgaagccacctctccagttccaagaaattcttgcctttccaatgattgtaacatcatttaataatgcttagccct

SEQ ID NO: 55199 - DNA, 110 bp, synthetic construct
  source 1..110: mol_type = other DNA
caagaaattcttgcctttccaatgattgtaacatcatttaataatgcttagcccttacgtttatgtaaacaggagctttctgtactttagccagtggaagaatgtcatat

SEQ ID NO: 55200 - DNA, 110 bp, synthetic construct; identical to SEQ ID NO: 55198
  source 1..110: mol_type = other DNA

SEQ ID NO: 55201 - DNA, 110 bp, synthetic construct; identical to SEQ ID NO: 55199
  source 1..110: mol_type = other DNA

SEQ ID NO: 55202 - DNA, 110 bp, synthetic construct
  source 1..110: mol_type = other DNA
tctaatgagaatgtatgaggtaaatcgcttaagagatgaaaataccctgttttttggttcgagatactggagtttatatttactctgaacttactctgatgactgacatc

SEQ ID NO: 55203 - DNA, 110 bp, synthetic construct
  source 1..110: mol_type = other DNA
ggttcgagatactggagtttatatttactctgaacttactctgatgactgacatcttaaactactgtctcaaagacagttctttaagactttctgaggtgttagtattgg

SEQ ID NO: 55204 - DNA, 110 bp, synthetic construct
  source 1..110: mol_type = other DNA
cttacaatgtattcctttgtgttttgttgtgtctcgaaggtacttgaagtttactgagttgcccttgtctcagagaaggttctgtcaaggatgtcagcagttgctgctgc

SEQ ID NO: 55205 - DNA, 110 bp, synthetic construct
  source 1..110: mol_type = other DNA
cctggtgcctgggacaaggcagagttccccggggagggagcctgtgttttcctgagtccttctgcagggcttgaagcctctccagtgataaagcagaaataagccaagtg

SEQ ID NO: 55206 - DNA, 110 bp, synthetic construct
  source 1..110: mol_type = other DNA
gtccttctgcagggcttgaagcctctccagtgataaagcagaaataagccaagtgttcctggggtcagccggcatatcagatgattcttaaaacaaactgaagcaaatgc

SEQ ID NO: 55207 - DNA, 110 bp, synthetic construct
  source 1..110: mol_type = other DNA
caggaagggatcttagaggttgttcttacctgtcagtcagagcaggtgggttaaaggacatggaggtgaagccagtccacccaggttctgagctctgttcactcgctgat

SEQ ID NO: 55208 - DNA, 110 bp, synthetic construct
  source 1..110: mol_type = other DNA
ggacatggaggtgaagccagtccacccaggttctgagctctgttcactcgctgatggccctggaaaggaccctacccatctctgagcctcgttttcttcactgatcagtt

SEQ ID NO: 55209 - DNA, 110 bp, synthetic construct
  source 1..110: mol_type = other DNA
cctctttgataaaaagcccagcagctttggtattaaatacatcttttccttcagcgtcttctgcattttctgcaaacacaccggcatatttcaggcagatggctagctgc

SEQ ID NO: 55210 - DNA, 110 bp, synthetic construct
  source 1..110: mol_type = other DNA
gtcttctgcattttctgcaaacacaccggcatatttcaggcagatggctagctgcttatcttcagatatcttccaaatcatccctccctgttcaggacacttttcaggaa

SEQ ID NO: 55211 - DNA, 110 bp, synthetic construct
  source 1..110: mol_type = other DNA
cggattcgttaaccactgagccacgacgggaactcccttttcctgaaatttcaaggtcttttccctcacttaaggatactactcaccagcagcaccagctacataatttg

SEQ ID NO: 55212 - DNA, 110 bp, synthetic construct
  source 1..110: mol_type = other DNA
gtcttttccctcacttaaggatactactcaccagcagcaccagctacataatttgaggagcccctcattcaaaaagtggggaaggtgcccattataggtgctaaaagtat

SEQ ID NO: 55213 - DNA, 110 bp, synthetic construct
  source 1..110: mol_type = other DNA
aggagccttttaaagcccagtgtgcgactgccctgttcagagctgtcccatcccgctgagagcagctgcgtggtcacaaggacttgggcacctgcctcctcgagctcatc

SEQ ID NO: 55214 - DNA, 110 bp, synthetic construct
  source 1..110: mol_type = other DNA
ccaggcagtagaagatgttagaaaaatctccccaatgccaccaaacggatcagcatgcaagactggccttccgactccgggtatctctcctgaaattacatcagctatca

SEQ ID NO: 55215 - DNA, 110 bp, synthetic construct
  source 1..110: mol_type = other DNA
tgcaagactggccttccgactccgggtatctctcctgaaattacatcagctatcaaaatcagtttctttcctgtctgcaatattactattcctatacaccttccccctct

SEQ ID NO: 55216 - DNA, 110 bp, synthetic construct
  source 1..110: mol_type = other DNA
ttcacccactgagcggggccaggggttcgttactgctgagccacagtgggaacgccatctgttttcattttttttttccatcctcctttcttagcttccatcctcctttt

SEQ ID NO: 55217 - DNA, 110 bp, synthetic construct
  source 1..110: mol_type = other DNA
catctgttttcattttttttttccatcctcctttcttagcttccatcctccttttcccgcagtccgggggtctctggaatccagagccttcccctctcttcctccccacc

SEQ ID NO: 55218 - DNA, 110 bp, synthetic construct
  source 1..110: mol_type = other DNA
agcttttgcaaatgttcatctgtaaaaatcatgcttagctcgtggctacaaataaaaacacgtggtggacttgacccatagcgcatctacttcagggaaagaatcagaga

SEQ ID NO: 55219 - DNA, 110 bp, synthetic construct
  source 1..110: mol_type = other DNA
tttagtgcatgtggctccagtatctgcatttttaactgtaaggcattctacagctgcctgcttttctggttcaattttaattgatttgaacaactcttatctgagagtca

SEQ ID NO: 55220 - DNA, 110 bp, synthetic construct
  source 1..110: mol_type = other DNA
ctgtaaggcattctacagctgcctgcttttctggttcaattttaattgatttgaacaactcttatctgagagtcataactgattccttaaaaaagtaaataatactaaat

SEQ ID NO: 55221 - DNA, 110 bp, synthetic construct; identical to SEQ ID NO: 55219
  source 1..110: mol_type = other DNA

SEQ ID NO: 55222 - DNA, 110 bp, synthetic construct; identical to SEQ ID NO: 55220
  source 1..110: mol_type = other DNA

SEQ ID NO: 55223 - DNA, 110 bp, synthetic construct
  source 1..110: mol_type = other DNA
gatggacggtcctgctcagatgatcctttccacgtgggcagatggttaattcaaagggaagctgaaaagaggttaatgaagacgaagatgctattttcagaggcttgggc

SEQ ID NO: 55224 - DNA, 110 bp, synthetic construct
  source 1..110: mol_type = other DNA
gggaagctgaaaagaggttaatgaagacgaagatgctattttcagaggcttgggcggagtgaagggagccgatcaaggatgaggaagcatccagggaccagcaagagcag

SEQ ID NO: 55225 - DNA, 110 bp, synthetic construct
  source 1..110: mol_type = other DNA
cggggcccgagaggtcaagcagcttatccatagtcacacacagacagaaatcaggctcttctgccttctgggcagtgagacgtgaagggaggctgtgctgggacagcgtt

SEQ ID NO: 55226 - DNA, 110 bp, synthetic construct
  source 1..110: mol_type = other DNA
ctcttctgccttctgggcagtgagacgtgaagggaggctgtgctgggacagcgttgatccttcaaggattttggaaggtggggaaaaggaagaggcaccttctagccagg

SEQ ID NO: 55227 - DNA, 110 bp, synthetic construct
  source 1..110: mol_type = other DNA
acattggcagttcatgggcagaatggtggcggcgttggtggtgaaagaccttgctgtcgtgagtatacttggcgcagtattatggtgaagcacggaagctctgtggtccg

SEQ ID NO: 55228 - DNA, 110 bp, synthetic construct
  source 1..110: mol_type = other DNA
gtcgtgagtatacttggcgcagtattatggtgaagcacggaagctctgtggtccggatcttagctcctccatttgctggctgtgcaacatgagcaagttccccaacctct

SEQ ID NO: 55229 - DNA, 110 bp, synthetic construct
  source 1..110: mol_type = other DNA
aaggctcccttgctatgcaagagacacgcgcacaaagacggagctcttcttctactggacattatccggataacatggttggaatcgaggcggctgttataaccatgttg

SEQ ID NO: 55230 - DNA, 110 bp, synthetic construct
  source 1..110: mol_type = other DNA
ccctgaggctgctttggccaatacgatgcagcagaagagacacctggactctcgaatctctattttaggagaaccggcagcttctagctccttccttttggaacatggcc

SEQ ID NO: 55231 - DNA, 110 bp, synthetic construct
  source 1..110: mol_type = other DNA
tatgatgtatgtaagacatggcctcatgctgtaccccttaaacagatacagcgccgtacatcaattatatatcaataaaacttgaggaaaaaataaatacatgagtaaaa

SEQ ID NO: 55232 - DNA, 110 bp, synthetic construct
  source 1..110: mol_type = other DNA
acatggcctcatgctgtaccccttaaacagatacagcgccgtacatcaattatatatcaataaaacttgaggaaaaaataaatacatgagtaaaatcagattcaattaga

SEQ ID NO: 55233 - DNA, 110 bp, synthetic construct
  source 1..110: mol_type = other DNA
gtctcgtgaatgaacacatttaaagcacttagaacagtacctggcacagagaaagtgctatctgattaaatatttgcagtgcgaataatgggacaaggacagtgctggac

SEQ ID NO: 55234 - DNA, 110 bp, synthetic construct
  source 1..110: mol_type = other DNA
tgctatctgattaaatatttgcagtgcgaataatgggacaaggacagtgctggaccaggaacatggaggaggagggatccctacctgagtcttagtgggcaagagaaaac

SEQ ID NO: 55235 - DNA, 110 bp, synthetic construct
  source 1..110: mol_type = other DNA
gaggaggtgtgacgcaatggaatcagaggtcagggtgatgcgattgctggctttgaagatggaagaaggggccacaagccaaggaatgcaggcaccctctagaagctggg

SEQ ID NO: 55236 - DNA, 110 bp, synthetic construct
  source 1..110: mol_type = other DNA
aagatggaagaaggggccacaagccaaggaatgcaggcaccctctagaagctgggaaaggcaagaaaacagattctcccccagagtgttcagaaaggaatacagccctgc

SEQ ID NO: 55237 - DNA, 110 bp, synthetic construct
  source 1..110: mol_type = other DNA
aaaattaaaatggcaagcatagcttttgcattctgccaccttgtaatgaagtctaataaaatagctccactgatatagtttgacacctcgaggaaggtgttccacttggc

SEQ ID NO: 55238 - DNA, 110 bp, synthetic construct
  source 1..110: mol_type = other DNA
ataaaatagctccactgatatagtttgacacctcgaggaaggtgttccacttggctgtcatttttatcacctcgcccccaagatcatggcaagaattaaatccctccctc

SEQ ID NO: 55239 - DNA, 110 bp, synthetic construct
  source 1..110: mol_type = other DNA
cccagtatactcttttgccaacacaatcatccatcaagtttcccaagtcaaaacactggatgttcatctttaatttctccttcagctacacatccagttatttggctcca

SEQ ID NO: 55240 - DNA, 110 bp, synthetic construct
  source 1..110: mol_type = other DNA
ctggatgttcatctttaatttctccttcagctacacatccagttatttggctccatggagtctacctgttaagcacttcttgaactgtcagcgtctattgatctcaggta

SEQ ID NO: 55241 - DNA, 110 bp, synthetic construct
  source 1..110: mol_type = other DNA
ttaggggaactaatttgacttcttgaaatggcagttcctataatctaccagtgggagcatagctccctgatgtcattgcttctgtagaatagaaaagttgctaataattg

SEQ ID NO: 55242 - DNA, 110 bp, synthetic construct
  source 1..110: mol_type = other DNA
agcatagctccctgatgtcattgcttctgtagaatagaaaagttgctaataattggcatggtgatctcccactatacttacagagacatgagactattagtcacctccct

SEQ ID NO: 55243 - DNA, 110 bp, synthetic construct
  source 1..110: mol_type = other DNA
cagcctagtgaatatggtgagaccaaaggcagtagagaatctcgtgtagagtataggaagcaagagggccttgtggaaggaagctgagtttagaaaggtagattgggtca

SEQ ID NO: 55244 - DNA, 110 bp, synthetic construct
  source 1..110: mol_type = other DNA
cgcataatttaaagttgtggtaccacaaaataccaggtaaatatatagcattcgtggcccaaactgtgacagttaagtctgtagctgctagaggccttacctttgttttc

SEQ ID NO: 55245 - DNA, 110 bp, synthetic construct
  source 1..110: mol_type = other DNA
cggggaaccactttttcttaagaacagtgctcctccagtgaatcaggattgctctcttccctagctgctaagcagttttcgctttaatcgcttcttcacactgattttcc

SEQ ID NO: 55246 - DNA, 110 bp, synthetic construct
  source 1..110: mol_type = other DNA
tcagcttaatttggtatttccttttatgtctgtcatagctgaaaaagtgcctcacaaagatatacagatctgactggaagtcgtctgtcatttgctttgcttaccaattc

SEQ ID NO: 55247 - DNA, 110 bp, synthetic construct
  source 1..110: mol_type = other DNA
aaagatatacagatctgactggaagtcgtctgtcatttgctttgcttaccaattcgtggtacacttttttaattcccacccatcaattatgcaagggttattactgaaat

SEQ ID NO: 55248 - DNA, 110 bp, synthetic construct
  source 1..110: mol_type = other DNA
atgtgtccccaggaacttaattgtcatgtaactttttaaatttatataaggatcaggaaataggaaaaaaataaagagacaaggaacagtcagtccactgtccctttact

SEQ ID NO: 55249 - DNA, 110 bp, synthetic construct
  source 1..110: mol_type = other DNA
tagctcatagaaatgtaaattttatccttaaaatagctacctgtgttctttatttaaagagaggaggatgtttatgcatcttgcaactgaatagatattagttccatctc

SEQ ID NO: 55250 - DNA, 110 bp, synthetic construct
  source 1..110: mol_type = other DNA
tggtcctagctgccaaggtctctcgcctgcatgaccgtgacagccgtagacgtggccgtagcaacagcaaaacccatgattgccctgcttctgctcttgtcgccttcagt

SEQ ID NO: 55251 - DNA, 110 bp, synthetic construct
  source 1..110: mol_type = other DNA
ccgtagcaacagcaaaacccatgattgccctgcttctgctcttgtcgccttcagtctgtgctcaccactgctgccaccatcatcttgttaatagtgtatgaatcaggtca

SEQ ID NO: 55252 - DNA, 110 bp, synthetic construct
  source 1..110: mol_type = other DNA
aatcattttccaagttttaggattacccagcacacttaaatctgcaacttttgattggctctgaggaggagtgccactttcattatttttatagccagctcatgcctggt

SEQ ID NO: 55253 - DNA, 110 bp, synthetic construct
  source 1..110: mol_type = other DNA
tggctctgaggaggagtgccactttcattatttttatagccagctcatgcctggtaccatattaatggaaagatttttttaagggtacttagatcactactttgtcaaac

SEQ ID NO: 55254 - DNA, 110 bp, synthetic construct; identical to SEQ ID NO: 55252
  source 1..110: mol_type = other DNA

SEQ ID NO: 55255 - DNA, 110 bp, synthetic construct; identical to SEQ ID NO: 55253
  source 1..110: mol_type = other DNA

SEQ ID NO: 55256 - DNA, 110 bp, synthetic construct
  source 1..110: mol_type = other DNA
aaaagcacttatgatcatttccttcccctctccgtggcattcctttgtcattataataaaatataaactttttaccctaggccacaaatccctgcttgttctgacccctg

SEQ ID NO: 55257 - DNA, 110 bp, synthetic construct
  source 1..110: mol_type = other DNA
tggggttgggcagttgtgtggtgttggacagagtacctcctttcatggaaatttttggtggttgacaaaggactcgatctaagctattctgtgaccaactaaaacttttg

SEQ ID NO: 55258 - DNA, 110 bp, synthetic construct
  source 1..110: mol_type = other DNA
tggtggttgacaaaggactcgatctaagctattctgtgaccaactaaaacttttgacataggagtctaggtaagtggtgagtgctcttaacagctttgaagtgctcaact

SEQ ID NO: 55259 - DNA, 110 bp, synthetic construct
  source 1..110: mol_type = other DNA
acaagaaccttttaaaattcctgtgtccagagaacatacattgaaggacgttcccttgctcattggtcagattttttttttctagtattccctcccactgaggactgtag

SEQ ID NO: 55260 - DNA, 110 bp, synthetic construct
  source 1..110: mol_type = other DNA
ttgctcattggtcagattttttttttctagtattccctcccactgaggactgtagctcatctaggcccaggctttcctctagagcactcacttacaattcctatttctca

SEQ ID NO: 55261 - DNA, 110 bp, synthetic construct
  source 1..110: mol_type = other DNA
aaggttcagactattaagggcattcacaagtttaatgattagaagacagttcaagactgttgtccaacgcagatgagcatcgcgcggctccagggtcctatggtgcagat

SEQ ID NO: 55262 - DNA, 110 bp, synthetic construct
  source 1..110: mol_type = other DNA
actgttgtccaacgcagatgagcatcgcgcggctccagggtcctatggtgcagatttcaaggaaggacgagatcaaggtggggtggggtaactagtctgctttcttcgtg

SEQ ID NO: 55263 - DNA, 110 bp, synthetic construct
  source 1..110: mol_type = other DNA
tgggaacccaggctgggtgtcacccctgtgcccacgtaatcacttgacacgaagtctctctccttctcaggcttctccaggaaggccacccctatgagtgagtggggaat

SEQ ID NO: 55264 - DNA, 110 bp, synthetic construct
  source 1..110: mol_type = other DNA
gagtgcccagcctccgtgccttgagccgggagaaaatcttcgggatcacttatgctccagaacagcactgagagttcaggctgctcctgggacctgaattggcgcctttg

SEQ ID NO: 55265 - DNA, 110 bp, synthetic construct
  source 1..110: mol_type = other DNA
tattcaaagagagatgacagacagtctataacatatagtaatctattcaaatggtgaagaacaggggcaacagtgagagagaatgttttttgaatacctttttatacttt

SEQ ID NO: 55266 - DNA, 110 bp, synthetic construct
  source 1..110: mol_type = other DNA
gacagacagtctataacatatagtaatctattcaaatggtgaagaacaggggcaacagtgagagagaatgttttttgaatacctttttatacttttgatattttagtcat

SEQ ID NO: 55267 - DNA, 110 bp, synthetic construct
  source 1..110: mol_type = other DNA
ggcatatttgatatgaaagttatagaatagaatgtaaaggttgtaaaaccttcgcactttaaaataacagcaactgaaaaacacggatagggaagaaaaagaggtggcaa

SEQ ID NO: 55268 - DNA, 110 bp, synthetic construct; identical to SEQ ID NO: 55267
  source 1..110: mol_type = other DNA

SEQ ID NO: 55269 - DNA, 110 bp, synthetic construct
  source 1..110: mol_type = other DNA
gcaccaatgattgagacgagagtggacacctattctgagtgtctcatgatctgacccactaaagttcacccactgcagttactctggctgatctccattcacctgtgtag

SEQ ID NO: 55270 - DNA, 110 bp, synthetic construct
  source 1..110: mol_type = other DNA
ccactaaagttcacccactgcagttactctggctgatctccattcacctgtgtagcttttaacctgttcctatgatttctgtgcctgctaattttgtcctcaacatggcg

SEQ ID NO: 55271 - DNA, 110 bp, synthetic construct
  source 1..110: mol_type = other DNA
tgaccaaggagagttgttcagaaatggcatgagctgcaagggtaagtcatgagctggctgtcgccagaggtattcaagtaaagtctgtatgtccacttatcaggaatgtg

SEQ ID NO: 55272 - DNA, 110 bp, synthetic construct
  source 1..110: mol_type = other DNA
ggttttggatggtcttttggaatcacaggttgattctgcctcctttcctgattttcaatgttcttttttaaataactgatagtttacaaaatatattgccttcatatttt

SEQ ID NO: 55273 - DNA, 110 bp, synthetic construct
  source 1..110: mol_type = other DNA
ggaaggagggcctgctgggcaccgccgctgagctctgttcctggggacagatgcccaaactcacaccgccaattctcagatgttaaacaccaagccttactgcttctgtt

SEQ ID NO: 55274 - DNA, 110 bp, synthetic construct
  source 1..110: mol_type = other DNA
cagggaagcgagagtcttgaagggagttttgatatataaacagctgtttgataagtgagctgtttggccaagtgaacaacccgttgttcctacagcagggactgtttgcc

SEQ ID NO: 55275 - DNA, 110 bp, synthetic construct
  source 1..110: mol_type = other DNA
tgagctgtttggccaagtgaacaacccgttgttcctacagcagggactgtttgcccagatgagcaaactattcatttaaatgtactggcttttaggaaattcctggaacc

SEQ ID NO: 55276 - DNA, 110 bp, synthetic construct
  source 1..110: mol_type = other DNA
atcctcccgtggtgaaaagcgggtgagcaagctctctgggatcctttttataacggcacaaaccattttatatataggttcttctctcatgatgtaatcaccccaaaggg

SEQ ID NO: 55277 - DNA, 110 bp, synthetic construct
  source 1..110: mol_type = other DNA
ggtggtctagtaggaggagatgaccatgcataaataatataacatttttttcattaagatggattgatatttgaatttggaggtggaaaagactacttccacaagagtct

SEQ ID NO: 55278 - DNA, 110 bp, synthetic construct
  source 1..110: mol_type = other DNA
taagtcccatggttatgttgatgctcttaaatgagaaggatatagtcagagtaataaacaactagatgcatgggcattggcagaaacctaactcagatactcatgggcca

SEQ ID NO: 55279 - DNA, 110 bp, synthetic construct
  source 1..110: mol_type = other DNA
aacctctaatctacttctaatttattatagtagattttcttgggatgtaaaaacctcagaggcagcaaagggacaattcgcaatattgatgcaggtattgagaaaataga

SEQ ID NO: 55280 - DNA, 110 bp, synthetic construct
  source 1..110: mol_type = other DNA
cttgtgttttctcagtggagagtcagagacagagagtgatgttgatagcctgataaaaagtagaaaatgggaagtcttcctttttttgagaatgagagaacacactgttt

SEQ ID NO: 55281 - DNA, 110 bp, synthetic construct
  source 1..110: mol_type = other DNA
agtgaatgcacacagttcaaacctgtattgctcaagagtcagctgtgtttagctcaattcagacccagattctattaaagacgaaaaacagagagaaatctcctcaacta

SEQ ID NO: 55282 - DNA, 110 bp, synthetic construct
  source 1..110: mol_type = other DNA
aattcagacccagattctattaaagacgaaaaacagagagaaatctcctcaactatgtccttaccagaatctagttattcatcgtctctctgacatgttggtggaatcac

SEQ ID NO: 55283 - DNA, 110 bp, synthetic construct
  source 1..110: mol_type = other DNA
tcgcattcatgaggcacttccctttctccttcaagtaaagatacacttgcccagtgtcgttgtacccatcgccagtctattcagattgattcccattcccatggatttcc

SEQ ID NO: 55284 - DNA, 110 bp, synthetic construct
  source 1..110: mol_type = other DNA
ctgaagaaagggggctgctcagagagtagagctcagaagtttgtgtgggcattcgccatgggttcctggagaatggtcaagagacacatgctcagggtgagatgctgagg

SEQ ID NO: 55285 - DNA, 110 bp, synthetic construct
  source 1..110: mol_type = other DNA
cccttgggtagactctattaacaacagaaagagcttggcaaactcatacttggtagtatatccaagaaaaagaggtcatgtcagttcggtttttatgatagcctcaagga

SEQ ID NO: 55286 - DNA, 110 bp, synthetic construct
  source 1..110: mol_type = other DNA
attcattatgttgatttctccttagaagtcttttccctgtttatagtctagacataccagaccaggagggatgttaagacagtagctcttgtctcaacatctaaatattc

SEQ ID NO: 55287 - DNA, 110 bp, synthetic construct
  source 1..110: mol_type = other DNA
gtctagacataccagaccaggagggatgttaagacagtagctcttgtctcaacatctaaatattcatcacgtaactaaaattagaacaattttatacacattttaattaa

SEQ ID NO: 55288 - DNA, 110 bp, synthetic construct
  source 1..110: mol_type = other DNA
agcagtatggcagtatgtatgagctgcaggatggcttgccacttcctttctgccttctgaatatcccaaaaatctttcctgtggctgcaatagctaggagcacacaagaa

SEQ ID NO: 55289 - DNA, 110 bp, synthetic construct
  source 1..110: mol_type = other DNA
tctgaatatcccaaaaatctttcctgtggctgcaatagctaggagcacacaagaaggagaattctgagaaatgtagttcagcctagccaagtggacacattacaaagcct

SEQ ID NO: 55290 - DNA, 110 bp, synthetic construct
  source 1..110: mol_type = other DNA
agaacaacagtgttttaagaaatgtatatgcatttcatcacttagtaatcataccaccctgtagctaaaaatgggattttagctgctaaactggaggcacagagaggaac

SEQ ID NO: 55291 - DNA, 110 bp, synthetic construct
  source 1..110: mol_type = other DNA
gcatgctgttgagacctactgctcagataaagattcctttcaaaatattactggtcattgatgatgcatgtggtcacccaagagctctgatggagacacacaattagatt

SEQ ID NO: 55292 - DNA, 110 bp, synthetic construct
  source 1..110: mol_type = other DNA
cattgatgatgcatgtggtcacccaagagctctgatggagacacacaattagattaatattgttttcatacctggtagcacaacatccattctgcggcccatggatcaaa

SEQ ID NO: 55293 - DNA, 110 bp, synthetic construct
  source 1..110: mol_type = other DNA
atactcacacctttatgaaaccataaagttaaggacaggaataaaagaaagccctgtacattacatcatcttttattacaggtactgtattgtctgtcatacatgtatta

SEQ ID NO: 55294 - DNA, 110 bp, synthetic construct
  source 1..110: mol_type = other DNA
tgaaaccataaagttaaggacaggaataaaagaaagccctgtacattacatcatcttttattacaggtactgtattgtctgtcatacatgtattatttcattttatgtcc

SEQ ID NO: 55295 - DNA, 110 bp, synthetic construct
  source 1..110: mol_type = other DNA
atgagcaacaacacaattaagacggttgtgcaatgacagagtgttgtcttggacgagggtgtttaggcctgtgtggctgccgtctggaaaagaagatgtctggggcctgc

SEQ ID NO: 55296 - DNA, 110 bp, synthetic construct
  source 1..110: mol_type = other DNA
ggaacgctggtgcagtagatgaagctgtgactctgacttcaggtagactgtatttaaatgtttcatatacagatatttggttcctacaactccattctgttaccaagcct

SEQ ID NO: 55297 - DNA, 110 bp, synthetic construct
  source 1..110: mol_type = other DNA
tacacacacactcacacaattattaatactcttacccctccatcccttcatcagtactcagctccagcatgaagccttccatgttgtcttgatcctaattgcatctacct

SEQ ID NO: 55298 - DNA, 110 bp, synthetic construct
  source 1..110: mol_type = other DNA
ttgggatctgggaagccttcttagaggaggtagattttgtggaaaatactcagcactttggagaactgggagtggggtcacagcagcttttgatgaagtcatctctgaat

SEQ ID NO: 55299 - DNA, 110 bp, synthetic construct
  source 1..110: mol_type = other DNA
ctttggagaactgggagtggggtcacagcagcttttgatgaagtcatctctgaatgtcaaggtaattgtacagacaatcactgaaattgtttggagcatgctggtgtcat

SEQ ID NO: 55300 - DNA, 110 bp, synthetic construct
  source 1..110: mol_type = other DNA
ctgctatggttcagattctgttcagggcctgggaacttccccaggctgtaggtatggccaaaaaccaaccaaccaagtgaaagcaaacaataaataaaagcaaagcagct

SEQ ID NO: 55301 - DNA, 110 bp, synthetic construct
  source 1..110: mol_type = other DNA
ggccaaaaaccaaccaaccaagtgaaagcaaacaataaataaaagcaaagcagcttgccctacactcctgatcttcctctcatgctaaggaagacctcccacaatcagtc

SEQ ID NO: 55302 - DNA, 110 bp, synthetic construct
  source 1..110: mol_type = other DNA
ctgcacatcattattcatgtgtaaaggacagagagatgggattgcatgggagagaggacattgtgactgcctctaaatgtcttcttttgcatacctaaaatctgttttga

SEQ ID NO: 55303 - DNA, 110 bp, synthetic construct
  source 1..110: mol_type = other DNA
aaagggggttaggactttcagtagggagaagtggaaaggaattttattgtacagcaagtagattgaatatacttatgtaaaagaaatccatcaatttaaaaaatgcccat

SEQ ID NO: 55304 - DNA, 110 bp, synthetic construct
  source 1..110: mol_type = other DNA
aagtagattgaatatacttatgtaaaagaaatccatcaatttaaaaaatgcccatcacgcctggtcatgaactataaaatcatatgccttcagtattaaacgactttcgt

SEQ ID NO: 55305 - DNA, 110 bp, synthetic construct
  source 1..110: mol_type = other DNA
cttatccattttatcttttgacattttgtgatgatggagcttagggataagcagtcacactgctgacaagcattctctaattgggtagtgtactgtatctctaggcctac

SEQ ID NO: 55306 - DNA, 110 bp, synthetic construct
  source 1..110: mol_type = other DNA
gataggcaagtgacagatacatacttacgagagggcactcagcattagtgggaagcttgggaagggtaagaatgaaatcagacacaagttgagaagatattatctccagg

SEQ ID NO: 55307 - DNA, 110 bp, synthetic construct
  source 1..110: mol_type = other DNA
cttgggaagggtaagaatgaaatcagacacaagttgagaagatattatctccaggtaagatgggatgtaagcctggaagagagactggatgagtatagaaaagaaatcaa

SEQ ID NO: 55308 - DNA, 110 bp, synthetic construct
  source 1..110: mol_type = other DNA
caacacatacctgatttgagggagagttgatccagaactttatggtacctcaaaagacaatgctaatggagtaaaacagctcaattatgtataagcttcttaaaggcaga

SEQ ID NO: 55309 - DNA, 110 bp, synthetic construct
  source 1..110: mol_type = other DNA
ttactgatctggttactttgcaaatgtgctcacaaaagtgcagttgggaataaccatttcagaaaactgtgacataataaaaatgattgataagactatataagccctag

SEQ ID NO: 55310 - DNA, 110 bp, synthetic construct
  source 1..110: mol_type = other DNA
tccttaaaatagtacattattagataatcagacatatttttttctttttatagccacacctgtgtcgtatggaagtttctgggttaggggttgaatgggggctatagctg

SEQ ID NO: 55311 - DNA, 110 bp, synthetic construct
  source 1..110: mol_type = other DNA
aatcagacatatttttttctttttatagccacacctgtgtcgtatggaagtttctgggttaggggttgaatgggggctatagctggagcctatgccacagccatggcaac

SEQ ID NO: 55312 - DNA, 110 bp, synthetic construct
  source 1..110: mol_type = other DNA
gctgcaagctgtgatatgggttgcagatgcagctcggacctggtgttggtgtggctatgtgcaggctgactgctgcaggccgccattctgattcaaacccctagcctggg

SEQ ID NO: 55313 - DNA, 110 bp, synthetic construct
  source 1..110: mol_type = other DNA
tagatggaatcaattgctttggggtattaaatctggtcacagattcattgccaatctttttatcaggatgagaatccctgctggccatgtgatttgcttcagcaaataaa

SEQ ID NO: 55314 - DNA, 110 bp, synthetic construct
  source 1..110: mol_type = other DNA
taagtagatgcaatttttcctcattctttatacttttgatgacaggttggattacaatggagtaatcacagttgaggtatacaaaaataaagtttgacggcccttgaggg

SEQ ID NO: 55315 - DNA, 110 bp, synthetic construct
  source 1..110: mol_type = other DNA
aatggagtaatcacagttgaggtatacaaaaataaagtttgacggcccttgagggcctggtctcaagcacttcctttgcatcactgagaacttgaattttctctgaactg

SEQ ID NO: 55316 - DNA, 110 bp, synthetic construct
  source 1..110: mol_type = other DNA
tataatccattaccctgcatagtactattacaaagtagaagctcaattttctgccaatgaattggcatggcatagaaggtggtgtgtcctgtaaagacctcagttgtgta

SEQ ID NO: 55317 - DNA, 110 bp, synthetic construct
  source 1..110: mol_type = other DNA
gtgctttggaattaggaattttaagcacagatgtggcaaattaaacttttctgcatgagaaatatttacctgtttttacctgttttggttctaattcaatgaagtcaata

SEQ ID NO: 55318 - DNA, 110 bp, synthetic construct
  source 1..110: mol_type = other DNA
cactgatatcatagaatagccacccaaaggaaaagaggaggtaaggaaatcaggcttgtattcatctatctagaaattgcacctggcttggagcttgtagtagaaagatg

SEQ ID NO: 55319 - DNA, 110 bp, synthetic construct
  source 1..110: mol_type = other DNA
ttgtattcatctatctagaaattgcacctggcttggagcttgtagtagaaagatgatgatttacattgtcctgaggaattctccccttttgtcccccttggaggagcaaa

SEQ ID NO: 55320 - DNA, 110 bp, synthetic construct
  source 1..110: mol_type = other DNA
aatatgagagtcttttccttatactttgtcataaaggtggagtatttctcaaattttcccaaatttgagctgtaaatggatgagtcacttctatgttgaaatgtcttatt

SEQ ID NO: 55321 - DNA, 110 bp, synthetic construct
  source 1..110: mol_type = other DNA
ttcccaaatttgagctgtaaatggatgagtcacttctatgttgaaatgtcttattgctggtgttagatcctctatttccttcctctaccctgctaatattgtagttgaga

SEQ ID NO: 55322 - DNA, 110 bp, synthetic construct
  source 1..110: mol_type = other DNA
tctattgtggctatcttgtcccaattaaggggagcagctggggaggaaaaaaattgagaaacatttatgaaattcacatgccagaggcattggctcactgaaagattaag

SEQ ID NO: 55323 - DNA, 110 bp, synthetic construct
  source 1..110: mol_type = other DNA
ttaataaaagcctgtttactcttctttgcatgatatgcccctactaccacagcatgtactttttgtacctctcttatttctacgcagagctggccttttcaaatgggact

SEQ ID NO: 55324 - DNA, 110 bp, synthetic construct
  source 1..110: mol_type = other DNA
gtactttttgtacctctcttatttctacgcagagctggccttttcaaatgggacttttactagtaaacctattcattgtgaatgttttgtgaaagtcattaatagttatc

SEQ ID NO: 55325 - DNA, 110 bp, synthetic construct
  source 1..110: mol_type = other DNA
aatctggttattaggtacttaacttcttccacctggtagggatttcagaatttactagacagctcataggatatgtggcagagtcttatcttcagcccttgaagaggagg

SEQ ID NO: 55326 - DNA, 110 bp, synthetic construct
  source 1..110: mol_type = other DNA
tagacagctcataggatatgtggcagagtcttatcttcagcccttgaagaggaggtaaaggtccttgactttgcttaatgaccaaactattattgtttggtcttatttga

SEQ ID NO: 55327 - DNA, 110 bp, synthetic construct
  source 1..110: mol_type = other DNA
taatgacagcattatgcccattagattgtaccactataaaggcactcttatgactgtatttaaatcagtgtcacaggtcaagggttgcactagggtgaagttatgaatgc

SEQ ID NO: 55328 - DNA, 110 bp, synthetic construct
  source 1..110: mol_type = other DNA
ggttgctaggtctgtggaggctgatctcagaaggtgctactgtgagctttagtaatcaacactcgaggtatttaaacaaaggtgtgcccacctaaaagaaaggaaccaac

SEQ ID NO: 55329 - DNA, 110 bp, synthetic construct
  source 1..110: mol_type = other DNA
tcaacactcgaggtatttaaacaaaggtgtgcccacctaaaagaaaggaaccaacagcatagattgtgctctgagtgcagggtggcacctgattctatactcccctgact

SEQ ID NO: 55330 - DNA, 110 bp, synthetic construct
  source 1..110: mol_type = other DNA
ggccttgcgtctccttcatgtagatctctccacatgggtgcttgtgctttgtcacaatatgacagccagctccaataaggagagttctaagagtgagtattccaagaagc

SEQ ID NO: 55331 - DNA, 110 bp, synthetic construct
  source 1..110: mol_type = other DNA
aatacttttggacattttgtccaactagaattataatagtgcagattctctaatctgttcagctgcttcccatcatgatgcaaataaccagtttatgggattgttacttt

SEQ ID NO: 55332 - DNA, 110 bp, synthetic construct
  source 1..110: mol_type = other DNA
tgttcagctgcttcccatcatgatgcaaataaccagtttatgggattgttactttttagagactcgtgtattttcacgtcttacaataaatatatgatacacatttatat

SEQ ID NO: 55333 - DNA, 110 bp, synthetic construct
  source 1..110: mol_type = other DNA
ggcccaggaacttcacatgccatgggcatggccaaaaaaaataaataaatctttataatgtatgtcagagtctcttgcactttctaaattccagttatggacacatacac

SEQ ID NO: 55334 - DNA, 110 bp, synthetic construct
  source 1..110: mol_type = other DNA
gacaccaactctaaagacaccttgatctcagatttttagcctctagaactgtgagaaaatctatttctgttgtgtaatccacacagtctgagatactttgttatgatact

SEQ ID NO: 55335 - DNA, 110 bp, synthetic construct
  source 1..110: mol_type = other DNA
gtagaacaatcacagatgatcagtgccctcaaaagaaaaaacatttctttctcatgcacaacctgggtatgcaatttcagatcagcttcagcagacctactacatgagtc

SEQ ID NO: 55336 - DNA, 110 bp, synthetic construct; identical to SEQ ID NO: 55335
  source 1..110: mol_type = other DNA

SEQ ID NO: 55337 - DNA, 110 bp, synthetic construct
  source 1..110: mol_type = other DNA
agacccccaattcttttctgtcccctgatctccacacacttatattaatgttcatattggggtcctcctttatgtagtgtcacagcatatgggacttcctccattacagc

SEQ ID NO: 55338 - DNA, 110 bp, synthetic construct
  source 1..110: mol_type = other DNA
tagaattgtgttatataatttacatatatttgcgactagaatccatgaggatgcggttcaatcactagccttgctcagtgtgtcgggggtctggcattgtggtgagctgc

SEQ ID NO: 55339 - DNA, 110 bp, synthetic construct
  source 1..110: mol_type = other DNA
acaaaaacaagcaaaaaaggcagaaaggcctctactcattgttcataacctcctttcccgcatcaggtgtcataaaaccaggaagagatgcacaggagtcaaacttagtc

SEQ ID NO: 55340 - DNA, 110 bp, synthetic construct
  source 1..110: mol_type = other DNA
gcatgatccttgtcatttgagaagcctttaatctgtgattttatcaaggacaacgtcagtttaaagagaaggagctgacattgttcaactgggatggaaaaaaatgacta

SEQ ID NO: 55341 - DNA, 110 bp, synthetic construct
  source 1..110: mol_type = other DNA
ctgtagctttagaagatgagctgggctgcggtctttgtggaatacatggtcaacgagaaattatatccttgaggttggttttgagggtaaaatgaacataggatcatgaa

SEQ ID NO: 55342 - DNA, 110 bp, synthetic construct
  source 1..110: mol_type = other DNA
tccgaataggtatgtttcaatcgaggttcttgaagctggtcaatataaaatgcggtgagcgtatcctgttaaattaaaagtttaaaaacatttcaaggatccaaaacttg

SEQ ID NO: 55343 - DNA, 110 bp, synthetic construct
  source 1..110: mol_type = other DNA
cattcttaacatatggggctctaaaataatgctgcatgctgtcagatacacccgttataactgtctccaggagcaaaaggtaagagctttaactacacacatatcatggc

SEQ ID NO: 55344 - DNA, 110 bp, synthetic construct
  source 1..110: mol_type = other DNA
gcatgcttataactgaatactgagactttataactatgaagtcactgaagttcaaatttcctgaatgttagtatcttatgctaaaaactattaacgtaaataatcccctc

SEQ ID NO: 55345 - DNA, 110 bp, synthetic construct
  source 1..110: mol_type = other DNA
agaaatttggaatgcagcgtctatattagactctcattgactaaataggccctgttgccaattctactctactgcagctatgtgagcctagggctttctgcatttctgta

SEQ ID NO: 55346 - DNA, 110 bp, synthetic construct
  source 1..110: mol_type = other DNA
attcttctgtgtaaaattgttaaagcctgttcatttgttaatatttcttttctcaagggactatgtgaaatccagctgtgctaaagaaatagaagttaatgaagggatgg

SEQ ID NO: 55347 - DNA, 110 bp, synthetic construct
  source 1..110: mol_type = other DNA
agggactatgtgaaatccagctgtgctaaagaaatagaagttaatgaagggatggaaatggaatggatttaattttgtagccaggtattttgaaataggtcagactgatg

SEQ ID NO: 55348 - DNA, 110 bp, synthetic construct
  source 1..110: mol_type = other DNA
cttctgatttcatgactaactgggagctacagctcaccagggctgcccagcgttaccagagagtatcataccacatattgctggcccaggaaaagatcaatttccaaaat

SEQ ID NO: 55349 - DNA, 110 bp, synthetic construct
  source 1..110: mol_type = other DNA
gactgggtcaacttcgagaacaacagaattgttccattaatcacagcttcaaactcactatgtcatatattcacaggctttattatctttttcacaggttaacaagatca

SEQ ID NO: 55350 - DNA, 110 bp, synthetic construct
  source 1..110: mol_type = other DNA
cttgacagtcatcttctccttacctcattcttaaaaggagtctgcacatcttgtggccaagtattgtcctatgatattattaggaacaatgaaatgtacatggaattgcc

SEQ ID NO: 55351 - DNA, 110 bp, synthetic construct
  source 1..110: mol_type = other DNA
tcttaacccactgagccacaataggaactccagaatagtgtctttgtgatataaatagaataggaatattattctgagggaaaatagcttgcaattattaaatagcataa

SEQ ID NO: 55352 - DNA, 110 bp, synthetic construct
  source 1..110: mol_type = other DNA
gttctatgttatctgtcaaaaaggaatagagctattcttacctcttagtgttactgcattaaatgagatctcgcacatggagcccttagcacagtgtctggaaattagta

SEQ ID NO: 55353 - DNA, 110 bp, synthetic construct
  source 1..110: mol_type = other DNA
taaaacaaaggttctggccacacttccaggaatgacatcagctcccataaaatttcctgtgccataatcataggctccaccatagaatcaacaaacaaacaaaaacttgg

SEQ ID NO: 55354 - DNA, 110 bp, synthetic construct
  source 1..110: mol_type = other DNA
gaatcccttcactgcagaggggagcttttactctacatctgggtttaaatgagcccaggtaaatagcatgcatgctctggttcattccaaagccagagacaggaggagac

SEQ ID NO: 55355 - DNA, 110 bp, synthetic construct
  source 1..110: mol_type = other DNA
agtgccatcaattgaatagatgaattactgctatcctatgccatgcataccaacgtgtcaggccacaaagacacctcgagatgaagacaacaactacctgtagagacctc

SEQ ID NO: 55356 - DNA, 110 bp, synthetic construct
  source 1..110: mol_type = other DNA
gtatgtttatcccatctgagaacagctttacccagcttcttgtgttttttccctagggtaacttaattcatctattgataaatagaatgaatggcaacagctaccattac

SEQ ID NO: 55357 - DNA, 110 bp, synthetic construct
  source 1..110: mol_type = other DNA
attgaaatgatcatgagctttttgttcattatttgattaatatgtacaccatattaatggccttctatattcccacggatgtgggggagctctttaaaatacccatggat

SEQ ID NO: 55358 - DNA, 110 bp, synthetic construct
  source 1..110: mol_type = other DNA
aatggccttctatattcccacggatgtgggggagctctttaaaatacccatggatatttcatactctagttttttactttaaaattttttggccagcctctttgcaccaa

SEQ ID NO: 55359 - DNA, 110 bp, synthetic construct
  source 1..110: mol_type = other DNA
gaataaaatgattaccactctacacaactccaaagctataaaatagccggaatagctttgatgacacccccatcattccaatgtccttcaggccctaaggattccactac

SEQ ID NO: 55360 - DNA, 110 bp, synthetic construct; identical to SEQ ID NO: 55359
  source 1..110: mol_type = other DNA

SEQ ID NO: 55361 - DNA, 110 bp, synthetic construct
  source 1..110: mol_type = other DNA
cagatcagcttatctgaagcagaagttgctggatcctcaaatggcaactttaatgaatttctaaaagctgaaatggactagcttgagagttaaatacccctggttgccca

SEQ ID NO: 55362 - DNA, 110 bp, synthetic construct
  source 1..110: mol_type = other DNA
aatttctaaaagctgaaatggactagcttgagagttaaatacccctggttgcccagcctacggaggtgccctacacttagaggttttacttccaagaatcccaccaagtt

SEQ ID NO: 55363 - DNA, 110 bp, synthetic construct; identical to SEQ ID NO: 55361
  source 1..110: mol_type = other DNA

SEQ ID NO: 55364 - DNA, 110 bp, synthetic construct; identical to SEQ ID NO: 55362
  source 1..110: mol_type = other DNA

SEQ ID NO: 55365 - DNA, 110 bp, synthetic construct
  source 1..110: mol_type = other DNA
aataatatcccatttgactaattcaaaattgactgagttgaccttaattacatatgcacagtctcttcagcttaccatagaacataatctaatcaacagtggaacatccc

SEQ ID NO: 55366 - DNA, 110 bp, synthetic construct
  source 1..110: mol_type = other DNA
gacttagtatctctgtatctctggcattaagattggcaataaaatgataactcactcttacaccagactctcagacctcagtaagcatatgtacttaaaaggtttcttta

SEQ ID NO: 55367 - DNA, 110 bp, synthetic construct
  source 1..110: mol_type = other DNA
ttccttagaattcaaggtacatatctgagagcttgaagttggagccgtatggccattcttgtgcctgactgctataaatagtttgcacagttggcaggatttagtacaag

SEQ ID NO: 55368 - DNA, 110 bp, synthetic construct
  source 1..110: mol_type = other DNA
aagttgaagatgataaaaataaagtgtgataaaatggccaagctgcccaaactgcccttgaacagccatgcttgtaaaactgtgtcactctgttttctggtcatcattaa

SEQ ID NO: 55369 - DNA, 110 bp, synthetic construct
  source 1..110: mol_type = other DNA
attttcatggaactgaatgacctataaatcactttacagatagattttaccttaaatattccctcaaacacttgattttccattttagctctgctaggaaactcagactt

SEQ ID NO: 55370 - DNA, 110 bp, synthetic construct
  source 1..110: mol_type = other DNA
atattccctcaaacacttgattttccattttagctctgctaggaaactcagacttaaccacaatcattgtactctcctccaatccatctctcccctggtatatggaacac

SEQ ID NO: 55371 - DNA, 110 bp, synthetic construct
  source 1..110: mol_type = other DNA
accttggacacatcattgactcctcccactccttcattccacacatcaaatcatgtatcaagtcaaaataagttttccataattctgtctatatttgttatatttcaatt

SEQ ID NO: 55372 - DNA, 110 bp, synthetic construct
  source 1..110: mol_type = other DNA
ccagaaacagaagcaaatcaggaaatttggttggccagagcttaggtggttgctttacttgggaaagcctagttggctatttgtggttggttcttagatttcaatttctt

SEQ ID NO: 55373 - DNA, 110 bp, synthetic construct
  source 1..110: mol_type = other DNA
aacatggtaaaagtgttaaagctgaggacttagcaaaaagagcaaataatatgttgagaaatgaagagagacacagtcttgtcagaacattttagtcattcaagtatttt

SEQ ID NO: 55374 - DNA, 110 bp, synthetic construct; identical to SEQ ID NO: 55373
  source 1..110: mol_type = other DNA

SEQ ID NO: 55375 - DNA, 110 bp, synthetic construct
  source 1..110: mol_type = other DNA
ctggagggaagggtggaatctaccattacagccttgttcctttggcagcaggataccatctataccagctcagaaatcatagtgctaacagccactgcctggcaaaggga

SEQ ID NO: 55376 - DNA, 110 bp, synthetic construct
  source 1..110: mol_type = other DNA
aggatttcccttgagagtcatttccagaaaagctttaaactatttttcaattcacctagtacataagaaatgaattcagggagttcccgttgcccagcagttgatgtact

SEQ ID NO: 55377 - DNA, 110 bp, synthetic construct
  source 1..110: mol_type = other DNA
acttcagataagattactctgagaccatgataaaattagacaaaacaaagctatttcttaattttttctaagcacacacaaaagttgactgggaattcctgttgtggctc

SEQ ID NO: 55378 - DNA, 110 bp, synthetic construct
  source 1..110: mol_type = other DNA
cagatattttcattagatattatgttagactgtggctcaattgccagtagatatgtattagctttctcctcacattacagatgtggaaacaaaagaaactaaggtacaaa

SEQ ID NO: 55379 - DNA, 110 bp, synthetic construct
  source 1..110: mol_type = other DNA
tattagctttctcctcacattacagatgtggaaacaaaagaaactaaggtacaaattaccttattcaagcttccacagtgagaaaaacatcaaagtagtacttagatttg

SEQ ID NO: 55380 - DNA, 110 bp, synthetic construct
  source 1..110: mol_type = other DNA
gcaagtgagtgggtattcaaatctagatgtgagttaaaacaactgctgcatttatagtttctcatcatattgggatgactaagaaaagattagatggcattttcctgcat

SEQ ID NO: 55381 - DNA, 110 bp, synthetic construct
  source 1..110: mol_type = other DNA
atgtgtattttgctactcttgagtggagaggtctataaaggtcacacatgggtatttgttgataacgttgtttagattactatatcctaactgattttctatttgcaata

SEQ ID NO: 55382 - DNA, 110 bp, synthetic construct
  source 1..110: mol_type = other DNA
atgtgcatttacataactatgtacatttaaaatgttaaaaagctgacttccaccccattccatttgtcagatcctgccttccctaagcctttcaaagttgaagtctgtga

SEQ ID NO: 55383 - DNA, 110 bp, synthetic construct
  source 1..110: mol_type = other DNA
cacgatgggaacgcctcaatatttttttaataagtgaaattaatgcgtacctacaacatgttaggtcttatttaacttactgagcttaagcaaatcatcattagaaacat

SEQ ID NO: 55384 - DNA, 110 bp, synthetic construct
  source 1..110: mol_type = other DNA
aatatcctcctagctgatttctttatttctactcaagatccggtctccactcatcattaatactgatataacttcccttcacactgaaaaaaatccaaaatatttaccct

SEQ ID NO: 55385 - DNA, 110 bp, synthetic construct
  source 1..110: mol_type = other DNA
gtggaatagctgctcagcactgccagccccctgcaggagcctccacagcccagaaaagctagaacaatcttggccgggccataaaaggatctacctaattttcggacagt

SEQ ID NO: 55386 - DNA, 110 bp, synthetic construct
  source 1..110: mol_type = other DNA
aagctagaacaatcttggccgggccataaaaggatctacctaattttcggacagtcctgagtcaggctgctctgggagaggctcttgggttcgaagcagaccagctagct

SEQ ID NO: 55387 - DNA, 110 bp, synthetic construct
  source 1..110: mol_type = other DNA
gatgcatacctattccttgggtggtctatctcaatcccaggtccgtggctgttccctatagctgtatttcccaggtgctttaaagtccctggtattacctcttgctaatg

SEQ ID NO: 55388 - DNA, 110 bp, synthetic construct
  source 1..110: mol_type = other DNA
tatgctagttgaggaaatcagagtattgcctgcttgtgctaagtggggaagaatagcagctcaattcctggcccaccaataccatcttggaaagaaaattgcatcaccgc

SEQ ID NO: 55389 - DNA, 110 bp, synthetic construct
  source 1..110: mol_type = other DNA
tttatgtttccattgaataatgctggttggcaaacacaaatgccacccctatcaccaagtgagcttagaatgaacttagtacgatgatgctgttgtcaaatccgcttacc

SEQ ID NO: 55390 - DNA, 110 bp, synthetic construct
  source 1..110: mol_type = other DNA
tgaagagttggatcaatcttgttgatttgctcaattgcataaatagtagtgattaatcttattttaaaaaatgtgttgggctggtagaaaagaggggcatatagcttata

SEQ ID NO: 55391 - DNA, 110 bp, synthetic construct
  source 1..110: mol_type = other DNA
agtctacttcctgagactattccttgcaaccactgtgtggggttaagttcctcagagcttgagacagaagttcttgaaggaagtgatttgttgaggacattctcttataa

SEQ ID NO: 55392 - DNA, 110 bp, synthetic construct
  source 1..110: mol_type = other DNA
agcttgagacagaagttcttgaaggaagtgatttgttgaggacattctcttataaaaaggagattaagcagagcggaacaagaacagaaagctaaggaagtaagtgatct

SEQ ID NO: 55393 - DNA, 110 bp, synthetic construct
  source 1..110: mol_type = other DNA
cggcagcaagatgatcaaagtcctgtgggtagtggcacaatgggcctgaggcagcagtccattctgagttggacagctgcctattgcaagctaaagaataagactcagtt

SEQ ID NO: 55394 - DNA, 110 bp, synthetic construct
  source 1..110: mol_type = other DNA
gtaatgctgtatttaacttttttgaggaactgttaaactgtttcaacagtgtcaaagctatattttcctgatacattccctccagcaataagcaaaggttccattcaatt

SEQ ID NO: 55395 - DNA, 110 bp, synthetic construct
  source 1..110: mol_type = other DNA
acattcagcaaaaagcaatgaatatatccttttcttattgtcttaaaatccacatactgaaattgaattttaaaaaaggcattgcatagcacagggaactgtactcggta

SEQ ID NO: 55396 - DNA, 110 bp, synthetic construct
  source 1..110: mol_type = other DNA
gcacacttcgtaacaattcctggttgccccacaatatttgagaagtgagcttctgaggtttaaatcactgaggtgtgttttttactgcaccttcaccatttccactgata

SEQ ID NO: 55397 - DNA, 110 bp, synthetic construct
  source 1..110: mol_type = other DNA
aataagcattatccacattcatccacctttacagcctgcaaaactagaaattaaatatcatgcacaaaggatatttgcaaaagaaatagtagggatactttctggttgtc

SEQ ID NO: 55398 - DNA, 110 bp, synthetic construct
  source 1..110: mol_type = other DNA
atgcacttcaagaggagaaaggcaaaagacaaggatacgcctatttatttaagtacacatatgaaggggagattttcccatcgatttctgagctctgcaacttctaaact

SEQ ID NO: 55399 - DNA, 110 bp, synthetic construct
  source 1..110: mol_type = other DNA
cacatatgaaggggagattttcccatcgatttctgagctctgcaacttctaaactcttttgaaaatgaagaatgaattgatttctcttcattcgacaaaaacatattgaa

SEQ ID NO: 55400 - DNA, 110 bp, synthetic construct
  source 1..110: mol_type = other DNA
atctcttcaggtactgactatccttcttcgaaacactactcaggttgtaaacattctgaagtatttctaatttaccatttcttccttgtgattccttagcttggaaatcc

SEQ ID NO: 55401 - DNA, 110 bp, synthetic construct
  source 1..110: mol_type = other DNA
ctgaagtatttctaatttaccatttcttccttgtgattccttagcttggaaatcccaatcttaatttctgaaacaatgcttcctatcctattatcctcatcaatctactt

SEQ ID NO: 55402 - DNA, 110 bp, synthetic construct
  source 1..110: mol_type = other DNA
acctcactgacaactccttttctttctcttttgttaggtcttccctctctcctgcttagagctttggatgcattttgggttttctcctattattgtatctatgccctcca

SEQ ID NO: 55403 - DNA, 110 bp, synthetic construct
  source 1..110: mol_type = other DNA
ggccagggatttaacccatgtcctcgtgaatattagtcgggttcattacggctaagctacaacaggaactctgcctagcatataaattatcattataattactctttgaa

SEQ ID NO: 55404 - DNA, 110 bp, synthetic construct
  source 1..110: mol_type = other DNA
attttcaaaggctcaggatttttggaaaggaaggtgcaccttatatcactctgattatttatcatgttcaaatattgatcccttttaaaaatgaaaaacagaactagggt

SEQ ID NO: 55405 - DNA, 110 bp, synthetic construct
  source 1..110: mol_type = other DNA
ggatttttggaaaggaaggtgcaccttatatcactctgattatttatcatgttcaaatattgatcccttttaaaaatgaaaaacagaactagggtgtttctcaaattgtt

SEQ ID NO: 55406 - DNA, 110 bp, synthetic construct
  source 1..110: mol_type = other DNA
caaaaaatataatgtccatcttccatgtgtttctttttaagagaaaaaacattttttcttggttatcctacagcagaactcttctcattggcccaaactgaatcaaatta

SEQ ID NO: 55407 - DNA, 110 bp, synthetic construct
  source 1..110: mol_type = other DNA
ttcttggttatcctacagcagaactcttctcattggcccaaactgaatcaaattatgattcaaaagaataatcattgttaacaaaaatgatcatcattggtttaagctat

SEQ ID NO: 55408 - DNA, 110 bp, synthetic construct
  source 1..110: mol_type = other DNA
ggctatgttgggagttgagaagcttgactaccttaaattctcctacaagtggatcttatagagcttgtgtggagttctagcaggggagcatagctactggtataccttaa

SEQ ID NO: 55409 - DNA, 110 bp, synthetic construct
  source 1..110: mol_type = other DNA
atgtatgctttcaacagggttatagatttggaatgaatgaaggaactaaactggtttctacaagcttcctcacctagattctggaggacacatttgcaacacagaagtca

SEQ ID NO: 55410 - DNA, 110 bp, synthetic construct
  source 1..110: mol_type = other DNA
ttctacaagcttcctcacctagattctggaggacacatttgcaacacagaagtcataataatgggattatagaacactacacacttgaaaattcaacagtaagagagaaa

SEQ ID NO: 55411 - DNA, 110 bp, synthetic construct
  source 1..110: mol_type = other DNA
cattctgatttttaggtgtagaatcattaatcaatatgtttttaaaggaagaagtagtttgtggaccaccaaaaactacaaccatatactactttctatgtgtgtgtggg

SEQ ID NO: 55412 - DNA, 110 bp, synthetic construct; identical to SEQ ID NO: 55411
  source 1..110: mol_type = other DNA

SEQ ID NO: 55413 - DNA, 110 bp, synthetic construct
  source 1..110: mol_type = other DNA
atggacatttaaatcagtaaactgagtaaagcagattagcttccataatatggttaggcctcatccaatcagttgaagaagaagagcaacctccccctgaggaggagggg

SEQ ID NO: 55414 - DNA, 110 bp, synthetic construct
  source 1..110: mol_type = other DNA
tatggccagtttgtcagattgatggtgccttgggaattcccttaagagagaactaactggagttcctgagttggagttttgttgtttacatgacatttcttaccaaaatg

SEQ ID NO: 55415 - DNA, 110 bp, synthetic construct
  source 1..110: mol_type = other DNA
ttgtttatcaaacttataataacgctcttcaaatttcagagtgaatatggcaaggccagcatctctaagtttaggaagatagcaaaattgtttgagagtcacaattcttg

SEQ ID NO: 55416 - DNA, 110 bp, synthetic construct
  source 1..110: mol_type = other DNA
ccagcatctctaagtttaggaagatagcaaaattgtttgagagtcacaattcttggatatgttttgaaagactatcaatataaatgctgtacattagttctgaatctgtt

SEQ ID NO: 55417 - DNA, 110 bp, synthetic construct
  source 1..110: mol_type = other DNA
aggtaaatagtccagagctggagtttgctctgcagtgtcagggacttgcattcttttgatgtcattgcacctttatgtgtagacttcaacacaagtggttcaaaatggct

SEQ ID NO: 55418 - DNA, 110 bp, synthetic construct
  source 1..110: mol_type = other DNA
ttgatgtcattgcacctttatgtgtagacttcaacacaagtggttcaaaatggcttttccagtttcagttactaagatccctagtgttgttgacaagaagacaaaacaga

SEQ ID NO: 55419 - DNA, 110 bp, synthetic construct
  source 1..110: mol_type = other DNA
tgagtttaggatgaagtctagtgcagtttacccaggaaatctaaaataggtcaatgcctctgagaatatttcttgggtttgggaggatgataatttcaatttctgctcag

SEQ ID NO: 55420 - DNA, 110 bp, synthetic construct
  source 1..110: mol_type = other DNA
aagataaaagtacacattcttttttcccagtaaaacaagagctgcagaatcagtccaatgtgtttattgagagtgaagctgccgaaaacaaagatgaagcgttaggcaaa

SEQ ID NO: 55421 - DNA, 110 bp, synthetic construct
  source 1..110: mol_type = other DNA
caatgtgtttattgagagtgaagctgccgaaaacaaagatgaagcgttaggcaaagatagcgattttaaaaaacaaaagagagattcccaaagagaaaacaatggtgata

SEQ ID NO: 55422 - DNA, 110 bp, synthetic construct
  source 1..110: mol_type = other DNA
ggtaaacaatgatatgtagtcagaatagaactcatgaatatgtattagaagagttcagtgtgtattttctggaagacactgccctgttcacaataatggttcctcttata

SEQ ID NO: 55423 - DNA, 110 bp, synthetic construct
  source 1..110: mol_type = other DNA
cagtgtgtattttctggaagacactgccctgttcacaataatggttcctcttatatctcggattttggaactggtctcccaggaccaattgattggttcaccttgaacat

SEQ ID NO: 55424 - DNA, 110 bp, synthetic construct
  source 1..110: mol_type = other DNA
caggtaacagtcttcatccacagtgattaagacaaaagagctattgtaagagtgaccacagacttttttgacataacgataaaaatatgaaaatgatggtttatctagat

SEQ ID NO: 55425 - DNA, 110 bp, synthetic construct
  source 1..110: mol_type = other DNA
tggcaaaagacaaaaaaaaaaaagaaaaaaaaaaagataggaaggctggagaagaagcacattgtgatgggggatatcatgaatttcttagacccctttgtcagtttcag

SEQ ID NO: 55426 - DNA, 110 bp, synthetic construct
  source 1..110: mol_type = other DNA
agcacattgtgatgggggatatcatgaatttcttagacccctttgtcagtttcagacccacacctagaattccaaatcccatgacttcaacaatgtggtggagtttcatg

SEQ ID NO: 55427 - DNA, 110 bp, synthetic construct
  source 1..110: mol_type = other DNA
tttcactgaagattttttcttttaaccttcagctgatacctgcaataaaacaaatgcaaaagaaccaacaaacgcccaggtggaaaacaacaaatttagagacatgaact

SEQ ID NO: 55428 - DNA, 110 bp, synthetic construct
  source 1..110: mol_type = other DNA
gaaatgtattttatggaagtagaagcactgatggaagatatattcatgaaagatgtgggaatggcacaatacaaaaacaagtatttgaggttttttgctgagctcacaca

SEQ ID NO: 55429 - DNA, 110 bp, synthetic construct
  source 1..110: mol_type = other DNA
ttatgagacctccatcagtcaaccagacagcttgcttcatatgaaattcatgaagaatgtttagaatttatattattcatcaatggttattggccatttttctgggaatt

SEQ ID NO: 55430 - DNA, 110 bp, synthetic construct
  source 1..110: mol_type = other DNA
ctttctagtcttagccacgtagctctagggcttaggaattcacatagctatggaaggatataccacatggttctagtttcaattaaaacagacttttaaatgtattcatt

SEQ ID NO: 55431 - DNA, 110 bp, synthetic construct
  source 1..110: mol_type = other DNA
cacgtagctctagggcttaggaattcacatagctatggaaggatataccacatggttctagtttcaattaaaacagacttttaaatgtattcattcatgaataaaaaata

SEQ ID NO: 55432 - DNA, 110 bp, synthetic construct
  source 1..110: mol_type = other DNA
aaagaaaaattctgagaagtagcctaggtttaaaacctaagtcgtcaacaaatctgacatgaagatcagatcttcaattactcattaaacctattttcatatgagaggtt

SEQ ID NO: 55433 - DNA, 110 bp, synthetic construct
  source 1..110: mol_type = other DNA
gccacaccgagttctcctagctgtactctcgatcacaactgttttattaattatgtcatggagttctcactgtggtgcagaggcataggttagatccctggcccagcaca

SEQ ID NO: 55434 - DNA, 110 bp, synthetic construct
  source 1..110: mol_type = other DNA
agagtagtaagcactcacactaggacatgcaagacatttttaaaaggtcattgtaagtacattagctattatgatgcctgaggacttctgcgcagaggaataaagtgtag

SEQ ID NO: 55435 - DNA, 110 bp, synthetic construct
  source 1..110: mol_type = other DNA
cagctataacaaccttacatatcccccctcttgcacaatgtgccttgagtggtatgtaagggcctttattaacatggacgtggctcattaggtggctatctagtgcatca

SEQ ID NO: 55436 - DNA, 110 bp, synthetic construct
  source 1..110: mol_type = other DNA
taagggctttttattatccctatgagcttacagaaaaaagctgagcacagtgaagttaagggggtgcccaagaagaagtagaagggccttccatagccactagcttgtgc

SEQ ID NO: 55437 - DNA, 110 bp, synthetic construct
  source 1..110: mol_type = other DNA
tccaggtcaaaggctaggaacacaattaagattttggcaaaattgatagagtatatttatttaaacacatattcctatattcactagcaattttcagttttgatgtggtc

SEQ ID NO: 55438 - DNA, 110 bp, synthetic construct; identical to SEQ ID NO: 55437
  source 1..110: mol_type = other DNA

SEQ ID NO: 55439 - DNA, 110 bp, synthetic construct
  source 1..110: mol_type = other DNA
tgcttttcaacacaatgtgggctttggattttcctcccccacctgtgtgagaattaacctagcccagtgactaagagcttgccctagagctagactgtctgggcttgatg

SEQ ID NO: 55440 - DNA, 110 bp, synthetic construct
  source 1..110: mol_type = other DNA
tccttctgcaatagcattctcctctagtacccttcgcctctcttcagattctatagctgctttaatttttgccataaacatgtaccctatgtattttctttttcttcctt

SEQ ID NO: 55441 - DNA, 110 bp, synthetic construct
  source 1..110: mol_type = other DNA
accttaccttgatttcaaagtggattattctccttagtatcatataggtactgcaaggttgttttaagagcttaaaataggatgtggcacatggtaaattccatatattg

SEQ ID NO: 55442 - DNA, 110 bp, synthetic construct
  source 1..110: mol_type = other DNA
aggttgttttaagagcttaaaataggatgtggcacatggtaaattccatatattgtcatcatagtattactgttactaccagaatattattgatttggagaaaacaggga

SEQ ID NO: 55443 - DNA, 110 bp, synthetic construct
  source 1..110: mol_type = other DNA
aaattcctaaatgaaataatgactagggaaaaacagctatactaaagagaactgcaaaaaataccggtccactttgaagaaggctacttcaaggcagaggtcatggaaga

SEQ ID NO: 55444 - DNA, 110 bp, synthetic construct
  source 1..110: mol_type = other DNA
agaaaaattaaatttaacttggtgccttacgaatggtttaatttcatgcatgacccaaataactggataattttcaagtggcttgtcaatgctgaacttctaataaaaag

SEQ ID NO: 55445 - DNA, 110 bp, synthetic construct
  source 1..110: mol_type = other DNA
ggaggatgaccagcccatataagcttcccaataaatgccaaattatttgtttacaaacatagtacatgagatatatgcagtacatgtttagagaatgtacaaagagttgg

SEQ ID NO: 55446 - DNA, 110 bp, synthetic construct
  source 1..110: mol_type = other DNA
caactgctgctgaagtctggactctacttgctgctctcaaaatgttggaaacatttcctatcagccagcagctttttttttttttttctttttagggcggcaccggcggc

SEQ ID NO: 55447 - DNA, 110 bp, synthetic construct
  source 1..110: mol_type = other DNA
tgagaggagtactagccataccttaaagactattttgagaactctgtcttttactgtaagtgaaatgaagagctatgaagggtttttaaacagaggtgtcacatgatctg

SEQ ID NO: 55448 - DNA, 110 bp, synthetic construct
  source 1..110: mol_type = other DNA
agattaaagtccgtctacactgatagcagggatgtgagttagaactctggttcctgtagtactccagaaaataaaaaggtagggtatgattaaaacagagtcaggctgga

SEQ ID NO: 55449 - DNA, 110 bp, synthetic construct
  source 1..110: mol_type = other DNA
gcctgggaacctccatatgccctgagtgtggccctaaaaagattttaaaaaaattttaagctcgctgtgagaagttcagtgtaaaataacagggacaccaggaggatgaa

SEQ ID NO: 55450 - DNA, 110 bp, synthetic construct; identical to SEQ ID NO: 55449
  source 1..110: mol_type = other DNA

SEQ ID NO: 55451 - DNA, 110 bp, synthetic construct
  source 1..110: mol_type = other DNA
tatcttctatttcagtcatctaattttattcttttccctccccagcagctcttttgcaataaaagcaaggccatgaagcttactgttcaataaaggagatggtggcttca

SEQ ID NO: 55452 - DNA, 110 bp, synthetic construct
  source 1..110: mol_type = other DNA
gcaataaaagcaaggccatgaagcttactgttcaataaaggagatggtggcttcattgcagaacatagagcaaaggaatatatcacatggagaaacactgaaccactgaa

SEQ ID NO: 55453 - DNA, 110 bp, synthetic construct
  source 1..110: mol_type = other DNA
catcgggtgacttggattttgcagctgtcacccaggggacatctcttgatcacttgattctgaaggccaggaaaggcttgcactcctaggtccgataggactgtaagaat

SEQ ID NO: 55454 - DNA, 110 bp, synthetic construct
  source 1..110: mol_type = other DNA
gattctgaaggccaggaaaggcttgcactcctaggtccgataggactgtaagaattggagagacaaatcttggcagactaccacccccagggcactgcagagagaggaga

SEQ ID NO: 55455 - DNA, 110 bp, synthetic construct
  source 1..110: mol_type = other DNA
ttatccaacgatattaacataaaacagagttacatcatcattgtccttatttcggcatttaaatgatgggctctgagtggcatctaatcctgtcagaattacaggtacat

SEQ ID NO: 55456 - DNA, 110 bp, synthetic construct
  source 1..110: mol_type = other DNA
atttaaatgctgcaaatgaaaatttaagatgacaatttaaaaggctaggaatcagatctctaggaatccgatcttcacggcgactcaggaagtcaactcaaggaggggtt

SEQ ID NO: 55457 - DNA, 110 bp, synthetic construct
  source 1..110: mol_type = other DNA
gtggaagaactgggctaaaaacttagctggttttctccttgttggctggaacatgtaaaaggccaatgaaggaaggctatgatgttaaaattccctagcagcactgtggc

SEQ ID NO: 55458 - DNA, 110 bp, synthetic construct
  source 1..110: mol_type = other DNA
tttaaacatcccaatagtaggtacctcaaaagtcctgttcttgaaccccacctcggtcccctaagctaatcaccccttatccctagcctttaatcacacttcctcagaat

SEQ ID NO: 55459 - DNA, 110 bp, synthetic construct
  source 1..110: mol_type = other DNA
gagcattaacactcggaaaatcaatagacacatcagtgttagacttagccccactggccacctcagcttcccaagagcctaaaggaatcccagtgcagttcctcatctgg

SEQ ID NO: 55460 - DNA, 110 bp, synthetic construct
  source 1..110: mol_type = other DNA
tgtgtgtaaggacagttacaggtgctaactagatgtgcagcatcttcctagagcagcaccatccaaaagaaagctactgaaagccatgtatacaatttaaaattttctaa

SEQ ID NO: 55461 - DNA, 110 bp, synthetic construct
  source 1..110: mol_type = other DNA
tcctagagcagcaccatccaaaagaaagctactgaaagccatgtatacaatttaaaattttctaacagcacattcaaaataaacaggtaaaatgtgtttctataatacac

SEQ ID NO: 55462 - DNA, 110 bp, synthetic construct
  source 1..110: mol_type = other DNA
agactatcaattcctaggtgttcctgtagatgataatcttcatttgaggactgtatctctcaaggaaggatgcctaaagattttaccttttgccccagcttacaagcttt

SEQ ID NO: 55463 - DNA, 110 bp, synthetic construct
  source 1..110: mol_type = other DNA
ctaatggaattatctacttcaatctcatacactcacctctttgaccctgcgggatgatttcttaatgagaccatcagctgtacataccaataagattaggatttatgcaa

SEQ ID NO: 55464 - DNA, 110 bp, synthetic construct
  source 1..110: mol_type = other DNA
ccagtccacctaagtggttggtggtggtgttttgcttaaactatggtcttctaaaatgcacttacatcagaatcacccaaaagacattttttaaagattattgggcctta

SEQ ID NO: 55465 - DNA, 110 bp, synthetic construct
  source 1..110: mol_type = other DNA
ctgacaccagagcatattttctttactgttgtgtcatgtttcttctttgtgggagagagagaaaggaaaattctagcttaaagaaaaaagcagagagagagtaggaagga

SEQ ID NO: 55466 - DNA, 110 bp, synthetic construct
  source 1..110: mol_type = other DNA
ttatgtgtacacatcatactttttgttttgttttagaatgcctttgaagtagtacgtgctctacccgatctgtcaaggtcctcccacagccccatgctttcttttatatc

SEQ ID NO: 55467 - DNA, 110 bp, synthetic construct
  source 1..110: mol_type = other DNA
gtgctctacccgatctgtcaaggtcctcccacagccccatgctttcttttatatcagcttttcatattattaccttcctgacaccagaagatgtttaatgggaacaccta

SEQ ID NO: 55468 - DNA, 110 bp, synthetic construct
  source 1..110: mol_type = other DNA
tatcattctatggtattaagtacacattgttgtccaaccatcaccaccatccatctctttaagattacatttttgtgacatggcaagtatgacaggcatgaactagcctc

SEQ ID NO: 55469 - DNA, 110 bp, synthetic construct
  source 1..110: mol_type = other DNA
tctttaagattacatttttgtgacatggcaagtatgacaggcatgaactagcctccaacctgggtcactatagtcaagtcagtttggcatttgtacacttccttgcatgt

SEQ ID NO: 55470 - DNA, 110 bp, synthetic construct
  source 1..110: mol_type = other DNA
atgtaccatctaaatgtgagatatgaagaagaaaactcaggaccaatgcagaatagtcagaatgttatatgtctcttcacaccagagtttaaaaccctcaatacccacaa

SEQ ID NO: 55471 - DNA, 110 bp, synthetic construct
  source 1..110: mol_type = other DNA
tgccactgttcttgacttattagttgggcatctcaacatttctagtccaagccatccatccaactgaagtctctctgattgcactcacgcctttctacagctcatttcca

SEQ ID NO: 55472 - DNA, 110 bp, synthetic construct
  source 1..110: mol_type = other DNA
ccatccaactgaagtctctctgattgcactcacgcctttctacagctcatttccatgcccagctgagctttaacaacataaatctaggagttccctttgtagctcagtgg

SEQ ID NO: 55473 - DNA, 110 bp, synthetic construct
  source 1..110: mol_type = other DNA
aagactgaaatattgcctttattactaataaaagctgaagcaggcgaatactcccctatctatggtcctttaggccagatgcgatttagcaatttgacattttttaaagt

SEQ ID NO: 55474 - DNA, 110 bp, synthetic construct
  source 1..110: mol_type = other DNA
ccatgaagcaacctctacttagcttcacactctgcagcttccccacctctctcagctctcatcaaattgaagacagttacggtcttgctctggattatgctttggtttaa

SEQ ID NO: 55475 - DNA, 110 bp, synthetic construct
  source 1..110: mol_type = other DNA
ctctcatcaaattgaagacagttacggtcttgctctggattatgctttggtttaagagaatattatggctgatttgatcttccttccagaccactagaactttccccttt

SEQ ID NO: 55476 - DNA, 110 bp, synthetic construct
  source 1..110: mol_type = other DNA
aatttgataaaatatattactattttaccagaaacatagaaaccagaaatcagcagttgggttcattcacttacttcatgaagccaacttcctaaccctatcatatattt

SEQ ID NO: 55477 - DNA, 110 bp, synthetic construct
  source 1..110: mol_type = other DNA
caattcacacatgaaaaactgaggctcagagagatgagctaacctcccccagaatcctgggctagaaaactgtagagttggaattcaaaacatctgtctgactataaagt

SEQ ID NO: 55478 - DNA, 110 bp, synthetic construct
  source 1..110: mol_type = other DNA
tgagaccagccggtttagagcagagggaggatgaagaaccaatggtaaactgctaatacggagatgacagtccttccctgggatgtgatcttatttccatagtcactatt

SEQ ID NO: 55479 - DNA, 110 bp, synthetic construct
  source 1..110: mol_type = other DNA
atacggagatgacagtccttccctgggatgtgatcttatttccatagtcactattttgtcccctttcccactccatggctgaaacccagctgttgtcaccctgcatctgg

SEQ ID NO: 55480 - DNA, 110 bp, synthetic construct
  source 1..110: mol_type = other DNA
cctttactgggataaagagtttttatcagaaagtgatgtaaaagagcatttaatgtccctcataaatctatcatttttaaagcatgctgctactacacaagtgggaagaa

SEQ ID NO: 55481 - DNA, 110 bp, synthetic construct
  source 1..110: mol_type = other DNA
agtggaactcttgaacccaaaaacactgccttcgctgggattagctggtgaacgccaacaaaagatggccctcaagtcacaccatgcctcatgggtctacacagggagaa

SEQ ID NO: 55482 - DNA, 110 bp, synthetic construct
  source 1..110: mol_type = other DNA
aggatccacttccacgttcactcagatggttgctggcatggcttggttcctcctcgtttacttcgtttatcctggagagctacagtcggccctttttctgtagagggcca

SEQ ID NO: 55483 - DNA, 110 bp, synthetic construct
  source 1..110: mol_type = other DNA
tgagtccccgctgactctaaaatcacacgagcaagaacaccacaatgattctcagaagtcatgtagccaaagtcattcttctcaggcctgctcagcccaaatccagagct

SEQ ID NO: 55484 - DNA, 110 bp, synthetic construct
  source 1..110: mol_type = other DNA
ggggttttgttcaaaaattatgaatttcagggtggctgatatcctggtgtggaccctatctaagcacagggcccccggaacccgtcacacacccataaagccagctttgg

SEQ ID NO: 55485 - DNA, 110 bp, synthetic construct
  source 1..110: mol_type = other DNA
ctatctaagcacagggcccccggaacccgtcacacacccataaagccagctttggtttgggaacttggaatgtagcgaaaagcttggaccacaagatcttttcaaaaagt

SEQ ID NO: 55486 - DNA, 110 bp, synthetic construct; identical to SEQ ID NO: 55484
  source 1..110: mol_type = other DNA

SEQ ID NO: 55487 - DNA, 110 bp, synthetic construct; identical to SEQ ID NO: 55485
  source 1..110: mol_type = other DNA

SEQ ID NO: 55488 - DNA, 110 bp, synthetic construct
  source 1..110: mol_type = other DNA
ctgttcctctcgatgctggatgtcacttccaatgtcacttccacgtctgattctgatctctggagccctctggacttttatttttatctctctgcctcttttggttttcc

SEQ ID NO: 55489 - DNA, 110 bp, synthetic construct
  source 1..110: mol_type = other DNA
atctctggagccctctggacttttatttttatctctctgcctcttttggttttcctcaggctgtttggtctcttatagatatcaaaggccaattagagttttctaaaccc

SEQ ID NO: 55490 - DNA, 110 bp, synthetic construct
  source 1..110: mol_type = other DNA
gggtcagattcatttctgctgcaccacaacaggaactccatatgcatctaattttaatacaaatgagatatcccagaataaagagaagaaataagctttatttttaaaac

SEQ ID NO: 55491 - DNA, 110 bp, synthetic construct; identical to SEQ ID NO: 55490
  source 1..110: mol_type = other DNA

SEQ ID NO: 55492 - DNA, 110 bp, synthetic construct
  source 1..110: mol_type = other DNA
ccaatctaatatttatgtatttatctatcagtccagctcttgaaccagaaaccgtagtgggggagttcccattgtggctcggttgttaagaacccaacatagtgtctgtg

SEQ ID NO: 55493 - DNA, 110 bp, synthetic construct
  source 1..110: mol_type = other DNA
actaagtgctagatttcttctcccaacagatcagagttggcaagagagagaagtcagggtgaaaaatatttggcacctttcagttggaagaacattggggtggtacttga

SEQ ID NO: 55494 - DNA, 110 bp, synthetic construct
  source 1..110: mol_type = other DNA
agggtgaaaaatatttggcacctttcagttggaagaacattggggtggtacttgagtcaaaaatggaagactcggacttactgaaggttactaagaagtgaaactatgta

SEQ ID NO: 55495 - DNA, 110 bp, synthetic construct
  source 1..110: mol_type = other DNA
gctctgtaattttgttcactggctttgaaaagccagtttgtcttccatcattgtaagtgtggctcttctttgaataatacaagtttgacatagttctcttcttctgatgg

SEQ ID NO: 55496 - DNA, 110 bp, synthetic construct
  source 1..110: mol_type = other DNA
agtgtggctcttctttgaataatacaagtttgacatagttctcttcttctgatggcttattggtagtcttgttaaattatttcctcaatgaccatacttggtttgtaaaa

SEQ ID NO: 55497 - DNA, 110 bp, synthetic construct
  source 1..110: mol_type = other DNA
catgcagatgttaaaacagtcatcattagcaagtgactgcatggttactgcacttgctggttctgtgtaatttaacttttttgtattttgtttttgtggtgatccttgga

SEQ ID NO: 55498 - DNA, 110 bp, synthetic construct
  source 1..110: mol_type = other DNA
gctggttctgtgtaatttaacttttttgtattttgtttttgtggtgatccttggagctacaggcctctgccaagaaaatctccccacacacagactagggggcattgtgg

SEQ ID NO: 55499 - DNA, 110 bp, synthetic construct
  source 1..110: mol_type = other DNA
ttattattacaattatcattattatttaagctttaccttgggccacaggttgtgtgaagttacttaaactactttctttaaccctcacaacgtgaccagggagacgttgt

SEQ ID NO: 55500 - DNA, 110 bp, synthetic construct
  source 1..110: mol_type = other DNA
gaagttacttaaactactttctttaaccctcacaacgtgaccagggagacgttgttctgtccttgtttggagttggaatactgatatgcagagaagttaagttacttgcc

SEQ ID NO: 55501 - DNA, 110 bp, synthetic construct
  source 1..110: mol_type = other DNA
cccttgggaagacattgttgatgggcaaggctcagagaggttatgtaatttgaacaggtcacacagctagcaggtggcaggggtgggatttaaagccaggcctgtctgac

SEQ ID NO: 55502 - DNA, 110 bp, synthetic construct
  source 1..110: mol_type = other DNA
ttcccttgtgattttaaagcttaatcaggattgagaactcctgctgtaattataatggattgaggtgaacctaagagctaggagtttacttaacctgacttgggtgttgt

SEQ ID NO: 55503 - DNA, 110 bp, synthetic construct
  source 1..110: mol_type = other DNA
tggattgaggtgaacctaagagctaggagtttacttaacctgacttgggtgttgtccccagccagcccagtccacgtttgcatgagtgacctgtataaggacatgcctct

SEQ ID NO: 55504 - DNA, 110 bp, synthetic construct
  source 1..110: mol_type = other DNA
aggaggagagggcccaggttagccctcaagtcgtgtgtacaggcggcggccagtgcagaggcattttcgcagctgggcaaagagtccataggaacagctgccgtttcaat

SEQ ID NO: 55505 - DNA, 110 bp, synthetic construct
  source 1..110: mol_type = other DNA
agttctatccttgaccccagctcctggccagctcctaattctaaggctttcccacttgccaaggagacctcaggcttttaattgattcaagggaaaggctcctttgatgc

SEQ ID NO: 55506 - DNA, 110 bp, synthetic construct
  source 1..110: mol_type = other DNA
attctctactggcttgctcacattgttgaagaggtttgggaattctttccttctagaagaggcaacaaatacttttaaggctttactgtgcacagagcatgatgatggca

SEQ ID NO: 55507 - DNA, 110 bp, synthetic construct
  source 1..110: mol_type = other DNA
taatccttagtcccaacaaggcataggcagatggatggactcgctgttttgaaggaccaatctgatagatgagctcttccctgaacccttcagtggttcccatcgctcct

SEQ ID NO: 55508 - DNA, 110 bp, synthetic construct
  source 1..110: mol_type = other DNA
ccctgggtgccttacctgagccactcctgagcccgacaaaactcccttctcagcggctaccccctctcaactagctctcttcactttagctgagcttgttgcctaatggt

SEQ ID NO: 55509 - DNA, 110 bp, synthetic construct
  source 1..110: mol_type = other DNA
tctctgtgaatgagagctagcttgtccctctgtcccgtgaggttaccgtgagatacagccgtcagtgagaaagctggccctcaccagacactgaatctcctgctgccttg

SEQ ID NO: 55510 - DNA, 110 bp, synthetic construct
  source 1..110: mol_type = other DNA
ctaaaagcaacatagtcccatagaaccttttgtgatgataaaatggtctatgcctgtgctgtccaatatggcagacaccagctgcgtgtagcttgtgaacacggaacacc

SEQ ID NO: 55511 - DNA, 110 bp, synthetic construct
  source 1..110: mol_type = other DNA
agcagcaataacaaaagactccaggaataagcaagccttctgttaatacttgagaaaaaaaaaaaaaagaacagctatggtccgactctacgctctcccacccccaaatc

SEQ ID NO: 55512 - DNA, 110 bp, synthetic construct
  source 1..110: mol_type = other DNA
aaaaaaaaaaaaagaacagctatggtccgactctacgctctcccacccccaaatcaccacaacttatgacaacagtcacttagaaggaccgcaaaatcactgccgctgaa

SEQ ID NO: 55513 - DNA, 110 bp, synthetic construct
  source 1..110: mol_type = other DNA
catagaattcatagaacttccaggaaaacgatataattctagagtttacccatctcatctttatctaagaagctccacaagacaaaataagcacctctattatagatttt

SEQ ID NO: 55514 - DNA, 110 bp, synthetic construct
  source 1..110: mol_type = other DNA
catctttatctaagaagctccacaagacaaaataagcacctctattatagattttgattctagatacataattggtatttagttcagctttcctcagggactaggtagaa

SEQ ID NO: 55515 - DNA, 110 bp, synthetic construct
  source 1..110: mol_type = other DNA
cagtgtaaatacacaacacaggtgtgcgcacacagacacacatgttgaatatatcatgaccatttgcttcatccttaagcatgctgatcagctgaaaaacaatcgttgac

SEQ ID NO: 55516 - DNA, 110 bp, synthetic construct
  source 1..110: mol_type = other DNA
atgaccatttgcttcatccttaagcatgctgatcagctgaaaaacaatcgttgactgggctcttacaagtataaatcctgagacctctcagggctcacgtactgtttgct

SEQ ID NO: 55517 - DNA, 110 bp, synthetic construct
  source 1..110: mol_type = other DNA
ggcttaagtaccctagcgtgatcggccttccatatagaggtgtgcagggtgaccggccatcccggtttgcctgaggcgttttcctcggatgttggacttttagggctaca

SEQ ID NO: 55518 - DNA, 110 bp, synthetic construct
  source 1..110: mol_type = other DNA
cccacgagcctcctgtggtcccgtcctcgaaagtgcgactcatgtggcaggtgtcccgtcaaggtgagctgtggagaggtcggatgggtcttctcggtatattctttctc

SEQ ID NO: 55519 - DNA, 110 bp, synthetic construct
  source 1..110: mol_type = other DNA
gggctcagggggctactgcctgcaagaggccatagcaaccctctgagccaattcatggtttttatttactattttctatttctttgcacgtgcaggggatacatcggtat

SEQ ID NO: 55520 - DNA, 110 bp, synthetic construct; identical to SEQ ID NO: 55519
  source 1..110: mol_type = other DNA

SEQ ID NO: 55521 - DNA, 110 bp, synthetic construct
  source 1..110: mol_type = other DNA
gtcagttttgaggcattcaccaaaattctaaaacaaccagaaaactcctattcgataaccagctacaaataaatttggctgtgactttccttggcaagcaggtaaatcat

SEQ ID NO: 55522 - DNA, 110 bp, synthetic construct
  source 1..110: mol_type = other DNA
ccactaatactagcacatagaagagctagttgggggatggcgtgagctgagaatagggtgagttcagtattgacgatgccatgagacagccacatgaagataactttgtg

SEQ ID NO: 55523 - DNA, 110 bp, synthetic construct
  source 1..110: mol_type = other DNA
tctgggccctcatgtgccctttaggccagtggaggggtgccccagctagagccaggagcaagtggcaaggctcccccagtccttccccaggagcagcctgtgctcatctt

SEQ ID NO: 55524 - DNA, 110 bp, synthetic construct
  source 1..110: mol_type = other DNA
gatgttagatgctgtatctagtgggcaacagagaccgactctggaaacgtaagcaggaaaggatttttttcaaggatgacagtggtagctcacagaaccaaacagaaggt

SEQ ID NO: 55525 - DNA, 110 bp, synthetic construct
  source 1..110: mol_type = other DNA
ggaaaggatttttttcaaggatgacagtggtagctcacagaaccaaacagaaggttggaggaccaggcttggaacccaggcggtgtggttgcaggtggggagtaggagga

SEQ ID NO: 55526 - DNA, 110 bp, synthetic construct
  source 1..110: mol_type = other DNA
gcaaaatgaggcgataaggtgtatctggatgtgctttaaagatagaaagcaccgtcaaatgcaaaccaaagtgtttttcccggtatttttttaagcctatgtgggggcct

SEQ ID NO: 55527 - DNA, 110 bp, synthetic construct
  source 1..110: mol_type = other DNA
ggggagggctgcaaccacagcatatggaaatttccaggccagggatgaatctaaacaagagctgagagcgttcctttcatggctcagtggtaacgaaccccactagtatc

SEQ ID NO: 55528 - DNA, 110 bp, synthetic construct
  source 1..110: mol_type = other DNA
ctttttttccttttttttctttggtttttgtttttgtttttttaagatctggctgtggggcaagccagggagcttctttaatggttaaccggtttaccttatgtagtgac

SEQ ID NO: 55529 - DNA, 110 bp, synthetic construct
  source 1..110: mol_type = other DNA
tggggcaagccagggagcttctttaatggttaaccggtttaccttatgtagtgactagccatttctaattatgagcaattgagaaacagtgcctcaacgcttctctcgtc

SEQ ID NO: 55530 - DNA, 110 bp, synthetic construct
  source 1..110: mol_type = other DNA
tttggtgaacacatagcattctctacaacagcctgatttctgccatgaacaaactctctggcctttggcaaggcacttaatctccttggcttcaattccctttattttaa

SEQ ID NO: 55531 - DNA, 110 bp, synthetic construct
  source 1..110: mol_type = other DNA
caaaaggacggcattcagagagcttctgggttggtgaatacgtgcagattggcagagggtggagtggtcattgagggcatggatcctctgaaccctttctccacaccttg

SEQ ID NO: 55532 - DNA, 110 bp, synthetic construct
  source 1..110: mol_type = other DNA
aaggattaccaaaactcctgatgcttctgcatgagatgttcagttcaattctccagctctgttctcaacctgactgtgccacgagtatcaactgtgctactcacaacatc

SEQ ID NO: 55533 - DNA, 110 bp, synthetic construct
  source 1..110: mol_type = other DNA
gctctgttctcaacctgactgtgccacgagtatcaactgtgctactcacaacatcgcctgtgataaaaatgacggtaaatgttaccgaaccaaacttgggtctactcggc

SEQ ID NO: 55534 - DNA, 110 bp, synthetic construct
  source 1..110: mol_type = other DNA
gttcaggctgcaaggagaacagccccttttcctggggagcacagggcaagatatgatctgcatgtccaaaagcaatagaaatagatgaatatgcctaagaaatttatgct

SEQ ID NO: 55535 - DNA, 110 bp, synthetic construct
  source 1..110: mol_type = other DNA
atctgcatgtccaaaagcaatagaaatagatgaatatgcctaagaaatttatgctcaccccactggcaaggtgaggcagtcatcaatcaaggaagtcttcactgaagcag

SEQ ID NO: 55536 - DNA, 110 bp, synthetic construct
  source 1..110: mol_type = other DNA
aggtagctacaaaaaacaaaatactttcatttttggtacacgacttcctcttcctcagggcttttctctgaagcctattaacggctctccatgagccctaagtcaaaaaa

SEQ ID NO: 55537 - DNA, 110 bp, synthetic construct
  source 1..110: mol_type = other DNA
tgcatcactgcgcctctttctcctccttcaatctacattcacatatattcattcgcaaagctggtgtttcggaccctgaaggatcgtttcacagaaatgggaaccaaccc

SEQ ID NO: 55538 - DNA, 110 bp, synthetic construct
  source 1..110: mol_type = other DNA
gattttatgtatgaggcagagtcttctagttgttcccaattccaataaccctcctacaatatcctgctaaaaattatatctctcagactactctgcagctggttatggat

SEQ ID NO: 55539 - DNA, 110 bp, synthetic construct
  source 1..110: mol_type = other DNA
acaatatcctgctaaaaattatatctctcagactactctgcagctggttatggataagtttggaccaccaatatgtaagtagaaatgattgctgctacttctgaatgtgc

SEQ ID NO: 55540 - DNA, 110 bp, synthetic construct
  source 1..110: mol_type = other DNA
ttttataaacataacaccagaggggacggctggaagcacctggaaaactcattcaataaatttcttctgagaagctactatatatctatcagaaccaggccaggcaaatt

SEQ ID NO: 55541 - DNA, 110 bp, synthetic construct
  source 1..110: mol_type = other DNA
ataaatttcttctgagaagctactatatatctatcagaaccaggccaggcaaattccaagccaggcctttagattaaagatgaaagagactctgaaaggagttcgccgtc

SEQ ID NO: 55542 - DNA, 110 bp, synthetic construct
  source 1..110: mol_type = other DNA
tccgtggcaaaggggaaaatagtagcggggttaaattaaggttactatattgtgaaagagctatgtgaggagcagttaacaaaaggacttcatgggaggtaaggtgattg

SEQ ID NO: 55543 - DNA, 110 bp, synthetic construct
  source 1..110: mol_type = other DNA
gtctgtcctgttttggggggggccacaggtgctgcatatatggaatttcccaggctaggggttgaattggagttgaagctgctagtctatgcctaagccacagcaatggc

SEQ ID NO: 55544 - DNA, 110 bp, synthetic construct; identical to SEQ ID NO: 55543
  source 1..110: mol_type = other DNA

SEQ ID NO: 55545 - DNA, 110 bp, synthetic construct
  source 1..110: mol_type = other DNA
agattctctagccagaaaatcagtaaggcaacagagatcttaaatgacaaaatagaacagttagacaactgatatttttaggccatcacattcaaaaaaacccaatatac

SEQ ID NO: 55546 - DNA, 110 bp, synthetic construct
  source 1..110: mol_type = other DNA
aacagttagacaactgatatttttaggccatcacattcaaaaaaacccaatatacattccaagtgtacatggaaccttcactctaggactgatcacatactgcagcacaa

SEQ ID NO: 55547 - DNA, 110 bp, synthetic construct
  source 1..110: mol_type = other DNA
tcaggcagtgtggctatttactcttacctacctcttaccattcttaatctatacttacatatagagtaacgtaataggatgaatagttatcccaaatgaccaaagaaaga

SEQ ID NO: 55548 - DNA, 110 bp, synthetic construct
  source 1..110: mol_type = other DNA
acctacctcttaccattcttaatctatacttacatatagagtaacgtaataggatgaatagttatcccaaatgaccaaagaaagataaaatacatacatagagagagtgt

SEQ ID NO: 55549 - DNA, 110 bp, synthetic construct
  source 1..110: mol_type = other DNA
tcctttctccggcatttaaatattttaccaatttcactggtactttcctctttcccccccctcccatctactgtcttttcggatgctttagctatagcaaaacagaatat

SEQ ID NO: 55550 - DNA, 110 bp, synthetic construct
  source 1..110: mol_type = other DNA
gggaggataaaaggtacacacttcctggtacaaaataaatgagtcacggggatacaatgtaagtgtggggaatacagccaataataatgtagtaccggtgatagacgtaa

SEQ ID NO: 55551 - DNA, 110 bp, synthetic construct
  source 1..110: mol_type = other DNA
aaatttttctgccaacagcaggataatttttttctcagcagtagcttcggccgcatcctggtaaaaagggttaggtttgttcagttacagcagtatatatgcctgtagtg

SEQ ID NO: 55552 - DNA, 110 bp, synthetic construct
  source 1..110: mol_type = other DNA
actttcacacagatgtttccagctagttttctccatgaaggctgcatcgataacaaagtaaatggaattcacagttctacttggttgactcaacatttatcatttgagcg

SEQ ID NO: 55553 - DNA, 110 bp, synthetic construct
  source 1..110: mol_type = other DNA
ccaccttctaaacctaccatcgtggaaggaagtgaagtgaaactgaattaatacattacaaatcggcattttattcctgtctccatgtggacaacggggtaactggatga

SEQ ID NO: 55554 - DNA, 110 bp, synthetic construct
  source 1..110: mol_type = other DNA
agctggtagtgacataaagttggttcctagatccagctgaaggtctgaaacgtagaccctttaccggtttttctcagaatttatctgacttgatacattgcaaaagaact

SEQ ID NO: 55555 - DNA, 110 bp, synthetic construct
  source 1..110: mol_type = other DNA
accctttaccggtttttctcagaatttatctgacttgatacattgcaaaagaactttagaaatgaaagaaaggggttcctgttgtggctcagtggtaataaatccaacta

SEQ ID NO: 55556 - DNA, 110 bp, synthetic construct
  source 1..110: mol_type = other DNA
gaagaccattcctttctaccaaatgcctcactgcacttctcaaccacccccctcctcttcagagagctcagcaaactgctccagagcctatttctggccctttataaagt

SEQ ID NO: 55557 - DNA, 110 bp, synthetic construct
  source 1..110: mol_type = other DNA
tcttcagagagctcagcaaactgctccagagcctatttctggccctttataaagttaataagttcaaattctgttttttagccttaaaataaaaaaatcgatggaattaa

SEQ ID NO: 55558 - DNA, 110 bp, synthetic construct
  source 1..110: mol_type = other DNA
tgaagttagtctaaacctttgaacctcaacgtggaatggagaaacagcatttatttggaccagagaagatggccagcaagtacgctctgctgtgaatagttaaccccaca

SEQ ID NO: 55559 - DNA, 110 bp, synthetic construct
  source 1..110: mol_type = other DNA
agtggaatgcctgctcttccaactgcctatattaaatccctttctgattaaaaaagctagaatgatttctatttactgcaattgaaccctctctggtatgttgaataaat

SEQ ID NO: 55560 - DNA, 110 bp, synthetic construct
  source 1..110: mol_type = other DNA
tatgtggggtgcagccctctccccgtccccctcatattctccagattttgtttttaggtttatgaatctctttggtcatttgaaaatgtcaaggcattaggggagtttcc

SEQ ID NO: 55561 - DNA, 110 bp, synthetic construct
  source 1..110: mol_type = other DNA
aggtttatgaatctctttggtcatttgaaaatgtcaaggcattaggggagtttccagtaaaacaagctctttcaggccacaagtgtttttccccatgcctagcacccgtg

SEQ ID NO: 55562 - DNA, 110 bp, synthetic construct
  source 1..110: mol_type = other DNA
agatctcttgaagtctgagtaacaaggatttttaagtatttatattagatttggattttgagtaccaaggcccttccacacatggatgtggaaatctagaactccctgag

SEQ ID NO: 55563 - DNA, 110 bp, synthetic construct; identical to SEQ ID NO: 55562
  source 1..110: mol_type = other DNA

SEQ ID NO: 55564 - DNA, 110 bp, synthetic construct
  source 1..110: mol_type = other DNA
cttaccccaggctatacatgagttacaaacccacgaaagataattttctttcatctggtccaatggcaacaaaactaaccccggcccttcccgtctgaccctgttgaccc

SEQ ID NO: 55565 - DNA, 110 bp, synthetic construct
  source 1..110: mol_type = other DNA
tggtccaatggcaacaaaactaaccccggcccttcccgtctgaccctgttgacccaaagtcaggtctaagccacgcatggaggcctcgagggcaggctcagcacgagtct

SEQ ID NO: 55566 - DNA, 110 bp, synthetic construct
  source 1..110: mol_type = other DNA
caaagatgctcctagtgctctcatcacttaggaaattacaagggtttcaggagctctgtgccaggaatcagggacagagatcgctaagtgtgtgtgtgtatgtgtgtgtg

SEQ ID NO: 55567 - DNA, 110 bp, synthetic construct
  source 1..110: mol_type = other DNA
ctgtgccaggaatcagggacagagatcgctaagtgtgtgtgtgtatgtgtgtgtgtgtagccactttctcttacatatttaatcaacgtaactcatgcggtgacatatga

SEQ ID NO: 55568 - DNA, 110 bp, synthetic construct
  source 1..110: mol_type = other DNA
ttagaatccgactgcacactctagctgcacaaagccctatgttagggcggcacaagctctacctgagtttcaaggatgcgtagcgcagtgtggctccttcaaattccttt

SEQ ID NO: 55569 - DNA, 110 bp, synthetic construct
  source 1..110: mol_type = other DNA
gatgccttgcctcctcaggctcttctcagcggtctgaggatagccaagctcagctcagacaagaggctttctctcctcgcctattcatggatgcacaccagaatgcacat

SEQ ID NO: 55570 - DNA, 110 bp, synthetic construct
  source 1..110: mol_type = other DNA
taatggccggaatcaacttctctgtatcctcgctctctgctctgtagctctgccgtcccttctcactgctggccttgctctgtcccttgcttaggtcaacaggaagttag

SEQ ID NO: 55571 - DNA, 110 bp, synthetic construct
  source 1..110: mol_type = other DNA
gtacccatcacctcatctgagaggttcctgggaggcagaatccttccttaggcacagaaatattgatgaagacagctaagcaggaagaacatgtcacctgcactcttgta

SEQ ID NO: 55572 - DNA, 110 bp, synthetic construct
  source 1..110: mol_type = other DNA
atctcttcaagatcctattttcatttcctggggatacacacctagaagtggaacggctggagcacacggcagctctatttttaactttttgaggactctccgcactgttt

SEQ ID NO: 55573 - DNA, 110 bp, synthetic construct
  source 1..110: mol_type = other DNA
ctgattcggtccccttcgcacagccattttctagttaaaacgctccctgcctctgaaggggaaatgaacttttcccccttgatcttgcagcggctaagctctgaacccct

SEQ ID NO: 55574 - DNA, 110 bp, synthetic construct
  source 1..110: mol_type = other DNA
tttgtaattttggtcagtggtaagaattccagatacattctgaagacagagctgataggatttgccgacagactgaatttggggcatgagagcaagaggattcagggatg

SEQ ID NO: 55575 - DNA, 110 bp, synthetic construct
  source 1..110: mol_type = other DNA
taggatttgccgacagactgaatttggggcatgagagcaagaggattcagggatgacactgaagtttctgatctgagaaatcagttcagtgaagtggacattttctgagt

SEQ ID NO: 55576 - DNA, 110 bp, synthetic construct
  source 1..110: mol_type = other DNA
ctgcaacctcaaggtgcagaggaatttcagttttgctgaggaaacaggttaggttatgtgcccaagctctcactgctactcattagggaaatcaggctttagactgtgga

SEQ ID NO: 55577 - DNA, 110 bp, synthetic construct
  source 1..110: mol_type = other DNA
atgtgcccaagctctcactgctactcattagggaaatcaggctttagactgtggactgggagttcccatcttggctcagcagtaaggaacctgactagtgtccatgagaa

SEQ ID NO: 55578 - DNA, 110 bp, synthetic construct
  source 1..110: mol_type = other DNA
taaatctaaattccaggaggttgatgtagttccagggggctgggggtggactccggttcctatctctgtgttgacactgagaggttcctcgttcctgcaacctggtcctt

SEQ ID NO: 55579 - DNA, 110 bp, synthetic construct
  source 1..110: mol_type = other DNA
tttcgcatatgaaatcacagtactccctggagcctgtaagttagcttctgttcgtgtgttgcagatgacgacattcaggctaggacagtaagtaagtcaccctgggcgac

SEQ ID NO: 55580 - DNA, 110 bp, synthetic construct
  source 1..110: mol_type = other DNA
ctttttttctgttttgtttttgtgaattgtgctaatggtgaagtttaagcaccatgcctcgtgacttcgggcaaggtgaagctttattttagatgctgactcactttgaa

SEQ ID NO: 55581 - DNA, 110 bp, synthetic construct
  source 1..110: mol_type = other DNA
agcacagaccagggaagacagcaacaaaaaccacgaggtctgtggaacactcaatcccacgttgagttgaatagcaggcttgaacctagcagggggcttagtttgtgcag

SEQ ID NO: 55582 - DNA, 110 bp, synthetic construct
  source 1..110: mol_type = other DNA
cacacctgactgtctctgcttaatggctgacatctccgtaggaatttggactactaaagaggaaaggctggttcataaagataatataaaataatacagatttggatttc

SEQ ID NO: 55583 - DNA, 110 bp, synthetic construct
  source 1..110: mol_type = other DNA
tggaaacgtgttaacactaaaagttacaagccaccagcacagaagacaccctctttaattccactgacttactgtgaatgctgagtttataggcttgtttactgaaagga

SEQ ID NO: 55584 - DNA, 110 bp, synthetic construct
  source 1..110: mol_type = other DNA
taattccactgacttactgtgaatgctgagtttataggcttgtttactgaaaggaatttaaacttgatttttaaataatttgaattactccgttgtacctaaggctttct

SEQ ID NO: 55585 - DNA, 110 bp, synthetic construct
  source 1..110: mol_type = other DNA
ggggctgaggagagaaacctcatccttcctctgactccactcaagctctctaatgattgcatatggacattaattgggccccgtgacattcttaaaagctgcctgagctc

SEQ ID NO: 55586 - DNA, 110 bp, synthetic construct
  source 1..110: mol_type = other DNA
ggacttttattcttccatatgaactttaagataagctgtaaaatgcttgttggaattttaatcaaaattgtatgtataggagttcccattgtggtacagtggaaacgaac

SEQ ID NO: 55587 - DNA, 110 bp, synthetic construct
  source 1..110: mol_type = other DNA
aatgtcttaacctgtgtgagtgagtatagtatgggctgagaaatcatcttcaggttgaaaacagaaagactgtaaggttaataatagctcagtatatcttggaatgagtt

SEQ ID NO: 55588 - DNA, 110 bp, synthetic construct
  source 1..110: mol_type = other DNA
gtcgtgagagcgggaccagtgcaggaaatcaggagctctgttttgatcatgataggactcattagatatggatgtggcaatgttaggaagccaagggatctttgggtctg

SEQ ID NO: 55589 - DNA, 110 bp, synthetic construct
  source 1..110: mol_type = other DNA
ctgcagttgcaacttccttggagcttctcttgagctacagtctcagctgctgacgtcttcctgggcaggtaagggaatcaaagaagttcaggaggccacactcggatggg

SEQ ID NO: 55590 - DNA, 110 bp, synthetic construct
  source 1..110: mol_type = other DNA
gtctaccttagcaatagttaatgggtggttaacacttaaatgtagggttggtttttttttgtttttttttttgtctttttgctttttttctagggccgcccccatggcat

SEQ ID NO: 55591 - DNA, 110 bp, synthetic construct
  source 1..110: mol_type = other DNA
tggttaacacttaaatgtagggttggtttttttttgtttttttttttgtctttttgctttttttctagggccgcccccatggcatgtggagattcctaggctaagggtct

SEQ ID NO: 55592 - DNA, 110 bp, synthetic construct
  source 1..110: mol_type = other DNA
tatgttttcctatatttttggctttagtcaaagcagtccttaaaaagagggaatatggaccaaaatacactcagaataatttcatcactggagtcagagcaatgaatgag

SEQ ID NO: 55593 - DNA, 110 bp, synthetic construct
  source 1..110: mol_type = other DNA
tggaccaaaatacactcagaataatttcatcactggagtcagagcaatgaatgagttctgcctcaaatccaggtacagtattttttttttaatgtgatagtttgctatat

SEQ ID NO: 55594 - DNA, 110 bp, synthetic construct
  source 1..110: mol_type = other DNA
atgccctgttctctcactgacgaggcagagcatagctgcatcccaagctatctaaggtcaatctcacaccagtgccgaagccactcaaggaagatgtaaaagctgacatg

SEQ ID NO: 55595 - DNA, 110 bp, synthetic construct
  source 1..110: mol_type = other DNA
cggctatgggtaccaatgacaggaagaaattagaagacttgagaagctaatggcgacaagaaacaggactgccctggagttctggcttttcaccaactgtgtggccttgg

SEQ ID NO: 55596 - DNA, 110 bp, synthetic construct
  source 1..110: mol_type = other DNA
acaagaaacaggactgccctggagttctggcttttcaccaactgtgtggccttggaactccacttaacttttttttgttgttttttttaggaccgtacctgcatcatatg

SEQ ID NO: 55597 - DNA, 110 bp, synthetic construct; identical to SEQ ID NO: 55595
  source 1..110: mol_type = other DNA

SEQ ID NO: 55598 - DNA, 110 bp, synthetic construct; identical to SEQ ID NO: 55596
  source 1..110: mol_type = other DNA

SEQ ID NO: 55599 - DNA, 110 bp, synthetic construct
  source 1..110: mol_type = other DNA
tttctcccttttcgaatggaaatgtctgtcttctgcctgtcccaccattgcatgttggaagcacacaacttattcggtttcacaggttggcagctgaatagcctcaggct

SEQ ID NO: 55600 - DNA, 110 bp, synthetic construct
  source 1..110: mol_type = other DNA
tggaagcacacaacttattcggtttcacaggttggcagctgaatagcctcaggctgaatcataccttaaatctcacccatctctgatttaagtgatatttaggtgggaca

SEQ ID NO: 55601 - DNA, 110 bp, synthetic construct
  source 1..110: mol_type = other DNA
ggttgggtgttactgaacccacgagacgggagcgggggctgtcacagaatgcagcccctgccaaaaatgcagctgggcgggcggaagcggagggctaagccccccatttc

SEQ ID NO: 55602 - DNA, 110 bp, synthetic construct
  source 1..110: mol_type = other DNA
ccctgccaaaaatgcagctgggcgggcggaagcggagggctaagccccccatttctttttctttgcgtcctctggtggaaccaaaggggaatcctgacaccagggaggct

SEQ ID NO: 55603 - DNA, 110 bp, synthetic construct
  source 1..110: mol_type = other DNA
atggaagggatgaggaggagaaaagatggaaaggacagtgagggcataaggaaagtgagaccagagaaaggtcattctcagctgcccacttaagatgccctcttcatgaa

SEQ ID NO: 55604 - DNA, 110 bp, synthetic construct
  source 1..110: mol_type = other DNA
gaagagaggagtcggtgttctgtttcatgctccttaattttctagagaataacccctattaactcaacagtctttcaaactacggcattgcccactaaaatgcgtgtgtg

SEQ ID NO: 55605 - DNA, 110 bp, synthetic construct
  source 1..110: mol_type = other DNA
ctattaactcaacagtctttcaaactacggcattgcccactaaaatgcgtgtgtgtatctgtgtatctatttgccttcttgcctacctgccatttacttacctatcttcc

SEQ ID NO: 55606 - DNA, 110 bp, synthetic construct
  source 1..110: mol_type = other DNA
ctgttatttttactggcctcttgaatcgagactgaagttttctggaaaccaatctttctggttgagcaaaacagtcttccacgtaccttttcaattaactcgtagctctc

SEQ ID NO: 55607 - DNA, 110 bp, synthetic construct
  source 1..110: mol_type = other DNA
ttctggttgagcaaaacagtcttccacgtaccttttcaattaactcgtagctctcttccagtttgagcagcctgttctgcacagacgtggatgcgcgctgatagacggct

SEQ ID NO: 55608 - DNA, 110 bp, synthetic construct
  source 1..110: mol_type = other DNA
catgctctggaaaatcacttctcattaacctcaaggcttagactagctctccagtggtaccaggggaaggcctggtgcttcccaaggaaaaaacaccatggcacggttct

SEQ ID NO: 55609 - DNA, 110 bp, synthetic construct
  source 1..110: mol_type = other DNA
cagtcttgaggggccagtccatcaaaaatatcattccactctttgacttaaagatgggcacatgacccatgctaagctaatcacaggcaatttgcagtctagatgtatga

SEQ ID NO: 55610 - DNA, 110 bp, synthetic construct
  source 1..110: mol_type = other DNA
attaagggtaaaattgatctgtctcgcagctttctctccaaaggaccgcctccttttgttgcagctttggagtttgacttctctggtttagaaccctgagaagttttgaa

SEQ ID NO: 55611 - DNA, 110 bp, synthetic construct
  source 1..110: mol_type = other DNA
ttgttgcagctttggagtttgacttctctggtttagaaccctgagaagttttgaaaactctgacaaatacctgatatagtctatctgcaagatcaaggaacctgctttct

SEQ ID NO: 55612 - DNA, 110 bp, synthetic construct
  source 1..110: mol_type = other DNA
catatcctctactagtttgcaaaactaattaaggggcacatcaaagagcttcctggggctccaattcataaggaaatattaaaatctcattggatggagttccctctgtg

SEQ ID NO: 55613 - DNA, 110 bp, synthetic construct
  source 1..110: mol_type = other DNA
catttacaccagcacttatggactggagtagttggttgcaaccacctgtcttctccatgagctgcatctttcctgtataatatatattcctgcacttaattctaaaagtt

SEQ ID NO: 55614 - DNA, 110 bp, synthetic construct
  source 1..110: mol_type = other DNA
catgagctgcatctttcctgtataatatatattcctgcacttaattctaaaagttagtcacctaacatagccagaaggaaagcaaaacaatggccatattaattccacac

SEQ ID NO: 55615 - DNA, 110 bp, synthetic construct
  source 1..110: mol_type = other DNA
agatattggaattgtttaaaaagtccctgggtaattttaatgcaccgccggtgtctgtaaacactgttagtgaaacactaaagtgtattcatttgtacctgagagagctg

SEQ ID NO: 55616 - DNA, 110 bp, synthetic construct
  source 1..110: mol_type = other DNA
tgtaaacactgttagtgaaacactaaagtgtattcatttgtacctgagagagctgagtgtgagcactttgttcttttctttttgatcagatatcttcctgcaaaacaggt

SEQ ID NO: 55617 - DNA, 110 bp, synthetic construct
  source 1..110: mol_type = other DNA
ctttcctatatatcctaggtatatacatatgtctgctaggccttgaattgtgtgtccaccaacttcatatccaaatttcctgggtcctaacccccagtagctgagaacat

SEQ ID NO: 55618 - DNA, 110 bp, synthetic construct
  source 1..110: mol_type = other DNA
ccaccaacttcatatccaaatttcctgggtcctaacccccagtagctgagaacatgaccttatttggaaatggggtcattgcagatgtaattagttgagccgaggtcatt

SEQ ID NO: 55619 - DNA, 110 bp, synthetic construct
  source 1..110: mol_type = other DNA
tccagtgtcccacaaccccactcaatattaaataaaactctttatccagtcctcttatggagctgtaaggccatgagggttatacacctgtgagtaggtttcctagatct

SEQ ID NO: 55620 - DNA, 110 bp, synthetic construct
  source 1..110: mol_type = other DNA
gagatctgtatttctctcacccccatccacacacatgcttctgggctctcacgcctaagagctgggtgatcttcctccagcacccaaccccgaggcattggagagagccc

SEQ ID NO: 55621 - DNA, 110 bp, synthetic construct
  source 1..110: mol_type = other DNA
taagagctgggtgatcttcctccagcacccaaccccgaggcattggagagagcccagggcagaaagcaaaagatgcttggcacaaacttacagcaaggttctatccgtac

SEQ ID NO: 55622 - DNA, 110 bp, synthetic construct
  source 1..110: mol_type = other DNA
tgacaaagacatcagttgtttaatggatggaggagcttaaatgtcttaaataaagtcctgcagtggtaccccaccatgtgtggcagacggggcaggacagagcggcagct

SEQ ID NO: 55623 - DNA, 110 bp, synthetic construct
  source 1..110: mol_type = other DNA
tcgccaaacttctctgcagaaatggaccatcaaggaagcttctgccccagtctagaagtggtcagctctagtaacttctgctgtccacctcagcaaaatggataatttgt

SEQ ID NO: 55624 - DNA, 110 bp, synthetic construct
  source 1..110: mol_type = other DNA
ccagtgcttcaaggtaggctcgttatgtaccatggcctgtgatgacatgtactctgggcacagatgtgggagagacagggcttagtttctatattacagctgttgagctt

SEQ ID NO: 55625 - DNA, 110 bp, synthetic construct
  source 1..110: mol_type = other DNA
gggcacagatgtgggagagacagggcttagtttctatattacagctgttgagcttttccatctgcagaattatatgtagcggatagaggtatcatcaaaataaaagtatt

SEQ ID NO: 55626 - DNA, 110 bp, synthetic construct; identical to SEQ ID NO: 55624
  source 1..110: mol_type = other DNA

SEQ ID NO: 55627 - DNA, 110 bp, synthetic construct; identical to SEQ ID NO: 55625
  source 1..110: mol_type = other DNA

SEQ ID NO: 55628 - DNA, 110 bp, synthetic construct
  source 1..110: mol_type = other DNA
ttgttttatgttagaacagtgagtgtgtgtagtgtgtatatcttgttttgtatgcatatcactgaggatgtattatgtcccaggagctctgataagttccttatacacag

SEQ ID NO: 55629 - DNA, 110 bp, synthetic construct
  source 1..110: mol_type = other DNA
actttcgaccatttgacttgaagtccctaatttggaaatatctagaaatctattgcaaatgtgaagctgggcattggaaggtagagagaacagcaccagaaacataaatc

SEQ ID NO: 55630 - DNA, 110 bp, synthetic construct
  source 1..110: mol_type = other DNA
caaatgtgaagctgggcattggaaggtagagagaacagcaccagaaacataaatccagacattgtaggaagaatgcctataatggaatccatcagagttggttgtcaaga

SEQ ID NO: 55631 - DNA, 110 bp, synthetic construct; identical to SEQ ID NO: 55629
  source 1..110: mol_type = other DNA

SEQ ID NO: 55632 - DNA, 110 bp, synthetic construct; identical to SEQ ID NO: 55630
  source 1..110: mol_type = other DNA

SEQ ID NO: 55633 - DNA, 110 bp, synthetic construct
  source 1..110: mol_type = other DNA
tgaccctccggacaaggtcagaatctgctacatgtttccacagtgctcgtgtttgttacagttttactcttgcatgtttattgtgttgatgcctttttctttagttggaa

SEQ ID NO: 55634 - DNA, 110 bp, synthetic construct
  source 1..110: mol_type = other DNA
ttacagttttactcttgcatgtttattgtgttgatgcctttttctttagttggaatttaagctgataggccatatcttctgtttgtttgtatactctccattttatcata

SEQ ID NO: 55635 - DNA, 110 bp, synthetic construct
  source 1..110: mol_type = other DNA
actttcattcaaactctgagaagaaaagaaatccatttccctggaaatctctggaactaaactgtaaaaacccaaagtgtacgggagttattaacctggtagtttcactc

SEQ ID NO: 55636 - DNA, 110 bp, synthetic construct
  source 1..110: mol_type = other DNA
acgttccttgatatttacccaagaggttgacaaaatatccacacaaaaacctgcgtgtagatgtgtatagcagctttgttcatagttgcttaaacttagaagcaacacca

SEQ ID NO: 55637 - DNA, 110 bp, synthetic construct
  source 1..110: mol_type = other DNA
gggaaaggaaaaaaggaggaatctttaagtaagaattatgataaaggaaagggaagctttagatttacagtatataggttttacatcatgcaaaaagaggaatctttaac

SEQ ID NO: 55638 - DNA, 110 bp, synthetic construct
  source 1..110: mol_type = other DNA
cacaacatcccaaggataacttcaaaaaagccaactttgtgctgtcaaaattatcatattcactacaattgtttaaaagagcaaacatttcattaagactttataagagc

SEQ ID NO: 55639 - DNA, 110 bp, synthetic construct
  source 1..110: mol_type = other DNA
acattgttttaacagaacatgctagcattcctcatcccctaactaagctcatatctgggccagaagtaggagaagctaaagagtaaaatatgccatgatctgatgtcact

SEQ ID NO: 55640 - DNA, 110 bp, synthetic construct
  source 1..110: mol_type = other DNA
tgggccagaagtaggagaagctaaagagtaaaatatgccatgatctgatgtcactgcaggtctggctactacctgacaccaacaaggagaaccagcagatgctgaataca

SEQ ID NO: 55641 - DNA, 110 bp, synthetic construct
  source 1..110: mol_type = other DNA
aataatttagttaagcaatttttaagaataaatctgtattatccaatctctattgcccaacatggcattttcccaactatgtctgctagcttttgaaggtgaatgctaag

SEQ ID NO: 55642 - DNA, 110 bp, synthetic construct
  source 1..110: mol_type = other DNA
cccaacatggcattttcccaactatgtctgctagcttttgaaggtgaatgctaagagttggattatttatacataaagatcgttaaaaaaaaacgtatgaagtgttgtta

SEQ ID NO: 55643 - DNA, 110 bp, synthetic construct
  source 1..110: mol_type = other DNA
ccctgccttttgattttcagctggactcagccactgataaagactggcaagacaatgaactcatctgacctcaacccaagatttctgtgatctggttgagtctttggacc

SEQ ID NO: 55644 - DNA, 110 bp, synthetic construct
  source 1..110: mol_type = other DNA
atattgctgtagaatcatgaagaccagaaatcaggaaggaaaggaaagctgaatgcggatgagaaaaaaggcaaactgaaatctgcagggacaaactggaaactatgagg

SEQ ID NO: 55645 - DNA, 110 bp, synthetic construct
  source 1..110: mol_type = other DNA
cggatgagaaaaaaggcaaactgaaatctgcagggacaaactggaaactatgaggatgactgaaactgcgtctgtcttttaagaactctcacctcgatcttgtgcgtgac

SEQ ID NO: 55646 - DNA, 110 bp, synthetic construct
  source 1..110: mol_type = other DNA
gctactttctggagcagtcccttggtactcaatctttcagttaccatgtgtgtaagaacagctactacattctcaggaatattttaagttgattgaatttacataaacat

SEQ ID NO: 55647 - DNA, 110 bp, synthetic construct
  source 1..110: mol_type = other DNA
aataaaatgttaaaacatattaggggaatatttctaattcttttctatgtacaaggcacttatcacttgcacataattagcatcagaagacagctgagaaatgactgcaa

SEQ ID NO: 55648 - DNA, 110 bp, synthetic construct
  source 1..110: mol_type = other DNA
gcacttatcacttgcacataattagcatcagaagacagctgagaaatgactgcaaagttctgatgtgaaaacataaatcaaggatggtatacttagccaagtgtctcctt

SEQ ID NO: 55649 - DNA, 110 bp, synthetic construct
  source 1..110: mol_type = other DNA
tatcaagtatttttcaccaagctgctgaagaaaaacttctggagctaagaataaccaggtgagataatcccaaatggtggatacaacttcccctccaggctaaatgagga

SEQ ID NO: 55650 - DNA, 110 bp, synthetic construct
  source 1..110: mol_type = other DNA
agccaacttaacccagaagctaataaagcttcagcttgaagccttcttcccagaccctaagaggagcccagcaatggatttacactaagattttcataaaatttgcaaaa

SEQ ID NO: 55651 - DNA, 110 bp, synthetic construct
  source 1..110: mol_type = other DNA
cagcgtgtccctacacacagcagcagctactagagttttacttacttgtcttcgcctccagcccaactcccaggattcttttcactaaatggccccacttttctataaat

SEQ ID NO: 55652 - DNA, 110 bp, synthetic construct
  source 1..110: mol_type = other DNA
aattctcaaagacaccctgtgagctcacaacacctttgcctgtttgtaacactcaggacatggatagaaatattgacctaatgctaggcagtgatctcgcccgtataaga

SEQ ID NO: 55653 - DNA, 110 bp, synthetic construct
  source 1..110: mol_type = other DNA
atgagttttgtttaactctccctgcccctattaagacaaagttagtcatttggattttaaaggatttaagaggtgaggacttggggttgagatgaaagagaatctgatga

SEQ ID NO: 55654 - DNA, 110 bp, synthetic construct
  source 1..110: mol_type = other DNA
tttaaaggatttaagaggtgaggacttggggttgagatgaaagagaatctgatgaatcagtagtttttggtttatttttactcctgttttttaatctgctaatggagttt

SEQ ID NO: 55655 - DNA, 110 bp, synthetic construct
  source 1..110: mol_type = other DNA
tgctatagaagaaggtgcacaaaaacatgcacttacacatacttttcaaaagggtgtaaactgtattgttaggcacagccatatcttcatattttctatatcaacgattt

SEQ ID NO: 55656 - DNA, 110 bp, synthetic construct
  source 1..110: mol_type = other DNA
gtaaactgtattgttaggcacagccatatcttcatattttctatatcaacgatttatagcaggacttttgatgtccagatgctactgcaggaagatgactaaggcaacca

SEQ ID NO: 55657 - DNA, 110 bp, synthetic construct
  source 1..110: mol_type = other DNA
ctgtaagagcacacgtgaaatttttctattcctagaagggccttttacttgatttaaacatagaattcagtgactataaagcttatttatattgcatccttgacagtggt

SEQ ID NO: 55658 - DNA, 110 bp, synthetic construct
  source 1..110: mol_type = other DNA
aaacatagaattcagtgactataaagcttatttatattgcatccttgacagtggtttcattgtggtgaattcccacaagaagattgagctggcagacgtgagcgagactt

SEQ ID NO: 55659 - DNA, 110 bp, synthetic construct
  source 1..110: mol_type = other DNA
agtgggttgatttcacaaaataagccaaattgagctttgtttgtatgcctggacgggttttatgtgcttggggaaacttcagggctagtctccagttgtttttaatttta

SEQ ID NO: 55660 - DNA, 110 bp, synthetic construct
  source 1..110: mol_type = other DNA
tggggtaaatattgctgaatatttttcttatgcttcattttcaaacagctatttttttttttttaaatgtatgggcattggggaaaatacattaggagttccatggtggc

SEQ ID NO: 55661 - DNA, 110 bp, synthetic construct
  source 1..110: mol_type = other DNA
tttttttttaaatgtatgggcattggggaaaatacattaggagttccatggtggctcagcagcttaaggatctagcactgtcactgctgtggcacgggttcgatctcaga

SEQ ID NO: 55662 - DNA, 110 bp, synthetic construct
  source 1..110: mol_type = other DNA
aagagatacacattgaattcttaccaataaaatggtatgtctgagattgatttcgaaataatttcaggagtgtggagatgggtgccagtacagatgaagcaagattagcc

SEQ ID NO: 55663 - DNA, 110 bp, synthetic construct
  source 1..110: mol_type = other DNA
tgatcatttagttttagatacaatctgtgttctgtagtttcagttgggaagagaggaattcatttttattggacccctcccatgtgctaggaggcttacacatttgtttt

SEQ ID NO: 55664 - DNA, 110 bp, synthetic construct
  source 1..110: mol_type = other DNA
gggaagagaggaattcatttttattggacccctcccatgtgctaggaggcttacacatttgtttttaattcatagtttattgactaaatagatttcaagtttcatgtgtt

SEQ ID NO: 55665 - DNA, 110 bp, synthetic construct
  source 1..110: mol_type = other DNA
atgcctagcctcgctcagtgtgttaaagatcctgcattgccacaagctgctgtgtaggtaggtcacagatgcactttgggtctagtgttgccatggctgttgtttaggct

SEQ ID NO: 55666 - DNA, 110 bp, synthetic construct
  source 1..110: mol_type = other DNA
aagcaacctcaaaaataggcaaactcctccctccttctagccacaggtaaagctgaaatccctatcttctcaaaaaaggaagttatggggtcatggggagaaattctgga

SEQ ID NO: 55667 - DNA, 110 bp, synthetic construct
  source 1..110: mol_type = other DNA
aaatccctatcttctcaaaaaaggaagttatggggtcatggggagaaattctggacattgtggacagattcactcactaccaaaaaggagaggagaggaacagagttgaa

SEQ ID NO: 55668 - DNA, 110 bp, synthetic construct
  source 1..110: mol_type = other DNA
ttcaatatgattcaggtaaaggcccaggaggacatttggcaattctgtttatttggtgtgttaggacttttcagcagagactacatagagcaaccattctttggagaagt

SEQ ID NO: 55669 - DNA, 110 bp, synthetic construct
  source 1..110: mol_type = other DNA
tcacaaactagatgggatcgccttagcaatcagatacagtatctaagaaatttatattagagctcagaaacatgtcaattccttgggcagtagcaatacctcatttaaag

SEQ ID NO: 55670 - DNA, 110 bp, synthetic construct
  source 1..110: mol_type = other DNA
ctcatgtatctgcttagtggagaaatggcaacacactgaagctacccaagtcttctgtttccacccttcagaggagtggccactgtggcctatatcacatcaaggcctat

SEQ ID NO: 55671 - DNA, 110 bp, synthetic construct
  source 1..110: mol_type = other DNA
cctgctctcctaaataaactatataaatgaatgatcacgaagtttgagaactaaatgatgaacttgaaaaagttttttggagctcaatcaactaatttcccatacttcat

SEQ ID NO: 55672 - DNA, 110 bp, synthetic construct; identical to SEQ ID NO: 55671
  source 1..110: mol_type = other DNA

SEQ ID NO: 55673 - DNA, 110 bp, synthetic construct
  source 1..110: mol_type = other DNA
ggaacaaatcaggcgtgagccatgtccttgcaaagttttgcatttgagaggatattctaaaggatgtttagcttattgttggaaatgcagatctctactcaggaaagaag

SEQ ID NO: 55674 - DNA, 110 bp, synthetic construct
  source 1..110: mol_type = other DNA
cagagatagttagtccaagatggtaacacaaaggtcagccaataaaggcactactcagcttttaccagtagagaaaaatcaaggataaatgactaggaggctaagtcatt

SEQ ID NO: 55675 - DNA, 110 bp, synthetic construct
  source 1..110: mol_type = other DNA
agccacatgtggctaaaatacatacgtgaaatatagctagttcgaattgagatatgctattgaaaaataccagatttcaggagttctcattgtggctcagtggttgacaa

SEQ ID NO: 55676 - DNA, 110 bp, synthetic construct
  source 1..110: mol_type = other DNA
cttacgatcctcactctagtacctactagcaaaatgatcttaggcaatttactcgagctctcttaagcctcactttcatcttctataaaaatatatttttaaggtttctg

SEQ ID NO: 55677 - DNA, 110 bp, synthetic construct
  source 1..110: mol_type = other DNA
ctttggttagctggtctgcagttctcaaatcctgatttcccaagaaatgtatcatctactatatcattgtgcacatacactgctggtgatctttgccgataattccccct

SEQ ID NO: 55678 - DNA, 110 bp, synthetic construct
  source 1..110: mol_type = other DNA
aaaaacataatgtttatgccacaaccttttcttctgcttctaaggagggaaatcaaaaagtttttcctctttgcttttaatccttttcacatactagtgagactgagctt

SEQ ID NO: 55679 - DNA, 110 bp, synthetic construct
  source 1..110: mol_type = other DNA
atttttagtaaaacttaataataactcacatttatcaggcatctaccctgtacatgacactattcagagaacttcagatatagcgtctcaccagcttttcattacagccc

SEQ ID NO: 55680 - DNA, 110 bp, synthetic construct
  source 1..110: mol_type = other DNA
gacactattcagagaacttcagatatagcgtctcaccagcttttcattacagccccttcagatattagctctgctttaaagatgagaagaatcgggttcaacctggttaa

SEQ ID NO: 55681 - DNA, 110 bp, synthetic construct
  source 1..110: mol_type = other DNA
ttgaatgatttttctctttggaaaatagcattattttgatagagcttcatgttcaatgaaggagtttccatttgatacaaagagagaaatggagatgaagtccattgttt

SEQ ID NO: 55682 - DNA, 110 bp, synthetic construct; identical to SEQ ID NO: 55681
  source 1..110: mol_type = other DNA

SEQ ID NO: 55683 - DNA, 110 bp, synthetic construct; identical to SEQ ID NO: 55681
  source 1..110: mol_type = other DNA

SEQ ID NO: 55684 - DNA, 110 bp, synthetic construct; identical to SEQ ID NO: 55681
  source 1..110: mol_type = other DNA

SEQ ID NO: 55685 - DNA, 110 bp, synthetic construct
  source 1..110: mol_type = other DNA
gtggaacaccctctgcacctcggtccaggtaggttaatgcagagaaatagctaatggttgaaagtcacatgttccaggacagcagatgtgaggtgactgtgtccaagaaa

SEQ ID NO: 55686 - DNA, 110 bp, synthetic construct
  source 1..110: mol_type = other DNA
gcacaaaatcaatgtcactgccacatgcctaatgaatgaggtcttacctttattttaaatacttgttgttaattttatatactcatcttcccttatgaaaatgtatttgg

SEQ ID NO: 55687 - DNA, 110 bp, synthetic construct; identical to SEQ ID NO: 55686
  source 1..110: mol_type = other DNA

SEQ ID NO: 55688 - DNA, 110 bp, synthetic construct
  source 1..110: mol_type = other DNA
gattttaagatacacattttgggggacacaggcattcagtctataggagtaggaataatagcttaatgtccttgttttccctgaaatgtctactatatagtgccttcaac

SEQ ID NO: 55689 - DNA, 110 bp, synthetic construct
  source 1..110: mol_type = other DNA
tctatttccttaaaaataaacctggaaaaacaaaaggtgggcaatgacatttgatctttcagttcttcccactttaaaggtttcacccacatcaccctctgcagagtggt

SEQ ID NO: 55690 - DNA, 110 bp, synthetic construct
  source 1..110: mol_type = other DNA
gccacgacaggaactcccagattttctaaccttctaaacagaaacaagaatttaggtgtttacgtaaaatagctatttttttctactattggaaactaatttaaaaattt

SEQ ID NO: 55691 - DNA, 110 bp, synthetic construct
  source 1..110: mol_type = other DNA
attattcatttaaagtcacgtagctgggagtgccctggaggttcagtgttgtcgctgctgtggccctggttgctgctgaggtacagttaaaccctttgccctggaacttt

SEQ ID NO: 55692 - DNA, 110 bp, synthetic construct
  source 1..110: mol_type = other DNA
ccgacattcatcaaactcattgaaaatactttcagctttatcatatcaggtggaaagatgtatataaactatgaagacactataaagatttgtgtggcacagtgggttaa

SEQ ID NO: 55693 - DNA, 110 bp, synthetic construct
  source 1..110: mol_type = other DNA
acattctggaggcttatggatatacacctagctgaagtattttagttctgagaacatagttattgactacttttaaatgaatgcatctctttgtcctgcacgtttagata

SEQ ID NO: 55694 - DNA, 110 bp, synthetic construct
  source 1..110: mol_type = other DNA
ttggtcttgtttcccatctaaactcaaaacattctgagccctagtatcacatctcacatatttttctaccccttaataattcctttagccatgagctgtggtgtgggtcg

SEQ ID NO: 55695 - DNA, 110 bp, synthetic construct
  source 1..110: mol_type = other DNA
gagccctagtatcacatctcacatatttttctaccccttaataattcctttagccatgagctgtggtgtgggtcgcagacgcagcttagatcccacgttgctgtggctct

SEQ ID NO: 55696 - DNA, 110 bp, synthetic construct
  source 1..110: mol_type = other DNA
aatggtgcactatgtatgttagggcttaaaaatataaacccttgcccttggggagctcaaaatctagtgggactgagaaatagttacaaaatatgtactataatcaaagt

SEQ ID NO: 55697 - DNA, 110 bp, synthetic construct
  source 1..110: mol_type = other DNA
ctcaaaatctagtgggactgagaaatagttacaaaatatgtactataatcaaagtagaagagtgttctgagaactccaaggagtgactcatcccagagttgaatttccca

SEQ ID NO: 55698 - DNA, 110 bp, synthetic construct
  source 1..110: mol_type = other DNA
ttagttaagaaaataattgtgtcacattgtacatcctccagcagttgactcaacagctaagataataagtactgcccacccactttctgctaatcatagtcaactctatc

SEQ ID NO: 55699 - DNA, 110 bp, synthetic construct
  source 1..110: mol_type = other DNA
gctaagataataagtactgcccacccactttctgctaatcatagtcaactctatctaaattagttttaaaagattggatttgggagttcccatcgtggtgcagtggaaat

SEQ ID NO: 55700 - DNA, 110 bp, synthetic construct
  source 1..110: mol_type = other DNA
cacattgtccactttttctcatggctaccaaaaagatcccagatgactccttgtttatctgcctatcattaaataaaaaatactcttacagctgttaaaatgataggtaa

SEQ ID NO: 55701 - DNA, 110 bp, synthetic construct
  source 1..110: mol_type = other DNA
tatctgcctatcattaaataaaaaatactcttacagctgttaaaatgataggtaagactttaatcaaaactatggcaattgaagtcagctcttgcaatgatgaagagacc

SEQ ID NO: 55702 - DNA, 110 bp, synthetic construct
  source 1..110: mol_type = other DNA
attagtatttattgagtcctttcccttcaaggcaattatttttttccttaggtccacactcagggcatatagaagttcccaggctagggattagaattggttctgcagct

SEQ ID NO: 55703 - DNA, 110 bp, synthetic construct
  source 1..110: mol_type = other DNA
tccccaacatgaagtgtgccatctctttccagctgggaccctgattgacacagaaggtaaaggacgtcataggcaaattttaactttggcattctccatcctaagctcag

SEQ ID NO: 55704 - DNA, 110 bp, synthetic construct
  source 1..110: mol_type = other DNA
tagaggcaaatagaaggcagagaggacataggaagatgctgtatatatgctgtgatgcaaacctgaatttagaacaatgtgggaatgagaagattgaaggataatcaatt

SEQ ID NO: 55705 - DNA, 110 bp, synthetic construct
  source 1..110: mol_type = other DNA
tatgctgaagagtattctgattatttatttttaaaatgatatcgcatcatctttaaatttctttagctactcaaggattgctcagtttagcactgttgacattttgggct

SEQ ID NO: 55706 - DNA, 110 bp, synthetic construct
  source 1..110: mol_type = other DNA
ttgtttttccaaagccaatggagtacatgtgatttgatggctgtaaggagaaagatgcaccagtaatcattagctccttgataattagatcttctgtccagcagcctagc

SEQ ID NO: 55707 - DNA, 110 bp, synthetic construct
  source 1..110: mol_type = other DNA
cctctgaagcagcctgaaactattggtggggaaacatgctcctgcctagaagaccagtggtgatgagaagagtcatgaccccattgaagaagggtaattcacagctactc

SEQ ID NO: 55708 - DNA, 110 bp, synthetic construct
  source 1..110: mol_type = other DNA
agtggtgatgagaagagtcatgaccccattgaagaagggtaattcacagctactcttggtgattgttgagtaccattatgctgaggttgatgtacagtcatggagaacac

SEQ ID NO: 55709 - DNA, 110 bp, synthetic construct
  source 1..110: mol_type = other DNA
agtttcaactgcagagtatgtttggaggtatgaaggtaggcccatgcagtggatacttcactccagaagctaaaagaggctagttcttccctctctccccttcctctggc

SEQ ID NO: 55710 - DNA, 110 bp, synthetic construct
  source 1..110: mol_type = other DNA
ggatccatcattgtcaccactgtggcttgggttgcagctggggtgtgggtttgatccctggccctggaacttcaacaggccacgggtatatcccaaaaaaaattctcatg

SEQ ID NO: 55711 - DNA, 110 bp, synthetic construct
  source 1..110: mol_type = other DNA
ccctggccctggaacttcaacaggccacgggtatatcccaaaaaaaattctcatggaggagctcctggtggctcagtgagttaaggatcagtattgtcactcctgtggca

SEQ ID NO: 55712 - DNA, 110 bp, synthetic construct
  source 1..110: mol_type = other DNA
caggtttgattgtctgaattttcctctggaaactgactgcaatcggtatcttccggccactgtaggcccacaatcccaagaacggactcacagcggtctttggagtgctc

SEQ ID NO: 55713 - DNA, 110 bp, synthetic construct
  source 1..110: mol_type = other DNA
atgaggaccgtcacggagtctcatctagaaatacgccacggatcagccttatgtgtttaaatcagtccggggaaactttataacacaagggttggccagtggtgtgtggg

SEQ ID NO: 55714 - DNA, 110 bp, synthetic construct
  source 1..110: mol_type = other DNA
tttaaatcagtccggggaaactttataacacaagggttggccagtggtgtgtgggttaggggactgagctcaggaaagggggtgatgcccctgggaaaaggtccatttgt

SEQ ID NO: 55715 - DNA, 110 bp, synthetic construct
  source 1..110: mol_type = other DNA
acgtgcctgcccttcaggagaggatctgctgtcctgctatcatcagccagcatccctcagctccttcaagtttagcctcagctgcagagagctgcctcactcaagggcac

SEQ ID NO: 55716 - DNA, 110 bp, synthetic construct
  source 1..110: mol_type = other DNA
aacagcgggaactcccgagacagaggactttatgacacaattgtctgtgttgtcctacaggccaaagagcttgcttataagagctgagagtacatttttctccaacaaaa

SEQ ID NO: 55717 - DNA, 110 bp, synthetic construct
  source 1..110: mol_type = other DNA
cagacccaaaaggagctgaaatctgaaagcttgggctgtgggagagggtaattaggagcaaaggctttatttctgggctctctcgaatctcatcacaccttagaccattt

SEQ ID NO: 55718 - DNA, 110 bp, synthetic construct
  source 1..110: mol_type = other DNA
gctgacaacattcactgacaagttagataacagctatgagattaagagtcaacgaaagataacttgaggaactgtgttaatagcaatgccattttctgggatagggaaca

SEQ ID NO: 55719 - DNA, 110 bp, synthetic construct
  source 1..110: mol_type = other DNA
cctggtaggctgccatcagctgaggagaagctgcaaactccctgcctctggatttctggctctttgtaaaaagccactgtgctccccagtgtccttggctttgattcccc

SEQ ID NO: 55720 - DNA, 110 bp, synthetic construct
  source 1..110: mol_type = other DNA
ctggctctttgtaaaaagccactgtgctccccagtgtccttggctttgattccccagccatggtggtggccaaagccaggctggctaaagcatgcaatgcttactaaggg

SEQ ID NO: 55721 - DNA, 110 bp, synthetic construct
  source 1..110: mol_type = other DNA
aattgaagtatacttgaggtacaatattatgtaagttacaggtgtacagggagagactgggagactgggcttaggagatgcaagctgctacatttagaatggataagtaa

SEQ ID NO: 55722 - DNA, 110 bp, synthetic construct
  source 1..110: mol_type = other DNA
ctctcacatatggcatcaagatgctatctttgcttatttctgaggccttccaggacctagctagtgcccctccgacgagtagtgttcaccaattcctattactccagctt

SEQ ID NO: 55723 - DNA, 110 bp, synthetic construct
  source 1..110: mol_type = other DNA
cctagctagtgcccctccgacgagtagtgttcaccaattcctattactccagcttcttcttttcctctagtctctagtctcagagacacctggcatatttctgtctccag

SEQ ID NO: 55724 - DNA, 110 bp, synthetic construct
  source 1..110: mol_type = other DNA
taaaaatagaaccaccgtatgatttagcaatgtctgggtatacacacaatggaagtgaaatcagtagcttaaagagctatctgcaatcccatgttcactgcagcactctt

SEQ ID NO: 55725 - DNA, 110 bp, synthetic construct
  source 1..110: mol_type = other DNA
tgaaatcagtagcttaaagagctatctgcaatcccatgttcactgcagcactcttcacaatagccaaggtatggacacaacctacgcgtccatcaacagataaacagaga

SEQ ID NO: 55726 - DNA, 110 bp, synthetic construct
  source 1..110: mol_type = other DNA
tctcacaccctttaattgccaattcattttccactgtgcccgggggtcttgatacacatgaacataaggggcaaagtttgtcacttgccattcctcaccctccaaaacct

SEQ ID NO: 55727 - DNA, 110 bp, synthetic construct
  source 1..110: mol_type = other DNA
acttgttctcttttttttaccactgtatcagatggagaaaattcaaccgtctagaacggaggcctatacattttgatgctaactcaaaattttaacatgcccctcaaaga

SEQ ID NO: 55728 - DNA, 110 bp, synthetic construct
  source 1..110: mol_type = other DNA
aaatttcagctttgatacttactagctgtgtgacctcaggtaaattaatttctcagtgcctgtttcctccttataaaacaggatactactttttagagatgtttgaaaag

SEQ ID NO: 55729 - DNA, 110 bp, synthetic construct
  source 1..110: mol_type = other DNA
tttaaaaacatagcttcacccagaaggaaagtaaacattggctgtgtttctagtccattgaaaaggattgacctggctggttttagatagataaggactagttttgaact

SEQ ID NO: 55730 - DNA, 110 bp, synthetic construct
  source 1..110: mol_type = other DNA
gttgagcaggtatttctgctgttggcataatgcagatacacagtgcacagtagagaggagaggaggccaaaagacagaattcttgtcatgtttaaatttttcttgtcttg

SEQ ID NO: 55731 - DNA, 110 bp, synthetic construct
  source 1..110: mol_type = other DNA
ctgctgttggcataatgcagatacacagtgcacagtagagaggagaggaggccaaaagacagaattcttgtcatgtttaaatttttcttgtcttgacataaaatatgaat

SEQ ID NO: 55732 - DNA, 110 bp, synthetic construct; identical to SEQ ID NO: 55730
  source 1..110: mol_type = other DNA

SEQ ID NO: 55733 - DNA, 110 bp, synthetic construct
  source 1..110: mol_type = other DNA
atacacagtgcacagtagagaggagaggaggccaaaagacagaattcttgtcatgtttaaatttttcttgtcttgacataaaatatgaattttatttcacaatgtctata

SEQ ID NO: 55734 - DNA, 110 bp, synthetic construct
  source 1..110: mol_type = other DNA
cattctttttcagattcttttcccatgtagatcctcactgttttagtctttaccctgttggacagcagttgttttcctccagtttacctttaatagtaatctcaaattta

SEQ ID NO: 55735 - DNA, 110 bp, synthetic construct
  source 1..110: mol_type = other DNA
atgggaactcctggatctcaataattcgtttcttttgttgaagcatttgctcttgcagaatttagctacttagtaaggtatggggcatggaagggccccatgtgttaggt

SEQ ID NO: 55736 - DNA, 110 bp, synthetic construct
  source 1..110: mol_type = other DNA
gaatcaggtgaagaggggaaggaagaaaggacttttccagatgaagctaacatatgcaaaggcccagtggtagagaaagccaggaggccatggaggtaggatactctgga

SEQ ID NO: 55737 - DNA, 110 bp, synthetic construct
  source 1..110: mol_type = other DNA
actagaatacagaggagggggagtcgggactccggcacagaggagcatacatgtgagatgacaggagagaacgtgccatgtcattattgagtctgtgacacactgtgtcc

SEQ ID NO: 55738 - DNA, 110 bp, synthetic construct
  source 1..110: mol_type = other DNA
tgccttcagaacaatgctttcaggaatcaagttagctggggaaatgctgggtaaagcaaagctatatgctggttcaagtatatgcaaactagtaaatctaggatgcaaac

SEQ ID NO: 55739 - DNA, 110 bp, synthetic construct
  source 1..110: mol_type = other DNA
gcaaagctatatgctggttcaagtatatgcaaactagtaaatctaggatgcaaactagtatatctaggatggacaaacaaggtcctactgttggcacagggaactacatg

SEQ ID NO: 55740 - DNA, 110 bp, synthetic construct
  source 1..110: mol_type = other DNA
tgttcctctacttagactgtatttctcttgcttgtccactggggacggtgcttcaaaaattcactgctaggaggtctcactgtggctcagcagttaatgaacctgactag

SEQ ID NO: 55741 - DNA, 110 bp, synthetic construct; identical to SEQ ID NO: 55740
  source 1..110: mol_type = other DNA

SEQ ID NO: 55742 - DNA, 110 bp, synthetic construct
  source 1..110: mol_type = other DNA
agaatattcatgttaccattcagtacaaaaatgtgaaataaatgtactgccccaaatgactaatcaaggactttgtattaattgctcagttttgattgcagtatggttga

SEQ ID NO: 55743 - DNA, 110 bp, synthetic construct
  source 1..110: mol_type = other DNA
atgactaatcaaggactttgtattaattgctcagttttgattgcagtatggttgaggatgacctaatcatcactcaagcagatgtactttcaatatgagattttaaaaag

SEQ ID NO: 55744 - DNA, 110 bp, synthetic construct
  source 1..110: mol_type = other DNA
ttattaaactggtatccaaaacaaccagaatacagaaaatatagaaacttgggaaaaatttcctatataaggtgtcaaatattctattgctccactatagcccccgcaga

SEQ ID NO: 55745 - DNA, 110 bp, synthetic construct
  source 1..110: mol_type = other DNA
aaatttcctatataaggtgtcaaatattctattgctccactatagcccccgcagattctagcttctttagaaagtcctcatcttttctggggtttagagaagagatcaaa

SEQ ID NO: 55746 - DNA, 110 bp, synthetic construct
  source 1..110: mol_type = other DNA
tgtttatgaaagaaagtattgtgttgggtaaggttgacaccgattgacatgttgcttcatttaagaaggataataagcaatttattcggatcaacatcctctgtacagca

SEQ ID NO: 55747 - DNA, 110 bp, synthetic construct
  source 1..110: mol_type = other DNA
gcatgggctagattaaaatcctgcctctatcactaactagctatgtgatcttggataacttactcaacttctctgtgcctcaaatccttcatgtgtaaagtgaagataat

SEQ ID NO: 55748 - DNA, 110 bp, synthetic construct
  source 1..110: mol_type = other DNA
cgtaaagctcatgcagtatgtcttctaattttcccatttttatttcttctcttataaaaatgtactcaacaaattcatttaagaagcattgatttcaggagttcttgtgg

SEQ ID NO: 55749 - DNA, 110 bp, synthetic construct
  source 1..110: mol_type = other DNA
agagctgattccttcctttctggagctctgaggtttcttgcctttctagcttctagaggccactcgttccttgcctcatggtcgatttctccacctccaaagtctgtaat

SEQ ID NO: 55750 - DNA, 110 bp, synthetic construct
  source 1..110: mol_type = other DNA
gaggccactcgttccttgcctcatggtcgatttctccacctccaaagtctgtaatgttgagctgagtccttctcaaactaccatctctttggttctatcttctgatccac

SEQ ID NO: 55751 - DNA, 110 bp, synthetic construct
  source 1..110: mol_type = other DNA
gaaagcttggtgcagtgccttgggaagtttgtgatctggccgctgagttgatcagtcaccagagaagaacgtgagtgaagcagaattctctctcgtctactcctgggcag

SEQ ID NO: 55752 - DNA, 110 bp, synthetic construct
  source 1..110: mol_type = other DNA
gagagaagcagcctgatatactggaaatgtaccactcaacgtggactgcatttgttcccccaacgtaccttacactttttgtacatgtattttagcttcacaggaggtaa

SEQ ID NO: 55753 - DNA, 110 bp, synthetic construct
  source 1..110: mol_type = other DNA
tcccccaacgtaccttacactttttgtacatgtattttagcttcacaggaggtaagtacctttctgcattgtcagttgtcaaattccaaaatgatcttttctctctgagc

SEQ ID NO: 55754 - DNA, 110 bp, synthetic construct
  source 1..110: mol_type = other DNA
tttaagtcacccagtctatggtattttgtttcagcatcctaaactgcccgagatcatgtctgataatccactgactcccaacctggtgtctgtgggactacaggccagta

SEQ ID NO: 55755 - DNA, 110 bp, synthetic construct
  source 1..110: mol_type = other DNA
atgtctgataatccactgactcccaacctggtgtctgtgggactacaggccagtaggcagagaagacagagtcagaggcagagtccttggagttcctgttgtggctcagt

SEQ ID NO: 55756 - DNA, 110 bp, synthetic construct; identical to SEQ ID NO: 55754
  source 1..110: mol_type = other DNA

SEQ ID NO: 55757 - DNA, 110 bp, synthetic construct; identical to SEQ ID NO: 55755
  source 1..110: mol_type = other DNA

SEQ ID NO: 55758 - DNA, 110 bp, synthetic construct
  source 1..110: mol_type = other DNA
gtgactgagaagagtgagcaaagggaggatgagtaagagagaagattggatagatgggtagaggtggagtgtgcagggccccaagtccatggtaagcgcttttcttttgc

SEQ ID NO: 55759 - DNA, 110 bp, synthetic construct
  source 1..110: mol_type = other DNA
gggtagaggtggagtgtgcagggccccaagtccatggtaagcgcttttcttttgccttgaagaccttccccttccatctgtaactttcgcatgaggttggaattattgta

SEQ ID NO: 55760 - DNA, 110 bp, synthetic construct
  source 1..110: mol_type = other DNA
tatgaatgttttcatactagatatctttggtttctgctgaggtttaccttgaagcttgaccttgctggcttttttgagttcatagcccttcagctctggctggctgagcc

SEQ ID NO: 55761 - DNA, 110 bp, synthetic construct
  source 1..110: mol_type = other DNA
ttgaccttgctggcttttttgagttcatagcccttcagctctggctggctgagcctaggtgtgcacctgtcctgatgggtaccaatcctcagacgtggctgagtctttca

SEQ ID NO: 55762 - DNA, 110 bp, synthetic construct; identical to SEQ ID NO: 55760
  source 1..110: mol_type = other DNA

SEQ ID NO: 55763 - DNA, 110 bp, synthetic construct; identical to SEQ ID NO: 55761
  source 1..110: mol_type = other DNA

SEQ ID NO: 55764 - DNA, 110 bp, synthetic construct
  source 1..110: mol_type = other DNA
tgcacatggtgtctccgagctatgaaggagccccaccaatgtggacactgaacggggaatagtgtggtactctttccataagagcatattcctctaggagttcccgtcgt

SEQ ID NO: 55765 - DNA, 110 bp, synthetic construct
  source 1..110: mol_type = other DNA
ttgcatctgaagctccgtcagagaggagctcagcatggcctcaggtcttggcttgcccaccaaagcacagcccagggcatccctccatggctttaatcatctttcctgtt

SEQ ID NO: 55766 - DNA, 110 bp, synthetic construct
  source 1..110: mol_type = other DNA
ttatgaaagacattatgttataattagcataaattatgatgtacccggaggatttttggtgtctctgtaggttctgcctcctccctaaccctttcaaacactgccgttac

SEQ ID NO: 55767 - DNA, 110 bp, synthetic construct
  source 1..110: mol_type = other DNA
gataaaggggagctacaactcacaggacacaagcaaagtgtcactaaaaacaaagagcacagagccattttcctgaaactcggttttggtagaaagggcagcaaagccac

SEQ ID NO: 55768 - DNA, 110 bp, synthetic construct
  source 1..110: mol_type = other DNA
agcacagagccattttcctgaaactcggttttggtagaaagggcagcaaagccacttccgctgtgcacaaaagcttcctcctctcagctcctcctgccctgagctgcact

SEQ ID NO: 55769 - DNA, 110 bp, synthetic construct
  source 1..110: mol_type = other DNA
cagcctctgtcacacatccgccctctgcagctcagcctctcagccccatacaagccccttcctttctcctctccttgcatgaccccccatttcccgatgccctaccttca

SEQ ID NO: 55770 - DNA, 110 bp, synthetic construct
  source 1..110: mol_type = other DNA
gccagtgatcaaatctgcacctctgcagcaatgctagttctctgaggtcactgtcacaaggccctggattaagtcatctatagtctgtaatgctggtttatctgggcagc

SEQ ID NO: 55771 - DNA, 110 bp, synthetic construct
  source 1..110: mol_type = other DNA
ctaggatagtggagcagaaagcaagctacatgggtccctaatgagtgggcaggaccactatagaagccctttaaacctcctttatgtgagataaggataaacctcttgtt

SEQ ID NO: 55772 - DNA, 110 bp, synthetic construct
  source 1..110: mol_type = other DNA
ggggctactaagcaaagagagaagactgaagggccactttcccttcccattcagtctgcaggtctcagcacgaacacgctcctgccttacagagctctgtgcatctgtgc

SEQ ID NO: 55773 - DNA, 110 bp, synthetic construct
  source 1..110: mol_type = other DNA
aaacaactaagagtcttttccattatctttcttaagctccaacctccctgagcttgctatcatgagatttgtgtgtatgaagggactttattttatttatagtgtctctt

SEQ ID NO: 55774 - DNA, 110 bp, synthetic construct
  source 1..110: mol_type = other DNA
agtgaggaggcaggcatgggctaggagggaggtagaacaagacgaatgctctggattcttccaaccttgagactgtgcagaacggcaggagctagtggtctgcatctcgg

SEQ ID NO: 55775 - DNA, 110 bp, synthetic construct
  source 1..110: mol_type = other DNA
ttcttccaaccttgagactgtgcagaacggcaggagctagtggtctgcatctcggcttagaggaggaagacaggaattagggacattgatgggtagttactgacaggctg

SEQ ID NO: 55776 - DNA, 110 bp, synthetic construct
  source 1..110: mol_type = other DNA
gagccctctcggttttccagaccacaagccagaaccctcttgctcataaacactgccctatagcttgttaaactcaagttttaatgtaatatgtgcttagtgacataacc

SEQ ID NO: 55777 - DNA, 110 bp, synthetic construct
  source 1..110: mol_type = other DNA
agccaagtaagaacagattgcattatcttgggtctgaaaggagtttttcatgggctatctgtgccatcactggctataatacttatctaggcagacacagcactgagagt

SEQ ID NO: 55778 - DNA, 110 bp, synthetic construct
  source 1..110: mol_type = other DNA
tatctgtgccatcactggctataatacttatctaggcagacacagcactgagagtttattgacctcttgtgatcacccctgccttctaagggctactgtccttccaccag

SEQ ID NO: 55779 - DNA, 110 bp, synthetic construct
  source 1..110: mol_type = other DNA
cttcaaggggcagacgaacacaatcctaccatgtacccagaaggaggaaagctggaaacacttgatgaacaactaacaattatacaggctctaagcctggaatcaccaga

SEQ ID NO: 55780 - DNA, 110 bp, synthetic construct
  source 1..110: mol_type = other DNA
aaacacttgatgaacaactaacaattatacaggctctaagcctggaatcaccagacttgtggagaagaacactggcagaggtgaaggagtcctgataacatagttcgagt

SEQ ID NO: 55781 - DNA, 110 bp, synthetic construct
  source 1..110: mol_type = other DNA
accgtgtgaacctccagatactgcagatgcagccctaaaaagaaaaaaaaaaaattcttctacaacaattctaggttgaactacttgtacctaagtgttctctctcctcc

SEQ ID NO: 55782 - DNA, 110 bp, synthetic construct
  source 1..110: mol_type = other DNA
tcttctacaacaattctaggttgaactacttgtacctaagtgttctctctcctcccccaggtcctaatgatcctccattttggcttagagtattttcctttatattctga

SEQ ID NO: 55783 - DNA, 110 bp, synthetic construct
  source 1..110: mol_type = other DNA
tgttttttgaaagggcccagtaaaatctcacagtagggggcagtattgtaacaccatgctcacactttaaacacggcttgatggaaggaggaaaaagaaccattattctt

SEQ ID NO: 55784 - DNA, 110 bp, synthetic construct
  source 1..110: mol_type = other DNA
gggaggaaaagcaattcgagtcgatgggtgaattgcgtgtgaggccagaagtcggaaagacatacaaatagcatgctaaggagtttggacactatcttgaggctggggaa

SEQ ID NO: 55785 - DNA, 110 bp, synthetic construct
  source 1..110: mol_type = other DNA
tgttctccaaagcacctcttcccaaaccacagggatttctcctacactctcaactctacacacagggcctctagagtagaacattattgccttcctcttttccatgacaa

SEQ ID NO: 55786 - DNA, 110 bp, synthetic construct
  source 1..110: mol_type = other DNA
ctacacacagggcctctagagtagaacattattgccttcctcttttccatgacaatgtttccaagatcaaggtaggtcaggtaatgctgttgttaccccagaagactagt

SEQ ID NO: 55787 - DNA, 110 bp, synthetic construct
  source 1..110: mol_type = other DNA
ggcccctttgaaagggacttgtgtgacactgatttttaacttccatcaagttacggtcccttcttgtttgttactgatactaattttgaaagttaatgttttttccttgc

SEQ ID NO: 55788 - DNA, 110 bp, synthetic construct
  source 1..110: mol_type = other DNA
aaaaaagaaagaaaaaagtgtgtatttttgcttttcatagtgtatttttcaagtggttaatttgcctgtaggctctttaggctgataagttgtctcaaggattatagtct

SEQ ID NO: 55789 - DNA, 110 bp, synthetic construct
  source 1..110: mol_type = other DNA
gttaatttgcctgtaggctctttaggctgataagttgtctcaaggattatagtctgtaaagctggatcaagtgaatggactatcatggatgcacagagcacatagaaaga

SEQ ID NO: 55790 - DNA, 110 bp, synthetic construct
  source 1..110: mol_type = other DNA
gcatcgaactgtcaggtcttatttcattggcaattcttactggctccaggggatgagagtcctaccccagatctcctgagctggaattaggtatttagaacaaatgtagg

SEQ ID NO: 55791 - DNA, 110 bp, synthetic construct
  source 1..110: mol_type = other DNA
atgcttgtgacagaagtccacagcatctaagacggcagaagtcaaccgaattacccaaaagattccaaacagtagctcacatgctcagacttattcccacagaagaactc

SEQ ID NO: 55792 - DNA, 110 bp, synthetic construct
  source 1..110: mol_type = other DNA
attcaaacaaatggtaaatctgagatcatttttcccatccagagcgtaaacattggtgagctgtcattggaagccactgataaatggaaaaattaaaagtgtgacaggcc

SEQ ID NO: 55793 - DNA, 110 bp, synthetic construct
  source 1..110: mol_type = other DNA
gtacagcccaaatcacatctggtatgattactctttagccaattatgtctggggtcaaatgaatgccacagagatagctatggaagaaacaaccatttcctatagagaca

SEQ ID NO: 55794 - DNA, 110 bp, synthetic construct
  source 1..110: mol_type = other DNA
tcgtaacggaacactggcaaatgtttttagacaaagaaaaagagggagcgagttcatggctgacactagctaagacttttaacgatatagataagacatttaaagatacc

SEQ ID NO: 55795 - DNA, 110 bp, synthetic construct
  source 1..110: mol_type = other DNA
atggctgacactagctaagacttttaacgatatagataagacatttaaagataccctctaaagatacaggattatcgtttcaataaggatttcttctacctactcttcca

SEQ ID NO: 55796 - DNA, 110 bp, synthetic construct
  source 1..110: mol_type = other DNA
ggtgccagttggcatagcgactatttactgaacaaccatgagctccatgaaggtagaggtctttgtgtttacctctctgtcctcactgttaaagagtctgacacatggta

SEQ ID NO: 55797 - DNA, 110 bp, synthetic construct
  source 1..110: mol_type = other DNA
gtatccatgaggatgtgggttggatccctggcctcaatcacggggttaaggattgggtgttgccctgatcttcggggtagtctggcagctgcagctcctattcaccccta

SEQ ID NO: 55798 - DNA, 110 bp, synthetic construct
  source 1..110: mol_type = other DNA
tgggttggatccctggcctcaatcacggggttaaggattgggtgttgccctgatcttcggggtagtctggcagctgcagctcctattcacccctagcctgggaacttcca

SEQ ID NO: 55799 - DNA, 110 bp, synthetic construct
  source 1..110: mol_type = other DNA
tgactttattaatagcttaaagtcggcagccgcttttcccatattattccgcaatcggatttgggggggggggctttagtcccccgttcgttatctacaaacattacggt

SEQ ID NO: 55800 - DNA, 110 bp, synthetic construct
  source 1..110: mol_type = other DNA
ttaggacgaggtagaagcagtaacaaggtacttgactagctacacgtgtaatcgcaatgcaagccccacctttttcgtgctaagtgtgaagactgaagccggattggcca

SEQ ID NO: 55801 - DNA, 110 bp, synthetic construct
  source 1..110: mol_type = other DNA
acagaaaaaaaaaaaaaacaacaactctgttctattggaaactcagggcacctgtcctttggtgtggtcaaagacagtgtctgtcctctcacccactctaggaggcaaca

SEQ ID NO: 55802 - DNA, 110 bp, synthetic construct
  source 1..110: mol_type = other DNA
tctggttttgttaaagtggcagtgcatatagcccaggcgatgatcaccattgatctaagccagacatgtcaatctccttcctctttaccagtgattaattatgggcatct

SEQ ID NO: 55803 - DNA, 110 bp, synthetic construct
  source 1..110: mol_type = other DNA
gttcctctctctgtttcaataacatcagataattacttggatttccctttgcagatgtgcttgagtttcaagcctagcttgtgaacactgccccattgggccctgctggc

SEQ ID NO: 55804 - DNA, 110 bp, synthetic construct
  source 1..110: mol_type = other DNA
gaaagactgtcctctgtgcttgcctgaccgattggtcatgtcgagacacagccagccacgctgagcctaagctgacagatctgtaaggatgaaggaagccctttctcctt

SEQ ID NO: 55805 - DNA, 110 bp, synthetic construct
  source 1..110: mol_type = other DNA
ccacgctgagcctaagctgacagatctgtaaggatgaaggaagccctttctccttgattgctcaggggtggactgttcactctggcgttacccctcaccctcacttccct

SEQ ID NO: 55806 - DNA, 110 bp, synthetic construct
  source 1..110: mol_type = other DNA
gattgaatctgagctgcaactgcagcataagttgcaatgccagatcctttaacccacggtgcagggtcagggattgaacgcatacctccacagtgacctgagctgttgca

SEQ ID NO: 55807 - DNA, 110 bp, synthetic construct
  source 1..110: mol_type = other DNA
acggtgcagggtcagggattgaacgcatacctccacagtgacctgagctgttgcagttggattaacccactgccacagcaggaactcctggggggctcattaattaccac

SEQ ID NO: 55808 - DNA, 110 bp, synthetic construct
  source 1..110: mol_type = other DNA
atatagttattatgaagttcatttagccagatgaagactgagacctagagaagaggttgaatccatttctataggtcacttagcaactaggtggttgataaggaatcaaa

SEQ ID NO: 55809 - DNA, 110 bp, synthetic construct
  source 1..110: mol_type = other DNA
tcttttactcccttctttgttttccccaacttcacccaaactccccccgatgttggcccaagaatttctttctaggagttcccgtcatggctcagtggttaaagaacccg

SEQ ID NO: 55810 - DNA, 110 bp, synthetic construct
  source 1..110: mol_type = other DNA
ccaaactccccccgatgttggcccaagaatttctttctaggagttcccgtcatggctcagtggttaaagaacccgactaggatacatgaggattgttcagtgggttaagg

SEQ ID NO: 55811 - DNA, 110 bp, synthetic construct
  source 1..110: mol_type = other DNA
tcacaagcttgcactttctttggatttctatagtgtccatttggcgagtataaccagaagtcagaatcttgagtcctagaatcttcatcacttactactcaagacaggca

SEQ ID NO: 55812 - DNA, 110 bp, synthetic construct
  source 1..110: mol_type = other DNA
agaagtcagaatcttgagtcctagaatcttcatcacttactactcaagacaggcagctccagcacaggttatattataaagagcatctaacagcaaatcataatggcaca

SEQ ID NO: 55813 - DNA, 110 bp, synthetic construct
  source 1..110: mol_type = other DNA
tttcagggttgcccaagatagcctcattgcaccctcttggaaatacaagcacaaccaaggactttcccattggcatctggatgtgttttgcttttttttttttttttttt

SEQ ID NO: 55814 - DNA, 110 bp, synthetic construct
  source 1..110: mol_type = other DNA
tgtgccacagctgagctgtgatgtcatagttgagaatgtcagtactactggcagcttgggtgctgcaggcaaaagcctgatacaggcatttgcttgtgaagctgtgagct

SEQ ID NO: 55815 - DNA, 110 bp, synthetic construct
  source 1..110: mol_type = other DNA
ttgggtgctgcaggcaaaagcctgatacaggcatttgcttgtgaagctgtgagctcccacccctctccctgcccagtggttgacagctgtgttcctcctgaaatgttctt

SEQ ID NO: 55816 - DNA, 110 bp, synthetic construct
  source 1..110: mol_type = other DNA
taatccttgtattatcaatagtcttccttcaagtattttcctcctaactcagagggcttatctctgagtcagacctcagctgagcctggtatgttctactactttagctc

SEQ ID NO: 55817 - DNA, 110 bp, synthetic construct
  source 1..110: mol_type = other DNA
aactgatgagccattttcttgtatttgtacagaaacagcacataataagaaaaataatttcattacttaacacctccatactagaagcaaaggcaagacccaactgctag

SEQ ID NO: 55818 - DNA, 110 bp, synthetic construct
  source 1..110: mol_type = other DNA
aatttcattacttaacacctccatactagaagcaaaggcaagacccaactgctagggccttctatctatgttttgtgctctatgttagtgtttaagtcttctgtcttcat

SEQ ID NO: 55819 - DNA, 110 bp, synthetic construct
  source 1..110: mol_type = other DNA
tgccccaaatttgtaagggtaacagcttacataatcaggaagaacatgagtggatctttctttggaggtagaaaaccacacgcaccaagcaaaacatgtacaaataattc

SEQ ID NO: 55820 - DNA, 110 bp, synthetic construct
  source 1..110: mol_type = other DNA
tcgttcttgcggcagggaggccgatctgggtctgacatgggcgggttgaaggatgagtatgcccgggccaagctttggaagatatcgtcgtctgggcaggagctgtattc

SEQ ID NO: 55821 - DNA, 110 bp, synthetic construct
  source 1..110: mol_type = other DNA
aacagttcagtttgaatcaaataggaaatgcatctttaaatctctaagtttcacaatacttagtacccaacaatttggagaaacaggcaccatggtatattgcggatggg

SEQ ID NO: 55822 - DNA, 110 bp, synthetic construct
  source 1..110: mol_type = other DNA
gtccagaggggcttccttcactccttcaggcgatcgcagagcagctgggtgactagtaccctcagtagctccaaggctgaagccaaggtcagcaactctcttggtcagta

SEQ ID NO: 55823 - DNA, 110 bp, synthetic construct
  source 1..110: mol_type = other DNA
atccatacaggcactgaggttgatagatcctgtagttgagaagcttaagtgacaagtaagtcttgatgtattatgaattcagtgctgtcagaaataatctggtttaaaaa

SEQ ID NO: 55824 - DNA, 110 bp, synthetic construct
  source 1..110: mol_type = other DNA
gtaagtcttgatgtattatgaattcagtgctgtcagaaataatctggtttaaaaagtaccaggttcaaaaataccaggttcgtgagattttcaaaaagattgaaatcact

SEQ ID NO: 55825 - DNA, 110 bp, synthetic construct
  source 1..110: mol_type = other DNA
ctacggagctcctgggcacaaaaaacattttgtgttccccatcgcttgtttgtggaggtaacaaacaagttactcctcattctgtgtccccccattacttgtttgtagga

SEQ ID NO: 55826 - DNA, 110 bp, synthetic construct
  source 1..110: mol_type = other DNA
aggtaacaaacaagttactcctcattctgtgtccccccattacttgtttgtaggagtaacaaacaagttactcctcattcagcatccatgaccttccctgagctctaaag

SEQ ID NO: 55827 - DNA, 110 bp, synthetic construct
  source 1..110: mol_type = other DNA
ctttgtcaattttgtcacttagtaaactccaagggttttaggcactctgagttagaatcgaggagaacaaatatattcttttcttattataaatcacactatcatggtac

SEQ ID NO: 55828 - DNA, 110 bp, synthetic construct
  source 1..110: mol_type = other DNA
aagttcttattttcagaaagtagttcactcacatttactgtaaatttacacattctgttgaaatctggtactaaacaggaatgtaaattgggtctgaaatgagtgtttac

SEQ ID NO: 55829 - DNA, 110 bp, synthetic construct
  source 1..110: mol_type = other DNA
gatttccatcctaaactaaggtaacctcccctggggacacagtcatgctctttctgctgttctttctctgacatcatctaagggtctgcagtggttgaaaagctgctggg

SEQ ID NO: 55830 - DNA, 110 bp, synthetic construct
  source 1..110: mol_type = other DNA
gaggcaatgaactgtcagattcactgaacactgagaaagatttgggctcctgagctaagatacaaattagctaagatgcacattttgcctgcgttatctgctaggcctct

SEQ ID NO: 55831 - DNA, 110 bp, synthetic construct
  source 1..110: mol_type = other DNA
catgggcatcaactagcaccaagtaccacagtcatcacaaaagaataagatgtagcagcaaacaaaatcaagttgctgcaatgacagctctcacactgcaatgagtagat

SEQ ID NO: 55832 - DNA, 110 bp, synthetic construct
  source 1..110: mol_type = other DNA
gtattcatgttttcagatattattctctgagcaaaattgagctaaaggctctggagatttaggcccaaattttcaaaggacctccggtgggcttgtgttttgagcatttg

SEQ ID NO: 55833 - DNA, 110 bp, synthetic construct
  source 1..110: mol_type = other DNA
tgacttctgaccactcagccaacttctttctcagtcctcggcagcttcagtcccgtgcagttggttcccacatccggactcatctccatgaagcccttcccaattaggct

SEQ ID NO: 55834 - DNA, 110 bp, synthetic construct
  source 1..110: mol_type = other DNA
tcacttttatattttccttctcttaaacagtctctctctctggccacctgatatttcagagaatccattagatcacttgcctagaataatttacaaaaaaagaaatggct

SEQ ID NO: 55835 - DNA, 110 bp, synthetic construct
  source 1..110: mol_type = other DNA
gcaagcacaataagtgtgtgcatgtgtgtgtgtgtgtgtgttatagagtgcatatgtatcagatattgatatgtatgtatagcatacagtgagaaggcagttacttaaat

SEQ ID NO: 55836 - DNA, 110 bp, synthetic construct
  source 1..110: mol_type = other DNA
gtgtgcatgtgtgtgtgtgtgtgtgttatagagtgcatatgtatcagatattgatatgtatgtatagcatacagtgagaaggcagttacttaaataaaatttattaaaga

SEQ ID NO: 55837 - DNA, 110 bp, synthetic construct
  source 1..110: mol_type = other DNA
acagagtactgtcagtcatcagaagctaagatgagtccaggaaaggtcgtaccgtggaagtttcagagacacttggccttgctaacacctggattcagcactgtgagaca

SEQ ID NO: 55838 - DNA, 110 bp, synthetic construct
  source 1..110: mol_type = other DNA
aaccagggaggggatgggatcttagttctgttcctacctgtttcttcacatttttgggtgattctcttgggtcactaatctgctgaccaaaaaaaaaaaaacaaaaacaa

SEQ ID NO: 55839 - DNA, 110 bp, synthetic construct
  source 1..110: mol_type = other DNA
ggctttgtgaatgtagatttgttaactggatgaaacacaaagaatgttgtgtacggaaaattaacaaccacgttctctattcccttgcctttctgtagcatcacagagca

SEQ ID NO: 55840 - DNA, 110 bp, synthetic construct
  source 1..110: mol_type = other DNA
gcaagaatttgcaggctggcagggtgaacacagcatggaggaataaagtactatgtggcaggcctgttacctcctgacacactggcctttaaatcagaacaaagaaccca

SEQ ID NO: 55841 - DNA, 110 bp, synthetic construct
  source 1..110: mol_type = other DNA
tggcaggcctgttacctcctgacacactggcctttaaatcagaacaaagaacccacgcaatagtcccacatggctcagaaatgctggtttgaagataaacagagtttctt

SEQ ID NO: 55842 - DNA, 110 bp, synthetic construct
  source 1..110: mol_type = other DNA
ttctttctacccacctcttctccctaagattctctcctcatgactccatactttgctagaggacagttgcttattaaacaagctatatgtagcttacaccccatccttcc

SEQ ID NO: 55843 - DNA, 110 bp, synthetic construct
  source 1..110: mol_type = other DNA
atcccatttcttaataaccatctatagatgtctttatccttttgggacaggcccctttaaaatttccacctgattaggaagaagtctcggacattcccttcagctttgtg

SEQ ID NO: 55844 - DNA, 110 bp, synthetic construct
  source 1..110: mol_type = other DNA
tttaaaatttccacctgattaggaagaagtctcggacattcccttcagctttgtgtgtgtgtgtgtgtttttttttttttttaatttccctgttaatcaacctagttgac

SEQ ID NO: 55845 - DNA, 110 bp, synthetic construct
  source 1..110: mol_type = other DNA
aaaacagccacactgttctggttcaggcttgccatctctacgctttgctggagatgctggaagtgaaaagtttttgtcaaatgtatgctaatgagctccaaggtctagat

SEQ ID NO: 55846 - DNA, 110 bp, synthetic construct
  source 1..110: mol_type = other DNA
gctggaagtgaaaagtttttgtcaaatgtatgctaatgagctccaaggtctagatgtgtgaagtttcatctctaaaattatagcattttggaatctaaatatagccactc

SEQ ID NO: 55847 - DNA, 110 bp, synthetic construct
  source 1..110: mol_type = other DNA
aatttgcccaggtaggcagccagagattttcctaaaatgctccctctacacctgatttaaatttcatctctctcagggaaacctcaccacttgaatgtctccgcttttcc

SEQ ID NO: 55848 - DNA, 110 bp, synthetic construct
  source 1..110: mol_type = other DNA
gcctggataacaggagaaactagagcccgaaggcagaggaaatgtcaaggagtgggaggccacctggctgttgacttgctgccagggtggggaccatggtgagtcagctc

SEQ ID NO: 55849 - DNA, 110 bp, synthetic construct
  source 1..110: mol_type = other DNA
attgtttgacatatgatcagagggtaatgtaaaaagcattgtaaaaatggtacatgtaagctgcttggggagcaccaagtgagaagccctatactacctggtgggggaaa

SEQ ID NO: 55850 - DNA, 110 bp, synthetic construct
  source 1..110: mol_type = other DNA
ggggtcattttccttcgctctttagtttattataaaaacaattcacatgcgtgaatttccacattggcctttgcactcataatttgtcagaagaaacattatttaaactg

SEQ ID NO: 55851 - DNA, 110 bp, synthetic construct
  source 1..110: mol_type = other DNA
tagcttggccaactccaccccttggccctttctgccttgggtttccataactgcccttaaagaagttataataggtagctggtgctcaaaaaagtacttcaattaggaac

SEQ ID NO: 55852 - DNA, 110 bp, synthetic construct
  source 1..110: mol_type = other DNA
tcatcttacatacctgaagttggttctaacgtgtgagacattgtgcactactgcgactcaaagagccttatgaaaggaaaaacaatctccataggcatcactcgaatgtc

SEQ ID NO: 55853 - DNA, 110 bp, synthetic construct
  source 1..110: mol_type = other DNA
atcccttatcctctagattttctgctgttctaacatgacagttactctttctcctatgtcatgatgtctagaatggattgctataaatgacatgaggttctgcaatattt

SEQ ID NO: 55854 - DNA, 110 bp, synthetic construct
  source 1..110: mol_type = other DNA
atgtcatgatgtctagaatggattgctataaatgacatgaggttctgcaatatttacagttcagggtgcaggtcctcactctggacctttggtgtctgggaatgtaacct

SEQ ID NO: 55855 - DNA, 110 bp, synthetic construct
  source 1..110: mol_type = other DNA
gcatccctatctctgctcatattccacaggcttgaactcaactgtgttggcacgtgtgtaagggaagttggaaaatgcagtccagctgtcctccctggaagaggaggaca

SEQ ID NO: 55856 - DNA, 110 bp, synthetic construct
  source 1..110: mol_type = other DNA
ccattgggctgaattcaaatcctgtttgttccttgtactaacagtgtaacttttggcaggttacccgaactccttaatccttagcttcttcatgtataaaatggaggaag

SEQ ID NO: 55857 - DNA, 110 bp, synthetic construct
  source 1..110: mol_type = other DNA
catggcagtctccttgctggcctttcttcccaacccctcaataaaaatatttcgctaaggtaaattcttcacactgtctctggggaactgtgattatttcccctctctca

SEQ ID NO: 55858 - DNA, 110 bp, synthetic construct
  source 1..110: mol_type = other DNA
tctgaggtctgcacttgaggattatggttcaaattagtagagtgcagggagttcccattgtagctctgcaggttaagaacccgaccaggatccatgaggatgcagattca

SEQ ID NO: 55859 - DNA, 110 bp, synthetic construct
  source 1..110: mol_type = other DNA
ttttttttcagttattgtatgataattttacaccttcaaattaaattcccagggtacacacaaacagatttttaaagccgcagtttccaatctttatggagccatgcatc

SEQ ID NO: 55860 - DNA, 110 bp, synthetic construct
  source 1..110: mol_type = other DNA
caccaaagtgatctcatggacataatgaggttaagaagctaaaattaggctttggggcttagggaaaaaataattcatttatgaagagaattgctaattacatggaagtg

SEQ ID NO: 55861 - DNA, 110 bp, synthetic construct
  source 1..110: mol_type = other DNA
ctcagagcaaagccaatttgacatctaaccttttatatatatactattgaatattcatggcaaagctcttgcagctgtgcacaaataagtaaggtttttttttgtttgtt

SEQ ID NO: 55862 - DNA, 110 bp, synthetic construct
  source 1..110: mol_type = other DNA
ccctggagacttatcttctgaggttgcattagagctgaatttgagagaggggatgaaaaacaattttcatattggctttctgaccaggattcccactggtcctctgatga

SEQ ID NO: 55863 - DNA, 110 bp, synthetic construct
  source 1..110: mol_type = other DNA
aaaaacaattttcatattggctttctgaccaggattcccactggtcctctgatgagagatgtgtcagttccggagcagatcctggtcagaaagcctgcaaggatgccaaa

SEQ ID NO: 55864 - DNA, 110 bp, synthetic construct
  source 1..110: mol_type = other DNA
ccatctaaagttgggggatttgttttaagtactcatttcatgctgttggtcccatagggtcagggccatttttggtgttcagttttaccatgggggaggggtcatgtgga

SEQ ID NO: 55865 - DNA, 110 bp, synthetic construct
  source 1..110: mol_type = other DNA
ctgatagtcaacgggcagggaagaaatctgtacaattccatgtacctagaacatcaaagatgatttgtgtagtgtgacaggatgtcagcatacttgccaccagcgtcagt

SEQ ID NO: 55866 - DNA, 110 bp, synthetic construct
  source 1..110: mol_type = other DNA
aaagatgatttgtgtagtgtgacaggatgtcagcatacttgccaccagcgtcagttttccctcacagttgacagttaacacaaaataaaaggcttttgtgaagcagagac

SEQ ID NO: 55867 - DNA, 110 bp, synthetic construct
  source 1..110: mol_type = other DNA
gtctttttattacactataggtgctgagtgttaacccctgaaatttgacaggcctgattagtctgacttaagcttctgagtaaatccagagaaaaccataactcaaaaag

SEQ ID NO: 55868 - DNA, 110 bp, synthetic construct
  source 1..110: mol_type = other DNA
ccctgaaatttgacaggcctgattagtctgacttaagcttctgagtaaatccagagaaaaccataactcaaaaagatacatgtactctaatgttcattgcaacactattt

SEQ ID NO: 55869 - DNA, 110 bp, synthetic construct
  source 1..110: mol_type = other DNA
ttaggattgatgcttggcaacttggctcacttaaattatctctaatgcatgacaaaagtagtaataaaatatctatgcagaggaggctcatgatcatagctacatctcag

SEQ ID NO: 55870 - DNA, 110 bp, synthetic construct
  source 1..110: mol_type = other DNA
aagtagtaataaaatatctatgcagaggaggctcatgatcatagctacatctcagaaagatcatgcctttgctggacatatactatctgcataatatttctctaccatgc

SEQ ID NO: 55871 - DNA, 110 bp, synthetic construct
  source 1..110: mol_type = other DNA
agtaatttctcgtaccttcttttttttcctcagttaatttggctagaagttttcattttattgatcttttaaaagtgctggagttcccattctggctcatcaagataagg

SEQ ID NO: 55872 - DNA, 110 bp, synthetic construct
  source 1..110: mol_type = other DNA
tgccaagggtatgccaggaaaccccttaaaatcaaagacaaatatctatcttgcagaaccttgtattatcacagataaggaagcatctcatttgtacatgtggttactgc

SEQ ID NO: 55873 - DNA, 110 bp, synthetic construct
  source 1..110: mol_type = other DNA
aggaagatcttaagtttattatctgtccatatgagctatatatttttgatagaaaactgtgcattaaaatattctacaccagaaattgcagagtttaaggcagctagggt

SEQ ID NO: 55874 - DNA, 110 bp, synthetic construct
  source 1..110: mol_type = other DNA
ggcagcagcagggctgacaagctcccaggggtgcaaaagcaacaacacgtggtgtttgatcacaatgccctcctctgtggtgttgttgtggtgactgggccacaaaaggt

SEQ ID NO: 55875 - DNA, 110 bp, synthetic construct
  source 1..110: mol_type = other DNA
ttgatcacaatgccctcctctgtggtgttgttgtggtgactgggccacaaaaggtacctattcagggacccttagtagtggtgggacacacccacctctagagtcagaga

SEQ ID NO: 55876 - DNA, 110 bp, synthetic construct
  source 1..110: mol_type = other DNA
atttaatatattagtcaattttgccacatggtgcacaaatctaatgtcattgtgaagccttttaatgttttaagtagaatgactccttcataatgtaatacttgtggctg

SEQ ID NO: 55877 - DNA, 110 bp, synthetic construct
  source 1..110: mol_type = other DNA
agccttttaatgttttaagtagaatgactccttcataatgtaatacttgtggctgtattaatactttcagatagttcatgcaggaatgtgctgactctcctcttgcctga

SEQ ID NO: 55878 - DNA, 110 bp, synthetic construct
  source 1..110: mol_type = other DNA
gacttcctttttatctgtcacatttaatctaaatttgtcaatcagccttttagaatattatgtgaatccaccattgctaaagggtatgcctttcccagtagatgatcagg

SEQ ID NO: 55879 - DNA, 110 bp, synthetic construct
  source 1..110: mol_type = other DNA
tattatgtgaatccaccattgctaaagggtatgcctttcccagtagatgatcaggccagattcctgtgatctcagaattttttgctcagcattccctgctccatctattc

SEQ ID NO: 55880 - DNA, 110 bp, synthetic construct
  source 1..110: mol_type = other DNA
aattattgaggaaaagcaaaaggaagcactcaagagaagagtgtgggcatcctcgggtgtgaggggtgctgcagaattactgatccctttaatcttatttttggctcttt

SEQ ID NO: 55881 - DNA, 110 bp, synthetic construct
  source 1..110: mol_type = other DNA
acttgagtcagcctccaatgagaaaaatggtcagtttgagaagtgtgctttacttttcataaaattaactttgcactttgcagttgatgttgactctactctgccattgt

SEQ ID NO: 55882 - DNA, 110 bp, synthetic construct
  source 1..110: mol_type = other DNA
caatgagaaaaatggtcagtttgagaagtgtgctttacttttcataaaattaactttgcactttgcagttgatgttgactctactctgccattgttataaataaagcttt

SEQ ID NO: 55883 - DNA, 110 bp, synthetic construct
  source 1..110: mol_type = other DNA
gcctcaagaaataccagtaaaatgtcatccttacttgcctaatttaatcataaaataaattaggcaaatttattgtaataggagaggagataggactattccactgaagc

SEQ ID NO: 55884 - DNA, 110 bp, synthetic construct; identical to SEQ ID NO: 55883
  source 1..110: mol_type = other DNA

SEQ ID NO: 55885 - DNA, 110 bp, synthetic construct
  source 1..110: mol_type = other DNA
ttgcacagagcatctatgaaatactggcagaagaccttaactgccactcctccaaaaagggcaagaaacgcaccacataactggatggaacaaaaagaaaaaagagagag

SEQ ID NO: 55886 - DNA, 110 bp, synthetic construct
  source 1..110: mol_type = other DNA
acaacactccccacccccagctccagcaatgggggctagttatcatgatactgcactggtctagggttggaaaggaagatgggagccaatgcactgcagaattcagtgta

SEQ ID NO: 55887 - DNA, 110 bp, synthetic construct
  source 1..110: mol_type = other DNA
ctggtctagggttggaaaggaagatgggagccaatgcactgcagaattcagtgtagaaataaacagccccaaatggggattcctgaaaatgtattgggcctagcacattt

SEQ ID NO: 55888 - DNA, 110 bp, synthetic construct
  source 1..110: mol_type = other DNA
gttgaattttagtgttgtaaaaattaatgaacacaaacctcagttaaatagagtaaggggacaagaaggaggagctctcatgtcctgtgagaagagtggagctagactgg

SEQ ID NO: 55889 - DNA, 110 bp, synthetic construct
  source 1..110: mol_type = other DNA
aggggacaagaaggaggagctctcatgtcctgtgagaagagtggagctagactggaaggatacagactcctcttcttccttggccaggtgaaaaagacctctcttcttta

SEQ ID NO: 55890 - DNA, 110 bp, synthetic construct
  source 1..110: mol_type = other DNA
atttacctttacatgctctaacacttgccattaggtggtcatatgacgtggttttgatcagtaatgagtaagagaaatataagagaatcaaaagttttgaccagtaaaat

SEQ ID NO: 55891 - DNA, 110 bp, synthetic construct
  source 1..110: mol_type = other DNA
gatcagtaatgagtaagagaaatataagagaatcaaaagttttgaccagtaaaatagacccctgttctttacccttcattcttgagactcagagagagtctgaggtgtaa

SEQ ID NO: 55892 - DNA, 110 bp, synthetic construct
  source 1..110: mol_type = other DNA
tcttgccaactggtcctcactgatttttacaacactaagcattttacaaaactaaaacatttagtacaagatcaaacaaatataggagttccatgtagtgatattaatag

SEQ ID NO: 55893 - DNA, 110 bp, synthetic construct
  source 1..110: mol_type = other DNA
aacatttagtacaagatcaaacaaatataggagttccatgtagtgatattaatagcaaaataatgaaagaaccatagagccaggacagggctgaggcacagttgaaggag

SEQ ID NO: 55894 - DNA, 110 bp, synthetic construct
  source 1..110: mol_type = other DNA
agaaccgcagagactataaagtacacataagcaccatagctcttaaaatgtgagaaaacttggctgcataaagggctgtttgtaggttgggattcttaaaaatccaacag

SEQ ID NO: 55895 - DNA, 110 bp, synthetic construct
  source 1..110: mol_type = other DNA
gtcttaacataagccacaataatcatttttatgataaagcccaccaattaattttcatttctgtatattataatatacctatgtggcctgtaaaagtctcctggtaccaa

SEQ ID NO: 55896 - DNA, 110 bp, synthetic construct
  source 1..110: mol_type = other DNA
catttctgtatattataatatacctatgtggcctgtaaaagtctcctggtaccaacattttattgcttcaggtcaagtgtggaaacctcacttccattaggtccttttac

SEQ ID NO: 55897 - DNA, 110 bp, synthetic construct
  source 1..110: mol_type = other DNA
aagataaaggaacactcaaagataagaggcaactgatattgcaaggcatttagctgagctctccaggctgtagagggaacagtgttacaagcgccaaggatctggctgac

SEQ ID NO: 55898 - DNA, 110 bp, synthetic construct
  source 1..110: mol_type = other DNA
gtatcaagtgtacgcggcttccatacaatattttcaccttctttctcactgtccaaacatcttcatcctttattatgatcaagtacacagtttgagctgataattacctc

SEQ ID NO: 55899 - DNA, 110 bp, synthetic construct
  source 1..110: mol_type = other DNA
accttctttctcactgtccaaacatcttcatcctttattatgatcaagtacacagtttgagctgataattacctcatatttcaacatgaaaatagaaactgtcagaaaaa

SEQ ID NO: 55900 - DNA, 110 bp, synthetic construct
  source 1..110: mol_type = other DNA
agaaagagaaagacaaatactatatggtccattaaatgacattacatgttagctgaggaacctctcattaacaattttccttcgatgcaaagtcctatggttcatgacag

SEQ ID NO: 55901 - DNA, 110 bp, synthetic construct
  source 1..110: mol_type = other DNA
aggaacctctcattaacaattttccttcgatgcaaagtcctatggttcatgacagaagtcagttttccctacagataaaacatacaagaaaatgtatttcctccaatctt

SEQ ID NO: 55902 - DNA, 110 bp, synthetic construct
  source 1..110: mol_type = other DNA
taatcacacgttcactgtccagtggatctctaaacacagtgtggaccttctactctagatcatttccagaattctgaggaatttttgtttcatcattctatttcaatata

SEQ ID NO: 55903 - DNA, 110 bp, synthetic construct
  source 1..110: mol_type = other DNA
aagaactagcataacaggacacttgttgaaatttgagaaattctgccaaagatgattgagaaactctgccaaagatgatggtatcttatgcttttctatcaaattaaata

SEQ ID NO: 55904 - DNA, 110 bp, synthetic construct
  source 1..110: mol_type = other DNA
ccaaagatgattgagaaactctgccaaagatgatggtatcttatgcttttctatcaaattaaatactaccttagtagttcccgtcatgactcagtggttaacgaatccga

SEQ ID NO: 55905 - DNA, 110 bp, synthetic construct
  source 1..110: mol_type = other DNA
cagagtgactaactccccctgctttgcctgagaatttcctgatttaatatctacagtttaatcctttgttctagaaattccaagaagatttgggtggttagttaccataa

SEQ ID NO: 55906 - DNA, 110 bp, synthetic construct
  source 1..110: mol_type = other DNA
ctataacagtaagtattttatctcacactggaaatcatgtgggtcggcctatgcgactgcttctgaagcagctgcacttcattgggtgtccattctgtggcccaggaagt

SEQ ID NO: 55907 - DNA, 110 bp, synthetic construct
  source 1..110: mol_type = other DNA
tgattggttggcagtgatgtcattgggagtcaacatcatcaaccttctggttccaagcagcctggggtctgtgagcttgtgggcctcatacagtcaacttcttacacctg

SEQ ID NO: 55908 - DNA, 110 bp, synthetic construct
  source 1..110: mol_type = other DNA
ttcacagctctagtaagttacattgttagaaccttggagggttagtttctgcatctgtaaagtagaaaatgaaaatgaccatatagattaagtgaaaattaaagaagatt

SEQ ID NO: 55909 - DNA, 110 bp, synthetic construct
  source 1..110: mol_type = other DNA
ggagtgctctgttttttattttgttaaattaaatttgctctattttattttgttaaaagcccaatgagagcattggccttcactgcagccgacagcttgatgctttaaaa

SEQ ID NO: 55910 - DNA, 110 bp, synthetic construct
  source 1..110: mol_type = other DNA
aaagcccaatgagagcattggccttcactgcagccgacagcttgatgctttaaaattttttaagtttgttaaggtgggattgaaagtatgcttcattccggcattaatac

SEQ ID NO: 55911 - DNA, 110 bp, synthetic construct
  source 1..110: mol_type = other DNA
taatttgttcttataaaaccaatgaggtgaagttcagttacccacgttgacaatggaacaggaaggtttaatattcccttttaaacgtcccctttctactgaagattata

SEQ ID NO: 55912 - DNA, 110 bp, synthetic construct
  source 1..110: mol_type = other DNA
atgcctttacttcctactacctcagctgccattaaaatgaacaggaaaacagtcgttattaattcttacaagactcagtaaagcaaaggcagagacataaggaagacaat

SEQ ID NO: 55913 - DNA, 110 bp, synthetic construct
  source 1..110: mol_type = other DNA
ataatcgtccatacctactcctaccatagtacttattcacaccaaactgacatcgcctccctagttaaaacagtctgcagcttcctcttgtattagaataacactcactc

SEQ ID NO: 55914 - DNA, 110 bp, synthetic construct
  source 1..110: mol_type = other DNA
aaatcagtgatgttcctctaagtgctgtggttgggggccctgggccatgaacagaaatactctcaggaagcacagtagccctttataactggtctcacagaagacactca

SEQ ID NO: 55915 - DNA, 110 bp, synthetic construct
  source 1..110: mol_type = other DNA
aatactctcaggaagcacagtagccctttataactggtctcacagaagacactcacaatgttaatatctttccactggaaattcttaaggaatctgtaacaccctcccca

SEQ ID NO: 55916 - DNA, 110 bp, synthetic construct
  source 1..110: mol_type = other DNA
accacctttgctgtccctgtctcctgcctgtactgctgcccatactggaaatgaatgattacacctatgagctgggaggtaaattcaataaaaggagacccagtcaatca

SEQ ID NO: 55917 - DNA, 110 bp, synthetic construct
  source 1..110: mol_type = other DNA
tgagcttcacgggcccaaactaaaggaaagctcacaggtactggctgtagaagaaccagggagcagctctactacttgtaacgtaatacagtgactgatacattgatagg

SEQ ID NO: 55918 - DNA, 110 bp, synthetic construct
  source 1..110: mol_type = other DNA
ccagggagcagctctactacttgtaacgtaatacagtgactgatacattgataggtaggctagtccttgttcatcatgttaggctggccctgttagtgaagaccccaaag

SEQ ID NO: 55919 - DNA, 110 bp, synthetic construct
  source 1..110: mol_type = other DNA
cttagtatggtctctctttctaaatgggtactgtattagacaaagactattttttttcacatatatgtcattccctaaagatagtaaatgtccctcaagggtgatttcta

SEQ ID NO: 55920 - DNA, 110 bp, synthetic construct; identical to SEQ ID NO: 55919
  source 1..110: mol_type = other DNA

SEQ ID NO: 55921 - DNA, 110 bp, synthetic construct
  source 1..110: mol_type = other DNA
gcagagttaaccaaatttatactggaaatgtgatttttcttcttgttctgaaaatcactacttggtaacgttttacgataggcaacgtgctagagacctgaggcaaatgc

SEQ ID NO: 55922 - DNA, 110 bp, synthetic construct
  source 1..110: mol_type = other DNA
cactacttggtaacgttttacgataggcaacgtgctagagacctgaggcaaatgcgttattgtaaaccagtaccgcccaatgctttatagcagtaagtgtaggtactatt

SEQ ID NO: 55923 - DNA, 110 bp, synthetic construct
  source 1..110: mol_type = other DNA
gagccacagcaaagacaatgtcagatccttaatctgctaggccaccagggaactccctaaagcaaatattcatgttttcaaataattcatcttggaacctgtaaacaatc

SEQ ID NO: 55924 - DNA, 110 bp, synthetic construct
  source 1..110: mol_type = other DNA
cagggaactccctaaagcaaatattcatgttttcaaataattcatcttggaacctgtaaacaatctattgaaagagcattttctttcacagtaggaattgcttatatgtg

SEQ ID NO: 55925 - DNA, 110 bp, synthetic construct
  source 1..110: mol_type = other DNA
aaatgagtatcttactaacctttcttgaagaggaggaaacagatacttgaagggcttacaaaaaatgtccagtcaactaaaccagtaacaagtcaaatttaagattttat

SEQ ID NO: 55926 - DNA, 110 bp, synthetic construct
  source 1..110: mol_type = other DNA
ttacaaaaaatgtccagtcaactaaaccagtaacaagtcaaatttaagattttattctatcggcctaaatacataaagcctgcccttatgacagcatgatagcaatttct

SEQ ID NO: 55927 - DNA, 110 bp, synthetic construct
  source 1..110: mol_type = other DNA
aagcaccatcttctaaggaaaagttggggcaatgggcaaatttttagagagaagcaaaactggctgttgaatttgaattttattaaattattaccaaaagcaaactgaga

SEQ ID NO: 55928 - DNA, 110 bp, synthetic construct
  source 1..110: mol_type = other DNA
agagagaagcaaaactggctgttgaatttgaattttattaaattattaccaaaagcaaactgagatgacattaaaggaattattctaaacttgaagaggtaatggggtga

SEQ ID NO: 55929 - DNA, 110 bp, synthetic construct
  source 1..110: mol_type = other DNA
tggttacacacagttgatccaggcatcttgcttagagaatagaactatatactattggctaaataacagctcagtcatattagtggtttagaatataaggaatgtgatta

SEQ ID NO: 55930 - DNA, 110 bp, synthetic construct
  source 1..110: mol_type = other DNA
agaaggacaaggaggagttggaggataccataaaagaggagaatgagtgagagatggtctaggctgaggcagcaggccctggttagaggcagggcaagagcaggtatgtg

SEQ ID NO: 55931 - DNA, 110 bp, synthetic construct
  source 1..110: mol_type = other DNA
ggtctaggctgaggcagcaggccctggttagaggcagggcaagagcaggtatgtgaacacctccacctggcatcctccaggtgcaggtcatctggcaagaatgaggaaga

SEQ ID NO: 55932 - DNA, 110 bp, synthetic construct
  source 1..110: mol_type = other DNA
ccccaggaccaccacagccttcatcctacaatgtcaggaaccagctcacccttaagcagggtggcaccagtcccaggacaccctgggctccaaccttaccctcctgcagg

SEQ ID NO: 55933 - DNA, 110 bp, synthetic construct
  source 1..110: mol_type = other DNA
tagcacttgtttgcaaatttgagtccatttgagaattcagttgctatagaaaaccatataggcccaaagaaaccttgactgagctatggagtttttccaccaccaccagg

SEQ ID NO: 55934 - DNA, 110 bp, synthetic construct
  source 1..110: mol_type = other DNA
atataggcccaaagaaaccttgactgagctatggagtttttccaccaccaccaggatcagaagcactgccctctggacattccagtggcaccagcagattctagcattgc

SEQ ID NO: 55935 - DNA, 110 bp, synthetic construct
  source 1..110: mol_type = other DNA
tgacacattgggcagactggtttgcaggtatgcttgggaaaagggggcacagtaacacctgtgcttgagtgccttgttagtttctttgcattgtactagaatccattttc

SEQ ID NO: 55936 - DNA, 110 bp, synthetic construct
  source 1..110: mol_type = other DNA
tgtttgtactctgggatacaaacgtgtttattaagaccataagacagaagtttatttttttttcacatttatgaaatgatttaagatgacctggtcactgctccctttaa

SEQ ID NO: 55937 - DNA, 110 bp, synthetic construct
  source 1..110: mol_type = other DNA
atacaaacgtgtttattaagaccataagacagaagtttatttttttttcacatttatgaaatgatttaagatgacctggtcactgctccctttaagatctaccatgatca

SEQ ID NO: 55938 - DNA, 110 bp, synthetic construct
  source 1..110: mol_type = other DNA
ctcgatgtgtgagggtgagttcttcccacatgtggaccatcactcccctctcctcacagggagcctgttctgtcacaaggattgatgtgcatcatgctatttcatggcaa

SEQ ID NO: 55939 - DNA, 110 bp, synthetic construct
  source 1..110: mol_type = other DNA
accatcactcccctctcctcacagggagcctgttctgtcacaaggattgatgtgcatcatgctatttcatggcaaacagttggcctagacctttcagagggaaggcaact

SEQ ID NO: 55940 - DNA, 110 bp, synthetic construct
  source 1..110: mol_type = other DNA
ttcagtgaagatatcgagagcgtcacactaggatgagggcaaatgggtctggttttatggtttgggctctgaaataaggtgtctcaaatgggcattaggcacgagtcatt

SEQ ID NO: 55941 - DNA, 110 bp, synthetic construct
  source 1..110: mol_type = other DNA
gagagcgtcacactaggatgagggcaaatgggtctggttttatggtttgggctctgaaataaggtgtctcaaatgggcattaggcacgagtcatttttcacatgtaggaa

SEQ ID NO: 55942 - DNA, 110 bp, synthetic construct
  source 1..110: mol_type = other DNA
cactgtgtagtcacacaggaccctgctgtcagaagggccccgggcttggtttaatctctgctgttactgtcttaattatacttttgaccttgtgttgggtaaatgaagtc

SEQ ID NO: 55943 - DNA, 110 bp, synthetic construct
  source 1..110: mol_type = other DNA
attcctgtttctcaagccatgggatattgtgttaggaggcttgaaaacaacccttctgtgcatctccatcaggcccttgggcacactgtcagtgagcaggaatattttga

SEQ ID NO: 55944 - DNA, 110 bp, synthetic construct
  source 1..110: mol_type = other DNA
ctgtgcatctccatcaggcccttgggcacactgtcagtgagcaggaatattttgaaaggaatccttttttctgagcagcaagtctcaacactgaacttaaaatagtcagt

SEQ ID NO: 55945 - DNA, 110 bp, synthetic construct
  source 1..110: mol_type = other DNA
tgcagaagaaatcttttgaccttgttacagctaaggcctcactaaaaacatagtctatggatctgaagctttgactccatgtgggagcttcttagaaatgcagactatca

SEQ ID NO: 55946 - DNA, 110 bp, synthetic construct
  source 1..110: mol_type = other DNA
caacagcccatctgcctttcattactataaccttatcatctggatcatgttacataagcatgcaatacatacacctctgagactggctttttgagcttgcacataagatc

SEQ ID NO: 55947 - DNA, 110 bp, synthetic construct
  source 1..110: mol_type = other DNA
aagcatgcaatacatacacctctgagactggctttttgagcttgcacataagatccaccctttcccttgcttttttgtttttgtcttttttaaggccgtatccagcgcat

SEQ ID NO: 55948 - DNA, 110 bp, synthetic construct
  source 1..110: mol_type = other DNA
agcactgagatctagcattatttaaacagagacacacgtttccttagtattcactctcaatgtacatattttgggctttgaaatttatctaggcttcccaaaaagatttc

SEQ ID NO: 55949 - DNA, 110 bp, synthetic construct
  source 1..110: mol_type = other DNA
agagagacttgctgcctaggactgcgcgagctttcaccaaacccggccacagcgctctcttagatccgtgtgcctgctcagaccccttctctaggagacaactcagatcc

SEQ ID NO: 55950 - DNA, 110 bp, synthetic construct
  source 1..110: mol_type = other DNA
gtgccaattttgattttgtattggaaccttataaacttgaaaatacaagattgagtaaggaaaataatgagctatacctggaattaatgaaactgagagaacagtcaggc

SEQ ID NO: 55951 - DNA, 110 bp, synthetic construct
  source 1..110: mol_type = other DNA
gattttacccttggcgttgagtactctgaccaggttagtaattcacaggtatgaatgcaccaaaggacagtgtgcagtgtgcgtaaaggacattttcatcattttgacat

SEQ ID NO: 55952 - DNA, 110 bp, synthetic construct
  source 1..110: mol_type = other DNA
tgcaccaaaggacagtgtgcagtgtgcgtaaaggacattttcatcattttgacattatcctcaaaggaagaacatatttgttattgttgacatttgatttcagttattct

SEQ ID NO: 55953 - DNA, 110 bp, synthetic construct
  source 1..110: mol_type = other DNA
ttttccagcactacctacctcctttgccctggagctaattgccaggtctgacccgctggtatcagatctgggggagttgggtgtcaggacacaagtgtgaggccgtgcca

SEQ ID NO: 55954 - DNA, 110 bp, synthetic construct
  source 1..110: mol_type = other DNA
ccttcttgctcccagcccacacctgtggcctcatgagttccctgtgagcagccgactggggaagaccaagctcaggcctggtttatggatggtttttcctgatattcagg

SEQ ID NO: 55955 - DNA, 110 bp, synthetic construct
  source 1..110: mol_type = other DNA
gataatgtgattgctaaggctttttgcagccttgtgggattaaatattagctacattaaagataaacatcagatcatgtattctctttttttcctttgaagcatggaaag

SEQ ID NO: 55956 - DNA, 110 bp, synthetic construct
  source 1..110: mol_type = other DNA
ttaaagataaacatcagatcatgtattctctttttttcctttgaagcatggaaagtccctgaaacccatgtacctggatctacaacagtagctctcagccagaggcactt

SEQ ID NO: 55957 - DNA, 110 bp, synthetic construct
  source 1..110: mol_type = other DNA
tgtgtttcccttgagtgtgtgccctgcctcaaaggaggggcctgccaaagtacatgaggcctgtgcactcacagtggacctacatgccatctgtgtaggcatcacagctc

SEQ ID NO: 55958 - DNA, 110 bp, synthetic construct
  source 1..110: mol_type = other DNA
gaggcctgtgcactcacagtggacctacatgccatctgtgtaggcatcacagctctgctcaggtgcagcccagggttgcataccttcccctgttgtgctcatgccagatc

SEQ ID NO: 55959 - DNA, 110 bp, synthetic construct
  source 1..110: mol_type = other DNA
cactgtaaaaaataaaaactgtaatgcccctcaaagcttaacaatgggagctcgcatagaaattaaagatgagtttattaaatggcaaatcatacctggaaaactactga

SEQ ID NO: 55960 - DNA, 110 bp, synthetic construct
  source 1..110: mol_type = other DNA
atgaagagatgcctttctctttgaacttcagttctcacttgttgcgatttcttcggcgtgccccccctccactgcccccagagtggataagatggtaagctactgtttgt

SEQ ID NO: 55961 - DNA, 110 bp, synthetic construct
  source 1..110: mol_type = other DNA
gcgtgccccccctccactgcccccagagtggataagatggtaagctactgtttgtgggagcttcccagaaatgctaaattcattatggtgcatctgtgcaagaccctcag

SEQ ID NO: 55962 - DNA, 110 bp, synthetic construct; identical to SEQ ID NO: 55960
  source 1..110: mol_type = other DNA

SEQ ID NO: 55963 - DNA, 110 bp, synthetic construct; identical to SEQ ID NO: 55961
  source 1..110: mol_type = other DNA

SEQ ID NO: 55964 - DNA, 110 bp, synthetic construct
  source 1..110: mol_type = other DNA
ttgatgctcttgaaaattctcctggtgctacgtatgttcggaagaaaggcggaaaagttgctggagataatcaaccaaaggaacacgggtaatgcttttcattgtaacat

SEQ ID NO: 55965 - DNA, 110 bp, synthetic construct
  source 1..110: mol_type = other DNA
agttgctggagataatcaaccaaaggaacacgggtaatgcttttcattgtaacattcactaatgctgaatgtgaattttaagtcataaagggaataaaaagttcactctc

SEQ ID NO: 55966 - DNA, 110 bp, synthetic construct
  source 1..110: mol_type = other DNA
gcagtcttttagtcaggctgtggtctccgggtctctggtcttgccttgcttacaagtcgctttcccattgaacaggcatgaggcagacgccctggacgcccactcttgtt

SEQ ID NO: 55967 - DNA, 110 bp, synthetic construct
  source 1..110: mol_type = other DNA
gtcgctttcccattgaacaggcatgaggcagacgccctggacgcccactcttgttcgtattcattttatgctgcccaggctggtgctcggtgtcagcttaggactgtttc

SEQ ID NO: 55968 - DNA, 110 bp, synthetic construct
  source 1..110: mol_type = other DNA
gtgtgtatgtattattagcattccaaaaagtttcttctgggaagaatcagcagaatgaaataaccctgaggcacttttttttaaggcaggtattcctgaatgcccacagg

SEQ ID NO: 55969 - DNA, 110 bp, synthetic construct
  source 1..110: mol_type = other DNA
tgaaataaccctgaggcacttttttttaaggcaggtattcctgaatgcccacagggccatattaactcttagtgcaaggttaagagggaaattagctctgggattttgac

SEQ ID NO: 55970 - DNA, 110 bp, synthetic construct
  source 1..110: mol_type = other DNA
gattgaatctgaactgcagctgcagcctaaactgcagctgtgtcaaagctggatcctttaacccactgagctggactggggaccaaacccttgccttgcctccatagtga

SEQ ID NO: 55971 - DNA, 110 bp, synthetic construct
  source 1..110: mol_type = other DNA
ctttaacccactgagctggactggggaccaaacccttgccttgcctccatagtgacctgagctgctatagttggattctttttttttgctatttcttgggccgcttccgc

SEQ ID NO: 55972 - DNA, 110 bp, synthetic construct; identical to SEQ ID NO: 55970
  source 1..110: mol_type = other DNA

SEQ ID NO: 55973 - DNA, 110 bp, synthetic construct
  source 1..110: mol_type = other DNA
cctaaactgcagctgtgtcaaagctggatcctttaacccactgagctggactggggaccaaacccttgccttgcctccatagtgacctgagctgctatagttggattctt

SEQ ID NO: 55974 - DNA, 110 bp, synthetic construct
  source 1..110: mol_type = other DNA
tattaattgataaattactaagtgtttctaatagtgatgctgtctgaagcttatagtgtagagaaaggttatatacaaaaatataggcaagggagttcctgttgtggctc

SEQ ID NO: 55975 - DNA, 110 bp, synthetic construct
  source 1..110: mol_type = other DNA
tcttctttaactggtacagatggagttggaagatggcatatgttgtgtaactattgccgtccacagatgaggcagagctacacatctgacagagtgggatagggggccgg

SEQ ID NO: 55976 - DNA, 110 bp, synthetic construct
  source 1..110: mol_type = other DNA
cctcggcttttgtccttggatgacaccgccacactgcccttggcagtagctgccccacactgttccatttgaccatttcaggcccactgtgcctggcttccctgggctta

SEQ ID NO: 55977 - DNA, 110 bp, synthetic construct
  source 1..110: mol_type = other DNA
cacactgttccatttgaccatttcaggcccactgtgcctggcttccctgggcttagagctagaggaatatctgtgtgcccggctcagtgaagaagctgtttggacacaga

SEQ ID NO: 55978 - DNA, 110 bp, synthetic construct
  source 1..110: mol_type = other DNA
aacctcctagtgagaatattgaccaaagaaatacttccactaggtttattactcagagggtagactctgagagaaaaaggaagcttctgaaaaacaggagctcgaggcgc

SEQ ID NO: 55979 - DNA, 110 bp, synthetic construct
  source 1..110: mol_type = other DNA
gagggtagactctgagagaaaaaggaagcttctgaaaaacaggagctcgaggcgcaaagcctcggatgatttaaggatgctgtacatatgctcaggaatgttcagatcat

SEQ ID NO: 55980 - DNA, 110 bp, synthetic construct
  source 1..110: mol_type = other DNA
aagccaatgtcttcgggagaaactgatattctgccatttgttcacatgccaacggctaagctgctccctcaagaaatgccacctggtctcaaaaaaaatgtagtgggaag

SEQ ID NO: 55981 - DNA, 110 bp, synthetic construct
  source 1..110: mol_type = other DNA
gtgaatggtatttggaccattctgagaagtacatgattttgtcaagcctgcaaacaggctatcctggagttttccaagctccccaagcacacagccgtacagctcactgg

SEQ ID NO: 55982 - DNA, 110 bp, synthetic construct
  source 1..110: mol_type = other DNA
aatgaaatcttagtttgtaaagctctgggattcatttgaatcaattgttgtcatggtttcaagagtctgaaaacaacatttcaaggtaacccaaagatctagatattgcc

SEQ ID NO: 55983 - DNA, 110 bp, synthetic construct
  source 1..110: mol_type = other DNA
gctggcaatgattgtagcagaacttgccaagcacacattgaccctctgagtcatattggttcctatggagattaacaccatcagtggtgagaacaacagcccagaagtgc

SEQ ID NO: 55984 - DNA, 110 bp, synthetic construct
  source 1..110: mol_type = other DNA
ggtacaatacagtgcatagaacaggagagagaaagagcaagtgggagtttaaggatattgactacagctaaggtggtgacgatccagtaaaggtctaaatgtcaaaagtg

SEQ ID NO: 55985 - DNA, 110 bp, synthetic construct
  source 1..110: mol_type = other DNA
gaacagcatggagtacttacttctgctcaaggctaagtgacaggaagcttcacaagaatcacttgcagtctgaggacacttatgttaaggaacctgacagattctcatag

SEQ ID NO: 55986 - DNA, 110 bp, synthetic construct
  source 1..110: mol_type = other DNA
gagccacagcaggaactccctgaggaatataattgatttgagcctagacttgcgttcaatgggaccaggaataaaatatctccagcttccttaccactatcaggataaat

SEQ ID NO: 55987 - DNA, 110 bp, synthetic construct
  source 1..110: mol_type = other DNA
taataacctctaacatgtaacacttgctcagctctattccatcaagatcctcaaatatcatgcagtcatgcattggtctcatgtgatcaaaaaacttattttttttcccg

SEQ ID NO: 55988 - DNA, 110 bp, synthetic construct
  source 1..110: mol_type = other DNA
gctcagctctattccatcaagatcctcaaatatcatgcagtcatgcattggtctcatgtgatcaaaaaacttattttttttcccgctttttattatctttaaagaaataa

SEQ ID NO: 55989 - DNA, 110 bp, synthetic construct
  source 1..110: mol_type = other DNA
cactgagccatgacaggaactcttgtatggaatttctgaatgctattattttcctgatttcaaaatccaatttttagatgctaaaatatagatatgcaatcaatttcagt

SEQ ID NO: 55990 - DNA, 110 bp, synthetic construct; identical to SEQ ID NO: 55989
  source 1..110: mol_type = other DNA

SEQ ID NO: 55991 - DNA, 110 bp, synthetic construct
  source 1..110: mol_type = other DNA
atcagtgtccccatgctggcagcgtttgctacaccagttgtcaggtgtttcagattttgttctcagatggtatagaagggatgggcagaggtgaccacatattttccacg

SEQ ID NO: 55992 - DNA, 110 bp, synthetic construct
  source 1..110: mol_type = other DNA
aatgtttgctcatttatacctggatggtaatttaagacttcacaagtctaaacagattacaactatagttggaaattattcagtgctaaatagcctagaaacccaatctg

SEQ ID NO: 55993 - DNA, 110 bp, synthetic construct
  source 1..110: mol_type = other DNA
attacaactatagttggaaattattcagtgctaaatagcctagaaacccaatctgaagaatctcacctgaaaacagtaacgccaatccagatcatttcattagaacaatg

SEQ ID NO: 55994 - DNA, 110 bp, synthetic construct
  source 1..110: mol_type = other DNA
tgttattcacttcaaatatctactccatgttgtcatcatttttacagtggaaaccaagatgttgaaaccaccacaattcaaagtaaaattttgataaaagttatgcagct

SEQ ID NO: 55995 - DNA, 110 bp, synthetic construct
  source 1..110: mol_type = other DNA
aagatgttgaaaccaccacaattcaaagtaaaattttgataaaagttatgcagctgagaatgttacggaaataattcaatgtccaacctttaagtggcacacttaacttt

SEQ ID NO: 55996 - DNA, 110 bp, synthetic construct
  source 1..110: mol_type = other DNA
ataaaagttttcagagaaaggaaaatgaacaaaaatgcccatctagtggaatagtggaggaattctgggatcaaggcctacagctgtttaattaaatggaattttcttca

SEQ ID NO: 55997 - DNA, 110 bp, synthetic construct
  source 1..110: mol_type = other DNA
ggaggaattctgggatcaaggcctacagctgtttaattaaatggaattttcttcaactgagaaaatgcatgtccaaaacttctctagaaagtcactgcagtaagaagttt

SEQ ID NO: 55998 - DNA, 110 bp, synthetic construct
  source 1..110: mol_type = other DNA
agcaaaattttctatactgcaaaatgtcatgttcagtttcattgagttttcaagcttatatctcttcatttttatcagagtcaacaatattttcctgatggtttgtgtcc

SEQ ID NO: 55999 - DNA, 110 bp, synthetic construct
  source 1..110: mol_type = other DNA
ttatatctcttcatttttatcagagtcaacaatattttcctgatggtttgtgtcccatatctactgaggcaaaactcagtgaaaaaaaaagatgcaatattgcttttctc

SEQ ID NO: 56000 - DNA, 110 bp, synthetic construct; identical to SEQ ID NO: 55998
  source 1..110: mol_type = other DNA

SEQ ID NO: 56001 - DNA, 110 bp, synthetic construct; identical to SEQ ID NO: 55999
  source 1..110: mol_type = other DNA

SEQ ID NO: 56002 - DNA, 110 bp, synthetic construct
  source 1..110: mol_type = other DNA
tgtgcactttctttgcctcattataaagacaccagtcattggacttaaggccatgtttaaatccaggatgatttcatcttgagagcctaaaccaactacatctgcaaaag

SEQ ID NO: 56003 - DNA, 110 bp, synthetic construct
  source 1..110: mol_type = other DNA
gatatgcaaataattatacagcttacattgagtacacattcctagaaatgcacttcttatcaaaactgatacacaaagaaatggcaaacccaaaactgataacaagaaaa

SEQ ID NO: 56004 - DNA, 110 bp, synthetic construct; identical to SEQ ID NO: 56003
  source 1..110: mol_type = other DNA

SEQ ID NO: 56005 - DNA, 110 bp, synthetic construct
  source 1..110: mol_type = other DNA
gaagtcattcttgaagtttctgcaatgtgtaattttctgcccctgacataatcatacctgatttttgtaagaaacctactacaacatttcaaaatgcaaatcttgggtgt

SEQ ID NO: 56006 - DNA, 110 bp, synthetic construct
  source 1..110: mol_type = other DNA
acctgatttttgtaagaaacctactacaacatttcaaaatgcaaatcttgggtgtgaaaatgtttcttccatcaacagctgagaaaacaataggttaatttcacaatggg

SEQ ID NO: 56007 - DNA, 110 bp, synthetic construct
  source 1..110: mol_type = other DNA
ttaatctgttctccacaagcataatttcactgaagcctcagtataaactaatctggaatgtgtggtaacttggtgacagctacagcacagcttgattcagcaatcattct

SEQ ID NO: 56008 - DNA, 110 bp, synthetic construct
  source 1..110: mol_type = other DNA
gaatgtgtggtaacttggtgacagctacagcacagcttgattcagcaatcattctgatgtattttgcaattattttcaatcatagatattcaacagttctcgtacatgcc

SEQ ID NO: 56009 - DNA, 110 bp, synthetic construct
  source 1..110: mol_type = other DNA
agatggcagagttcaaccagcttcctcgaacattagcatctttcctaatgtagttccgtttgtcaaaacaatactattaaataaacgacagatattattcatatttctct

SEQ ID NO: 56010 - DNA, 110 bp, synthetic construct; identical to SEQ ID NO: 56009
  source 1..110: mol_type = other DNA

SEQ ID NO: 56011 - DNA, 110 bp, synthetic construct
  source 1..110: mol_type = other DNA
agcaccacaaaatatagtagcaaatcactattttgggtaaaaaacaaaattggaaactcttactcattcttctctttcttacttaagaacttaggctagctaaaggattt

SEQ ID NO: 56012 - DNA, 110 bp, synthetic construct
  source 1..110: mol_type = other DNA
actcttactcattcttctctttcttacttaagaacttaggctagctaaaggatttagcatttgtaagagtggaaatggagtttcttttatagttttttctccccctaaaa

SEQ ID NO: 56013 - DNA, 110 bp, synthetic construct
  source 1..110: mol_type = other DNA
actcttctgtcccagaggaaatgcatttgtggctcaaacagccaaacaatggaaagaattaaagaaacataaatactagtgaggggagtgtccgctgatgtcttaaaatg

SEQ ID NO: 56014 - DNA, 110 bp, synthetic construct
  source 1..110: mol_type = other DNA
gaattaaagaaacataaatactagtgaggggagtgtccgctgatgtcttaaaatggaataccactattgcctctgcaccctaatcaccagcaggcccttcatatattccc

SEQ ID NO: 56015 - DNA, 110 bp, synthetic construct
  source 1..110: mol_type = other DNA
gagtgctgatgacaaactattagaaactctagggaaattatcccaggtggtggttctggcaagagaaaggaacattgctcctcaatagtggattgattctgaatgaatgc

SEQ ID NO: 56016 - DNA, 110 bp, synthetic construct
  source 1..110: mol_type = other DNA
aaggagaccttatcttaaaccctatttttcagttcctttctttgctttgaagtaatgctaaaatgagggccaagtagtgtaacctttatgatattgatctccctcagata

SEQ ID NO: 56017 - DNA, 110 bp, synthetic construct
  source 1..110: mol_type = other DNA
taaatgtcagcaattaaaattataatcaaatggccacacttgcagcatatgggaatatccgggctagggactgaatctgagatatagatatagctgtgaactacaccaca

SEQ ID NO: 56018 - DNA, 110 bp, synthetic construct
  source 1..110: mol_type = other DNA
acacttgcagcatatgggaatatccgggctagggactgaatctgagatatagatatagctgtgaactacaccacagctgtggcaatgccagatctttaacccattgtgct

SEQ ID NO: 56019 - DNA, 110 bp, synthetic construct
  source 1..110: mol_type = other DNA
agaaaggggcacagcactagggattttattatcctcttccatgtcatttattgggtgatttcagcagttgctcagtttccagggagggccagtacaaaacaactgttaac

SEQ ID NO: 56020 - DNA, 110 bp, synthetic construct
  source 1..110: mol_type = other DNA
tgatttcagcagttgctcagtttccagggagggccagtacaaaacaactgttaacgttcaggctgcaggaaagctgctatcccacttgagacttaagattcaatagattc

SEQ ID NO: 56021 - DNA, 110 bp, synthetic construct
  source 1..110: mol_type = other DNA
ccctttttatctagagacagaatcaaaactcttcagaagttgttatctctgtggcaagcttcaataaatagttctgaaaataaatatggaagcctcttcaagctaaattt

SEQ ID NO: 56022 - DNA, 110 bp, synthetic construct
  source 1..110: mol_type = other DNA
tttcccactataagtttctttttctgcatcattcatagtggctctgattctcttgtaaactttgatacatctgtaacactgacagggattatacaagtcctcttcaagat

SEQ ID NO: 56023 - DNA, 110 bp, synthetic construct
  source 1..110: mol_type = other DNA
aaaacttttaacattattctctcatcacgtgacagacaaaccaaggctatgaatgtaagaatgtggaaaatctgaacactatcaaataccatgattatgttaatacagaa

SEQ ID NO: 56024 - DNA, 110 bp, synthetic construct; identical to SEQ ID NO: 56023
  source 1..110: mol_type = other DNA

SEQ ID NO: 56025 - DNA, 110 bp, synthetic construct
  source 1..110: mol_type = other DNA
agagaagaaaatttctgtttccttccagaatcccatggtaaaaaatgtcgcagaaggtactcctccaaatgttttcatcatcgtcactggtgctggagactagttgggtt

SEQ ID NO: 56026 - DNA, 110 bp, synthetic construct
  source 1..110: mol_type = other DNA
ggtactcctccaaatgttttcatcatcgtcactggtgctggagactagttgggttttaaggaacaagaagcaaaagtaatccacaaacaaccattaaaaagaaaggggaa

SEQ ID NO: 56027 - DNA, 110 bp, synthetic construct
  source 1..110: mol_type = other DNA
acacagctgatctagaggtgtcccctgagtagaagccacaaaaattggggtgcgaaattacaagctcctttaaggtggagaagagacttttggagaatattttagtagcc

SEQ ID NO: 56028 - DNA, 110 bp, synthetic construct
  source 1..110: mol_type = other DNA
ttattcttgattgctccggagggtatgctttattttggaggtggttatgaagataatacgaggaatatttaacagctatagatgtggatttatagagtgagcaaccacag

SEQ ID NO: 56029 - DNA, 110 bp, synthetic construct
  source 1..110: mol_type = other DNA
ataccaaaatttatcatatttctctacctcttaaaagactcatttacagctcttgttctttcacggattcttattaacatttttaattgcagctgctttaaaggaccttc

SEQ ID NO: 56030 - DNA, 110 bp, synthetic construct; identical to SEQ ID NO: 56029
  source 1..110: mol_type = other DNA

SEQ ID NO: 56031 - DNA, 110 bp, synthetic construct
  source 1..110: mol_type = other DNA
gggtctgaaggaaggatcacatcccttcaccaaggtaagctagattggatcagtgggaaacttctctgtaagcaaaagcagcagtgcacccagcaccactgtaaatcccc

SEQ ID NO: 56032 - DNA, 110 bp, synthetic construct
  source 1..110: mol_type = other DNA
gcctgctcttatgtgtgtgtctatctttaccttcccaaacagggattataaatgcaggctgttgttaactgacaagaagcttgtgcttatttataacacagttgtaaaaa

SEQ ID NO: 56033 - DNA, 110 bp, synthetic construct
  source 1..110: mol_type = other DNA
cagatagattacacagcacttgccaagccctcctctgccctgagtaaagaatgaacagaaagggagtcagtgtgtgataggtggtcaatacaagtgtccttgaaagtccc

SEQ ID NO: 56034 - DNA, 110 bp, synthetic construct
  source 1..110: mol_type = other DNA
cagaaagggagtcagtgtgtgataggtggtcaatacaagtgtccttgaaagtcccatttaaatataggatttgtggaattcccactgtggctcagcagcaatgaacccga

SEQ ID NO: 56035 - DNA, 110 bp, synthetic construct
  source 1..110: mol_type = other DNA
gctgagcactgcccctcattatgaactgctcagatatggcctttggaatgagatgcacttgaatacaatcccaattccacaactttctagctccatcatctctatttgtg

SEQ ID NO: 56036 - DNA, 110 bp, synthetic construct
  source 1..110: mol_type = other DNA
tctcttgtaatttagcattgaatattatctaaatgctggttattcctgaattttatctatagcccaaacatttgcacctactcgatgcttacatatacagcaactttttc

SEQ ID NO: 56037 - DNA, 110 bp, synthetic construct
  source 1..110: mol_type = other DNA
tctatagcccaaacatttgcacctactcgatgcttacatatacagcaactttttcaaacatcactgctaggaattttattatataccttcaacttagtaggtcccaaact

SEQ ID NO: 56038 - DNA, 110 bp, synthetic construct
  source 1..110: mol_type = other DNA
ctggacagaagggcactccttgttcgtagtagcaggtcagctctatgtatttcgtaatcagtttaagggtggaatgccattccatttatgaaggcctatttgcatcacat

SEQ ID NO: 56039 - DNA, 110 bp, synthetic construct
  source 1..110: mol_type = other DNA
tcattttaaaataaaatctcacattgttttggtatctatcattcagccatagaattctcaaggagagtgtgcgtctctctctcaatgagagtgttattagtttcctgcac

SEQ ID NO: 56040 - DNA, 110 bp, synthetic construct; identical to SEQ ID NO: 56039
  source 1..110: mol_type = other DNA

SEQ ID NO: 56041 - DNA, 110 bp, synthetic construct
  source 1..110: mol_type = other DNA
cctccatatgccttgggtgtggccctatcaaagacaaaacaaaaaatagtctttcacttttttaataaatcagaaaaagcaattgaaatattcaaatccattcacatttt

SEQ ID NO: 56042 - DNA, 110 bp, synthetic construct; identical to SEQ ID NO: 56041
  source 1..110: mol_type = other DNA

SEQ ID NO: 56043 - DNA, 110 bp, synthetic construct
  source 1..110: mol_type = other DNA
tgtaatgactatagtagtttccaagggcttcagtaacaaaacaccatagactatgtggcttaaacaacagatacttaatttcccatcactttggaagctagtagtccaag

SEQ ID NO: 56044 - DNA, 110 bp, synthetic construct
  source 1..110: mol_type = other DNA
ccaccacctccattagtaatcacatccttgacagagacaaagttcatctaatatgagttctcattgcagatgaagtattgatgttttcgtgttactttggtcagtcaata

SEQ ID NO: 56045 - DNA, 110 bp, synthetic construct
  source 1..110: mol_type = other DNA
agttctcattgcagatgaagtattgatgttttcgtgttactttggtcagtcaataaggttaaaaggataaagtttatttagttttcaacattgccttcgtgaagtcaaat

SEQ ID NO: 56046 - DNA, 110 bp, synthetic construct
  source 1..110: mol_type = other DNA
gttcctggatctagagttggtctgctggtagatgggccagttcctgaccttaccggatgagcgttattggatatcccacacctgatgtcagcccattggtgggtggggtt

SEQ ID NO: 56047 - DNA, 110 bp, synthetic construct
  source 1..110: mol_type = other DNA
gctacaatgttgggaaaatgggtcagagtagattttattttaaacctgggagattgggtaaattaaagggattgatgatagacacataaaagaagagaactagggattga

SEQ ID NO: 56048 - DNA, 110 bp, synthetic construct
  source 1..110: mol_type = other DNA
tacaaatgcctagcagtcctctaagttatggtgacaaactggttaaaagacaaataactttcattctagttgtaaaaggcaggcaattcatcaataaacaaaccaacagg

SEQ ID NO: 56049 - DNA, 110 bp, synthetic construct
  source 1..110: mol_type = other DNA
aactttcattctagttgtaaaaggcaggcaattcatcaataaacaaaccaacagggaggatcagattatgagagctggtaaagaacccaatatggtggtatgacacagaa

SEQ ID NO: 56050 - DNA, 110 bp, synthetic construct
  source 1..110: mol_type = other DNA
aggaataaagatgaataatataccgttgttatattgcattcgtattctatctgtggaagtattttaaacctcatgtatagtatttctggactgttatcttcttgtcagtg

SEQ ID NO: 56051 - DNA, 110 bp, synthetic construct
  source 1..110: mol_type = other DNA
tcacttttgttcctaattgttatcttgattggtatttttacttgcaggcaactcttccactatagctagttttacaggtagagatttataagaaaaaaatgagtttcctg

SEQ ID NO: 56052 - DNA, 110 bp, synthetic construct
  source 1..110: mol_type = other DNA
caaccagttctctggaggggccactgtggagtctggtccatgtttagtagtagaagagaggtttagctgatatttggttaggttagcaaacactttgtccagattggtca

SEQ ID NO: 56053 - DNA, 110 bp, synthetic construct
  source 1..110: mol_type = other DNA
tcactggggagtagtcagagctgtggcaaagatggcacatcccatctaaaggaggcaacatcttctctcttccagctgatggcctggcctgtgcaaatgcaggcctggga

SEQ ID NO: 56054 - DNA, 110 bp, synthetic construct
  source 1..110: mol_type = other DNA
caacatcttctctcttccagctgatggcctggcctgtgcaaatgcaggcctgggatgtttaagagaagacagaaatctagatttgtatatgatatcacttgacttttgaa

SEQ ID NO: 56055 - DNA, 110 bp, synthetic construct
  source 1..110: mol_type = other DNA
acgtgccagagaacagggaggggaagcaggatcactcaccactctcctaggagcacatatttcattcaagagagctctagccccatgacctcatctaatactaatacctc

SEQ ID NO: 56056 - DNA, 110 bp, synthetic construct
  source 1..110: mol_type = other DNA
caaaggatggggcttaggtcaactacttactcttcaacagttccagaaaaagatgtttgcattatattgcaattctttctaagtttgggagcctatcaaaatttaataaa

SEQ ID NO: 56057 - DNA, 110 bp, synthetic construct; identical to SEQ ID NO: 56056
  source 1..110: mol_type = other DNA

SEQ ID NO: 56058 - DNA, 110 bp, synthetic construct
  source 1..110: mol_type = other DNA
gaatttttctttatctgaatgtaccatagttttttatctattcctgtatgaaggacattttaattgcttcccagtttgggcaattatgagtaaagaggctataaacatcc

SEQ ID NO: 56059 - DNA, 110 bp, synthetic construct; identical to SEQ ID NO: 56058
  source 1..110: mol_type = other DNA

SEQ ID NO: 56060 - DNA, 110 bp, synthetic construct
  source 1..110: mol_type = other DNA
atagtgccatgaccactgactcactttacatgtcttataaaggtagccagaggtgctgcatccacccaggccttcctactgtgtaagcagcttcattttaaggggcagaa

SEQ ID NO: 56061 - DNA, 110 bp, synthetic construct
  source 1..110: mol_type = other DNA
ctgcatccacccaggccttcctactgtgtaagcagcttcattttaaggggcagaaatggcatctactagtgtctctgtctctggggagcatttgtcccaggtcactgcac

SEQ ID NO: 56062 - DNA, 110 bp, synthetic construct
  source 1..110: mol_type = other DNA
acctacagcacatgatccaggacagcccagctaatgtttttaagctcagcacattgataccctaagcaaaatttatgttccattagaaatgaagatgggggaatggaaat

SEQ ID NO: 56063 - DNA, 110 bp, synthetic construct
  source 1..110: mol_type = other DNA
tcaaaaccaacatcttcaaataataataactttgttggcccatgaatctgtagatatgtaattttgtctggacatggctgatgctccttgtagtttgggctctggcacct

SEQ ID NO: 56064 - DNA, 110 bp, synthetic construct
  source 1..110: mol_type = other DNA
aatcacattctaccaggcagcagctttggtaaaccacacattatcagaaacgtaaacgagtgtgtagatgatataaaactgacttggagaaaagacttgtggctgcctga

SEQ ID NO: 56065 - DNA, 110 bp, synthetic construct
  source 1..110: mol_type = other DNA
tctccaaaagagattagacgcaaagctaacaggcaataaccaggcacagatgtgcatttaccacctgagtccacttacataacatctataaaacatgcataactaaagta

SEQ ID NO: 56066 - DNA, 110 bp, synthetic construct
  source 1..110: mol_type = other DNA
atttaccacctgagtccacttacataacatctataaaacatgcataactaaagtatgatgctagatgtctgaaaattagttaactttatggggtttaatgattgttagag

SEQ ID NO: 56067 - DNA, 110 bp, synthetic construct
  source 1..110: mol_type = other DNA
ggaggttctgtgatttgctgtatttagtgcaaattacaagctgatctttggggataaggggtgtatcacagacctcttttacctatatcacttcctctggactcatcttt

SEQ ID NO: 56068 - DNA, 110 bp, synthetic construct
  source 1..110: mol_type = other DNA
actaagaggtaattttgtttcttgttgagtgtccagtgttcttactctatattcaactgtaggattaagcttttaaagcaccctcggaaatatatatatatgtaactata

SEQ ID NO: 56069 - DNA, 110 bp, synthetic construct
  source 1..110: mol_type = other DNA
gggaacttgtctgctggtggatgaggcaatgctcctactcatttgcttggtctgatttatcccagtaatggtgcctatatttggcagggcaggggcacagctatggtcta

SEQ ID NO: 56070 - DNA, 110 bp, synthetic construct
  source 1..110: mol_type = other DNA
tgcaaaactaaccctatcattctaagcaaatagatctgtctatgaactagatgagtcaatactggccgaattcacaatggtccgagaagttagaagctctaaacaccttc

SEQ ID NO: 56071 - DNA, 110 bp, synthetic construct
  source 1..110: mol_type = other DNA
tcaatactggccgaattcacaatggtccgagaagttagaagctctaaacaccttcagggaaagccctgtccttccaactttctcaacaaggatgcactataaatctactt

SEQ ID NO: 56072 - DNA, 110 bp, synthetic construct
  source 1..110: mol_type = other DNA
gagcaggttagaggttgggggctggggtggggagagatccagattcaattttggacaggttcagcttgagatatctattagatattcaaaatagatgttatgggagttcc

SEQ ID NO: 56073 - DNA, 110 bp, synthetic construct
  source 1..110: mol_type = other DNA
caggttcagcttgagatatctattagatattcaaaatagatgttatgggagttccctttgtggctcaccaataaagaacctggctgcatccatgaggacatgggtttgat

SEQ ID NO: 56074 - DNA, 110 bp, synthetic construct
  source 1..110: mol_type = other DNA
accttttttattgattacctggcagttagctttggctgccataacaaaacacccaaatcaagatttaacccaagattccagggttagtaatttgacctctgctcagttaa

SEQ ID NO: 56075 - DNA, 110 bp, synthetic construct
  source 1..110: mol_type = other DNA
taaggatgtttggaacttccagaaatcaatggttacatgtaccactataatttcaaactgaaattacaattgaaattaaaactcactctttcttttctgtgttgtgcctc

SEQ ID NO: 56076 - DNA, 110 bp, synthetic construct
  source 1..110: mol_type = other DNA
cacaggatgctgagtgactctgggctcagcttttcatttcattcggaccctcagggcatttggctcctttaaaagtattttctccttaggattccttgagatctcttggc

SEQ ID NO: 56077 - DNA, 110 bp, synthetic construct
  source 1..110: mol_type = other DNA
tgtacattcgccaacgcgcgtctctctccaattgggaaaaagtgtacactccctggctgccagagctggcctctggcaaatattagttttaccattataagtagcagaag

SEQ ID NO: 56078 - DNA, 110 bp, synthetic construct
  source 1..110: mol_type = other DNA
gctgccagagctggcctctggcaaatattagttttaccattataagtagcagaaggtaagctatgtatggcttttgccctgtggaaagcacttactaatatgttacttag

SEQ ID NO: 56079 - DNA, 110 bp, synthetic construct; identical to SEQ ID NO: 56078
  source 1..110: mol_type = other DNA

SEQ ID NO: 56080 - DNA, 110 bp, synthetic construct; identical to SEQ ID NO: 56078
  source 1..110: mol_type = other DNA

SEQ ID NO: 56081 - DNA, 110 bp, synthetic construct
  source 1..110: mol_type = other DNA
tttttcagctgtccatgaaacaaatggtaagccatttgtttctttgggaattactttgccagaatcattaaactcatgttgaggacagcagagtaagaattccataaaaa

SEQ ID NO: 56082 - DNA, 110 bp, synthetic construct
  source 1..110: mol_type = other DNA
ttgccagaatcattaaactcatgttgaggacagcagagtaagaattccataaaaaatttgagccatgtttgaagacattaatatttgaccgggtaaaataccttaaaagg

SEQ ID NO: 56083 - DNA, 110 bp, synthetic construct
  source 1..110: mol_type = other DNA
gtgagatttgaatactggctctattacaatgtgatcttgagcgaattgtatctgagctgtatctgtgactcacaccacagctcatggcaatgtcaatccttcacccactg

SEQ ID NO: 56084 - DNA, 110 bp, synthetic construct
  source 1..110: mol_type = other DNA
aagatctgaaaacactggctaccatctattatcatataatgactctggtggtacgagtagtggctggccctcggatgacctatgagtccacctaaccctttcattaatat

SEQ ID NO: 56085 - DNA, 110 bp, synthetic construct
  source 1..110: mol_type = other DNA
gacagatgttacacaaaaatgcaactgccttattactacttactgaaaattctcagatacacttctcaaagaaaatgtactcattttggaaaatactctttcttgggtag

SEQ ID NO: 56086 - DNA, 110 bp, synthetic construct
  source 1..110: mol_type = other DNA
gatacacttctcaaagaaaatgtactcattttggaaaatactctttcttgggtaggggcatgaactcgtgatcacaccacacaaagtgagggcacagcttgctgtgctcc

SEQ ID NO: 56087 - DNA, 110 bp, synthetic construct
  source 1..110: mol_type = other DNA
ataaagaaggacagagatgtaaactgctcagtaatgtgagtttaaaaacagctttagcaatgttctcatgccatcgactgatgactgaaatgatttgaaaatcctactcc

SEQ ID NO: 56088 - DNA, 110 bp, synthetic construct
  source 1..110: mol_type = other DNA
caccaggtcctttccaataatagatacaaatgtactctgagacataggactttcctcatattcttttcttttaatatcaacgatataagaaaaagtaactatattcttcc

SEQ ID NO: 56089 - DNA, 110 bp, synthetic construct
  source 1..110: mol_type = other DNA
tctgagacataggactttcctcatattcttttcttttaatatcaacgatataagaaaaagtaactatattcttcctgtgttcctcacaatcaacagggtaatcacttttt

SEQ ID NO: 56090 - DNA, 110 bp, synthetic construct
  source 1..110: mol_type = other DNA
ggatccagttcttctgaaaatagatggatttcctataaagaatttcagcaaagatcttattatgctatcacaaacatccatacatatgaaaggaagcatatagacaagca

SEQ ID NO: 56091 - DNA, 110 bp, synthetic construct
  source 1..110: mol_type = other DNA
cagaacactcaggaatgtaagacattctttgaaaccacactgatttcctcccatggcagtggtacaatatagagtgatttttaccacttcagctgagtgattttgatgaa

SEQ ID NO: 56092 - DNA, 110 bp, synthetic construct
  source 1..110: mol_type = other DNA
ttgttttcaccgggccatcatcacagatacaatgaggtcaggtcacaggattggagtagtcatgccctcgggcctgctgtgggagctatggagatagctcaaattctggc

SEQ ID NO: 56093 - DNA, 110 bp, synthetic construct
  source 1..110: mol_type = other DNA
tctattatagtgaggaaggccaaatgggagcttttgaaaccacaacctccaaaagagtaaatcaaaaccaggataacatccttgtgtgtgtggtgtgtgggggggaggca

SEQ ID NO: 56094 - DNA, 110 bp, synthetic construct
  source 1..110: mol_type = other DNA
cagttactccacctgctccaaattctctgtagcccagagggtgtgtctgcttcccagctgttgctagacagctgctgctgcagagtgcctcccagagcggaagcagacag

SEQ ID NO: 56095 - DNA, 110 bp, synthetic construct
  source 1..110: mol_type = other DNA
agtgcacatagaatgttctccaagatagatcatatgctagaccacagaaaatacctcagaagctttaaaagaacaaaaattatatcaagcatattttccaaccacaacag

SEQ ID NO: 56096 - DNA, 110 bp, synthetic construct
  source 1..110: mol_type = other DNA
aaaaataaaatatggcttctttagctggaatgtcatgaggtagactagttcctgggacctgcagtcagactaatgactgtgattggagcaagcgtaagagcggcagggag

SEQ ID NO: 56097 - DNA, 110 bp, synthetic construct
  source 1..110: mol_type = other DNA
aacccagtttggttagcataaatgtttctgctttagccagtttacttctcagaggtgaaataaagacttagctaggatgtcgagagcatctattttcatttaatagcaag

SEQ ID NO: 56098 - DNA, 110 bp, synthetic construct
  source 1..110: mol_type = other DNA
actagtcacctcggtgcataaatcaactgtgattaaagctggctcaatgagattctgctctatagcactggaactatatctagtcacttgtgatggagcatgatgatgga

SEQ ID NO: 56099 - DNA, 110 bp, synthetic construct
  source 1..110: mol_type = other DNA
ctgttaattcctgggatgatggggggctctgggggcaaacagccctgtgcacagggagggcattatcccaggcagctaagtgatgctgcctaactgctgcctgcttctat

SEQ ID NO: 56100 - DNA, 110 bp, synthetic construct
  source 1..110: mol_type = other DNA
atttcacctgaataacctccaaaatgttctattcatcacaattctaagcatcctaaaatatgtgaaaggcaacaccgtccctagtctcaaaaacagctgatagaaaatgt

SEQ ID NO: 56101 - DNA, 110 bp, synthetic construct
  source 1..110: mol_type = other DNA
aaatatgtgaaaggcaacaccgtccctagtctcaaaaacagctgatagaaaatgtaatagaaaaagtattatatataacagcaataaacttggaagatacacaaggctaa

SEQ ID NO: 56102 - DNA, 110 bp, synthetic construct
  source 1..110: mol_type = other DNA
aatgggaactcctcaacagctggtttcttattttaaaacacactatattagaggttaaagacactgagggcctgaaaggcacagagttgaatccatatttcccacagaac

SEQ ID NO: 56103 - DNA, 110 bp, synthetic construct
  source 1..110: mol_type = other DNA
attttggagggtaagttatgcttctctatgctatcataatcatttttaggcgcacagttcaatagtattaaacaaatttgttcctgacaaaaggttcttgtctcatggca

SEQ ID NO: 56104 - DNA, 110 bp, synthetic construct
  source 1..110: mol_type = other DNA
ttaggcgcacagttcaatagtattaaacaaatttgttcctgacaaaaggttcttgtctcatggcagaaggaatttagaaaggacacagaaattgagaaagtaaagtgaag

SEQ ID NO: 56105 - DNA, 110 bp, synthetic construct
  source 1..110: mol_type = other DNA
gttctaggagactggagacctgcagttcagccacctcatctggcagaaagcaagaaatgttcatctatgtctgcttcccattccttccttctacgctcacatcctcagca

SEQ ID NO: 56106 - DNA, 110 bp, synthetic construct
  source 1..110: mol_type = other DNA
atcatgaataccaggcttcagatagcacgtaagagcttctacctgtggctgaccgtgggcttcctaaagtaccaactgccatccatggtggaagggtgactcaggaattg

SEQ ID NO: 56107 - DNA, 110 bp, synthetic construct
  source 1..110: mol_type = other DNA
accctattataatgctacaattgtgaggcttgagaaccagcccctggatcacaccacaggaaaagctaatgagcctctatacctgcacattcaagcatcaggtgatggcc

SEQ ID NO: 56108 - DNA, 110 bp, synthetic construct
  source 1..110: mol_type = other DNA
cgaaccaggcgagcaaggagcacgaggagcaggaagacaaggaggccttcatgcaatgggaaagggattaagaatctgacctcctgccttaatgattaactgagattgtt

SEQ ID NO: 56109 - DNA, 110 bp, synthetic construct
  source 1..110: mol_type = other DNA
ttgctcatatgggttgtatccactaatttttactgtgctagaaaaattaaaactaagaaacatttaaaatacaagaatatcacacacattccattagctgttcgagcaat

SEQ ID NO: 56110 - DNA, 110 bp, synthetic construct
  source 1..110: mol_type = other DNA
aaatattcctgactgcaactatgaaagcaaaatggaagacaactgtgtttaagggatcaactatctcataaaacacacacacacaatatacccaggcactgaaacaaaat

SEQ ID NO: 56111 - DNA, 110 bp, synthetic construct
  source 1..110: mol_type = other DNA
atcaactatctcataaaacacacacacacaatatacccaggcactgaaacaaaataggaaaacaaaaatccaattacggttttcttattccccagtaggctttcactatc

SEQ ID NO: 56112 - DNA, 110 bp, synthetic construct
  source 1..110: mol_type = other DNA
gttggaaccacatctatatatgtttgtatataatatgaatatttgtttatatccctttgtatgcaatctaatcatttcacattagggccacttagaaactttctctctgt

SEQ ID NO: 56113 - DNA, 110 bp, synthetic construct
  source 1..110: mol_type = other DNA
tctatcatgggcaggggaaaactgcaccatcaattttttttctaggttttatgccaactagttaatttaaaattcctctgatgggagttcccgtcatggctcagtggaaa

SEQ ID NO: 56114 - DNA, 110 bp, synthetic construct
  source 1..110: mol_type = other DNA
ttataaaataatgttttgatgtgccttcaaaatggcattgccatttaaatttttatctactacaccagattactttgggccatgaaaaagcaacatggtattttctagga

SEQ ID NO: 56115 - DNA, 110 bp, synthetic construct
  source 1..110: mol_type = other DNA
tctactacaccagattactttgggccatgaaaaagcaacatggtattttctaggaaaattaagcctttgctttattccttcgagagacaatttataacatcagtagaagc

SEQ ID NO: 56116 - DNA, 110 bp, synthetic construct
  source 1..110: mol_type = other DNA
aaagccttattaaaaaaaaaaattgaagtttttttccttttcaatcagagctctaataaagccctgcacccataattttaaagcaatactgtttctgatctctgcttgat

SEQ ID NO: 56117 - DNA, 110 bp, synthetic construct
  source 1..110: mol_type = other DNA
cacttcccttaaaatcagatttctatcatgttatgcactgactaaagtttttccttggagttcttaaccactcatgtcttagatgagcaattctgagcctcatgttctcc

SEQ ID NO: 56118 - DNA, 110 bp, synthetic construct
  source 1..110: mol_type = other DNA
tggagttcttaaccactcatgtcttagatgagcaattctgagcctcatgttctccttggtcctgaagctgttccttcagtaaaacagctacaggtaacacataagtccca

SEQ ID NO: 56119 - DNA, 110 bp, synthetic construct
  source 1..110: mol_type = other DNA
ggccatgtgttttttccttattgtttcatgatcatacctgcagcatatggaggttcctgggctaggggttgaattggagctgcggaggccacaagccaccgaaataccgg

SEQ ID NO: 56120 - DNA, 110 bp, synthetic construct
  source 1..110: mol_type = other DNA
cctgggctaggggttgaattggagctgcggaggccacaagccaccgaaataccggatctgagctgcatctgcaacctttgctgtagcttgcatcagcagtgcatccttaa

SEQ ID NO: 56121 - DNA, 110 bp, synthetic construct
  source 1..110: mol_type = other DNA
catgaaagcagtgctgtgtcacttgcatttcacagatgagtccaagattgtcctgtgagcaggacttccttgaaagaacctcctgggtcaaagagagcatgtgtgtaacc

SEQ ID NO: 56122 - DNA, 110 bp, synthetic construct
  source 1..110: mol_type = other DNA
cacatacaactggaattccgtataatcctcaaggacagacaattgtagaaaaagctcatcaaacattaaaaatcaaattactgaattacaggaaggggaatttaaacata

SEQ ID NO: 56123 - DNA, 110 bp, synthetic construct
  source 1..110: mol_type = other DNA
tcctcaaggacagacaattgtagaaaaagctcatcaaacattaaaaatcaaattactgaattacaggaaggggaatttaaacataattctcctcatcatgtgttaagtca

SEQ ID NO: 56124 - DNA, 110 bp, synthetic construct
  source 1..110: mol_type = other DNA
ttgctactaacaaaacgaagtcaattgcataagacaagaaaatgcattgtaaggcttgaaattgaaagccagggaagagatttattttaagtaattggcttacatgatta

SEQ ID NO: 56125 - DNA, 110 bp, synthetic construct; identical to SEQ ID NO: 56124
  source 1..110: mol_type = other DNA

SEQ ID NO: 56126 - DNA, 110 bp, synthetic construct
  source 1..110: mol_type = other DNA
tgtttgacatcaataaaggaagaaagatctagttttaggatctctctccatgagttttaggtctccctatgattccctgcacgatgagatgttatgcctacaaggactgg

SEQ ID NO: 56127 - DNA, 110 bp, synthetic construct
  source 1..110: mol_type = other DNA
tttaggtctccctatgattccctgcacgatgagatgttatgcctacaaggactggaaaacagacaaaaccaaactgaagcatgttaatcatagcaaaatatcttcgtaca

SEQ ID NO: 56128 - DNA, 110 bp, synthetic construct
  source 1..110: mol_type = other DNA
gaacttttaaaatcccacatcaccaatagtagttttgatattctgagacaatagtaaggagaggaagggagtggctggtaaggggtttttcaaaagtttaagtacagagt

SEQ ID NO: 56129 - DNA, 110 bp, synthetic construct
  source 1..110: mol_type = other DNA
atgagatcatctagcaagacttgaaccaattctgaaagtgtcaagatattatcagaatcattctaagggcttctgcttctgggcatagggattcaagatttggatgtaat

SEQ ID NO: 56130 - DNA, 110 bp, synthetic construct
  source 1..110: mol_type = other DNA
aatcattctaagggcttctgcttctgggcatagggattcaagatttggatgtaatttccatcttctaattgctcccagaaatctcatactcaactgtatcagaagactgg

SEQ ID NO: 56131 - DNA, 110 bp, synthetic construct; identical to SEQ ID NO: 56129
  source 1..110: mol_type = other DNA

SEQ ID NO: 56132 - DNA, 110 bp, synthetic construct; identical to SEQ ID NO: 56130
  source 1..110: mol_type = other DNA

SEQ ID NO: 56133 - DNA, 110 bp, synthetic construct
  source 1..110: mol_type = other DNA
aaatgtttgatttgtaagtgtaggagtgaatgtgctattgatttttcacatatgttttcacaggactctgccaaatatgaagttctttatctttgcctttattatggctc

SEQ ID NO: 56134 - DNA, 110 bp, synthetic construct
  source 1..110: mol_type = other DNA
tttcacaggactctgccaaatatgaagttctttatctttgcctttattatggctctcatgtttgccatgattgtaagtatattgggacattttgaagaatatgttctcag

SEQ ID NO: 56135 - DNA, 110 bp, synthetic construct
  source 1..110: mol_type = other DNA
aaagctagaagtccaagatcaagggaccagccaattctattcctggcttgcagatgcctttacatggccttacttctgaatatgctcatggagagaaaaagatttctctt

SEQ ID NO: 56136 - DNA, 110 bp, synthetic construct
  source 1..110: mol_type = other DNA
gcctttacatggccttacttctgaatatgctcatggagagaaaaagatttctctttttttaataagtccaccagacctatcaaattaaggccttgcccttatgtcctaat

SEQ ID NO: 56137 - DNA, 110 bp, synthetic construct
  source 1..110: mol_type = other DNA
agagccactttctgatccattaaatgctgtcttgtcaaatggcagatataagtgcctgtcaaaaagggcacttaaaagagggggtggaaaggagttcccactgtagctca

SEQ ID NO: 56138 - DNA, 110 bp, synthetic construct
  source 1..110: mol_type = other DNA
ctgtcaaaaagggcacttaaaagagggggtggaaaggagttcccactgtagctcagtggttaagaatccaactgcagcagccggggttgctgcaaaggcccaggtttgat

SEQ ID NO: 56139 - DNA, 110 bp, synthetic construct
  source 1..110: mol_type = other DNA
tccacataccgctgtcccatgtacatacggtgtttttctaaggctttttgcacgtcctgctctgactccatttcaattaaggcatcacctcttcgtttcccatctctatt

SEQ ID NO: 56140 - DNA, 110 bp, synthetic construct
  source 1..110: mol_type = other DNA
gaagctgtgtccacacggattccagttgggttcatttccagtacgctgcaacaggcagtccaataatgtttattcagatttacctacagacttaccccttcagtttgctc

SEQ ID NO: 56141 - DNA, 110 bp, synthetic construct
  source 1..110: mol_type = other DNA
cagtccaataatgtttattcagatttacctacagacttaccccttcagtttgctcttcatttcttttgtcgtcttttcttttcttttttttttttttttggtctttttgc

SEQ ID NO: 56142 - DNA, 110 bp, synthetic construct
  source 1..110: mol_type = other DNA
agataagccaaggaaagcagcacttaacttacatttgggggacgttgcttattggttctgaaagaaggatataaagtcccaaatcttgtggaatctctgctttgaactgg

SEQ ID NO: 56143 - DNA, 110 bp, synthetic construct
  source 1..110: mol_type = other DNA
ttctgaaagaaggatataaagtcccaaatcttgtggaatctctgctttgaactggggaaaacaaaaattccgatgattctagaaagagcaacaatgtgtataaaaataga

SEQ ID NO: 56144 - DNA, 110 bp, synthetic construct
  source 1..110: mol_type = other DNA
ttgggttcaagagtacaagatgggaagcttgagatgggagtgtatctgtgagtatgtgtgtgcctggaaggcactgaaagaacagaagatattggtggggatcttctacg

SEQ ID NO: 56145 - DNA, 110 bp, synthetic construct
  source 1..110: mol_type = other DNA
gtgtgtgcctggaaggcactgaaagaacagaagatattggtggggatcttctacgagtggtgttctgcgtaggaaatctcttctatcaaaaatgaaaattttaagggcct

SEQ ID NO: 56146 - DNA, 110 bp, synthetic construct
  source 1..110: mol_type = other DNA
ttgaggatgatggtggaaaagagctgcatactgtatggaagtgatgcttaattttatggaatgaatttggtgatacaggttaacggcaactgattgaagggcaactggtt

SEQ ID NO: 56147 - DNA, 110 bp, synthetic construct
  source 1..110: mol_type = other DNA
tctggaacagctggggactgagggctcgccacctgacttttccacaggactgacttggacttcatcatagctgaggactcctgcttcattggaagggggaggtggtccct

SEQ ID NO: 56148 - DNA, 110 bp, synthetic construct
  source 1..110: mol_type = other DNA
tttgctctggatgcacagtactgcctcccaaataatagaagtctgtttttgtatagatttttgcactgtgctttgcgatttcatcttatccaggtctcctttgtgctgca

SEQ ID NO: 56149 - DNA, 110 bp, synthetic construct
  source 1..110: mol_type = other DNA
ctaacaatgtattatttcttgttattagtttcttttttatataagtctgtaatcgcctacctagaagagagcattttttttggactcaccatggttccaacacattatta

SEQ ID NO: 56150 - DNA, 110 bp, synthetic construct
  source 1..110: mol_type = other DNA
gctgcttcgagtttaggccagggatgccagtggtaaaggtaagtgcacttgtttcagtggtactccaatcttggcctctttcttactgcacctgttctgagtcttcagat

SEQ ID NO: 56151 - DNA, 110 bp, synthetic construct
  source 1..110: mol_type = other DNA
agtggtactccaatcttggcctctttcttactgcacctgttctgagtcttcagattattgttcagcacaatctgtctaggttcttagctacatccaatgggagagacagg

SEQ ID NO: 56152 - DNA, 110 bp, synthetic construct
  source 1..110: mol_type = other DNA
ccttggggtctttcctgaatgcctcacagatctcgtcatttgttggctccacgtaggtagggaattcttggggctgatgcttcagggcagccatacagagtttcttttca

SEQ ID NO: 56153 - DNA, 110 bp, synthetic construct
  source 1..110: mol_type = other DNA
ggtagggaattcttggggctgatgcttcagggcagccatacagagtttcttttcaaggccctctttggtgcagcactcagcagttcctgggtgtactgggaatggggagt

SEQ ID NO: 56154 - DNA, 110 bp, synthetic construct
  source 1..110: mol_type = other DNA
acaaaagaatctcttttgcattaaataaagtttttcctataatctctagcaagccttccatatcaatttgtctggtttttcaatctggcttttctgttcaagttcaggtg

SEQ ID NO: 56155 - DNA, 110 bp, synthetic construct
  source 1..110: mol_type = other DNA
tgaagatgtgatcagtttataggtcccatttgctttgaggcaccctgtcatctattcagaataattgagaatggggagagagcagaaatgtaaattggtacaaccactat

SEQ ID NO: 56156 - DNA, 110 bp, synthetic construct
  source 1..110: mol_type = other DNA
aaaacttggtctctgccctctggaagatagatatatggtagacatttggcagccagtctaacagactggaattcagagcagtctcttgtcttactgccagctcccaggag

SEQ ID NO: 56157 - DNA, 110 bp, synthetic construct
  source 1..110: mol_type = other DNA
gtctaacagactggaattcagagcagtctcttgtcttactgccagctcccaggagccttttgttgtgctaacctttgttgaggcagcctgtacaacaaaggtctttagtt

SEQ ID NO: 56158 - DNA, 110 bp, synthetic construct; identical to SEQ ID NO: 56156
  source 1..110: mol_type = other DNA

SEQ ID NO: 56159 - DNA, 110 bp, synthetic construct; identical to SEQ ID NO: 56157
  source 1..110: mol_type = other DNA

SEQ ID NO: 56160 - DNA, 110 bp, synthetic construct
  source 1..110: mol_type = other DNA
acaaaaataaacatgctccccaaatatgatataagtgtgtacttggtaaaagactgaaaaatgcaaagtgaaatgaggtcattacatggttcagtcttctgcaaactggg

SEQ ID NO: 56161 - DNA, 110 bp, synthetic construct; identical to SEQ ID NO: 56160
  source 1..110: mol_type = other DNA

SEQ ID NO: 56162 - DNA, 110 bp, synthetic construct
  source 1..110: mol_type = other DNA
gaaagatctcaactttccagaagcatttcctagtagagggagttcagctgcacgaggaaacccaacttccctcccatgcattgctttccacattttcttttcagtagtga

SEQ ID NO: 56163 - DNA, 110 bp, synthetic construct
  source 1..110: mol_type = other DNA
ttaagccgcagaggagctctggatggatcaagaataggcaattcagccataaaaccttgcaaactcttccagcctttggaacagtggacctgtaccaaaagctcaggtag

SEQ ID NO: 56164 - DNA, 110 bp, synthetic construct
  source 1..110: mol_type = other DNA
cttgcaaactcttccagcctttggaacagtggacctgtaccaaaagctcaggtagaatcaatttctttcttcaagaatgataaagatgattggctcagcaagctaaaaag

SEQ ID NO: 56165 - DNA, 110 bp, synthetic construct
  source 1..110: mol_type = other DNA
acatctcttatgcacgtgtgcatactctatctcactttcttgctctcttgttctgtttattgctttctctctcctgtcaaacacacacacacacacacactacacctctc

SEQ ID NO: 56166 - DNA, 110 bp, synthetic construct
  source 1..110: mol_type = other DNA
ttatgtcagttgcctgtcctatatgcacttcaggtcatttctttcctcccaggggaagctaaagaagtttagggttcagaccccctttttgcacgggtcacttccagggc

SEQ ID NO: 56167 - DNA, 110 bp, synthetic construct
  source 1..110: mol_type = other DNA
tctgtggcccatgccacaaatctgaaaagggtatggcgcctctgatactaaccagctgcagtatcagatattttaaaaaggggttctgcttatggttcccaaattgttaa

SEQ ID NO: 56168 - DNA, 110 bp, synthetic construct
  source 1..110: mol_type = other DNA
ctgcagtatcagatattttaaaaaggggttctgcttatggttcccaaattgttaacctcacgcttccaagaccctctgccctaaaagtgaagaaccccgtgagacgcctc

SEQ ID NO: 56169 - DNA, 110 bp, synthetic construct
  source 1..110: mol_type = other DNA
agttgtgtcattgagcaaaaagcacctccaggcatttatatgaaactacctttaaatcaattattggaaaaaaattacttaagtatctgcagaggaatgcattttaccaa

SEQ ID NO: 56170 - DNA, 110 bp, synthetic construct
  source 1..110: mol_type = other DNA
atcaattattggaaaaaaattacttaagtatctgcagaggaatgcattttaccaaacctccaggttagcaatcccttcatggggccaggggaaaaaaaatctcattactg

SEQ ID NO: 56171 - DNA, 110 bp, synthetic construct; identical to SEQ ID NO: 56169
  source 1..110: mol_type = other DNA

SEQ ID NO: 56172 - DNA, 110 bp, synthetic construct; identical to SEQ ID NO: 56170
  source 1..110: mol_type = other DNA

SEQ ID NO: 56173 - DNA, 110 bp, synthetic construct
  source 1..110: mol_type = other DNA
tcaacttattttggaaggaactggaagttaaaaaatgatccacctgctttaccgttttattagcattttgaatattatctccttcttaagtggttagaccaggtcagtta

SEQ ID NO: 56174 - DNA, 110 bp, synthetic construct
  source 1..110: mol_type = other DNA
tctaaccaaatggctcctattctagtcagttaagattgaggtagaaacagggtgaacagtgacaccaaatggtgagtaagggtgtttattaagaaagggggtttaaagcc

SEQ ID NO: 56175 - DNA, 110 bp, synthetic construct
  source 1..110: mol_type = other DNA
acagtgacaccaaatggtgagtaagggtgtttattaagaaagggggtttaaagcctgtttttcatcagaagcaattggggtggcttacatggataaatattaggcaacaa

SEQ ID NO: 56176 - DNA, 110 bp, synthetic construct
  source 1..110: mol_type = other DNA
cacaaagcgataatgtataattctacaggataagaagcactgcaatactataacgactgcaaagggacacttttcctcttcaagtgcatacaaatttaccaaagaagcct

SEQ ID NO: 56177 - DNA, 110 bp, synthetic construct
  source 1..110: mol_type = other DNA
ctcgatccagacagcaaaggaagaaatgagtcctaagaataaagagttttaagtagacatttgaaagataaaacccaatgtgaacttaagccaaatatgtaaatgtgata

SEQ ID NO: 56178 - DNA, 110 bp, synthetic construct
  source 1..110: mol_type = other DNA
caaagccaggagatttaaaaaagtataagaccatgtattggcaacctttcctaggagaggaaattctagagtctttaagctagaaaagataacctgatatacttattcct

SEQ ID NO: 56179 - DNA, 110 bp, synthetic construct
  source 1..110: mol_type = other DNA
ctttcctaggagaggaaattctagagtctttaagctagaaaagataacctgatatacttattccttctaaaagttcaggaaaagtcacttcatttaaaaatgcaaaacaa

SEQ ID NO: 56180 - DNA, 110 bp, synthetic construct; identical to SEQ ID NO: 56178
  source 1..110: mol_type = other DNA

SEQ ID NO: 56181 - DNA, 110 bp, synthetic construct; identical to SEQ ID NO: 56179
  source 1..110: mol_type = other DNA

SEQ ID NO: 56182 - DNA, 110 bp, synthetic construct
  source 1..110: mol_type = other DNA
aacatatgagacagtgtgttagatatataacctccacctgttagaaaaaaaaattattagctccaacatggatgaagaaaatgaggtttaaatagtacagttcccactgt

SEQ ID NO: 56183 - DNA, 110 bp, synthetic construct; identical to SEQ ID NO: 56182
  source 1..110: mol_type = other DNA

SEQ ID NO: 56184 - DNA, 110 bp, synthetic construct
  source 1..110: mol_type = other DNA
cggcccttctagataattcagttattccctcttacaactaaatttataatcagcttctaaaggtgtttttcttctgctgcctgaagttacaacttctttcttcagaccaa

SEQ ID NO: 56185 - DNA, 110 bp, synthetic construct
  source 1..110: mol_type = other DNA
tctaaaggtgtttttcttctgctgcctgaagttacaacttctttcttcagaccaagattctctagcttccatttcagggagtggacaagagttacaaaagagctgataac

SEQ ID NO: 56186 - DNA, 110 bp, synthetic construct
  source 1..110: mol_type = other DNA
gggggcaagtggacagagatgaaacctcactgcattatccctaaacacattccgcagcttaggattttggatacaaagaccaaaatagaagtatgcagttaaattggttg

SEQ ID NO: 56187 - DNA, 110 bp, synthetic construct
  source 1..110: mol_type = other DNA
ctcaacagtgggttactttaggtagaggctagactaaatgcaagtgcatttctgcatgtaaaaacccaactgaatatcactgatttcacatggttaaccagatagctcaa

SEQ ID NO: 56188 - DNA, 110 bp, synthetic construct
  source 1..110: mol_type = other DNA
aaacatgaacaagatatgaaacctgctttcctttcattaataatgtgtattttgtaatgggataagcctcagaactgaagtgtgtgcatggcatcaagtgctactatagg

SEQ ID NO: 56189 - DNA, 110 bp, synthetic construct
  source 1..110: mol_type = other DNA
aatgggataagcctcagaactgaagtgtgtgcatggcatcaagtgctactataggaaataacagagtctttcaaaaggcaggcgcagctgtcaccagggcaaacattcaa

SEQ ID NO: 56190 - DNA, 110 bp, synthetic construct
  source 1..110: mol_type = other DNA
ctgtgacagactgtatgaactgcaaagccccaaatatttggtatctggccatttacaaaaaagctttgctgactctcagactagctgatacgaaaaatgaagatagtcat

SEQ ID NO: 56191 - DNA, 110 bp, synthetic construct
  source 1..110: mol_type = other DNA
taagggtgacttcacaggaacaatggctcatatttttcctgttcatctgttgtctgcaaaataatcggccctttctccacttgagctccatttcctagactctaggatga

SEQ ID NO: 56192 - DNA, 110 bp, synthetic construct
  source 1..110: mol_type = other DNA
acctcttcatctcattgcttaactttcctcacctacctcatagggctgtaaggaagattaaataaatgcattgtctgctgcaaagaaaacactgagcctcagagaaaatg

SEQ ID NO: 56193 - DNA, 110 bp, synthetic construct
  source 1..110: mol_type = other DNA
gattaaataaatgcattgtctgctgcaaagaaaacactgagcctcagagaaaatgtttcagcttgtcaaattcagacatgacagctttagcaactgtatatgaagcctgt

SEQ ID NO: 56194 - DNA, 110 bp, synthetic construct; identical to SEQ ID NO: 56192
  source 1..110: mol_type = other DNA

SEQ ID NO: 56195 - DNA, 110 bp, synthetic construct; identical to SEQ ID NO: 56193
  source 1..110: mol_type = other DNA

SEQ ID NO: 56196 - DNA, 110 bp, synthetic construct
  source 1..110: mol_type = other DNA
aattgctgcctggctgaactggttactattcaatctattcaccactaaatgagagcatgagctaaaactgtagtttccatagcggattctttgcttttgtgtaaataaaa

SEQ ID NO: 56197 - DNA, 110 bp, synthetic construct
  source 1..110: mol_type = other DNA
catgagctaaaactgtagtttccatagcggattctttgcttttgtgtaaataaaacaataatccctgagggagaacaaaaagtaaacacagataaacatttttacttcct

SEQ ID NO: 56198 - DNA, 110 bp, synthetic construct
  source 1..110: mol_type = other DNA
ttttaggcgcagttgctggaaaagctatttcagagggcagtggagagaggagcggagtcttgcagaaaagatcaccaagaaaacatgcgaactgatgccagcattggctc

SEQ ID NO: 56199 - DNA, 110 bp, synthetic construct
  source 1..110: mol_type = other DNA
ctaggtgtggggggagggtcttcctggtgcaccccagactggagaaggccattacatgaataggagctgcattcagtgggcacctcatatgtgccaggaattctgctagg

SEQ ID NO: 56200 - DNA, 110 bp, synthetic construct
  source 1..110: mol_type = other DNA
atgaataggagctgcattcagtgggcacctcatatgtgccaggaattctgctagggtgctttccagatcacattcatgatggcctttggagagaggtacctatcaacaga

SEQ ID NO: 56201 - DNA, 110 bp, synthetic construct
  source 1..110: mol_type = other DNA
cattcattcatttaataagtcaacagataggcactgaatgcatccatggcctatttctataaacggaggaaacagcaaacctctgtcttcatggagtttatgtcatagtg

SEQ ID NO: 56202 - DNA, 110 bp, synthetic construct
  source 1..110: mol_type = other DNA
tctataaacggaggaaacagcaaacctctgtcttcatggagtttatgtcatagtggaggagacaagacaaagcaaatgaatacatatatcatataaaatcaggttatatt

SEQ ID NO: 56203 - DNA, 110 bp, synthetic construct; identical to SEQ ID NO: 56201
  source 1..110: mol_type = other DNA

SEQ ID NO: 56204 - DNA, 110 bp, synthetic construct; identical to SEQ ID NO: 56202
  source 1..110: mol_type = other DNA

SEQ ID NO: 56205 - DNA, 110 bp, synthetic construct
  source 1..110: mol_type = other DNA
tattaataatgtgttctgattggcttatggctacaaaggtcctaccttacattgtaactgacattatttatggtcgatggtagaaaattgtggtagtagatacagaacat

SEQ ID NO: 56206 - DNA, 110 bp, synthetic construct
  source 1..110: mol_type = other DNA
aaccaaagttttctgaccactgacttcgggatcacatagcctgtgactgccttcctaacctcatctctttatactctgtttccgccacatgcttcagtcatcatggactt

SEQ ID NO: 56207 - DNA, 110 bp, synthetic construct
  source 1..110: mol_type = other DNA
taacctcatctctttatactctgtttccgccacatgcttcagtcatcatggactttaagctcctccattgcatctgcttcactatcaagtccaaagttcctttattattc

SEQ ID NO: 56208 - DNA, 110 bp, synthetic construct
  source 1..110: mol_type = other DNA
aaatgtgaaatgtgtcaatagcaataacccaggtatcccatggaactgggtgatgctgcttctcgtaataatattgcaggtgtgttcatctttcaggtctcgttatcatc

SEQ ID NO: 56209 - DNA, 110 bp, synthetic construct
  source 1..110: mol_type = other DNA
tttgttaaaaatgcaaaaagtcatcagaaggatggttataaggtggtgataaaatttgtaattcataatgtcatttgtagctacacggatggacctagagattatcatac

SEQ ID NO: 56210 - DNA, 110 bp, synthetic construct
  source 1..110: mol_type = other DNA
ttatttctttagctttctgacaccattttcttgaagtggtagccatcttaattttccccccctctcttatttgtgtctatttatttcttctgcaatagtctgtaagctgc

SEQ ID NO: 56211 - DNA, 110 bp, synthetic construct
  source 1..110: mol_type = other DNA
tgtctccagctttgatcatgagggcaaggtcttcatataagtaacatccatacccgatagtgattgatgcacagctggggctccattcatgagtgatggataatggataa

SEQ ID NO: 56212 - DNA, 110 bp, synthetic construct
  source 1..110: mol_type = other DNA
gatagtgattgatgcacagctggggctccattcatgagtgatggataatggataagggagtgaaaaaataaccagcaatacagtgcaccttatcaatcatttgatagtca

SEQ ID NO: 56213 - DNA, 110 bp, synthetic construct
  source 1..110: mol_type = other DNA
tctgattggttgatagtgaggtaataggaagttgacatcatcagcttctggttccaatccgtctggggtctacaggtgtgtgggcagcacacagtcaaattcttccacgt

SEQ ID NO: 56214 - DNA, 110 bp, synthetic construct
  source 1..110: mol_type = other DNA
gactgagtgtgactgggtgatgatttttgcctaggtagtcagggaagacctttctgaggaaatgactttggagctaatgcttacatgacaaggggactcaaacatgcaaa

SEQ ID NO: 56215 - DNA, 110 bp, synthetic construct
  source 1..110: mol_type = other DNA
accttgtaaatcaactctacttcaatatttttttagagaaagaggaattgactcactcaatcacgggggtaaagaagccccatggtctgctacctgcaagctagagaccc

SEQ ID NO: 56216 - DNA, 110 bp, synthetic construct
  source 1..110: mol_type = other DNA
ctcaatcacgggggtaaagaagccccatggtctgctacctgcaagctagagacccaggagagcccacatgtaattccagcagcgtgtgaaggcctgagaatcaaggaagc

SEQ ID NO: 56217 - DNA, 110 bp, synthetic construct
  source 1..110: mol_type = other DNA
agctaagatcaggacattacacagcatcattgcaagagaaacatgactgatgcaacagagaggagcttgaatgttggcggaataagaaaaggcagtaatggcttgggcag

SEQ ID NO: 56218 - DNA, 110 bp, synthetic construct
  source 1..110: mol_type = other DNA
cagagaggagcttgaatgttggcggaataagaaaaggcagtaatggcttgggcagaacacatggcagggagaaaactggggcacaaggcaagaagggaaagtgcttttga

SEQ ID NO: 56219 - DNA, 110 bp, synthetic construct; identical to SEQ ID NO: 56217
  source 1..110: mol_type = other DNA

SEQ ID NO: 56220 - DNA, 110 bp, synthetic construct; identical to SEQ ID NO: 56218
  source 1..110: mol_type = other DNA

SEQ ID NO: 56221 - DNA, 110 bp, synthetic construct
  source 1..110: mol_type = other DNA
cccattattgcataactgcctttaatcttttttaccattaatattttaaaaaggaaattggagttaagaagagagaggccaagccatgtgaggaagtatgtagcagaacc

SEQ ID NO: 56222 - DNA, 110 bp, synthetic construct
  source 1..110: mol_type = other DNA
aattggagttaagaagagagaggccaagccatgtgaggaagtatgtagcagaaccctgggagatatttttgcagtgcaacttgagaagagaaaggaagccaagaccattg

SEQ ID NO: 56223 - DNA, 110 bp, synthetic construct; identical to SEQ ID NO: 56221
  source 1..110: mol_type = other DNA

SEQ ID NO: 56224 - DNA, 110 bp, synthetic construct; identical to SEQ ID NO: 56222
  source 1..110: mol_type = other DNA

SEQ ID NO: 56225 - DNA, 110 bp, synthetic construct
  source 1..110: mol_type = other DNA
ccttttccatttgtaaagaaactaatacaagttacattaaaaatccttctcctattgacatggcatttcaaatgcaaagtagagagcctgacccaattagaatattactt

SEQ ID NO: 56226 - DNA, 110 bp, synthetic construct
  source 1..110: mol_type = other DNA
ttatctacttcttgctcctaacgtttctctgctctaagcatcctgtgctcattcgggcagctgttgatccagctgttgttgagcatctcagacagtctctaactctgatg

SEQ ID NO: 56227 - DNA, 110 bp, synthetic construct
  source 1..110: mol_type = other DNA
tctggagctaaactccctgggttcaaatttggtcctactctaccatctgtgaggtcctgggccagtatcacgacagctccattcttcagtttcctgttcgtagagaggag

SEQ ID NO: 56228 - DNA, 110 bp, synthetic construct
  source 1..110: mol_type = other DNA
cctgggccagtatcacgacagctccattcttcagtttcctgttcgtagagaggagataatcgtactttctcagagggttactgtgcagattggatgagttcatataaata

SEQ ID NO: 56229 - DNA, 110 bp, synthetic construct
  source 1..110: mol_type = other DNA
caacccaactaagaccccccaaaactctagcttctgcagcagctgcccacagaagccaaagaacaagcccagagctgcaaggtagttagttcatggcccgtggggcaaac

SEQ ID NO: 56230 - DNA, 110 bp, synthetic construct
  source 1..110: mol_type = other DNA
ccaaagaacaagcccagagctgcaaggtagttagttcatggcccgtggggcaaactaaacagtcagagacagaaaatgggcaagaattgtcaggagtattcctctccctc

SEQ ID NO: 56231 - DNA, 110 bp, synthetic construct; identical to SEQ ID NO: 56229
  source 1..110: mol_type = other DNA

SEQ ID NO: 56232 - DNA, 110 bp, synthetic construct; identical to SEQ ID NO: 56230
  source 1..110: mol_type = other DNA

SEQ ID NO: 56233 - DNA, 110 bp, synthetic construct
  source 1..110: mol_type = other DNA
agagggctctagccagacatcaaatctgccagaacgtggtcttggactttccagcctctcgactgtgagaaataaatgcttgcaatgtaagccaccccgtctacgtcatt

SEQ ID NO: 56234 - DNA, 110 bp, synthetic construct
  source 1..110: mol_type = other DNA
ctctcgactgtgagaaataaatgcttgcaatgtaagccaccccgtctacgtcattttgttagagctactgctcccactgagacactttgtaacaccaaagcccatgctct

SEQ ID NO: 56235 - DNA, 110 bp, synthetic construct
  source 1..110: mol_type = other DNA
ctccaggcaatattctggcttgatttttttattatcctgtaattttgtttgtgttttagggccacatccatggcatatggaagtaacaggctaggggtcaaatatgagct

SEQ ID NO: 56236 - DNA, 110 bp, synthetic construct
  source 1..110: mol_type = other DNA
aattccccagggccagggatcaaactcatgccatagcagtgaccagagaagccacagcatgaacaaccccaggatccttaacctattaggtcaccaacgtacacctcaag

SEQ ID NO: 56237 - DNA, 110 bp, synthetic construct
  source 1..110: mol_type = other DNA
agcatgaacaaccccaggatccttaacctattaggtcaccaacgtacacctcaagtggcatttctttaacatctgtttctttaaatccatttaaaaacaggattactaaa

SEQ ID NO: 56238 - DNA, 110 bp, synthetic construct
  source 1..110: mol_type = other DNA
gcagatcagtctgcagtattttattttttaccaaaatctggcttattcagtctcggacaacatcacctgtgagacaccaacagctcagccaaggcattactttaccaggt

SEQ ID NO: 56239 - DNA, 110 bp, synthetic construct
  source 1..110: mol_type = other DNA
gcttccagcagaaccagatgtcagcctcctcgtgcatcccctggctgtcaccggatccacattttcactccgggtgcaccccccactttaccccgacatctttgaccctg

SEQ ID NO: 56240 - DNA, 110 bp, synthetic construct
  source 1..110: mol_type = other DNA
tccacattttcactccgggtgcaccccccactttaccccgacatctttgaccctgagatgggacggcgtgccctgtggcagttcatactcactctcgtcgtgactgctgg

SEQ ID NO: 56241 - DNA, 110 bp, synthetic construct
  source 1..110: mol_type = other DNA
gcagcactcattaccgtagtataaattgtgtagctgaaaataatgagaggaattttaaatacacatttttccccctttggccatgcctgaggcatgccaaagttcccagg

SEQ ID NO: 56242 - DNA, 110 bp, synthetic construct
  source 1..110: mol_type = other DNA
gaaaataatgagaggaattttaaatacacatttttccccctttggccatgcctgaggcatgccaaagttcccaggccagggatcaaactcaagctacaacagttacccga

SEQ ID NO: 56243 - DNA, 110 bp, synthetic construct; identical to SEQ ID NO: 56241
  source 1..110: mol_type = other DNA

SEQ ID NO: 56244 - DNA, 110 bp, synthetic construct; identical to SEQ ID NO: 56242
  source 1..110: mol_type = other DNA

SEQ ID NO: 56245 - DNA, 110 bp, synthetic construct
  source 1..110: mol_type = other DNA
aaaatacaaagtatctgaatattggtgttacctaccttttgttgctggtgatacttggtttatatatgtgctttgttttcttagctgagttataatgatattaaggtcag

SEQ ID NO: 56246 - DNA, 110 bp, synthetic construct
  source 1..110: mol_type = other DNA
ggaagaccctttaaaaaaagagataactgtccttcataactagtcattaaaatacctttcaaaacaaatctgtgtgatgactcttagctgtatgccttttgaaatacaag

SEQ ID NO: 56247 - DNA, 110 bp, synthetic construct
  source 1..110: mol_type = other DNA
tactgacaaaagaggtagttgtttcaggtgtcaagtctaccttcaaacttgcaatttcagtcattgtcattgttatcatagaaaggtttaaaaggtatttgaggacctat

SEQ ID NO: 56248 - DNA, 110 bp, synthetic construct
  source 1..110: mol_type = other DNA
ccttttgcctcgtagggtcagttgacagtagctagaaacatttttaattgtcataactgtctctagttgatattagcatctcgtgcatataggccaaagaacactgctaa

SEQ ID NO: 56249 - DNA, 110 bp, synthetic construct
  source 1..110: mol_type = other DNA
cctgaagagctagtcactctccacaggtctgaggcctcttctgtgtagctctgtgttcagtcattgagattagcatgtatgacacaaacatccagatcaaagtagaaaaa

SEQ ID NO: 56250 - DNA, 110 bp, synthetic construct
  source 1..110: mol_type = other DNA
ttcagtcattgagattagcatgtatgacacaaacatccagatcaaagtagaaaaataagttgtttgcctctcttaaacaagctgatgtgtggtgtcatttgactgaaaca

SEQ ID NO: 56251 - DNA, 110 bp, synthetic construct
  source 1..110: mol_type = other DNA
attcaattggttttttgcaacgaattcaaatatttttagaaaggtgtgacatcgtatcagcaggctgtgatgccagtttgcaaccttatttggtgcaaattcatttatat

SEQ ID NO: 56252 - DNA, 110 bp, synthetic construct
  source 1..110: mol_type = other DNA
tgggtctaagtctcatgctctgtttcccaggggtgggaaatccactccaggtccgaatctaactgagccctggtagggcttttcactaacgggggctcagagagctgcag

SEQ ID NO: 56253 - DNA, 110 bp, synthetic construct
  source 1..110: mol_type = other DNA
aaatcagaggaacgaaacgtgagaagagcacatgcttttgtgaatggatgatggttggtgcctgctgcaggttacaccatcatcgaggactcagaaagagaaagaacttc

SEQ ID NO: 56254 - DNA, 110 bp, synthetic construct
  source 1..110: mol_type = other DNA
gcctcgggtactggcgtgtgtctgctgccattttcgatggttggtgtcactgccacagggcaggaagccgaggctctttgctaatttcttgatctgtatttgagaacgga

SEQ ID NO: 56255 - DNA, 110 bp, synthetic construct
  source 1..110: mol_type = other DNA
cagggcaggaagccgaggctctttgctaatttcttgatctgtatttgagaacggaattaagctgtcctggtggcggttaagattccaaagtctagaatcagaaaggctag

SEQ ID NO: 56256 - DNA, 110 bp, synthetic construct
  source 1..110: mol_type = other DNA
tggcatttccacagctgtggctcagattcattccctgtgctggaaacttctatatgctgtggatctgattgcaagttgctgtgtctgtggcataggctggtagctgcagc

SEQ ID NO: 56257 - DNA, 110 bp, synthetic construct
  source 1..110: mol_type = other DNA
attcattccctgtgctggaaacttctatatgctgtggatctgattgcaagttgctgtgtctgtggcataggctggtagctgcagcttccattcagcccctagcccaggaa

SEQ ID NO: 56258 - DNA, 110 bp, synthetic construct
  source 1..110: mol_type = other DNA
tatgtacacttgcctccccttcaccattgttcaaggcctacttagttatttctcacctagatttctggaatacctcagtttcacagtctcaaactttcaatctcaaactt

SEQ ID NO: 56259 - DNA, 110 bp, synthetic construct
  source 1..110: mol_type = other DNA
gttcgtttctagctgttgctagtttcatagcatagtacatccgcttggctctcgcagcttgtctactgcttagctgacaatacgtgcattcaactatcagctctggtccc

SEQ ID NO: 56260 - DNA, 110 bp, synthetic construct
  source 1..110: mol_type = other DNA
tttggatgaggtgagagttttcacagagctgagagctgtgattgcattgccacgtggtgtaggaccgtctctggaacaggacctgacctggcgaagaggggaaaattgca

SEQ ID NO: 56261 - DNA, 110 bp, synthetic construct
  source 1..110: mol_type = other DNA
atactcaaacagaagcagatggctcgcggctgcagtgctgacaaatggaccccatagaaagaccaagcgtgatgagagaggacttgaagctaggcaggaatgactccttt

SEQ ID NO: 56262 - DNA, 110 bp, synthetic construct
  source 1..110: mol_type = other DNA
agaaagaccaagcgtgatgagagaggacttgaagctaggcaggaatgactcctttgggagacaatagaggtgtcaatggagcaaaggtattaagactgaagactgtgtga

SEQ ID NO: 56263 - DNA, 110 bp, synthetic construct
  source 1..110: mol_type = other DNA
ccaagtctgcacagttcaagtgcagatagtctctcatgagttggattcctgcgagggacccctgctgaactcacctctggctacaatgaccaaatcaaggtcccagcctg

SEQ ID NO: 56264 - DNA, 110 bp, synthetic construct
  source 1..110: mol_type = other DNA
ggacccctgctgaactcacctctggctacaatgaccaaatcaaggtcccagcctgcaaagctgaaccatcgccttcccctttccaaaggttcttctttccaaagtcaatt

SEQ ID NO: 56265 - DNA, 110 bp, synthetic construct
  source 1..110: mol_type = other DNA
ccacactggcgagtcttgcctttgttaccccctaaggagtcccagggttcctccacgcatgcagaggaccctgagaaactggcttggagccagacctacctctcaagtct

SEQ ID NO: 56266 - DNA, 110 bp, synthetic construct
  source 1..110: mol_type = other DNA
cgcatgcagaggaccctgagaaactggcttggagccagacctacctctcaagtctttttcgaagacaagagagcagacttagtgagttcaaacaccaggagctcaaaggg

SEQ ID NO: 56267 - DNA, 110 bp, synthetic construct
  source 1..110: mol_type = other DNA
ggcgggttttatcctgaggtagttttcctctgcgacctgtttctgaactagtatcgcagcttgaaacccagtatgtggcagttggggttcccctctgtcagttgccttca

SEQ ID NO: 56268 - DNA, 110 bp, synthetic construct
  source 1..110: mol_type = other DNA
ctcccccgacccccttctccagaaaagattgcgtcagctctgtgtcacccctaatgaaatgcctggttgccccctgagatcagttgaccttatccgggcgcaaaggaaga

SEQ ID NO: 56269 - DNA, 110 bp, synthetic construct
  source 1..110: mol_type = other DNA
cgccgaaagtgcagccctaaaaagacaaaaaagaaaagggaaaaaagaaatgtctaggagagtcagcacatgccacccaagcattgctgtgatgagtccaccgcctgcca

SEQ ID NO: 56270 - DNA, 110 bp, synthetic construct
  source 1..110: mol_type = other DNA
aggagagtcagcacatgccacccaagcattgctgtgatgagtccaccgcctgccaccatccctttctgatctcaaaggcccacattgactgtgtaaaatgttcagtatga

SEQ ID NO: 56271 - DNA, 110 bp, synthetic construct
  source 1..110: mol_type = other DNA
gtgaaggaggtgtcgctcagaggacttgggggcttgctgagtatttatgggaagagcctgtggtagaggggtaactagtgctgaaaagctcaagaaatgatagagttttc

SEQ ID NO: 56272 - DNA, 110 bp, synthetic construct
  source 1..110: mol_type = other DNA
tatgaatgttattttgccttcccttccaaatatttctcaagcctggtaagctgggaaatagagctcaaccgtaagtggtggagagcactggtcccagttaaatcccaatt

SEQ ID NO: 56273 - DNA, 110 bp, synthetic construct
  source 1..110: mol_type = other DNA
aaatagagctcaaccgtaagtggtggagagcactggtcccagttaaatcccaattctttgatattattaaaaagcactttgtagggagttcccatcgtggaacagcggaa

SEQ ID NO: 56274 - DNA, 110 bp, synthetic construct
  source 1..110: mol_type = other DNA
aaccgactcagcaattcttactccctgctctgccgcagggctgcttttccggcacctactagaaactctgaattcctctccttgttcccctgaccttgaagctgggcagc

SEQ ID NO: 56275 - DNA, 110 bp, synthetic construct
  source 1..110: mol_type = other DNA
ctactagaaactctgaattcctctccttgttcccctgaccttgaagctgggcagcctcgccaaagatctgcaagggatctggcagagcctcccgccggccagggtgggag

SEQ ID NO: 56276 - DNA, 110 bp, synthetic construct; identical to SEQ ID NO: 56274
  source 1..110: mol_type = other DNA

SEQ ID NO: 56277 - DNA, 110 bp, synthetic construct; identical to SEQ ID NO: 56275
  source 1..110: mol_type = other DNA

SEQ ID NO: 56278 - DNA, 110 bp, synthetic construct
  source 1..110: mol_type = other DNA
gtcacaaggtaactgtgcattaattatctggactagctgtgcaataattcccactttataggtcaaaaggaaacaggtactcatactccttgtcttagcttagcagctac

SEQ ID NO: 56279 - DNA, 110 bp, synthetic construct
  source 1..110: mol_type = other DNA
ttataggtcaaaaggaaacaggtactcatactccttgtcttagcttagcagctacagacttccaggaaaatttcctagtctgttttgtaaatctcatcggcaaacttcaa

SEQ ID NO: 56280 - DNA, 110 bp, synthetic construct
  source 1..110: mol_type = other DNA
catgctgaagccaaagtcaagaatgtggcagaaccaacaaagctggtttctgtggaaagccggcatcattcatgtaaagatgcctggccttccagaagcctgccctgatt

SEQ ID NO: 56281 - DNA, 110 bp, synthetic construct
  source 1..110: mol_type = other DNA
caggaggtcgggtcagtctccagtgatcaaaaaaaggtcggctgagctctcccttgtgcccagctctctcattacaccccggggaggcctcggcccccacgctctagggc

SEQ ID NO: 56282 - DNA, 110 bp, synthetic construct
  source 1..110: mol_type = other DNA
attatctcgactttacagtgaaagaaaaagagtcttagaagtcacttgcccaaagttattccactcaaaagtggcagagctggagttccctttgtggtgcagcaaaaatg

SEQ ID NO: 56283 - DNA, 110 bp, synthetic construct
  source 1..110: mol_type = other DNA
ttgcccaaagttattccactcaaaagtggcagagctggagttccctttgtggtgcagcaaaaatgaatctgactgctatccatgaggatgtgggttcattccctggcctc

SEQ ID NO: 56284 - DNA, 110 bp, synthetic construct
  source 1..110: mol_type = other DNA
aactactggagcacagctgggagcggtctagcgggggtggtgttaggagcccaagcgcagaaatggaaatcagctggtgactgggtggacttgtgtcgggtcagaatgct

SEQ ID NO: 56285 - DNA, 110 bp, synthetic construct
  source 1..110: mol_type = other DNA
gtatttgccagtaagtcaatgaaaggatgccttttcatcagagttcctgtttcttcttcttctaagagtaagcattttaaaatgtgaattttaggagttcccactgcagc

SEQ ID NO: 56286 - DNA, 110 bp, synthetic construct
  source 1..110: mol_type = other DNA
cttcttctaagagtaagcattttaaaatgtgaattttaggagttcccactgcagctcaatgagttaagaacctgacatactctccatgaggatgtgggttcgatcccttg

SEQ ID NO: 56287 - DNA, 110 bp, synthetic construct; identical to SEQ ID NO: 56285
  source 1..110: mol_type = other DNA

SEQ ID NO: 56288 - DNA, 110 bp, synthetic construct
  source 1..110: mol_type = other DNA
catcagagttcctgtttcttcttcttctaagagtaagcattttaaaatgtgaattttaggagttcccactgcagctcaatgagttaagaacctgacatactctccatgag

SEQ ID NO: 56289 - DNA, 110 bp, synthetic construct
  source 1..110: mol_type = other DNA
tgctgggtccttgacccactctataaggccagggatcgaacctgcttcctcatgaatatagtcgggttccttaccactgagccatgacgggtactcctagattatgttct

SEQ ID NO: 56290 - DNA, 110 bp, synthetic construct
  source 1..110: mol_type = other DNA
atatagtcgggttccttaccactgagccatgacgggtactcctagattatgttctattagcttggatgtggatatacaatcacttgtttcctcaatggtctttaattaat

SEQ ID NO: 56291 - DNA, 110 bp, synthetic construct
  source 1..110: mol_type = other DNA
ctctgggttctgggaaccactctctctccttgtaccttcaggctagaggtggtcccagttcctactgtagctggatcctgggatgcttctttttttcttatggtttcctt

SEQ ID NO: 56292 - DNA, 110 bp, synthetic construct
  source 1..110: mol_type = other DNA
ttcctcccgcctcccatcccctcagtcttatccaagggaagaagactcagtgaggtggggcctatgcagctgaaccctgttcttcagttttcagagtagtgccctcttca

SEQ ID NO: 56293 - DNA, 110 bp, synthetic construct
  source 1..110: mol_type = other DNA
tggggcctatgcagctgaaccctgttcttcagttttcagagtagtgccctcttcagtttgtgtggaaaaacgactcaccagggtttctctgccttctaacagaaggttcc

SEQ ID NO: 56294 - DNA, 110 bp, synthetic construct
  source 1..110: mol_type = other DNA
tgtcacaatttctgggggaagcctatacaagggtgagtagaagagctctagcctttattgctgcacttggtcctgaggccacgaatcattttccttagttttctcccttt

SEQ ID NO: 56295 - DNA, 110 bp, synthetic construct
  source 1..110: mol_type = other DNA
ggggtagaggtgagataagagaggtaacgctgttatagcttgttaatgtttcaaagactcagtaacgttgtcctcctttgtgtccgtggcttttatgtgttgggaatgaa

SEQ ID NO: 56296 - DNA, 110 bp, synthetic construct
  source 1..110: mol_type = other DNA
acatacagctccttgtaataaagaaggagctgtccacctgtagctctgtgagaacaaagaggtagttatctgcccccaacacacccaaaggacaatggcctgcaagtact

SEQ ID NO: 56297 - DNA, 110 bp, synthetic construct
  source 1..110: mol_type = other DNA
tccaagtttcaggaagcatatgttaagctctcagaatgagtcctttgaagtcactgtctcttgactcactttgggaaggctgatggaggcaagcatctctctgttttgtc

SEQ ID NO: 56298 - DNA, 110 bp, synthetic construct
  source 1..110: mol_type = other DNA
tttatgcatgccatgggtgtagctaaaaacaaaacaaaacaaaaaattgctgatgacaaaaatagacattgcaatgtctagttgcagtactaggtggcattacttttttg

SEQ ID NO: 56299 - DNA, 110 bp, synthetic construct
  source 1..110: mol_type = other DNA
caatttaggtattataattcttttagacataatttcacaaatatatgctaccatctaaaataacatgaggagttccatcgtgacgcagtggacacgaatccaactaggaa

SEQ ID NO: 56300 - DNA, 110 bp, synthetic construct
  source 1..110: mol_type = other DNA
aattcttttagacataatttcacaaatatatgctaccatctaaaataacatgaggagttccatcgtgacgcagtggacacgaatccaactaggaaccaagaggttgtggg

SEQ ID NO: 56301 - DNA, 110 bp, synthetic construct
  source 1..110: mol_type = other DNA
agattacagcaaggagaaaaaactgttaggaaaaaatgagtaaagatactgaagcatttttgtagcaggtggagttatggcaccgtgataagggcagaacagctttgtaa

SEQ ID NO: 56302 - DNA, 110 bp, synthetic construct
  source 1..110: mol_type = other DNA
atttttgtagcaggtggagttatggcaccgtgataagggcagaacagctttgtaaaaataaaagcatccttctaatctactaaattatttgaaagaagcaacataaatga

SEQ ID NO: 56303 - DNA, 110 bp, synthetic construct
  source 1..110: mol_type = other DNA
aagggagaaagccaagaaattaatacaatctaaattttcaggatcttgagaaggctaggatacggctctagatacctctggaactgagtgttactggtctgtgtggggat

SEQ ID NO: 56304 - DNA, 110 bp, synthetic construct
  source 1..110: mol_type = other DNA
tttgaggatcaatatatggtggtaggagagtaatcactcagaacatgatttttgtaccaaattcaagggaaaaaacaatgagcctctggttctctgctatgatgtgtctg

SEQ ID NO: 56305 - DNA, 110 bp, synthetic construct
  source 1..110: mol_type = other DNA
gttatcctatgcctttcccaccgtcatattttgtaagaatatgtctttgtctactagtgtttgctataataaaattccatagattgggtggcttataaataacagaaatt

SEQ ID NO: 56306 - DNA, 110 bp, synthetic construct
  source 1..110: mol_type = other DNA
acctgggaggtaaactcgcaagaacctatcagtacctttctcagtcccattgttgtgggacatccccccaaccccaattcaggtcagctagagttgtgtaggtgccagaa

SEQ ID NO: 56307 - DNA, 110 bp, synthetic construct
  source 1..110: mol_type = other DNA
gcattaggaaggcgtgtttacctctgagctgcttttcagggctgaaatctgtgtggtatgaagaacactggagccttttgagtatcgtgccagagagcccagcagtattc

SEQ ID NO: 56308 - DNA, 110 bp, synthetic construct
  source 1..110: mol_type = other DNA
gctgcccatttgatgtgaagaagttggaaatcatcttttcttacagctaatgggatgtcagtctgacttgaggcaatgagacagtatggccgacagtgggtttatagccc

SEQ ID NO: 56309 - DNA, 110 bp, synthetic construct
  source 1..110: mol_type = other DNA
ctcatcctgatttgcatatggtggggagcataccctctggggagtaagatgggacttgttggcaaagagggcagctatggccatttaggtgcttaaatgagaagtttcat

SEQ ID NO: 56310 - DNA, 110 bp, synthetic construct
  source 1..110: mol_type = other DNA
ttgttggcaaagagggcagctatggccatttaggtgcttaaatgagaagtttcatcttgaaagcaattgcctgatacaactaattcatattgaagaagttggaatagaag

SEQ ID NO: 56311 - DNA, 110 bp, synthetic construct
  source 1..110: mol_type = other DNA
ctgccctccattaagatgcgagaaggtactcagagtgtgtagcttgcttttcaacgctttattcgcggtcacttaagaaacgcatttcctagccttagtgtttccttgga

SEQ ID NO: 56312 - DNA, 110 bp, synthetic construct
  source 1..110: mol_type = other DNA
gtgctatgtgagtgtttgctgtttaatcctcaccatgatgatgtgaggttgttcttatcagcctcgtttttcagatgaagaaagagagaggctaagaaccttgcctgagg

SEQ ID NO: 56313 - DNA, 110 bp, synthetic construct
  source 1..110: mol_type = other DNA
atcaagctcagtggggagcgttcctggtttctttgtcaccaggggttgtccttgaaaactggggtctgtccttatgtgctgtcgccctggactggttggtttttgtgtgt

SEQ ID NO: 56314 - DNA, 110 bp, synthetic construct
  source 1..110: mol_type = other DNA
aaactggggtctgtccttatgtgctgtcgccctggactggttggtttttgtgtgtggaaaattgtttcgggcagaaaagtctgaggagctcgaactcttcactgcctgtg

SEQ ID NO: 56315 - DNA, 110 bp, synthetic construct
  source 1..110: mol_type = other DNA
ctcattctccgctgccctcgggcctggacagaggcaaagagaactcccttctgggttcctggtcagttagtcgtgccaggagcggtgcgaaagacaatgcagagagcact

SEQ ID NO: 56316 - DNA, 110 bp, synthetic construct
  source 1..110: mol_type = other DNA
ttcctggtcagttagtcgtgccaggagcggtgcgaaagacaatgcagagagcacttatgttctacttggcaggcacgttgggggggcgggggagggagacgacaggtgac

SEQ ID NO: 56317 - DNA, 110 bp, synthetic construct
  source 1..110: mol_type = other DNA
taatggctatgtttgcttgcaaaactcctgaaaatttagtagttggttctctcatgccaggccagctcagcgtaccgccatggaagaggaaacatattcagtacccacca

SEQ ID NO: 56318 - DNA, 110 bp, synthetic construct
  source 1..110: mol_type = other DNA
tgccaggaactgcaagtaacctctgataccacaaagattaaaaccctggtcccataccttcatatgtttcatatgcaacaaagattggaaaaagaaatctgtaggagtaa

SEQ ID NO: 56319 - DNA, 110 bp, synthetic construct
  source 1..110: mol_type = other DNA
ttcagattctcgtcgcccttgtcgcccacgatcagcaatttcctgaacaggtgtctgcggacagtttacaagttgggtagtgtgcattcggattcaaaaccggcagccgg

SEQ ID NO: 56320 - DNA, 110 bp, synthetic construct
  source 1..110: mol_type = other DNA
tgcggacagtttacaagttgggtagtgtgcattcggattcaaaaccggcagccggcgtggtgtgcgcttccgcttggagcaaaagctagaataggaagaaaaatagcaaa

SEQ ID NO: 56321 - DNA, 110 bp, synthetic construct
  source 1..110: mol_type = other DNA
gtatagagcttatcctaaaatgtacatagaaatgaaaggaactcagaataaaataaccttgagaaagaaaatataaattggagggttaacactttcatactggaatgagg

SEQ ID NO: 56322 - DNA, 110 bp, synthetic construct; identical to SEQ ID NO: 56321
  source 1..110: mol_type = other DNA

SEQ ID NO: 56323 - DNA, 110 bp, synthetic construct
  source 1..110: mol_type = other DNA
caaacatagtaaagctgtaccatagtgttggttctaatgtagctaatgactttggtgacagggccactttgtctctgttaaaaattagatcccttctcttggataaacta

SEQ ID NO: 56324 - DNA, 110 bp, synthetic construct
  source 1..110: mol_type = other DNA
acatccactactgtttctccctagtttccctttcaatttccatgatgttctgtagacctccagctatccgtttcttatttgctcaaccaaactttgacgttcctttcatt

SEQ ID NO: 56325 - DNA, 110 bp, synthetic construct
  source 1..110: mol_type = other DNA
cttgtcatctcttttgcaatcaaggagcccagtctcaacatcagccctggtctgcagaggacagccaccattcatctactcaacatcactttggcgcctcgtacaagtgt

SEQ ID NO: 56326 - DNA, 110 bp, synthetic construct
  source 1..110: mol_type = other DNA
agaggacagccaccattcatctactcaacatcactttggcgcctcgtacaagtgtgttccttaccactctggtaaataaagcagattctggaccctcccatagaacacag

SEQ ID NO: 56327 - DNA, 110 bp, synthetic construct
  source 1..110: mol_type = other DNA
tggccttattaacctaattaggtagcctctcttttgtacatgtgggttgacttgccatgttagttggactgcctcaagattcttgagaaattgaacttgatgatgatatt

SEQ ID NO: 56328 - DNA, 110 bp, synthetic construct
  source 1..110: mol_type = other DNA
ggcaatgtttaaccagaaagccccttctccatcagaaacaggcagcagctacttggttctagcaaacttttaacctcaaggaaatccagtttgcccagttacgcgaaatt

SEQ ID NO: 56329 - DNA, 110 bp, synthetic construct
  source 1..110: mol_type = other DNA
taacataaaattacttcatacaagtatgcaatgtttaggtgtatttcacattacataaagagtccaccagcattcaatatttattctatttcactctgtactctataccc

SEQ ID NO: 56330 - DNA, 110 bp, synthetic construct
  source 1..110: mol_type = other DNA
caatgcctgtagagttcatgttctttactagctattctgtgctaggtgatgcaattctgataaatctgtacaaaagcaaagatccatgccctcaaagagttcacaatctg

SEQ ID NO: 56331 - DNA, 110 bp, synthetic construct
  source 1..110: mol_type = other DNA
aggggtgaaaatctacatactgaaccacgccaatgaaaggaaaagtaaattcttattgggcaacagagaagacaagaaaatagcaaaatatctacagcagcggtagcaga

SEQ ID NO: 56332 - DNA, 110 bp, synthetic construct
  source 1..110: mol_type = other DNA
ttgggcaacagagaagacaagaaaatagcaaaatatctacagcagcggtagcagagtgcccatcccctgtgctctccagaagtcatttccctcaatggcaaataaaagtg

SEQ ID NO: 56333 - DNA, 110 bp, synthetic construct
  source 1..110: mol_type = other DNA
actttggacacagccccagagtggcagctgtttttcagttgacttcatttccattggaccaggtccagctaagtcacctgaaactccccagagcatttttctaaacttct

SEQ ID NO: 56334 - DNA, 110 bp, synthetic construct
  source 1..110: mol_type = other DNA
ggaccaggtccagctaagtcacctgaaactccccagagcatttttctaaacttcttccacgtgccgggttcaccctcgagaacagaggagaccatccagggaagcccgtc

SEQ ID NO: 56335 - DNA, 110 bp, synthetic construct
  source 1..110: mol_type = other DNA
gaagactgggctgggaaaggggcttatgcagaatatcatttgagggtaggctcagaggcagaaggctatgccctgcaggtctcctcctacaagggcacagcaggagatgc

SEQ ID NO: 56336 - DNA, 110 bp, synthetic construct
  source 1..110: mol_type = other DNA
cttaactcttcattagaaatgaaattactaggaaactgcctgataggaaaaatctgacaagggtacacaagcaagttcattgtacatttgtattttaatgaaaactagcc

SEQ ID NO: 56337 - DNA, 110 bp, synthetic construct
  source 1..110: mol_type = other DNA
gacaagggtacacaagcaagttcattgtacatttgtattttaatgaaaactagcccaggagttgccattatggctcagaggaaacgaatccaactactaaccatgaggat

SEQ ID NO: 56338 - DNA, 110 bp, synthetic construct
  source 1..110: mol_type = other DNA
tattctgaggcatacccatcctcctcctggcaacaatgaatgccattgattcattgggtggagagcccagggccactccacttgaagctatgaggaatcagaaaatggag

SEQ ID NO: 56339 - DNA, 110 bp, synthetic construct
  source 1..110: mol_type = other DNA
gggtggagagcccagggccactccacttgaagctatgaggaatcagaaaatggagaaaactggtccgttcctagatcaaataaactgctgtggtgacggtgctcgtgcta

SEQ ID NO: 56340 - DNA, 110 bp, synthetic construct
  source 1..110: mol_type = other DNA
gaaacatggccagaccatggggttagtgtgcctggatttgaatctcagctcttctactttttagctgtgtgatcttgggcattgcacctcagtttcctcatctggaaaat

SEQ ID NO: 56341 - DNA, 110 bp, synthetic construct
  source 1..110: mol_type = other DNA
actttttagctgtgtgatcttgggcattgcacctcagtttcctcatctggaaaatgtggataaccaggtttccattgtggtcctgcaaaaacaaatctgactagtatcca

SEQ ID NO: 56342 - DNA, 110 bp, synthetic construct
  source 1..110: mol_type = other DNA
gcaggaaagatactttcccttcaggggataaagcttctggatagtaaaacctttttggttgtgcttaagggaagagcagggcctcttgtttctgggggtgggaatgggga

SEQ ID NO: 56343 - DNA, 110 bp, synthetic construct
  source 1..110: mol_type = other DNA
ggagtcagtgataaatacctgaataacttcatgctgcctctggttgcttctcctagcaaggtgagattctgttgaaggccagctcattcaagggcagatctgggaagtgg

SEQ ID NO: 56344 - DNA, 110 bp, synthetic construct
  source 1..110: mol_type = other DNA
ttgcacctgcaccctcatagatagtagtcaggttcgtttccactgagccacaatgggaacttccaccacagatacatttggagtaattaattgtctggattctgccttgt

SEQ ID NO: 56345 - DNA, 110 bp, synthetic construct
  source 1..110: mol_type = other DNA
taaaccatagtggtaactctgcaatatcatatttactactttgatttgaacaaaaggaatgccatccattatttccagaataaatatctttatgccagaattcctgtgtc

SEQ ID NO: 56346 - DNA, 110 bp, synthetic construct; identical to SEQ ID NO: 56345
  source 1..110: mol_type = other DNA

SEQ ID NO: 56347 - DNA, 110 bp, synthetic construct; identical to SEQ ID NO: 56345
  source 1..110: mol_type = other DNA

SEQ ID NO: 56348 - DNA, 110 bp, synthetic construct; identical to SEQ ID NO: 56345
  source 1..110: mol_type = other DNA

SEQ ID NO: 56349 - DNA, 110 bp, synthetic construct
  source 1..110: mol_type = other DNA
tgctacctcctaccaaagcagaccccaaggccacctacagagaaaatgtctagtgtaataaacatctctcagacttgaatgtgccttaaactgttccttttgctttttta

SEQ ID NO: 56350 - DNA, 110 bp, synthetic construct
  source 1..110: mol_type = other DNA
taataaacatctctcagacttgaatgtgccttaaactgttccttttgcttttttaatgaaaagctgtgtagagcgtggttgagagctcagctttgaagtcaggtaaagct

SEQ ID NO: 56351 - DNA, 110 bp, synthetic construct
  source 1..110: mol_type = other DNA
gccccagacctgataaattccacccttctagccctagctatctcacttgtcactctcttccaggcagagtcattttacaactcagaggcccaagtcagctcgggttctgc

SEQ ID NO: 56352 - DNA, 110 bp, synthetic construct
  source 1..110: mol_type = other DNA
gcttgcagattcatagatcctaaatttaatgaacctcatcaaataatgtgtacaaaatagtacatatctaactgcttattcacatagattttttgtttttcgctgcaccc

SEQ ID NO: 56353 - DNA, 110 bp, synthetic construct
  source 1..110: mol_type = other DNA
tggaagattggtccagagtggtggtagtggaagtggtaagaagtggtcagaatatggatatatttggagagatgaatcgagctgttgctagcttatgggtggtgtttaag

SEQ ID NO: 56354 - DNA, 110 bp, synthetic construct
  source 1..110: mol_type = other DNA
tgatcaattcaagagaagtcttactttaaaccacgcttgttagatagagaagagatggtctcccacagccagctccaggagggagcccttcccattctcccacgacactg

SEQ ID NO: 56355 - DNA, 110 bp, synthetic construct
  source 1..110: mol_type = other DNA
tggtctcccacagccagctccaggagggagcccttcccattctcccacgacactgcatagacaccttgagaacaactctgctgtatttaaatggccagttctgctgtttg

SEQ ID NO: 56356 - DNA, 110 bp, synthetic construct
  source 1..110: mol_type = other DNA
attgtccacactttctgtcgagcacaaggctcctttcatgagaacagaacctcaactgtctcattgaccattgtctgccagccccgaccccagtgcctggcacacgggag

SEQ ID NO: 56357 - DNA, 110 bp, synthetic construct
  source 1..110: mol_type = other DNA
acaaacccatgtttttctagtcaggcaacaggagggtgatcagacctcccagagactaaacgtgaagtagtaaactgggggaaacagagaaacaccaacaaacttagaca

SEQ ID NO: 56358 - DNA, 110 bp, synthetic construct
  source 1..110: mol_type = other DNA
ctaaacgtgaagtagtaaactgggggaaacagagaaacaccaacaaacttagacaaattgataaaagttggttacagggtgaatttaggcgttttcatagtaactgtggc

SEQ ID NO: 56359 - DNA, 110 bp, synthetic construct
  source 1..110: mol_type = other DNA
ggaacttcaacatacaaaagttttatacataactttcaaaactctccatgaccctgagagtaagaatctcagctctacagcaagtacctgcactgagggagacctcgatg

SEQ ID NO: 56360 - DNA, 110 bp, synthetic construct
  source 1..110: mol_type = other DNA
cccactgcaaaagttcccaggcgggatcgaacctgcgccagaggcatgacaatggcagactcttaatccactgcaccacaggggaactctgctagctgcctctgatatct

SEQ ID NO: 56361 - DNA, 110 bp, synthetic construct
  source 1..110: mol_type = other DNA
cagactcttaatccactgcaccacaggggaactctgctagctgcctctgatatctaaattctttcactggggagagaagcattttttttttttttttttgcattttctaa

SEQ ID NO: 56362 - DNA, 110 bp, synthetic construct
  source 1..110: mol_type = other DNA
acctgactcccgagaaaaaccttcaagaaccatctcttttcatccgtgccctcctgaaagcccacagccgagtgggggaccccctcctatgcctccttcatcactgaccg

SEQ ID NO: 56363 - DNA, 110 bp, synthetic construct
  source 1..110: mol_type = other DNA
gaaagcccacagccgagtgggggaccccctcctatgcctccttcatcactgaccgtcttcatccatttttaatcctccagcattttttggaaatttcttaccaactcata

SEQ ID NO: 56364 - DNA, 110 bp, synthetic construct
  source 1..110: mol_type = other DNA
agggaactctgattttattttacattggagtatagttgagtggagaaatgggaattcatgggctttcttcattcttgagttttccctttccagatcttctttcctcttct

SEQ ID NO: 56365 - DNA, 110 bp, synthetic construct
  source 1..110: mol_type = other DNA
atccattcatctgttgatggacactggggacatttggcttgttaccttttagctatcaggaataatgctgtagtgaacactggtgcacgaatatcttaggcccttccctg

SEQ ID NO: 56366 - DNA, 110 bp, synthetic construct
  source 1..110: mol_type = other DNA
tcacagagatctcccttgtgctgccgtttttggccacagaggatgtttctaggccagggattgaaccctggccacagcagcagcctgagccttggcagtgacaatgccta

SEQ ID NO: 56367 - DNA, 110 bp, synthetic construct
  source 1..110: mol_type = other DNA
tgtagcccttgactgtgaactacacaaaaaaaagggaggagtcagcactgacctcttgcttcccctcttctgagtcctacaggttcctgccctttcccttccccatcctg

SEQ ID NO: 56368 - DNA, 110 bp, synthetic construct
  source 1..110: mol_type = other DNA
cacaaaataactacagagggagatgtatgttcttttaaaagatggaacggtgatatcactactttctaaatttcaaaccattagattatgcaattcggaaaattgctatg

SEQ ID NO: 56369 - DNA, 110 bp, synthetic construct
  source 1..110: mol_type = other DNA
cttaaaaaccctcctccttttttctgcttctttcaaaagcaggaaattctggagctattcacagcccatccttctcccattcaagttagcattgctcagtcacagaatgt

SEQ ID NO: 56370 - DNA, 110 bp, synthetic construct
  source 1..110: mol_type = other DNA
tattcacagcccatccttctcccattcaagttagcattgctcagtcacagaatgttggagccaagtgtaacctaagaggtctttacgtcacagataaggaaaccgtgacc

SEQ ID NO: 56371 - DNA, 110 bp, synthetic construct
  source 1..110: mol_type = other DNA
ttaaaaagcaaacactgttatcgccaacaatcaggccattcacttgagcctgtattttgctacacactgaattgaaatgtaccatccacatcccagctgcaggcgccatc

SEQ ID NO: 56372 - DNA, 110 bp, synthetic construct
  source 1..110: mol_type = other DNA
tacagaagagttaaaaggagatggctaaaatgtggtccaagctagaatgagatctaaaatttgctacatggggagtttctgttgtggttcagtgggttaagaacttgatg

SEQ ID NO: 56373 - DNA, 110 bp, synthetic construct
  source 1..110: mol_type = other DNA
ccccttcccccctccccccctcccccccatacttcctcccatgctagctccttgcttacccctttggtgagctccccttctgtgccattcaggtgagagataattcttgc

SEQ ID NO: 56374 - DNA, 110 bp, synthetic construct
  source 1..110: mol_type = other DNA
ttacccctttggtgagctccccttctgtgccattcaggtgagagataattcttgcctcctcccaactccaatctcccttccactgcaaaaaccaaagcagccagatcccc

SEQ ID NO: 56375 - DNA, 110 bp, synthetic construct
  source 1..110: mol_type = other DNA
ctgatcctcacaacagccatataaggtggtcagaactagtagcgttattagagctgatgtttagctgacacacagcagtatagctgtactggctgctgaaataataaaac

SEQ ID NO: 56376 - DNA, 110 bp, synthetic construct
  source 1..110: mol_type = other DNA
tcttcctctccacttgaatagtctttgaacacacatttatctgcccagctgcacgaggaatccaagtcttcccttcctgtgtgaaaagttgtctttcccttaggccttta

SEQ ID NO: 56377 - DNA, 110 bp, synthetic construct
  source 1..110: mol_type = other DNA
ggtcctggtgggaggacacaggatgtaggtgcctgcaatgagtaaccagcgctttcccccaagaggcctcaatggtgacaaccctcagggccttaaagatgtattgggtt

SEQ ID NO: 56378 - DNA, 110 bp, synthetic construct
  source 1..110: mol_type = other DNA
cccccaagaggcctcaatggtgacaaccctcagggccttaaagatgtattgggtttcaggaaagagccaggcgctctagccccacgtgggaaccatggtctggtgtgctc

SEQ ID NO: 56379 - DNA, 110 bp, synthetic construct
  source 1..110: mol_type = other DNA
ccatttatagaatagcactatatcccctacctttagggccttgaagtgaatgtcccattgttagctttactaaatttaagggcagatggaacttctggatcagctaaacc

SEQ ID NO: 56380 - DNA, 110 bp, synthetic construct
  source 1..110: mol_type = other DNA
aggacactccaaaaaccaggatacgagaaggaagagaaagcaccctctcaaccaccaccattacacagtccggcaaaaacagttttagggaaaaggagaagccttcagga

SEQ ID NO: 56381 - DNA, 110 bp, synthetic construct
  source 1..110: mol_type = other DNA
caccattacacagtccggcaaaaacagttttagggaaaaggagaagccttcaggatgtcatcaagttacaaaatagcacactcatcgatgtttcagataacttccgttta

SEQ ID NO: 56382 - DNA, 110 bp, synthetic construct
  source 1..110: mol_type = other DNA
acatcgctgccatacacaagattcaagatgaatcacagacctacatatgagaagtaagacattaaagagttttagaagaaaatggagtaactccacgatattgggatggg

SEQ ID NO: 56383 - DNA, 110 bp, synthetic construct
  source 1..110: mol_type = other DNA
aagacattaaagagttttagaagaaaatggagtaactccacgatattgggatgggcaaagatgtcttagaagggtcacaaacatcactaaagggaaagaaacactaacaa

SEQ ID NO: 56384 - DNA, 110 bp, synthetic construct
  source 1..110: mol_type = other DNA
atgtcacacactaaatgtcctcgggaatatatgacaccccttgagtccggtgtatctaaggcttagacatgcatccttggtccagtaattttggcaggtggtagaactgg

SEQ ID NO: 56385 - DNA, 110 bp, synthetic construct
  source 1..110: mol_type = other DNA
gtaaaatgtgactggtgggaaaggtgaaaggatggaggaggatttatttgtgagaagaaattaatttgcaacttcttgactccctttaagagtttggtgttattacatga

SEQ ID NO: 56386 - DNA, 110 bp, synthetic construct
  source 1..110: mol_type = other DNA
agaaattaatttgcaacttcttgactccctttaagagtttggtgttattacatgagcattggatggcattgtcctctcatttgttctgttcagcaaatactactgaaccc

SEQ ID NO: 56387 - DNA, 110 bp, synthetic construct
  source 1..110: mol_type = other DNA
tggcactggctggggtcaggaatcaagcctgggatatactggtccttacccttcgagctctatgaagccagggacaccactatgttcatcattacaggtccaggtgagtg

SEQ ID NO: 56388 - DNA, 110 bp, synthetic construct
  source 1..110: mol_type = other DNA
ggaagtcactagtgctttccctccccacccatgttcccaagccctcgtttctttaaaccaatgaacatttttaaaactgcttaggttttcctaattttaagtcttctgag

SEQ ID NO: 56389 - DNA, 110 bp, synthetic construct
  source 1..110: mol_type = other DNA
gaccagccacagtggggagtatcgcgaaggagttggggggtggggtttgccccaaacaggcctttatgtcttgaatgtgtcgcgttgacctgaggtacagcatcaccgtc

SEQ ID NO: 56390 - DNA, 110 bp, synthetic construct
  source 1..110: mol_type = other DNA
acaggcctttatgtcttgaatgtgtcgcgttgacctgaggtacagcatcaccgtcattgggagaaatgtcttttaatgtcctggatcattaaaatccaataatcgcttag

SEQ ID NO: 56391 - DNA, 110 bp, synthetic construct
  source 1..110: mol_type = other DNA
catcatttgctcatcttttgactcacattgtggaacaactactactcaaagattattcaaaacaatttgctctgtcttagctatagagaattcagcctgaacaaagaaag

SEQ ID NO: 56392 - DNA, 110 bp, synthetic construct
  source 1..110: mol_type = other DNA
tcaaagattattcaaaacaatttgctctgtcttagctatagagaattcagcctgaacaaagaaaggaaagaaacaggcaataaaggaaatatttgctatgtcaaaatttg

SEQ ID NO: 56393 - DNA, 110 bp, synthetic construct
  source 1..110: mol_type = other DNA
ttaaaaaatctgttcatcccaaacccctaatttactcttccccctctttccacgttggtagctataattttgtttttggtgcctatgagtctatttctattttgtaaata

SEQ ID NO: 56394 - DNA, 110 bp, synthetic construct
  source 1..110: mol_type = other DNA
agccaccaaactgagctcctgaaccctaggatctgaagaccttggcgatcttgtcaaggtgcccaccagtgagctcccgtcttgcttgggttactccaaagagaagtcct

SEQ ID NO: 56395 - DNA, 110 bp, synthetic construct
  source 1..110: mol_type = other DNA
aaggtgcccaccagtgagctcccgtcttgcttgggttactccaaagagaagtccttgtagccacagagaagtgctgtgacaatgcctgtaatagcaaagaagggcagtgc

SEQ ID NO: 56396 - DNA, 110 bp, synthetic construct
  source 1..110: mol_type = other DNA
gggcacgtaaagatagacaaacaaaatgctctcactattgcctcgcggtgtccccgaagccagctgaccttgacttttcttcattctctgcttctcttggaggttttggc

SEQ ID NO: 56397 - DNA, 110 bp, synthetic construct
  source 1..110: mol_type = other DNA
ctgtttctgtttcttcagcccgacagtcaggtctcagggtgcataggggccccgatctgtgctcaccactgttatcatcagcacctttgatgattctgcccggaccacac

SEQ ID NO: 56398 - DNA, 110 bp, synthetic construct
  source 1..110: mol_type = other DNA
tctgtgctcaccactgttatcatcagcacctttgatgattctgcccggaccacacagaccacgaatctctgtgctggacaccatctgctcagcttggggatcagtgcaga

SEQ ID NO: 56399 - DNA, 110 bp, synthetic construct
  source 1..110: mol_type = other DNA
gcagagccaggaaaatcagtgtcaaagggaagtagaagaaaggaatgagcagaagttcaggggaggaacctaaaatcacacgtgtggggggtagatgcattaggattggg

SEQ ID NO: 56400 - DNA, 110 bp, synthetic construct
  source 1..110: mol_type = other DNA
gagatgctcatggtctcctgagtgctgggcatatcctagaaggtagaaatatttgtcctcctcacacagagactgcgggactagactttttcatttactgattcgttgat

SEQ ID NO: 56401 - DNA, 110 bp, synthetic construct
  source 1..110: mol_type = other DNA
aacacacatttactatgacatgacttcttcccatgaaagacttgcacccatgagagacagcccacccagaggacattcgccacgctgggagaaccataattttacattac

SEQ ID NO: 56402 - DNA, 110 bp, synthetic construct
  source 1..110: mol_type = other DNA
gacagcccacccagaggacattcgccacgctgggagaaccataattttacattacttggcttccatcaaaactgtgaagccaccaaatgtgagttactaatgaaataaac

SEQ ID NO: 56403 - DNA, 110 bp, synthetic construct
  source 1..110: mol_type = other DNA
ggggaactcctcatatggccactttaaatacatgtgattctcttccagaatcacaggtccagattagtgtaatttgcgtcattgctcacctgtcaaaaattctctggcat

SEQ ID NO: 56404 - DNA, 110 bp, synthetic construct
  source 1..110: mol_type = other DNA
ggtccagattagtgtaatttgcgtcattgctcacctgtcaaaaattctctggcattaatgacagacttgaaggatagctcagaaatgcggcttattttggaagatgagga

SEQ ID NO: 56405 - DNA, 110 bp, synthetic construct
  source 1..110: mol_type = other DNA
tgtaaacatttaagatgcctgtcgtcacccagaacctttgtttacttatcaccactagctagtgctcttatttacatgtttcgtgttctcttgcgtttttacttttatgc

SEQ ID NO: 56406 - DNA, 110 bp, synthetic construct
  source 1..110: mol_type = other DNA
tagctagtgctcttatttacatgtttcgtgttctcttgcgtttttacttttatgcagagaggttagtgtatgtgaatgcacttcatagctcccgagtagcagctatgaag

SEQ ID NO: 56407 - DNA, 110 bp, synthetic construct; identical to SEQ ID NO: 56405
  source 1..110: mol_type = other DNA

SEQ ID NO: 56408 - DNA, 110 bp, synthetic construct; identical to SEQ ID NO: 56406
  source 1..110: mol_type = other DNA

SEQ ID NO: 56409 - DNA, 110 bp, synthetic construct
  source 1..110: mol_type = other DNA
cttgctgagaagaagataccccacaacccgctgaactgaatacaccttcttcatgtgatggaggcaagaactccaaccccagcacgtcagagttctttttccaaagtact

SEQ ID NO: 56410 - DNA, 110 bp, synthetic construct
  source 1..110: mol_type = other DNA
attgacctctaccagggctgagcttaagtttttcattgctccctcttctctgcgtgtgcactaagggccctagagagtggggacatttttataatggtctacagaataac

SEQ ID NO: 56411 - DNA, 110 bp, synthetic construct
  source 1..110: mol_type = other DNA
ccatcttatactttcaaccttgcctctgattccccagccccagctgcctctccgctacatactctgcatctcagggattcagtacagggggaaaagcaccattatggggg

SEQ ID NO: 56412 - DNA, 110 bp, synthetic construct
  source 1..110: mol_type = other DNA
ttggaaggctctgaattggctgctattaaatacataaaccatctgtcactctcaatgtgcttatcatgtaaagttccatctaagggtggagactccaaatattgggaaaa

SEQ ID NO: 56413 - DNA, 110 bp, synthetic construct
  source 1..110: mol_type = other DNA
acacttcggagggaaaaaaagaactcagaaacactgcgtgctagaagccaaaaaagggacagctatcctgttccacaatccacggaggaccagataagaagtgcttcctt

SEQ ID NO: 56414 - DNA, 110 bp, synthetic construct
  source 1..110: mol_type = other DNA
gggacagctatcctgttccacaatccacggaggaccagataagaagtgcttccttttactttgacatctgtaaattctgtgaaatatttagtgcaattacttacatatgt

SEQ ID NO: 56415 - DNA, 110 bp, synthetic construct
  source 1..110: mol_type = other DNA
tagtcgggtttggtactactgagccacaacaggaactcctcaaacacatttttccttttgcggtcagacatccttcccctccatcactcccataccagatcttaacatcc

SEQ ID NO: 56416 - DNA, 110 bp, synthetic construct
  source 1..110: mol_type = other DNA
ttttgcggtcagacatccttcccctccatcactcccataccagatcttaacatcctacacctgcccggctatctctacctgcacaactgcccctcgtccttgaatccagc

SEQ ID NO: 56417 - DNA, 110 bp, synthetic construct
  source 1..110: mol_type = other DNA
attctgggtcagtaggtctagcgtaaagctgatattctgtatttaaacgtgctgtcagataataatgatgccactagcccatggaccacacttcatagcaagggcataga

SEQ ID NO: 56418 - DNA, 110 bp, synthetic construct
  source 1..110: mol_type = other DNA
aacctgggctttgcagaaagatggagatgaagggtcatcttcaaaccagcttttgcatccacagctacatctgagcacatcagtgaattaccacatctactcagcatcgc

SEQ ID NO: 56419 - DNA, 110 bp, synthetic construct
  source 1..110: mol_type = other DNA
catccacagctacatctgagcacatcagtgaattaccacatctactcagcatcgccaaagcccatcatgtattagtttctagtgctgtcctaacaaagtaccacaagctg

SEQ ID NO: 56420 - DNA, 110 bp, synthetic construct
  source 1..110: mol_type = other DNA
agtcagattcattactgctgaggcacgatgggaactcctgagctgcaccactttaagccaaatcattttttttttttttttctttttggtcgtttttcttttctagggcc

SEQ ID NO: 56421 - DNA, 110 bp, synthetic construct; identical to SEQ ID NO: 56420
  source 1..110: mol_type = other DNA

SEQ ID NO: 56422 - DNA, 110 bp, synthetic construct
  source 1..110: mol_type = other DNA
aacctattagtggcttttaagcaattgatactgtttcacagggagtaaatgtcaaattgaagggaagagagcagttagaataacatttagggagttcctgttgtggctca

SEQ ID NO: 56423 - DNA, 110 bp, synthetic construct
  source 1..110: mol_type = other DNA
tttaagcaattgatactgtttcacagggagtaaatgtcaaattgaagggaagagagcagttagaataacatttagggagttcctgttgtggctcagtgggttaagaaccc

SEQ ID NO: 56424 - DNA, 110 bp, synthetic construct
  source 1..110: mol_type = other DNA
gccaaaacttttgatcacatggttggcagatatctgtttggtttgatggatacatttaaatttgcagaaattttcatctcgagcttttacttcttgttgatatttttcca

SEQ ID NO: 56425 - DNA, 110 bp, synthetic construct
  source 1..110: mol_type = other DNA
actactgtcagctgtaagacgtcttagcattctacctcggcttttactaaattcctttcctttcagctttgaaaacattctaccctgttcattcagagtattcatagaga

SEQ ID NO: 56426 - DNA, 110 bp, synthetic construct
  source 1..110: mol_type = other DNA
ttactctgacaaccacctactccatagagagattatgctgagttcatttgcagatttctgtttagcctcgctgacaaaatgatacttaacctcttatacagtcagtcttt

SEQ ID NO: 56427 - DNA, 110 bp, synthetic construct
  source 1..110: mol_type = other DNA
atcctttcaccatttagcaatttagggctatgttccctagagagggagtgatactcatgtctccatatcacagatcctaacatagttctttgcaaagagtaaaaacaaaa

SEQ ID NO: 56428 - DNA, 110 bp, synthetic construct
  source 1..110: mol_type = other DNA
catgtctccatatcacagatcctaacatagttctttgcaaagagtaaaaacaaaacaaatttttttcggggattatgacatgtggtatcacccttcatatctacttaagg

SEQ ID NO: 56429 - DNA, 110 bp, synthetic construct
  source 1..110: mol_type = other DNA
ttaattatgtatcttccagctaacatacatcatacacaaagatcatagaactgaacagataccaccttaaatgtctgtacagtttgagaagagaaccgtgtttaggaaac

SEQ ID NO: 56430 - DNA, 110 bp, synthetic construct; identical to SEQ ID NO: 56429
  source 1..110: mol_type = other DNA

SEQ ID NO: 56431 - DNA, 110 bp, synthetic construct
  source 1..110: mol_type = other DNA
atcacttcctacataatgtgctttgatatattaagaaaagcctctgccacacaattcattgccttttactaatgcttggagcgccattattagagatcatttctttagtt

SEQ ID NO: 56432 - DNA, 110 bp, synthetic construct
  source 1..110: mol_type = other DNA
tcattgccttttactaatgcttggagcgccattattagagatcatttctttagttacagattttgttttgaaacaattttctctagtcattcagctccctgtgcttagga

SEQ ID NO: 56433 - DNA, 110 bp, synthetic construct
  source 1..110: mol_type = other DNA
aactagtgtttatttgcatcaccttctcccctatggacttttaagcttgtgaaatcagatttaaatgaacataaaggggagcgttagtgaaaagactacacgaaacagca

SEQ ID NO: 56434 - DNA, 110 bp, synthetic construct
  source 1..110: mol_type = other DNA
cagatttaaatgaacataaaggggagcgttagtgaaaagactacacgaaacagcaaacatttagcaagaagaacaatggaagataatgccgtagaaatagtgggaatgat

SEQ ID NO: 56435 - DNA, 110 bp, synthetic construct
  source 1..110: mol_type = other DNA
tcagatgctccatctataaagagtagacaaactgcaagacctgaggccacttccaggttccacagtctatggtttcaggtaaccagctagtaaaacggagaagttacaat

SEQ ID NO: 56436 - DNA, 110 bp, synthetic construct
  source 1..110: mol_type = other DNA
ggttccacagtctatggtttcaggtaaccagctagtaaaacggagaagttacaatcgagggaccatcaactctcagctgtcctaacatctttcagttttaggttttaaga

SEQ ID NO: 56437 - DNA, 110 bp, synthetic construct
  source 1..110: mol_type = other DNA
tggctaaggccagatggaatgtcaagatgggggctcaggtaggtgggcgtgagcttggagcagagagggggatggggaaaacctccagcacctggaaactgtgtctatct

SEQ ID NO: 56438 - DNA, 110 bp, synthetic construct
  source 1..110: mol_type = other DNA
tggagcagagagggggatggggaaaacctccagcacctggaaactgtgtctatctttctccctcttgtacccagagcaccagccttgtgcttgaggacagacacaccggg

SEQ ID NO: 56439 - DNA, 110 bp, synthetic construct
  source 1..110: mol_type = other DNA
ccaaggtggaccctcctgttgcccatgtggagttgaggcaggatattaactcaggagttagtgtaggcgcatggccttcgatgcattctttgatatggtcatcagctgac

SEQ ID NO: 56440 - DNA, 110 bp, synthetic construct
  source 1..110: mol_type = other DNA
ttaactcaggagttagtgtaggcgcatggccttcgatgcattctttgatatggtcatcagctgacatctgtggcttaagagttcgagggaataacatccccacaggcctt

SEQ ID NO: 56441 - DNA, 110 bp, synthetic construct
  source 1..110: mol_type = other DNA
gccctgatcccaagcacttctctcccgactgcacagtgcatcttataacttctcttggtagcttctaaaggcactggaaacagtcacggttctcttcctgcaaatccttt

SEQ ID NO: 56442 - DNA, 110 bp, synthetic construct
  source 1..110: mol_type = other DNA
atattatttagtccgccatagtgctggagccacaacaaaagtaatttgcgtccatctacgtaatagctaccccaccagatacgtgatacatgccgtaagagaaaagcaaa

SEQ ID NO: 56443 - DNA, 110 bp, synthetic construct
  source 1..110: mol_type = other DNA
ctacgtaatagctaccccaccagatacgtgatacatgccgtaagagaaaagcaaaggagatctttggaaatgcataaaaggtagcaattgcagggtttgagaaagtctta

SEQ ID NO: 56444 - DNA, 110 bp, synthetic construct
  source 1..110: mol_type = other DNA
ccctcaggaagtacgaggaataaggggaagctcatcattcatcctgttcagctctcccagtgaggagaatgctttctggtggggtaattccctcttggtgctgagcagtg

SEQ ID NO: 56445 - DNA, 110 bp, synthetic construct
  source 1..110: mol_type = other DNA
gagattcaggatgacagaatttattttctaaatatgagcattaccaccagcaaatacaagggaggagcagacttcagatgctatggttaatttaatgttgtgtacttttt

SEQ ID NO: 56446 - DNA, 110 bp, synthetic construct
  source 1..110: mol_type = other DNA
acaagggaggagcagacttcagatgctatggttaatttaatgttgtgtacttttttcccccctcatcaggtttagtgtgcctgttgtggagttccttaaagagacctctc

SEQ ID NO: 56447 - DNA, 110 bp, synthetic construct
  source 1..110: mol_type = other DNA
agctatagcactcttagaaaaccctgttttgtttgggtttttgtcattttcacggagcccaccagtagtagggagaaaccagtgtgggatggtggaagtcaaagtctcca

SEQ ID NO: 56448 - DNA, 110 bp, synthetic construct
  source 1..110: mol_type = other DNA
acctttcttttgagtttaatgggaaaccagtttttgcaaagctcatgttggctattacctgacaaaacggggttgaacaagagggggttttatctattaagactgctttc

SEQ ID NO: 56449 - DNA, 110 bp, synthetic construct
  source 1..110: mol_type = other DNA
gataacctaaaagcacttattattaagttgcaagactaaggcaggggatagagaagatacgaaggagatcttcaaactgtgtctatataaaaaaaagaactctgaatgtg

SEQ ID NO: 56450 - DNA, 110 bp, synthetic construct
  source 1..110: mol_type = other DNA
ggatagagaagatacgaaggagatcttcaaactgtgtctatataaaaaaaagaactctgaatgtgatcattggcatgtagaattagaagaaaatagattgaagtatctag

SEQ ID NO: 56451 - DNA, 110 bp, synthetic construct
  source 1..110: mol_type = other DNA
tcctcagatttgccttttgcagctgattttatttacttataggcatattacacttagaaaaattctatggaatcagcattaaaatcaaaagaccgtgtgacttttcttat

SEQ ID NO: 56452 - DNA, 110 bp, synthetic construct
  source 1..110: mol_type = other DNA
atcaaacaaaatgcaccagacatggatattgaatatgaatgaaaacttcaatagtagacatagggagtgccagttgatgtaggaaatgctggtatccatggttatggcca

SEQ ID NO: 56453 - DNA, 110 bp, synthetic construct; identical to SEQ ID NO: 56452
  source 1..110: mol_type = other DNA

SEQ ID NO: 56454 - DNA, 110 bp, synthetic construct
  source 1..110: mol_type = other DNA
tttaaacaacagacatttattcctcacagttctagaggccaggaattcaaagatcaaagtgcaggtagatttgattctcagtgatggtcaccttctcaccttatcttccc

SEQ ID NO: 56455 - DNA, 110 bp, synthetic construct
  source 1..110: mol_type = other DNA
gtgtgttgcatcacttaagtgttcttggtggaaggagatagggaaggacattacacctgaatttatttaaatctttcaagctaaattccaatttacagaaaatttcctgg

SEQ ID NO: 56456 - DNA, 110 bp, synthetic construct
  source 1..110: mol_type = other DNA
ccatcccaggatcctgcactggggagaaaagcccttaaaagtctggttttgaaaggcagaggggctaagggtcagaaaagctaggggcttaagaaatcgagacttaactc

SEQ ID NO: 56457 - DNA, 110 bp, synthetic construct
  source 1..110: mol_type = other DNA
gcagaggggctaagggtcagaaaagctaggggcttaagaaatcgagacttaactctgaaaaggtgcacgcaaaatctcatctgctccgagtcctggtgcagagacagcag

SEQ ID NO: 56458 - DNA, 110 bp, synthetic construct
  source 1..110: mol_type = other DNA
ccttgtgcatttacctttgctttctcacatcatccagtccagagcaatctctttttcttccttaagctcttctccaattatccacacaagcccaagtcctgtcagaagcc

SEQ ID NO: 56459 - DNA, 110 bp, synthetic construct
  source 1..110: mol_type = other DNA
ttggcggatagaaatgtggaaacagagatttgggtgaaggagaaaaagataggtttatagcttcaccaggcaaagggggctatagcaggctaaagccttaaagactgtac

SEQ ID NO: 56460 - DNA, 110 bp, synthetic construct
  source 1..110: mol_type = other DNA
aagataggtttatagcttcaccaggcaaagggggctatagcaggctaaagccttaaagactgtaccccataccccacccctttggaagggtttaggaggtggttttatag

SEQ ID NO: 56461 - DNA, 110 bp, synthetic construct
  source 1..110: mol_type = other DNA
tcattgcaatgttatgtttatcagaagattcttaactacaaaacgtcctcactggctggaaaggaaagctgcatctgacagaatgagggaaacgggaggcccagatctgc

SEQ ID NO: 56462 - DNA, 110 bp, synthetic construct
  source 1..110: mol_type = other DNA
atattcaacattgtttggaaaggtttttttattgaataggagctgatatgtaatcaaattaaaagtttaaaaattaaaaagagcataccagcgggagttccctttgtgac

SEQ ID NO: 56463 - DNA, 110 bp, synthetic construct
  source 1..110: mol_type = other DNA
tttttaagttaagatttttctctttgtcaacagttatgaaatttcttatcaatcaagaaatacatttccttcagtctgagaagtgtgtgtgtgtgtgtgtgtgtgtgttt

SEQ ID NO: 56464 - DNA, 110 bp, synthetic construct; identical to SEQ ID NO: 56463
  source 1..110: mol_type = other DNA

SEQ ID NO: 56465 - DNA, 110 bp, synthetic construct
  source 1..110: mol_type = other DNA
ttaattttattttattataccttcctttgagagtgaatcgtgcagagaacatattttagaaaagtggcctgatgagtaataatgtgggttctgtcaagagctcttccata

SEQ ID NO: 56466 - DNA, 110 bp, synthetic construct
  source 1..110: mol_type = other DNA
ttagaaaagtggcctgatgagtaataatgtgggttctgtcaagagctcttccatataacaaacatccttctgctaaacagagagttttgccttgcatgttattgtttgca

SEQ ID NO: 56467 - DNA, 110 bp, synthetic construct
  source 1..110: mol_type = other DNA
taactatatgtgtgtgtatccattgaggccaaccttattccctcatttattcactccttttttccatttgtctgtttttgctgcacccattctcaaaagaaagcttctac

SEQ ID NO: 56468 - DNA, 110 bp, synthetic construct
  source 1..110: mol_type = other DNA
ccttttttccatttgtctgtttttgctgcacccattctcaaaagaaagcttctacacatttttacaggttttgctattaactttccagattataaaatctttgcagtgac

SEQ ID NO: 56469 - DNA, 110 bp, synthetic construct
  source 1..110: mol_type = other DNA
ggcagctggtggctccattggcactggatggtcaagatggccttgctctacagcctagccttctccctgggccctttcttcctggttctctccacgtggtctcatcagca

SEQ ID NO: 56470 - DNA, 110 bp, synthetic construct
  source 1..110: mol_type = other DNA
tagccttctccctgggccctttcttcctggttctctccacgtggtctcatcagcagctagtgcaggaccttgcatccttgtttgaggatgacatatgcagcccaccgaca

SEQ ID NO: 56471 - DNA, 110 bp, synthetic construct
  source 1..110: mol_type = other DNA
tgtgggtgtggaagaaaaaaaaaaaagacaatgggaaaaagaagagaacacgctttagttgtaatataatgaatcatattttgtcaatagagctgttccactatggtcag

SEQ ID NO: 56472 - DNA, 110 bp, synthetic construct
  source 1..110: mol_type = other DNA
tagttgtaatataatgaatcatattttgtcaatagagctgttccactatggtcagcctatctcaggaagtgattctctgtcaccagaagtgttctagtaaaagctggatg

SEQ ID NO: 56473 - DNA, 110 bp, synthetic construct
  source 1..110: mol_type = other DNA
taaaaggttcccatttcccacttcctttgtctgatggcctctagttatacagttaggctctgttttcatcccaagcttcattcctattacctcttctctgtctaagcttt

SEQ ID NO: 56474 - DNA, 110 bp, synthetic construct
  source 1..110: mol_type = other DNA
cagtaatctacaaaggaaaatgtttctctgagttctatgagctgctcctgcaacttaatcaaagccaaggaggcagaatcttggcacctccaatttatggctaggtgagt

SEQ ID NO: 56475 - DNA, 110 bp, synthetic construct
  source 1..110: mol_type = other DNA
tttctagaagcaacaagcagtcttattacagaaccagcctcatggccaacaatagggaaactcaaaccctcatgcatttctaaagtccccaggacttttgatagccacag

SEQ ID NO: 56476 - DNA, 110 bp, synthetic construct
  source 1..110: mol_type = other DNA
ggaaactcaaaccctcatgcatttctaaagtccccaggacttttgatagccacagcagtagttctgggtgcatctagtctccacaggacccattttagaaggctgactct

SEQ ID NO: 56477 - DNA, 110 bp, synthetic construct
  source 1..110: mol_type = other DNA
cgacgggaactctgcatatatctttttgaattaacagttttggccagatatatgctcaggagagggatttctgggttgtatggttctatatttagttttctaaggaagct

SEQ ID NO: 56478 - DNA, 110 bp, synthetic construct
  source 1..110: mol_type = other DNA
agatatatgctcaggagagggatttctgggttgtatggttctatatttagttttctaaggaagctccatactgttgtccatggtatgtggttgtaccaatttacattcct

SEQ ID NO: 56479 - DNA, 110 bp, synthetic construct
  source 1..110: mol_type = other DNA
gcattctctatttttttttcagttggacaaatttctatcctagatgaaatactacagtcttaattactgcagctttttagtaagttttgctatctagtagtacgtaagtt

SEQ ID NO: 56480 - DNA, 110 bp, synthetic construct
  source 1..110: mol_type = other DNA
caacagtcaggatttgaacccatctcaggtggattgcatgccattctctctctatgccattacattaaaccttgatgcattcagagctttaaaggggaaatgagaacttg

SEQ ID NO: 56481 - DNA, 110 bp, synthetic construct
  source 1..110: mol_type = other DNA
gccattacattaaaccttgatgcattcagagctttaaaggggaaatgagaacttgacagaatgatgcacagtcaagaactagtggaggatggaggcaaaagataaggaaa

SEQ ID NO: 56482 - DNA, 110 bp, synthetic construct
  source 1..110: mol_type = other DNA
aatgaatgaacaggtaaattgtcaggactcatctcaaacttcctccattaactgttgagaatgaaactgtctgcctgaagtctttttagcagaagtaccactaggtcagg

SEQ ID NO: 56483 - DNA, 110 bp, synthetic construct
  source 1..110: mol_type = other DNA
aaggctgcacctaggcttcagggcagcccgctgagggggatggggagaggttgatcctcactgatttcccaccctggcttccgggagggctgttcagtgaaaagctttgt

SEQ ID NO: 56484 - DNA, 110 bp, synthetic construct
  source 1..110: mol_type = other DNA
tgataaggccaagacacaagtatccagttgcttggattatcatatattagaagcagcaatttaggggatgagagcaaacatatcgcaagtggtaggacaggacattaaag

SEQ ID NO: 56485 - DNA, 110 bp, synthetic construct
  source 1..110: mol_type = other DNA
gtgtaaggtaacatgggaacaaatgcaggagctaggaggggtaaaattgctggtaggagaggcaagaattacttttattttaattagtggattgttttggagagaggaga

SEQ ID NO: 56486 - DNA, 110 bp, synthetic construct
  source 1..110: mol_type = other DNA
agcatctgaccagttcttttagacctgagcctgtggagaatcacgccaggactggggaaggcacagtaaattaagctgagctgtgtagtctgtttccaggtcactgcctt

SEQ ID NO: 56487 - DNA, 110 bp, synthetic construct
  source 1..110: mol_type = other DNA
ggaaggcacagtaaattaagctgagctgtgtagtctgtttccaggtcactgccttttgcctctttctcatgccttgttcaccccttgaccttgttagaacagtcatgttt

SEQ ID NO: 56488 - DNA, 110 bp, synthetic construct
  source 1..110: mol_type = other DNA
tctttcttctgctggtttggtcaaaagttcttcctagtggaggaaggagagtgcgtaggaggtgcaagtctttctggatggattctcctgtttgttcaaatgagggcatg

SEQ ID NO: 56489 - DNA, 110 bp, synthetic construct
  source 1..110: mol_type = other DNA
aggccatgggtgcagccataaaaacaacaacaacaaaaactgtatttatataaaataggcagcagtgggccagtttgctgacacttggattcagtggaccagatgcaaat

SEQ ID NO: 56490 - DNA, 110 bp, synthetic construct
  source 1..110: mol_type = other DNA
taggcagcagtgggccagtttgctgacacttggattcagtggaccagatgcaaatccgttttgtaatggagagttgggggagatgaaggtgatgatggcaaactcccctg

SEQ ID NO: 56491 - DNA, 110 bp, synthetic construct
  source 1..110: mol_type = other DNA
agacgataatcctcttttcactccccaaactgtcttttaaaatgtttcttctgtctggaataaaaaatagaaaagactatatctcagataaccttatgagctttccttac

SEQ ID NO: 56492 - DNA, 110 bp, synthetic construct
  source 1..110: mol_type = other DNA
ctggtacaacttaaattactcacaaatatctatatcttgtctaccactagtggctcaagcattacacgtaaccaaccctactgtttatcccaaaggcctagagcaaggct

SEQ ID NO: 56493 - DNA, 110 bp, synthetic construct
  source 1..110: mol_type = other DNA
tggatcactgaaagcaaagcaggcaaatagggaaagaaaatccacctggattctgtcacaaaggaaaaaaaaaatattttttttcactacataaggtgagagacgttaac

SEQ ID NO: 56494 - DNA, 110 bp, synthetic construct
  source 1..110: mol_type = other DNA
aaaatgtatatgaagagggaagaaggcaggaaggatatgcaccaaaatatcaatggcactcggccataggaagcagatgcaactggccgtgatctaaaggctctacaacc

SEQ ID NO: 56495 - DNA, 110 bp, synthetic construct
  source 1..110: mol_type = other DNA
attgccctttaaaaaaatgacaacattttaagagaaagcaacacttaccaaaaagaaacaaaaaccaccagctttacacaaagaaatttgccaacaggctggattggact

SEQ ID NO: 56496 - DNA, 110 bp, synthetic construct
  source 1..110: mol_type = other DNA
gttaaccactgagccacgaagggaactctcaaggatgataatataattttaaatattacattctttaaaggactaagagctactagaattctctgaaattttctgaaatt

SEQ ID NO: 56497 - DNA, 110 bp, synthetic construct
  source 1..110: mol_type = other DNA
acggtggcatctggggataattacatttcgctgacatgataaacttggctggctgctttgacattatatttcctaaattcctttgtggaaaagggaatgaccaaaaaaag

SEQ ID NO: 56498 - DNA, 110 bp, synthetic construct
  source 1..110: mol_type = other DNA
atagtcattctgtgaattcacaaatctattctaccatttttaaaatattgcggggttgaagcttttgtttatgaagagttgtcgatttcctataatcagagctataaatt

SEQ ID NO: 56499 - DNA, 110 bp, synthetic construct
  source 1..110: mol_type = other DNA
aaggccagttttagccagttgctcatcagacaagtttaacatatagaactgctgtaagctttcaaagtgaaggaagctcttcccacatctgactgcaaaaattaattcca

SEQ ID NO: 56500 - DNA, 110 bp, synthetic construct
  source 1..110: mol_type = other DNA
aaaaggaagaaagtctttcttaagctgatctaatataccaattagctctcattcggtcatgtgcttctacaagattgtggttggggtagggatggagtgttctgattggc

SEQ ID NO: 56501 - DNA, 110 bp, synthetic construct
  source 1..110: mol_type = other DNA
tctacgcagggtcactgttgtaactgccaagagaaagctttcaggaatgagcgagtgctcagagaaatcaggtagcatgctccgtccagcatggtgatcctttctgacaa

SEQ ID NO: 56502 - DNA, 110 bp, synthetic construct
  source 1..110: mol_type = other DNA
tgctcagagaaatcaggtagcatgctccgtccagcatggtgatcctttctgacaatgctgatagagggacctctcctgcagtccattgatttcagtgtcaggcagatgaa

SEQ ID NO: 56503 - DNA, 110 bp, synthetic construct
  source 1..110: mol_type = other DNA
tttgaaatcccaatgaaaatgcagtttaatgcatccagtattcctctagagaaacagaatcggatcatagcttgattttaggacagcaatgagattaaactccatggtct

SEQ ID NO: 56504 - DNA, 110 bp, synthetic construct
  source 1..110: mol_type = other DNA
tggctcaaagagatggctgtgaaacaagttatactacagataaaaataaacccaagccaacatgaatttttaataagcaaaaaccgtattttatggtgacattaaaaaca

SEQ ID NO: 56505 - DNA, 110 bp, synthetic construct
  source 1..110: mol_type = other DNA
aggcgcctccccttttatgggaccatgcagatgaaatgctccatcactgtaaattgctagacaactcttggtttttccaaagctaaataggaagcaaagtgcccagcaga

SEQ ID NO: 56506 - DNA, 110 bp, synthetic construct
  source 1..110: mol_type = other DNA
cagcataaactatacccactattggaaaagcagtttagctggtatcatttagaaagaaaagtcgcatgactctctatctcattcatgattatacaagtggaatttaaaat

SEQ ID NO: 56507 - DNA, 110 bp, synthetic construct
  source 1..110: mol_type = other DNA
ctgcagtctagttaacaaaacaaaatggatgccatggcagcaatactgtggagtagctaggctaaactcccagtacccaccaactcatatattctatgaaggtgcaaaat

SEQ ID NO: 56508 - DNA, 110 bp, synthetic construct
  source 1..110: mol_type = other DNA
ctgggccagggatcaaatccaagccgcagaagcaacctctaccacagaggtagtaacactggatccttagctcattgagccacagtggggacttcaaattttatgttttt

SEQ ID NO: 56509 - DNA, 110 bp, synthetic construct
  source 1..110: mol_type = other DNA
ttgtggagttaaaagatcaccactgccctcattgtagggagactcttcagatatatctcagcagcttcaattctctgcaggatggaaattggtgaaaagcaaagctgaag

SEQ ID NO: 56510 - DNA, 110 bp, synthetic construct
  source 1..110: mol_type = other DNA
aaagtactgattctgggactcttaaattaaaactttaaggagatatctggtcccccatagagaagttcaaaaggtcctttagaatccctttcaattcagtctgttagaaa

SEQ ID NO: 56511 - DNA, 110 bp, synthetic construct
  source 1..110: mol_type = other DNA
catagagaagttcaaaaggtcctttagaatccctttcaattcagtctgttagaaaaattttatttttttttatttttttgttgtcttttttttagggccacacccacgcc

SEQ ID NO: 56512 - DNA, 110 bp, synthetic construct; identical to SEQ ID NO: 56510
  source 1..110: mol_type = other DNA

SEQ ID NO: 56513 - DNA, 110 bp, synthetic construct; identical to SEQ ID NO: 56511
  source 1..110: mol_type = other DNA

SEQ ID NO: 56514 - DNA, 110 bp, synthetic construct
  source 1..110: mol_type = other DNA
cccattcaagttgtctggttgcagctgtctttactatagtgcactgtgcctggtgaacaagccagaatgctcctatcagcggttaagacacccccttcccctgacggagc

SEQ ID NO: 56515 - DNA, 110 bp, synthetic construct
  source 1..110: mol_type = other DNA
aacaagccagaatgctcctatcagcggttaagacacccccttcccctgacggagctatgaacatactgagaagtgcttagttgggaatgttaaggcattacctctgtgaa

SEQ ID NO: 56516 - DNA, 110 bp, synthetic construct
  source 1..110: mol_type = other DNA
gagtatttaactggattctttaagttcacagacacacaaattagtcaaagatatcaagagttagagttaggaccctctggtttatactctattgagtttccttttctttc

SEQ ID NO: 56517 - DNA, 110 bp, synthetic construct
  source 1..110: mol_type = other DNA
ggtgaggacagggtcctgtagcacagctagaagcgaagcatcccagccccctgccaaacgccaagaaatccccctccttcaactgaaggatcataacatcagggattccc

SEQ ID NO: 56518 - DNA, 110 bp, synthetic construct
  source 1..110: mol_type = other DNA
ccgttttagtaagataattgccagcaggaccgtggaagagaatctggaggcagaaagaatacttagtaatgtcagggacaaaaaaaaaggctaaggcagtgataatgggt

SEQ ID NO: 56519 - DNA, 110 bp, synthetic construct
  source 1..110: mol_type = other DNA
gctttaaattgccctctactttttcatccaccttttcaaatgccacttggtggtggagcctgagctaggaaactaggttttaggatatgtgggagactcttgcagccaga

SEQ ID NO: 56520 - DNA, 110 bp, synthetic construct
  source 1..110: mol_type = other DNA
gacacaaagacgtcacctatagcttgatttttgaaaggtaaggactcatcttcgagacatatagtaatcctccctttcatagaaatgatactttttttcttaccaagttc

SEQ ID NO: 56521 - DNA, 110 bp, synthetic construct
  source 1..110: mol_type = other DNA
gactgggacctggaatacagcagtgggagagctggaaacctcagcctctgctctccaaaagatgatgtagccatgagcctctccacccccacccacccataattgctatt

SEQ ID NO: 56522 - DNA, 110 bp, synthetic construct
  source 1..110: mol_type = other DNA
atagattagttacctgggaactaatctattttctgggaggtaggctgtccaactctgtcccattagctaaatttatcagattaactagttggtgcccatagactagcatt

SEQ ID NO: 56523 - DNA, 110 bp, synthetic construct
  source 1..110: mol_type = other DNA
gctagtttccaaggaaacctatctaaattggtacccacaaggaggtaatccacaaatggtatctcacactctcaaagaaacaaacaaacgaaaagactcataacaactgt

SEQ ID NO: 56524 - DNA, 110 bp, synthetic construct
  source 1..110: mol_type = other DNA
cataggtacacagcatacaggtaagcctctctaaaaggtaaaaacctccgttaatactataaggcagcagactcagctataaggaactcagctataaggaacatcttgag

SEQ ID NO: 56525 - DNA, 110 bp, synthetic construct
  source 1..110: mol_type = other DNA
actataaggcagcagactcagctataaggaactcagctataaggaacatcttgagaaaatgaacactaagagaacacactgaaaatttgctaacatgattcaaagaagtg

SEQ ID NO: 56526 - DNA, 110 bp, synthetic construct
  source 1..110: mol_type = other DNA
atagaagtcctgagcacacaaacatgaacactgggaaaaataaagaggttattaattatgccagactgcaaagccagcaacgaacacaaagcaaaacaggacgctgtaac

SEQ ID NO: 56527 - DNA, 110 bp, synthetic construct
  source 1..110: mol_type = other DNA
ttatgccagactgcaaagccagcaacgaacacaaagcaaaacaggacgctgtaacagatgagatggcaagaagcaataaacaggcggctggcctgagcgctattagggct

SEQ ID NO: 56528 - DNA, 110 bp, synthetic construct
  source 1..110: mol_type = other DNA
gcctcccccaaccatccaacttgggcagaaacacgagacttagtttaaagatcagtcccgtgcaagatgccaggaagagagagaaaaccaggaagcgtgaccgtgttcac

SEQ ID NO: 56529 - DNA, 110 bp, synthetic construct
  source 1..110: mol_type = other DNA
gtaatccaaaatcccagtcagtgtctgcatccggctcagggcctcctggtgatacaagccccctccatcaggtccaggtggctcgtcatggctgtccctttctcctccct

SEQ ID NO: 56530 - DNA, 110 bp, synthetic construct
  source 1..110: mol_type = other DNA
agtaatgtgcctttatgttgtgctttgcttctgcatgcaaagcatcacactgatgttacatcatttacctttaaagggtctatgagaagaagatgaagggcctgtgttat

SEQ ID NO: 56531 - DNA, 110 bp, synthetic construct
  source 1..110: mol_type = other DNA
cacactgatgttacatcatttacctttaaagggtctatgagaagaagatgaagggcctgtgttattagtttcatcttacatgtgataaaaataaggtttaagaagtttaa

SEQ ID NO: 56532 - DNA, 110 bp, synthetic construct
  source 1..110: mol_type = other DNA
tgtctctctcaacctgaagatccccagaaaacataagttgagctccacagagcattcatgaatatggcagattttaaagatgttttcctgggcacatgaagaagagggtt

SEQ ID NO: 56533 - DNA, 110 bp, synthetic construct
  source 1..110: mol_type = other DNA
gcctactaaatgacccagccactacactcctaggaaatttgcctgagagaaatggagagttcacatcagctttatttttaatagactcacactaggaataacccaaatgt

SEQ ID NO: 56534 - DNA, 110 bp, synthetic construct
  source 1..110: mol_type = other DNA
tgtggaagtatagtgaaaggcgttgagaggtgtccctggctttaaaatacttactttgtatgaagatttaccttatgttgagtgagaattgttgaaggcaaatatggaat

SEQ ID NO: 56535 - DNA, 110 bp, synthetic construct
  source 1..110: mol_type = other DNA
tgcattattctgtaagaggagggaaagagatctgattctcactctgttgtcctggcagtagacagaaaagcagcatgaaatatgactttcatttgtttttcatcgtttta

SEQ ID NO: 56536 - DNA, 110 bp, synthetic construct
  source 1..110: mol_type = other DNA
cagtagacagaaaagcagcatgaaatatgactttcatttgtttttcatcgttttatgccctatatgggattttgtgactgaccctcctaattccatagggccatcagttg

SEQ ID NO: 56537 - DNA, 110 bp, synthetic construct; identical to SEQ ID NO: 56535
  source 1..110: mol_type = other DNA

SEQ ID NO: 56538 - DNA, 110 bp, synthetic construct; identical to SEQ ID NO: 56536
  source 1..110: mol_type = other DNA

SEQ ID NO: 56539 - DNA, 110 bp, synthetic construct
  source 1..110: mol_type = other DNA
gttccatgagtccttcagtcctttgctcaaatgtttgattctggtttctgttacttctaactgtaggggctcacttcttacccatacaaatatttgtaaagcatatattc

SEQ ID NO: 56540 - DNA, 110 bp, synthetic construct
  source 1..110: mol_type = other DNA
ttctgttacttctaactgtaggggctcacttcttacccatacaaatatttgtaaagcatatattcctttcacttttcttcctcagatttaaacactttagtatacatatt

SEQ ID NO: 56541 - DNA, 110 bp, synthetic construct
  source 1..110: mol_type = other DNA
gaaagcaaatgagaaagccactccaattttccagtaatttctcagtcaattttatcctcttaagacagggccaatcttgttattcccaaatttagaagattagaacatgg

SEQ ID NO: 56542 - DNA, 110 bp, synthetic construct
  source 1..110: mol_type = other DNA
ctgtgatgaacatggaagtgcagatatctttttgaggtactaatttcagttcctttggatatatactgagaggagtgggattgttggaccatatggtagttctattttta

SEQ ID NO: 56543 - DNA, 110 bp, synthetic construct
  source 1..110: mol_type = other DNA
tggatatatactgagaggagtgggattgttggaccatatggtagttctatttttaattttttaaggaattgccatactgctttccataatgggtgcaccattgcttagtc

SEQ ID NO: 56544 - DNA, 110 bp, synthetic construct
  source 1..110: mol_type = other DNA
tttatatctactgtggagccgtcagttacataagtgtgcctgggtccacatgtcttggcagctgtttgtcacactgctggataccaaagaattgcatatatgataagggt

SEQ ID NO: 56545 - DNA, 110 bp, synthetic construct
  source 1..110: mol_type = other DNA
gcattaggctggatgctaaagatctaaaacttctatcctcagagagcttctacgaccagatagagagccccaagtgcatgaaatggtataaacactatgatggtattgct

SEQ ID NO: 56546 - DNA, 110 bp, synthetic construct
  source 1..110: mol_type = other DNA
tgaaggggaggaaggtactccaggaaaaggggtgaattctgggcagatggtatcttttctacagctccagctggatgctacataaaccgggaacatagctgagatgccag

SEQ ID NO: 56547 - DNA, 110 bp, synthetic construct
  source 1..110: mol_type = other DNA
tttctacagctccagctggatgctacataaaccgggaacatagctgagatgccagggcctaggtctcgaccaagtctccagttcccaaggccaggctcagagacattctg

SEQ ID NO: 56548 - DNA, 110 bp, synthetic construct; identical to SEQ ID NO: 56546
  source 1..110: mol_type = other DNA

SEQ ID NO: 56549 - DNA, 110 bp, synthetic construct; identical to SEQ ID NO: 56547
  source 1..110: mol_type = other DNA

SEQ ID NO: 56550 - DNA, 110 bp, synthetic construct
  source 1..110: mol_type = other DNA
cacccaggctcaagtaaatcaccacagagttgcctaccagcccccacagaagctgggtattgtacctcgggttgtgcagttcacctaccaggtggtggattccgcaggca

SEQ ID NO: 56551 - DNA, 110 bp, synthetic construct
  source 1..110: mol_type = other DNA
ggtattgtacctcgggttgtgcagttcacctaccaggtggtggattccgcaggcaatagtgtacctggtatcttcacattattcctaaagcctatagataaccagcctcc

SEQ ID NO: 56552 - DNA, 110 bp, synthetic construct
  source 1..110: mol_type = other DNA
aaatgcccgttacttattatgtcacaggctcatttattctgagctcactgtaggataaaggtccgccacctgtatttggcagagactcaaaggcaggcaaagaagtggca

SEQ ID NO: 56553 - DNA, 110 bp, synthetic construct
  source 1..110: mol_type = other DNA
tcagcaactctccccttgccttcattggtcacagtcctctgctctagtcaaggagtggactccaccagtgggtccttccctcacctgagagccttcaggttctgcctccc

SEQ ID NO: 56554 - DNA, 110 bp, synthetic construct
  source 1..110: mol_type = other DNA
tggactccaccagtgggtccttccctcacctgagagccttcaggttctgcctccctcctctcattatggagacagcttcagtttacaatcagtcttcctccgaggaagct

SEQ ID NO: 56555 - DNA, 110 bp, synthetic construct; identical to SEQ ID NO: 56553
  source 1..110: mol_type = other DNA

SEQ ID NO: 56556 - DNA, 110 bp, synthetic construct; identical to SEQ ID NO: 56554
  source 1..110: mol_type = other DNA

SEQ ID NO: 56557 - DNA, 110 bp, synthetic construct
  source 1..110: mol_type = other DNA
acacctctgaaatatttagatgtgaaacaaagatctgttttagttgtacttatatcttccattttctgtgaagcaggcccattgcaaagagttccccctgaaataacaca

SEQ ID NO: 56558 - DNA, 110 bp, synthetic construct
  source 1..110: mol_type = other DNA
cttccattttctgtgaagcaggcccattgcaaagagttccccctgaaataacacactacaggtcccaagaaaaatattctatgagttattaatgtatagtttacttcaaa

SEQ ID NO: 56559 - DNA, 110 bp, synthetic construct
  source 1..110: mol_type = other DNA
ctaatcagtagtcacaggccacagacattacctaattcagttaaatttttatagttggattcaaatgctgggtcaactctataatttagttctcctactccagctcccca

SEQ ID NO: 56560 - DNA, 110 bp, synthetic construct
  source 1..110: mol_type = other DNA
tggattcaaatgctgggtcaactctataatttagttctcctactccagctccccaattgctgaaatattattaagagtgagtcaggaaactacactcgattgtactgcta

SEQ ID NO: 56561 - DNA, 110 bp, synthetic construct
  source 1..110: mol_type = other DNA
ggtagggacagttatgatggtgttgaagatttgatgttaggtctcaagcaactattgcacagaatgtgaagaaaagcaaaattcatgctaaggaaggaatgttggtgaat

SEQ ID NO: 56562 - DNA, 110 bp, synthetic construct
  source 1..110: mol_type = other DNA
tgcacagaatgtgaagaaaagcaaaattcatgctaaggaaggaatgttggtgaatgatacaaaaggaagtgttagatgccttggtgaatagggcctgtttaacttaatgg

SEQ ID NO: 56563 - DNA, 110 bp, synthetic construct
  source 1..110: mol_type = other DNA
catttcacacaatagcatgcctaataccccactttggaatagctgccaccccaaattctgtgtttgcatggcctagtgcacaaatgcagggggaaatggctgaaaggata

SEQ ID NO: 56564 - DNA, 110 bp, synthetic construct
  source 1..110: mol_type = other DNA
taaatttaatgtattcaacttatagtctcattagaggctgtgaagacagcatgggtacttgcgtagcatatattaaaccctggtttcattatgatatactgtaatacttg

SEQ ID NO: 56565 - DNA, 110 bp, synthetic construct
  source 1..110: mol_type = other DNA
aactcatttcactctcttgctcccagtctttttttctttcccagcttatccagatacaaaaaccagtgagtttacccataagccacagggaatttggtcctgttcatcaa

SEQ ID NO: 56566 - DNA, 110 bp, synthetic construct
  source 1..110: mol_type = other DNA
ctgaaagctatgttctttatgttacagggtcaaaatttaacaatcataacaaataaagatgtataaatgctggagctttgttccctgtgtctgagatcaatttctccttg

SEQ ID NO: 56567 - DNA, 110 bp, synthetic construct
  source 1..110: mol_type = other DNA
aagatgtataaatgctggagctttgttccctgtgtctgagatcaatttctccttgtccctccttcctgttcatggtagggaaaggcacccttcttgcatctgtcatctaa

SEQ ID NO: 56568 - DNA, 110 bp, synthetic construct
  source 1..110: mol_type = other DNA
ctggtagcctaatggttaaagatttggcattgtcaatactgtggctcaggttccgttcctggcccaagaactcccacatgccatgggcacgccagaaaaaaatcagcaaa

SEQ ID NO: 56569 - DNA, 110 bp, synthetic construct
  source 1..110: mol_type = other DNA
ttcctggcccaagaactcccacatgccatgggcacgccagaaaaaaatcagcaaatacaggttgagaacaactatatcctcccctttcaggtatagaattataagggaaa

SEQ ID NO: 56570 - DNA, 110 bp, synthetic construct
  source 1..110: mol_type = other DNA
ttaaaccttctgaaccaacctctgccagcttcagacttttcttcttcatcttcttcacctctctcagccttcaggagattaaagagagctagggtcttgctatggatgag

SEQ ID NO: 56571 - DNA, 110 bp, synthetic construct
  source 1..110: mol_type = other DNA
cacctctctcagccttcaggagattaaagagagctagggtcttgctatggatgaggctttggcttaagggagcattgtggctggtttgacttcctttcagaacattaaaa

SEQ ID NO: 56572 - DNA, 110 bp, synthetic construct; identical to SEQ ID NO: 56570
  source 1..110: mol_type = other DNA

SEQ ID NO: 56573 - DNA, 110 bp, synthetic construct; identical to SEQ ID NO: 56571
  source 1..110: mol_type = other DNA

SEQ ID NO: 56574 - DNA, 110 bp, synthetic construct
  source 1..110: mol_type = other DNA
atcagcaggatttcttttgagttgcatgcaacagtggccataagagagaaaccgtctctaaggatagcttctgcttctccgcacacaactggcaggattcaggcaaagct

SEQ ID NO: 56575 - DNA, 110 bp, synthetic construct
  source 1..110: mol_type = other DNA
acaatgataaataatgtggtgagagtttctttgcaccgaactcctaaaaggtttcctgggacttgtggggattggaggattatactttcagaactgctaatatggactat

SEQ ID NO: 56576 - DNA, 110 bp, synthetic construct
  source 1..110: mol_type = other DNA
ctgggacttgtggggattggaggattatactttcagaactgctaatatggactattcctgttatctacaagaggtgaattgttaatttgttatccctagtctgtatgtca

SEQ ID NO: 56577 - DNA, 110 bp, synthetic construct
  source 1..110: mol_type = other DNA
gttctgttctgatctgtgctgcttcctcatggtgaaggtgaggaggacatagctggctagttcaatcctgagctcccaaagctggacttttgatcaaactggagcccctg

SEQ ID NO: 56578 - DNA, 110 bp, synthetic construct
  source 1..110: mol_type = other DNA
tatttctttcagtattcagagggacctgcttccattcttggaataacattttcatcctttcttaagcagcacatatgttgcttctgaaaagagcagcagaaagctgcaag

SEQ ID NO: 56579 - DNA, 110 bp, synthetic construct
  source 1..110: mol_type = other DNA
cctttcttaagcagcacatatgttgcttctgaaaagagcagcagaaagctgcaagcacgtgtttctgaagtggaacatgggtttggtacatgcacacaaagagccaagaa

SEQ ID NO: 56580 - DNA, 110 bp, synthetic construct
  source 1..110: mol_type = other DNA
agcagtgcctgtccacctaccaaaactgttcatgtcctttgatagagatgcggatagagtcagctcatggtcagtcttaaaggtattttcatttaattttatctgattta

SEQ ID NO: 56581 - DNA, 110 bp, synthetic construct
  source 1..110: mol_type = other DNA
cctttggtcatgaacttccttactctccttgtccattgattacttacttcttttcccatgaatgttgtgtgatgaaagctaatctgtggaaaagttgcgaaggagattaa

SEQ ID NO: 56582 - DNA, 110 bp, synthetic construct
  source 1..110: mol_type = other DNA
agcctcaaaagccttaagtagttttaaactttgcagagcccagtaacttcaataatttctttttcagcttgctggattggtttgtggttttgtcatcaaattgcacacaa

SEQ ID NO: 56583 - DNA, 110 bp, synthetic construct
  source 1..110: mol_type = other DNA
atgttaaaagtgatgattgttatctcatatcagcattgccatgggctggggaagagaaaagaatggaacgattcatctattacccataagtcataggttatgagaccata

SEQ ID NO: 56584 - DNA, 110 bp, synthetic construct
  source 1..110: mol_type = other DNA
gaaaagaatggaacgattcatctattacccataagtcataggttatgagaccataaattattgatactaagagattcttctggcttgcatcagaattacacagagagaaa

SEQ ID NO: 56585 - DNA, 110 bp, synthetic construct
  source 1..110: mol_type = other DNA
agctgttgcattgtgtgtgaagggaagactatcacgaatcgaagggttctgcataccctcccagctctgcagcccctggactactaatgagctcctggccccctctggag

SEQ ID NO: 56586 - DNA, 110 bp, synthetic construct
  source 1..110: mol_type = other DNA
gccctaagagaggcaactccctttcatgaaagggatcctagattgagtcagacccttaggtttaccctgtccctctgtccctagctgtcactttgcttatggatcagtca

SEQ ID NO: 56587 - DNA, 110 bp, synthetic construct
  source 1..110: mol_type = other DNA
agggtcatcttggaggctgacgaccacaggaactaagaaattaatttacaagtgcaaattcgcactgtgagaggcagagccaggagctgaattcgtctcttgactctaaa

SEQ ID NO: 56588 - DNA, 110 bp, synthetic construct
  source 1..110: mol_type = other DNA
atttgatttttctgattgtttattttctctctcaatcttggtgctgagcattgagattcagggggtgaggggggaccattagtgccatcatccagcagagctggcaaaaa

SEQ ID NO: 56589 - DNA, 110 bp, synthetic construct
  source 1..110: mol_type = other DNA
attcagggggtgaggggggaccattagtgccatcatccagcagagctggcaaaaattctatactggggcttggaggtggcaaattccaagctagtgcagctgctaatata

SEQ ID NO: 56590 - DNA, 110 bp, synthetic construct
  source 1..110: mol_type = other DNA
cagtgccagggagagattttaaaaaagtattgtgagtcctaaatatctattttttctcactgctgtgaaaatcacataggatgttaatacagaatgcactttcaaattta

SEQ ID NO: 56591 - DNA, 110 bp, synthetic construct
  source 1..110: mol_type = other DNA
ccaattacacaagtactgtataagcattactttaaaaccgacatcccatcgttgtatcactctacatcaaaatgaaatagtggttgattgtcactgtcaacgtgtgggaa

SEQ ID NO: 56592 - DNA, 110 bp, synthetic construct
  source 1..110: mol_type = other DNA
ggtaaagtagagccccagatggctataccctcagggtaaaaagaacctaggctgttcttctctcacaacccaggacttctacagaatttacattggtgctaagcaggtta

SEQ ID NO: 56593 - DNA, 110 bp, synthetic construct
  source 1..110: mol_type = other DNA
tttcattacctttattaaattctattttcaaagagccgtatttgtctttaaagaacaaattctacacattaggtaaccagcttcaggcagttctttcccagtagcctgct

SEQ ID NO: 56594 - DNA, 110 bp, synthetic construct
  source 1..110: mol_type = other DNA
aaatcttgtatggttttgcaaattcatgcaatgtgagcactagggaatgtgcaactggaatccagggaagagacttcaggtccaccccatctggagggcatctacatcac

SEQ ID NO: 56595 - DNA, 110 bp, synthetic construct
  source 1..110: mol_type = other DNA
tggaatccagggaagagacttcaggtccaccccatctggagggcatctacatcacagctggaaagcttgggtgggcaggtggtggcatcaaaaccaaaaattccgccttg

SEQ ID NO: 56596 - DNA, 110 bp, synthetic construct; identical to SEQ ID NO: 56594
  source 1..110: mol_type = other DNA

SEQ ID NO: 56597 - DNA, 110 bp, synthetic construct; identical to SEQ ID NO: 56595
  source 1..110: mol_type = other DNA

SEQ ID NO: 56598 - DNA, 110 bp, synthetic construct
  source 1..110: mol_type = other DNA
atacacggagtttcaaaaaaccgcacctcgaaatttacatgtctcgttacaatacagcaaaatcacataccagcttgtacctaaaacaaaactaaggtcattcataaaag

SEQ ID NO: 56599 - DNA, 110 bp, synthetic construct
  source 1..110: mol_type = other DNA
agcaaaatcacataccagcttgtacctaaaacaaaactaaggtcattcataaaagttttcctactttatgggtttcaactctaacgctggaatgcccaatcaaaatccga

SEQ ID NO: 56600 - DNA, 110 bp, synthetic construct
  source 1..110: mol_type = other DNA
taattttgacaaagcacagtacaaagctggttgcaaccagagctgttatggtcactcagtatgcaattctctgaatatcttcacctgtaaatacctcctcccttttctgg

SEQ ID NO: 56601 - DNA, 110 bp, synthetic construct
  source 1..110: mol_type = other DNA
tatagtaattgatgatgtgtacgtaaataaaaatgggtcagtaaacttcataggtcattacattggcataattgcttgaaataaggcaaatcgttgacgtacacatattt

SEQ ID NO: 56602 - DNA, 110 bp, synthetic construct
  source 1..110: mol_type = other DNA
cattacattggcataattgcttgaaataaggcaaatcgttgacgtacacatatttaaaacccagaatccaaaccagagcactttaaatggagtagggtccaggaagggtt

SEQ ID NO: 56603 - DNA, 110 bp, synthetic construct
  source 1..110: mol_type = other DNA
cttaataagctcagtaggtaggaattgtatagttggccatggttgatagagttaaagatactcataacctcttagtctcctgggcagtagaaagaggcatgataaacagg

SEQ ID NO: 56604 - DNA, 110 bp, synthetic construct
  source 1..110: mol_type = other DNA
tttaataggagtgcctgcctcgtggatacatctctgagtatacctaaatccagccaagattgccgagcacttctggaatttgtgttgaggattcgagctgcagcttttcc

SEQ ID NO: 56605 - DNA, 110 bp, synthetic construct
  source 1..110: mol_type = other DNA
aagattgccgagcacttctggaatttgtgttgaggattcgagctgcagcttttccctattctttttttttttttttttttttttctttttggccattcccacggcatgtg

SEQ ID NO: 56606 - DNA, 110 bp, synthetic construct
  source 1..110: mol_type = other DNA
aacagcctctactacagatagggcaggggccgttaacactcctttatttaactaagagaaaaccttaactcggggtcacagggcccaaagcgcagctaggttttctgact

SEQ ID NO: 56607 - DNA, 110 bp, synthetic construct
  source 1..110: mol_type = other DNA
gagaaaaccttaactcggggtcacagggcccaaagcgcagctaggttttctgacttctgggccagcaccctttccaagacacagctacctctgctatggatttgacacct

SEQ ID NO: 56608 - DNA, 110 bp, synthetic construct
  source 1..110: mol_type = other DNA
tatgcccaggagtgggattgctggcatatgacaactctatttttagcttttcgaagaacctccatacagttctccatagtggctgtgccaattgacattcccacctctaa

SEQ ID NO: 56609 - DNA, 110 bp, synthetic construct; identical to SEQ ID NO: 56608
  source 1..110: mol_type = other DNA

SEQ ID NO: 56610 - DNA, 110 bp, synthetic construct
  source 1..110: mol_type = other DNA
agcgtgttcaggatccagtgttgtcactgctgtggcttgggtccctgctatggcactggttccatccatagctcaggaaatactgcacgctgcagggtggctaaaaaaaa

SEQ ID NO: 56611 - DNA, 110 bp, synthetic construct
  source 1..110: mol_type = other DNA
ctggttccatccatagctcaggaaatactgcacgctgcagggtggctaaaaaaaaaaaggcaggcatgttggaaagacattggagcaatgccccccatacaggctatgct

SEQ ID NO: 56612 - DNA, 110 bp, synthetic construct
  source 1..110: mol_type = other DNA
ctttatctgatacattcagacagcagcctgatggcagaggctgtgctattagagccagcagtgagcagtagaggaagcaccagctcaagttctagcaaaactgggccaat

SEQ ID NO: 56613 - DNA, 110 bp, synthetic construct
  source 1..110: mol_type = other DNA
taatttgcctaggctgacacagttaataagtggtctaagctggaatgtgagaaattgttgctctagaaccggatgtttttaatctttgacgccagtctccttctcttaac

SEQ ID NO: 56614 - DNA, 110 bp, synthetic construct
  source 1..110: mol_type = other DNA
tgatctcaggtgttaggaggcagctggctgtgagtaattcacaccacaccgttatgggagtcctgcagctgagggagacatcgcatttctaaaaggtgctgatagagcaa

SEQ ID NO: 56615 - DNA, 110 bp, synthetic construct
  source 1..110: mol_type = other DNA
cagtgtatttaaaccatggaatattacacagtatttaaaatgaatgggagttctttggtggtctactgattaaggactcagcattgttactgctgcagcttaggtcactc

SEQ ID NO: 56616 - DNA, 110 bp, synthetic construct
  source 1..110: mol_type = other DNA
atcaagctggaggactcttcgccccgggacaacggggcctgctcctccatgctcatctctgacgacgacaccaaggatgacagctccatgtcctcgtactcggtgctgag

SEQ ID NO: 56617 - DNA, 110 bp, synthetic construct
  source 1..110: mol_type = other DNA
taacactgccacctagtgtcgcccactggaatttttggactcaaaaacatactgattatggcgctggagaggaggtttgccatcacatgctgttaggctctgataaaaac

SEQ ID NO: 56618 - DNA, 110 bp, synthetic construct
  source 1..110: mol_type = other DNA
ttatggcgctggagaggaggtttgccatcacatgctgttaggctctgataaaaacagtctccataacttaagagcagtaaattatattaagatctgaactacctatgata

SEQ ID NO: 56619 - DNA, 110 bp, synthetic construct
  source 1..110: mol_type = other DNA
taaggttcttcccagacttcagatgattgcagccctgctgacatctgatagcagaggcatcgggaattctcaagggagaactgcccagctaacccccacccctggaatct

SEQ ID NO: 56620 - DNA, 110 bp, synthetic construct
  source 1..110: mol_type = other DNA
ccctgcgcttgatcagtccacattaaatgaactatattaaatcaatgtgaggtgtatcaaccttagcttctcgggataaaacacaacagagcctctttgtcctcttgtta

SEQ ID NO: 56621 - DNA, 110 bp, synthetic construct
  source 1..110: mol_type = other DNA
gccatatttagaagataatatgagaaagtattttggtcctgtccccatcactgcgtaaggtaattaagctaaatcatcagttagaatgtgcatctggaaagttacagtca

SEQ ID NO: 56622 - DNA, 110 bp, synthetic construct
  source 1..110: mol_type = other DNA
ggtgtttcctggtgatctcagtttccttatggagattcagagccattcatacatccaacagctaatgattcagcagtgtattcgtcaaaatcccagcgggaaacagatgg

SEQ ID NO: 56623 - DNA, 110 bp, synthetic construct
  source 1..110: mol_type = other DNA
caacagctaatgattcagcagtgtattcgtcaaaatcccagcgggaaacagatggcacactcaaactgggcaactgagaagagtttaataaagggatcatttgcaaatat

SEQ ID NO: 56624 - DNA, 110 bp, synthetic construct
  source 1..110: mol_type = other DNA
aaagactgtgttagcttaaggagaggggtggtgtcctgaatagcagctatcatgataagtagcacttcacttcgtacgaaaaactattctggactctttatatgtatgac

SEQ ID NO: 56625 - DNA, 110 bp, synthetic construct
  source 1..110: mol_type = other DNA
ctcaaaggaacgaagagaaatttgaggaagccagttttaacaagtgaaccattaaactctggagctacagttaaccagttccaagccaacgtgagccaaggtttggtgcc

SEQ ID NO: 56626 - DNA, 110 bp, synthetic construct
  source 1..110: mol_type = other DNA
actctggagctacagttaaccagttccaagccaacgtgagccaaggtttggtgccattgagaagaatgaaaagataacacgtgagggggcgatggagagtggagattggg

SEQ ID NO: 56627 - DNA, 110 bp, synthetic construct
  source 1..110: mol_type = other DNA
agagacacgattgcttcccagatttatcctggtgttggtctttcgctcacattaacatgcttactgggaatgcaagcatgtatatattcatgtgtgtgcccagctgaaag

SEQ ID NO: 56628 - DNA, 110 bp, synthetic construct
  source 1..110: mol_type = other DNA
catgcttactgggaatgcaagcatgtatatattcatgtgtgtgcccagctgaaagtgaaaattataatagtttgtagcttcccatactttacttgtttatgaattgtata

SEQ ID NO: 56629 - DNA, 110 bp, synthetic construct
  source 1..110: mol_type = other DNA
tattaatccagtatctccatcactcaactgacgtgtcatggacatatggaccagactatggaagaggttgtcattttttatatctccacattcctcacaaacagcttctt

SEQ ID NO: 56630 - DNA, 110 bp, synthetic construct
  source 1..110: mol_type = other DNA
ctatggaagaggttgtcattttttatatctccacattcctcacaaacagcttcttagaattacaggctcacttattaatttggtgattaagccatttaaacaggcaactg

SEQ ID NO: 56631 - DNA, 110 bp, synthetic construct
  source 1..110: mol_type = other DNA
agtagcaggcttccaaacctgcactggggctgccactggccaggggaagggcaggtgacaaaagaaaaagatgtattgcacatttcctaacccagaaagaagctacggat

SEQ ID NO: 56632 - DNA, 110 bp, synthetic construct
  source 1..110: mol_type = other DNA
tgacaaaagaaaaagatgtattgcacatttcctaacccagaaagaagctacggatcagctgagaaacacacggagagagacaaagacagaggaaagaggaaaggaggggt

SEQ ID NO: 56633 - DNA, 110 bp, synthetic construct
  source 1..110: mol_type = other DNA
ggtttaccatcgggaaagtaaacctaatagagaaagaaagcaggagaaacagcggcagctccattccgccaaggcttttgatggtcaaagggctgtttatgaagcttgag

SEQ ID NO: 56634 - DNA, 110 bp, synthetic construct
  source 1..110: mol_type = other DNA
agagagggtggggacattcttgggtcattttttttttttttaatgaggggaaaaaatgagctaaggaatgtaggtagatggtttggccattttccagctttgagatcaag

SEQ ID NO: 56635 - DNA, 110 bp, synthetic construct
  source 1..110: mol_type = other DNA
atgagctaaggaatgtaggtagatggtttggccattttccagctttgagatcaagtctcgttccttagctactttgaacttgagttttcttattttataaactgggaata

SEQ ID NO: 56636 - DNA, 110 bp, synthetic construct
  source 1..110: mol_type = other DNA
ccagcatttcaatatttgcccataaattcagcactgttttgaatttggcctatgtatgatcaaaacaacggacaaaagtatggaaagtgaattcagtctgccattgctgt

SEQ ID NO: 56637 - DNA, 110 bp, synthetic construct
  source 1..110: mol_type = other DNA
cagatccgacctggctgggcccaaacccttccagcttcaccccagggattaaattcccctttgtctagctctgtggccccagcgcaagcttgaccctgtcacctcactca

SEQ ID NO: 56638 - DNA, 110 bp, synthetic construct
  source 1..110: mol_type = other DNA
cccctttgtctagctctgtggccccagcgcaagcttgaccctgtcacctcactcaccctgagcagtaacctcagggactctggctctgagacagtggcctactgagggga

SEQ ID NO: 56639 - DNA, 110 bp, synthetic construct
  source 1..110: mol_type = other DNA
cctaattgcttttgcatctgagacgtttgaacatttctttgggcttcttttctacactgggctccagctggttcatacagaggacattaataggccatgagtgcttgcag

SEQ ID NO: 56640 - DNA, 110 bp, synthetic construct
  source 1..110: mol_type = other DNA
gaagccacatactccagacccactttctgcctaagggcctgggccagtctgcccacccagcttacttccctgcttcggtacaccagccccatactgcagagaatgaacac

SEQ ID NO: 56641 - DNA, 110 bp, synthetic construct
  source 1..110: mol_type = other DNA
cccagcttacttccctgcttcggtacaccagccccatactgcagagaatgaacacgggccctcggtatggtaaaaggcaataatgaactgtttagatgttggttgtcagt

SEQ ID NO: 56642 - DNA, 110 bp, synthetic construct
  source 1..110: mol_type = other DNA
gccttctaccctcactgcaaacgtggaccccactgagctaaaattcaagatcatgtgtttgatttgataagaaaaaatagcacaaaacttggaatgcatcattcaggccc

SEQ ID NO: 56643 - DNA, 110 bp, synthetic construct
  source 1..110: mol_type = other DNA
gcctcaccctctgacatcagggtcctagtctatcctgcttcaacccagccacacgctctctcttcctctggggcctgggaggaactggttatcagggacacagacagtcc

SEQ ID NO: 56644 - DNA, 110 bp, synthetic construct
  source 1..110: mol_type = other DNA
cacccctgagcctggggctctaggtgtcactgctgttgaagcagcagagctggttgggaaagtcctacagctggatcaacctcggatcacggatgttgcacatagcccag

SEQ ID NO: 56645 - DNA, 110 bp, synthetic construct
  source 1..110: mol_type = other DNA
gggaaagtcctacagctggatcaacctcggatcacggatgttgcacatagcccaggagtccctgtcgtggctcagtggttaatgactctgactaggaatcatgaggttgc

SEQ ID NO: 56646 - DNA, 110 bp, synthetic construct
  source 1..110: mol_type = other DNA
tcttcaaaaaccaatcagtgacgagttacagttacattgacacaggaaccaaagtgaaaataattggtctctatgtgtacaagaaggccacctactttacaggaaatcct

SEQ ID NO: 56647 - DNA, 110 bp, synthetic construct
  source 1..110: mol_type = other DNA
cagctgagccaatcttaagcatcgaagctctttgccctggtagcctcacctctacctgttctgagcaagaagcaggtcagctgagccacagtgctatagggtgtgtggtg

SEQ ID NO: 56648 - DNA, 110 bp, synthetic construct
  source 1..110: mol_type = other DNA
ctgttctgagcaagaagcaggtcagctgagccacagtgctatagggtgtgtggtgaccagaatcaggcgtaccgggagccacatggcctcccaaagtatgctagccttgg

SEQ ID NO: 56649 - DNA, 110 bp, synthetic construct; identical to SEQ ID NO: 56647
  source 1..110: mol_type = other DNA

SEQ ID NO: 56650 - DNA, 110 bp, synthetic construct; identical to SEQ ID NO: 56648
  source 1..110: mol_type = other DNA

SEQ ID NO: 56651 - DNA, 110 bp, synthetic construct
  source 1..110: mol_type = other DNA
aatcaatgtacacagtttcagttatgcaagatgagtctattctacatatctgatatacagtctgataataattttggactgcgcacttaaaattctgttaagagctccaa

SEQ ID NO: 56652 - DNA, 110 bp, synthetic construct
  source 1..110: mol_type = other DNA
tacagtctgataataattttggactgcgcacttaaaattctgttaagagctccaagtgggcatgatgcggggggggggggtcacaaaaaaattaaaattaaattctgtta

SEQ ID NO: 56653 - DNA, 110 bp, synthetic construct
  source 1..110: mol_type = other DNA
ctattttttgaaataggaaatataattgcaaaacacaaaaattttacacaggattggtgggaaggaaaagaaaattgacttgcccctctctcttctctcccttacaacta

SEQ ID NO: 56654 - DNA, 110 bp, synthetic construct
  source 1..110: mol_type = other DNA
ggtgggaaggaaaagaaaattgacttgcccctctctcttctctcccttacaactaagaatgaacctagcctgcttcaaatcacaatcttttgtcacacctgaatggacag

SEQ ID NO: 56655 - DNA, 110 bp, synthetic construct
  source 1..110: mol_type = other DNA
gggacttattgctccttggtggctctctgctctggctgagttcctgagcaggaagaaatatgcatatattctgaggaagagtatttttattctcctatagaatctgtccc

SEQ ID NO: 56656 - DNA, 110 bp, synthetic construct
  source 1..110: mol_type = other DNA
aaatatgcatatattctgaggaagagtatttttattctcctatagaatctgtccctgtgagaaagtttctctgtccatagagcatggaacagcccgtctgtcagtcccag

SEQ ID NO: 56657 - DNA, 110 bp, synthetic construct
  source 1..110: mol_type = other DNA
tctggcttgttaacataagcaggatcagatcatgtgcatttaatctgcagggaaattgccagggtttgcgtgttccttcttgcacccctgagatggctttaaagttgttc

SEQ ID NO: 56658 - DNA, 110 bp, synthetic construct
  source 1..110: mol_type = other DNA
ttgccagggtttgcgtgttccttcttgcacccctgagatggctttaaagttgttctggcagtgacttgctctccttggcagccagtaacaagtactgaagctacaacttc

SEQ ID NO: 56659 - DNA, 110 bp, synthetic construct
  source 1..110: mol_type = other DNA
ggtaggtgtcttgtgggagccactctgctccaaagtagtctgaggttggatctgggaaagctgctgggtactggtgaaattgctcagactgcaggagcctgttattgggg

SEQ ID NO: 56660 - DNA, 110 bp, synthetic construct
  source 1..110: mol_type = other DNA
aaaaatcacctggtagaagtggtcacacagctcttgcctggtgccagctcactctactaaaatgcttttagttatactgagcaaactctatatccctctaacacttctgt

SEQ ID NO: 56661 - DNA, 110 bp, synthetic construct
  source 1..110: mol_type = other DNA
aactatagcttgcaaagcatgagcaacagggaaactgggtaaagggtcctaggtaatctctccacattgttttttaaaattacgcttgactctagttacctaaaaataaa

SEQ ID NO: 56662 - DNA, 110 bp, synthetic construct
  source 1..110: mol_type = other DNA
acagggaaactgggtaaagggtcctaggtaatctctccacattgttttttaaaattacgcttgactctagttacctaaaaataaaaagtttgatttttttttaacaaagc

SEQ ID NO: 56663 - DNA, 110 bp, synthetic construct
  source 1..110: mol_type = other DNA
agacactaggaccctctgccagaagtagaatatttcctgactactaacgttggatttggatgctcataagatgcttagattgagtcacttttctttccaggagattagac

SEQ ID NO: 56664 - DNA, 110 bp, synthetic construct
  source 1..110: mol_type = other DNA
ttggatgctcataagatgcttagattgagtcacttttctttccaggagattagactgggcctacatcctcaacagcttatttggggtcctgctggaggctagatgcacca

SEQ ID NO: 56665 - DNA, 110 bp, synthetic construct
  source 1..110: mol_type = other DNA
acctagtggatgtgtaagtttctactatgttatcgtaaaacaaagactctccattctcttcttttccatcctccttcttcaataaaaattgctaatttctctacacagtt

SEQ ID NO: 56666 - DNA, 110 bp, synthetic construct
  source 1..110: mol_type = other DNA
gtgggtgaccgcgatgcagaactgccggcgggatgccctgcactccagagtctgggcgatggccacctgattggttttcagcgtcatggccgtcagcctgatgttggcac

SEQ ID NO: 56667 - DNA, 110 bp, synthetic construct
  source 1..110: mol_type = other DNA
gcgatggccacctgattggttttcagcgtcatggccgtcagcctgatgttggcactgttgactagcttgaatcggttctggaggaaaaacaaggcacagccatcgggtcc

SEQ ID NO: 56668 - DNA, 110 bp, synthetic construct
  source 1..110: mol_type = other DNA
cccgtctccgtgtgtctgctcccctggcacccgatttcccatggatacaggattctgggagcaagcttattactcttggcagaacctacttataagcctaccgggctggc

SEQ ID NO: 56669 - DNA, 110 bp, synthetic construct
  source 1..110: mol_type = other DNA
aaatatctcctggtttccccagactcaaggagggtgtgttactttcttctttcctgcagtcattcacagctgggccatcaggatgtttcctgggaggtgaaggaaggcat

SEQ ID NO: 56670 - DNA, 110 bp, synthetic construct
  source 1..110: mol_type = other DNA
ttggcttcttagaaaatgctaggggaagtatagtgggtgctttacaatcaccataaaagacctagatcctttaatttcacatttattgtgatgataagccttcattcctg

SEQ ID NO: 56671 - DNA, 110 bp, synthetic construct
  source 1..110: mol_type = other DNA
cagtcagtgtcattaatttttttctccgtgtgggctgaggaacacgaagctgacttgattgatcacattgccacttcaaaacaggagccttcagagccaggtgggtgagt

SEQ ID NO: 56672 - DNA, 110 bp, synthetic construct
  source 1..110: mol_type = other DNA
tgattgatcacattgccacttcaaaacaggagccttcagagccaggtgggtgagtgggttggtgaaacccttcggagagttaatgcatttgtgtagtcatcacagcatca

SEQ ID NO: 56673 - DNA, 110 bp, synthetic construct; identical to SEQ ID NO: 56671
  source 1..110: mol_type = other DNA

SEQ ID NO: 56674 - DNA, 110 bp, synthetic construct; identical to SEQ ID NO: 56672
  source 1..110: mol_type = other DNA

SEQ ID NO: 56675 - DNA, 110 bp, synthetic construct
  source 1..110: mol_type = other DNA
tttaaatactcttaataactattgtatttaaatgaagctatataatcactttcttagcaagtaaaattatagaggagttacctggtgactcagagggttaagaatctggc

SEQ ID NO: 56676 - DNA, 110 bp, synthetic construct
  source 1..110: mol_type = other DNA
ctgattgacaaatatgactagatgtccaccttcagctccttgagaagcttctgacttgggctatgtgctcttcacagaggtttcaactgacactgcacttctccagcact

SEQ ID NO: 56677 - DNA, 110 bp, synthetic construct
  source 1..110: mol_type = other DNA
cagcaccaaaaacatttttttttgagtaggtgccagaaggaagacacacaggtgtcacaagtgtattttttttctggagcctcaaaaggaaatttcaggcagattttgtt

SEQ ID NO: 56678 - DNA, 110 bp, synthetic construct
  source 1..110: mol_type = other DNA
cacaagtgtattttttttctggagcctcaaaaggaaatttcaggcagattttgttaggaaatggtattcattgctgaactacaaattagattgcaagtgctttgggcatt

SEQ ID NO: 56679 - DNA, 110 bp, synthetic construct
  source 1..110: mol_type = other DNA
tccagtgaacccctgacagccagggagatatacggccttcttctttcttccttcctctgatttcctgttaggacttcccactggccagagggcacaggagctctgtggat

SEQ ID NO: 56680 - DNA, 110 bp, synthetic construct
  source 1..110: mol_type = other DNA
tctgatttcctgttaggacttcccactggccagagggcacaggagctctgtggatgtggtccatgaaggcaagagtaaaggtagggagtgagtctctgccaaatgaaaga

SEQ ID NO: 56681 - DNA, 110 bp, synthetic construct
  source 1..110: mol_type = other DNA
gtattactgcagccaccagatgctgctgcttgtgtcacacctggttgatgtaccggcatgccttgtcatcagagctttactgtgctctccgagccatcagtgtattctgc

SEQ ID NO: 56682 - DNA, 110 bp, synthetic construct
  source 1..110: mol_type = other DNA
aattaaatacttgggctgctgaacacctcataaaaaaggccaggccagttcagcgtactgaggcataccagattggcaggctccagcttgtgctttcttcccagaaggtt

SEQ ID NO: 56683 - DNA, 110 bp, synthetic construct
  source 1..110: mol_type = other DNA
acaaatctgttgctctctgatttttgaaccaatttcccaggagctgagattttatgatgtttctctattcctacttcagttccaccaagaattatggccgcatagcatca

SEQ ID NO: 56684 - DNA, 110 bp, synthetic construct
  source 1..110: mol_type = other DNA
atggctttaaatatcatctatatctagggggttctggatttgtatcttcagccttttccttttctctgggctccaggcttgtgtatctgagtcccttcccaacagctcca

SEQ ID NO: 56685 - DNA, 110 bp, synthetic construct
  source 1..110: mol_type = other DNA
ttccttttctctgggctccaggcttgtgtatctgagtcccttcccaacagctccacttggatagctaaaaagcattttcaaatttaacagcttcaaaatagaatacttga

SEQ ID NO: 56686 - DNA, 110 bp, synthetic construct
  source 1..110: mol_type = other DNA
actactcgtgtgattagaatgggccgatttaattaatccagaataatttcctaatctcaagatctctaagtctcatcttcacggtctctttttccatgtaaaataactga

SEQ ID NO: 56687 - DNA, 110 bp, synthetic construct
  source 1..110: mol_type = other DNA
ctcaagatctctaagtctcatcttcacggtctctttttccatgtaaaataactgattcacaggttctagagattaggggaggatggacattttggggtggccattatttt

SEQ ID NO: 56688 - DNA, 110 bp, synthetic construct
  source 1..110: mol_type = other DNA
atggtgtggggtacgtgggccactctgccattttttctataaatctaaatctattctgaacatttattaaaactttactaaacatttagtgagtttagccacttaaaagt

SEQ ID NO: 56689 - DNA, 110 bp, synthetic construct; identical to SEQ ID NO: 56688
  source 1..110: mol_type = other DNA

SEQ ID NO: 56690 - DNA, 110 bp, synthetic construct
  source 1..110: mol_type = other DNA
aggctccctgaagttatcaaacaatgctggggccatctgaggtagtccaggaagtccaggactgaatgaatggctcctagaacttttggaatatcttggatcctcgtagt

SEQ ID NO: 56691 - DNA, 110 bp, synthetic construct
  source 1..110: mol_type = other DNA
cctattagactgtaaacttcataaagccagggtttgtaaagtgcttattcagtgccagttacattagacacattgttatggttaaccattaaatatttttgcctagtata

SEQ ID NO: 56692 - DNA, 110 bp, synthetic construct
  source 1..110: mol_type = other DNA
gtttacaactttaatgacatgctatttacatttaactctaccatccatgtataatttctttttgcgtgtggcatgaggtaatattcctagcaaggatactagtagtttat

SEQ ID NO: 56693 - DNA, 110 bp, synthetic construct
  source 1..110: mol_type = other DNA
ttctttttgcgtgtggcatgaggtaatattcctagcaaggatactagtagtttatggaattgaaagatcttcagtacacagaacctatctggattccttccgtaggaact

SEQ ID NO: 56694 - DNA, 110 bp, synthetic construct
  source 1..110: mol_type = other DNA
ttgcccacttgtatggacatattcaaacaacaagagataacgccttcctgtctgcgggttttacccaagcttctcaaacttcaatgtgaataaaactcaccttgagatct

SEQ ID NO: 56695 - DNA, 110 bp, synthetic construct
  source 1..110: mol_type = other DNA
ttaatctgggatagggtgaagctcaaggtagaaacagcccagtcccagcaatggtgggtttgagccttgccccatgggttggggttcaaggtagtggcaatgccataagt

SEQ ID NO: 56696 - DNA, 110 bp, synthetic construct
  source 1..110: mol_type = other DNA
gaaatgaatattaactgagtatcctgtatttaatctggcaatcctactgatgtcatacccaagataagggtaattttattttctcttggagtgataattttttagaaagc

SEQ ID NO: 56697 - DNA, 110 bp, synthetic construct; identical to SEQ ID NO: 56696
  source 1..110: mol_type = other DNA

SEQ ID NO: 56698 - DNA, 110 bp, synthetic construct
  source 1..110: mol_type = other DNA
atcctttgtttgtttgtattttaatccttccatttcagggctgggatttttttaaagtatgtaggtggcattggtaaaatcagctagcatctaaatcaatttattttatt

SEQ ID NO: 56699 - DNA, 110 bp, synthetic construct
  source 1..110: mol_type = other DNA
attcaaaggttcttcccctaagacctcactatgagcttatgaaaaaagtgggggcaagagattcaagaaaaacttctttcagttgcattcctgggaaagtgatacaccat

SEQ ID NO: 56700 - DNA, 110 bp, synthetic construct
  source 1..110: mol_type = other DNA
caagtttacaatgtcccaatgttgtcctcttcctattctgaaccataacatggatcatgaaaggcacaaattattagaatgaagagctaagattgctgattaaatatctt

SEQ ID NO: 56701 - DNA, 110 bp, synthetic construct
  source 1..110: mol_type = other DNA
ggtaatgggcctagaggtcagtggaagctggaatcctgtgcagccttttccctactctgtaacattgggcaagttatgtaaactgtcattgaaatcttctgtatctgtaa

SEQ ID NO: 56702 - DNA, 110 bp, synthetic construct
  source 1..110: mol_type = other DNA
aggagcagtctcccaaatactgccagttcttacaagctgtggaaatttaagaattaatttttatgtgaagaaacaaattaacgtggatgattagaaggaagaattacctt

SEQ ID NO: 56703 - DNA, 110 bp, synthetic construct
  source 1..110: mol_type = other DNA
aatactgccagttcttacaagctgtggaaatttaagaattaatttttatgtgaagaaacaaattaacgtggatgattagaaggaagaattacctttatggccagaaacat

SEQ ID NO: 56704 - DNA, 110 bp, synthetic construct
  source 1..110: mol_type = other DNA
catgtttaataagcaatggtgctagagaaaaatttcttcagttcaccagtcagggtaatttcagctctgctacattcatactcacccagctacctgttaaatttatttct

SEQ ID NO: 56705 - DNA, 110 bp, synthetic construct
  source 1..110: mol_type = other DNA
taatttcagctctgctacattcatactcacccagctacctgttaaatttatttcttgttatcattgttatcagcagggtatggctaatgaatgttaaccaaagaatactt

SEQ ID NO: 56706 - DNA, 110 bp, synthetic construct
  source 1..110: mol_type = other DNA
aatactgtgttggtttcatacctggaaattttgatcctctatttctctactctctttattttatgaactccttattctgaatcttccatatacatagcccatggttttga

SEQ ID NO: 56707 - DNA, 110 bp, synthetic construct
  source 1..110: mol_type = other DNA
agtagtcagctgaatgctgcagatagccagaattttctccctgtgcacctttctcctctctagtactttctcttgtaaattataggtacttagttctctctaggggcttt

SEQ ID NO: 56708 - DNA, 110 bp, synthetic construct
  source 1..110: mol_type = other DNA
ctctctagtactttctcttgtaaattataggtacttagttctctctaggggctttattcagcttcctcaactcaggaagtctacagggttctgcaccaggttaggaacct

SEQ ID NO: 56709 - DNA, 110 bp, synthetic construct
  source 1..110: mol_type = other DNA
catgataatgaatgaaaaattatggttaagacagcttaccagacaaaactactaagatgtgaaaaacgcagcgagaactacatacagcagcagcacttgagtaataaatc

SEQ ID NO: 56710 - DNA, 110 bp, synthetic construct
  source 1..110: mol_type = other DNA
tcctaactagagagatcttgagagattacatactactgcaaactctacaacatggtaggctccattgcagttaccatttttggatgcagtactatctttgctagcacaga

SEQ ID NO: 56711 - DNA, 110 bp, synthetic construct
  source 1..110: mol_type = other DNA
taagtcttcctttcctaggtctgaaagactgtgggcaattcatttcagttctttgtagtgttttcagcaaagcactttagctttctttcccaagcggactcaaaacttgg

SEQ ID NO: 56712 - DNA, 110 bp, synthetic construct
  source 1..110: mol_type = other DNA
agagctcaagccccaataaacatgactgcctgagtactaccttaactttatataaacatttcaatcctctaagtaagtgcattcactttattgtttaagacaaatgaata

SEQ ID NO: 56713 - DNA, 110 bp, synthetic construct
  source 1..110: mol_type = other DNA
ccaccaggaaacttggggaaataaattaagataagaaattcagactgttttgacgagcaaaatctaagtaggccaaaggcagactattaaaagccattaggatgtccatc

SEQ ID NO: 56714 - DNA, 110 bp, synthetic construct
  source 1..110: mol_type = other DNA
gatatttctgaaatgcagatatgagttctgtggctacattttgtctagctgttttaatcataaatttgcaagcaccatagactatgcacaaatatatgcttctttttaca

SEQ ID NO: 56715 - DNA, 110 bp, synthetic construct
  source 1..110: mol_type = other DNA
tctctataggataatgagagatgagagacttggaacaacttgcacttaccaaacttcggcctgtaattttccctaatatatctgctttgaacatacatcttctgtctttt

SEQ ID NO: 56716 - DNA, 110 bp, synthetic construct
  source 1..110: mol_type = other DNA
gatgcctgggtaaagtctcagctgagctcagctcccctaaggaggcctccacttagaggaggctaggaatgcagatattagtaagacatgggcagccagggagatggctc

SEQ ID NO: 56717 - DNA, 110 bp, synthetic construct
  source 1..110: mol_type = other DNA
ttggagaggaaagtctcccatttttccatctgttaactttccgtcgttgcaggtctcctcagatggtttgtaaacattgactgtgagctcctcctcagggtggttttcct

SEQ ID NO: 56718 - DNA, 110 bp, synthetic construct
  source 1..110: mol_type = other DNA
tcctcagatggtttgtaaacattgactgtgagctcctcctcagggtggttttcctgtttgccccatgtattcttggcttgggaaacatctctcgaggttttaatgttttt

SEQ ID NO: 56719 - DNA, 110 bp, synthetic construct
  source 1..110: mol_type = other DNA
aaggtaactgtctacacaaagtttctcacaatggggtgctgaaattttccacccaggcattctaaatcccccttctcttgcatttcctggagcaccacttcattggtatt

SEQ ID NO: 56720 - DNA, 110 bp, synthetic construct
  source 1..110: mol_type = other DNA
gaactgggttgtccattgttaaatacttttcattggtttgaaatcatttgtgcgttatacatgctttataatagtggttcccacagtgttttctggggttctaaagggat

SEQ ID NO: 56721 - DNA, 110 bp, synthetic construct
  source 1..110: mol_type = other DNA
cacctattcacaccactgccatgagccctaattattttggaccagcatcaaaagagagttgcctgcaacagctttaaagacatacactaggtcttactcatccactctca

SEQ ID NO: 56722 - DNA, 110 bp, synthetic construct
  source 1..110: mol_type = other DNA
cagtgatttctggaagttcaagggagggaagaggagaaaacaagatgaggcatagagaacatttaaggtgtgaaagtatactgtatgatactgtaatggacacatgtcat

SEQ ID NO: 56723 - DNA, 110 bp, synthetic construct
  source 1..110: mol_type = other DNA
gggaagaggagaaaacaagatgaggcatagagaacatttaaggtgtgaaagtatactgtatgatactgtaatggacacatgtcattaaaaaaaaaaaagaaacttacaga

SEQ ID NO: 56724 - DNA, 110 bp, synthetic construct
  source 1..110: mol_type = other DNA
tatcatccaaggggagtgggagtgggagtgggaaagaacctctcttctttctttgagcagtagctcctccttagtctccaaaaggtgttttattcaaatcaccatcacca

SEQ ID NO: 56725 - DNA, 110 bp, synthetic construct
  source 1..110: mol_type = other DNA
agcagtagctcctccttagtctccaaaaggtgttttattcaaatcaccatcaccaaagggcagtcctcaaactcctgcccaaggtctaaatctgaattcaggcctcatcc

SEQ ID NO: 56726 - DNA, 110 bp, synthetic construct
  source 1..110: mol_type = other DNA
gggaatgggaaaaaacatattccactaccactacttgtttgacaacttttagtttgtagttggcttatgtttcttgagtaaatacttttacggaatggcaatatctaaaa

SEQ ID NO: 56727 - DNA, 110 bp, synthetic construct
  source 1..110: mol_type = other DNA
atttggataggactgctggcttggttatctcctcaagtgaggctaaagaaggggctgtatagctgcttgagttctctagtcaggcttactaggtgattgggactgggtac

SEQ ID NO: 56728 - DNA, 110 bp, synthetic construct
  source 1..110: mol_type = other DNA
cactcatttgtacatagatatattcattaggtagaccactttggaggtgtctttaaagatgcacacattttaggttcagttacaagcagcaaggattttaaagtattatt

SEQ ID NO: 56729 - DNA, 110 bp, synthetic construct
  source 1..110: mol_type = other DNA
ccactttggaggtgtctttaaagatgcacacattttaggttcagttacaagcagcaaggattttaaagtattattttttagttcaattttggaattgaaattatggagag

SEQ ID NO: 56730 - DNA, 110 bp, synthetic construct
  source 1..110: mol_type = other DNA
tgactctttacaagagatttgtggtaagattccccatttcaacaaatgaagtaactgacacacagagaaataaattagacagcttctccggctggaaaaaaagctgaaca

SEQ ID NO: 56731 - DNA, 110 bp, synthetic construct
  source 1..110: mol_type = other DNA
tgacacacagagaaataaattagacagcttctccggctggaaaaaaagctgaacagaggatcaaaacccttgtggtggtagagtgagtcaatgagaactacaactgccta

SEQ ID NO: 56732 - DNA, 110 bp, synthetic construct
  source 1..110: mol_type = other DNA
ttaaacatggtttcactgagtaaggtaaagtagctaagacaataaaaaaaatatgtacggttctaacaagcaaggcttaaagcaaaaaatggcaatggaaaaataatgtc

SEQ ID NO: 56733 - DNA, 110 bp, synthetic construct
  source 1..110: mol_type = other DNA
ctgagatcaagcaacactcagcccttaggcacggagcaagggagctggacagggaaatcagtggggctggggcaggagaactgcagtccccaaacatatccactgtatgg

SEQ ID NO: 56734 - DNA, 110 bp, synthetic construct
  source 1..110: mol_type = other DNA
ccctaacctggggaaaccttgagtacctgctccacatagctctgagccacctcgccctgcccaatgagaggctgtgggctactccacattgctccaggccgccttgcccc

SEQ ID NO: 56735 - DNA, 110 bp, synthetic construct
  source 1..110: mol_type = other DNA
taagagcaacattctcccagcaccaagacagctccttgaaagagaacattccttcttaatcttataattggccaggattatccatcacccactacttgccagattgtgta

SEQ ID NO: 56736 - DNA, 110 bp, synthetic construct
  source 1..110: mol_type = other DNA
ttttacatggaagtcagtatactatgctaggccctgagtcattcaagggccacgtaccacgcaactagagaccacacttacagctcaaagcccaaaggaattattcacat

SEQ ID NO: 56737 - DNA, 110 bp, synthetic construct
  source 1..110: mol_type = other DNA
gtcactcagtgttttaaactattaacacaaatctcatgcaataatcacagtaattctaataggatgtcctaatgttagtctctttttaatgatgagtaaatagtgctgag

SEQ ID NO: 56738 - DNA, 110 bp, synthetic construct; identical to SEQ ID NO: 56737
  source 1..110: mol_type = other DNA

SEQ ID NO: 56739 - DNA, 110 bp, synthetic construct
  source 1..110: mol_type = other DNA
agtcaaataggcagcctgtactaccatgaaaattaagtgtgctattccacatgagtctcagaagatatagcaagttcaattgtgattactcttgaaatgttttttaatcg

SEQ ID NO: 56740 - DNA, 110 bp, synthetic construct; identical to SEQ ID NO: 56739
  source 1..110: mol_type = other DNA

SEQ ID NO: 56741 - DNA, 110 bp, synthetic construct
  source 1..110: mol_type = other DNA
catatccgacatgtgacatgtgtgactggaagagacacatgcagtgtgtctaaaattagtggtgggaaactcatctcaattcaaaaagatattaaacttaggcatactta

SEQ ID NO: 56742 - DNA, 110 bp, synthetic construct
  source 1..110: mol_type = other DNA
cacatgcagtgtgtctaaaattagtggtgggaaactcatctcaattcaaaaagatattaaacttaggcatacttatatacatggattgtatatgtatgggaatggattat

SEQ ID NO: 56743 - DNA, 110 bp, synthetic construct
  source 1..110: mol_type = other DNA
aaaatagtgaaagtgtcgaatactgatgagaagacaaagaaactgaggcactcattttttctgcttggagtatcagatgttagagacactgtaacacagttatttcctta

SEQ ID NO: 56744 - DNA, 110 bp, synthetic construct
  source 1..110: mol_type = other DNA
tttttctgcttggagtatcagatgttagagacactgtaacacagttatttccttaaaaagcttgccatacatatagcacataatccagagaattcattcatgggcattta

SEQ ID NO: 56745 - DNA, 110 bp, synthetic construct
  source 1..110: mol_type = other DNA
tgtcagtctgaatgtagtcctggctcctagaggttgtcgcaatcctcatcatgtagcctctatccgggagctgcaggtcaagtctctctaattccaatccctcctccttc

SEQ ID NO: 56746 - DNA, 110 bp, synthetic construct
  source 1..110: mol_type = other DNA
aataatgcctgtttgcatgttaataggaaagttaagctgagtagagataggatacttggaacctggcatatttgttaaattcctttgtaagggtggagtccatgtggggt

SEQ ID NO: 56747 - DNA, 110 bp, synthetic construct
  source 1..110: mol_type = other DNA
gggttactatgatttccttagcctcctcttgcttccactagttaaaaaagctgcagttctctttgagcttggagtagatgtagggaggaaaaaagaaataattcaactga

SEQ ID NO: 56748 - DNA, 110 bp, synthetic construct
  source 1..110: mol_type = other DNA
cctaagccacagcgggaactctagaaattaataatttttaaaagaacagatcacgcagctagaatgtaagtaaggacataaccttaacaagtaacttgcaaatccacata

SEQ ID NO: 56749 - DNA, 110 bp, synthetic construct
  source 1..110: mol_type = other DNA
caagaaaatgatcttcaaatttccagcatacctcaaagctgagttaagatccataggtgtgttattcaaggagagaaaagaccttacccaggacatggctgaaactcaag

SEQ ID NO: 56750 - DNA, 110 bp, synthetic construct
  source 1..110: mol_type = other DNA
taaagtcctcaggcagttgttgttccctccaattattatctttgtgataatctcatttgtgttttgtgctttaagctccctaacatttatgtaactaattccctctataa

SEQ ID NO: 56751 - DNA, 110 bp, synthetic construct
  source 1..110: mol_type = other DNA
tttgaaaggtgaaatgaggaaatctggtcatttaaataagagcttactctgaatttggtgtcagagccaaccttctgtttgctacaaaactccttgggtgaaagagcaag

SEQ ID NO: 56752 - DNA, 110 bp, synthetic construct
  source 1..110: mol_type = other DNA
ttcagcagttgactttacccagctctttgtaaaactggatcactaaactcagattgcctagcattcaggtctatttgatgatgggtcactcccacagtcacccagagaat

SEQ ID NO: 56753 - DNA, 110 bp, synthetic construct
  source 1..110: mol_type = other DNA
agtaattaaagtagtaaaaacgggacaatttactcaggactattgctatagggagacgagacagcttagaacagcacccatgttcaaatacagcaaggccaagggggatt

SEQ ID NO: 56754 - DNA, 110 bp, synthetic construct; identical to SEQ ID NO: 56753
  source 1..110: mol_type = other DNA

SEQ ID NO: 56755 - DNA, 110 bp, synthetic construct
  source 1..110: mol_type = other DNA
aatgtagggctttgtgaacccagctggggctttagcttttaccttgaatgaaacagaaacacttgaaatgtcttgaacagagacattatgtgatcagattgcatttttaa

SEQ ID NO: 56756 - DNA, 110 bp, synthetic construct
  source 1..110: mol_type = other DNA
tcttatccacagtttcagttcccatggtttcatttacctgtggccaaccgtagtctgaaaataatacatggaaaactacagaaataaacaattcataaattttaaattgc

SEQ ID NO: 56757 - DNA, 110 bp, synthetic construct
  source 1..110: mol_type = other DNA
cagttcccatggtttcatttacctgtggccaaccgtagtctgaaaataatacatggaaaactacagaaataaacaattcataaattttaaattgcatgccattctgggca

SEQ ID NO: 56758 - DNA, 110 bp, synthetic construct
  source 1..110: mol_type = other DNA
tggatacaattagttgcctgaaaataaaaatgggggagttatcattgctagagcaaatgctgatgtcatagggatggcagatcatctgggtctgtggtttttcaagttgg

SEQ ID NO: 56759 - DNA, 110 bp, synthetic construct
  source 1..110: mol_type = other DNA
aatgctgatgtcatagggatggcagatcatctgggtctgtggtttttcaagttggcctgggagagactggtgatgaatttgcaattctagcatgctaccaaaacacaacc

SEQ ID NO: 56760 - DNA, 110 bp, synthetic construct
  source 1..110: mol_type = other DNA
gggtcagtcacaacagatgaaattaaaataatccacttaagctttttcttagacaggttaaagagcaaaaacagataaataaaaaaaccatctgaataaaagcgacctat

SEQ ID NO: 56761 - DNA, 110 bp, synthetic construct
  source 1..110: mol_type = other DNA
tttttttttcatactacaaaggtacagtaatcaaagcagcatgatactggcacaaatagagacacacaaatcaatggaacagaacaagagagctcagaaataaacccgca

SEQ ID NO: 56762 - DNA, 110 bp, synthetic construct
  source 1..110: mol_type = other DNA
atagagacacacaaatcaatggaacagaacaagagagctcagaaataaacccgcacatttatgacaattaatctatgacaggtgaagaaatgacagtctctttagtaagt

SEQ ID NO: 56763 - DNA, 110 bp, synthetic construct; identical to SEQ ID NO: 56762
  source 1..110: mol_type = other DNA

SEQ ID NO: 56764 - DNA, 110 bp, synthetic construct; identical to SEQ ID NO: 56762
  source 1..110: mol_type = other DNA

SEQ ID NO: 56765 - DNA, 110 bp, synthetic construct
  source 1..110: mol_type = other DNA
taattctgcgacaaccttgatatcactgagggagaatgcttttgattagtcgtattccattatttcagagatttgttttcttttcacctcacaatcaaaaccataaatgc

SEQ ID NO: 56766 - DNA, 110 bp, synthetic construct
  source 1..110: mol_type = other DNA
ggaaaacaaaatcagcttacaactaaattcataaatgtcagcatatataaaggcacagaaaaaaaaatctatcctgtctctacttctatatcagactcaaagtcaatacc

SEQ ID NO: 56767 - DNA, 110 bp, synthetic construct
  source 1..110: mol_type = other DNA
cagaaaaaaaaatctatcctgtctctacttctatatcagactcaaagtcaataccttcctgtataacatgaagaaattcatgagaaatgatttccagttagagaaatcta

SEQ ID NO: 56768 - DNA, 110 bp, synthetic construct; identical to SEQ ID NO: 56766
  source 1..110: mol_type = other DNA

SEQ ID NO: 56769 - DNA, 110 bp, synthetic construct; identical to SEQ ID NO: 56767
  source 1..110: mol_type = other DNA

SEQ ID NO: 56770 - DNA, 110 bp, synthetic construct
  source 1..110: mol_type = other DNA
taatgggaagtgaaaaactcagaactgccttcaattgtgcatatgctaagtttttattagttgtattattctggtagctatccaggaggttcaaatgcctaaccactgga

SEQ ID NO: 56771 - DNA, 110 bp, synthetic construct
  source 1..110: mol_type = other DNA
attagttgtattattctggtagctatccaggaggttcaaatgcctaaccactggagaaaatgataaatacgccatacagcaaaaaattctcacataatgagcataaatat

SEQ ID NO: 56772 - DNA, 110 bp, synthetic construct
  source 1..110: mol_type = other DNA
catggttttttattttgtgtcatattaagggtgaaattttgttcacaaagttagatgtgcagctattaaattatttgtgaatcagccttgttatcatttcaagctcctga

SEQ ID NO: 56773 - DNA, 110 bp, synthetic construct
  source 1..110: mol_type = other DNA
agctcaatgaaatacaatcttgttcctttgatttggccatgattaactttcaatggcatggagttatagatcgaagatgtgtttcaggaataaatggaacaaatagaaag

SEQ ID NO: 56774 - DNA, 110 bp, synthetic construct
  source 1..110: mol_type = other DNA
tgcccctattgaaaaagcctcgcagaggactcaatgaaggagaatatagaagagggcctgacagctgagagaagataacctaataaaccgccaagcattgaatcttatgc

SEQ ID NO: 56775 - DNA, 110 bp, synthetic construct
  source 1..110: mol_type = other DNA
gtagaaaacatctggttgtggataatgagccagagtatctcagctcccttggatgctaatagcattgggcaaaggtcatggcggagggccatctggctccctgtgtaaag

SEQ ID NO: 56776 - DNA, 110 bp, synthetic construct
  source 1..110: mol_type = other DNA
agatattgaagggcactagaggaagcaaaagtttgctaagtgtggtcagttgtgtaaggtaatgagatccaatctaatttacagataggtaagaaaattgacttttccaa

SEQ ID NO: 56777 - DNA, 110 bp, synthetic construct
  source 1..110: mol_type = other DNA
ttctatgaatatttcatggttgcatggcccaagacttctaatcaagggaaatgtttgaatagcaaaggcgtgggaagctagaggtttaaagatgtctacccagacacatt

SEQ ID NO: 56778 - DNA, 110 bp, synthetic construct
  source 1..110: mol_type = other DNA
tgaatagcaaaggcgtgggaagctagaggtttaaagatgtctacccagacacatttgcttccattccagtggaataaataaggacaaaaaattctccctccccttcctgg

SEQ ID NO: 56779 - DNA, 110 bp, synthetic construct
  source 1..110: mol_type = other DNA
tggagagctgaagctgatgacaaatatcctgcattggaggtaactggctggctcatggaaggtcaggtgctgaaccttcaaacggctgcagtacttcccactggatagga

SEQ ID NO: 56780 - DNA, 110 bp, synthetic construct
  source 1..110: mol_type = other DNA
tggaaggtcaggtgctgaaccttcaaacggctgcagtacttcccactggataggacacaaaaagctgggccctaacagaaacacagcagagattttaagcagatgaggtc

SEQ ID NO: 56781 - DNA, 110 bp, synthetic construct
  source 1..110: mol_type = other DNA
acagttgtgcaagagttaattgggtacctggatttttctgtacacagattccagagaaagcaatatccagaattgtaaggagcaggctctaatggaaccttgtaaaatcc

SEQ ID NO: 56782 - DNA, 110 bp, synthetic construct
  source 1..110: mol_type = other DNA
gaaagcaatatccagaattgtaaggagcaggctctaatggaaccttgtaaaatcccaagaaatatatctctaaaatcaaattaatactaggaagaggttttatagtattc

SEQ ID NO: 56783 - DNA, 110 bp, synthetic construct
  source 1..110: mol_type = other DNA
taccactagaacccaagtctctagagatgaggtatattctattttcccttcttttttgattaggatgataggaaatatgtaagattcaaacacttacctgccagtacagc

SEQ ID NO: 56784 - DNA, 110 bp, synthetic construct
  source 1..110: mol_type = other DNA
ttgattaggatgataggaaatatgtaagattcaaacacttacctgccagtacagcttctaaaatgttttccacattaaattaccaagtgaaaccaatagctttctatccc

SEQ ID NO: 56785 - DNA, 110 bp, synthetic construct
  source 1..110: mol_type = other DNA
tctatacagaatatagatgcatggtcattgcatagcaaatgctttgacaaatatactgagggtcaggtccactaaggaaagcggatcgtgattctgaaatagctagaaat

SEQ ID NO: 56786 - DNA, 110 bp, synthetic construct; identical to SEQ ID NO: 56785
  source 1..110: mol_type = other DNA

SEQ ID NO: 56787 - DNA, 110 bp, synthetic construct
  source 1..110: mol_type = other DNA
acttgattctcaatatggcaggataatgagcatattttgctagtttagtaattaagtctgttgctgaggagctcttgctttctgtgatggatgcttacctgttatctgaa

SEQ ID NO: 56788 - DNA, 110 bp, synthetic construct
  source 1..110: mol_type = other DNA
gataaaatatcacaggttttgttcagagaggttaaaatacataccctatttacttagggatgaaaagaactacatgcagcaattgcaggagcccagagcctagagctcag

SEQ ID NO: 56789 - DNA, 110 bp, synthetic construct
  source 1..110: mol_type = other DNA
agggatgaaaagaactacatgcagcaattgcaggagcccagagcctagagctcagtcagaggtatctttcagtgctgtcctgcccaattcattctatgggaggaggaaca

SEQ ID NO: 56790 - DNA, 110 bp, synthetic construct
  source 1..110: mol_type = other DNA
tcttgtgagactgacatgttgtgagactaacctcatgccctgtgctccagtcagaacacagtaattacagctcttggaaccaccaatctgcttttcctcatgctattccc

SEQ ID NO: 56791 - DNA, 110 bp, synthetic construct
  source 1..110: mol_type = other DNA
acacagtaattacagctcttggaaccaccaatctgcttttcctcatgctattccctgtacatagaggatcattatttatcatttgccacatcagtattgacaacctatgc

SEQ ID NO: 56792 - DNA, 110 bp, synthetic construct
  source 1..110: mol_type = other DNA
ccatgagcccattgctatagttctaatacagtattacagcccggctcaaaacaccttttaaaaaggcatgaggaaaatttagtctttgctccaattattgggctagttga

SEQ ID NO: 56793 - DNA, 110 bp, synthetic construct
  source 1..110: mol_type = other DNA
gtaatataacatatcacccaattcacataagcagatttaaacaatgttattttagtgcagttaagtagttcctaacctgaagtcagacttaattacaggacagactgtat

SEQ ID NO: 56794 - DNA, 110 bp, synthetic construct
  source 1..110: mol_type = other DNA
attggtagcacactctggccaaggaactcagcagggtgcatatctgcttagcttgaatcctcaaacaagttttgccatccctagagcctgtttttccacgtacagacaag

SEQ ID NO: 56795 - DNA, 110 bp, synthetic construct
  source 1..110: mol_type = other DNA
gcttaactctatcagttttttggggtcaccaatatcttgtggtgctcactctttctccatattggcctaaatcctgctgtgtcgagaacggtcagctatctggagcacca

SEQ ID NO: 56796 - DNA, 110 bp, synthetic construct
  source 1..110: mol_type = other DNA
tccatattggcctaaatcctgctgtgtcgagaacggtcagctatctggagcaccatgaaaatgaagagtgttgaatcatatcaaaaaggagaaattttgcttctatttga

SEQ ID NO: 56797 - DNA, 110 bp, synthetic construct
  source 1..110: mol_type = other DNA
ttcctacccagtgtaactgtgacctttgaaatagaagatctatgatgtggttaacttataagctatatacgcatccaaaaagcagtgcccttgaggtcaatcccacactc

SEQ ID NO: 56798 - DNA, 110 bp, synthetic construct
  source 1..110: mol_type = other DNA
ttataagctatatacgcatccaaaaagcagtgcccttgaggtcaatcccacactcccagtttatcctgtttcattttcataatgctgatcttgactcacgaaacctattc

SEQ ID NO: 56799 - DNA, 110 bp, synthetic construct
  source 1..110: mol_type = other DNA
gagatgagcaccaaagtgctgccatctttgcagtgacctgctcgcccatgatgtctttccactttttcctccaagaagccttgttagttacagtagtgatgatcttctgc

SEQ ID NO: 56800 - DNA, 110 bp, synthetic construct
  source 1..110: mol_type = other DNA
gcctcccctggagctgagtagcagctaggaagggggtctgtgagaaaggtggaatttgtccacagttcacgggctacctttgatagtgggatggggaagggagacagtgg

SEQ ID NO: 56801 - DNA, 110 bp, synthetic construct
  source 1..110: mol_type = other DNA
tgattgcagttttgttttaagtaattttacatgacctccttcctgatctccacctgctcattgatgtttgagagctggtgacaatgtctttgttatctaatattttttgc

SEQ ID NO: 56802 - DNA, 110 bp, synthetic construct
  source 1..110: mol_type = other DNA
gagagttttcttcagtaatttctatagcttacactttttaggatcatggacagcggtttaaatctctatctctgattgaagcattttaattttaactgttaaatcggaat

SEQ ID NO: 56803 - DNA, 110 bp, synthetic construct
  source 1..110: mol_type = other DNA
ttcatgatctctgtattagaaataaaatgagcttccttgcagtgttgcaatgtgctataactcttactatctttgctcttctctattctactttagtatccaacctgtgt

SEQ ID NO: 56804 - DNA, 110 bp, synthetic construct
  source 1..110: mol_type = other DNA
aggattccagtttatccttctgaatccctctcatctctaacaaaaaagctacatatacatgtggttgagaggcaagggcttctttacactcaccaccagggggggcacgg

SEQ ID NO: 56805 - DNA, 110 bp, synthetic construct
  source 1..110: mol_type = other DNA
caggattcatgggttatgggacatgggacatgagattgtatgggagatagcaaggtaactcaaaaccttgaaaattaagcttcctcagactgaagactggggggtggggt

SEQ ID NO: 56806 - DNA, 110 bp, synthetic construct
  source 1..110: mol_type = other DNA
taactcaaaaccttgaaaattaagcttcctcagactgaagactggggggtggggtatcagcaggcactaaactaagagcagcatcagccaaaagaacccatcccccgcaa

SEQ ID NO: 56807 - DNA, 110 bp, synthetic construct; identical to SEQ ID NO: 56805
  source 1..110: mol_type = other DNA

SEQ ID NO: 56808 - DNA, 110 bp, synthetic construct; identical to SEQ ID NO: 56806
  source 1..110: mol_type = other DNA

SEQ ID NO: 56809 - DNA, 110 bp, synthetic construct
  source 1..110: mol_type = other DNA
ccttgtgcagcttgggacttgggctgattccaatggtatcaccacctccagctgtctcatatcttgtctctctcttttctcactggctcctactttaggtctctccaata

SEQ ID NO: 56810 - DNA, 110 bp, synthetic construct
  source 1..110: mol_type = other DNA
ggcacaggaaagcttctctgaagctcaagctactggcaactgcacattcaaccgagggccatgaggctccagtgtcccttcacagttgtgaaggctccctcttcatgctg

SEQ ID NO: 56811 - DNA, 110 bp, synthetic construct
  source 1..110: mol_type = other DNA
tttccaacacatacaaagctgtttcaatttttactaacaactggtatagatagccacattagtgactatcagcttaataccagcctgcttataggtaaattgtctatacc

SEQ ID NO: 56812 - DNA, 110 bp, synthetic construct
  source 1..110: mol_type = other DNA
cctgagaataagacttagcaccaaactccacattataatggactttctgttctgtcagggttcccaagctactcaaagaaatgattctacagcgacacttgaagggctcc

SEQ ID NO: 56813 - DNA, 110 bp, synthetic construct
  source 1..110: mol_type = other DNA
atctgggttgccatagttgcagctcccctgacccagaaatttccagatgccatgagtgcaaccataaaaattaaaaaaaaaaaagagagagagagcaaaaagggccttct

SEQ ID NO: 56814 - DNA, 110 bp, synthetic construct
  source 1..110: mol_type = other DNA
gcatatggaggttcctggctaggggtcaaattggagctatggctgctggtcttcactaaagctgcagcacacaccaataatatctaagcccagatctgagccacgtctgc

SEQ ID NO: 56815 - DNA, 110 bp, synthetic construct
  source 1..110: mol_type = other DNA
ctaaagctgcagcacacaccaataatatctaagcccagatctgagccacgtctgcatcctacactgcagtttgctgcaacgccagatcatttaacccacggagcgaggcc

SEQ ID NO: 56816 - DNA, 110 bp, synthetic construct
  source 1..110: mol_type = other DNA
gtgaggctaagactctacaacgcccaggtagatgaaaagaaactgtaaataaagctaaactaatgaattgaagggccaccttatcccatctacttccctaccgccccaga

SEQ ID NO: 56817 - DNA, 110 bp, synthetic construct
  source 1..110: mol_type = other DNA
tttacatatagccttgccatccctcctagtaccctttaagatccctcccagtgccactttgccatgtaacagagcttctttccttggttcatgctacatgctttaaaaat

SEQ ID NO: 56818 - DNA, 110 bp, synthetic construct
  source 1..110: mol_type = other DNA
actttgccatgtaacagagcttctttccttggttcatgctacatgctttaaaaatcccttttctcggagttcccatcgtggttcagtgattagcaaaacctgacaagcat

SEQ ID NO: 56819 - DNA, 110 bp, synthetic construct
  source 1..110: mol_type = other DNA
aagttactttccctactatcattccagttgcattcaaatgttactgatccatactgtccagctattggttagctgtccagttactcttccttctttgaaagcatctgcct

SEQ ID NO: 56820 - DNA, 110 bp, synthetic construct
  source 1..110: mol_type = other DNA
atttacagtaaaggcacatgaataaggagaaataggtcctctgtttttattatgttaattatggtcgggcgctataattatgtgtgtatattttcaagccattaatatgg

SEQ ID NO: 56821 - DNA, 110 bp, synthetic construct
  source 1..110: mol_type = other DNA
taattatggtcgggcgctataattatgtgtgtatattttcaagccattaatatggtaaataaaaccccattgcttgataaattagacgtttgtgggcataaatttgtaaa

SEQ ID NO: 56822 - DNA, 110 bp, synthetic construct
  source 1..110: mol_type = other DNA
tatttcttttctttgaacagtattttaaacctgcattccttaagatttctacagcctggggaatactaggtcatagtaattgtacgaagatcctccaataccagatttga

SEQ ID NO: 56823 - DNA, 110 bp, synthetic construct
  source 1..110: mol_type = other DNA
ctggggaatactaggtcatagtaattgtacgaagatcctccaataccagatttgaaattttttttttttgtcttttttttgtttttgctatttcttgggccgctcccgcg

SEQ ID NO: 56824 - DNA, 110 bp, synthetic construct
  source 1..110: mol_type = other DNA
aatgcttaattatgccaaagagttagagaataatttataccggtgttctttgtagttaaaaagtcaattatttctggaatttgaccctccatgctccctgtcctactacc

SEQ ID NO: 56825 - DNA, 110 bp, synthetic construct; identical to SEQ ID NO: 56824
  source 1..110: mol_type = other DNA

SEQ ID NO: 56826 - DNA, 110 bp, synthetic construct
  source 1..110: mol_type = other DNA
caatatttcttgaatgactgaatcttagagtatatttaattcaacttcttttaagagctgctcatggctccttaagcctatccaagtcctcttagactatattccctact

SEQ ID NO: 56827 - DNA, 110 bp, synthetic construct
  source 1..110: mol_type = other DNA
aacccactgagcaaagctagggatcgaacttatgtcctcaacgatacaggtcaggttcatttgttgagccacaagggaaagtcgatctacccctctcccacaccaaagtg

SEQ ID NO: 56828 - DNA, 110 bp, synthetic construct
  source 1..110: mol_type = other DNA
aaaattctatacacataatgaatccctttatttcctgcacctgggacagactggtatactctaagtttggagggtccaagatattagggctttctcaccgatggttggaa

SEQ ID NO: 56829 - DNA, 110 bp, synthetic construct
  source 1..110: mol_type = other DNA
atactctaagtttggagggtccaagatattagggctttctcaccgatggttggaaagctgtgctcagctgagagtgttaatcagaataactaactgtggcctgtccagca

SEQ ID NO: 56830 - DNA, 110 bp, synthetic construct; identical to SEQ ID NO: 56828
  source 1..110: mol_type = other DNA

SEQ ID NO: 56831 - DNA, 110 bp, synthetic construct; identical to SEQ ID NO: 56829
  source 1..110: mol_type = other DNA

SEQ ID NO: 56832 - DNA, 110 bp, synthetic construct
  source 1..110: mol_type = other DNA
actttatttttgcccttctcactgcccacatatttctaaaaattacagccagtgggcaagagtgtgccaatgtcaggtatttaaacctgccagttttgggtttctgttta

SEQ ID NO: 56833 - DNA, 110 bp, synthetic construct
  source 1..110: mol_type = other DNA
gcaagagtgtgccaatgtcaggtatttaaacctgccagttttgggtttctgtttagacaaagtctccacagaggaattactgttcctattatacagattaagaaactaaa

SEQ ID NO: 56834 - DNA, 110 bp, synthetic construct
  source 1..110: mol_type = other DNA
taatcttggcagtaaactagtttggtgggataagaataggatagaaagacacggataagcctgattttggaaataagatagtggtagagaaatggtaagacaagtctgag

SEQ ID NO: 56835 - DNA, 110 bp, synthetic construct
  source 1..110: mol_type = other DNA
taagcctgattttggaaataagatagtggtagagaaatggtaagacaagtctgagggatttgttctaaatttctaccagatcgacaattataataatgacacatttcttt

SEQ ID NO: 56836 - DNA, 110 bp, synthetic construct; identical to SEQ ID NO: 56834
  source 1..110: mol_type = other DNA

SEQ ID NO: 56837 - DNA, 110 bp, synthetic construct; identical to SEQ ID NO: 56835
  source 1..110: mol_type = other DNA

SEQ ID NO: 56838 - DNA, 110 bp, synthetic construct
  source 1..110: mol_type = other DNA
atgccttaaaagcacagagaactttaaagagaccttagggatttggggcaagagacgaggggtgtaacttagtgcaagggataagactgaataccaaatggaaaatatat

SEQ ID NO: 56839 - DNA, 110 bp, synthetic construct
  source 1..110: mol_type = other DNA
cactagttgactactcagtgatgtcattggtcacaggatagtcaatcagtccattttagctaaaataacttttaactcagaggcttgatacccactcacattttctagcc

SEQ ID NO: 56840 - DNA, 110 bp, synthetic construct
  source 1..110: mol_type = other DNA
aagataaagaggcaggtaaatagtagggtaaagtttctaaaatggcatattggagagtttttaaatgatgatggcccagtgtctttgaggttttcttaaattgtttccag

SEQ ID NO: 56841 - DNA, 110 bp, synthetic construct
  source 1..110: mol_type = other DNA
tggctctcctgtgatctagtgatctacatacagaagcaatgtaatatgatggacaccctcactctgcctgctttcaggcaatgcctttttcttcagctttttcctgaaga

SEQ ID NO: 56842 - DNA, 110 bp, synthetic construct
  source 1..110: mol_type = other DNA
gtttgaaacaatactaaataagctcaaaattctaatcacatataactgaaaatactactgcaattcttcattggccttacttctgataatagaacctgggaatccagcct

SEQ ID NO: 56843 - DNA, 110 bp, synthetic construct
  source 1..110: mol_type = other DNA
tgggaaatgcctatttgtggggaagtatatgccttaaagatagcttctatgacctaggtaaatgcttttatatgagaaatagttcaaatcgattagggtatagatttgta

SEQ ID NO: 56844 - DNA, 110 bp, synthetic construct
  source 1..110: mol_type = other DNA
ttcccactcagtcctataaagtcatgatagagtcctaaagctgacatatgtatttatcagactctatgactgttcaataccaacatatattttaagaaaataatttgttc

SEQ ID NO: 56845 - DNA, 110 bp, synthetic construct
  source 1..110: mol_type = other DNA
cagaagttgagctaaaaacacagcttacctccaggcatcctgtgattaaggaagaagagctgaaacctctcctcttgtctgcatcaactgcagttttacatctccactgc

SEQ ID NO: 56846 - DNA, 110 bp, synthetic construct
  source 1..110: mol_type = other DNA
agttcccttatggaagtgagttcagattctggcattgtcaatgcagtagctcaggccactgctgtgccacaagttcagtctctggtccaggaatttctacttgccccagg

SEQ ID NO: 56847 - DNA, 110 bp, synthetic construct
  source 1..110: mol_type = other DNA
gcagaacagatttctaggtttctgtttgtttgtttttaatgcctgtgtgtgtgggggggggggtcaacatttttctctttgatgattttgtgaggctattgtgttcaagc

SEQ ID NO: 56848 - DNA, 110 bp, synthetic construct
  source 1..110: mol_type = other DNA
gactaaagtagcctttattcaagagatatagcactcctatcctagaagtctgaagtctattcaatgcctagctattcagtgaggacttttcacttttgctttttggaatt

SEQ ID NO: 56849 - DNA, 110 bp, synthetic construct
  source 1..110: mol_type = other DNA
ttaattctaagtttcaacgtattatttaccttccttctcccatggagtgctaccacctctacttgattatttccaacctactccaaaaataatgttctatcactcagttt

SEQ ID NO: 56850 - DNA, 110 bp, synthetic construct
  source 1..110: mol_type = other DNA
ccttaggaagaaagagcaaggtagcaatggtctctgctatcaaaaaatactctaatgagagagacacacatattaaccaaaacaaaagatcaatcggaagagtggtcacg

SEQ ID NO: 56851 - DNA, 110 bp, synthetic construct
  source 1..110: mol_type = other DNA
tgagagagacacacatattaaccaaaacaaaagatcaatcggaagagtggtcacgatagaaatgaaaaaaaaaaacttgaaccaaattcatgttaagaactataaggaat

SEQ ID NO: 56852 - DNA, 110 bp, synthetic construct; identical to SEQ ID NO: 56850
  source 1..110: mol_type = other DNA

SEQ ID NO: 56853 - DNA, 110 bp, synthetic construct; identical to SEQ ID NO: 56851
  source 1..110: mol_type = other DNA

SEQ ID NO: 56854 - DNA, 110 bp, synthetic construct
  source 1..110: mol_type = other DNA
gagatgatgtgcaagtattacctgaaggtattcaggtgaaccactaacactatgagaatcattcagaagtgttcagacattctttccactagacaaataactttgtagaa

SEQ ID NO: 56855 - DNA, 110 bp, synthetic construct
  source 1..110: mol_type = other DNA
aagaagccaatttgagtgtactgaggagcctctgaacgtcacctagtttagttttgtcagactttttgaccatttgactcagtacacacacatatacaaaccaaaacaaa

SEQ ID NO: 56856 - DNA, 110 bp, synthetic construct
  source 1..110: mol_type = other DNA
gtttagttttgtcagactttttgaccatttgactcagtacacacacatatacaaaccaaaacaaaattttcctgaaattctgtttacttttaccaaatgtgatgcatttg

SEQ ID NO: 56857 - DNA, 110 bp, synthetic construct
  source 1..110: mol_type = other DNA
gcctctctctctgaatatcgctgaccaccatgtcaaaacattgcagacaattcaaatgtccaatttcttcttagattcatgcgacgtttctactccacctcagtatttat

SEQ ID NO: 56858 - DNA, 110 bp, synthetic construct
  source 1..110: mol_type = other DNA
atgtccaatttcttcttagattcatgcgacgtttctactccacctcagtatttatctcaggctttcagatacactggttcttcaaagtcgtgttataaattgtctggaga

SEQ ID NO: 56859 - DNA, 110 bp, synthetic construct
  source 1..110: mol_type = other DNA
tattaccaaaacagagagacccaatcaagcatcctaaagtcatacataaaatacgtagcatgagcttaaaagtccatcggttttcctctctgtgatatacatttgtacat

SEQ ID NO: 56860 - DNA, 110 bp, synthetic construct
  source 1..110: mol_type = other DNA
atcaaatcctgttcttagtggttggtaatgaacagagaatttgcatgtcaggagggtaatttgaagcttgtagatctggggcgtgatttccatagcccagcccatgtggt

SEQ ID NO: 56861 - DNA, 110 bp, synthetic construct
  source 1..110: mol_type = other DNA
gtaatttgaagcttgtagatctggggcgtgatttccatagcccagcccatgtggtggtctctacttatttctgccaccaacctctgcttccctccagggatataaaggac

SEQ ID NO: 56862 - DNA, 110 bp, synthetic construct
  source 1..110: mol_type = other DNA
aatgtaaacctttcagcacagctgccaatgcagcttcttcccttctatgagagccaccagaaagggtactccctgaactgcagaggaaaaactagaacttcatttctaga

SEQ ID NO: 56863 - DNA, 110 bp, synthetic construct
  source 1..110: mol_type = other DNA
tagaaaaatggacaaatgaaatggataattcaaagaacagctagtaaatatgaaaaagtactcagctccagtgatgactatattagcacatcaaaaccacaatggaatag

SEQ ID NO: 56864 - DNA, 110 bp, synthetic construct
  source 1..110: mol_type = other DNA
aagtactcagctccagtgatgactatattagcacatcaaaaccacaatggaatagcactgtattcctgtcaagtgcaaaaaatgtaaactgtctgagaatacaagcttcc

SEQ ID NO: 56865 - DNA, 110 bp, synthetic construct; identical to SEQ ID NO: 56863
  source 1..110: mol_type = other DNA

SEQ ID NO: 56866 - DNA, 110 bp, synthetic construct; identical to SEQ ID NO: 56864
  source 1..110: mol_type = other DNA

SEQ ID NO: 56867 - DNA, 110 bp, synthetic construct
  source 1..110: mol_type = other DNA
tgcctgaacctgaggattaatgaagttaacacttgtgacaccaccctgttacctcactatcaatcaatcagagaattgtgtgcaagctgatcacacaccctgagaatccc

SEQ ID NO: 56868 - DNA, 110 bp, synthetic construct
  source 1..110: mol_type = other DNA
tattctgctgggtaactaggcagctgttgtgattagttcttgacctttgggagaggtcttaacctggggcctctgaggcaggtgctctgaattatggaacctgcttctct

SEQ ID NO: 56869 - DNA, 110 bp, synthetic construct
  source 1..110: mol_type = other DNA
atgcaaaccattaaactgatttcaattggccaatgtcctagagtttataaagcattggggttagaaagcagaccagaggaagctgtaaatatttagcttctgttcccatg

SEQ ID NO: 56870 - DNA, 110 bp, synthetic construct
  source 1..110: mol_type = other DNA
gtgctacttcctttggctcctggtacctttatcatttgctgaacaagccctcaaagtttaatcacttctgctgtagtggcataacataatgcttcatatttatattgctt

SEQ ID NO: 56871 - DNA, 110 bp, synthetic construct
  source 1..110: mol_type = other DNA
atgcaagatagagggcatcaggaagtgttagaaggttatccttcctcggagacggaattaagccttaaacaagccctgaagcttcagattgagggttctgaccctagctt

SEQ ID NO: 56872 - DNA, 110 bp, synthetic construct
  source 1..110: mol_type = other DNA
ctatacagtacatatgctactggttataaaacctgtccatctaatccagttacagaccccaaacaactccaagtgaatcaataagacaacattcttcttttttaaaaaaa

SEQ ID NO: 56873 - DNA, 110 bp, synthetic construct; identical to SEQ ID NO: 56872
  source 1..110: mol_type = other DNA

SEQ ID NO: 56874 - DNA, 110 bp, synthetic construct
  source 1..110: mol_type = other DNA
acaatcttaaattgtatcaaacactgtatggcaataaacagaggttgtaccttagctttgtacacaaaccacactcgcttatactagctcatggtctcaaaaaattattg

SEQ ID NO: 56875 - DNA, 110 bp, synthetic construct
  source 1..110: mol_type = other DNA
attatgactaatattgctatgaatatttgtgtacaagcttttaagtgaacatgctttcatttcttttgagtacatactaaaaagtcaaatgctggatcacatagtgactc

SEQ ID NO: 56876 - DNA, 110 bp, synthetic construct
  source 1..110: mol_type = other DNA
ctggagtctcttctaattaccatatcaatggagcaaaatacctattttcccatcacatttcaccatctttacactttttctgagaatctgccagccctcgtttctatatt

SEQ ID NO: 56877 - DNA, 110 bp, synthetic construct
  source 1..110: mol_type = other DNA
gttatgatgggccaaagagaaaagactcagggaacttctatagtatgatttagtttatataaatttgtagaatactgacttctagaatggcagattaagtgaacccacta

SEQ ID NO: 56878 - DNA, 110 bp, synthetic construct
  source 1..110: mol_type = other DNA
tatataaatttgtagaatactgacttctagaatggcagattaagtgaacccactataacacaaacacaaagaaaatactgactgaaccattaaactgaatcgtcttagaa

SEQ ID NO: 56879 - DNA, 110 bp, synthetic construct
  source 1..110: mol_type = other DNA
tcaatagaaattgttgccctatctttcctctctactgccatcaaaatttaactaagggtgataaaaatgggccatatatccaaagcaaaagtacaactgaggtatcacct

SEQ ID NO: 56880 - DNA, 110 bp, synthetic construct
  source 1..110: mol_type = other DNA
tcctctctactgccatcaaaatttaactaagggtgataaaaatgggccatatatccaaagcaaaagtacaactgaggtatcacctcacaccaatcagaatggccatcatt

SEQ ID NO: 56881 - DNA, 110 bp, synthetic construct
  source 1..110: mol_type = other DNA
tttatagaactgtattcactaacacagtcacaatcagctgtaccatttagtgaatccactgtcttttgaaaaccaatggcaagcagtatctgcacaatctttagtgaaat

SEQ ID NO: 56882 - DNA, 110 bp, synthetic construct
  source 1..110: mol_type = other DNA
tgaggtgttgactatcagcatggggaatcaacactccaggaaaagtatctaaaggctgactttgttgttagtttcctttccctctaataaatgtactctaatggccagag

SEQ ID NO: 56883 - DNA, 110 bp, synthetic construct
  source 1..110: mol_type = other DNA
ctgactttgttgttagtttcctttccctctaataaatgtactctaatggccagaggcaaacagaccctccgcattctttcctagaaaaatttctatacttctgacctttt

SEQ ID NO: 56884 - DNA, 110 bp, synthetic construct
  source 1..110: mol_type = other DNA
caaagtaaaaattttgcatgcccaggattcttcagctcctgattgggacagagactatagtgctgcttgtataaattgtaatgatcttttgaggtgaaagtcatgccacg

SEQ ID NO: 56885 - DNA, 110 bp, synthetic construct
  source 1..110: mol_type = other DNA
taacaaaactgcattaatagtgtcctgggctacagcagcacaggtttttggtacagcttttatgacctgtgtttgcaagtccatggattggagtgatgttaatggcaaac

SEQ ID NO: 56886 - DNA, 110 bp, synthetic construct
  source 1..110: mol_type = other DNA
gcttttatgacctgtgtttgcaagtccatggattggagtgatgttaatggcaaacatttggtgccctcagagaaatttctcattaataaaacctacaaagcacagttctg

SEQ ID NO: 56887 - DNA, 110 bp, synthetic construct
  source 1..110: mol_type = other DNA
ttacgaattctcaactggaaaagcccatacatctatttgaagtcttttcagctggaagtgttggaaaattctcaaggcatcaggtccacaggggatgtgaggcaaagatg

SEQ ID NO: 56888 - DNA, 110 bp, synthetic construct
  source 1..110: mol_type = other DNA
cctagagtgacaatgtggcatgcatttgcatgtataaggactagcactccccacacaaaacactgcatgcttttcagaatcgatcacacacaaattatttaaagagccgc

SEQ ID NO: 56889 - DNA, 110 bp, synthetic construct
  source 1..110: mol_type = other DNA
gactaaggatgctaacatgtccctgatagagcttatcctactgcaagtgatggctatccaatttacaggtctctggatcctccattatcaaattatttcttcttggcttg

SEQ ID NO: 56890 - DNA, 110 bp, synthetic construct
  source 1..110: mol_type = other DNA
taaaattttagcatactaagggcaaagatttagcagtggagggggcaagacatgttaaaaagcaaagaatctggtgttgcaagggtttcagaattctctattgaacatta

SEQ ID NO: 56891 - DNA, 110 bp, synthetic construct
  source 1..110: mol_type = other DNA
ttataccaaatacagtcacatacataaagctctagtacaacctctggcttgggtcagtaaatgatatcaacctgatgcattcattccacaatgctgactgagcacctact

SEQ ID NO: 56892 - DNA, 110 bp, synthetic construct
  source 1..110: mol_type = other DNA
gggccagaggtttgatggttcctttgacaagtgtgaacaactataaattgagcacttaagcatttatataacctctgtatagctggacttcctgtgctatggagtccaga

SEQ ID NO: 56893 - DNA, 110 bp, synthetic construct
  source 1..110: mol_type = other DNA
cggcccctttccaacaccctcttgtgtctctggacactgtcccctcaccacttttcctctagccaaatactccccatttcttcaaagcttgtttcaagcccacctccccc

SEQ ID NO: 56894 - DNA, 110 bp, synthetic construct
  source 1..110: mol_type = other DNA
tttttataaggccctgtgcagacatcaccaatcgggctccttctcaattcactgtgacagtaagactgtgagcatacagcactatagccattcttactttgttacaggag

SEQ ID NO: 56895 - DNA, 110 bp, synthetic construct
  source 1..110: mol_type = other DNA
gacagtaagactgtgagcatacagcactatagccattcttactttgttacaggagactgagggttgaaactgttcattatgcagtcctgtcagagaaagtttatgcagtc

SEQ ID NO: 56896 - DNA, 110 bp, synthetic construct
  source 1..110: mol_type = other DNA
ctacagaactcacctggctcttctctgaagcctggtgactggagctgactcatactctggtgatcactgccgctgttaacactaatgtggtattggtaagggcagcagca

SEQ ID NO: 56897 - DNA, 110 bp, synthetic construct
  source 1..110: mol_type = other DNA
tggaataaatgtctctgaagctgtaagaatacactgattataattaggatcacggcaggatacctttccctcaccaaagcattatgggacacaaagctgtaagtccaggg

SEQ ID NO: 56898 - DNA, 110 bp, synthetic construct
  source 1..110: mol_type = other DNA
aaaacacatacactcacaccacaataccaagcacaatgggcccatgatgtaggtgaggacgctcaggcagttgtatgctagatacctttaacttggtttctattatcctc

SEQ ID NO: 56899 - DNA, 110 bp, synthetic construct
  source 1..110: mol_type = other DNA
tgccctcaagatgcttaaggggggcggggtggtgggtggtggtggtgtctatgaaaaagtttccagctgtagctgacaagacgtaaagccctgtatgtgttcatggtggt

SEQ ID NO: 56900 - DNA, 110 bp, synthetic construct
  source 1..110: mol_type = other DNA
aaagtttccagctgtagctgacaagacgtaaagccctgtatgtgttcatggtggtaattagtctaatctcttccttactcccattcccactgctatagactaagtagctc

SEQ ID NO: 56901 - DNA, 110 bp, synthetic construct
  source 1..110: mol_type = other DNA
tttcttctaaaacatattcctttgtctcattttgtttgattttgtttctgtgaattaggtgaaacagctacctctccggctcgtgtagaagcatccccgtgcaggctgaa

SEQ ID NO: 56902 - DNA, 110 bp, synthetic construct
  source 1..110: mol_type = other DNA
taggtgaaacagctacctctccggctcgtgtagaagcatccccgtgcaggctgaatgtgttacgcatctctggcaggccaggtggagttggagtgggtgcaggctggcag

SEQ ID NO: 56903 - DNA, 110 bp, synthetic construct
  source 1..110: mol_type = other DNA
attacattcaaggcctttaattgtatttacttaactaattagtggtgatcctacactacaaggtgctaataaggaaggtcatatgaacaggtcttgggaaaatcaaggtg

SEQ ID NO: 56904 - DNA, 110 bp, synthetic construct
  source 1..110: mol_type = other DNA
aacaatctccccatgattctccttccctgctgctcatcatgtacagtgcaatacggaactctgagctggcctttttaacttcaggtacattcgaatctcaacataatatg

SEQ ID NO: 56905 - DNA, 110 bp, synthetic construct
  source 1..110: mol_type = other DNA
agcaaatatctgacgtaacctcgcttcagtctccccatagaatctgtaacaaataaaatacatttaaggatccactcttattcttttcaaagctccgtctataaaagctc

SEQ ID NO: 56906 - DNA, 110 bp, synthetic construct
  source 1..110: mol_type = other DNA
aaatacatttaaggatccactcttattcttttcaaagctccgtctataaaagctcatctgactttccaaatattcccagaacacttgaaactactttcaaaaattttcct

SEQ ID NO: 56907 - DNA, 110 bp, synthetic construct
  source 1..110: mol_type = other DNA
agataaataacccctctaatgactatcttacagatccaccatgattaccaggttactggatctcctaatctcagtaagtggataccataggataacgatctcaatatact

SEQ ID NO: 56908 - DNA, 110 bp, synthetic construct
  source 1..110: mol_type = other DNA
agtaactgataactgaattccaaggcataacccactcattcctagtcttctatcaggaatcgtccaaggtaatgctgaagacaaggcactgaaaactttttaatgcacag

SEQ ID NO: 56909 - DNA, 110 bp, synthetic construct
  source 1..110: mol_type = other DNA
ggaatcgtccaaggtaatgctgaagacaaggcactgaaaactttttaatgcacagataactgacaaaagagcctacatagcaaaggaaactcatctgctgaaaatgagaa

SEQ ID NO: 56910 - DNA, 110 bp, synthetic construct
  source 1..110: mol_type = other DNA
cttctaacgggcaggaataggcctgagcactactcaccaacaatcagtcaactaggtgtggtgtccaccaatagccaaagacccacccacagttccatccaaccagtaca

SEQ ID NO: 56911 - DNA, 110 bp, synthetic construct
  source 1..110: mol_type = other DNA
gtgtggtgtccaccaatagccaaagacccacccacagttccatccaaccagtacaggaacatacagttactatcacatctctctctgtcccttcatacacatgtacctca

SEQ ID NO: 56912 - DNA, 110 bp, synthetic construct
  source 1..110: mol_type = other DNA
gattcttttctgctgctccacaacgggaactccccttattccttcttaatgctgtgcctttttcctactttatcctccacagcctggagctaagtgcatgatttttaaag

SEQ ID NO: 56913 - DNA, 110 bp, synthetic construct
  source 1..110: mol_type = other DNA
gcctttttcctactttatcctccacagcctggagctaagtgcatgatttttaaagttttttgcaaagttgcaactgtgtattccccctgaacgtatgagttcatagtttt

SEQ ID NO: 56914 - DNA, 110 bp, synthetic construct
  source 1..110: mol_type = other DNA
ccgcttcacaacaaagggaactcctcattgtacttttcatcttcactaaagacgtaactgatattcactctgccttgtcaaaagctgtagcacagtggcaaattttgctt

SEQ ID NO: 56915 - DNA, 110 bp, synthetic construct
  source 1..110: mol_type = other DNA
ttgtcactgagtaaaataaacgaaagacagataactgcatattccaacccagactggaaggtgattatttaattaattccaacaagataaacatttatattctggatacc

SEQ ID NO: 56916 - DNA, 110 bp, synthetic construct
  source 1..110: mol_type = other DNA
ctcatggtggtacaccagactttatcacctggaaccattctctgcctgaaatctttacatatataataaaacccacctgtaagatctttgctctcaaactgccctccttc

SEQ ID NO: 56917 - DNA, 110 bp, synthetic construct
  source 1..110: mol_type = other DNA
tacatatataataaaacccacctgtaagatctttgctctcaaactgccctccttctactacatctatcctgacatttcatcacaacagccaggccttccccattcccatt

SEQ ID NO: 56918 - DNA, 110 bp, synthetic construct
  source 1..110: mol_type = other DNA
tcatctggaggtagaatcacctaagtcaagaacccaggcaagtggatagctctgaggaattcaccagtgtgtaccatgaaggagccagctttggaatcttaatgtgagag

SEQ ID NO: 56919 - DNA, 110 bp, synthetic construct
  source 1..110: mol_type = other DNA
atcttttcctttttgtagttgaggacatttattttggccaagaccattgacctagagctaggctttgaagacagtttaataccaacatctccctttgacaacatgtcata

SEQ ID NO: 56920 - DNA, 110 bp, synthetic construct
  source 1..110: mol_type = other DNA
agctaggctttgaagacagtttaataccaacatctccctttgacaacatgtcatacgcatattttctaaaatgccacagggtacatgttggagatgtctcctttaaccct

SEQ ID NO: 56921 - DNA, 110 bp, synthetic construct
  source 1..110: mol_type = other DNA
taccatactagtatggaatattatcattatatatgagtgtgcacgtgtgtttgtgtgtaggtctaaatcaggaggcccatccccaaatgcttcatatattttgtttttat

SEQ ID NO: 56922 - DNA, 110 bp, synthetic construct
  source 1..110: mol_type = other DNA
gggattccttaccactgagccacaatgggaactccccttcgtcattttaatagctcttgcttaattgtcctccatgggaattgtgtcagtttacattcttaccaccatgg

SEQ ID NO: 56923 - DNA, 110 bp, synthetic construct; identical to SEQ ID NO: 56922
  source 1..110: mol_type = other DNA

SEQ ID NO: 56924 - DNA, 110 bp, synthetic construct
  source 1..110: mol_type = other DNA
attgcctaagtaaaacaataagatgggaagttcagcagtaagtcctttaacatgtcccagacttcatagatattgactcattggcagttaactccttgacatgtcaggta

SEQ ID NO: 56925 - DNA, 110 bp, synthetic construct
  source 1..110: mol_type = other DNA
cccagacttcatagatattgactcattggcagttaactccttgacatgtcaggtacttggtaataaatatatatggacttcagaaatgtaagaaaaacaaaatatgtaag

SEQ ID NO: 56926 - DNA, 110 bp, synthetic construct
  source 1..110: mol_type = other DNA
ggaggatgggactttcttcctaggaggtaatcaattaatataatccatcacatcgaaaagctaaagaagaaaaatgatatgatcatattaaaagatgaagaaaaagcatc

SEQ ID NO: 56927 - DNA, 110 bp, synthetic construct
  source 1..110: mol_type = other DNA
aaaagctaaagaagaaaaatgatatgatcatattaaaagatgaagaaaaagcatctgacaaaatcccacacctcttggtaataaagactccgtaaattaggaacacagaa

SEQ ID NO: 56928 - DNA, 110 bp, synthetic construct
  source 1..110: mol_type = other DNA
gctagagtcctagaatctgtcagttttttttttattagtacctcttatgatgtccactcatctaatctaggatctctttaagttctactgatgcaatatgaaagactgac

SEQ ID NO: 56929 - DNA, 110 bp, synthetic construct; identical to SEQ ID NO: 56928
  source 1..110: mol_type = other DNA

SEQ ID NO: 56930 - DNA, 110 bp, synthetic construct
  source 1..110: mol_type = other DNA
agagtataaatatttctcttgataaatttgtcctataaaagtaaaccagtaaaacaactgttacctcaaagcacagctattcctaagtatatctctggaatctgggttct

SEQ ID NO: 56931 - DNA, 110 bp, synthetic construct; identical to SEQ ID NO: 56930
  source 1..110: mol_type = other DNA

SEQ ID NO: 56932 - DNA, 110 bp, synthetic construct
  source 1..110: mol_type = other DNA
gagttaacggtaaaaaagaaacaggtacaattccttgacactgaagttagtgaacaatagaggaaagctaaaatatttcaggatggcaacaggttgggcaggaaagagta

SEQ ID NO: 56933 - DNA, 110 bp, synthetic construct
  source 1..110: mol_type = other DNA
aatagaggaaagctaaaatatttcaggatggcaacaggttgggcaggaaagagtaaagataagcattgggggagttcccattgtggttcagcatgttaagaacccgatat

SEQ ID NO: 56934 - DNA, 110 bp, synthetic construct
  source 1..110: mol_type = other DNA
aacaatattcagcaaggtggccctctgtgcttaaaactaaattcaaagctggagttctcaccatggctcgttaaggaccaaacatagtctctgtgaggatgcaggttcgt

SEQ ID NO: 56935 - DNA, 110 bp, synthetic construct
  source 1..110: mol_type = other DNA
cacaacaggtactccctattgagcaatacttttaaagttaccattatataacacttttggtacttgactatacataataatccaacatctattatgtttgaaggagctta

SEQ ID NO: 56936 - DNA, 110 bp, synthetic construct; identical to SEQ ID NO: 56935
  source 1..110: mol_type = other DNA

SEQ ID NO: 56937 - DNA, 110 bp, synthetic construct
  source 1..110: mol_type = other DNA
cactcagtgggttaaggatcgaacattgccactggctacactgtacgtcgcagatgcagcttggatctcatgttgctgtagctgtgctgtaggctggcagctatagcttc

SEQ ID NO: 56938 - DNA, 110 bp, synthetic construct; identical to SEQ ID NO: 56937
  source 1..110: mol_type = other DNA

SEQ ID NO: 56939 - DNA, 110 bp, synthetic construct
  source 1..110: mol_type = other DNA
aggtgatacactttagctttgaggatggcttggggcagaggagtggagctgtctgattagtggggagaaggaagtactcagttcagctgcactcagaggctgcatcttca

SEQ ID NO: 56940 - DNA, 110 bp, synthetic construct
  source 1..110: mol_type = other DNA
agccacactggaacacatatatcagttccattgattgctgagcacaacagctgacaacacaaggtgccaaagaattaagtgtacttgagattgaattacactcattttgt

SEQ ID NO: 56941 - DNA, 110 bp, synthetic construct
  source 1..110: mol_type = other DNA
aacacaaggtgccaaagaattaagtgtacttgagattgaattacactcattttgtaacaatgcacaggaaaaaccttatagtttacaatacaccgaaactcttcaaagtt

SEQ ID NO: 56942 - DNA, 110 bp, synthetic construct
  source 1..110: mol_type = other DNA
ttaagaggcagggaaagaagatagtcaggatattcagggttccttcatgacttcggcagttacagataaggatctagagaagttctagctcggaggcccttggataccta

SEQ ID NO: 56943 - DNA, 110 bp, synthetic construct
  source 1..110: mol_type = other DNA
gcagttacagataaggatctagagaagttctagctcggaggcccttggatacctattgctgagggtatgtgacctggaagaggtgtcttactcaatgtctactcaatgtc

SEQ ID NO: 56944 - DNA, 110 bp, synthetic construct
  source 1..110: mol_type = other DNA
ccagatgataccacctgaacttgtagtgtttctgcttaagtggaggagaggaacgcaggcccaggagcagtcagagttgcttctgtgcatcttctccttctagatgccat

SEQ ID NO: 56945 - DNA, 110 bp, synthetic construct
  source 1..110: mol_type = other DNA
aagcagcctcagcctggctcttaggacttcccttcctcacaccaatgactagccatctggggtggaggcacaaaaagctgaccccttgggttaaggtagggccaactttt

SEQ ID NO: 56946 - DNA, 110 bp, synthetic construct
  source 1..110: mol_type = other DNA
tgctcactttccagtgagttaacagtgaacagtcaaggccagaaggtggtatcatgtgggctcatctctttaagaaggaatctggcattattttgagagagtactcagtg

SEQ ID NO: 56947 - DNA, 110 bp, synthetic construct
  source 1..110: mol_type = other DNA
tggtaggcgtgtgaatttgaacagatacactggagggcaacttggcagtagctactaacactgagactgcacataggcagtaattcttcccttttcactcacttgtagag

SEQ ID NO: 56948 - DNA, 110 bp, synthetic construct
  source 1..110: mol_type = other DNA
tgcggagagggcgggtctgcggcggggcgcggggtctccgtgggccctgcggcggggaagtctggctagctgaaccagctgtcactctcttctcttgcagtcctgcatca

SEQ ID NO: 56949 - DNA, 110 bp, synthetic construct
  source 1..110: mol_type = other DNA
ctcagattagctgcttttcaggtcaccctggctgaccccaggtgtgtgtcaggtggtccttatagggaagactgtagcttcttaagcttcttgtcatagtccttgccacc

SEQ ID NO: 56950 - DNA, 110 bp, synthetic construct
  source 1..110: mol_type = other DNA
gtccttatagggaagactgtagcttcttaagcttcttgtcatagtccttgccacctcacattgaagctgcctattgactgcccttaacaggccactcagagccatcagtt

SEQ ID NO: 56951 - DNA, 110 bp, synthetic construct; identical to SEQ ID NO: 56949
  source 1..110: mol_type = other DNA

SEQ ID NO: 56952 - DNA, 110 bp, synthetic construct; identical to SEQ ID NO: 56950
  source 1..110: mol_type = other DNA

SEQ ID NO: 56953 - DNA, 110 bp, synthetic construct
  source 1..110: mol_type = other DNA
gtcttctgcagaacacacccatcatcagagttggagacttggaggtggtgagagactgaggcaggttctagttcatccatacgggttcaagcttagcctcctaggtactg

SEQ ID NO: 56954 - DNA, 110 bp, synthetic construct
  source 1..110: mol_type = other DNA
ctgaggcaggttctagttcatccatacgggttcaagcttagcctcctaggtactgggaaaggaggtccaccacgggctctgagtgtccattgatgattttgctaggtgta

SEQ ID NO: 56955 - DNA, 110 bp, synthetic construct
  source 1..110: mol_type = other DNA
aaaaaagctccatatatttaggtgggtcctttcaactcccttctcattataaagggtatttgctttaaactttgtctatcataaatatatgcaagagtctatgagaatct

SEQ ID NO: 56956 - DNA, 110 bp, synthetic construct; identical to SEQ ID NO: 56955
  source 1..110: mol_type = other DNA

SEQ ID NO: 56957 - DNA, 110 bp, synthetic construct
  source 1..110: mol_type = other DNA
taggtcctggaactggtgctgactggctgatgggtgagccagatccgggatataataggctagagaaaagaatcccaaatgacacttgttgtaccagtgtccttgtggta

SEQ ID NO: 56958 - DNA, 110 bp, synthetic construct
  source 1..110: mol_type = other DNA
taggctagagaaaagaatcccaaatgacacttgttgtaccagtgtccttgtggtagaatgagctccttaaaatgtcagttgcctttgtccccagggaagtctgagttgct

SEQ ID NO: 56959 - DNA, 110 bp, synthetic construct
  source 1..110: mol_type = other DNA
atcctgcaaatctcaggctttaccaaagagctctatcttgactgattgcaagagtaaaggacactggcgttttgttttctacttggctattttttctagcatctacctca

SEQ ID NO: 56960 - DNA, 110 bp, synthetic construct
  source 1..110: mol_type = other DNA
agaatgcatatcaacaaaaagacaagagataacaaatgctagtgtggatggagagtaaagggaaccattgtgcacagttggtggaattgtaaattgatgcagctactata

SEQ ID NO: 56961 - DNA, 110 bp, synthetic construct
  source 1..110: mol_type = other DNA
taaagggaaccattgtgcacagttggtggaattgtaaattgatgcagctactatagaaaacagcatggaagatcgtcaaaaaattaaaagcagagttagcatacggtcca

SEQ ID NO: 56962 - DNA, 110 bp, synthetic construct
  source 1..110: mol_type = other DNA
tgcctcactacactcctggtgcagatatagcagagagtggttccctctggcaggtttcatgggggtatctgcaactccaagcgcttctgggacagctagagcagattccg

SEQ ID NO: 56963 - DNA, 110 bp, synthetic construct
  source 1..110: mol_type = other DNA
ttcatgggggtatctgcaactccaagcgcttctgggacagctagagcagattccgttgcttgcttgcagatttcatggggtatctgcacctcaatgaactccaggaacag

SEQ ID NO: 56964 - DNA, 110 bp, synthetic construct; identical to SEQ ID NO: 56962
  source 1..110: mol_type = other DNA

SEQ ID NO: 56965 - DNA, 110 bp, synthetic construct; identical to SEQ ID NO: 56963
  source 1..110: mol_type = other DNA

SEQ ID NO: 56966 - DNA, 110 bp, synthetic construct
  source 1..110: mol_type = other DNA
gtggtacttccattggaacttctttcttcgtgcatgtttgggctctctggtggcaaggaacctcttgcataggctataggagcagctaaaaaccacctaaacatttcaga

SEQ ID NO: 56967 - DNA, 110 bp, synthetic construct
  source 1..110: mol_type = other DNA
tctcctagccttaggccccaggaagcgggcagcctttgactctctctttgtcagatctccttccactcagcctcgtgatgactgactggcaggacttgctcataggaagc

SEQ ID NO: 56968 - DNA, 110 bp, synthetic construct
  source 1..110: mol_type = other DNA
acagcaagattggctatgaactttggataaagaaaagagtgggagatggctcagtgcttcgaactattcatggaaaagaaatgtcaaaaatagccaggtctgtttaatgg

SEQ ID NO: 56969 - DNA, 110 bp, synthetic construct
  source 1..110: mol_type = other DNA
gcttcgaactattcatggaaaagaaatgtcaaaaatagccaggtctgtttaatggaaaactcatctgtgtttaaaatattcttagttagctgtgctgaaagggacagttg

SEQ ID NO: 56970 - DNA, 110 bp, synthetic construct
  source 1..110: mol_type = other DNA
cttagcaagacaaccaaaagattcaaaatatgtgataaaaagcctcacttactttgccagatctgatccatttgcccctacagatgcatttccactgcttttcacatttt

SEQ ID NO: 56971 - DNA, 110 bp, synthetic construct
  source 1..110: mol_type = other DNA
gccagatctgatccatttgcccctacagatgcatttccactgcttttcacattttttggttgtgaccggtaagaactacatctttaggtttctgtgcctctctctgacct

SEQ ID NO: 56972 - DNA, 110 bp, synthetic construct
  source 1..110: mol_type = other DNA
ggcaagtcagacctccgagtctccttcagaaagcaccctgatacccacagtttacccatgcagcactcaacgagcactaacactgtctagcagtcctgtcagctgaagct

SEQ ID NO: 56973 - DNA, 110 bp, synthetic construct
  source 1..110: mol_type = other DNA
ccatgcagcactcaacgagcactaacactgtctagcagtcctgtcagctgaagctgaacctatgctgagacattacccattgaagttctaggaactagaacagttacgtt

SEQ ID NO: 56974 - DNA, 110 bp, synthetic construct
  source 1..110: mol_type = other DNA
tggaatgatatctccatttctctgaaagttattgcagctagtaagacttctcatgaaacaaaacttgactaaaaggcagactcttaaagtagatagcacatgtgaaaggg

SEQ ID NO: 56975 - DNA, 110 bp, synthetic construct
  source 1..110: mol_type = other DNA
aagtaatgaatctgagagtttattttcactttttggcagcccagtaaaacaggtaggagctctggtattttcaaactgtgtgcagtgaagccctaggaagcgatcctaag

SEQ ID NO: 56976 - DNA, 110 bp, synthetic construct
  source 1..110: mol_type = other DNA
ggagctctggtattttcaaactgtgtgcagtgaagccctaggaagcgatcctaagagccaccaccagggggtgaaaaagagacaagtgctcaaggtccaggccatttacc

SEQ ID NO: 56977 - DNA, 110 bp, synthetic construct
  source 1..110: mol_type = other DNA
catgccttgcatgttgcttcccatctttggtttaccccatgcctttgtgcaagttacgcaaggtggtccctctgagcaagtacacccacaaggcagacatttattaaagg

SEQ ID NO: 56978 - DNA, 110 bp, synthetic construct
  source 1..110: mol_type = other DNA
acgcaaggtggtccctctgagcaagtacacccacaaggcagacatttattaaaggggcccgcctgggtggacaaaatacagacaggtggcccttctcttatagggcgctg

SEQ ID NO: 56979 - DNA, 110 bp, synthetic construct
  source 1..110: mol_type = other DNA
taccaggcacttgagccaaactttctgcatgaaagagttttcttcttagctgtgaccaaacaagccatgggaggtagaaaacaaagaaatttttaaatgatctcaaatta

SEQ ID NO: 56980 - DNA, 110 bp, synthetic construct
  source 1..110: mol_type = other DNA
acttttcaaactgttctgttcagtttaagagctttattagataagtattttctgagtcccagtctccttccctataatgtcatgccagcaactgggactagctgggctag

SEQ ID NO: 56981 - DNA, 110 bp, synthetic construct
  source 1..110: mol_type = other DNA
gtcccagtctccttccctataatgtcatgccagcaactgggactagctgggctagccagagggcttctaatccctcatatctgataatggaccttaaaacatggtgtcac

SEQ ID NO: 56982 - DNA, 110 bp, synthetic construct
  source 1..110: mol_type = other DNA
tgaggatgctgggtaaatccctaccagccataaccatctagctctctaactctggggctgacctaaatatctcaaatatcctggggcattgggcagcttgtcctcctcat

SEQ ID NO: 56983 - DNA, 110 bp, synthetic construct
  source 1..110: mol_type = other DNA
tttacatgccaattgcatggacatcagtccctaatgttttttgttaacaccaacttcttgccttccttacttcctcccacctaatatgtctgcctgctttctttagcagc

SEQ ID NO: 56984 - DNA, 110 bp, synthetic construct
  source 1..110: mol_type = other DNA
tcttgccttccttacttcctcccacctaatatgtctgcctgctttctttagcagcttccctcctctagcaaagaatacataaccctgggctgttgccccagtgtatcaaa

SEQ ID NO: 56985 - DNA, 110 bp, synthetic construct
  source 1..110: mol_type = other DNA
gattaaaaatttgtggatgagctaggctctggttataaataggtggagcctcaaaatatctgccaggttcagagaaactttccataaaaggggagtcttacagtccttcc

SEQ ID NO: 56986 - DNA, 110 bp, synthetic construct
  source 1..110: mol_type = other DNA
atatctgccaggttcagagaaactttccataaaaggggagtcttacagtccttcctgcagaggacatattcttggagaatcacatggttctgtcttcttttagactcagt

SEQ ID NO: 56987 - DNA, 110 bp, synthetic construct; identical to SEQ ID NO: 56985
  source 1..110: mol_type = other DNA

SEQ ID NO: 56988 - DNA, 110 bp, synthetic construct; identical to SEQ ID NO: 56986
  source 1..110: mol_type = other DNA

SEQ ID NO: 56989 - DNA, 110 bp, synthetic construct
  source 1..110: mol_type = other DNA
gcaggcactgtgctaggcctttggggtacacaggtgggcaaaacccacaaggtctttgtctgcctggagcttattttcttgtcggggggagaggcagtaaataatgtaaa

SEQ ID NO: 56990 - DNA, 110 bp, synthetic construct
  source 1..110: mol_type = other DNA
ttgtctgcctggagcttattttcttgtcggggggagaggcagtaaataatgtaaaaagagagggtttccaagataattattgcatatgttaagtgaaagaaataaatggg

SEQ ID NO: 56991 - DNA, 110 bp, synthetic construct
  source 1..110: mol_type = other DNA
acgacgggaacttagtctttttctttttcagtaaaagaattctctttaacatttactgtgaagctgttttagtggtaatgtacttgtttagattttgcttgtctgaaaaa

SEQ ID NO: 56992 - DNA, 110 bp, synthetic construct
  source 1..110: mol_type = other DNA
gtttattttcacacagtgaagattagtatttccatgaagcaagagacagttacttttgctgttttgaaatagcagaactgatcctcagacacatgagttcatgaaatcta

SEQ ID NO: 56993 - DNA, 110 bp, synthetic construct
  source 1..110: mol_type = other DNA
ttgctgttttgaaatagcagaactgatcctcagacacatgagttcatgaaatctatcctagtgaggcatgtagttcttgagaaggggcaatgggcatattgtcagagaaa

SEQ ID NO: 56994 - DNA, 110 bp, synthetic construct
  source 1..110: mol_type = other DNA
actttcatgtcatctgctttaaagactttgttctgagaggtctgtttgctgaatagggaagctggaggtcttatgatggagccattcccttcctttttatctgctctgac

SEQ ID NO: 56995 - DNA, 110 bp, synthetic construct
  source 1..110: mol_type = other DNA
tattgctctagaattttctgaaatgctacaactcacatgcagtaaactcctgttgcattgactgtgtttgcacatggccccaagtcagaatctagttgttgaattgctga

SEQ ID NO: 56996 - DNA, 110 bp, synthetic construct
  source 1..110: mol_type = other DNA
cattgactgtgtttgcacatggccccaagtcagaatctagttgttgaattgctgagaatttagaaattatcccttctaaccagtctaccatgtaggtgaaaatcgaaaaa

SEQ ID NO: 56997 - DNA, 110 bp, synthetic construct
  source 1..110: mol_type = other DNA
ttgcatgaatacagaactgaaagaacttagcaagtacaaagatggctcttagtaatagggattttagcttttcttagactaaaattgtgcactctgcctattatgtaggt

SEQ ID NO: 56998 - DNA, 110 bp, synthetic construct
  source 1..110: mol_type = other DNA
ttatggctgataatacataggccatgtgggatagggcagggggccagaacctcgatgtttaactctcatagtgattcatgaagggatgtttcatctttggtgtaacttag

SEQ ID NO: 56999 - DNA, 110 bp, synthetic construct
  source 1..110: mol_type = other DNA
tccttctcttttctttccctatcttaaatgtggtttggcagctgcatctctagatattatgcaaattttagcctctgtcaaagagttttattctctgcatttagttcaca

SEQ ID NO: 57000 - DNA, 110 bp, synthetic construct
  source 1..110: mol_type = other DNA
attgctaggaagttacatggagaattgcttcccaggcttgagctgatgctcacaggtatactgtgcaagcactgaaagatccaaattcatttctttttgaccaccttctt

SEQ ID NO: 57001 - DNA, 110 bp, synthetic construct
  source 1..110: mol_type = other DNA
catggagaattgcttcccaggcttgagctgatgctcacaggtatactgtgcaagcactgaaagatccaaattcatttctttttgaccaccttcttactttgaaaccagtc

SEQ ID NO: 57002 - DNA, 110 bp, synthetic construct
  source 1..110: mol_type = other DNA
ccaatctcaaggtgctacagcaggaactccttattctccctttcttaactgcaattatactggccttctttcaccctctgatctgatgctcttcccttttagtctttaag

SEQ ID NO: 57003 - DNA, 110 bp, synthetic construct
  source 1..110: mol_type = other DNA
tatcagaggtaatacctagagggaataaagctgaaaatttcataatcaaattcctactctctgatataactgaaacaatgtttatattacattctccccaagtaacagtt

SEQ ID NO: 57004 - DNA, 110 bp, synthetic construct
  source 1..110: mol_type = other DNA
ctgaaaggatctctggtataagctaattagcgaagaacagaaagaggtgagcgtttttactaaggttctaggggatttgtgtaacattaataaaaatctagggagttcac

SEQ ID NO: 57005 - DNA, 110 bp, synthetic construct
  source 1..110: mol_type = other DNA
gtggcatacgtcacagctgcggctaagatcagatccctggcccaggaacttccgtatgccacatgctctgccaaaaaacaaacagtctgatagtcctcattcctgtgttt

SEQ ID NO: 57006 - DNA, 110 bp, synthetic construct
  source 1..110: mol_type = other DNA
gccagggttcccatgtggttcagtgggttaaggacttgaagttgtttctgtgagaatgcaggtttgatcccctccctcacttaatgctggttaaggttctggcattgctg

SEQ ID NO: 57007 - DNA, 110 bp, synthetic construct
  source 1..110: mol_type = other DNA
gttagagaatgaatacttgatccaattgaagtcaatacaaaagtccaaccccaagactagaagcttctcaattctctggaacgtgcaataaggtctatgatctttgcacc

SEQ ID NO: 57008 - DNA, 110 bp, synthetic construct
  source 1..110: mol_type = other DNA
actagaagcttctcaattctctggaacgtgcaataaggtctatgatctttgcacctattttgctaacacaaagagaaggctggagctgtgggagtgggaagagaagttgg

SEQ ID NO: 57009 - DNA, 110 bp, synthetic construct
  source 1..110: mol_type = other DNA
tttaaaaggtatcctgtccaacaggatggtctgagaagagtgaagacaacctaggaataactgttgcaaggcagaagtcaaggcgcaatgggagtagccaactgaaggtg

SEQ ID NO: 57010 - DNA, 110 bp, synthetic construct
  source 1..110: mol_type = other DNA
aataactgttgcaaggcagaagtcaaggcgcaatgggagtagccaactgaaggtgaggcactgccacaggtggagagtgagactgagggacaggtgacccctatcagagg

SEQ ID NO: 57011 - DNA, 110 bp, synthetic construct
  source 1..110: mol_type = other DNA
tgaagcttccatgccttctcaagaaacacctccctcccagcacctccacaagttcaccaacccaaaatctttccaaaccactttggttaggattttttggcatgcttggg

SEQ ID NO: 57012 - DNA, 110 bp, synthetic construct
  source 1..110: mol_type = other DNA
caggtttgttgtgacagaatagcaagaatttaaaggaagtaaactgtagactattaaataacatcagggaggatctatattactgctctcaaggatttttattgataccg

SEQ ID NO: 57013 - DNA, 110 bp, synthetic construct
  source 1..110: mol_type = other DNA
aaataacatcagggaggatctatattactgctctcaaggatttttattgataccgtttccatggatttccttcatgatggctgatgcttgctgtttcctctgcttcacca

SEQ ID NO: 57014 - DNA, 110 bp, synthetic construct
  source 1..110: mol_type = other DNA
aaaaggtgagcagcagcatttaaacatacctttaagagacaaggaattttcatgaagggagcagcatttcaagtgaagcttgtagaatttgtgggaatactagagaagaa

SEQ ID NO: 57015 - DNA, 110 bp, synthetic construct; identical to SEQ ID NO: 57014
  source 1..110: mol_type = other DNA

SEQ ID NO: 57016 - DNA, 110 bp, synthetic construct
  source 1..110: mol_type = other DNA
gactgccttttagcaaagagctgggctcctttcccgctcattccgggaagctcattggatggtcccactgcaccagcatgagcagcatttactgttggtgtgggagctgc

SEQ ID NO: 57017 - DNA, 110 bp, synthetic construct
  source 1..110: mol_type = other DNA
tggatggtcccactgcaccagcatgagcagcatttactgttggtgtgggagctgctggcttgggagtgtagttcagagtggctactgatgcttgtggtcctttgaaggga

SEQ ID NO: 57018 - DNA, 110 bp, synthetic construct
  source 1..110: mol_type = other DNA
agtttgtcccagcttccctcagcggtgggccaatagtttctcccaagccaactaatttctatttattctttctttgtagtctcttttaaatttgagatgactacaaaagt

SEQ ID NO: 57019 - DNA, 110 bp, synthetic construct
  source 1..110: mol_type = other DNA
aaggaggccagcaattatggtgattacactaatcacagggagggcttgtgggggagggaaccgatgtggaggtctctaatggcagctctgtggggactctgctctaattg

SEQ ID NO: 57020 - DNA, 110 bp, synthetic construct
  source 1..110: mol_type = other DNA
gggaaccgatgtggaggtctctaatggcagctctgtggggactctgctctaattggccaccatcaagaccctctaaggtaggtttcccagactgctgatggagaaaggag

SEQ ID NO: 57021 - DNA, 110 bp, synthetic construct
  source 1..110: mol_type = other DNA
ttggcacctgctccatattctagaattaggttgagtggaaccaaaagcttggtgcatggtattcatgggaggtcttcctcctaagaaaacaccatgcacatcccgacagg

SEQ ID NO: 57022 - DNA, 110 bp, synthetic construct
  source 1..110: mol_type = other DNA
taaatctgtcaaacgttatcatcctccaatagaaggttttttgatgtcggcactattgacattttaggttggataactgttgtagggagctgttctgtgtgtggtaggat

SEQ ID NO: 57023 - DNA, 110 bp, synthetic construct
  source 1..110: mol_type = other DNA
ttgacattttaggttggataactgttgtagggagctgttctgtgtgtggtaggatacatagcaacactcctggcctctatccactagatgccagttgtaagaactaaata

SEQ ID NO: 57024 - DNA, 110 bp, synthetic construct
  source 1..110: mol_type = other DNA
tctacagttgttacccaaacccagctgggcagagagttataaccacacatttcccccctaagttcatggagaactcttacctatccttaagataattcccacctctttct

SEQ ID NO: 57025 - DNA, 110 bp, synthetic construct
  source 1..110: mol_type = other DNA
gctgggttttggtggaatatatttgtttggtgggctatatataattcacattcatgtcaagctattgccagctgcaccagcataggaatgcatagctcccaggcacactc

SEQ ID NO: 57026 - DNA, 110 bp, synthetic construct
  source 1..110: mol_type = other DNA
gtcaagctattgccagctgcaccagcataggaatgcatagctcccaggcacactctcaccatgtgttgtgccaattcatttgctgtggaaacatttaaagacagggccag

SEQ ID NO: 57027 - DNA, 110 bp, synthetic construct
  source 1..110: mol_type = other DNA
atcaaacaagtacgtcatcaagttgtctgtgtacacgtgccagattcgcctttagcctgtaatctctttgaaattcggaagcttgcaccttcccgaatccgcagtgcagg

SEQ ID NO: 57028 - DNA, 110 bp, synthetic construct
  source 1..110: mol_type = other DNA
cctgtaatctctttgaaattcggaagcttgcaccttcccgaatccgcagtgcaggaccggaaatatcctagttactcaaggaatgtgtaatgaatgaatagctgaacctg

SEQ ID NO: 57029 - DNA, 110 bp, synthetic construct
  source 1..110: mol_type = other DNA
gcaggcagtgcagcgcagcagcaacagctctgactgggagcctcacacatctgcccgggaatccagtctcccctccttactgtcctgggctttgctcatttcatttccct

SEQ ID NO: 57030 - DNA, 110 bp, synthetic construct
  source 1..110: mol_type = other DNA
tccagggttccatacacatttcttcctctaaggcagagtgttacaagaagggctaccatagaccgtacttacctttacagctgtgataagaaggtttttcaagcactgca

SEQ ID NO: 57031 - DNA, 110 bp, synthetic construct
  source 1..110: mol_type = other DNA
atttggttattcaaacttcagtctcattttaacaaagtatgaaatcaaaatttaattctgactttcaagttaaggcttaccccacttccaggccagtggcagacatgaag

SEQ ID NO: 57032 - DNA, 110 bp, synthetic construct
  source 1..110: mol_type = other DNA
ttctgactttcaagttaaggcttaccccacttccaggccagtggcagacatgaagctaacagttccaggggtagagaaaggaggacacagtctgctgtttctgtttttcc

SEQ ID NO: 57033 - DNA, 110 bp, synthetic construct
  source 1..110: mol_type = other DNA
atagtctactgagactgatttgaacccaagatatccgagcccagagcttgcatgggtaacagccaaattatgccattagtacgagcctttgaggagttcccgtcatggct

SEQ ID NO: 57034 - DNA, 110 bp, synthetic construct
  source 1..110: mol_type = other DNA
ctatatgaaaaaaaataagtctttactaaagctggaagacttctgaagtgatccaccacaaacctgaatgggaagacaaaatagaaagtaacctgtatattaaatgctat

SEQ ID NO: 57035 - DNA, 110 bp, synthetic construct
  source 1..110: mol_type = other DNA
acacaacagaaaaattgtgaaaataactctgtcaacagcaaatattgtttaaaacaatgagttggaagaggcagtgtttctaaattatatctgagccaaacaatgagcat

SEQ ID NO: 57036 - DNA, 110 bp, synthetic construct
  source 1..110: mol_type = other DNA
aatgagttggaagaggcagtgtttctaaattatatctgagccaaacaatgagcattttatctgtgatcagacatagctatagggaatgcagacatagtaatccacaattt

SEQ ID NO: 57037 - DNA, 110 bp, synthetic construct
  source 1..110: mol_type = other DNA
tagactaagccagaaagaccaaccatgtaatcagagggttggagctttaacctacttgatatcaaactgagctcctctgaagacaaggaaggaggaaagggttggaaatt

SEQ ID NO: 57038 - DNA, 110 bp, synthetic construct
  source 1..110: mol_type = other DNA
ttgatatcaaactgagctcctctgaagacaaggaaggaggaaagggttggaaattgagttctcgatcatgtggccagtgatttaatcaaatgtgccaatgtaaagaaatc

SEQ ID NO: 57039 - DNA, 110 bp, synthetic construct
  source 1..110: mol_type = other DNA
tccctgcacacagcactgggcctggtatccagccaggagtattccccaagcgtgagctatcccagagggtgtctggatgaggcgcagcctgcccggctaagagatcttac

SEQ ID NO: 57040 - DNA, 110 bp, synthetic construct
  source 1..110: mol_type = other DNA
gctatcccagagggtgtctggatgaggcgcagcctgcccggctaagagatcttacagttgctctgagagcagttctggggcggcctctgagggggtcggatggacttgga

SEQ ID NO: 57041 - DNA, 110 bp, synthetic construct
  source 1..110: mol_type = other DNA
aaattaagaaggcacagaagcagactagagttagatagggtttgacttctgctcttccatttacaagctgtatgaccttggtaacgtttgagtctagtcttttgttcaaa

SEQ ID NO: 57042 - DNA, 110 bp, synthetic construct
  source 1..110: mol_type = other DNA
gaggtatgcttcccactcttatctctcaggcctgattttgacggcatgctccctgctaatttccaggtaaatgcgtcctctttcagttcccctgaagaggttacagcctc

SEQ ID NO: 57043 - DNA, 110 bp, synthetic construct
  source 1..110: mol_type = other DNA
agagcccccgtctctgagacgttgatatagtgttagctgggtaagagcttcatcgtcacagggctgcagtactttggggtctgacctatcttggtgtccttttcattcct

SEQ ID NO: 57044 - DNA, 110 bp, synthetic construct
  source 1..110: mol_type = other DNA
actctggtcaggctcctcagagccctcttctcacataggccatggcctccaaaacctggaacaaacttcacatagtttctaatagctcaaagtcacatctctatgatgat

SEQ ID NO: 57045 - DNA, 110 bp, synthetic construct
  source 1..110: mol_type = other DNA
ctggaacaaacttcacatagtttctaatagctcaaagtcacatctctatgatgatcctagttctccttaaagtgcctgcctaagaaaatgcaaagaatttactgtttgtt

SEQ ID NO: 57046 - DNA, 110 bp, synthetic construct
  source 1..110: mol_type = other DNA
gctctgctctccctcctacagtgtgacaagcagttagggctccatctaagtttgccccttaaattgtactctagagcttattcctcttgacatttttccagcattctgcc

SEQ ID NO: 57047 - DNA, 110 bp, synthetic construct
  source 1..110: mol_type = other DNA
aaaacaggagttaggttaaatgttgcctagtgacttcatctttataattaatgtctgaggaaaacagaaagggagcaaaaaacctgcttatggttttgaggtgaaaatat

SEQ ID NO: 57048 - DNA, 110 bp, synthetic construct
  source 1..110: mol_type = other DNA
tgaggaaaacagaaagggagcaaaaaacctgcttatggttttgaggtgaaaatatgcatatgttcgagtttgatagatacttaggggttacattgctgagtcatagcatt

SEQ ID NO: 57049 - DNA, 110 bp, synthetic construct
  source 1..110: mol_type = other DNA
gctgcgccatgacaagaactcctcttcatgccttttaaaagtagatcaatgttataaaaaagcttgaaacaatttactaaaatattttagatagtcttcagttttaagtt

SEQ ID NO: 57050 - DNA, 110 bp, synthetic construct
  source 1..110: mol_type = other DNA
ttctcttggttacatttatttaaattttttcctcaaagttttggaataaaggagtagtatctagtgggaaaaatcactgaatttccttcacctgacactcaagctgaaaa

SEQ ID NO: 57051 - DNA, 110 bp, synthetic construct
  source 1..110: mol_type = other DNA
agtatctagtgggaaaaatcactgaatttccttcacctgacactcaagctgaaaataatcaaatttttttcttgccttttagtatgcttaataatttttttttgagagcc

SEQ ID NO: 57052 - DNA, 110 bp, synthetic construct
  source 1..110: mol_type = other DNA
ctgcacaaaggcaacgtcctggagaatcttattactttgtccatggtcaagctaatttgctgataaaataatgaaaaagtaatttgtcctatcacctactaagagagtta

SEQ ID NO: 57053 - DNA, 110 bp, synthetic construct
  source 1..110: mol_type = other DNA
ccaatttcaactaggttctcaaaatttttggcagtccttttacttgtcactcaaatgaatcttgattttatagtcctgacctgtgtactaggctgagcacaactctcttt

SEQ ID NO: 57054 - DNA, 110 bp, synthetic construct
  source 1..110: mol_type = other DNA
tgaatcttgattttatagtcctgacctgtgtactaggctgagcacaactctcttttgcacttgtggagtctagaagtgatgctttacaaggaactgcatgagaatttata

SEQ ID NO: 57055 - DNA, 110 bp, synthetic construct
  source 1..110: mol_type = other DNA
gagatgttagtcatacataaaatgtaggaaataaatgttcagaattaatttttccaaaaaaataagctcttacacactgctggtaaactgcaaaatgctacaaccacttg

SEQ ID NO: 57056 - DNA, 110 bp, synthetic construct
  source 1..110: mol_type = other DNA
aggccgtattgtataacacaggggaatctattcaatactttgtgattctatatgggaaaagaatctgaaaaggatgcataactgatttgctttgctgtatctctgaagct

SEQ ID NO: 57057 - DNA, 110 bp, synthetic construct; identical to SEQ ID NO: 57056
  source 1..110: mol_type = other DNA

SEQ ID NO: 57058 - DNA, 110 bp, synthetic construct
  source 1..110: mol_type = other DNA
atttcctgtgttcaccaccaaatcctcctgagccagagctaatccacatttcctagccacgctggctgttcactgtggcaatgtgactagatctcaccctgtgatatttg

SEQ ID NO: 57059 - DNA, 110 bp, synthetic construct
  source 1..110: mol_type = other DNA
ctgttcaattggtaaatgcttccttgaacactcatactgcattcaatgtaccaaaaaccacacagcattttaattcttcatttgaatgttttcttcttcactttactaaa

SEQ ID NO: 57060 - DNA, 110 bp, synthetic construct; identical to SEQ ID NO: 57059
  source 1..110: mol_type = other DNA

SEQ ID NO: 57061 - DNA, 110 bp, synthetic construct
  source 1..110: mol_type = other DNA
agcaataaaatttaataagatatgcacattccatgtttggaaaagaactgttgtattgtggaggcttgcccagaaaagctaagttgtatggctacccaaaaatggctaca

SEQ ID NO: 57062 - DNA, 110 bp, synthetic construct; identical to SEQ ID NO: 57061
  source 1..110: mol_type = other DNA

SEQ ID NO: 57063 - DNA, 110 bp, synthetic construct
  source 1..110: mol_type = other DNA
aacaaaaatcctgataaagtacagtccgacagttggatcacttcaacagctcaacagtatttcccaaatccaaggttcttttgtatgtatcttcactacaaccctgagca

SEQ ID NO: 57064 - DNA, 110 bp, synthetic construct; identical to SEQ ID NO: 57063
  source 1..110: mol_type = other DNA

SEQ ID NO: 57065 - DNA, 110 bp, synthetic construct
  source 1..110: mol_type = other DNA
aagtcatattaggaacttaaatttgcttgtaactctgcaagatgttactaaggcatgtgcttgcatgaggggccagggtgagtttaaggcccttcagaaacttggccaaa

SEQ ID NO: 57066 - DNA, 110 bp, synthetic construct
  source 1..110: mol_type = other DNA
gtgattcttcctccatccacacacctgttaggatgctctctctcagtaccttggcagtgatgagactgagtaattgtctaatactgtgtggttattaaaactgatctcta

SEQ ID NO: 57067 - DNA, 110 bp, synthetic construct
  source 1..110: mol_type = other DNA
ctctctctcagtaccttggcagtgatgagactgagtaattgtctaatactgtgtggttattaaaactgatctctaaggcctatacatatgtagtttttatttatttaact

SEQ ID NO: 57068 - DNA, 110 bp, synthetic construct
  source 1..110: mol_type = other DNA
ccacaatgactttataccatatgtcaccaggaacagaacttataccacaaagatattttttatcagctattaaataattcatcaaaggagagctactgctagtcactgtg

SEQ ID NO: 57069 - DNA, 110 bp, synthetic construct
  source 1..110: mol_type = other DNA
ctgacaccaaaaagagtcctgaagcttgaaactaatcatgcagagtgacatctgatcactgccatctgtagctataggcataaattcctagagagccactgggtcttaat

SEQ ID NO: 57070 - DNA, 110 bp, synthetic construct
  source 1..110: mol_type = other DNA
actgacagtggctgctttagcctcaccctttgcccagcatacacactgagaacggctggtgctggtgccccatataagagctgacactggccattgctgccccactcata

SEQ ID NO: 57071 - DNA, 110 bp, synthetic construct
  source 1..110: mol_type = other DNA
aggttatattatgcgacatgggtgtaatttcaagacaagtacttgtattgttgaattttataagctgtgtcagacttgatgcccaccagctgttctccaagcagcatcag

SEQ ID NO: 57072 - DNA, 110 bp, synthetic construct
  source 1..110: mol_type = other DNA
tcatctaggctatctaatgtcagacttatgtagctcaaaagatcgtatgaaaatagttctgtcttgtatttttaagagactctgtggctacgtttgctctaagttgagtg

SEQ ID NO: 57073 - DNA, 110 bp, synthetic construct
  source 1..110: mol_type = other DNA
tttttaacacatacagagataaatacatactaaatatatgtgtatatatgggctagtatacatgcatatggtatctatctccgtccactgagaaggtctagaggcaatga

SEQ ID NO: 57074 - DNA, 110 bp, synthetic construct; identical to SEQ ID NO: 57073
  source 1..110: mol_type = other DNA

SEQ ID NO: 57075 - DNA, 110 bp, synthetic construct
  source 1..110: mol_type = other DNA
tatccttgctacactataagtaatgctttccccacaaacacacatgacgtcttttaagatattctatgtctttttacagtttaaatatgacagctctaggtgtagaattt

SEQ ID NO: 57076 - DNA, 110 bp, synthetic construct
  source 1..110: mol_type = other DNA
tttgaattgtcaagagactatgaaatctgagcctgcccctcaaggactgacccatcaagctaaattgtggaatatatagagcggcattccaatgttatgtgcaagtaaat

SEQ ID NO: 57077 - DNA, 110 bp, synthetic construct
  source 1..110: mol_type = other DNA
caagctaaattgtggaatatatagagcggcattccaatgttatgtgcaagtaaataggagattggatttaagcagatcctgtggtagaagaaagtctctcatgcactaat

SEQ ID NO: 57078 - DNA, 110 bp, synthetic construct
  source 1..110: mol_type = other DNA
tggatggcatgaatttcctgacattctatcttaatgcctagatcaatgagtcttttgagggattttgtttttgtttttgtttttgcttttttagccaaatggtcagatac

SEQ ID NO: 57079 - DNA, 110 bp, synthetic construct; identical to SEQ ID NO: 57078
  source 1..110: mol_type = other DNA

SEQ ID NO: 57080 - DNA, 110 bp, synthetic construct
  source 1..110: mol_type = other DNA
agccacagctgtgatctacaccacagttgctggatcctttaacccactgtgccaagccagggatcaaacctgtgttctggcattgctgagatgcacccaatcttattgca

SEQ ID NO: 57081 - DNA, 110 bp, synthetic construct
  source 1..110: mol_type = other DNA
gccagggatcaaacctgtgttctggcattgctgagatgcacccaatcttattgcaccagagcgggaactccaaggctacttaaaaaaaaagaaactttcaaaactgttag

SEQ ID NO: 57082 - DNA, 110 bp, synthetic construct
  source 1..110: mol_type = other DNA
tgagttttctatttaaattctagtttctataatctggaacctatcttgtccacccaggtctgaaaagctagtcaaggtggacacaaatgagggtagaaaggcaggagatg

SEQ ID NO: 57083 - DNA, 110 bp, synthetic construct
  source 1..110: mol_type = other DNA
aggtctgaaaagctagtcaaggtggacacaaatgagggtagaaaggcaggagatgcttctaaaagtcaggacacccaagtgctagtcctggttctccactacacaaggct

SEQ ID NO: 57084 - DNA, 110 bp, synthetic construct; identical to SEQ ID NO: 57082
  source 1..110: mol_type = other DNA

SEQ ID NO: 57085 - DNA, 110 bp, synthetic construct; identical to SEQ ID NO: 57083
  source 1..110: mol_type = other DNA

SEQ ID NO: 57086 - DNA, 110 bp, synthetic construct
  source 1..110: mol_type = other DNA
aaagcaatcactaagttttgtggacagttgcaagaattctgagaccagaggacatgacaggaaagcaggcaagggataagagcctctggtagaagtgactaatccccagg

SEQ ID NO: 57087 - DNA, 110 bp, synthetic construct
  source 1..110: mol_type = other DNA
gacaggaaagcaggcaagggataagagcctctggtagaagtgactaatccccaggccctctaagtacagaaatccagtccaaagcagaatgattccattagccacactgc

SEQ ID NO: 57088 - DNA, 110 bp, synthetic construct
  source 1..110: mol_type = other DNA
agagcagaggaaggcggggaatatgttaatagtccctagtgctttttaagtccaagaacaagacaatgaagcccttcctaaggtggtatcaagctgatttcaaaaaaaac

SEQ ID NO: 57089 - DNA, 110 bp, synthetic construct
  source 1..110: mol_type = other DNA
gaacaagacaatgaagcccttcctaaggtggtatcaagctgatttcaaaaaaaacataggctgtttgatcttttttagatagctcctaagaaagcattaagtgtggactc

SEQ ID NO: 57090 - DNA, 110 bp, synthetic construct
  source 1..110: mol_type = other DNA
tattgatgtccatagaattccaggaggtatgaagagtattactcgctataatttcaaatcatagtgaaagtagccagtttaccccttcttgaatcacatgacatttggta

SEQ ID NO: 57091 - DNA, 110 bp, synthetic construct
  source 1..110: mol_type = other DNA
gacagtaggagaagacaaaccacaggcttggagaatttatctgcgaaagatacatctgataaagaactatcatccaaaatacacaaagaagtcttaaaactcaacagtaa

SEQ ID NO: 57092 - DNA, 110 bp, synthetic construct
  source 1..110: mol_type = other DNA
tttatctgcgaaagatacatctgataaagaactatcatccaaaatacacaaagaagtcttaaaactcaacagtaagaaaacaaaccacccaattaaaaaatgagccaaag

SEQ ID NO: 57093 - DNA, 110 bp, synthetic construct
  source 1..110: mol_type = other DNA
taaacagatgattagagttgattgctttgctttattttgtgctaaaaacaatcatacccagggcatggaatttctaaagtgaacttcatactatgggagggtgatgtgtg

SEQ ID NO: 57094 - DNA, 110 bp, synthetic construct
  source 1..110: mol_type = other DNA
cctgcaatgctactatacacagtttgttctataacatgaaagcaaaattatatgaacttaaatattagcatccaagttttagaagcataaaatgaagccacaccaagact

SEQ ID NO: 57095 - DNA, 110 bp, synthetic construct; identical to SEQ ID NO: 57094
  source 1..110: mol_type = other DNA

SEQ ID NO: 57096 - DNA, 110 bp, synthetic construct
  source 1..110: mol_type = other DNA
tttagggagtcagtgtgtgaaggccgtctctgagcccacacaaggcagcatgatgagcatctgtgtgtttggatccagctttttacataaaagctctatctttttatatg

SEQ ID NO: 57097 - DNA, 110 bp, synthetic construct
  source 1..110: mol_type = other DNA
ttttgtttgagctctgcactcctaatgctgaccttacagctaagtcaatttcactgtggtatctgtcttctctgtaagagagtcctgagcaggacagcatagtctaaaac

SEQ ID NO: 57098 - DNA, 110 bp, synthetic construct
  source 1..110: mol_type = other DNA
ctgggcctggccctgtgtgtttctttggaagagcagtggtggtggcagcaggaagtggtgtggtgggcagctgccacctctgctgctgagaccaggattgctacaactgg

SEQ ID NO: 57099 - DNA, 110 bp, synthetic construct
  source 1..110: mol_type = other DNA
ctaattaaatacttgtctgggagaattatttgccctttccctcttttatctgttttcccctgcatttgaaatctagtcttgggctgcagaatttcaattcacaacaaaga

SEQ ID NO: 57100 - DNA, 110 bp, synthetic construct
  source 1..110: mol_type = other DNA
cagcccctaatcccacattgtttacaattttatttaagaaaaagcaaacaaaagctcccctttcaatatgagatttgaatctataaagagataatattctataggcagca

SEQ ID NO: 57101 - DNA, 110 bp, synthetic construct
  source 1..110: mol_type = other DNA
gaatagagataaaatggccttttaattcttagctgaaaaggtatcaattcagatttctggtaacaaattagttgatacacagtatctacatagagtctaagcctaaagct

SEQ ID NO: 57102 - DNA, 110 bp, synthetic construct
  source 1..110: mol_type = other DNA
tctggtaacaaattagttgatacacagtatctacatagagtctaagcctaaagcttgaggggattcccagactgctcttaaatattaacattgggatcaacacatccaga

SEQ ID NO: 57103 - DNA, 110 bp, synthetic construct
  source 1..110: mol_type = other DNA
cctgcagcttcctgatcacttcctgtgggcttcctggcttcctcttgctctgtgactttcatcctaacagttcttttttatcccaacaagggcagttccttcccatagaa

SEQ ID NO: 57104 - DNA, 110 bp, synthetic construct
  source 1..110: mol_type = other DNA
ctttcatcctaacagttcttttttatcccaacaagggcagttccttcccatagaaaatactaaatctaggtttcaggttttccaaaactttctgaaccagcttcattcca

SEQ ID NO: 57105 - DNA, 110 bp, synthetic construct
  source 1..110: mol_type = other DNA
aataaaacctacaaaaagactttcacagctacaaataatctggatgggaaaaaccctgatgggctaattaaacttttaaaatgctggagtgtcaataacacagtgaacta

SEQ ID NO: 57106 - DNA, 110 bp, synthetic construct
  source 1..110: mol_type = other DNA
attagaaaatgaaacctgaggagacccaggtttcctctggagtgtgacttgaataggaataagtgaccaaatggcactggaactaagctacaatgtggtgggaacctgtc

SEQ ID NO: 57107 - DNA, 110 bp, synthetic construct
  source 1..110: mol_type = other DNA
caacaaaatgactgacaattctgctttttggataggtttcactaggggtagctcgtctctactccaggtgaaactccaggggcaactctactgaggctgaaagatccaag

SEQ ID NO: 57108 - DNA, 110 bp, synthetic construct
  source 1..110: mol_type = other DNA
tattcatccccaccctgctctcagctccgccaatctgacatctcccagactcttggctatctaagcccttgtgcccaaacttgtttcctgtcatcagcaaactcctctcc

SEQ ID NO: 57109 - DNA, 110 bp, synthetic construct
  source 1..110: mol_type = other DNA
ttgaactcgcttatcctgtttagtaggttcttcctttcttattctttgggttttggctgtgtaagcagagcttaattctgatttttgtagttaagtgtaaagattttaag

SEQ ID NO: 57110 - DNA, 110 bp, synthetic construct
  source 1..110: mol_type = other DNA
cttaaccaagggatttatcctcccttggcctttatcatgaattggtggaatttacttaaacttcattgacaaacgcaaagatgggcagcctacaattatgagcttattaa

SEQ ID NO: 57111 - DNA, 110 bp, synthetic construct
  source 1..110: mol_type = other DNA
ttaaacttcattgacaaacgcaaagatgggcagcctacaattatgagcttattaaaaataaccctttgacagggcagtgaaatggctgcctgtttaatgttggcagaatt

SEQ ID NO: 57112 - DNA, 110 bp, synthetic construct
  source 1..110: mol_type = other DNA
tatctatgcatagcattctagagaatctccagtgtgcctctgcagacaccattgtgctatctgcagcaacctcacctgcctcaggtttgctcttccattctcctagcttg

SEQ ID NO: 57113 - DNA, 110 bp, synthetic construct
  source 1..110: mol_type = other DNA
gcctctgcagacaccattgtgctatctgcagcaacctcacctgcctcaggtttgctcttccattctcctagcttgctaatgcatatcccacaaatgacccctcataaacc

SEQ ID NO: 57114 - DNA, 110 bp, synthetic construct; identical to SEQ ID NO: 57112
  source 1..110: mol_type = other DNA

SEQ ID NO: 57115 - DNA, 110 bp, synthetic construct
  source 1..110: mol_type = other DNA
tctccagtgtgcctctgcagacaccattgtgctatctgcagcaacctcacctgcctcaggtttgctcttccattctcctagcttgctaatgcatatcccacaaatgaccc

SEQ ID NO: 57116 - DNA, 110 bp, synthetic construct
  source 1..110: mol_type = other DNA
attaaggttaataagcacgtgagtccagttttaaacaatgtctctttatgtttctgtcatccatttattctcctttgtgcacatgcttgcacatacacacaatttctagt

SEQ ID NO: 57117 - DNA, 110 bp, synthetic construct
  source 1..110: mol_type = other DNA
aaaatggcaggtaatcttctctgtgaattaaactatgagcagtcattgcagctgtctttgggcagttgacaccaaacagagttaagcacagcattggcataatggctgaa

SEQ ID NO: 57118 - DNA, 110 bp, synthetic construct
  source 1..110: mol_type = other DNA
ctttgggcagttgacaccaaacagagttaagcacagcattggcataatggctgaagtcagtgcattatttttattagaaacgtgcaataatctgtacacaggaaatttca

SEQ ID NO: 57119 - DNA, 110 bp, synthetic construct; identical to SEQ ID NO: 57117
  source 1..110: mol_type = other DNA

SEQ ID NO: 57120 - DNA, 110 bp, synthetic construct; identical to SEQ ID NO: 57118
  source 1..110: mol_type = other DNA

SEQ ID NO: 57121 - DNA, 110 bp, synthetic construct
  source 1..110: mol_type = other DNA
atttcatctttcttacaggtctaggcctgtggagctctgtacagcgagcagaaatgtattgctgagactggctgtgtgtggggacttaatacttgtttatcctcttcttc

SEQ ID NO: 57122 - DNA, 110 bp, synthetic construct
  source 1..110: mol_type = other DNA
cttgaatgtgaatggattaaatgcttcaaacaaaagatacagacaggctgaatggatacagaaacaagaccagtatatatgctgtctacaagaggcccacttaaaatcta

SEQ ID NO: 57123 - DNA, 110 bp, synthetic construct
  source 1..110: mol_type = other DNA
tcaaacaaaagatacagacaggctgaatggatacagaaacaagaccagtatatatgctgtctacaagaggcccacttaaaatctaggggcatatacagactgaaagtcag

SEQ ID NO: 57124 - DNA, 110 bp, synthetic construct
  source 1..110: mol_type = other DNA
accttaaatatgtatatgtgcatttgtatacacctttctcctcgctaaaataacactttatgccacataccagtaactcttccataatgttcaactgtgtgtaaatccta

SEQ ID NO: 57125 - DNA, 110 bp, synthetic construct
  source 1..110: mol_type = other DNA
ctttatgccacataccagtaactcttccataatgttcaactgtgtgtaaatcctatgcataaacacattttttgaatactagttacggttcattttaataaaccttgtcc

SEQ ID NO: 57126 - DNA, 110 bp, synthetic construct
  source 1..110: mol_type = other DNA
atttccctgtgatactcagtaggtcatttttctttacaaaagggtttccaactattaaaattagagtttatggtcaagtaggcatcattatacccaggtatcatttgttg

SEQ ID NO: 57127 - DNA, 110 bp, synthetic construct
  source 1..110: mol_type = other DNA
taaaattagagtttatggtcaagtaggcatcattatacccaggtatcatttgttgctagatttactggctctgttttaaaagggattgagggcttcatggggcccaagtt

SEQ ID NO: 57128 - DNA, 110 bp, synthetic construct
  source 1..110: mol_type = other DNA
actctcagctcatctgcttctctctgcaaattccctattgagtaaacaaacagttcagctacttccttccagagctaagggcaaggggagaagaagtaaaggtcttcttt

SEQ ID NO: 57129 - DNA, 110 bp, synthetic construct
  source 1..110: mol_type = other DNA
cagctacttccttccagagctaagggcaaggggagaagaagtaaaggtcttctttcaaataagattctgatctaaatatttaactcttatttgcttcagtatagttccat

SEQ ID NO: 57130 - DNA, 110 bp, synthetic construct
  source 1..110: mol_type = other DNA
tgctgagaatcacaccaaccactgtttgctcctggtgacttcctccataattacactttgggctagctttaagaattctaagtcaatgaaagtaaatgtaaatgtaaatg

SEQ ID NO: 57131 - DNA, 110 bp, synthetic construct
  source 1..110: mol_type = other DNA
acgttgataaggattcttcttaatatagagacgttctgggccctgttgtgacaggaacacacattggaggcacagctttttaaaaacaccttctgaatcagtgtgtctgt

SEQ ID NO: 57132 - DNA, 110 bp, synthetic construct
  source 1..110: mol_type = other DNA
agagaatgttagactatgagtgaacaaaaccttagctactgcagggggctgtagggttttaatggcacaaagcaaacaaccaagcagaaaagtgactaagcttgaatggc

SEQ ID NO: 57133 - DNA, 110 bp, synthetic construct
  source 1..110: mol_type = other DNA
caaaaaagggataagaactactcagtggcttgcatcatggtccctggctttgagttgtccgtattctatagcatttccccagaacactcaagaggaaagataggaaggag

SEQ ID NO: 57134 - DNA, 110 bp, synthetic construct
  source 1..110: mol_type = other DNA
tgtccgtattctatagcatttccccagaacactcaagaggaaagataggaaggagctcagtgtgaaatatgacccactctttgctgggatccaggagcccttctccggga

SEQ ID NO: 57135 - DNA, 110 bp, synthetic construct
  source 1..110: mol_type = other DNA
cttatcgcagtggtttccaattctggaattgggaatcaccggggagctttaaaaatatactggtaatagcctttccttttcagtcaaccccaggatcctgatttattgtg

SEQ ID NO: 57136 - DNA, 110 bp, synthetic construct
  source 1..110: mol_type = other DNA
ctctgcagtgcaaattctattctaatatcagatttatgtgttcaaaatgatcagacaattatggtacctggaaacccacacccaaaaaaatcgctctgcagataaatctc

SEQ ID NO: 57137 - DNA, 110 bp, synthetic construct
  source 1..110: mol_type = other DNA
cagatctactcatattttccaaggaatgtgtggtcacacttctactttaggttgcctggtatatgaatgacactctcagtgcgtcagagctttttgccattggaaatgga

SEQ ID NO: 57138 - DNA, 110 bp, synthetic construct
  source 1..110: mol_type = other DNA
ctggtatatgaatgacactctcagtgcgtcagagctttttgccattggaaatggatcctatgtcctggagcaaaggtgctagtctgattctagaagataaacaaaaaagg

SEQ ID NO: 57139 - DNA, 110 bp, synthetic construct
  source 1..110: mol_type = other DNA
gggcccctacctgccacactgccagctacaccccagcttggcactgctctctgacctttccctgcagagaccttacaggggtgcaccataagttgaccaaggggtttctg

SEQ ID NO: 57140 - DNA, 110 bp, synthetic construct
  source 1..110: mol_type = other DNA
ggagagtgaaacatgacaagtttgcagacatactcaattgattactagctggagctacacctcggctggcatggtttaggcacagaatagtattgcaaacatggagtttt

SEQ ID NO: 57141 - DNA, 110 bp, synthetic construct
  source 1..110: mol_type = other DNA
cctcggagtttccattatgcactctgttttcctggtgtcaagctatttccactactaaacatgaagtcagtctaagccttggctccagactacaggagcatttgtaattg

SEQ ID NO: 57142 - DNA, 110 bp, synthetic construct
  source 1..110: mol_type = other DNA
agcaaaatgaaaagggccagatccatgctgagaagggcctgatcttttctgtgcggtcaggatttccagctttagtccactgatgaggtcctgctttcctcatatgtttt

SEQ ID NO: 57143 - DNA, 110 bp, synthetic construct
  source 1..110: mol_type = other DNA
tcattcacgtcaaagacttgagggtaggccgtgggataatgtgggtgcacaccgattgtaatctacactctaagagcagctaaatcacatttcctagaggtgggtgatcg

SEQ ID NO: 57144 - DNA, 110 bp, synthetic construct
  source 1..110: mol_type = other DNA
ttgaagccacctagtctatggaattttattttggccgctaagtaatacaccctacttcacaaggtagctattccactctcaaacaaccctaagtgttggaaagttcttat

SEQ ID NO: 57145 - DNA, 110 bp, synthetic construct
  source 1..110: mol_type = other DNA
acaaccatttgtttttgcttttccttttctcccaaccctggactacaaataccgacagctaaccacatttaaaaggaacaggttggtggtgggaatttgaaaaataaaac

SEQ ID NO: 57146 - DNA, 110 bp, synthetic construct
  source 1..110: mol_type = other DNA
aaaggtgaaggttctatccctggtccagcagagttggttaaagatccagcattgtcatagctatggctcagattcaatccctggtcctggagtttccatatgctgcaggt

SEQ ID NO: 57147 - DNA, 110 bp, synthetic construct
  source 1..110: mol_type = other DNA
catagctatggctcagattcaatccctggtcctggagtttccatatgctgcaggtgcagccaataaaaaaaattttgttttaattaaaaaaaaaaaattcctctgtcatg

SEQ ID NO: 57148 - DNA, 110 bp, synthetic construct
  source 1..110: mol_type = other DNA
tatcctggagattcaaaagcattattaccctgacttgtttcctgccaggtagaggctcggtgctaaggatcttcacaatcacaccgctcacaaactgaggtcctgttgca

SEQ ID NO: 57149 - DNA, 110 bp, synthetic construct
  source 1..110: mol_type = other DNA
ctcggtgctaaggatcttcacaatcacaccgctcacaaactgaggtcctgttgcattaaccttctcctggggacaacactcttcaccgtttgctgcagatgtgaaaagaa

SEQ ID NO: 57150 - DNA, 110 bp, synthetic construct
  source 1..110: mol_type = other DNA
cagttagctggtgagttaattcacacacacaagttaaacaaggatcaagctacagccctaattcagatagcgcaaatgatggcatcacaaggaagtgctgaagaagtgaa

SEQ ID NO: 57151 - DNA, 110 bp, synthetic construct
  source 1..110: mol_type = other DNA
cagtatatgtattaaatatgattgagacgttctaaggttccatcaaggtgcatatttggtacttgccagactggagtatgactcccttctttaaaacaggccttattttg

SEQ ID NO: 57152 - DNA, 110 bp, synthetic construct; identical to SEQ ID NO: 57151
  source 1..110: mol_type = other DNA

SEQ ID NO: 57153 - DNA, 110 bp, synthetic construct
  source 1..110: mol_type = other DNA
caggcaaaacattgaagtgctctggagcagaagttcttaacgttggctttacccaagtcactggagagctcttaaaaatatgaatgcctggatccacaccacagacccat

SEQ ID NO: 57154 - DNA, 110 bp, synthetic construct
  source 1..110: mol_type = other DNA
tctgttgatgcagttactctagaaaaatacaaaataaaacgtgggtacaatttatgcacagctgcaagaacctgagagtgcatgaacttgggcttttgaaaagttaacct

SEQ ID NO: 57155 - DNA, 110 bp, synthetic construct
  source 1..110: mol_type = other DNA
gcacagctgcaagaacctgagagtgcatgaacttgggcttttgaaaagttaacctccacaagcccatttctctcatgcccttttatctctgtccctctcggtattcagcc

SEQ ID NO: 57156 - DNA, 110 bp, synthetic construct
  source 1..110: mol_type = other DNA
atctcatagatgcatctgagagacactggaaaaacaataatgagaaagacagacatggtgttagctgatctgtgaatatttcgaagacgaaaattcctacttaagtggat

SEQ ID NO: 57157 - DNA, 110 bp, synthetic construct
  source 1..110: mol_type = other DNA
tggtgttagctgatctgtgaatatttcgaagacgaaaattcctacttaagtggattgggtggggtgacttatagaaaatatagaacaaatgaatatcagaattggagatt

SEQ ID NO: 57158 - DNA, 110 bp, synthetic construct
  source 1..110: mol_type = other DNA
tagcactttttctcactagcatggatagatcttccacatacagatttcacttccctgctatgtttctactagcaataccttctgtggacttactgaaagcttatttcacc

SEQ ID NO: 57159 - DNA, 110 bp, synthetic construct
  source 1..110: mol_type = other DNA
tgctatgtttctactagcaataccttctgtggacttactgaaagcttatttcacccacagcaatccatataacattgcttctggccaaggaccttactggatcccacagg

SEQ ID NO: 57160 - DNA, 110 bp, synthetic construct
  source 1..110: mol_type = other DNA
aaactaccaatcttcacttaaggctattgctcctcaaactccactataaatactatacagtatttaaggaatgcagggagcattcagcaacatctaaattttggtataat

SEQ ID NO: 57161 - DNA, 110 bp, synthetic construct
  source 1..110: mol_type = other DNA
tacagtatttaaggaatgcagggagcattcagcaacatctaaattttggtataatttaccatcacactagattaaaggcattatatacagctgctcaagattgaggtgta

SEQ ID NO: 57162 - DNA, 110 bp, synthetic construct
  source 1..110: mol_type = other DNA
caaaactagaagagcttcttactattatataaagacagagtgaagtctgaccagatgcttgaattggataaagtgggtaaattttgaccaatccttgttctttgactctc

SEQ ID NO: 57163 - DNA, 110 bp, synthetic construct
  source 1..110: mol_type = other DNA
cagagcattccctcataaatttcctgcatgttaatttcttctggaaagagctgctttgctgaatttgttgatcagtttgagacgtttttgtgtggagtccttagggtttt

SEQ ID NO: 57164 - DNA, 110 bp, synthetic construct; identical to SEQ ID NO: 57163
  source 1..110: mol_type = other DNA

SEQ ID NO: 57165 - DNA, 110 bp, synthetic construct; identical to SEQ ID NO: 57163
  source 1..110: mol_type = other DNA

SEQ ID NO: 57166 - DNA, 110 bp, synthetic construct; identical to SEQ ID NO: 57163
  source 1..110: mol_type = other DNA

SEQ ID NO: 57167 - DNA, 110 bp, synthetic construct
  source 1..110: mol_type = other DNA
agttctttgaatatatttataatagctgttttgaagtctttttctgctaagtatatcatctgggccccaccaagacattttttcttgtctgctccccccccatttatgga

SEQ ID NO: 57168 - DNA, 110 bp, synthetic construct
  source 1..110: mol_type = other DNA
taatgaaagtctaatagataaagtttagggctgtaatctttgcctttaaggatggctctacataaaatgagatcatcttggctcatgttagacttaataattcagttccc

SEQ ID NO: 57169 - DNA, 110 bp, synthetic construct
  source 1..110: mol_type = other DNA
atactcctgaatagtcttgtgtacaagatgtttatataagaaattgggtagtgatttggacaataaagaccctgaaaataaactggtaaaataggcctgatctttctgat

SEQ ID NO: 57170 - DNA, 110 bp, synthetic construct; identical to SEQ ID NO: 57169
  source 1..110: mol_type = other DNA

SEQ ID NO: 57171 - DNA, 110 bp, synthetic construct
  source 1..110: mol_type = other DNA
attgggtaaaatttcagaaattatcatttagagtatttgccacttctttccaggctttttcagagattactggtgaatccttattatcaccttggaaaatagttagctcc

SEQ ID NO: 57172 - DNA, 110 bp, synthetic construct
  source 1..110: mol_type = other DNA
ctttccaggctttttcagagattactggtgaatccttattatcaccttggaaaatagttagctccatttattggaaggatataaaataaagccacttaagataattgaga

SEQ ID NO: 57173 - DNA, 110 bp, synthetic construct
  source 1..110: mol_type = other DNA
cttcatcttttgtatgaaggcagcatcactgacatatttataacataaggtggcactcaaaacttgaaagaaaagagacatatctcttgaaaaaatgcaaagagccaatt

SEQ ID NO: 57174 - DNA, 110 bp, synthetic construct
  source 1..110: mol_type = other DNA
catgttgctagaatcgttctgctcagtattgttgcctggagaaaatcatggaccagaacaggcagaatatcacgtgcctgtggtctgtgtggcgtccgagcggtggaatc

SEQ ID NO: 57175 - DNA, 110 bp, synthetic construct
  source 1..110: mol_type = other DNA
tttctcttccagagaaatgcagaataacgtaagagttaagtgtttggttatggagtcaggtagatatacattcacattttcatatttaaccttgagctacttaattccgt

SEQ ID NO: 57176 - DNA, 110 bp, synthetic construct; identical to SEQ ID NO: 57175
  source 1..110: mol_type = other DNA

SEQ ID NO: 57177 - DNA, 110 bp, synthetic construct
  source 1..110: mol_type = other DNA
cactgatgacattcaataacacgaaatagatacggcgatgtaaatactccgcaagtatttattgggtgtctctatgttctaggtactttctaaacactaagaataaatca

SEQ ID NO: 57178 - DNA, 110 bp, synthetic construct
  source 1..110: mol_type = other DNA
tatttattgggtgtctctatgttctaggtactttctaaacactaagaataaatcagcaaataaaacatacctacatggccactcctgcagtttatattctagtcaataaa

SEQ ID NO: 57179 - DNA, 110 bp, synthetic construct
  source 1..110: mol_type = other DNA
gtcagatgaagaaccatctttgagcctcagtgaggaagcagtaagaactggagtggttggtgaaagacctagcactgaacattgtagtcaggcaagacctgtgatttgtt

SEQ ID NO: 57180 - DNA, 110 bp, synthetic construct
  source 1..110: mol_type = other DNA
gcatataatcccattgcttttattctggcacctgactcctcccctctgctgtcccctggatatctctggtcaaatttttccagcaattaaagtcatggtattttccaaga

SEQ ID NO: 57181 - DNA, 110 bp, synthetic construct
  source 1..110: mol_type = other DNA
aataaatgtcctataagcaggaagtaagatggattatcaggagtttgttgtcaacttgaatcctaggaagaagaatgggagagactcttctcaggacagcgtaacttcac

SEQ ID NO: 57182 - DNA, 110 bp, synthetic construct
  source 1..110: mol_type = other DNA
gctatacctttaaaggtcaagcctgggaggcagaaccttgagagaggttattacgtttttttcaggctagaggcaacattcctttacagagatgcagagctagcatgact

SEQ ID NO: 57183 - DNA, 110 bp, synthetic construct
  source 1..110: mol_type = other DNA
cggatggcaatgggacagccaattggagatgttctacagttaatgggatatcatagaatttaggtagcaaagatctgcaagtcatcagtgcacagaaagatttgaagtca

SEQ ID NO: 57184 - DNA, 110 bp, synthetic construct
  source 1..110: mol_type = other DNA
taactcaatagtgttaggaacattctagcctagatttgaagggatttccctatgattttctaccccaaagattaagtattaaataatgagcccccaaatagataccgcct

SEQ ID NO: 57185 - DNA, 110 bp, synthetic construct
  source 1..110: mol_type = other DNA
tgttcctgctcagtggaaggctcttgtctaaatgacaattcagatattcaaccgtgtttcatttgtagctctgttctttttaacatatatttaccaaggtcatgctggga

SEQ ID NO: 57186 - DNA, 110 bp, synthetic construct
  source 1..110: mol_type = other DNA
ttttacagtatctcctaaacctacaacccaggttgatcgattcttagtgaccaatacaagggactggaagaggaatatacatttatagaactcagaaaagaatgaaagct

SEQ ID NO: 57187 - DNA, 110 bp, synthetic construct
  source 1..110: mol_type = other DNA
cctcataatcaaattatagtgggccgaggaaaaaagtggaggaggaggaattgaggggcaaatatagagatcatgttttcattcagttggaccagtagtggaagagagaa

SEQ ID NO: 57188 - DNA, 110 bp, synthetic construct
  source 1..110: mol_type = other DNA
gggcaaatatagagatcatgttttcattcagttggaccagtagtggaagagagaaataaaggcgatcttagagaatggttcagaaaagatgaggaagatttgagcatgat

SEQ ID NO: 57189 - DNA, 110 bp, synthetic construct
  source 1..110: mol_type = other DNA
accagaaagggcagaacacgtggtaagtgctggggtgaagaaaagttaagatcattagagagaggccagattacagagggtctgcaaagtccaaagagggagttaatatt

SEQ ID NO: 57190 - DNA, 110 bp, synthetic construct
  source 1..110: mol_type = other DNA
tacaacaaaataaccagacttttaaatgtacagctagggatcttccccttcaccagtttgtgttgcaaagcatccagtccagtgaattgtgtaaaggtaggttgctgctg

SEQ ID NO: 57191 - DNA, 110 bp, synthetic construct
  source 1..110: mol_type = other DNA
atacatgtttttcaacacatgtaaaactaaattacagcacaactgaaccaaattgagaacctcctggagatatagggggtcacgaaaatgcctttacagcataacaagta

SEQ ID NO: 57192 - DNA, 110 bp, synthetic construct
  source 1..110: mol_type = other DNA
agaacctcctggagatatagggggtcacgaaaatgcctttacagcataacaagtactctttgggactttataagaaaggattaggaacactcgtttatttttttaaaagc

SEQ ID NO: 57193 - DNA, 110 bp, synthetic construct
  source 1..110: mol_type = other DNA
cagtttcaaccatattgtgcttattttcattttttaaaatatggagcaatctcgggtttttaaatttaagctgcccgttttcatttctaaagtgcctaaaatcacttcaa

SEQ ID NO: 57194 - DNA, 110 bp, synthetic construct
  source 1..110: mol_type = other DNA
ttgtcactgttgtggctctggttactgctgtggcgctggttcagggtctggccccagaacttccacatacagccaaaaataaaataaaataaaacgtatgtatatttgtg

SEQ ID NO: 57195 - DNA, 110 bp, synthetic construct
  source 1..110: mol_type = other DNA
gtctggccccagaacttccacatacagccaaaaataaaataaaataaaacgtatgtatatttgtgatttaagtaccatgttaatttctttattagcccacatctgaggac

SEQ ID NO: 57196 - DNA, 110 bp, synthetic construct
  source 1..110: mol_type = other DNA
agacttttggcgtcctcagagactgcagtgtaggtagaaaaatctcatcttctagtggtgttctgctaacactgcctgggaaatattgagggggtgaaggagggttgtgt

SEQ ID NO: 57197 - DNA, 110 bp, synthetic construct
  source 1..110: mol_type = other DNA
taagtatttatttctggactctcatttctattccattaacctatatgtctatccttatggcagtatcatattgtattactgtagctgtgtagtaagtttcaaatttgaga

SEQ ID NO: 57198 - DNA, 110 bp, synthetic construct
  source 1..110: mol_type = other DNA
atgcagaaatcaattgtaagcaaagtctaagagtcaattctgaaagagtttaaaatgcatataaaagtatgaaggaaaaaaggaggaggaagagggggaggtgagaggaa

SEQ ID NO: 57199 - DNA, 110 bp, synthetic construct
  source 1..110: mol_type = other DNA
caatggggaaaagagtctctttaataaatggtgcttggaaaattggacagaacattttctcagggagctgccatcatgactcagcaataacaaaccagacgattatccat

SEQ ID NO: 57200 - DNA, 110 bp, synthetic construct
  source 1..110: mol_type = other DNA
aaatggtgcttggaaaattggacagaacattttctcagggagctgccatcatgactcagcaataacaaaccagacgattatccatgaggacacgggttcagtccctggtc

SEQ ID NO: 57201 - DNA, 110 bp, synthetic construct
  source 1..110: mol_type = other DNA
tgggcctgttttgactgatatggtgcggaaagcctgactaggtctcactgattttaaaacccacaagcttgggagttcccactatggcttagtggcaatgaacctgacta

SEQ ID NO: 57202 - DNA, 110 bp, synthetic construct
  source 1..110: mol_type = other DNA
tgtctggctaaggaaactttatccatgaacttgtttttactaaggaaaaaaaaacggaattgtacacctttatgcgctttcctatatatgaggtttagaaagtgacatgt

SEQ ID NO: 57203 - DNA, 110 bp, synthetic construct
  source 1..110: mol_type = other DNA
ttggagatgaggtaataagaacctatggtttagaaagatattcgagacaagggcggtctgattatctgcccaagtgattctgataatttaaaatatacctggaacatgta

SEQ ID NO: 57204 - DNA, 110 bp, synthetic construct
  source 1..110: mol_type = other DNA
ttacggccaatccagtctatggcaagaccttctggcacatcgactgcttcctcgaaaagcctttctcgctgggaaccatccatattagctctctctatccatttcagggc

SEQ ID NO: 57205 - DNA, 110 bp, synthetic construct
  source 1..110: mol_type = other DNA
taaactgtgttgatgacagatgtccttcattttccaaagaacatacttttgaaattcccttttgagcttaaagctggaatctacattttaaagaattccagaagaaagca

SEQ ID NO: 57206 - DNA, 110 bp, synthetic construct
  source 1..110: mol_type = other DNA
tcccttttgagcttaaagctggaatctacattttaaagaattccagaagaaagcagaattatttgtacctttacaaaagaacatctgccagcagtaaaactatccttgca

SEQ ID NO: 57207 - DNA, 110 bp, synthetic construct
  source 1..110: mol_type = other DNA
ttatgcacagtattgccgtcccttggtatacataagggattggtgccagcaaccctcagacaccaaaatctgaagctgcttctgccctttctatgaaatagcataatatt

SEQ ID NO: 57208 - DNA, 110 bp, synthetic construct
  source 1..110: mol_type = other DNA
tcatgactacctaactaaataactgcattgtccaaatttctgtcctagatctcttttcttacacattcgacataaccacactcaagtgatttcacacatatctaaggcta

SEQ ID NO: 57209 - DNA, 110 bp, synthetic construct
  source 1..110: mol_type = other DNA
aagtgtggtcagcaagccttccttcagacagcaactaattgtcagaacctccagggtctgcctcagctatggagagctgccttaactaagagcatgcatttcctgggcaa

SEQ ID NO: 57210 - DNA, 110 bp, synthetic construct
  source 1..110: mol_type = other DNA
gtctgcctcagctatggagagctgccttaactaagagcatgcatttcctgggcaaccctcaccaggggactgagcaaggcaggcaagatccagccatctctgcctgatcc

SEQ ID NO: 57211 - DNA, 110 bp, synthetic construct
  source 1..110: mol_type = other DNA
gaatggaagtcaatgtgtgattttgtttttccttgtctttctcaggtacagatgacggttctattgatgcctgtaaaggggactctggaggccccttagtctgtacagat

SEQ ID NO: 57212 - DNA, 110 bp, synthetic construct
  source 1..110: mol_type = other DNA
cggttctattgatgcctgtaaaggggactctggaggccccttagtctgtacagatgccaacaacatgacttatgtttggggtgttgtgagttggggtgaaaactgtggaa

SEQ ID NO: 57213 - DNA, 110 bp, synthetic construct
  source 1..110: mol_type = other DNA
atccggaacggcgttcacaaaatagacacgtacctcaacgccgccttggaccttctgggaggagaggatgggctctgccagtataagtgcaatgacggtgagggggaccc

SEQ ID NO: 57214 - DNA, 110 bp, synthetic construct
  source 1..110: mol_type = other DNA
actgccaccattactggtattagggataaaaacacgtgggggcctgaataactccattggtacctcagtaagggttttgatcgaaaaagagaattcctgacgtttcagag

SEQ ID NO: 57215 - DNA, 110 bp, synthetic construct
  source 1..110: mol_type = other DNA
attggtacctcagtaagggttttgatcgaaaaagagaattcctgacgtttcagagctgcaaccctgtatttccaggagtggcacagaggccacagccacattttacaccc

SEQ ID NO: 57216 - DNA, 110 bp, synthetic construct
  source 1..110: mol_type = other DNA
ccatagctgtgacctacatataccatggctgtggcaacaccagctcctttaagctactgtgctggggcagggatagaacccatgcctcctcagagacccaagctgctgca

SEQ ID NO: 57217 - DNA, 110 bp, synthetic construct
  source 1..110: mol_type = other DNA
acatataccatggctgtggcaacaccagctcctttaagctactgtgctggggcagggatagaacccatgcctcctcagagacccaagctgctgcagtcagattcttaacc

SEQ ID NO: 57218 - DNA, 110 bp, synthetic construct
  source 1..110: mol_type = other DNA
ctccattgccaagagaaacaattccaaaaaaagttttcatgagctgattcttatccgcgtccccagcctcaccctgtcatcacgagcactggcccctcccagccccctgt

SEQ ID NO: 57219 - DNA, 110 bp, synthetic construct
  source 1..110: mol_type = other DNA
cgcgtccccagcctcaccctgtcatcacgagcactggcccctcccagccccctgtaccagacatgcagagggtattgtggtttcttgaatatggcacactcggcgtgctt

SEQ ID NO: 57220 - DNA, 110 bp, synthetic construct
  source 1..110: mol_type = other DNA
atacatcatacagacctaaagtctatcccactactaagataaaatagcaaaataacacgtaaaattctctagcaggaggtcgttacgagttaagcaaagctcattactgg

SEQ ID NO: 57221 - DNA, 110 bp, synthetic construct
  source 1..110: mol_type = other DNA
cacgtaaaattctctagcaggaggtcgttacgagttaagcaaagctcattactgggaaaggaaatgagttaattagaaaggtaatttagaaatatgcactgaagggggaa

SEQ ID NO: 57222 - DNA, 110 bp, synthetic construct
  source 1..110: mol_type = other DNA
agacatacagatggccaataggtatgcgaaaaagttctcaacattagcaatcaccagacaaaggaaaaacccaaaccacaatgaagtattcaccttacacttgtaagact

SEQ ID NO: 57223 - DNA, 110 bp, synthetic construct; identical to SEQ ID NO: 57222
  source 1..110: mol_type = other DNA

SEQ ID NO: 57224 - DNA, 110 bp, synthetic construct
  source 1..110: mol_type = other DNA
acttagggcctgcctacttggtagaacttatataaacacggtttatttacatttatgtctggctctccagctagattataaaagcaggggtaggagttcccttctggtgt

SEQ ID NO: 57225 - DNA, 110 bp, synthetic construct
  source 1..110: mol_type = other DNA
tatgctgcaggtgtggctggaaaaagaaaaaaggaaaccaacaaacagacaaataaacaccagcaggagttctgctgtggtgcagtaagttaaggatctggtgatgtctc

SEQ ID NO: 57226 - DNA, 110 bp, synthetic construct
  source 1..110: mol_type = other DNA
tgagatggaaataaaggaggaagagcagggtttggagctaagacgacgatcaagtcggacttgcttataggacatctaagtagaaatggctttaaggctcagaagagagg

SEQ ID NO: 57227 - DNA, 110 bp, synthetic construct
  source 1..110: mol_type = other DNA
aagccccaaaggggttaaataactttcacatattatataacttttatttttttatttttgtctttttagagctgcactcatgaatatggaagttcctaggctaggggtcg

SEQ ID NO: 57228 - DNA, 110 bp, synthetic construct; identical to SEQ ID NO: 57227
  source 1..110: mol_type = other DNA

SEQ ID NO: 57229 - DNA, 110 bp, synthetic construct
  source 1..110: mol_type = other DNA
taagatccctagaactgtggtggaatctgatcaacttagccaaaatgatttgactcagtttaagtatgcatttaaaaaattcatttattcagctgtgattgagtgcttat

SEQ ID NO: 57230 - DNA, 110 bp, synthetic construct
  source 1..110: mol_type = other DNA
taccccggggccttgttttagtcctacactagtcattgacctagtctgggatgcacagcaagataacagcttcatcatgctcagttcccaagactagcttaactctcaac

SEQ ID NO: 57231 - DNA, 110 bp, synthetic construct
  source 1..110: mol_type = other DNA
cagcaagataacagcttcatcatgctcagttcccaagactagcttaactctcaacctaggctggatgttccctggccaaggctaagctcccattctctctctttaaaaag

SEQ ID NO: 57232 - DNA, 110 bp, synthetic construct
  source 1..110: mol_type = other DNA
ataatcagagatgtccttaaggaaggttaacttaataggtatatgtttttggagttcccattgtggctcaacaggttaagaaattgaccagcatccatgaggatgtggga

SEQ ID NO: 57233 - DNA, 110 bp, synthetic construct
  source 1..110: mol_type = other DNA
cttaaggaaggttaacttaataggtatatgtttttggagttcccattgtggctcaacaggttaagaaattgaccagcatccatgaggatgtgggatcaatccctggcctc

SEQ ID NO: 57234 - DNA, 110 bp, synthetic construct
  source 1..110: mol_type = other DNA
aaagaggtaaatcttcctaatatttaatcccttgcaaagaacttgaccccccaaatcgctaatgaaacagtaaaattaatggttaaaacatcagcggttatggtttgaat

SEQ ID NO: 57235 - DNA, 110 bp, synthetic construct
  source 1..110: mol_type = other DNA
tcgctaatgaaacagtaaaattaatggttaaaacatcagcggttatggtttgaatatcatttgtcctttgtacatgaagcttattacagaaatgacttaacagcaatttc

SEQ ID NO: 57236 - DNA, 110 bp, synthetic construct
  source 1..110: mol_type = other DNA
gagttcatggaagtaggcagaattaccaaaagacaaaggatttatcactagcgtagtgacacttaaaggttggagctaggatccttttttttttttttttttttttaaga

SEQ ID NO: 57237 - DNA, 110 bp, synthetic construct
  source 1..110: mol_type = other DNA
ataaacatttcacattaatgtcaaaagaacccaatcacaggatcctagatatgcaagtccttttgctcagctgggtggcagcagtctcccatacggtccctctttctaag

SEQ ID NO: 57238 - DNA, 110 bp, synthetic construct
  source 1..110: mol_type = other DNA
agtccttttgctcagctgggtggcagcagtctcccatacggtccctctttctaaggtcattctgtaaaatatgttaatgtggatttcttttgctctatcactggcagaga

SEQ ID NO: 57239 - DNA, 110 bp, synthetic construct
  source 1..110: mol_type = other DNA
aaaatgtaccaggattcacttctaagcttgaactggagcttgatttcagggtcgacgcatatccatctgtcaaagcaatgacaagatgcaagagtcagaaagtctcactt

SEQ ID NO: 57240 - DNA, 110 bp, synthetic construct
  source 1..110: mol_type = other DNA
gattgtctcattcccttacgtcaccaattcaatttaatcctttccatatctataaacacccatatggggcggagaactgggctttttgatcctgccaaagtaatagaatt

SEQ ID NO: 57241 - DNA, 110 bp, synthetic construct
  source 1..110: mol_type = other DNA
ttgagttttggaatgtttggtgcattggatcggtctaggattatgaaacctaaacctcccattgtaaacaggaagctggatgcgagtccttccataatatattgtccatt

SEQ ID NO: 57242 - DNA, 110 bp, synthetic construct
  source 1..110: mol_type = other DNA
ctcccattgtaaacaggaagctggatgcgagtccttccataatatattgtccatttactctggaaaaaaaaaaaaaaaaacacagcgtaagaataaatgaaaattgccat

SEQ ID NO: 57243 - DNA, 110 bp, synthetic construct
  source 1..110: mol_type = other DNA
tattggggatggctcctcacagctgtcccaaactggcaaggaaactgggcctttgcgttcccacatcagacagtctttggtccggctgctccctatttacaggtgtggca

SEQ ID NO: 57244 - DNA, 110 bp, synthetic construct
  source 1..110: mol_type = other DNA
cgttcccacatcagacagtctttggtccggctgctccctatttacaggtgtggcagcttcctgaaactgagaacagtgtcctgtgacccagtcaatatccttggcccaga

SEQ ID NO: 57245 - DNA, 110 bp, synthetic construct
  source 1..110: mol_type = other DNA
ggtttcacaaacacagaagacgtagctggcagggtttaggaagtgttatcatcgctcatgtgaggtggaaatcagaactttcagcatcgggcagactcagtccaggctgt

SEQ ID NO: 57246 - DNA, 110 bp, synthetic construct
  source 1..110: mol_type = other DNA
cggtctataaatatcccagcttcctcccacttcaggtggcctttctaaggcacatcttctgcataggcactgaggtcctcagcagaaataagtttcaattatccgtagca

SEQ ID NO: 57247 - DNA, 110 bp, synthetic construct
  source 1..110: mol_type = other DNA
cgctggtgtatgaaggatggctgatgccagtgaagaagatgagctcacccagaaagagacttagatagtggaagaagagctcaccggagacctggggcttgggggttgcg

SEQ ID NO: 57248 - DNA, 110 bp, synthetic construct
  source 1..110: mol_type = other DNA
gagacttagatagtggaagaagagctcaccggagacctggggcttgggggttgcgacactgcacaagaatacgaacacaaaagcctgagagataaaatttcaggtggagg

SEQ ID NO: 57249 - DNA, 110 bp, synthetic construct
  source 1..110: mol_type = other DNA
ggaggagccggaaagtgccctggcctgtatttgtagattggtagaatcctacatgacatttttgggattaaataatttgttgctgagtgaaaacaaacgtgagagctaga

SEQ ID NO: 57250 - DNA, 110 bp, synthetic construct
  source 1..110: mol_type = other DNA
gtaattcttttgaagggtgcagaatatcactatcctgactacacaatatatagcgtggtggtggtccagtacagaaataggggcaggtttgtggcagacatcacattata

SEQ ID NO: 57251 - DNA, 110 bp, synthetic construct
  source 1..110: mol_type = other DNA
cttctccaagcccagggcaaaggtttgtgatctcttagtgagttcctttggtccatggacaagcctagccttcccacgctcaagcacaccccgctagtattcccgagtgg

SEQ ID NO: 57252 - DNA, 110 bp, synthetic construct
  source 1..110: mol_type = other DNA
ggggagatatttaagtattggaatatgatagggttttctcatagtggaaattactaaacatacatagcacctacatcacttagagataaagtctaatgatttatggttga

SEQ ID NO: 57253 - DNA, 110 bp, synthetic construct
  source 1..110: mol_type = other DNA
ccgctttaataaactgctttgctcttgatcactttgaagtggcaattttccccctctcatatgagataaaatgaatatttcatctcaagcccaggagtcattttgcacat

SEQ ID NO: 57254 - DNA, 110 bp, synthetic construct
  source 1..110: mol_type = other DNA
ctcatatgagataaaatgaatatttcatctcaagcccaggagtcattttgcacatatcctgtgatgggaggctaatgagagccctgacagagacttcacgttggaaggga

SEQ ID NO: 57255 - DNA, 110 bp, synthetic construct
  source 1..110: mol_type = other DNA
tgtgcagtttcccaccggcagctgttactgcttccctccttcatgcatcatcttttcctccgacaccggttaagcaagagcacctcagctggggggcagtgggggggcag

SEQ ID NO: 57256 - DNA, 110 bp, synthetic construct
  source 1..110: mol_type = other DNA
tcctccgacaccggttaagcaagagcacctcagctggggggcagtgggggggcagtgctcggggctcacagcctctgctctggactcagcacccacccaacccccacccc

SEQ ID NO: 57257 - DNA, 110 bp, synthetic construct
  source 1..110: mol_type = other DNA
aacgaagcagaagataacaactgggatgattttacatttaatcaccaggcgtcttaagaaaggggatgcctttccattcgactgagtttcttatcgaaaaccaaagcaac

SEQ ID NO: 57258 - DNA, 110 bp, synthetic construct
  source 1..110: mol_type = other DNA
aagaaaggggatgcctttccattcgactgagtttcttatcgaaaaccaaagcaacgaagcagcttcctgaatgctaccttggacagggccggctcggcctctctctcacc

SEQ ID NO: 57259 - DNA, 110 bp, synthetic construct
  source 1..110: mol_type = other DNA
ttatattactcagtgaattttattacatttacagttgtactaggatcatcacaagagaggctctcgtctttagtaaaagctctcccagcctctagcagaggtgacccctt

SEQ ID NO: 57260 - DNA, 110 bp, synthetic construct
  source 1..110: mol_type = other DNA
gcattaaacaatgcactaaatctgatcggatttttaaaaatccatcttttttttttgcatcacctgaaagaactttagaaacaattatctccctttactgagcagctata

SEQ ID NO: 57261 - DNA, 110 bp, synthetic construct; identical to SEQ ID NO: 57260
  source 1..110: mol_type = other DNA

SEQ ID NO: 57262 - DNA, 110 bp, synthetic construct
  source 1..110: mol_type = other DNA
tcttaacctgctaagccacagtgggaaatccataaaaaagtttaaaaggtagaactgaaaaagcagccaccaaggactgtaattctgaactctgggagagatatgcttgg

SEQ ID NO: 57263 - DNA, 110 bp, synthetic construct
  source 1..110: mol_type = other DNA
gttaaccccaagatgagttaaaatactctttcctccacttaatgcaatttttcttcagattgcaacaggcaataataatttttgttaaggtcatagatcacagatctgaa

SEQ ID NO: 57264 - DNA, 110 bp, synthetic construct; identical to SEQ ID NO: 57263
  source 1..110: mol_type = other DNA

SEQ ID NO: 57265 - DNA, 110 bp, synthetic construct
  source 1..110: mol_type = other DNA
tgtgtgctcctgtcccacgactgcccataaaaacttagcatcacagaggaaaggatcataacaaactcatgccaaattgaggcttgcgttcttttagggtagagctgcat

SEQ ID NO: 57266 - DNA, 110 bp, synthetic construct
  source 1..110: mol_type = other DNA
tcataacaaactcatgccaaattgaggcttgcgttcttttagggtagagctgcatccattcctttattaattccttctgcttttgttgattacttcataaaggaaggcac

SEQ ID NO: 57267 - DNA, 110 bp, synthetic construct
  source 1..110: mol_type = other DNA
aattaaaatggaaaaatttaagatagagatttctgaaggcagcaaaagaaaaagagttgtacacaatggaatccccaaatggctattagctgatttctttgcaaagactt

SEQ ID NO: 57268 - DNA, 110 bp, synthetic construct
  source 1..110: mol_type = other DNA
aaggcagcaaaagaaaaagagttgtacacaatggaatccccaaatggctattagctgatttctttgcaaagactttgtagaccagaagggagtggcatggaatgttcaaa

SEQ ID NO: 57269 - DNA, 110 bp, synthetic construct
  source 1..110: mol_type = other DNA
tcctgttatttcttattgttcttggaactctatggccactacatgtagagctgtaggttagcctgcgagaggatgaacaacacatggcctactagctgcagtatcttgga

SEQ ID NO: 57270 - DNA, 110 bp, synthetic construct
  source 1..110: mol_type = other DNA
aattcatactttcatggagcttacactgtggatgtaaatatgtttgaaagaagtggagatggtggggaaaaatagatctatcattttaacttttaaggttccaaacattc

SEQ ID NO: 57271 - DNA, 110 bp, synthetic construct
  source 1..110: mol_type = other DNA
ggagcttacactgtggatgtaaatatgtttgaaagaagtggagatggtggggaaaaatagatctatcattttaacttttaaggttccaaacattctcctacattaagaaa

SEQ ID NO: 57272 - DNA, 110 bp, synthetic construct
  source 1..110: mol_type = other DNA
tggctgaccaacattcctcagtgcaaagcaaatagcttatgaaatttgcttttgattttcaaacaaaatgcatttgagccagcatcccaacatactgaaaaacaggagtt

SEQ ID NO: 57273 - DNA, 110 bp, synthetic construct
  source 1..110: mol_type = other DNA
cattttaagtacacaggcatatcagggaaaagtgggcctttttgggtctcagtctttttctcatgaaaccaactttaaattggggctgtatcaaaatcacgcagatccaa

SEQ ID NO: 57274 - DNA, 110 bp, synthetic construct
  source 1..110: mol_type = other DNA
ttacatgaaatctgggtatgtctgtgtatacacaccaaggaaaggctgtatgaagacataaccaagtaggcagctctcaccaagagcctgaccacacttgcaccctaatc

SEQ ID NO: 57275 - DNA, 110 bp, synthetic construct
  source 1..110: mol_type = other DNA
ccccccttcatcttgcagtttagtttggattgtaagatttacacaacttcttagagtgggcttctcaaattataatgtgcatacacattacctggggatttttattagaa

SEQ ID NO: 57276 - DNA, 110 bp, synthetic construct
  source 1..110: mol_type = other DNA
cccctttttcaggaaacactccgaatctcttgctcaactcatcactgggctattctgtgacctaaatttaggatttctgtttttatgtgagggactgcctcacatgaaca

SEQ ID NO: 57277 - DNA, 110 bp, synthetic construct
  source 1..110: mol_type = other DNA
tttcagatgaggagcattattagtgtgccacagttgcacacaaatatggtgatacaagaaagatatgagctaagaaatgaatcgcccagttttcaggaataaatgaaaac

SEQ ID NO: 57278 - DNA, 110 bp, synthetic construct
  source 1..110: mol_type = other DNA
aagaaagatatgagctaagaaatgaatcgcccagttttcaggaataaatgaaaaccaggtatagttggttaaacattttggggacagaaaatgtaagtgtttcttatctt

SEQ ID NO: 57279 - DNA, 110 bp, synthetic construct
  source 1..110: mol_type = other DNA
attggtctaggcactatggaccggtgcagataggcactccgtttgcacagcatgatatgtcctataaagaataagacgaagataaacctcatggcctcaaggggtttatg

SEQ ID NO: 57280 - DNA, 110 bp, synthetic construct; identical to SEQ ID NO: 57279
  source 1..110: mol_type = other DNA

SEQ ID NO: 57281 - DNA, 110 bp, synthetic construct
  source 1..110: mol_type = other DNA
tggatgctaaagaaaccacagctactgttttaattttaattgagctatactgcttcattggccattcactgtataaaacccaataatacacagtatttgcttagcacttc

SEQ ID NO: 57282 - DNA, 110 bp, synthetic construct
  source 1..110: mol_type = other DNA
cattggccattcactgtataaaacccaataatacacagtatttgcttagcacttcattttgaacactctacacaatttacttccatgataaccatacctggtaggtagta

SEQ ID NO: 57283 - DNA, 110 bp, synthetic construct
  source 1..110: mol_type = other DNA
ttacactcaggatatttccagaccttgccctatgtactccttcaattgactgtccatgtgtaccctttataataaacctataacagaaagtaaagcactcctctatgttc

SEQ ID NO: 57284 - DNA, 110 bp, synthetic construct
  source 1..110: mol_type = other DNA
taaatctttagttcctagtaccatcccttttccaacatccctttgttgcaaaaactcaaacatcctagcttcccccctcacctccctggaggggtttctcacagctacct

SEQ ID NO: 57285 - DNA, 110 bp, synthetic construct
  source 1..110: mol_type = other DNA
cctgataaaaatgtcctgttgtcatgaatgatgtctcatgcacagcttagttgatgagtacaatccatcattgggcaaacacatcatacccacaccttacctaaactcaa

SEQ ID NO: 57286 - DNA, 110 bp, synthetic construct
  source 1..110: mol_type = other DNA
atataccttttattctctgacaattgtcacaaatttcagtggatactgaatatcctgttgttggtgttcctcacatgattgcaaagccagaatttttgagaaaaatacaa

SEQ ID NO: 57287 - DNA, 110 bp, synthetic construct
  source 1..110: mol_type = other DNA
ataaaaggctggctatgcacagagcctgaagttctatatcagtccccagaggaacagatactctgccttccacctgaaagttgagctaagaagcaaagcagcggacagga

SEQ ID NO: 57288 - DNA, 110 bp, synthetic construct
  source 1..110: mol_type = other DNA
tatctggcacctatgggtaaaagttcacatttcatctggaattcagctttatcatggtattgaatatagcactgctttggcttttctttttggccttgaggcccctcttt

SEQ ID NO: 57289 - DNA, 110 bp, synthetic construct
  source 1..110: mol_type = other DNA
aaaacacccaccaagaagaccaagtccagtaaaccaaagctcctggtagttgacatccgaaatagtgaagagtatcctttatacatgcggttttaaagggtggtactgct

SEQ ID NO: 57290 - DNA, 110 bp, synthetic construct
  source 1..110: mol_type = other DNA
taatgccattgaattgcatacctgaaagttccagggtttgatatcttcaggctgcctgactgtctccagttcatctgagctatcagtttttggccaaacagaagtgaaga

SEQ ID NO: 57291 - DNA, 110 bp, synthetic construct
  source 1..110: mol_type = other DNA
tggggaaacagcacctgttggctagagttatttggcaggtgccctgaaagccatcggggatttgcctgctggaagacagacatggcactggccagctgctgctgctctgc

SEQ ID NO: 57292 - DNA, 110 bp, synthetic construct
  source 1..110: mol_type = other DNA
ggggatttgcctgctggaagacagacatggcactggccagctgctgctgctctgcactgtccctttacagaaaatctacccagagactgtgaggagctgtgcagttctgc

SEQ ID NO: 57293 - DNA, 110 bp, synthetic construct
  source 1..110: mol_type = other DNA
agtggcaagagtcccaggtaactaaatcagaagctaaggcagagcacagcttccactattagcttctaccttaactcccggacgcatcttcctacacacacagacacaca

SEQ ID NO: 57294 - DNA, 110 bp, synthetic construct
  source 1..110: mol_type = other DNA
ctattagcttctaccttaactcccggacgcatcttcctacacacacagacacacacacccaccccaattccttctttttcaggagcacttcaaggcctttatcttctaac

SEQ ID NO: 57295 - DNA, 110 bp, synthetic construct
  source 1..110: mol_type = other DNA
taggcttctagagtctacagaggcagtcctaagtcctgaagaaaccactcaatgtttgtggtttagctactcaatagaatactatgcagccattcacacgaggaggtaga

SEQ ID NO: 57296 - DNA, 110 bp, synthetic construct
  source 1..110: mol_type = other DNA
acaattcctccaccacctgtctatccctcctcgatctgtttattccatccactgattatgaaagctctcaatcaagagactgaccatcccctcggtctgaggcactaggc

SEQ ID NO: 57297 - DNA, 110 bp, synthetic construct
  source 1..110: mol_type = other DNA
ttatgaaagctctcaatcaagagactgaccatcccctcggtctgaggcactaggctccctgttgtaaagcaatgagcacattcttgtcttcttgggatccacattcttga

SEQ ID NO: 57298 - DNA, 110 bp, synthetic construct
  source 1..110: mol_type = other DNA
gctggggtcccagctctaccacttgggaaatgtgtgacctatgcagactacccagctcttctctgctctaaaatggagatcacaggttgaaccagaggaagttctcagca

SEQ ID NO: 57299 - DNA, 110 bp, synthetic construct
  source 1..110: mol_type = other DNA
ctcttctctgctctaaaatggagatcacaggttgaaccagaggaagttctcagcatggccatttttactttacaaatagtaaacaacacggtgcagacagcatttaccca

SEQ ID NO: 57300 - DNA, 110 bp, synthetic construct
  source 1..110: mol_type = other DNA
ggaatgcaatcagcaaaatccacactgtgggaaactctgaaggacaaatgccatggttatgtaaacaaataaactgcaggggaaaaaaaggagacagggatggtatggta

SEQ ID NO: 57301 - DNA, 110 bp, synthetic construct
  source 1..110: mol_type = other DNA
gggaagagaggatccactaggaggtaaagtgctaggcactccactcagctgctaattgagaagcaaagtaagcccagaactctccttattatgcaaaagccagtgagttt

SEQ ID NO: 57302 - DNA, 110 bp, synthetic construct
  source 1..110: mol_type = other DNA
tggtctttaggacctgatgtgaccctagctgtccttttctgacctgatctcctacttctcctccctctggctcacttccctccagccagttcttatgttctgggaagatg

SEQ ID NO: 57303 - DNA, 110 bp, synthetic construct
  source 1..110: mol_type = other DNA
ttctcctccctctggctcacttccctccagccagttcttatgttctgggaagatgtcagcaatatttccacacataagaatttttttcttgctattccctctgcctaaaa

SEQ ID NO: 57304 - DNA, 110 bp, synthetic construct
  source 1..110: mol_type = other DNA
atcaattagtagaatgtcaggaatgccataatctctaccatcaagattgccacaagccccaggtgacagacaaggaagtgaacgaccctcgccttgtgtggtattgtgcc

SEQ ID NO: 57305 - DNA, 110 bp, synthetic construct
  source 1..110: mol_type = other DNA
gccccaggtgacagacaaggaagtgaacgaccctcgccttgtgtggtattgtgcccgatgtaccagacaaatgaagagaatggtaggaatcatttttctccatcttaaac

SEQ ID NO: 57306 - DNA, 110 bp, synthetic construct
  source 1..110: mol_type = other DNA
atgtggtgtacatacacgatggaacactgttcaaccccagaaaggaaggaaatcctatcacataccataagaagagtggttatctttagggggctataaccggggagtaa

SEQ ID NO: 57307 - DNA, 110 bp, synthetic construct
  source 1..110: mol_type = other DNA
tatcacataccataagaagagtggttatctttagggggctataaccggggagtaaccatgagtgatctcatggggagctgcaaaaggcttatatctagacctgggtgttg

SEQ ID NO: 57308 - DNA, 110 bp, synthetic construct
  source 1..110: mol_type = other DNA
tcactaatgtgaccctgtaaataccctttgctgaataagttaataagttaaaaacttgcagatttccaatttatagtgtatcagtgcagatgtggttttgtgcttctgga

SEQ ID NO: 57309 - DNA, 110 bp, synthetic construct
  source 1..110: mol_type = other DNA
ttgcagatttccaatttatagtgtatcagtgcagatgtggttttgtgcttctggattgtcttttctgacttaaggtctccaaatgcttaaattactgcttagattatatc

SEQ ID NO: 57310 - DNA, 110 bp, synthetic construct
  source 1..110: mol_type = other DNA
gaaagaaaaaaaatcactgtcatttaggatttagtgtggtgactttgggaatgactttttttttctggccatgcccatggcatgtggaaattcctgggctggggctcaaa

SEQ ID NO: 57311 - DNA, 110 bp, synthetic construct
  source 1..110: mol_type = other DNA
tggtggaattgtcagtcgtgctgcctgctccccctcccctgcgctacagtgggcgtgtgacccagctggccacagcaattggcctagaatggcagcttcttaggcacagc

SEQ ID NO: 57312 - DNA, 110 bp, synthetic construct
  source 1..110: mol_type = other DNA
tacctaacttggctctggccccaaatcccatctctaccacagtttcatagctgcgggagttactgggatgtgcactctactccaccccttaatgaagggccttttgcttt

SEQ ID NO: 57313 - DNA, 110 bp, synthetic construct
  source 1..110: mol_type = other DNA
ttagggcatgtcccctgttaacaagaacattggaggtttagggaaataaaacaccaaatcaatgtgctagaggtattgtttatgtttaattacaaatgcagctggctgtt

SEQ ID NO: 57314 - DNA, 110 bp, synthetic construct
  source 1..110: mol_type = other DNA
aacattggaggtttagggaaataaaacaccaaatcaatgtgctagaggtattgtttatgtttaattacaaatgcagctggctgtttattctgtcaagttttctatactgc

SEQ ID NO: 57315 - DNA, 110 bp, synthetic construct
  source 1..110: mol_type = other DNA
cttgttctgtttccacatcagcccttccttcccagagttgttcattcattcggcgcacatttttgagtacctgatatttgccaggccatgttctaattactggaggtaaa

SEQ ID NO: 57316 - DNA, 110 bp, synthetic construct
  source 1..110: mol_type = other DNA
tcctctgagggtaaaggccaaaggatattggccctatgatgtggcactctacaatatgaccttatccccacaactcttttcacagcttattgtgctccagccatagcctt

SEQ ID NO: 57317 - DNA, 110 bp, synthetic construct
  source 1..110: mol_type = other DNA
atgaccttatccccacaactcttttcacagcttattgtgctccagccatagccttcctgtgtttgctagcacactttagggcccttctcttgctgttctcttggcttgat

SEQ ID NO: 57318 - DNA, 110 bp, synthetic construct
  source 1..110: mol_type = other DNA
gccccaagttatagtgtacattttaaatggcatcaaaacagaaataaaaagactataatttttttttcttcaaaaaggttcttatttctggaaacgctagactctaaggg

SEQ ID NO: 57319 - DNA, 110 bp, synthetic construct; identical to SEQ ID NO: 57318
  source 1..110: mol_type = other DNA

SEQ ID NO: 57320 - DNA, 110 bp, synthetic construct
  source 1..110: mol_type = other DNA
aaacttcaaatactgttactcagattaatttgcaattacattggtacaaactgaatcctcttggtccaataactcatagctggaatgaacaccaaaggtgaatgtataaa

SEQ ID NO: 57321 - DNA, 110 bp, synthetic construct
  source 1..110: mol_type = other DNA
ctgtctgcctccttagctacgtgctaactcacagatgaaggatacctcaagatgagaagagacacggggcctcctgagactggctaggaacctgaagcctcaccttgagc

SEQ ID NO: 57322 - DNA, 110 bp, synthetic construct
  source 1..110: mol_type = other DNA
gaagagacacggggcctcctgagactggctaggaacctgaagcctcaccttgagctaggtttgacactaacacataatttttcccagcaatctggggaatgagaatggtc

SEQ ID NO: 57323 - DNA, 110 bp, synthetic construct
  source 1..110: mol_type = other DNA
atcacctgaaaaaaaggcctaaaggcatttaaagttacaaatgctagatataattttattaagctggaacctaaccatggtactcttggctatacagcagaattttgttc

SEQ ID NO: 57324 - DNA, 110 bp, synthetic construct
  source 1..110: mol_type = other DNA
ttattaagctggaacctaaccatggtactcttggctatacagcagaattttgttcagggggtttcagtttcactgctgaagtgatgttaagtgatgattatcaaccttta

SEQ ID NO: 57325 - DNA, 110 bp, synthetic construct; identical to SEQ ID NO: 57323
  source 1..110: mol_type = other DNA

SEQ ID NO: 57326 - DNA, 110 bp, synthetic construct; identical to SEQ ID NO: 57324
  source 1..110: mol_type = other DNA

SEQ ID NO: 57327 - DNA, 110 bp, synthetic construct
  source 1..110: mol_type = other DNA
ctcttagaccttggaaagatctcatgcatttttaacttaggacttctgtatagataagctgtatgcttgtgttatctcatttcctcattcttgtgtgcaaaagggagtgt

SEQ ID NO: 57328 - DNA, 110 bp, synthetic construct
  source 1..110: mol_type = other DNA
gggttcttaacctgctgagccataactggagctcccagtaagaacccttaaaagctaagagacaatgaggaaattattctcaaagagcataatcaagtaactccccattt

SEQ ID NO: 57329 - DNA, 110 bp, synthetic construct
  source 1..110: mol_type = other DNA
taagagacaatgaggaaattattctcaaagagcataatcaagtaactccccatttcttcaggtagggacttcatgagagctgccaagcaggattttagaattgcagcaga

SEQ ID NO: 57330 - DNA, 110 bp, synthetic construct
  source 1..110: mol_type = other DNA
gctgtctgcagatgtaatgaaccaagtgggaggtaatgagaagtgactgtcgcgccatctctagggcccgttcctcccaccacgcaattacactgtgaccctagagaaag

SEQ ID NO: 57331 - DNA, 110 bp, synthetic construct
  source 1..110: mol_type = other DNA
ttctctgcttcaaagttgagtcctttgagtagaattctatggctttcaaggttaaatatctcatctatgagctttcagagcactctgtacttcatctctcctgatattct

SEQ ID NO: 57332 - DNA, 110 bp, synthetic construct
  source 1..110: mol_type = other DNA
ctaaaggaaagagagatccagatacagcaagcacagagggccacaaacaagctgaacagaaacaggcccattctaagacatagtataaaaaaaaaactgcaaaatttaaa

SEQ ID NO: 57333 - DNA, 110 bp, synthetic construct
  source 1..110: mol_type = other DNA
agcaagcacagagggccacaaacaagctgaacagaaacaggcccattctaagacatagtataaaaaaaaaactgcaaaatttaaagacagaggattccaaaggcagcaag

SEQ ID NO: 57334 - DNA, 110 bp, synthetic construct
  source 1..110: mol_type = other DNA
atccagatacagcaagcacagagggccacaaacaagctgaacagaaacaggcccattctaagacatagtataaaaaaaaaactgcaaaatttaaagacagaggattccaa

SEQ ID NO: 57335 - DNA, 110 bp, synthetic construct; identical to SEQ ID NO: 57334
  source 1..110: mol_type = other DNA

SEQ ID NO: 57336 - DNA, 110 bp, synthetic construct
  source 1..110: mol_type = other DNA
agtcagattcctccagctccatttttatttctcaagattgtttcagctattcagggtcttttgtgtttccaagaaaattaaggtttttttttgttcaagttcgtgaaaaa

SEQ ID NO: 57337 - DNA, 110 bp, synthetic construct
  source 1..110: mol_type = other DNA
gattgtttcagctattcagggtcttttgtgtttccaagaaaattaaggtttttttttgttcaagttcgtgaaaaatgccatatgtaatttaatagggattgcactgaatc

SEQ ID NO: 57338 - DNA, 110 bp, synthetic construct
  source 1..110: mol_type = other DNA
acttcaatatgctacaggtgcagctataaaaagaaaaaacctccaacaaaattccaggaccagatggcttcattggaaaattctatcaaacatttggaaaagagttaatg

SEQ ID NO: 57339 - DNA, 110 bp, synthetic construct
  source 1..110: mol_type = other DNA
acaaaattccaggaccagatggcttcattggaaaattctatcaaacatttggaaaagagttaatgcctatccttctgtaattattctaaaaaactgcagagaaaggaata

SEQ ID NO: 57340 - DNA, 110 bp, synthetic construct
  source 1..110: mol_type = other DNA
gatgtgggacaaatacaggtaggtaacctgagaagtggagctatagatgaactcagaatgaaactcttgtatgactgcagtattattacatccctcaatttctagttcct

SEQ ID NO: 57341 - DNA, 110 bp, synthetic construct
  source 1..110: mol_type = other DNA
gggagttgatcattcatatccttggtctgtctttattcccaacagacaggactgccacaccttcagcagttcccaagagatttctaacagatgacctattcaatttatca

SEQ ID NO: 57342 - DNA, 110 bp, synthetic construct
  source 1..110: mol_type = other DNA
caaacaaatccttccaaatctgacttaatgaaacaagatcctacaaattctctaaggcattcattattgatgtattattctgtgaatgctatctgctcctctttggtatt

SEQ ID NO: 57343 - DNA, 110 bp, synthetic construct
  source 1..110: mol_type = other DNA
tactttgtattctgtcctcattgactaatgagaattggtccctctcctctttataacatcccttaacaaatctgcagacagttttgtttccccctagtcttctcctctcc

SEQ ID NO: 57344 - DNA, 110 bp, synthetic construct
  source 1..110: mol_type = other DNA
gagtgcccactaattcttcgccaaagctccttgctcttgcctgacctggcctggttttcttcaggaccaaggaagtgagcagaccagctacaccaaatctgtaactgaat

SEQ ID NO: 57345 - DNA, 110 bp, synthetic construct
  source 1..110: mol_type = other DNA
aacaactacttctttcctgtgtagagtcatcattcacttcttttaaacacctgcagcattaaataatatactgtcttccatttacatttgtgtacctgtgcacgcatctg

SEQ ID NO: 57346 - DNA, 110 bp, synthetic construct
  source 1..110: mol_type = other DNA
atgtggtcctcatgacactcctattaggtcactaagcaggtatattttgtttaagcagcttatttctcttcccaaaagctgttgttatagcactccttgcctttgacatt

SEQ ID NO: 57347 - DNA, 110 bp, synthetic construct
  source 1..110: mol_type = other DNA
cctgggaacttccatatgtcaaaggtacagccctaaaaacccaaaagaaaaacaaacaaaaaaacaaacaaaaaaggcaagtttttgaagatagttagtgaaaaagagga

SEQ ID NO: 57348 - DNA, 110 bp, synthetic construct; identical to SEQ ID NO: 57347
  source 1..110: mol_type = other DNA

SEQ ID NO: 57349 - DNA, 110 bp, synthetic construct
  source 1..110: mol_type = other DNA
cacaaccaattctatacatgcataattttacacatgcacttcttgctttgcacaagtttcagttaccaagattattaagttacataacaccagtcccctcaacagcacag

SEQ ID NO: 57350 - DNA, 110 bp, synthetic construct
  source 1..110: mol_type = other DNA
gtttcagttaccaagattattaagttacataacaccagtcccctcaacagcacagcttaaatttttgctaccacgtcatattaactgtgagtacttgaataaagtaaaaa

SEQ ID NO: 57351 - DNA, 110 bp, synthetic construct; identical to SEQ ID NO: 57349
  source 1..110: mol_type = other DNA

SEQ ID NO: 57352 - DNA, 110 bp, synthetic construct; identical to SEQ ID NO: 57350
  source 1..110: mol_type = other DNA

SEQ ID NO: 57353 - DNA, 110 bp, synthetic construct
  source 1..110: mol_type = other DNA
taccatctgtatacccaatcaatggaaaattgtgcactaataatcaatcaatggcatgtagtgtcatcatgagtagttaacttatcacctatggttacttgggatgaaag

SEQ ID NO: 57354 - DNA, 110 bp, synthetic construct
  source 1..110: mol_type = other DNA
ctagcaatcacctcatctcagtcttggaaatggtatttttttcttgagttctatatgcatgtaatggctagctcttatgcactcaatactacatagtatcttaatctcag

SEQ ID NO: 57355 - DNA, 110 bp, synthetic construct
  source 1..110: mol_type = other DNA
actacttctgcctagaaattatttcattggaactattacagtaatatccttatatatttctgctgtttctcatgtatcttctacattgctgccagaagataaacctgata

SEQ ID NO: 57356 - DNA, 110 bp, synthetic construct
  source 1..110: mol_type = other DNA
ctgcctcacctcaccagaattctttctcagtgattactcttacttctggggatgtgcctgcttgtcagagctgggacatatgcaagggaggctggaaagggagattctct

SEQ ID NO: 57357 - DNA, 110 bp, synthetic construct
  source 1..110: mol_type = other DNA
tctctagttccatggagggtggcatggtggttgtttttagctatgaacatgtatttttttttaagattttgtttaattaggaattcccgtcgtggcgcagtggttaacga

SEQ ID NO: 57358 - DNA, 110 bp, synthetic construct; identical to SEQ ID NO: 57357
  source 1..110: mol_type = other DNA

SEQ ID NO: 57359 - DNA, 110 bp, synthetic construct
  source 1..110: mol_type = other DNA
tcataatttatcatcattaattaacgcttaagcaaacaattcataaaatatctctttctaccaggaaacaatgagcagaatttgacctttgactgtatcaccttagacca

SEQ ID NO: 57360 - DNA, 110 bp, synthetic construct
  source 1..110: mol_type = other DNA
ttctaccaggaaacaatgagcagaatttgacctttgactgtatcaccttagaccagagctgcagccagggtttgccttcctgacaatctagaaaggaagctgctttttgc

SEQ ID NO: 57361 - DNA, 110 bp, synthetic construct; identical to SEQ ID NO: 57359
  source 1..110: mol_type = other DNA

SEQ ID NO: 57362 - DNA, 110 bp, synthetic construct; identical to SEQ ID NO: 57360
  source 1..110: mol_type = other DNA

SEQ ID NO: 57363 - DNA, 110 bp, synthetic construct
  source 1..110: mol_type = other DNA
tacgtaacaggtaatcctgttgtcattgatggaggctggagcttgtgatttcaggatctccttgcctgggaaggcagtcacttcctgtccacagtgaaccggttatgaag

SEQ ID NO: 57364 - DNA, 110 bp, synthetic construct
  source 1..110: mol_type = other DNA
atctccttgcctgggaaggcagtcacttcctgtccacagtgaaccggttatgaagaacagtcacccatcctctctgctatcaatggcatattaatgaaaacaagaccttt

SEQ ID NO: 57365 - DNA, 110 bp, synthetic construct
  source 1..110: mol_type = other DNA
taaagtccattaatttgttccaaaattatgatgcttccaaacaatcagataccgttgcaacttttttttttcctttttcggccacgcccatgggatatggaagttccctg

SEQ ID NO: 57366 - DNA, 110 bp, synthetic construct
  source 1..110: mol_type = other DNA
tggtcatttaaaaatagctagttttaataagtcctaagaaatgggcaaaaggcatgaaaacatggaaacaagtgacaattattttggagctaaaaaggcgcattttagga

SEQ ID NO: 57367 - DNA, 110 bp, synthetic construct
  source 1..110: mol_type = other DNA
gaaaacatggaaacaagtgacaattattttggagctaaaaaggcgcattttaggaataatgcaaacttggcttatttcttgccatgtccaggattcgttcagtaatttag

SEQ ID NO: 57368 - DNA, 110 bp, synthetic construct
  source 1..110: mol_type = other DNA
gtgtctattagggatattttgaattagcatctaccaagtgccctagggatagctccatggaaagatactttacaatgccaagttttggatttggaggttcctaaaccatg

SEQ ID NO: 57369 - DNA, 110 bp, synthetic construct
  source 1..110: mol_type = other DNA
catggaaagatactttacaatgccaagttttggatttggaggttcctaaaccatgtaaatcatgtacatttaagcccacagcataagttagttgaggcctatatgaattc

SEQ ID NO: 57370 - DNA, 110 bp, synthetic construct
  source 1..110: mol_type = other DNA
accagaaagagttcccttgtggggcatcagtttaaggatccattgttgtcactacagcagcttggtttgttgccgtggtgctggttcaatccctgacctgggaacttccg

SEQ ID NO: 57371 - DNA, 110 bp, synthetic construct
  source 1..110: mol_type = other DNA
tactgacaaaaggaacccaacaagcaatgtgggaaagaaatatagacatttcttcaaagaaggtatatggatggcaaagcacgtggaaggatgctcaacatcattagtca

SEQ ID NO: 57372 - DNA, 110 bp, synthetic construct
  source 1..110: mol_type = other DNA
agaaatatagacatttcttcaaagaaggtatatggatggcaaagcacgtggaaggatgctcaacatcattagtcatcaggaaaatgcaagtaagcacaatgagatactac

SEQ ID NO: 57373 - DNA, 110 bp, synthetic construct
  source 1..110: mol_type = other DNA
ggccagaaatggaacctgcgacccagcgctcccaggaggccaaggatcccatatcgccagagtgggattttaaatttgcctgtgcattaagtacaggtttctggaacctc

SEQ ID NO: 57374 - DNA, 110 bp, synthetic construct
  source 1..110: mol_type = other DNA
gccagagtgggattttaaatttgcctgtgcattaagtacaggtttctggaacctcaggaacctcttctatggagctttataaatcaggaggttgtagtccactaacatga

SEQ ID NO: 57375 - DNA, 110 bp, synthetic construct
  source 1..110: mol_type = other DNA
agtgtacttattctctgaaggatcaggtagtaaatattttagcttttggggccatatggcctttgtgcaattgtagtatgaaagcaaccaaaggtaatgtataaacaatg

SEQ ID NO: 57376 - DNA, 110 bp, synthetic construct
  source 1..110: mol_type = other DNA
atggcctttgtgcaattgtagtatgaaagcaaccaaaggtaatgtataaacaatgagcatggatgctgtctggctctctgaggtgctgtgataaaataccaaagactggg

SEQ ID NO: 57377 - DNA, 110 bp, synthetic construct
  source 1..110: mol_type = other DNA
ggaagtgtagggaattctggtcagacagctcttctctcctgggaactaggatagaatgttgtctgcttggagtgataggcgccaagttagacatttgaggaaaatgagaa

SEQ ID NO: 57378 - DNA, 110 bp, synthetic construct
  source 1..110: mol_type = other DNA
aaattcttgctttttactttcttcctattcgctctactttataaatctggatgcaaggagaatggttctagccctaaccttccggagtgaccaccccccccccgccaccg

SEQ ID NO: 57379 - DNA, 110 bp, synthetic construct
  source 1..110: mol_type = other DNA
aggagaatggttctagccctaaccttccggagtgaccaccccccccccgccaccgttccactcatgagtccacgctggaccaagttccacagcagaatgctccagaatgt

SEQ ID NO: 57380 - DNA, 110 bp, synthetic construct
  source 1..110: mol_type = other DNA
gcagctggctgagtgtccagtttcttggagtggtgttagtctcctggtggttggggccagggtgtgggagctctggggctggtgccagtgtgctggtttattggctgtgt

SEQ ID NO: 57381 - DNA, 110 bp, synthetic construct
  source 1..110: mol_type = other DNA
gccagggtgtgggagctctggggctggtgccagtgtgctggtttattggctgtgtcataataaggcagggttcaaggcttcagtgatcctagggctgcccattggtgggt

SEQ ID NO: 57382 - DNA, 110 bp, synthetic construct
  source 1..110: mol_type = other DNA
tcaaggcacgttcttggggagaggaaggcaatgacgttgattctatcatctttgttcagagagatcaaagttctgtgactattctgacgtgctaagtaactttttattta

SEQ ID NO: 57383 - DNA, 110 bp, synthetic construct
  source 1..110: mol_type = other DNA
tcagagagatcaaagttctgtgactattctgacgtgctaagtaactttttatttattttttatttatttttgctttttagggtggtacccgcagcatatggaagttccca

SEQ ID NO: 57384 - DNA, 110 bp, synthetic construct
  source 1..110: mol_type = other DNA
ctatcaaacaactgaaccaactgacattcacagaacattcatccaacttcaccaggctacccatccttttaaagagcacaaagaacattcactaacaggacaattttcta

SEQ ID NO: 57385 - DNA, 110 bp, synthetic construct
  source 1..110: mol_type = other DNA
gctacccatccttttaaagagcacaaagaacattcactaacaggacaattttctatccataaaacaaatctcaatacatctaagagaatcaaactataccaaggattctc

SEQ ID NO: 57386 - DNA, 110 bp, synthetic construct
  source 1..110: mol_type = other DNA
ttgttttaaatgtctcctttgttcaagttcaaggacagaatgagaataaagagattcttctctctgaaacatacccatagaacacaccatattcactaatggtaagagaa

SEQ ID NO: 57387 - DNA, 110 bp, synthetic construct
  source 1..110: mol_type = other DNA
tcttctctctgaaacatacccatagaacacaccatattcactaatggtaagagaaaagtgcatagtatatattttaaattaaggtatgttgaaatgctccttgaacgctc

SEQ ID NO: 57388 - DNA, 110 bp, synthetic construct
  source 1..110: mol_type = other DNA
taagcactgaaacctcgatcctaagctttagtgtttcccagagatgaccagtttgtagaagaacattgctatgccagagctactaaataccatagtcattttctcatatt

SEQ ID NO: 57389 - DNA, 110 bp, synthetic construct
  source 1..110: mol_type = other DNA
tcccagagatgaccagtttgtagaagaacattgctatgccagagctactaaataccatagtcattttctcatattacgggctttataataaaatctttaagttaaatata

SEQ ID NO: 57390 - DNA, 110 bp, synthetic construct
  source 1..110: mol_type = other DNA
atggaaaaagagggaggaggagcagatttagtgaggaaggtaagaccaagtttcattttggatacttggctattcaggtgaagatgtaagggagactttgaccggaatct

SEQ ID NO: 57391 - DNA, 110 bp, synthetic construct
  source 1..110: mol_type = other DNA
ttttggatacttggctattcaggtgaagatgtaagggagactttgaccggaatctaaaatgggagagaagatgggctcgagacccattttggaggccctaagaaaggcga

SEQ ID NO: 57392 - DNA, 110 bp, synthetic construct
  source 1..110: mol_type = other DNA
tctgtgcattacctcctccgctggctggagtttgcctctcctagggcaaagctcaaagggtcatggcaaacgtcagggtgatgcctttgaaaacagcagtgttacaaact

SEQ ID NO: 57393 - DNA, 110 bp, synthetic construct
  source 1..110: mol_type = other DNA
tagccattgctcacccaggtaccaagttaggatggttagccattaccctgcaccgtactgcctatcatttccacttgctgacgcatctttacatgctccctcctcttatt

SEQ ID NO: 57394 - DNA, 110 bp, synthetic construct
  source 1..110: mol_type = other DNA
tggtattttgttctggcagatctggcaaacggatatagatagtgattagtgccaccttttagtgaacagctatgacatgtcagggactgtagtaggaggcctttatgaac

SEQ ID NO: 57395 - DNA, 110 bp, synthetic construct
  source 1..110: mol_type = other DNA
aaatatttcattaagcctcctccatttattatcctgtaattggcatctgtacccaaattgctgagttcatttgggctgcctgtatctatgagatgtataatttaaagaaa

SEQ ID NO: 57396 - DNA, 110 bp, synthetic construct
  source 1..110: mol_type = other DNA
aaagagcttaaagcatcccctttctttactctttctaacactctgtgaaatatatagagtgtccagataggagtaatagtctctactttaattcttcaataactgtttga

SEQ ID NO: 57397 - DNA, 110 bp, synthetic construct
  source 1..110: mol_type = other DNA
agagtgtccagataggagtaatagtctctactttaattcttcaataactgtttgatcataattgtacagtgatctcacatggaattctgcatttatgtcttgagaatgtg

SEQ ID NO: 57398 - DNA, 110 bp, synthetic construct
  source 1..110: mol_type = other DNA
tgatggagtgggtgaaaagaaatcactgctcaggctagccaagagacttctctgtttctgtctatgcaaactgatcatcagcttgaaattatcttcacactataggcaat

SEQ ID NO: 57399 - DNA, 110 bp, synthetic construct
  source 1..110: mol_type = other DNA
aggaacattgacacaattaatttgattgtaataatagtcaaaaatcacctggcctgaatgggacacggccatgcaagacgtgggaagagtacaggcttgacatcatccag

SEQ ID NO: 57400 - DNA, 110 bp, synthetic construct; identical to SEQ ID NO: 57399
  source 1..110: mol_type = other DNA

SEQ ID NO: 57401 - DNA, 110 bp, synthetic construct
  source 1..110: mol_type = other DNA
catataatagtctacagggaacttttgacctcttgagctctctgcagaaggacaagttcaaggtgcccaccacaggcaacatcctctagcatggtttcttagaggcattt

SEQ ID NO: 57402 - DNA, 110 bp, synthetic construct
  source 1..110: mol_type = other DNA
gttcaaggtgcccaccacaggcaacatcctctagcatggtttcttagaggcatttcccagtatggagtgaagaggccttcccaacggcagagaactttcagtgtgcatta

SEQ ID NO: 57403 - DNA, 110 bp, synthetic construct
  source 1..110: mol_type = other DNA
tgttcacaatccatttagacaaggatgagtggggctgttccatgattaaccagtccagctaagctatggctaacctttagttaaaacaagaaatctcaagaaatgtcatt

SEQ ID NO: 57404 - DNA, 110 bp, synthetic construct
  source 1..110: mol_type = other DNA
acagtctccttcaggcacttttcccaggagtttagtgttaccaaatatttgtctacaggattttaaattttttgttattttggggggccgaaccctcagcatatggaagt

SEQ ID NO: 57405 - DNA, 110 bp, synthetic construct
  source 1..110: mol_type = other DNA
acgtcttcccccaaattcatatgttgaaatcataatctccagtcttatagtattaggaggtgaaccaatgggagataaggacgttattagggtggagccctcatgaatgg

SEQ ID NO: 57406 - DNA, 110 bp, synthetic construct
  source 1..110: mol_type = other DNA
ggaggtgaaccaatgggagataaggacgttattagggtggagccctcatgaatggaattttggccacttacaaaagaggctccaacacacaacctaaatgtccactgaca

SEQ ID NO: 57407 - DNA, 110 bp, synthetic construct
  source 1..110: mol_type = other DNA
aatgagatgaagaatggagagcattgatcacagtgcttgatagctgtaaacacgaaataaaacttcctttcaacttctgcaaagtgaaatctgcttttagagtcagggtt

SEQ ID NO: 57408 - DNA, 110 bp, synthetic construct
  source 1..110: mol_type = other DNA
cagatgctttgtttctacatgctggcagccatgctttcaaaagttgtctacatggcgtcctcgtcttcatttcccttcaactcgagtcccctctactaaagctatttaac

SEQ ID NO: 57409 - DNA, 110 bp, synthetic construct
  source 1..110: mol_type = other DNA
cgtcctcgtcttcatttcccttcaactcgagtcccctctactaaagctatttaacttctattcctaaggtcatctgatattttcatggtgacaaattcattggctaaact

SEQ ID NO: 57410 - DNA, 110 bp, synthetic construct
  source 1..110: mol_type = other DNA
cacatgccaacgtgattttagagactagaggggacctgtcccaggtgctgtggaaagttccagctactcagaagttgaggcactggcggtggcacgctgcccagatccaa

SEQ ID NO: 57411 - DNA, 110 bp, synthetic construct
  source 1..110: mol_type = other DNA
agttccagctactcagaagttgaggcactggcggtggcacgctgcccagatccaaagagagctcccacctcgttgggtccctatttccccccgtcaagaagcccacgacg

SEQ ID NO: 57412 - DNA, 110 bp, synthetic construct
  source 1..110: mol_type = other DNA
gggttctttgaaagacaaaatgaaatcatgtgcttggatgaactaagtgctcagctcaggactggtgctccacacacatggattccctttgtcagattgctcattagcca

SEQ ID NO: 57413 - DNA, 110 bp, synthetic construct
  source 1..110: mol_type = other DNA
cagaactattcattgctcctttcaggtgtgttcagtttttatagtgtgtgtgtgttctcttgttttggttctcttagaactattcctgcttcagtgcagtattcatagac

SEQ ID NO: 57414 - DNA, 110 bp, synthetic construct
  source 1..110: mol_type = other DNA
tctcttgttttggttctcttagaactattcctgcttcagtgcagtattcatagactcattaaaataaggagttaatatctttgcaagaaccacttgaaataggtttattt

SEQ ID NO: 57415 - DNA, 110 bp, synthetic construct; identical to SEQ ID NO: 57413
  source 1..110: mol_type = other DNA

SEQ ID NO: 57416 - DNA, 110 bp, synthetic construct; identical to SEQ ID NO: 57414
  source 1..110: mol_type = other DNA

SEQ ID NO: 57417 - DNA, 110 bp, synthetic construct
  source 1..110: mol_type = other DNA
tccctttactgaaaactaactcaccatagaattggggtacacataagatttttgaagaagagaagtatatccttttaaaaagcagtgaatactttagctgtcatctcact

SEQ ID NO: 57418 - DNA, 110 bp, synthetic construct
  source 1..110: mol_type = other DNA
tgttttttgctgcacccatggcatgcagaagtccctcggccagggattaaacctgtagcacaccagtgacaatgccagatccataaccactagactaccagggaactccc

SEQ ID NO: 57419 - DNA, 110 bp, synthetic construct
  source 1..110: mol_type = other DNA
tagcacaccagtgacaatgccagatccataaccactagactaccagggaactcccaatgaccttttacattctgaaaaatattgaaatatatataaattgaatatattat

SEQ ID NO: 57420 - DNA, 110 bp, synthetic construct
  source 1..110: mol_type = other DNA
ctaacatctgtgccatgatgggctcccattttaagaaaaatctagaaattagtgtcccagttgttcgaaatctggacattatttcattcctgtagcatttctctaatgtg

SEQ ID NO: 57421 - DNA, 110 bp, synthetic construct
  source 1..110: mol_type = other DNA
cccaattattaaattcttatcttgtaagaaatatttgagtttttttcctgtggatattttccagctgtaagagtcgtctactatcatttgtggaagagacttagagaccc

SEQ ID NO: 57422 - DNA, 110 bp, synthetic construct
  source 1..110: mol_type = other DNA
attttccagctgtaagagtcgtctactatcatttgtggaagagacttagagaccccctccagctcccagcctcacagaggaggaaaacagatgaggtgtggcaggccttg

SEQ ID NO: 57423 - DNA, 110 bp, synthetic construct
  source 1..110: mol_type = other DNA
gatacctcttcgcagctaaacaaacaaatgtggagcgatgactagaattttatgttccacgtgcccaggatgcagttctagttggccacaaagatatatctttagaagtc

SEQ ID NO: 57424 - DNA, 110 bp, synthetic construct
  source 1..110: mol_type = other DNA
atcagtaaggacaaaaagaaaaaatagcacacaggcaggcacccaaaccagaggcagtggtgactcagctcttccacagggcttcagcaccccctccccacacccctagc

SEQ ID NO: 57425 - DNA, 110 bp, synthetic construct
  source 1..110: mol_type = other DNA
aacatcaattttcactgctctaaatgcagccatgcaaagcccctccaaagtgggtactagcttctctgcccagcagtgtttgaaccatgacactttctgctctttttttc

SEQ ID NO: 57426 - DNA, 110 bp, synthetic construct
  source 1..110: mol_type = other DNA
gctgtttaagccctagaagggcacctcctcttatttcaattcctgctcttactattgtcccataagtgagtaaattacaagctggttttcagttttggttggccatgcga

SEQ ID NO: 57427 - DNA, 110 bp, synthetic construct
  source 1..110: mol_type = other DNA
ctcattggaagtattcacaaagacctgctcaccctgccccaggtgaagttctgaacctggttaagagtgagactggctatgctcttagcatctctgtaaccataacattc

SEQ ID NO: 57428 - DNA, 110 bp, synthetic construct
  source 1..110: mol_type = other DNA
cctggttaagagtgagactggctatgctcttagcatctctgtaaccataacattccatgtgagtgtgtatctaacctaaagacagcaaagcagagtgaagcagacagatt

SEQ ID NO: 57429 - DNA, 110 bp, synthetic construct
  source 1..110: mol_type = other DNA
cccttcatctttactcttagctcacgagaagctatgacactttctcccagtttctctcagaactccaaagaaagaagttttgattctgtttggtcagcttctctttatag

SEQ ID NO: 57430 - DNA, 110 bp, synthetic construct
  source 1..110: mol_type = other DNA
aattaatctttaaaaacgccttccagatgatgctggtacacagaaactttgagaatcactgtcccaggcctgccctctcctgttgcgggcatcctagtgggtggatgggc

SEQ ID NO: 57431 - DNA, 110 bp, synthetic construct
  source 1..110: mol_type = other DNA
tcactgtcccaggcctgccctctcctgttgcgggcatcctagtgggtggatgggcaaaggagcagcctcctaaaagtctggactcagaaatgtcacatattgataatttc

SEQ ID NO: 57432 - DNA, 110 bp, synthetic construct
  source 1..110: mol_type = other DNA
tgggatcccattttccctcctgggacttcttgagaggtggagggagagtttcttagccttctgtctctcttagctccattccatctgtaaactgaaacaataaggcaggc

SEQ ID NO: 57433 - DNA, 110 bp, synthetic construct
  source 1..110: mol_type = other DNA
gccttctgtctctcttagctccattccatctgtaaactgaaacaataaggcaggcagaggaaatttcccttgttaaatttaacaactttttttgctggagggctgcctat

SEQ ID NO: 57434 - DNA, 110 bp, synthetic construct
  source 1..110: mol_type = other DNA
tgtgacacgggattttcagagaatctgtgtttcgttaattctaggcacagaatctttcctggatccagcagcatatggcaggcccgtgggcagtgccctaggtgggtgga

SEQ ID NO: 57435 - DNA, 110 bp, synthetic construct
  source 1..110: mol_type = other DNA
ttcctggatccagcagcatatggcaggcccgtgggcagtgccctaggtgggtggaaaaagtgtgattctctgacaaccacacacaggctttgccaacctgaggcaggcag

SEQ ID NO: 57436 - DNA, 110 bp, synthetic construct
  source 1..110: mol_type = other DNA
ataagcaaccaaaagtatgaaattaggtaattcatagacatacaagagcaaaaaactagtcaggcaatttatgtttcctgtggtaataatgcagaagagctggagatgga

SEQ ID NO: 57437 - DNA, 110 bp, synthetic construct
  source 1..110: mol_type = other DNA
ctagtcaggcaatttatgtttcctgtggtaataatgcagaagagctggagatggatgtataatgaggctgagaatttacttacatctgaagccagtgaactggaggtgac

SEQ ID NO: 57438 - DNA, 110 bp, synthetic construct
  source 1..110: mol_type = other DNA
gtgttagctccttacaacatgatttatcaaacattttgtttcaggagttcctgctgtggcacaatgggttaaaaatctaaccgcaggagttcccatcatggtgcagcaga

SEQ ID NO: 57439 - DNA, 110 bp, synthetic construct
  source 1..110: mol_type = other DNA
aacatgatttatcaaacattttgtttcaggagttcctgctgtggcacaatgggttaaaaatctaaccgcaggagttcccatcatggtgcagcagaaatgaattcaactag

SEQ ID NO: 57440 - DNA, 110 bp, synthetic construct
  source 1..110: mol_type = other DNA
atcactcaagcagattggccacatgtgcatcctgggactcactcctccaggactctgatttgtggggctatggcccaagaatctgcatgcagctgattctcaaacactct

SEQ ID NO: 57441 - DNA, 110 bp, synthetic construct
  source 1..110: mol_type = other DNA
tgatttgtggggctatggcccaagaatctgcatgcagctgattctcaaacactctatgagaaattagacacctgggagtgggcctgcacagtttgggatttgatttgtgg

SEQ ID NO: 57442 - DNA, 110 bp, synthetic construct
  source 1..110: mol_type = other DNA
aagtattgacttggcatattatctaagaacaggacttcatgtctggctcttagactctacaagtttagatgcataaaggatgccttttcccaggtcacttaccttgttaa

SEQ ID NO: 57443 - DNA, 110 bp, synthetic construct
  source 1..110: mol_type = other DNA
tctacaagtttagatgcataaaggatgccttttcccaggtcacttaccttgttaatgggaaacgccaagattacaaagtaggccttctgattttcattcaagatcaagtt

SEQ ID NO: 57444 - DNA, 110 bp, synthetic construct
  source 1..110: mol_type = other DNA
tctgggttgcatgtgtacgaatgccaagtgagggctgagctatctcatgccactgtggcctcagggaagcaccagagcatgagataaagcacatggtagattcagacaag

SEQ ID NO: 57445 - DNA, 110 bp, synthetic construct
  source 1..110: mol_type = other DNA
agtcattgttctgcaaagtaaatatatatgtacttctggaaatcacgcagcctcctcctgattactacttttttaagtgttcatgtattattggtgaaaaatctgttctt

SEQ ID NO: 57446 - DNA, 110 bp, synthetic construct
  source 1..110: mol_type = other DNA
cgcagcctcctcctgattactacttttttaagtgttcatgtattattggtgaaaaatctgttcttaaatctatactggatttgccaatttgtgtttctgaaatatataca

SEQ ID NO: 57447 - DNA, 110 bp, synthetic construct
  source 1..110: mol_type = other DNA
aatacaaggttttcctagatgaaaaaagcagatggacaacttgaggtttaaactgaagctcctcttgtggatgtgaaaacaatctcctttattcaaaatatttatcatat

SEQ ID NO: 57448 - DNA, 110 bp, synthetic construct
  source 1..110: mol_type = other DNA
gacacatgggatcaaaatgtcatgttggttcaagttctgtggaaagctttggcactaacaagctgccaggggaagctctttaatttttatgactactaagctgattttga

SEQ ID NO: 57449 - DNA, 110 bp, synthetic construct
  source 1..110: mol_type = other DNA
agatttaggaagaaccacaaatgataatgcattattccaagctctttgttaccgcccctagaccaaaggtggcaatcagaagaggaagcagagagcagaatctggaagtt

SEQ ID NO: 57450 - DNA, 110 bp, synthetic construct
  source 1..110: mol_type = other DNA
tggtgtaggttgcagaggcagttaggatccagtgttgctatggctgtgacatagtcaggcagctttagctccaattcaatcccaagccagggaacttccatatgccacag

SEQ ID NO: 57451 - DNA, 110 bp, synthetic construct; identical to SEQ ID NO: 57450
  source 1..110: mol_type = other DNA

SEQ ID NO: 57452 - DNA, 110 bp, synthetic construct
  source 1..110: mol_type = other DNA
cacacacacacacttcttagagatgtgcttaagtcaattgtcaaaaatggaaccttatcttattacatttagtgacaatttctgctataggatttaccaaactatctttt

SEQ ID NO: 57453 - DNA, 110 bp, synthetic construct
  source 1..110: mol_type = other DNA
aattgtcaaaaatggaaccttatcttattacatttagtgacaatttctgctataggatttaccaaactatcttttgaactgtataccatcctaaatggggcaaattttgc

SEQ ID NO: 57454 - DNA, 110 bp, synthetic construct
  source 1..110: mol_type = other DNA
gtttgggtcacacacaaaaccatggcctgatgcagcccgtttccttccaataattgatgaacagttacctaccaatggatatgcaacacagtcacctagtgagataacaa

SEQ ID NO: 57455 - DNA, 110 bp, synthetic construct
  source 1..110: mol_type = other DNA
tctagttctaggaataacctaccttccaatctctcctttctgcctatttccactctcttatccagtgggacttactcaaacgacatcctctccagggagctccctcagtg

SEQ ID NO: 57456 - DNA, 110 bp, synthetic construct
  source 1..110: mol_type = other DNA
tcttatccagtgggacttactcaaacgacatcctctccagggagctccctcagtgccttcagttatggtttcttcttggtccttagtatttttatgacacttaatttctt

SEQ ID NO: 57457 - DNA, 110 bp, synthetic construct
  source 1..110: mol_type = other DNA
cttacctgccaccattctagattccccacttcctctattttcacctctgccagccagctgacttgctagtggggtgacccagacctcatggttaagaggtctaagccccc

SEQ ID NO: 57458 - DNA, 110 bp, synthetic construct
  source 1..110: mol_type = other DNA
gcaagcagaagtaggtgctgtatgttgtgtcctgctctcatttctcagagtattcaatttagggaagtgactagaacacaagcactgttgtcctacttcacatggggaaa

SEQ ID NO: 57459 - DNA, 110 bp, synthetic construct
  source 1..110: mol_type = other DNA
aatttagggaagtgactagaacacaagcactgttgtcctacttcacatggggaaaaggggttgggagagagggagtagccactgggtaaaagctatagcatcatgtgatt

SEQ ID NO: 57460 - DNA, 110 bp, synthetic construct
  source 1..110: mol_type = other DNA
agcaatgctaaaatgaagccaagggcagccagatgaatttcctattagctagacatctctctgctctctaccctttcacaaagaaataagcggcagtagggtacactaaa

SEQ ID NO: 57461 - DNA, 110 bp, synthetic construct
  source 1..110: mol_type = other DNA
ttcctgggctaggggtggaatcacagctgcagctgaggcctatgccacagccacagcgggatccaagctgcatatgtgacctacccaacagcttgtggcaacgctggatc

SEQ ID NO: 57462 - DNA, 110 bp, synthetic construct; identical to SEQ ID NO: 57461
  source 1..110: mol_type = other DNA

SEQ ID NO: 57463 - DNA, 110 bp, synthetic construct
  source 1..110: mol_type = other DNA
caaggggagaatgagggtggtgtgttggtcagctaggctgatatcacagaataccataggctggatggattaaattataaacattcatttctcacaattctggagactgg

SEQ ID NO: 57464 - DNA, 110 bp, synthetic construct
  source 1..110: mol_type = other DNA
aatatcctaaacttaatgacttattatgatctgatagtcttatctactcctatgagcaaaagcattgttctttcattttctgcctggatcctgacagtatgaattctcaa

SEQ ID NO: 57465 - DNA, 110 bp, synthetic construct
  source 1..110: mol_type = other DNA
aattgttttacttgcactaaacagttgctttgacatttagttagttttgcattgtgcagtaacaagactcttcgaatgcagtacttattaatccctagctgtggcatact

SEQ ID NO: 57466 - DNA, 110 bp, synthetic construct
  source 1..110: mol_type = other DNA
gcagtaacaagactcttcgaatgcagtacttattaatccctagctgtggcatacttgtgaggagttttggaatttctttttgcacttaagatactataaaattgttctta

SEQ ID NO: 57467 - DNA, 110 bp, synthetic construct
  source 1..110: mol_type = other DNA
tccagagtccaaccaataaaccctctcttcgaatgaacgctttctcaagaattagtttattttagctactagtccaccagccggagctacctgaaacgtccacaggctgg

SEQ ID NO: 57468 - DNA, 110 bp, synthetic construct
  source 1..110: mol_type = other DNA
tttattttagctactagtccaccagccggagctacctgaaacgtccacaggctgggctgttcagttagtacatgacacggtgagttacagaaattgtgagagttaagggt

SEQ ID NO: 57469 - DNA, 110 bp, synthetic construct
  source 1..110: mol_type = other DNA
gccaacaatgtccagctcatagtcagcactctatacatacttactagttatgaattaaaataagatcatacccatacatattttattattgccctcaggttcagaaaaca

SEQ ID NO: 57470 - DNA, 110 bp, synthetic construct
  source 1..110: mol_type = other DNA
agcctcagcagacccagcgcaagatgctcctggacgtgacgactggccagtactatctggtggacacaccagtgcagcccattacccggagactgtttgaccccgagaca

SEQ ID NO: 57471 - DNA, 110 bp, synthetic construct
  source 1..110: mol_type = other DNA
tctggtggacacaccagtgcagcccattacccggagactgtttgaccccgagacagggcagtatgtggatgtgcccatgacctcccagcagcaggctttggctcccatgt

SEQ ID NO: 57472 - DNA, 110 bp, synthetic construct
  source 1..110: mol_type = other DNA
ttcagtgagccacaataggaactcctagagtgagtcttaaactttactccatgtctctagcttgtctaaatagctaattagtgttgagatattcctatccctgactcctt

SEQ ID NO: 57473 - DNA, 110 bp, synthetic construct
  source 1..110: mol_type = other DNA
ggggtcgaaccagcattctcacggacactagttgggttcttaacctgctgagccacaacagaaattcctggccgacttctttcgaacttgatgctagatccctctgaaaa

SEQ ID NO: 57474 - DNA, 110 bp, synthetic construct
  source 1..110: mol_type = other DNA
caacagaaattcctggccgacttctttcgaacttgatgctagatccctctgaaaatggtgttaaaaattcttattcctggcaggctgcacagtgcaaactctgagacaga

SEQ ID NO: 57475 - DNA, 110 bp, synthetic construct
  source 1..110: mol_type = other DNA
gctagggtaatagtatggcagcattatctttgcaaatccaagggggaaaacttgaggcattggcacattcctagtttctgacaataaactcagctcagggtttacagtct

SEQ ID NO: 57476 - DNA, 110 bp, synthetic construct
  source 1..110: mol_type = other DNA
ggcattggcacattcctagtttctgacaataaactcagctcagggtttacagtctcaccttttgtacgtgcattaagcagccactgtagaacttctgccagagaatcagt

SEQ ID NO: 57477 - DNA, 110 bp, synthetic construct
  source 1..110: mol_type = other DNA
actgtttccctgtttccctccagtttctcctactctcacgccaaggagtctgtgtggctccctggttgttaagataacactatatagcttagcaacatggtaacattcct

SEQ ID NO: 57478 - DNA, 110 bp, synthetic construct
  source 1..110: mol_type = other DNA
ggctccctggttgttaagataacactatatagcttagcaacatggtaacattccttatggagatctgagttccagaacctctccatgtaccatttttcttagagctccgc

SEQ ID NO: 57479 - DNA, 110 bp, synthetic construct
  source 1..110: mol_type = other DNA
gtcccagggaaaagcagggactccttaagaatctgggtcagacctacgcatgtgtcttggaggatctcctgggaaagcagggattagctgtgtctcacctgtgtaggcag

SEQ ID NO: 57480 - DNA, 110 bp, synthetic construct
  source 1..110: mol_type = other DNA
cttggaggatctcctgggaaagcagggattagctgtgtctcacctgtgtaggcaggacattggaggcagaggtcctgggaatattcatcagtgtgagctcccctgaagat

SEQ ID NO: 57481 - DNA, 110 bp, synthetic construct
  source 1..110: mol_type = other DNA
gttttaaatcttctgggtatcagatagcattgagattactttccacaaagaattagggactcgcttgtgcctgagaaacaacagcttccgggagcatttgctctgctcct

SEQ ID NO: 57482 - DNA, 110 bp, synthetic construct; identical to SEQ ID NO: 57481
  source 1..110: mol_type = other DNA

SEQ ID NO: 57483 - DNA, 110 bp, synthetic construct
  source 1..110: mol_type = other DNA
tattttaattaaaatagttgaattaaattttaaaaaaccaacctgggtgtgagtcagtcattgtgtttgattgtcatacactgtttacgtgtttgtttcctcacaagtct

SEQ ID NO: 57484 - DNA, 110 bp, synthetic construct
  source 1..110: mol_type = other DNA
atagctcttggtaattaaaaagtatcacagcaggaaaggagatccaatgaaaacataaaagatccccttagtgcactttttctcaggaggccacttgacgaagttcccct

SEQ ID NO: 57485 - DNA, 110 bp, synthetic construct; identical to SEQ ID NO: 57484
  source 1..110: mol_type = other DNA

SEQ ID NO: 57486 - DNA, 110 bp, synthetic construct
  source 1..110: mol_type = other DNA
ccacaagcaaaagaccaaaaattcctcctattttattacttacactaatctaattcttatttgtttacactgcttccccccaagctcagaccagaagccctgccctatat

SEQ ID NO: 57487 - DNA, 110 bp, synthetic construct
  source 1..110: mol_type = other DNA
aaattcaaaaacttaaagacagaagaatactagacaagttaagtcaaatgtgggtagtgagaaagtgaaagcatggatctgtgtatatgtataactgaatcactttattg

SEQ ID NO: 57488 - DNA, 110 bp, synthetic construct; identical to SEQ ID NO: 57487
  source 1..110: mol_type = other DNA

SEQ ID NO: 57489 - DNA, 110 bp, synthetic construct
  source 1..110: mol_type = other DNA
ctgggaacttccacatgccaagggtgaggccctaaaaacaaaacgataggaaaaaaaataaattaaaaaaaaattaagtcagtaaatcatttacatttgaatagtaccat

SEQ ID NO: 57490 - DNA, 110 bp, synthetic construct; identical to SEQ ID NO: 57489
  source 1..110: mol_type = other DNA

SEQ ID NO: 57491 - DNA, 110 bp, synthetic construct
  source 1..110: mol_type = other DNA
accttgtttattcttggagcttgcccccaacttacctgggattgtccacagtttgggaatcttttgcagggccaaggcatcaagcaggtgaaataaaataaagcccatgg

SEQ ID NO: 57492 - DNA, 110 bp, synthetic construct
  source 1..110: mol_type = other DNA
cagaaatatattgcttttggcttattgacttaacagaattcagtgggggaggagaagtagtttcagagggtttcacttggccttccccactgtgatacttcttcactcaa

SEQ ID NO: 57493 - DNA, 110 bp, synthetic construct
  source 1..110: mol_type = other DNA
gttcagcgcctagccagggagtttccacatgccacaggtgcagccctaaaaagaaaagagggaaaaaaaaattggagagtaaaaggacaaatccgattttcttattcaca

SEQ ID NO: 57494 - DNA, 110 bp, synthetic construct; identical to SEQ ID NO: 57493
  source 1..110: mol_type = other DNA

SEQ ID NO: 57495 - DNA, 110 bp, synthetic construct
  source 1..110: mol_type = other DNA
tgctgcaagctgtggtataggttacggtctcagctcagatccctcattgctgtggctgtggctgtgacgaaggctggcagctacagcttttgatttgaccccctagcctg

SEQ ID NO: 57496 - DNA, 110 bp, synthetic construct; identical to SEQ ID NO: 57495
  source 1..110: mol_type = other DNA

SEQ ID NO: 57497 - DNA, 110 bp, synthetic construct
  source 1..110: mol_type = other DNA
ccttcctcacaagagtctcaaaaagactctggtgagactctccccaactgcaagtgtcttgagttgaactgacagcttctggaacttctagatgctgcgtctgccatctc

SEQ ID NO: 57498 - DNA, 110 bp, synthetic construct
  source 1..110: mol_type = other DNA
tatcaggacaaagagcccatatgtgcagcagaggaagcagagagaggattttgtaaaacaaactccatccctctccccagcccaaacatacatgcgcatatacttttatt

SEQ ID NO: 57499 - DNA, 110 bp, synthetic construct
  source 1..110: mol_type = other DNA
tctgcctttcacagtgtgaatgaggcaggggggaaaggggaagtcagcagctctcgaaggcaggcctggggaggcctctggacagaaacaaaacgagcaagatatgcgtt

SEQ ID NO: 57500 - DNA, 110 bp, synthetic construct
  source 1..110: mol_type = other DNA
gaaggcaggcctggggaggcctctggacagaaacaaaacgagcaagatatgcgttgccacgtccctaattgatgagcccgctccatggtaagtaatgacagcaaaagagc

SEQ ID NO: 57501 - DNA, 110 bp, synthetic construct
  source 1..110: mol_type = other DNA
cagccactctagcaaattaatggaacccaaggagggggcagttggaatcttcaatctatagctggttggtcagaagaacaggtgacaagctggagttggaatgggcattt

SEQ ID NO: 57502 - DNA, 110 bp, synthetic construct
  source 1..110: mol_type = other DNA
tgaagacgtggagtgatttttgaggtgctgaagaacatagcagggttcccttttagaatgttgtttcttgctgtaactccagacctagcttcttgtttgaaacctctttt

SEQ ID NO: 57503 - DNA, 110 bp, synthetic construct
  source 1..110: mol_type = other DNA
gaatgttgtttcttgctgtaactccagacctagcttcttgtttgaaacctcttttagaagatgcttgttattctaaaataaaacatcaagtaagtcatttacatctgttc

SEQ ID NO: 57504 - DNA, 110 bp, synthetic construct
  source 1..110: mol_type = other DNA
gggatggcgagaagggtagaaccggggagaccaattacagggctgaggtacacacttggtacagtcattggactccctcccatggggtaggacagtggttctcaagcttt

SEQ ID NO: 57505 - DNA, 110 bp, synthetic construct
  source 1..110: mol_type = other DNA
ttggtacagtcattggactccctcccatggggtaggacagtggttctcaagctttaggatacagaagacttgcaggcgctatttgtgagcgctgtagaattcttccctgg

SEQ ID NO: 57506 - DNA, 110 bp, synthetic construct
  source 1..110: mol_type = other DNA
catacaggttacatgtggcaggggagatgggactctcaggactctgtcggggtacaaacgatgtcccaggcctcaccagggatgggtaaccccaactgcattgacaggtt

SEQ ID NO: 57507 - DNA, 110 bp, synthetic construct
  source 1..110: mol_type = other DNA
aaacgatgtcccaggcctcaccagggatgggtaaccccaactgcattgacaggttgtgatagaccccaagcaacactggggatgtcatcagccggagtttgtactaccat

SEQ ID NO: 57508 - DNA, 110 bp, synthetic construct
  source 1..110: mol_type = other DNA
tacacacataattactttccaagtttataaaaccaatttaaaaatgactttttagcttataacctgcgtgacggagagtatctgcacgttcacattactggtccgttttg

SEQ ID NO: 57509 - DNA, 110 bp, synthetic construct; identical to SEQ ID NO: 57508
  source 1..110: mol_type = other DNA

SEQ ID NO: 57510 - DNA, 110 bp, synthetic construct
  source 1..110: mol_type = other DNA
ccgggtgtctgtgaaccccctaaaatcctagcgaatttgaatgaaagtttcttacactctgagtaagtgttcctgactttacaaggttagacgattgtgtggggcagaag

SEQ ID NO: 57511 - DNA, 110 bp, synthetic construct
  source 1..110: mol_type = other DNA
actctgagtaagtgttcctgactttacaaggttagacgattgtgtggggcagaagttaaaggagtaatgccacgtgggcacacacaaagaaatttaggctttagggtgag

SEQ ID NO: 57512 - DNA, 110 bp, synthetic construct
  source 1..110: mol_type = other DNA
aggtggacccttctcagatgtccctgaaactggagagaataaccaccctcacccttgtttgctcggtgccccgcttctcagcagccagcttccctgacatttaacttaat

SEQ ID NO: 57513 - DNA, 110 bp, synthetic construct
  source 1..110: mol_type = other DNA
tgtttgctcggtgccccgcttctcagcagccagcttccctgacatttaacttaatcaagatgttagtcaaataaacagcgtgcgccgctgcccccggagggaacgtgctg

SEQ ID NO: 57514 - DNA, 110 bp, synthetic construct; identical to SEQ ID NO: 57512
  source 1..110: mol_type = other DNA

SEQ ID NO: 57515 - DNA, 110 bp, synthetic construct; identical to SEQ ID NO: 57513
  source 1..110: mol_type = other DNA

SEQ ID NO: 57516 - DNA, 110 bp, synthetic construct
  source 1..110: mol_type = other DNA
ggaacttgcttgggtcagtgtttgtctgctggcattccagcagttccaagggctcaggggtgcggtgttgtgacagctgggtcgacaggaatgatcagatggagcgcctt

SEQ ID NO: 57517 - DNA, 110 bp, synthetic construct
  source 1..110: mol_type = other DNA
aggggtgcggtgttgtgacagctgggtcgacaggaatgatcagatggagcgccttgcccaatgacgaggctaaggctttttggagttacacagacatgccgtgccctcct

SEQ ID NO: 57518 - DNA, 110 bp, synthetic construct
  source 1..110: mol_type = other DNA
aaggagataactcagcaggagaatgccgtgtggaagatgatgttcttcacattttcttaacttggcatctctaccactttcttggaccacttataatattatgaattttg

SEQ ID NO: 57519 - DNA, 110 bp, synthetic construct
  source 1..110: mol_type = other DNA
cctgacttccaaagatgactgaataggaatttgaggcatgataggattagttctactaaagcagtcatctccaaacttctttttgattatgcagccttaactaaaaattt

SEQ ID NO: 57520 - DNA, 110 bp, synthetic construct
  source 1..110: mol_type = other DNA
ccacactcagatggagagagtattacaggtaaaaaatattcaaaaatctcctgaagacaaaagaaagtaaaagccaatgttttagttagtcactactgaatttaaagtag

SEQ ID NO: 57521 - DNA, 110 bp, synthetic construct
  source 1..110: mol_type = other DNA
atctcctgaagacaaaagaaagtaaaagccaatgttttagttagtcactactgaatttaaagtagcttattaccttggggtaaaatagcaagcatttagcttttgaatca

SEQ ID NO: 57522 - DNA, 110 bp, synthetic construct
  source 1..110: mol_type = other DNA
acaatacatcatttaacatacagccctctgtctcaaaacacttataaaacttatataactgtgacttataagagtgaaacacttctcagaattttctaagatgctcttcc

SEQ ID NO: 57523 - DNA, 110 bp, synthetic construct
  source 1..110: mol_type = other DNA
catttgctggaaagatccagccttttccccctagaaggccactaaattgtaccaacatttattaatttatttttgcccaccatttctagatgatactttcgtaacacaca

SEQ ID NO: 57524 - DNA, 110 bp, synthetic construct
  source 1..110: mol_type = other DNA
tccccctagaaggccactaaattgtaccaacatttattaatttatttttgcccaccatttctagatgatactttcgtaacacacattaaattattgtaggtttttggttt

SEQ ID NO: 57525 - DNA, 110 bp, synthetic construct
  source 1..110: mol_type = other DNA
gcatcctgaagtattcattgatgaaattatacaatattttggatttgcctctacaacactggagtgagaatttagggagttgataggattagaaaacacataaggacata

SEQ ID NO: 57526 - DNA, 110 bp, synthetic construct
  source 1..110: mol_type = other DNA
acactggagtgagaatttagggagttgataggattagaaaacacataaggacatagattgagattattgaccctgggtgatgggtatgtgggaatttcttatactatttt

SEQ ID NO: 57527 - DNA, 110 bp, synthetic construct
  source 1..110: mol_type = other DNA
cctctatatggaagtatgaccaatctaagactgccattctggagaggtcttgtataggtaccaggtactgctccagataaggctagctcagtagtgtttatcatgaatct

SEQ ID NO: 57528 - DNA, 110 bp, synthetic construct
  source 1..110: mol_type = other DNA
aacataagcgctaatgcttatatggtgctcgttctatgccagggaccattccaaacatatgttaactcatgtgagtactgtgcatgtaagtattttaaagatgactgatt

SEQ ID NO: 57529 - DNA, 110 bp, synthetic construct
  source 1..110: mol_type = other DNA
ccattccaaacatatgttaactcatgtgagtactgtgcatgtaagtattttaaagatgactgattatggtcatctttaaaaatgaggaaactgaggaacagaatttaaaa

SEQ ID NO: 57530 - DNA, 110 bp, synthetic construct
  source 1..110: mol_type = other DNA
atgaggatgcgggttcgatctctctctggccttgctcagtgtgttaaggagccagcattacagtgaactgtggtgtaggtttcagacgcagctgtgatttggcattgctg

SEQ ID NO: 57531 - DNA, 110 bp, synthetic construct; identical to SEQ ID NO: 57530
  source 1..110: mol_type = other DNA

SEQ ID NO: 57532 - DNA, 110 bp, synthetic construct
  source 1..110: mol_type = other DNA
cgattaaagattttgactcgaagctctgattgaaagtacccttgaagtcttcttaagtcacttcactaacatgacaagtttccttgtaaaaaagctctaaatgacttgtt

SEQ ID NO: 57533 - DNA, 110 bp, synthetic construct
  source 1..110: mol_type = other DNA
agtcacttcactaacatgacaagtttccttgtaaaaaagctctaaatgacttgtttttggtttttttttagggtcacccctgcagcacatggaggttcccagcctaggga

SEQ ID NO: 57534 - DNA, 110 bp, synthetic construct; identical to SEQ ID NO: 57532
  source 1..110: mol_type = other DNA

SEQ ID NO: 57535 - DNA, 110 bp, synthetic construct; identical to SEQ ID NO: 57533
  source 1..110: mol_type = other DNA

SEQ ID NO: 57536 - DNA, 110 bp, synthetic construct
  source 1..110: mol_type = other DNA
caacaatgggtgatgttcagttacaatgccctcctctgtggtgccttctgaggagactggggccacaactggtgcctgttcacggacccctagcggtggtgggccatgcc

SEQ ID NO: 57537 - DNA, 110 bp, synthetic construct
  source 1..110: mol_type = other DNA
ctgtggtgccttctgaggagactggggccacaactggtgcctgttcacggacccctagcggtggtgggccatgcctacctctggagtcagacataactgtggtggtttgc

SEQ ID NO: 57538 - DNA, 110 bp, synthetic construct
  source 1..110: mol_type = other DNA
ttaatcctaaatccagtccatcagccaatcctgtgggttctgtcttcacaatatatccagaattcaacaacttttcatctcctcaatgctaacactttgttccaagcttc

SEQ ID NO: 57539 - DNA, 110 bp, synthetic construct
  source 1..110: mol_type = other DNA
atatttttgatgtcatatccaaaaaaaatgttgccaagaccattattaagaagctttccctacattcctcctaggagttttatagtttcagctgttcaacttaagtgttt

SEQ ID NO: 57540 - DNA, 110 bp, synthetic construct
  source 1..110: mol_type = other DNA
tttgtggaaatctaggcttgtcaaccagaactatgcagttcaagttattcaccccagcacagattttatttttgagtagctaaaatgcttggtggaaaatagatccatgc

SEQ ID NO: 57541 - DNA, 110 bp, synthetic construct
  source 1..110: mol_type = other DNA
gtaggaatgcctgcatccactcattttatgctttctgctgtgtgtgtgtgggcctacacaataagctagtgcaagtaagtaagtgcacagcattcctccagaagtgaaaa

SEQ ID NO: 57542 - DNA, 110 bp, synthetic construct
  source 1..110: mol_type = other DNA
acacaataagctagtgcaagtaagtaagtgcacagcattcctccagaagtgaaaatgaaagaactcggagttgctgttgtgatgcagcagaaacaaatctgattactaac

SEQ ID NO: 57543 - DNA, 110 bp, synthetic construct
  source 1..110: mol_type = other DNA
ccttggcagatgagatactgcctgattcataaattattaaaagcttctgcaaacttaggtcttcaaatttacttagttgaattttggtcattaacaagtttcacgtgaat

SEQ ID NO: 57544 - DNA, 110 bp, synthetic construct
  source 1..110: mol_type = other DNA
gggttgagctccatgagaccaactgctcacaagctgccctctcacactaaagggtgagcatacatcacatcaatctgagctcggtttgtctcatgcagcctccagggctg

SEQ ID NO: 57545 - DNA, 110 bp, synthetic construct
  source 1..110: mol_type = other DNA
gagcatacatcacatcaatctgagctcggtttgtctcatgcagcctccagggctgaatcatttcactaatcatttatacaactttaaagcacaatttcccaacaaagaga

SEQ ID NO: 57546 - DNA, 110 bp, synthetic construct
  source 1..110: mol_type = other DNA
ttcggagttcatgattgtatgcagtttttctatgctgggaaaatgaaaaggtagccggacgtgggttaatttttttaaaaaagtcccatacccattttgaggcaaaaatg

SEQ ID NO: 57547 - DNA, 110 bp, synthetic construct
  source 1..110: mol_type = other DNA
cggacgtgggttaatttttttaaaaaagtcccatacccattttgaggcaaaaatggtaagcattggttaaaagcactgacttgactatttgcatagtcctgggatggaat

SEQ ID NO: 57548 - DNA, 110 bp, synthetic construct
  source 1..110: mol_type = other DNA
agcacttgggagtaaacgaagattacaaagctgggtttggagattttgtttagcttttgaaggtatatagaatcctcccacttagttcaggtttcatctcacttgctaaa

SEQ ID NO: 57549 - DNA, 110 bp, synthetic construct
  source 1..110: mol_type = other DNA
tcattttgactctcaggtggaaaccgcatgttgagaatggtagagtgaaagacaggagaaagattaattatagcttttgacacggtcaactaattctaatagatgtccat

SEQ ID NO: 57550 - DNA, 110 bp, synthetic construct
  source 1..110: mol_type = other DNA
aatggtagagtgaaagacaggagaaagattaattatagcttttgacacggtcaactaattctaatagatgtccatgaactaataacctgagaatatttaaatgccagtat

SEQ ID NO: 57551 - DNA, 110 bp, synthetic construct
  source 1..110: mol_type = other DNA
caaataaatgacagcacaaataaaatcgtatccttttctggcaggatgctgacatctaataaatgctaatgataaaacaagtattacatgcttagtcatgtgctacaaat

SEQ ID NO: 57552 - DNA, 110 bp, synthetic construct
  source 1..110: mol_type = other DNA
ctaataaatgctaatgataaaacaagtattacatgcttagtcatgtgctacaaatgattaatctgaagtaattttttttggctttttagggccacacccatggcatatgg

SEQ ID NO: 57553 - DNA, 110 bp, synthetic construct
  source 1..110: mol_type = other DNA
tttatgtagagcaaatgttgactcttaataagataccacagctaagacttttttttttttttgccttcccaggctaagggtcaaatcagagctgcacctcccagcctatg

SEQ ID NO: 57554 - DNA, 110 bp, synthetic construct
  source 1..110: mol_type = other DNA
tttttttgccttcccaggctaagggtcaaatcagagctgcacctcccagcctatgccacagctgtacacctaaaactaacacagcattgtaaaaacaaaattcaaaaaaa

SEQ ID NO: 57555 - DNA, 110 bp, synthetic construct
  source 1..110: mol_type = other DNA
ttcaggagaaaaacagccctacattttgtaattctagcttccagacctgtgaaaaaataaatttctgttgtttaagacacctactctgtgctacctttttatggcatttt

SEQ ID NO: 57556 - DNA, 110 bp, synthetic construct
  source 1..110: mol_type = other DNA
gccctacattttgtaattctagcttccagacctgtgaaaaaataaatttctgttgtttaagacacctactctgtgctacctttttatggcattttatctaactaatagat

SEQ ID NO: 57557 - DNA, 110 bp, synthetic construct
  source 1..110: mol_type = other DNA
tgttttgcagcattgatatttcgggccagataattctttgttgtaagggtctgtcttaagcattacagggtatttagtagtaacatgtcttgcctccttgcattaaatgc

SEQ ID NO: 57558 - DNA, 110 bp, synthetic construct
  source 1..110: mol_type = other DNA
ttaagcattacagggtatttagtagtaacatgtcttgcctccttgcattaaatgctagtatcacctttgcccccagttatgacaactaaagatgtctctagatattgaca

SEQ ID NO: 57559 - DNA, 110 bp, synthetic construct
  source 1..110: mol_type = other DNA
ctcgtctattagctatgggactgtgtgtaaatcgcttaacagctctatgcatcggtttccttctctataaaagagctatgtcatacagctgtttggaaaattaaatgagt

SEQ ID NO: 57560 - DNA, 110 bp, synthetic construct
  source 1..110: mol_type = other DNA
cagcttactgttccccaggaataatacatctattcatccacctagagaactggctaatgaagtacttattttcagtatactcagagcttttttccttccaaagactcagt

SEQ ID NO: 57561 - DNA, 110 bp, synthetic construct
  source 1..110: mol_type = other DNA
catacaggacaaagtacaatactcgatgcacataaaatacttttatatgttaacactgtgtgtttccagtgcactatggtacattatagtctcatggcagaacttaataa

SEQ ID NO: 57562 - DNA, 110 bp, synthetic construct
  source 1..110: mol_type = other DNA
ctgtgtgtttccagtgcactatggtacattatagtctcatggcagaacttaataattatttgctgaataaatgatattcttggaattcctgttgtggtgcagcagaaacg

SEQ ID NO: 57563 - DNA, 110 bp, synthetic construct
  source 1..110: mol_type = other DNA
aaactaatagttttgagggtgaaaatcagtgctaaactaacagtatttaactttacacagaagtagatttgtatattgttagaattgtaccttctgcttcaactgggaaa

SEQ ID NO: 57564 - DNA, 110 bp, synthetic construct; identical to SEQ ID NO: 57563
  source 1..110: mol_type = other DNA

SEQ ID NO: 57565 - DNA, 110 bp, synthetic construct
  source 1..110: mol_type = other DNA
gataaaattacaaaatctctaagaccagtagcctttactttaatcttttcccagaaccatttgaatagaaatggaatggagcatgctctctgtattttgtgccatacgtg

SEQ ID NO: 57566 - DNA, 110 bp, synthetic construct
  source 1..110: mol_type = other DNA
accatttgaatagaaatggaatggagcatgctctctgtattttgtgccatacgtgtaaggtttagctttcttctccatgagtatgaaatagtcttcccgacctgaacttc

SEQ ID NO: 57567 - DNA, 110 bp, synthetic construct
  source 1..110: mol_type = other DNA
ctgccctgtaggagactctagtagtttggaacattgtatattgagcacagagatcatgcgtatgcccccaaggtgtctggaaaggattacagtcagtccctagatgcagg

SEQ ID NO: 57568 - DNA, 110 bp, synthetic construct
  source 1..110: mol_type = other DNA
tcaatgttcagtagtcatcagtctattataaatctatcattttcagcaggtgatctcatcatttacttatagtacgtctgacctgaacaatttcaggccaccaatttctc

SEQ ID NO: 57569 - DNA, 110 bp, synthetic construct
  source 1..110: mol_type = other DNA
gatcatatgcttgtttggaagaatatttccaatggaattattacaacacatagctgagttgttttggaaacaataatgagatcattttgacagcatggcttcctttgttt

SEQ ID NO: 57570 - DNA, 110 bp, synthetic construct; identical to SEQ ID NO: 57569
  source 1..110: mol_type = other DNA

SEQ ID NO: 57571 - DNA, 110 bp, synthetic construct
  source 1..110: mol_type = other DNA
ggttatttggtagaacctcaacattttcacttataacaagctccaagtgatgcagctagtggcggttcatggaccatgttttcattagccctcagtggttagtgtggtgg

SEQ ID NO: 57572 - DNA, 110 bp, synthetic construct
  source 1..110: mol_type = other DNA
gcatgatgctgtacttgaacctataactcctccaggcccttctagaccttctctttcagctactctgagttgttgccaagtgtgtgggtacaactccaggccaaagagtg

SEQ ID NO: 57573 - DNA, 110 bp, synthetic construct
  source 1..110: mol_type = other DNA
cctcacaaatggaatttgtgctcttataaaagaggcttcacagagatccctcgccccttctaccatgagagaaccacagagaaaatgtaccagctatgagtcaggaagag

SEQ ID NO: 57574 - DNA, 110 bp, synthetic construct
  source 1..110: mol_type = other DNA
aatattccttccttttactcttctggcacttcactgctagagatatactgctcgagtaccaaaagaactattcctatccctttctcatggagactaccgaccactggact

SEQ ID NO: 57575 - DNA, 110 bp, synthetic construct
  source 1..110: mol_type = other DNA
ggccccagttcattctcccagctgtaacttccaccagttggatatgcacctacactaccttctcatcaaactacccgaagtctggaagatgcaccatgccctctcagaca

SEQ ID NO: 57576 - DNA, 110 bp, synthetic construct
  source 1..110: mol_type = other DNA
acaaaatgaatcccctaaaaagtccccaacgtaaaagattcagacagcttccaggttggtggagctaccaggagggtgatatcctaaatccacaggtctagctgctcctg

SEQ ID NO: 57577 - DNA, 110 bp, synthetic construct
  source 1..110: mol_type = other DNA
gggaaacacaacatttgctaataaaatgattcagggtacaatatttgttaataaaatgattcagggcagttctcaaactttgagagagaattagtagcctcattttgtgt

SEQ ID NO: 57578 - DNA, 110 bp, synthetic construct
  source 1..110: mol_type = other DNA
atgattcagggcagttctcaaactttgagagagaattagtagcctcattttgtgtaaatacatccttgaaatcggaaaatgaaatttaatgtcgcatttatgtggaattt

SEQ ID NO: 57579 - DNA, 110 bp, synthetic construct
  source 1..110: mol_type = other DNA
tatttctggaatagtacttttaaaataacatggaaataatagttgtctctgggtagggtcagtgaaggtctagggtttaggatggggaggaaaacttttttgtgttcttt

SEQ ID NO: 57580 - DNA, 110 bp, synthetic construct; identical to SEQ ID NO: 57579
  source 1..110: mol_type = other DNA

SEQ ID NO: 57581 - DNA, 110 bp, synthetic construct
  source 1..110: mol_type = other DNA
attgcattaaaatgtgtataaataagattggtacccagagttgcatgcaatatgtgacggctcttcaagaattcagaatacatatttgagtagtacattaatcacttgtt

SEQ ID NO: 57582 - DNA, 110 bp, synthetic construct
  source 1..110: mol_type = other DNA
cctgaagtgtagaatcattaggattggactatggattgaatattacaaaacaaagtaacagggaacaagaggaccaccccatctctggcaatattttggaagtggaatga

SEQ ID NO: 57583 - DNA, 110 bp, synthetic construct
  source 1..110: mol_type = other DNA
taacagggaacaagaggaccaccccatctctggcaatattttggaagtggaatgacattgataggagtagatcaggaaagcatttttaatttaagatcacatgaaatgta

SEQ ID NO: 57584 - DNA, 110 bp, synthetic construct
  source 1..110: mol_type = other DNA
ggattgccaaacctatagaacccctgcccttaaatgatgctttctatctcttcatcctatatattgtttaaatagcgacatttctagggaagcattgatcataagaacaa

SEQ ID NO: 57585 - DNA, 110 bp, synthetic construct
  source 1..110: mol_type = other DNA
tctccaatgtccaagataactgagagaacatttcacaggatgaggtacttcatcagatgactaagctactgtatattatttattgattcttactagtatggtttttacgg

SEQ ID NO: 57586 - DNA, 110 bp, synthetic construct; identical to SEQ ID NO: 57585
  source 1..110: mol_type = other DNA

SEQ ID NO: 57587 - DNA, 110 bp, synthetic construct
  source 1..110: mol_type = other DNA
ttttttaaatcaaaagttttggtttcattatagagtatgtggttctaacagtgagaatgatcagaaattagacatgggtcttagcagctattaacaagtcatttttagcc

SEQ ID NO: 57588 - DNA, 110 bp, synthetic construct
  source 1..110: mol_type = other DNA
aaggatctagcatttgtcattgctgctgctaggatcgctgctgtggctcagatttgatccctggcccgcgggaacatctacacgtcacaggtgtggccaaaaaagaaaaa

SEQ ID NO: 57589 - DNA, 110 bp, synthetic construct
  source 1..110: mol_type = other DNA
gatccctggcccgcgggaacatctacacgtcacaggtgtggccaaaaaagaaaaaaaattaaagcatcagtttccctccagatggagcaccattcctcgtgcccctccct

SEQ ID NO: 57590 - DNA, 110 bp, synthetic construct
  source 1..110: mol_type = other DNA
aactccaaaacaatgaattttattactttcttgctaaatgccaggcaccattctactggtgatgtaacagtatacaagtggacataaaatccctgcccttatcaatccaa

SEQ ID NO: 57591 - DNA, 110 bp, synthetic construct
  source 1..110: mol_type = other DNA
ctggtgatgtaacagtatacaagtggacataaaatccctgcccttatcaatccaacattccattatagattttactctctggtttttggcattcatcctgtaagttacaa

SEQ ID NO: 57592 - DNA, 110 bp, synthetic construct
  source 1..110: mol_type = other DNA
tgtctagattggtatttttctaagctattatgcagatcaaatgctgtagtatttggggggggaccccactctgtcagagactatactaacatctggggatacaaaactca

SEQ ID NO: 57593 - DNA, 110 bp, synthetic construct
  source 1..110: mol_type = other DNA
gggggggaccccactctgtcagagactatactaacatctggggatacaaaactcaaaaccatggaaactatgctctgtcttcacatagaggaggaggcacaaatatgtaa

SEQ ID NO: 57594 - DNA, 110 bp, synthetic construct
  source 1..110: mol_type = other DNA
ccacggaactgaccttcgaggcctcctttgctgcaagcgttatcttgactttgcgaacataaggtaccgacataaacacatacgctgctcacatttttatactgtaatcc

SEQ ID NO: 57595 - DNA, 110 bp, synthetic construct
  source 1..110: mol_type = other DNA
gtcctaattcggattctgaatgtccaaatgaatggctttgtgtggtcaggttacttttgccgtacaaagctgtgaaaaagagtgcaggctctggaggcgggcagttctgg

SEQ ID NO: 57596 - DNA, 110 bp, synthetic construct
  source 1..110: mol_type = other DNA
tttgccgtacaaagctgtgaaaaagagtgcaggctctggaggcgggcagttctggatgaaaagaccctgtgtgaccctgaagaattactttatcactaccagcctcattt

SEQ ID NO: 57597 - DNA, 110 bp, synthetic construct
  source 1..110: mol_type = other DNA
cttaaagtaaacttcctgattccctgggtgcgctacagtgcccaccagcatttctggtgcttccttactctaaacacccatagttagccagtcatctttcagatccctta

SEQ ID NO: 57598 - DNA, 110 bp, synthetic construct
  source 1..110: mol_type = other DNA
ggtgcttccttactctaaacacccatagttagccagtcatctttcagatcccttagtctgagtgcccaacagacacaccgagaggtggtttccttgtctctgctgaccag

SEQ ID NO: 57599 - DNA, 110 bp, synthetic construct
  source 1..110: mol_type = other DNA
cagaaagggtatgccttcctgaaaataaccacatgtgtgtgtttcaagacctggattttctaggcatgagtgcattgctgatgaaatacctccttagcatgaggaaactt

SEQ ID NO: 57600 - DNA, 110 bp, synthetic construct
  source 1..110: mol_type = other DNA
ttttctaggcatgagtgcattgctgatgaaatacctccttagcatgaggaaactttattattcttcctttccacaaactgtttgcctcttttacacttgtaaagattgtc

SEQ ID NO: 57601 - DNA, 110 bp, synthetic construct
  source 1..110: mol_type = other DNA
cactacagccctctgcttattgtggagctgtgtagtggagcaagaggagccagagctggtgctcagctcagactgtggcatgtgctagggcagtcatgggaaatgggcca

SEQ ID NO: 57602 - DNA, 110 bp, synthetic construct
  source 1..110: mol_type = other DNA
ctggtgctcagctcagactgtggcatgtgctagggcagtcatgggaaatgggccaaggcccagacagtttcagtcgtcttcctctctctagttcctaggagaaagcgagc

SEQ ID NO: 57603 - DNA, 110 bp, synthetic construct
  source 1..110: mol_type = other DNA
tgggtaaagtattttcggttgtaggttttttcctgtcattaatatattgtgccactcacttctggcctgcagagtttctgctggcaaatcagctgataacgttatgggga

SEQ ID NO: 57604 - DNA, 110 bp, synthetic construct; identical to SEQ ID NO: 57603
  source 1..110: mol_type = other DNA

SEQ ID NO: 57605 - DNA, 110 bp, synthetic construct
  source 1..110: mol_type = other DNA
atttcccaaagtgcattgaagatacatgacatgagagtgtgggtgatcagcgggccactggcgatccaaatatcagtcatttcgccatataaaccctgtggctgtgagtc

SEQ ID NO: 57606 - DNA, 110 bp, synthetic construct
  source 1..110: mol_type = other DNA
cactggcgatccaaatatcagtcatttcgccatataaaccctgtggctgtgagtcttagggtagtggttcctccgctcttaggatgtcgtgggacctagaaacctgagca

SEQ ID NO: 57607 - DNA, 110 bp, synthetic construct
  source 1..110: mol_type = other DNA
taaccactgagtcacgacaggaactcccggatataattttggtgggcctgtaggcatcgttgatgttatataaatgatgtgagtacacagctccagtgtaaggcttaagg

SEQ ID NO: 57608 - DNA, 110 bp, synthetic construct
  source 1..110: mol_type = other DNA
atcgttgatgttatataaatgatgtgagtacacagctccagtgtaaggcttaaggttatttcttttacatcccttgcaaatgtacttctaaggcactgtcaggatagata

SEQ ID NO: 57609 - DNA, 110 bp, synthetic construct
  source 1..110: mol_type = other DNA
gtgggttaaggatctggcattgccccaaactgcagtgtaggttgtagaggtggcatggatccattgctgccatggctgtggcattttcctgtagctgtagctccaatttg

SEQ ID NO: 57610 - DNA, 110 bp, synthetic construct
  source 1..110: mol_type = other DNA
tgtaggttgtagaggtggcatggatccattgctgccatggctgtggcattttcctgtagctgtagctccaatttgacccccagccctggaccttccgtatgccacaggtc

SEQ ID NO: 57611 - DNA, 110 bp, synthetic construct
  source 1..110: mol_type = other DNA
ctagttcctgttcgaggcagggctccagcacagataactgctagacttagggcaacattcgtttttctccatctgtaggtttgcttactttgcattctcccaacatgtat

SEQ ID NO: 57612 - DNA, 110 bp, synthetic construct
  source 1..110: mol_type = other DNA
cattcgtttttctccatctgtaggtttgcttactttgcattctcccaacatgtattaagctctcctgccttgcatctcgcaccgtcgtcttacaaacacaatagcgagag

SEQ ID NO: 57613 - DNA, 110 bp, synthetic construct
  source 1..110: mol_type = other DNA
tctgttttaagaatgatgcacttttgatttgggccactttttagattattctctctacaaaagagggattagtcatgaggatgtgatctactcaggacacacccagcttg

SEQ ID NO: 57614 - DNA, 110 bp, synthetic construct
  source 1..110: mol_type = other DNA
tcaagagtggaaaaaccctgaaagactgagatacttacctggtagctaaaattgcaatctgaaatgcaagaaatatcttcaattgccaagatcaatcatctctcattatt

SEQ ID NO: 57615 - DNA, 110 bp, synthetic construct
  source 1..110: mol_type = other DNA
atcccaggtctaaagctatacagaaaggaaaaatttctcaaggcaaaattttaaggtggaaccaggacctctgagagaatttgcccataggagagaaatgagtaggaaag

SEQ ID NO: 57616 - DNA, 110 bp, synthetic construct
  source 1..110: mol_type = other DNA
gtggaaccaggacctctgagagaatttgcccataggagagaaatgagtaggaaagttcaatttgacagtaagaccagcgattcagaggagagtcgtgtttctggtgataa

SEQ ID NO: 57617 - DNA, 110 bp, synthetic construct
  source 1..110: mol_type = other DNA
aacatcacacccctccccctccatcggcctgaatacccttatttattgctttattaaaaactacttcaaccttcttagattcttgacaaatccatttgatactttaaatt

SEQ ID NO: 57618 - DNA, 110 bp, synthetic construct
  source 1..110: mol_type = other DNA
ggcctgaatacccttatttattgctttattaaaaactacttcaaccttcttagattcttgacaaatccatttgatactttaaattcagcagttctaatgcttctttggaa

SEQ ID NO: 57619 - DNA, 110 bp, synthetic construct
  source 1..110: mol_type = other DNA
aacataagcattatcagcattatctgaaggcttagttcagcttaatctattcatacataactctaagctgtaccccacaggaagccttttctcactaacccaactctgac

SEQ ID NO: 57620 - DNA, 110 bp, synthetic construct
  source 1..110: mol_type = other DNA
ggacaaaggatgagtcagacctttccgagtgccgttctcctccgccacttccccaggtccccaactccacccaagtccactcatcttgataacctaccagctatctctgc

SEQ ID NO: 57621 - DNA, 110 bp, synthetic construct
  source 1..110: mol_type = other DNA
ggtccccaactccacccaagtccactcatcttgataacctaccagctatctctgccccatgtataattaatccctgttcttaaactgtttcctcttaggatgtgtattaa

SEQ ID NO: 57622 - DNA, 110 bp, synthetic construct
  source 1..110: mol_type = other DNA
gtgtcaattatatctcaacaaaagcaggaaaaaaaaattcagttcctcagtttgaccagctacatttaaaatgactaatagccacctgtggctagtagataccatactgg

SEQ ID NO: 57623 - DNA, 110 bp, synthetic construct
  source 1..110: mol_type = other DNA
ccagctacatttaaaatgactaatagccacctgtggctagtagataccatactggataatacagacacacaacatgtccaccacctcagaaagttctattaaaaatccaa

SEQ ID NO: 57624 - DNA, 110 bp, synthetic construct
  source 1..110: mol_type = other DNA
aacttgggtttgctctaagcaacaagagagtctgtggtttccttagtaatgtcagtaatagctttactaacaataaaatgcagtggaataattcaatctcatgtaaataa

SEQ ID NO: 57625 - DNA, 110 bp, synthetic construct
  source 1..110: mol_type = other DNA
taatagctttactaacaataaaatgcagtggaataattcaatctcatgtaaataacctcctaacaacacatataaagttggcccaggcccagaaattgtggttcacaaat

SEQ ID NO: 57626 - DNA, 110 bp, synthetic construct
  source 1..110: mol_type = other DNA
cagaagaggtgcgctgtttcctctgaggccagcgtgatccgcctctagtccactgacttccaaaaagttcaccgagagcacagcacagaacagaacttgaatgggggaaa

SEQ ID NO: 57627 - DNA, 110 bp, synthetic construct
  source 1..110: mol_type = other DNA
cccacagtcagcaccttagattatcagttcccggatgcagctctgacaggcagttgtcaacatcaagttatcacttaggactgaggcagctcacttgccaaaggtctgtg

SEQ ID NO: 57628 - DNA, 110 bp, synthetic construct
  source 1..110: mol_type = other DNA
acactacagtcaagcagcaccagatccaagctgcatctgtgacgtatactgcagcttgcagcttacagccatgccagatccttaatctgctgaatgaagccagagatcaa

SEQ ID NO: 57629 - DNA, 110 bp, synthetic construct
  source 1..110: mol_type = other DNA
ttgcagcttacagccatgccagatccttaatctgctgaatgaagccagagatcaaagccatatcctcacagacactattgttggattcttaacccattaagctacaacag

SEQ ID NO: 57630 - DNA, 110 bp, synthetic construct
  source 1..110: mol_type = other DNA
tatacgaacaaataactggccttcataggaatagaaacagaacccagattcataaacatgctaattaacatttctagttgcattgattcacatttttgttaagaacaact

SEQ ID NO: 57631 - DNA, 110 bp, synthetic construct
  source 1..110: mol_type = other DNA
ctggccttcataggaatagaaacagaacccagattcataaacatgctaattaacatttctagttgcattgattcacatttttgttaagaacaactttacgacatgctaat

SEQ ID NO: 57632 - DNA, 110 bp, synthetic construct
  source 1..110: mol_type = other DNA
gcacaacccaaccaaatcctgtagcttttccagggtcagaaggttcctaatggaggaaaccagttaaagaagctggtctgccagtcagttgcacaaggtgcctaaacttg

SEQ ID NO: 57633 - DNA, 110 bp, synthetic construct
  source 1..110: mol_type = other DNA
gaaaccagttaaagaagctggtctgccagtcagttgcacaaggtgcctaaacttgagaagttcgagacatccctggaaacattgtgagttggagaaaatatactagggcg

SEQ ID NO: 57634 - DNA, 110 bp, synthetic construct
  source 1..110: mol_type = other DNA
ttggatctgatccctggccccagggaactccataggttgcagggcagaccaaaaaaaaaaaaaaaaaaaaaaaaagattttctattacttaaacttttcttgaagcgaga

SEQ ID NO: 57635 - DNA, 110 bp, synthetic construct
  source 1..110: mol_type = other DNA
ggccccagggaactccataggttgcagggcagaccaaaaaaaaaaaaaaaaaaaaaaaaagattttctattacttaaacttttcttgaagcgagattaatttttcaactt

SEQ ID NO: 57636 - DNA, 110 bp, synthetic construct
  source 1..110: mol_type = other DNA
gagtagtgagcattttaatgtatatattaaacacctggccaggctgtacttgaataggcataaaatgtatcagttaatggagttcccgtcgtggtgcagcagaaatgact

SEQ ID NO: 57637 - DNA, 110 bp, synthetic construct
  source 1..110: mol_type = other DNA
ttctgaagatttatgttcctgaagatttactgaagaatttttgaatcatggtattccagactccaggccttctgatcatgctgcaattcaccaatctccatttttcctaa

SEQ ID NO: 57638 - DNA, 110 bp, synthetic construct
  source 1..110: mol_type = other DNA
ccagactccaggccttctgatcatgctgcaattcaccaatctccatttttcctaacctttgtaaagatcttagcccagggatacttaatatatggttaagaatgaatgag

SEQ ID NO: 57639 - DNA, 110 bp, synthetic construct
  source 1..110: mol_type = other DNA
cctctgcttctggaagcctaaccttcctcctcacttagcaaaggggcttgatatgccgctgcatcgatcctcagctcaccatgtcctcctctctgcttaccactcatttg

SEQ ID NO: 57640 - DNA, 110 bp, synthetic construct
  source 1..110: mol_type = other DNA
caagccctggccccaactgcactgactgtcagagaataagaacaaagctgatgctaattacttaatacacttttatgaaattgttttcttatgtattactataacacaag

SEQ ID NO: 57641 - DNA, 110 bp, synthetic construct
  source 1..110: mol_type = other DNA
tgacagattggcaaaacagtggcttttcccctagatattcttaaataaaagcattgagttcaaagataggaatgttcagctttgctgaagttgatgctattttgggataa

SEQ ID NO: 57642 - DNA, 110 bp, synthetic construct; identical to SEQ ID NO: 57641
  source 1..110: mol_type = other DNA

SEQ ID NO: 57643 - DNA, 110 bp, synthetic construct
  source 1..110: mol_type = other DNA
ctgagccctgacgggaccgcctaagagctgtacttttaaagacaggtttcctgggtgaaaaatcctaactcaattatcagctataaaaatatggacaagttctgaatctc

SEQ ID NO: 57644 - DNA, 110 bp, synthetic construct
  source 1..110: mol_type = other DNA
tgaaaaatcctaactcaattatcagctataaaaatatggacaagttctgaatctcattttccttccttatcaaataggggtgataataaatcataccccatagtggtgtt

SEQ ID NO: 57645 - DNA, 110 bp, synthetic construct
  source 1..110: mol_type = other DNA
ttcgacccctagcctgtgaacttccatatgccatggcgtggccctaaaaaacaaaacacaacaaaatgaaaaaggatagaactacaatatgatccatctactccacttct

SEQ ID NO: 57646 - DNA, 110 bp, synthetic construct; identical to SEQ ID NO: 57645
  source 1..110: mol_type = other DNA

SEQ ID NO: 57647 - DNA, 110 bp, synthetic construct
  source 1..110: mol_type = other DNA
tttggctcgaatgcttccagtagctgaaagcttaccatctcctaagaaaacacatcccactgacaatagtcccaatggtagcaggattattcttcatcttgaattaaaat

SEQ ID NO: 57648 - DNA, 110 bp, synthetic construct
  source 1..110: mol_type = other DNA
caattagagtattatgcaacaaattgagaaatgcctgaatcttcattacaactcattccatgatttttgctgcacagttcttaccattaactttccttcattttactact

SEQ ID NO: 57649 - DNA, 110 bp, synthetic construct
  source 1..110: mol_type = other DNA
aatgccagatccttaacctgttgcaccacaagagaactcctcaaattagtgttgttattttctttagataaatatccaatagtggaatttctggtttgtatggtagttct

SEQ ID NO: 57650 - DNA, 110 bp, synthetic construct
  source 1..110: mol_type = other DNA
actataaaagagtacatatggtgtaacttgagaaaggtaattctttgaaggatcaaggcacaaagcatattccatattaatctagaggatcaaaattctctaaactagtg

SEQ ID NO: 57651 - DNA, 110 bp, synthetic construct
  source 1..110: mol_type = other DNA
aggcacaaagcatattccatattaatctagaggatcaaaattctctaaactagtgttttctatatgcagtaggcagaattctaagatggctctgaagattttcattccct

SEQ ID NO: 57652 - DNA, 110 bp, synthetic construct
  source 1..110: mol_type = other DNA
atgcgcatgcacacacacacacagcctctcaaaactttctttcaatccggagaagtgagagctgtgcaaccagaggaagcgcttagagaatgaacattttaatttctgta

SEQ ID NO: 57653 - DNA, 110 bp, synthetic construct
  source 1..110: mol_type = other DNA
tgagagctgtgcaaccagaggaagcgcttagagaatgaacattttaatttctgtagaagggagagcaagtcaaccagagtaacctaggtgttgcattgaatgacacgatg

SEQ ID NO: 57654 - DNA, 110 bp, synthetic construct
  source 1..110: mol_type = other DNA
attttatcagttttttaatctgacagctcattgaaattagtgtttaggaagtacttaggagatttaaatttccaatccaagtggtcaaggaaataagaatgggaggatca

SEQ ID NO: 57655 - DNA, 110 bp, synthetic construct
  source 1..110: mol_type = other DNA
ggtagttcattaatgctccagtagggcaatcggattatcaagttctcttgttgacaaagatccggagagctgataaagcccagaatgagataatttaaatgtactggcgt

SEQ ID NO: 57656 - DNA, 110 bp, synthetic construct
  source 1..110: mol_type = other DNA
aaagatccggagagctgataaagcccagaatgagataatttaaatgtactggcgtctctgtcaggtgaaagcaaactattttggtcatctctgcttattggaggatggaa

SEQ ID NO: 57657 - DNA, 110 bp, synthetic construct
  source 1..110: mol_type = other DNA
atcagtgcagtttaaactaatcttagaagcaaaattaagaggttattaacagttagctggacaagaacaccagcctctcacagcaaccaagacttatgagacagaactgg

SEQ ID NO: 57658 - DNA, 110 bp, synthetic construct
  source 1..110: mol_type = other DNA
atggtggtaatttggtggaagaaaggaccaagagaagaatggggtcctttcttccaccaaagaatcttgcgaggagatcctcagaccaccctgaggaagctgatgtgacc

SEQ ID NO: 57659 - DNA, 110 bp, synthetic construct
  source 1..110: mol_type = other DNA
accaaagaatcttgcgaggagatcctcagaccaccctgaggaagctgatgtgaccagaaaactggactaagaagttcaggaagaatggaggtggcacatggtttggagag

SEQ ID NO: 57660 - DNA, 110 bp, synthetic construct
  source 1..110: mol_type = other DNA
aggcaaggtggttatttaaaaagctgttcataccttcagagtcacatttagacgcatgtaggggtgaaagaacatgaggcctatgatttgctttgaagtcctttatcatt

SEQ ID NO: 57661 - DNA, 110 bp, synthetic construct
  source 1..110: mol_type = other DNA
tgcaagctcaggtgcacacacctcggtgtgggagacccctcatggcgctgacgtcctgtgtcactaggtaagcgccaaacccacagctagtccgtgaattagaaactcaa

SEQ ID NO: 57662 - DNA, 110 bp, synthetic construct
  source 1..110: mol_type = other DNA
ctgtgtcactaggtaagcgccaaacccacagctagtccgtgaattagaaactcaaacctggcttcctaggggccatgaaggtgtatgtgtccagataacaggatagagcg

SEQ ID NO: 57663 - DNA, 110 bp, synthetic construct
  source 1..110: mol_type = other DNA
gtagcatttttgacttgggccgcagcgtagctccagggtagagaggaaaactggctctctcagctgttgacaccattggtgttgatgtgtgttcttttggttgagcttgg

SEQ ID NO: 57664 - DNA, 110 bp, synthetic construct
  source 1..110: mol_type = other DNA
tctctcagctgttgacaccattggtgttgatgtgtgttcttttggttgagcttgggcaaccaaaatgctgttctccaatggtttgggggacactagcagatgaaaactcc

SEQ ID NO: 57665 - DNA, 110 bp, synthetic construct
  source 1..110: mol_type = other DNA
gggaactcctatattttgtatgtctaaaggtagaactattaattgtttctttgccttctgcttatatccttccagccaattgatcacagagctttaagccagttggtgac

SEQ ID NO: 57666 - DNA, 110 bp, synthetic construct
  source 1..110: mol_type = other DNA
ttctgcttatatccttccagccaattgatcacagagctttaagccagttggtgactgattttggagctactaatgggtaatcaatggagcttgtttttctcttcctgaaa

SEQ ID NO: 57667 - DNA, 110 bp, synthetic construct
  source 1..110: mol_type = other DNA
agaaacaaatggacaattactctggggtttgatgcatttcctgtttccctctgccttgaatagctactgtaaagcacaggatatgaacagagttggccactggtgatctg

SEQ ID NO: 57668 - DNA, 110 bp, synthetic construct
  source 1..110: mol_type = other DNA
ttgaatagctactgtaaagcacaggatatgaacagagttggccactggtgatctgccatgtctgtcagctttggctgacaggttattctcagctttgtagcctgatcttt

SEQ ID NO: 57669 - DNA, 110 bp, synthetic construct
  source 1..110: mol_type = other DNA
gctttgccactttagtgtggttggaagcaatgtgtgccatctccctatctgttcttcccaaagcttccagactacctccttttccaccactccctacatgctcctctctc

SEQ ID NO: 57670 - DNA, 110 bp, synthetic construct
  source 1..110: mol_type = other DNA
tcccaaagcttccagactacctccttttccaccactccctacatgctcctctctcttgcctcctattccagccatgtgtgggaatatagtagaggacattgatgccttag

SEQ ID NO: 57671 - DNA, 110 bp, synthetic construct
  source 1..110: mol_type = other DNA
gagagcctagaatcaagttaataagagttcccgttaaaaaacacacctatttccattgacaggaagctcaagataagcgatcggtgtgctctgacttccaaaaaatctaa

SEQ ID NO: 57672 - DNA, 110 bp, synthetic construct
  source 1..110: mol_type = other DNA
ttgacaggaagctcaagataagcgatcggtgtgctctgacttccaaaaaatctaatgaaacttcattatgtataaaataggttgttcacaacaagcaacaaagtgattaa

SEQ ID NO: 57673 - DNA, 110 bp, synthetic construct
  source 1..110: mol_type = other DNA
agtctttagtcttcactaggaatcccattacattttaccagtctactgtccaccctgttctccagaacaaccattcctacctcctctttctttaaatctccagaatctct

SEQ ID NO: 57674 - DNA, 110 bp, synthetic construct
  source 1..110: mol_type = other DNA
tgttctccagaacaaccattcctacctcctctttctttaaatctccagaatctctattttgctgcttatatcttggttcccatttctttgagaaaatacagtcaaaaatg

SEQ ID NO: 57675 - DNA, 110 bp, synthetic construct
  source 1..110: mol_type = other DNA
tggggagtttgctcagctttcccttgaatttctgggaggagggattcgctaggacttccccaacaggtccttgtgctcttggccccacaggcacttgacctagctgtcct

SEQ ID NO: 57676 - DNA, 110 bp, synthetic construct
  source 1..110: mol_type = other DNA
gtggggaaaaaagaaagtcgtgattctctggaatagtgtaatccatctggtagtgggaacagctcttcattttcctccaaagttgtcctgggatctcaaagccagtgggt

SEQ ID NO: 57677 - DNA, 110 bp, synthetic construct
  source 1..110: mol_type = other DNA
ggaacagctcttcattttcctccaaagttgtcctgggatctcaaagccagtgggttgcctctcatattaactcttgtgcagcggccatcaagttatcttctaccatttct

SEQ ID NO: 57678 - DNA, 110 bp, synthetic construct
  source 1..110: mol_type = other DNA
atgtgtatgtagcagctcactaaagctgtaatcaatgcagaggcgcttttctgtaatgtaagaatactaaggcgtctctcctggtaatccctccagtaaaaaggatgaat

SEQ ID NO: 57679 - DNA, 110 bp, synthetic construct; identical to SEQ ID NO: 57678
  source 1..110: mol_type = other DNA

SEQ ID NO: 57680 - DNA, 110 bp, synthetic construct
  source 1..110: mol_type = other DNA
taccagacaaattttttgactcggaggcacgataacgtaactgtattagaggaacatgccatgtgcctgtgcctggggaggacggatggctaagagcactccaagggttt

SEQ ID NO: 57681 - DNA, 110 bp, synthetic construct
  source 1..110: mol_type = other DNA
atgccatgtgcctgtgcctggggaggacggatggctaagagcactccaagggttttcattgattgtactcaggagagcagaagtactgatttacctcacatggatgaaca

SEQ ID NO: 57682 - DNA, 110 bp, synthetic construct
  source 1..110: mol_type = other DNA
ctttatgccgacccatgagactaaccacctcactcaagtgacatcctgtttttggtgccggtgccaagactgcgagatcttttcctccttcaccgtgggacaccacacac

SEQ ID NO: 57683 - DNA, 110 bp, synthetic construct
  source 1..110: mol_type = other DNA
tgagactaaccacctcactcaagtgacatcctgtttttggtgccggtgccaagactgcgagatcttttcctccttcaccgtgggacaccacacacctccagctttctcaa

SEQ ID NO: 57684 - DNA, 110 bp, synthetic construct
  source 1..110: mol_type = other DNA
tcttaggtcagctgtgctggagtgccccccaggtatgtactgatcccagagaacgaggctgtacccacactgcagcagctgagacttgctggtcccaggtcactgcacag

SEQ ID NO: 57685 - DNA, 110 bp, synthetic construct
  source 1..110: mol_type = other DNA
ctgagcacgacagacttgctctttgttctaagtgagctttcagcctaactttactggatgcttattaggaatatgaagagtgtaactgtgcctgccagaggacatgtaat

SEQ ID NO: 57686 - DNA, 110 bp, synthetic construct
  source 1..110: mol_type = other DNA
ggatgcttattaggaatatgaagagtgtaactgtgcctgccagaggacatgtaatattccaggagaaataactaaggccatacacctttacataaaagacacgacaaaag

SEQ ID NO: 57687 - DNA, 110 bp, synthetic construct
  source 1..110: mol_type = other DNA
aaggaaaagacaatgcagtcaagtactacgtagaacaatgcttttactcatgcgaagagcagagtgagcaaactcaacactaacagtgtgtgttgattcccctccccaac

SEQ ID NO: 57688 - DNA, 110 bp, synthetic construct
  source 1..110: mol_type = other DNA
cagcctaagaggtcttgatgtctcccccaaacccatggcctttccaatgatatgtataggtaggaaagcacttttaccctggggaggtttgctggaagatgagttaggag

SEQ ID NO: 57689 - DNA, 110 bp, synthetic construct
  source 1..110: mol_type = other DNA
ccactaagccacattgggaactccccaaatatgaacttgtattcattaaaattcaccatttatagagtggaaagacaaacaataggagaaagtatttaaaatacattggg

SEQ ID NO: 57690 - DNA, 110 bp, synthetic construct; identical to SEQ ID NO: 57689
  source 1..110: mol_type = other DNA

SEQ ID NO: 57691 - DNA, 110 bp, synthetic construct
  source 1..110: mol_type = other DNA
ctgttgtgctcctggggcttttacattaacaatccaccatggaaatataaaaattctgtcctgagttttaaaatgtgttcttcacagagttcctgtcctggcagtggtga

SEQ ID NO: 57692 - DNA, 110 bp, synthetic construct
  source 1..110: mol_type = other DNA
cttagagagatgcatttagactttcacattggctgcacgacattagacctactctgatgggtacacaaaagttgtaatgaccacttgtaagtacagtattatttcagact

SEQ ID NO: 57693 - DNA, 110 bp, synthetic construct
  source 1..110: mol_type = other DNA
gacctactctgatgggtacacaaaagttgtaatgaccacttgtaagtacagtattatttcagactttgaaaatatcttagagaaaggtaatttagtagatgtaatcaaat

SEQ ID NO: 57694 - DNA, 110 bp, synthetic construct
  source 1..110: mol_type = other DNA
ttgtgttcaaagccttcactcttccttttaacaagtgtcaattggtataagtgtaccatgtcatacgtttggctctttgattaggctctgcatgagttccttaaagaggg

SEQ ID NO: 57695 - DNA, 110 bp, synthetic construct
  source 1..110: mol_type = other DNA
tgaatttgcgtaggttatctttccttccaatcccaagcataggtatcgcagaattaaagaggatgtggaaaaatctgaagagtcctattttgattttagcagttcaaata

SEQ ID NO: 57696 - DNA, 110 bp, synthetic construct
  source 1..110: mol_type = other DNA
aaagaggatgtggaaaaatctgaagagtcctattttgattttagcagttcaaatatagtaagtgcggggtttcctttaggttttggttcttgacaaacattaccaaaggg

SEQ ID NO: 57697 - DNA, 110 bp, synthetic construct; identical to SEQ ID NO: 57695
  source 1..110: mol_type = other DNA

SEQ ID NO: 57698 - DNA, 110 bp, synthetic construct; identical to SEQ ID NO: 57696
  source 1..110: mol_type = other DNA

SEQ ID NO: 57699 - DNA, 110 bp, synthetic construct
  source 1..110: mol_type = other DNA
caaacagagcagataagttaaatattataaattgaattgtgtctcccaaaaaggtatggtgaagacctaatccctcaggcctatgaatgcggcctttttgcaagatcctt

SEQ ID NO: 57700 - DNA, 110 bp, synthetic construct; identical to SEQ ID NO: 57699
  source 1..110: mol_type = other DNA

SEQ ID NO: 57701 - DNA, 110 bp, synthetic construct
  source 1..110: mol_type = other DNA
tgtaagcctataacatatctttgctttctagcccaacagacagtgagcaagtcctaaagactttcctactccgagatctctgttcctctgaagaattcatgagggattag

SEQ ID NO: 57702 - DNA, 110 bp, synthetic construct
  source 1..110: mol_type = other DNA
aaagactttcctactccgagatctctgttcctctgaagaattcatgagggattagaacattctgttttcaggaagatcattgctgttattctatcagctttcaaattttg

SEQ ID NO: 57703 - DNA, 110 bp, synthetic construct
  source 1..110: mol_type = other DNA
gtcattagactctccaatatctactgttatggcactgattgtaaatatattatagaacccacctcaaaaaagttcatgtgcaaagccagaaatcatatgacttatttttt

SEQ ID NO: 57704 - DNA, 110 bp, synthetic construct; identical to SEQ ID NO: 57703
  source 1..110: mol_type = other DNA

SEQ ID NO: 57705 - DNA, 110 bp, synthetic construct
  source 1..110: mol_type = other DNA
actagaaatccatcctttgcttgttctttcagatcagctatggatagcaaatactttctctgaaatgctctgttttacatctttcctggactaatggctacatcctgtcc

SEQ ID NO: 57706 - DNA, 110 bp, synthetic construct
  source 1..110: mol_type = other DNA
gctccaggcaattgcttatctgtttcatctataagctatcacacaacctgtgtcaatcatattcttggattcttgttgtatttatttgcttgtgtgtcttcctaggggct

SEQ ID NO: 57707 - DNA, 110 bp, synthetic construct
  source 1..110: mol_type = other DNA
tgtaaaaccaggaatttacacctctgctgcagactttgtaaattcagtgcctgcagaacatctgaaaagacaggaaaacaaatgctaccacggctgaaataggtctggtc

SEQ ID NO: 57708 - DNA, 110 bp, synthetic construct
  source 1..110: mol_type = other DNA
gaacatctgaaaagacaggaaaacaaatgctaccacggctgaaataggtctggtcttagcagttgtgggctttatgggcagagacataggagttggaccaggcaagagtc

SEQ ID NO: 57709 - DNA, 110 bp, synthetic construct
  source 1..110: mol_type = other DNA
ttattgtatacatggatacattcatctgtggcaatcaaaatgaaccaacaattttgagaaagacttttacaaaatcaaaactttgaccaactagtgagtgtctgactgat

SEQ ID NO: 57710 - DNA, 110 bp, synthetic construct; identical to SEQ ID NO: 57709
  source 1..110: mol_type = other DNA

SEQ ID NO: 57711 - DNA, 110 bp, synthetic construct
  source 1..110: mol_type = other DNA
tgtataaaaatacacttcatggagtagctcaatcttcacataactcacctgctcttcttttatgcacagttgtttttattgtactgtatttcacagtatctcctatacaa

SEQ ID NO: 57712 - DNA, 110 bp, synthetic construct
  source 1..110: mol_type = other DNA
tctgtaataagtctaaatagtccacataaataaatgggggggtgatccatattatatcaaaaagcaaaaacaaaattctctacgcttaaaatttagcagaggtatgcact

SEQ ID NO: 57713 - DNA, 110 bp, synthetic construct
  source 1..110: mol_type = other DNA
atcaaaaagcaaaaacaaaattctctacgcttaaaatttagcagaggtatgcactgacttaactggtacattacaggaattttgaaacctgctctactgatgaaaataaa

SEQ ID NO: 57714 - DNA, 110 bp, synthetic construct
  source 1..110: mol_type = other DNA
attcctgggctctctctcccattcaattgatctatttgcatagtatgttgccaatggcattagctatagcttcaagcatgatgttaaaaaggaatggtaggcatggacat

SEQ ID NO: 57715 - DNA, 110 bp, synthetic construct
  source 1..110: mol_type = other DNA
aacacccagtgcaagagggtttacactcactcctaagctcttttctatgaatcttctaaggggttcatggaaaagaatgagatcaggtcatgacaccagaaatactccat

SEQ ID NO: 57716 - DNA, 110 bp, synthetic construct
  source 1..110: mol_type = other DNA
ctaaggggttcatggaaaagaatgagatcaggtcatgacaccagaaatactccatgactgcaaaatagaagtggaacaatatcaaaatatggctcaattccttgggctct

SEQ ID NO: 57717 - DNA, 110 bp, synthetic construct
  source 1..110: mol_type = other DNA
caggcattgttaagaacagaatactgtggtatatttttaaattatttgcctatttcttcctgccccttgccggtagcaaaaagtatttttttcctctgatttttagctag

SEQ ID NO: 57718 - DNA, 110 bp, synthetic construct
  source 1..110: mol_type = other DNA
cttcctgccccttgccggtagcaaaaagtatttttttcctctgatttttagctaggaaacctgattaagctcctggaggtaaaacgcacaatattggggaagggcaagga

SEQ ID NO: 57719 - DNA, 110 bp, synthetic construct
  source 1..110: mol_type = other DNA
tgatccttcatctcaagatcctcaagggctttaaggcttaatgagaaaggtgagtgctaatacaacaccgtggagctaagagggatcaaatgctgtgaattggagcattt

SEQ ID NO: 57720 - DNA, 110 bp, synthetic construct
  source 1..110: mol_type = other DNA
gctaatacaacaccgtggagctaagagggatcaaatgctgtgaattggagcatttactctagatcagtaagtacctagatcaacctctttcctttcatgtaacttgtgca

SEQ ID NO: 57721 - DNA, 110 bp, synthetic construct
  source 1..110: mol_type = other DNA
tttatatgttgtttgtggcatagagaagtattcatgagaagagaaacctacagcctctaaataaactgtccaatgcagccatcacaatagtatgtaatatattataacat

SEQ ID NO: 57722 - DNA, 110 bp, synthetic construct
  source 1..110: mol_type = other DNA
gagaagagaaacctacagcctctaaataaactgtccaatgcagccatcacaatagtatgtaatatattataacatccaaatactacagttttatttttttacaaacggaa

SEQ ID NO: 57723 - DNA, 110 bp, synthetic construct
  source 1..110: mol_type = other DNA
cagagctatataaagaagggttctgcacggttgagttgtattgatataaaggatgagagcaatccttagccctagggccaaaccttcattgattctagactctttccaat

SEQ ID NO: 57724 - DNA, 110 bp, synthetic construct
  source 1..110: mol_type = other DNA
agagcaatccttagccctagggccaaaccttcattgattctagactctttccaatgagaggtttataacataacaccgtgaccatttcttggcagagattacttttacca

SEQ ID NO: 57725 - DNA, 110 bp, synthetic construct
  source 1..110: mol_type = other DNA
ctcagaaagatggctagtgccaaatgaatgaagcaagtgctctagtgctctgtgcgtgaagacagtcaacatggcatatttgtttagctgttaagagtttgactctggat

SEQ ID NO: 57726 - DNA, 110 bp, synthetic construct
  source 1..110: mol_type = other DNA
gtgaagacagtcaacatggcatatttgtttagctgttaagagtttgactctggattcagactcctgacacctgtgaaacacttttgtatgttcacaagtccatggttagc

SEQ ID NO: 57727 - DNA, 110 bp, synthetic construct
  source 1..110: mol_type = other DNA
attctttcttcttcctgttgggctttgttgttgtcacaaggttcaagagacttctcttttggttgcccagctctgtttgactgaagtttctgttaattttgagagagggc

SEQ ID NO: 57728 - DNA, 110 bp, synthetic construct
  source 1..110: mol_type = other DNA
cttttggttgcccagctctgtttgactgaagtttctgttaattttgagagagggcaaggaggagaggagaacaggaggagtgtggtttcttgaagccaagtgaagaggga

SEQ ID NO: 57729 - DNA, 110 bp, synthetic construct
  source 1..110: mol_type = other DNA
gtggatagtgacccaaatttaaaaattaagaaaaagcagtaaatacaggatttttagaattaagggagcaaaaagagctagtagatttaaaagacagttgcaggagttaa

SEQ ID NO: 57730 - DNA, 110 bp, synthetic construct
  source 1..110: mol_type = other DNA
ccagtgcacgtgaaagtctgtgtacaccttttaagaatgaggttttggtttccccccaccctgtggagctcctgcacataagctccactgtccttcaatggcagatgctc

SEQ ID NO: 57731 - DNA, 110 bp, synthetic construct
  source 1..110: mol_type = other DNA
gtctgtgtacaccttttaagaatgaggttttggtttccccccaccctgtggagctcctgcacataagctccactgtccttcaatggcagatgctccagggctctttctcc

SEQ ID NO: 57732 - DNA, 110 bp, synthetic construct
  source 1..110: mol_type = other DNA
cttttatctgtgaaaatatttatatctagacagctgtattagttgctgacatgcagtataaaattcgacatgatctattgctttaggccatttccttcatataagatgtt

SEQ ID NO: 57733 - DNA, 110 bp, synthetic construct; identical to SEQ ID NO: 57732
  source 1..110: mol_type = other DNA

SEQ ID NO: 57734 - DNA, 110 bp, synthetic construct
  source 1..110: mol_type = other DNA
tccaaagaaactttttttttgtctttttgtcttttctagggctgcacctgtggcacatgggtgttcccaggctagagttccaatcatagctgttgccactggcctatgcc

SEQ ID NO: 57735 - DNA, 110 bp, synthetic construct
  source 1..110: mol_type = other DNA
ctagggctgcacctgtggcacatgggtgttcccaggctagagttccaatcatagctgttgccactggcctatgccacatctatagcaatgcaggatctgagccacgtctg

SEQ ID NO: 57736 - DNA, 110 bp, synthetic construct
  source 1..110: mol_type = other DNA
aagtttccattgtggttcaggggattaaaaaccaatgtactctccacgagggtatagattctacccctggcctcgcttagtgtgttgagaatatggcattggctaaagct

SEQ ID NO: 57737 - DNA, 110 bp, synthetic construct
  source 1..110: mol_type = other DNA
agattctacccctggcctcgcttagtgtgttgagaatatggcattggctaaagctgcagtgtaggtcagttgcagcttggatctcatgtatctctggctatggcctaggc

SEQ ID NO: 57738 - DNA, 110 bp, synthetic construct
  source 1..110: mol_type = other DNA
atcgaacccacatgcttctagatactagtcagttttgttactgctgagccacaacagaactcttcttcgaggcttattaaaggtaacagcactaagtatttgtttacagc

SEQ ID NO: 57739 - DNA, 110 bp, synthetic construct
  source 1..110: mol_type = other DNA
agaactcttcttcgaggcttattaaaggtaacagcactaagtatttgtttacagctgaattgctagaaacttaatcatatactctcccaaggatgcaatcagttaggaaa

SEQ ID NO: 57740 - DNA, 110 bp, synthetic construct
  source 1..110: mol_type = other DNA
gaacccaggaataaaactcatccctttgtggacaaatgatctttgacaaagatgtcaagctttcataattgggaaatgacagcctatccaacaaatgatattgggaaaac

SEQ ID NO: 57741 - DNA, 110 bp, synthetic construct
  source 1..110: mol_type = other DNA
caagctttcataattgggaaatgacagcctatccaacaaatgatattgggaaaactagattatctatatacaaagaatgaaactggacccttatcttatactatgcaaaa

SEQ ID NO: 57742 - DNA, 110 bp, synthetic construct
  source 1..110: mol_type = other DNA
cataaggaggaatatagggaatcatcataatctgtgttttgtcttctccagtgtctatttctgatcactctatatgagctcttcttccctttcctacctgcttcacacaa

SEQ ID NO: 57743 - DNA, 110 bp, synthetic construct
  source 1..110: mol_type = other DNA
ttggttgataggtctctcaaaatgctactgccgaatgaggctctattaatggtagccaaaagcctctggactgcctgttttactagtctgttatggtacagaagctggtt

SEQ ID NO: 57744 - DNA, 110 bp, synthetic construct
  source 1..110: mol_type = other DNA
tactgccgaatgaggctctattaatggtagccaaaagcctctggactgcctgttttactagtctgttatggtacagaagctggttctctcttgttgcttcttctcatatc

SEQ ID NO: 57745 - DNA, 110 bp, synthetic construct
  source 1..110: mol_type = other DNA
taggattttctctagcatatgaccaggaatgggactgctgggtcatatggtagttcaatatttagtttttttaaagaacttatatactgtcctccatagtggtttcagct

SEQ ID NO: 57746 - DNA, 110 bp, synthetic construct
  source 1..110: mol_type = other DNA
caatatttagtttttttaaagaacttatatactgtcctccatagtggtttcagctatttaaattcccactaacagtgtaggaggattgctatttctccacagcctttcca

SEQ ID NO: 57747 - DNA, 110 bp, synthetic construct
  source 1..110: mol_type = other DNA
cagccacagcaacacgcagatctgagcttcatctgcaagctaagctgcagcttgtggtaatgctagatcattaacctacggagagaggccaggaattgaacccatatcct

SEQ ID NO: 57748 - DNA, 110 bp, synthetic construct; identical to SEQ ID NO: 57747
  source 1..110: mol_type = other DNA

SEQ ID NO: 57749 - DNA, 110 bp, synthetic construct
  source 1..110: mol_type = other DNA
tagctaaccttgcttttttcagttaccgttggcttgaaatgtctttttccatctgtttactcttagtctatgtgtgtttttatgttagtctctcattggcagtatatcct

SEQ ID NO: 57750 - DNA, 110 bp, synthetic construct; identical to SEQ ID NO: 57749
  source 1..110: mol_type = other DNA

SEQ ID NO: 57751 - DNA, 110 bp, synthetic construct
  source 1..110: mol_type = other DNA
aaggctcagagttaattctctctccttttcaagactgtattcaatggccattttttgctgtacttcacaggtaagctgtcactagcttaacttaaaatggttctattttt

SEQ ID NO: 57752 - DNA, 110 bp, synthetic construct
  source 1..110: mol_type = other DNA
ggccatttgtctatcggtctttggagaaccatatattcaagtctttgactcatttttaaattgggttattagatttttttgctactgagttgaagaaattccttatatat

SEQ ID NO: 57753 - DNA, 110 bp, synthetic construct
  source 1..110: mol_type = other DNA
ttatcttgtccttccagtttaatgtgatccagcttatattataagcaacctacatggcttgctcaagtccatgttttgttttcatagtgtgctttatctatgctttatca

SEQ ID NO: 57754 - DNA, 110 bp, synthetic construct
  source 1..110: mol_type = other DNA
ctccttttgaagtaattagggtgggagctggctaatctcagtgctggccttaacgactttgtgttgggggctgttttttctgtagttggagaaagaacagaatgtctcca

SEQ ID NO: 57755 - DNA, 110 bp, synthetic construct
  source 1..110: mol_type = other DNA
ctacatggagcccataatttacggtcgagaagtatcactctccgacaggtaggcttccctggagatgtattacagagcatcagatgttattcctcagagacccgaggttg

SEQ ID NO: 57756 - DNA, 110 bp, synthetic construct
  source 1..110: mol_type = other DNA
ctgtttagacacttccctaattgtgtaccccaaacctaagtttccctgtcttgctaattcctcacaatcttatttatttatttatttgtctgaaaagtataaatactgct

SEQ ID NO: 57757 - DNA, 110 bp, synthetic construct
  source 1..110: mol_type = other DNA
gtgaaaggagaaggaaatactttaggaaaaacaaagagcttgagtagatacagagtgagaaagtctgtttcagtgtgttagaagttcatcacagctgcaatggagtattt

SEQ ID NO: 57758 - DNA, 110 bp, synthetic construct
  source 1..110: mol_type = other DNA
tgagaaagtctgtttcagtgtgttagaagttcatcacagctgcaatggagtatttagtggaggcaggaagctagagagatggtctgagatagatcagaaagaaccttctt

SEQ ID NO: 57759 - DNA, 110 bp, synthetic construct
  source 1..110: mol_type = other DNA
gagccctagtacctttttgactgaggtcctagcctcttatcctcagtttatgagctctttcctaattctcattctcagatgagagcattgtcaggctgaatcaatatgcc

SEQ ID NO: 57760 - DNA, 110 bp, synthetic construct
  source 1..110: mol_type = other DNA
tctttcctaattctcattctcagatgagagcattgtcaggctgaatcaatatgcctcagcaaagaattccatgaaagtactatatccctttatcttttggcaagaggttg

SEQ ID NO: 57761 - DNA, 110 bp, synthetic construct
  source 1..110: mol_type = other DNA
attgttgatttttctgagaagggaccaaccgataccactcctttcgctctgctgcaaagactgttgccttgcaaagtgctctctgccaacaagggtaactttcataggat

SEQ ID NO: 57762 - DNA, 110 bp, synthetic construct
  source 1..110: mol_type = other DNA
aaagactgttgccttgcaaagtgctctctgccaacaagggtaactttcataggataaaaacacgtttgcacaaagtggggaataggatggcattcagtgtatttcaacct

SEQ ID NO: 57763 - DNA, 110 bp, synthetic construct
  source 1..110: mol_type = other DNA
aagtagaaaacagaaaagaaacttatgtttgggggagggaaggatatgagtatttttaaacactctttaggaaagagtatttgagtagaaatgtccaatgagtatttaag

SEQ ID NO: 57764 - DNA, 110 bp, synthetic construct
  source 1..110: mol_type = other DNA
ttaaacactctttaggaaagagtatttgagtagaaatgtccaatgagtatttaagtacaaatgtccaataaggaactagaaacagagatctggacagaaatctatatgga

SEQ ID NO: 57765 - DNA, 110 bp, synthetic construct
  source 1..110: mol_type = other DNA
gggatggagagaaagggttaagagctgattttacctctgctttcactaagaaagaaagccccttaggtgtaaactccctcagttttctgctccccctactgctgaccctc

SEQ ID NO: 57766 - DNA, 110 bp, synthetic construct
  source 1..110: mol_type = other DNA
gtaaaccaagggatgcctgaggctacagaagctgaaagatgcaaggaaagatccttctctgatcagaaggagcatggtttgctgatgccttaatttcagactcctaagtt

SEQ ID NO: 57767 - DNA, 110 bp, synthetic construct
  source 1..110: mol_type = other DNA
tctctgatcagaaggagcatggtttgctgatgccttaatttcagactcctaagttccatatctgtgaaacaatcagtatctgttgtaagccacctacgttgtgagtaatg

SEQ ID NO: 57768 - DNA, 110 bp, synthetic construct
  source 1..110: mol_type = other DNA
tcatcggtccacttattaatgtagcctagatactactctacatcaggacattgctatttctcttttcttccccctcagctttgcagccccccatttcgtgagcaagccat

SEQ ID NO: 57769 - DNA, 110 bp, synthetic construct
  source 1..110: mol_type = other DNA
ggggcccaggagaatatttctgacacttcgagtcccaaacaccacctcattagtaatatccaggttttataaacacccacttttttttaatcgttagaagatcctcatac

SEQ ID NO: 57770 - DNA, 110 bp, synthetic construct
  source 1..110: mol_type = other DNA
gaattgtgacaatgataaagaatacagaaataagtgatgccgtagggattttttcccccaagacttgtggcataattatagaattctggggaggaggaaatgcagagagc

SEQ ID NO: 57771 - DNA, 110 bp, synthetic construct
  source 1..110: mol_type = other DNA
tgaagtgggtctccaaaccaaggttgaggtactaacaagtcagtttcttaaaagccattttctttcaagaaatgcagacatacagttatttttatttcccaaaatttcaa

SEQ ID NO: 57772 - DNA, 110 bp, synthetic construct
  source 1..110: mol_type = other DNA
gaggtactaacaagtcagtttcttaaaagccattttctttcaagaaatgcagacatacagttatttttatttcccaaaatttcaaggcttttattggcttacactttttc

SEQ ID NO: 57773 - DNA, 110 bp, synthetic construct
  source 1..110: mol_type = other DNA
cctgcatgtgtggttttgaagtatttggctaaatagttgctcattttgaaaactgataggaaattttcagaacactagcgttgtggctaattcttgcaactctgttaagt

SEQ ID NO: 57774 - DNA, 110 bp, synthetic construct
  source 1..110: mol_type = other DNA
ataggaaattttcagaacactagcgttgtggctaattcttgcaactctgttaagtccttcaagaaagagttatgtttgggctaacgttcaggcattagaaagcagagaag

SEQ ID NO: 57775 - DNA, 110 bp, synthetic construct
  source 1..110: mol_type = other DNA
gaactccaattggagatatttaaaacagagcatctatgacccacagaagttgctactggggcacagttatagagaaactactgacacccttagaggtagcttcttagaag

SEQ ID NO: 57776 - DNA, 110 bp, synthetic construct
  source 1..110: mol_type = other DNA
ctggggcacagttatagagaaactactgacacccttagaggtagcttcttagaagctggtcatagtcgttttagaatggattcttcatcttttttttttcccttaggtga

SEQ ID NO: 57777 - DNA, 110 bp, synthetic construct
  source 1..110: mol_type = other DNA
catgtgtgcagtcacttatgcttaggtaacagaggctcaataaaactctggacgccaaagcttgtatgtgctccctgatttggcaaccctttgtccatactgtcatacag

SEQ ID NO: 57778 - DNA, 110 bp, synthetic construct
  source 1..110: mol_type = other DNA
tcacccatatttctagcatggaatcacctttccatcacatcatcactctctacaccagcatttgtcatgtaacctggtactaaccaatcacatcatcaaatattcctggg

SEQ ID NO: 57779 - DNA, 110 bp, synthetic construct
  source 1..110: mol_type = other DNA
tattgctttttgacttggaagtgatcacttttctatttttcttttcaaatatccagaatccacatattaaccatgcaactatccatcagtaaagattaacctactgaaag

SEQ ID NO: 57780 - DNA, 110 bp, synthetic construct; identical to SEQ ID NO: 57779
  source 1..110: mol_type = other DNA

SEQ ID NO: 57781 - DNA, 110 bp, synthetic construct
  source 1..110: mol_type = other DNA
gtgtttatagattagacaaggtaaagaagaagcatcttttaaatacacatgagatgcaggtcatagagtggtcctcctagaagcatacattcttcagctgcaagccaggt

SEQ ID NO: 57782 - DNA, 110 bp, synthetic construct
  source 1..110: mol_type = other DNA
gcaggtcatagagtggtcctcctagaagcatacattcttcagctgcaagccaggttcaccattatcaatgaacttcatttaagacattattttgatattccaactgtcat

SEQ ID NO: 57783 - DNA, 110 bp, synthetic construct
  source 1..110: mol_type = other DNA
aattacctagactagacccatagaattatgtggtcatataagatctcggttgtgtatatttattttacattaagtacattttatcccaggaagcctttaagctccctgat

SEQ ID NO: 57784 - DNA, 110 bp, synthetic construct; identical to SEQ ID NO: 57783
  source 1..110: mol_type = other DNA

SEQ ID NO: 57785 - DNA, 110 bp, synthetic construct
  source 1..110: mol_type = other DNA
aatattccacagtgtataggtacctaatcttcttagactaatcatctgttgatgggtgtttgggttgcttccatgcttactattgtaaatagtactgggataaatattga

SEQ ID NO: 57786 - DNA, 110 bp, synthetic construct
  source 1..110: mol_type = other DNA
gtgtttgggttgcttccatgcttactattgtaaatagtactgggataaatattgagggtgcatttatcttttcaatccctgctgtatattatatatgatgttgttaggac

SEQ ID NO: 57787 - DNA, 110 bp, synthetic construct
  source 1..110: mol_type = other DNA
tgagggagctaatacaagcggctttaagacaccccgcccacaggtgcaagctcagaccctaccctcctacacacaccccatcactacccatgtcttcaggcttccacggt

SEQ ID NO: 57788 - DNA, 110 bp, synthetic construct
  source 1..110: mol_type = other DNA
accctaccctcctacacacaccccatcactacccatgtcttcaggcttccacggtatggacaagaacctagaattctggcctcctggaatgtgtaaagctttgcgtgagc

SEQ ID NO: 57789 - DNA, 110 bp, synthetic construct
  source 1..110: mol_type = other DNA
atccttagaagcagtaggtaggtaggaattgctgttcacatattagtttcagcagggagccatttctcttagctagtgtgttctgatatgtcccagctatttgcacataa

SEQ ID NO: 57790 - DNA, 110 bp, synthetic construct
  source 1..110: mol_type = other DNA
tatattgtgtaacaggaaccaacatagtgttagtaggtcaatggttctctaaaaacaaaccgaaaaactcacaggaaaagagatcagatttatggtcaccagaaccaggg

SEQ ID NO: 57791 - DNA, 110 bp, synthetic construct
  source 1..110: mol_type = other DNA
caaaccgaaaaactcacaggaaaagagatcagatttatggtcaccagaaccaggggtcagtgagggaagggggaattggataaaggcagtcaaaaggcacaaacttccag

SEQ ID NO: 57792 - DNA, 110 bp, synthetic construct
  source 1..110: mol_type = other DNA
ggtcaacaaatttttgacaacaatgtcaaaaatacacaatgggaaaatgaaagtctcttcaataaacggtgttgggaagactgcatatccacatgcaaaggaatgaaact

SEQ ID NO: 57793 - DNA, 110 bp, synthetic construct
  source 1..110: mol_type = other DNA
tcttcaataaacggtgttgggaagactgcatatccacatgcaaaggaatgaaactggatccctatactataaaatacaaaaaaataacctgaaatggatcaaaggcttca

SEQ ID NO: 57794 - DNA, 110 bp, synthetic construct
  source 1..110: mol_type = other DNA
cgtttataaggatataaaagtgtcttaaaagggaagtaacctgtgtgtttttttagagattactcgcagcattgatgctgatttggcaaaagtcaaatacatagagcatg

SEQ ID NO: 57795 - DNA, 110 bp, synthetic construct
  source 1..110: mol_type = other DNA
ctcacaggagaaaaggtgaattaatagactgaacctaaggtccacttagcttgagcaaggtactcaaagttctgtgtgaactttccagaagatgagctgcatatctccaa

SEQ ID NO: 57796 - DNA, 110 bp, synthetic construct
  source 1..110: mol_type = other DNA
caaggtactcaaagttctgtgtgaactttccagaagatgagctgcatatctccaaatatggagaagacctaatgtttaaacatcctctgcttaaaggtactcattcttaa

SEQ ID NO: 57797 - DNA, 110 bp, synthetic construct
  source 1..110: mol_type = other DNA
aactaataatgacagtagttcattctcagctctcattctgctttggtagacttcggactggagtgagtttgtgcagtgttggtgtacttaaaactggaattgtgtttcca

SEQ ID NO: 57798 - DNA, 110 bp, synthetic construct
  source 1..110: mol_type = other DNA
tgtttgggaagaaaataacagatttcagaccagatccttccatttttctacagaacgtattgatctatggttcatttgaagttcataatgggaaggccattacattaatt

SEQ ID NO: 57799 - DNA, 110 bp, synthetic construct; identical to SEQ ID NO: 57798
  source 1..110: mol_type = other DNA

SEQ ID NO: 57800 - DNA, 110 bp, synthetic construct
  source 1..110: mol_type = other DNA
ttatttttttccattatagctggcttagagtgtccggtcaatttgtttgttttcaacatagaattattgattacaattgcttcaagccagtcaacgtacagggaatatag

SEQ ID NO: 57801 - DNA, 110 bp, synthetic construct; identical to SEQ ID NO: 57800
  source 1..110: mol_type = other DNA

SEQ ID NO: 57802 - DNA, 110 bp, synthetic construct
  source 1..110: mol_type = other DNA
atatcttatagggccattggcaaaggattggtaagaaggacggagtgtttgagagtgtacgtaggccaaaaactcacaaaagtgtcagggtgacgaggtgtcaatgcatg

SEQ ID NO: 57803 - DNA, 110 bp, synthetic construct
  source 1..110: mol_type = other DNA
tgtacgtaggccaaaaactcacaaaagtgtcagggtgacgaggtgtcaatgcatgcgtagtctctatctactgggaatcctgagaagtcaagacacagccatggctaggt

SEQ ID NO: 57804 - DNA, 110 bp, synthetic construct
  source 1..110: mol_type = other DNA
tgaacctgcttactaagatgagccaccttgtgtgtacacatcaagacacactggcacaatatgcctcgtctaaagccctggttttaaacctggaagcatacagtaggtcc

SEQ ID NO: 57805 - DNA, 110 bp, synthetic construct
  source 1..110: mol_type = other DNA
acaatatgcctcgtctaaagccctggttttaaacctggaagcatacagtaggtccagctgctagagttacagttagtgcttcaagtttctggaatgaacccctaatcatc

SEQ ID NO: 57806 - DNA, 110 bp, synthetic construct
  source 1..110: mol_type = other DNA
ggaaatttggcgggaattgttccttttacaaggcgcaaccacacttcctgcccgtaatttaattccaataaggcatccccagtcaaaactctattgcagtatatttccct

SEQ ID NO: 57807 - DNA, 110 bp, synthetic construct
  source 1..110: mol_type = other DNA
tgcaataacaaagagatgcaaacctgagggccagaactaggaggtgattggtgattaagccttactcttaggccaagagccatgggaaatgacagatacttgctggtatc

SEQ ID NO: 57808 - DNA, 110 bp, synthetic construct
  source 1..110: mol_type = other DNA
taagccttactcttaggccaagagccatgggaaatgacagatacttgctggtatctgtggattccttcattttgaacctctggaactcaatagaaattttccactggagc

SEQ ID NO: 57809 - DNA, 110 bp, synthetic construct
  source 1..110: mol_type = other DNA
ttatcttcccaactgtatctgtatatggtttgaggtatagaaccaggcctcatacttctgagtggctcttataacacttagcgtattctcaactttgtctagcggggcca

SEQ ID NO: 57810 - DNA, 110 bp, synthetic construct
  source 1..110: mol_type = other DNA
ttctgagtggctcttataacacttagcgtattctcaactttgtctagcggggccaaagtaagagtctttggatattgctttattattaacttggaaatatcatactttcc

SEQ ID NO: 57811 - DNA, 110 bp, synthetic construct
  source 1..110: mol_type = other DNA
ctgtactataaacagtgtatatttgcttggctgatttagtcacatcaagagtaagatttaactgcccttatctattttcccagaattgaaaaacaaaaagctttaaagaa

SEQ ID NO: 57812 - DNA, 110 bp, synthetic construct; identical to SEQ ID NO: 57811
  source 1..110: mol_type = other DNA

SEQ ID NO: 57813 - DNA, 110 bp, synthetic construct
  source 1..110: mol_type = other DNA
ccggaccacttcgggctcaggagaggttaagaacaaacgttaaatccggagaatagttaaacaaaagcttcgttaacattgtgtcctaaggacccttcatccaatttcag

SEQ ID NO: 57814 - DNA, 110 bp, synthetic construct
  source 1..110: mol_type = other DNA
tgtagattgatgtgtgaagtgagacaggagaggttgaaaagtcatcactgtgtgctaaaatctaaattgaagagcatcctgttagctttgctttctcctatttgttgtag

SEQ ID NO: 57815 - DNA, 110 bp, synthetic construct
  source 1..110: mol_type = other DNA
taaaatctaaattgaagagcatcctgttagctttgctttctcctatttgttgtagtgattactggatttctttaagttcttttgctgtctgaggatatcttaacatatgg

SEQ ID NO: 57816 - DNA, 110 bp, synthetic construct
  source 1..110: mol_type = other DNA
ttatgggtacttatagggtcttacaaagttctaatatgaaaatgaagtcataaacctggaaattacagcacagttgtagcaaaaaaaattgaactgagagtttaaatggc

SEQ ID NO: 57817 - DNA, 110 bp, synthetic construct; identical to SEQ ID NO: 57816
  source 1..110: mol_type = other DNA

SEQ ID NO: 57818 - DNA, 110 bp, synthetic construct
  source 1..110: mol_type = other DNA
tattcatttttccccagcactccagtatttttcctacaacccacaatgaaaacttatggtctatttacagtcctctcttccctacacttagtcataaaatggttctaagt

SEQ ID NO: 57819 - DNA, 110 bp, synthetic construct
  source 1..110: mol_type = other DNA
atggtctatttacagtcctctcttccctacacttagtcataaaatggttctaagttccttatctttttcattctctctcccaactctttgattatggtttggataaggct

SEQ ID NO: 57820 - DNA, 110 bp, synthetic construct
  source 1..110: mol_type = other DNA
agaagcctaaatggtcccattacatagtctctgggggagggggtgtttttaattaccgactttcaaaaatgtcacttgctaacatttcctttcttgtagctttaattaaa

SEQ ID NO: 57821 - DNA, 110 bp, synthetic construct
  source 1..110: mol_type = other DNA
ccgactttcaaaaatgtcacttgctaacatttcctttcttgtagctttaattaaacatgaattaatttgtccatctttccttgctcttctcattttcctttcctttcctc

SEQ ID NO: 57822 - DNA, 110 bp, synthetic construct
  source 1..110: mol_type = other DNA
actttattataaaataggctttgtgttagacgattttgcctatctgtaggctaattgttttgagcacatttaaggtaggctgggctaaggtgtgatattggataggttag

SEQ ID NO: 57823 - DNA, 110 bp, synthetic construct
  source 1..110: mol_type = other DNA
tgttttgagcacatttaaggtaggctgggctaaggtgtgatattggataggttaggtgtattaaatgcattttctacttaggagatttccgggtcacttaggatttatca

SEQ ID NO: 57824 - DNA, 110 bp, synthetic construct
  source 1..110: mol_type = other DNA
ctttctggtataggccctcccgtctaaattcttcggggcagttatgcaggagattaaaagctcccgagtctgctaggccttcgttgcattcagttcaaaacaatccactt

SEQ ID NO: 57825 - DNA, 110 bp, synthetic construct
  source 1..110: mol_type = other DNA
aaaagctcccgagtctgctaggccttcgttgcattcagttcaaaacaatccacttgccagaatgtcacattttggggtgtatattctgctccccttcagatacagccaac

SEQ ID NO: 57826 - DNA, 110 bp, synthetic construct
  source 1..110: mol_type = other DNA
attgaccggaatcctctcttcgtgggatctcattcaaaatcattttttttttcttgagatgatacacaaaaacttgttttacgtgaattgagttcagtgcagttattaag

SEQ ID NO: 57827 - DNA, 110 bp, synthetic construct
  source 1..110: mol_type = other DNA
gagatgatacacaaaaacttgttttacgtgaattgagttcagtgcagttattaaggcagtgggtaacattttcccagcctgtttccctcttctgcatgctaagtatccca

SEQ ID NO: 57828 - DNA, 110 bp, synthetic construct
  source 1..110: mol_type = other DNA
cagagagtgctatgtccctgaggacacggggcttcatgcttcgaactcccagttccaggttctgccctttgcatctctcctttggctggctctaatttgtatgcttttgt

SEQ ID NO: 57829 - DNA, 110 bp, synthetic construct
  source 1..110: mol_type = other DNA
aaaaaatatttcctcctaattctggtggctagaagtccagtttcaagataccctcagaaatggtttctggtgaggccacttcacctgacatgtagatggccagcttctca

SEQ ID NO: 57830 - DNA, 110 bp, synthetic construct
  source 1..110: mol_type = other DNA
agaaatggtttctggtgaggccacttcacctgacatgtagatggccagcttctcacttggtcctcacacagcctgttctctgtgcatgtgtagagagaaagaaccatctc

SEQ ID NO: 57831 - DNA, 110 bp, synthetic construct
  source 1..110: mol_type = other DNA
cctctgcactccccagcattttgctggaactgttaatagtgcacttatcactttgtgttactgtcaagtttttcctgcctcttttctcggtgggatcatgagcagctcaa

SEQ ID NO: 57832 - DNA, 110 bp, synthetic construct
  source 1..110: mol_type = other DNA
tgttactgtcaagtttttcctgcctcttttctcggtgggatcatgagcagctcaaaggcctctcgttcaccttatcaccacaagcacctacaatgctacctgcctcacgg

SEQ ID NO: 57833 - DNA, 110 bp, synthetic construct
  source 1..110: mol_type = other DNA
cctgccttaggaagacaaactcctagagtatctggctttgaaggccagtcaagattactttcaggagtccaagacagctagggaaaatagagacttcactttcaaagggt

SEQ ID NO: 57834 - DNA, 110 bp, synthetic construct
  source 1..110: mol_type = other DNA
tactttcaggagtccaagacagctagggaaaatagagacttcactttcaaagggtgcatacaaaatctcacacacttcagaatgcagggaagaagtagtaatttgatagg

SEQ ID NO: 57835 - DNA, 110 bp, synthetic construct
  source 1..110: mol_type = other DNA
ttctagttttcttgtcattgcatttcttactgtaaatgaatacatcagacttacggaggtgtatcaatttctgcaagcttgaatatcccgtgcaagcccactcctaaaag

SEQ ID NO: 57836 - DNA, 110 bp, synthetic construct
  source 1..110: mol_type = other DNA
agttccctgtgctatacatagggtctcattgcgtatatattctaaatgtaacagcttgcatccattttaaaatcccaccagccaggcatgatggttttaattcctgtgtc

SEQ ID NO: 57837 - DNA, 110 bp, synthetic construct
  source 1..110: mol_type = other DNA
ttgcatccattttaaaatcccaccagccaggcatgatggttttaattcctgtgtccttgttaacatatgtcattgctgctctgtcctaacatagtcatcctagtgtatgt

SEQ ID NO: 57838 - DNA, 110 bp, synthetic construct
  source 1..110: mol_type = other DNA
accgaagaatgaccagaggggagtgataatgagataccctcgtgagggcaagttgaggaaagctatttgccacttcctcttctggagaagactccctggcaattatgcag

SEQ ID NO: 57839 - DNA, 110 bp, synthetic construct
  source 1..110: mol_type = other DNA
aggaaagctatttgccacttcctcttctggagaagactccctggcaattatgcagtcaaagacaaagcctgtctgtgtagaccataggctctgtgattatacatggtttt

SEQ ID NO: 57840 - DNA, 110 bp, synthetic construct
  source 1..110: mol_type = other DNA
ttcttactcccaatctccccacattgccttctgttgaatctgaaaatttgaaaacaaagctctgtatcttctctataaagcctttccagcacccataacatgggcataaa

SEQ ID NO: 57841 - DNA, 110 bp, synthetic construct
  source 1..110: mol_type = other DNA
aaagctctgtatcttctctataaagcctttccagcacccataacatgggcataaacacttttccttctctgccacctctataatgggtgcataatggggcaattatatcc

SEQ ID NO: 57842 - DNA, 110 bp, synthetic construct
  source 1..110: mol_type = other DNA
ctgctctctctgcatcactggcagttacacgtgtatctttttgacaagaatgacttccagaatatggccactttgagaatgaccccccacgttgcttgggacacctagat

SEQ ID NO: 57843 - DNA, 110 bp, synthetic construct
  source 1..110: mol_type = other DNA
tggcaatatgaataatctctaaatatgactaaacacttgcgttataccattgtgcatttcatgcattagctcatgtactcctcaaaacaacctcttacagtagctgcaaa

SEQ ID NO: 57844 - DNA, 110 bp, synthetic construct
  source 1..110: mol_type = other DNA
acatgaaagataaaaatccttttgatttattcacataaacatttgcattagagaaaggccacttttctctgtttcctctgacccttgcaacttatattttcatgtttaga

SEQ ID NO: 57845 - DNA, 110 bp, synthetic construct
  source 1..110: mol_type = other DNA
aggccacttttctctgtttcctctgacccttgcaacttatattttcatgtttagacattaaatttctttgtagaattttcccgaaattctgagaaataatggtagacagc

SEQ ID NO: 57846 - DNA, 110 bp, synthetic construct
  source 1..110: mol_type = other DNA
gcgtctgcaactcagatttgacccctatcctaggtacttctgtatgcctcaactgcagcctaaaaagaaaaaaagaagaagaaaataaaatgaactcaaacatgaaattc

SEQ ID NO: 57847 - DNA, 110 bp, synthetic construct; identical to SEQ ID NO: 57846
  source 1..110: mol_type = other DNA

SEQ ID NO: 57848 - DNA, 110 bp, synthetic construct
  source 1..110: mol_type = other DNA
tatgaaagaatggttgctaattcattgttagtatcaaaaaatactctacattatttgctaggtggcagagggacaagataactctgagccccgagacaggtaatcctatt

SEQ ID NO: 57849 - DNA, 110 bp, synthetic construct; identical to SEQ ID NO: 57848
  source 1..110: mol_type = other DNA

SEQ ID NO: 57850 - DNA, 110 bp, synthetic construct
  source 1..110: mol_type = other DNA
ggattcattaaccactgagccacgacaagaacgctacctgtctctttttttaatcacaactcagaccaaacccctcggcaaagaaacggtccagagattctctcggaccc

SEQ ID NO: 57851 - DNA, 110 bp, synthetic construct; identical to SEQ ID NO: 57850
  source 1..110: mol_type = other DNA

SEQ ID NO: 57852 - DNA, 110 bp, synthetic construct
  source 1..110: mol_type = other DNA
tggttaagggaggctgatagtctggagagaaaagcagaaagtaagagcctggcgttctgttaaggtttttggttctttgtctttttgtttttttggaagtggaagacccg

SEQ ID NO: 57853 - DNA, 110 bp, synthetic construct
  source 1..110: mol_type = other DNA
aaagccagaggcaagttgtcccagggccacgttctctctgtgggctctaggagagaattcctccttgcctcttctagctgctggtgtttccacgatccttagcattccgt

SEQ ID NO: 57854 - DNA, 110 bp, synthetic construct
  source 1..110: mol_type = other DNA
aagaaattcctcaacctgataaagggcgtgtataaaatcatatagctaatatcataccttaattgttaaagacagatttccctctaggctcagaaataacaaaaacgctc

SEQ ID NO: 57855 - DNA, 110 bp, synthetic construct; identical to SEQ ID NO: 57854
  source 1..110: mol_type = other DNA

SEQ ID NO: 57856 - DNA, 110 bp, synthetic construct
  source 1..110: mol_type = other DNA
gtaaattctcggtccattcgagggcagctttatggctaatatgcttctctggattcaggtctgctcttcgcgtcttgctggagggcttgtgctcggcaggcttggccggg

SEQ ID NO: 57857 - DNA, 110 bp, synthetic construct
  source 1..110: mol_type = other DNA
caggtctgctcttcgcgtcttgctggagggcttgtgctcggcaggcttggccgggtcctcagcaccttcactgtcagttagcacctgacagctcgagtcattgctccggg

SEQ ID NO: 57858 - DNA, 110 bp, synthetic construct
  source 1..110: mol_type = other DNA
gaccttgatggagagggtccttctggtaccctagagatagagcctttgctggcacctcccttagcctcagcttttcccagaatgcttttaagagtcaaaaggggccccta

SEQ ID NO: 57859 - DNA, 110 bp, synthetic construct
  source 1..110: mol_type = other DNA
ctcccttagcctcagcttttcccagaatgcttttaagagtcaaaaggggcccctattaataattatgttaagtcaataagcataaatcaaaactttgccaagtaggctgg

SEQ ID NO: 57860 - DNA, 110 bp, synthetic construct
  source 1..110: mol_type = other DNA
tgtatcttaaaatctgtctccaggtaactaccattcactttctagttttgtcttctggatgacatggcaactttcttataatcgggaagtgttttaacccgggtcctccc

SEQ ID NO: 57861 - DNA, 110 bp, synthetic construct
  source 1..110: mol_type = other DNA
tggatgacatggcaactttcttataatcgggaagtgttttaacccgggtcctcccttttgagtgtaattgttgcaggttcttcattccttctttgcataacatgatgatg

SEQ ID NO: 57862 - DNA, 110 bp, synthetic construct
  source 1..110: mol_type = other DNA
tggatcctgagaggtggggatccttggggccagttggggagctgcctagcatatgtgctgactggtgcttcttctgattacatggtgccctggctatgattggagctgca

SEQ ID NO: 57863 - DNA, 110 bp, synthetic construct
  source 1..110: mol_type = other DNA
tttggtcttggaaatgcacttgtattatctctcttttatggttctgttagtgtttggttgttgtctcttcattctgttttctataaaatgtaatcagctttcctgtccaa

SEQ ID NO: 57864 - DNA, 110 bp, synthetic construct
  source 1..110: mol_type = other DNA
ggttgttgtctcttcattctgttttctataaaatgtaatcagctttcctgtccaaccttgttttttcatagtattagcttttcagttttaatagtcagcatattcatgct

SEQ ID NO: 57865 - DNA, 110 bp, synthetic construct
  source 1..110: mol_type = other DNA
agcctgcggcccagcatgtcctaattgttcaataaatgcttcttgaatggcattggtgtcaaaagtgaagaatgcggtctaaagctaaatcactagattaatttggtggt

SEQ ID NO: 57866 - DNA, 110 bp, synthetic construct
  source 1..110: mol_type = other DNA
gtgtcaaaagtgaagaatgcggtctaaagctaaatcactagattaatttggtggtagtgacatgtcatcccaagttctgaagtcctttattatgtgcgttaatgattcca

SEQ ID NO: 57867 - DNA, 110 bp, synthetic construct
  source 1..110: mol_type = other DNA
cacagccacaggttgcaaggaggctctggggggggtccccccaagacactcaccctgtttgttacagaaaggcttgttctttgtattacagttcgtcctcgccccacaga

SEQ ID NO: 57868 - DNA, 110 bp, synthetic construct
  source 1..110: mol_type = other DNA
tgtttgttacagaaaggcttgttctttgtattacagttcgtcctcgccccacagagcttggcagaacctcatggagtcactagcaactcttgcgtaaactaggcaggccc

SEQ ID NO: 57869 - DNA, 110 bp, synthetic construct
  source 1..110: mol_type = other DNA
aagcccagctcagccacggtgagccgccgagcagccgctcacccgtccagaccaactttggcgcggaagagacagttgtgagagtcccttgcaaactgccagacaaggat

SEQ ID NO: 57870 - DNA, 110 bp, synthetic construct
  source 1..110: mol_type = other DNA
ctttggcgcggaagagacagttgtgagagtcccttgcaaactgccagacaaggatggcttgcgaaatcatgcctctgcaaaggtagtattctttcctcttcgggtctttt

SEQ ID NO: 57871 - DNA, 110 bp, synthetic construct
  source 1..110: mol_type = other DNA
attctagtaaccagggaggaaagtgaatgaatgccaagtcactaccgtttgtcgttggtttcatttcatgacacacaccccgtgtctctttctcgggacatgagcttcct

SEQ ID NO: 57872 - DNA, 110 bp, synthetic construct
  source 1..110: mol_type = other DNA
tggtttcatttcatgacacacaccccgtgtctctttctcgggacatgagcttccttttgaaacttggaaatgcatctgaataaattcgccgtttaaaatgtaggcaagaa

SEQ ID NO: 57873 - DNA, 110 bp, synthetic construct
  source 1..110: mol_type = other DNA
aagcaaaaagagaaataaagctgataaagacagcataggttacacagagtggaatcttctcagcatgaacataggctcagagtctaaataatccatgcttcttggtcttt

SEQ ID NO: 57874 - DNA, 110 bp, synthetic construct
  source 1..110: mol_type = other DNA
cttctcagcatgaacataggctcagagtctaaataatccatgcttcttggtcttttgtcctctacgtgcggctgtgtcttggggcccattgcgtgatctgtccacgtgac

SEQ ID NO: 57875 - DNA, 110 bp, synthetic construct
  source 1..110: mol_type = other DNA
aataccagcacatccgggggcgggaggggggatagttttcggcatatgcattgggcggtgtgcagggcgcacaatcagcgcaagcaggtctcccgggacagggcgtgtcg

SEQ ID NO: 57876 - DNA, 110 bp, synthetic construct
  source 1..110: mol_type = other DNA
cggtgtgcagggcgcacaatcagcgcaagcaggtctcccgggacagggcgtgtcggaagacggctgcacaggggagggaggtggctcttgggctggaatttaccaaaccc

SEQ ID NO: 57877 - DNA, 110 bp, synthetic construct
  source 1..110: mol_type = other DNA
cagtggccgttggccgcacccccactgaagccactgggttgaactcacagctgaggtcatacctgttgttcatgccgctggatgcctaaccaatgttttgatttttcaag

SEQ ID NO: 57878 - DNA, 110 bp, synthetic construct
  source 1..110: mol_type = other DNA
gtcatacctgttgttcatgccgctggatgcctaaccaatgttttgatttttcaagatactaggatattcttttctggtctgactgtacattttggcagtaaattacttct

SEQ ID NO: 57879 - DNA, 110 bp, synthetic construct; identical to SEQ ID NO: 57877
  source 1..110: mol_type = other DNA

SEQ ID NO: 57880 - DNA, 110 bp, synthetic construct; identical to SEQ ID NO: 57878
  source 1..110: mol_type = other DNA

SEQ ID NO: 57881 - DNA, 110 bp, synthetic construct
  source 1..110: mol_type = other DNA
cccgcccctactctccatccagacactagccccccacaggtactcatccttctctctcatgggtgttaaatgtgagatcggatgcacattgctccgtgggcctaaaatgc

SEQ ID NO: 57882 - DNA, 110 bp, synthetic construct
  source 1..110: mol_type = other DNA
ctcatgggtgttaaatgtgagatcggatgcacattgctccgtgggcctaaaatgcctcccccacttgaattcttccaagtcactgacggtggtgtggcctcctgccctgg

SEQ ID NO: 57883 - DNA, 110 bp, synthetic construct
  source 1..110: mol_type = other DNA
gggggggacttccagaaacttccagagagcaacacttgaatctgccacacacgggcaacgatgtccatagcatttacactgcattaggcatgataagtaatcaagagacc

SEQ ID NO: 57884 - DNA, 110 bp, synthetic construct
  source 1..110: mol_type = other DNA
caacgatgtccatagcatttacactgcattaggcatgataagtaatcaagagacccttaaagtatatgaaaggatgcaggcaggttgtatgcaaatgcgacaccactgcg

SEQ ID NO: 57885 - DNA, 110 bp, synthetic construct
  source 1..110: mol_type = other DNA
tccctggggttggctgaggcctctgctacactgaacagctgttcagcttctccccctgcccagtcctgcctcctgcaccccttaggcaatactgctctggagcatgctcc

SEQ ID NO: 57886 - DNA, 110 bp, synthetic construct
  source 1..110: mol_type = other DNA
ctgcccagtcctgcctcctgcaccccttaggcaatactgctctggagcatgctccctccaaaaatttctgaatgtaagtctctggctcagagtctgtttgccagagaaac

SEQ ID NO: 57887 - DNA, 110 bp, synthetic construct
  source 1..110: mol_type = other DNA
aggtaggaaatgctgcttggaagatgtgacagccaagatgtgccctgagtgataaaaagctagttactcactcattcattcacccacgcatccacggggatccaaagtct

SEQ ID NO: 57888 - DNA, 110 bp, synthetic construct
  source 1..110: mol_type = other DNA
aaagctagttactcactcattcattcacccacgcatccacggggatccaaagtctctaacagcagatttaaagattacatcagcatgaagtcaactcaatgacaaaaacg

SEQ ID NO: 57889 - DNA, 110 bp, synthetic construct
  source 1..110: mol_type = other DNA
gcggtacccaagcaagactcaaactcagctctttgctcttctttacacacacctggggtaacgatactgacctactttacacaactatcctgagggttaatccgcttaag

SEQ ID NO: 57890 - DNA, 110 bp, synthetic construct
  source 1..110: mol_type = other DNA
gggtaacgatactgacctactttacacaactatcctgagggttaatccgcttaagaatgctaagcgcttcgatgacgagggcttgtaacatacagagtcaaccacttcca

SEQ ID NO: 57891 - DNA, 110 bp, synthetic construct
  source 1..110: mol_type = other DNA
aacaggaacccctaaattcttttcactcctttgccattataaacaatggtgcagcatacctacacatggtgaacacagctaaacttgctttcactcttgattatttcctt

SEQ ID NO: 57892 - DNA, 110 bp, synthetic construct
  source 1..110: mol_type = other DNA
aggaaggctgaggctcaacccaggaattccaggttctggcccaaaagcgttaaaatgaatgccaggccccagctgatgggtccggtgcagcaacactacggctgccttgt

SEQ ID NO: 57893 - DNA, 110 bp, synthetic construct
  source 1..110: mol_type = other DNA
tgaatgccaggccccagctgatgggtccggtgcagcaacactacggctgccttgttcaagacagactctccacctgcgtgaggttaaactgataggaagaaagcatcatg

SEQ ID NO: 57894 - DNA, 110 bp, synthetic construct
  source 1..110: mol_type = other DNA
tttctattgggttgttggttttttactgttgagttgtatgaattgtttgtacattttggaaaataagtccttgtcagctgcaccatttggaactattttctaccattctt

SEQ ID NO: 57895 - DNA, 110 bp, synthetic construct
  source 1..110: mol_type = other DNA
tttgtacattttggaaaataagtccttgtcagctgcaccatttggaactattttctaccattctttaggttgtttttttttatggtttcatttgctgtgcagaaggttgt

SEQ ID NO: 57896 - DNA, 110 bp, synthetic construct
  source 1..110: mol_type = other DNA
gtggtttacccagagtaacaattaatacttgaactgaagttgaaaccacttggcggtgtgacttgccttctcagtccctgcagagcgaagctttattttgagcaaattca

SEQ ID NO: 57897 - DNA, 110 bp, synthetic construct
  source 1..110: mol_type = other DNA
tatagttacgcccaccattgcgatatatgctcatcattattgaaggaaaagagcaccatttctacattacggaagataaagagatcgtaggatctgtgcgactgtgaccc

SEQ ID NO: 57898 - DNA, 110 bp, synthetic construct
  source 1..110: mol_type = other DNA
atctttatatggtgacatattaaccaatcttattgtgctgatcagtttgaagtgtatagaaacatcgaatcgttgccttgtacaccaggaactaacatagtggtgtatgt

SEQ ID NO: 57899 - DNA, 110 bp, synthetic construct
  source 1..110: mol_type = other DNA
atagaaacatcgaatcgttgccttgtacaccaggaactaacatagtggtgtatgtaggtcaactgtacttcaaaaaacaaacatataaacaaacttatacaaaaagagat

SEQ ID NO: 57900 - DNA, 110 bp, synthetic construct
  source 1..110: mol_type = other DNA
tcagaaagacagcctcaatcagtcaaattaatagcatacttcgtttttcgtaaatctgcttttgtaatcaaaatcatctttagatgatcacctgagtattttacttagat

SEQ ID NO: 57901 - DNA, 110 bp, synthetic construct
  source 1..110: mol_type = other DNA
ctgcttttgtaatcaaaatcatctttagatgatcacctgagtattttacttagatgctggaaagcgttaaccatgttactaaagacaatacctgctttaaatgttatctt

SEQ ID NO: 57902 - DNA, 110 bp, synthetic construct
  source 1..110: mol_type = other DNA
ctcacactttcaatgttctgtctgataccaggactgcaaattcttcctttaccatattcctttcgtgtcccttttctcaccaatttcttccactgctgctctagttcagt

SEQ ID NO: 57903 - DNA, 110 bp, synthetic construct
  source 1..110: mol_type = other DNA
tggaagtgaaaaccaactagaggaggtgtcaaaataaacaaaggggatgaaaccagcagctcagctcttcaggggcaaaagagattatggaaaattgaattctagggcat

SEQ ID NO: 57904 - DNA, 110 bp, synthetic construct
  source 1..110: mol_type = other DNA
agatcgtggaaagtctcagatgtgcggcaagggggacagactttgttctgcaacgaataataataaaatgcccccttttacagtgtcgttgacttcaaatatgaaatatt

SEQ ID NO: 57905 - DNA, 110 bp, synthetic construct
  source 1..110: mol_type = other DNA
aggaaagtctgcttctgagatgggtcaggctttagcaatgtggctacagcatctgtgtatttgttggaaagctacaaaaaaaaaaaagagttgcacatttgtcattctag

SEQ ID NO: 57906 - DNA, 110 bp, synthetic construct
  source 1..110: mol_type = other DNA
tgtatttgttggaaagctacaaaaaaaaaaaagagttgcacatttgtcattctagaaaaaagaagcaaggatctctaagtgataacctgaaaacttaggataagcataac

SEQ ID NO: 57907 - DNA, 110 bp, synthetic construct
  source 1..110: mol_type = other DNA
aattttgtccttatgtatggcttattcagttttgtgaaagtcttatttgattttttcaagtaggtgtctgccaaacttttatttctctggtcaaaccacacattatttct

SEQ ID NO: 57908 - DNA, 110 bp, synthetic construct; identical to SEQ ID NO: 57907
  source 1..110: mol_type = other DNA

SEQ ID NO: 57909 - DNA, 110 bp, synthetic construct
  source 1..110: mol_type = other DNA
aaaaaagttgtttgcaaaagtggacctggatgagaacgttatagaacttgaccctcagctctgtgcttggtgttacaggtggtagaagaatcgcttcgtgagcagccccc

SEQ ID NO: 57910 - DNA, 110 bp, synthetic construct
  source 1..110: mol_type = other DNA
cagctctgtgcttggtgttacaggtggtagaagaatcgcttcgtgagcagcccccacgtagagttggcacatggctaataagacaagatttatgggcacgtaaagttatg

SEQ ID NO: 57911 - DNA, 110 bp, synthetic construct
  source 1..110: mol_type = other DNA
tactgggaaagctttgtttttcacttgaggtcacttgactcctgtcagaaggtcccggacctttcctactgctgcctttgccatatttgggaatttcattataattcgta

SEQ ID NO: 57912 - DNA, 110 bp, synthetic construct
  source 1..110: mol_type = other DNA
cggacctttcctactgctgcctttgccatatttgggaatttcattataattcgtactttcagctccatcactgctgccaccttttcgtttatcttttgagggtgcatgag

SEQ ID NO: 57913 - DNA, 110 bp, synthetic construct
  source 1..110: mol_type = other DNA
tgacggagaaaggagggggccggagaggagggatgtgatgagctgaggagctcgtgacgtgtcggactctgaacaactctgcgtgggtgccgtgtgcagcaggtgaagga

SEQ ID NO: 57914 - DNA, 110 bp, synthetic construct
  source 1..110: mol_type = other DNA
gacgtgtcggactctgaacaactctgcgtgggtgccgtgtgcagcaggtgaaggaacacagatcagggaaggaaattcattgactcttgatacagccatcactgaagtcc

SEQ ID NO: 57915 - DNA, 110 bp, synthetic construct
  source 1..110: mol_type = other DNA
atcctcatggctactagtcaggttcattgtcactgagccaccaggaactctctcctcaatttttaaactctaaaaatattggccaacggggacctgctgcatagtacaaa

SEQ ID NO: 57916 - DNA, 110 bp, synthetic construct
  source 1..110: mol_type = other DNA
tcttccgtggactctgggctttcctccgaggacaggaggctctctttggattcggcgtctgccggatcctctctggattggctctctgaattggagggtttgtccaagct

SEQ ID NO: 57917 - DNA, 110 bp, synthetic construct
  source 1..110: mol_type = other DNA
cattatgccatataagacagaagaggtatgtgaaagaaatcagagtctctagatatcctaaatagaaatattttaatctagttttaaacccctaatgtcaactggcaaaa

SEQ ID NO: 57918 - DNA, 110 bp, synthetic construct; identical to SEQ ID NO: 57917
  source 1..110: mol_type = other DNA

SEQ ID NO: 57919 - DNA, 110 bp, synthetic construct
  source 1..110: mol_type = other DNA
tgagaaataggtggtctctgtttttatccaagcaggacgcagttcctccttgctcctgccataatcaagtatctgtctacaggggacagattccagctgctcagcccggg

SEQ ID NO: 57920 - DNA, 110 bp, synthetic construct
  source 1..110: mol_type = other DNA
ctgccataatcaagtatctgtctacaggggacagattccagctgctcagcccgggacccatctacctcctgactcatgccgaggcagatggcaagcgccaagctcacacc

SEQ ID NO: 57921 - DNA, 110 bp, synthetic construct
  source 1..110: mol_type = other DNA
cgagcttaaagcttttggtggtcctgcgttctagatatgtactgcatctagatatgtacggtgtgggggtggaagcccagcatcagctccctattaaaacacctgactga

SEQ ID NO: 57922 - DNA, 110 bp, synthetic construct
  source 1..110: mol_type = other DNA
acccctgggattgcccattctccacagtcttttctttttattgcaacaaactgtaagatgtttttcccagaaacggggtgggcgattttatttccacttctgtccctttt

SEQ ID NO: 57923 - DNA, 110 bp, synthetic construct
  source 1..110: mol_type = other DNA
agatgtttttcccagaaacggggtgggcgattttatttccacttctgtcccttttccacctacaaacaggattgtaagagtataactcatttagaacaaagaccaatgtt

SEQ ID NO: 57924 - DNA, 110 bp, synthetic construct; identical to SEQ ID NO: 57922
  source 1..110: mol_type = other DNA

SEQ ID NO: 57925 - DNA, 110 bp, synthetic construct; identical to SEQ ID NO: 57923
  source 1..110: mol_type = other DNA

SEQ ID NO: 57926 - DNA, 110 bp, synthetic construct
  source 1..110: mol_type = other DNA
ctgatgaatgcaagcgactgggctcaaaggcccatgccttcgtggtagactgcagtgaccgcgaagatatctacagctctgcgaagaaggtgaaggtttatactcccttc

SEQ ID NO: 57927 - DNA, 110 bp, synthetic construct
  source 1..110: mol_type = other DNA
tgaccgcgaagatatctacagctctgcgaagaaggtgaaggtttatactcccttcaaatcatatcatgtcagagtttggagggatttcggagatgacccagttataatgt

SEQ ID NO: 57928 - DNA, 110 bp, synthetic construct
  source 1..110: mol_type = other DNA
atagttttgttttgttattgttactaatattaaaacagctgccatttttgagcagccgtgatgggctagatgctacaagtcaattatgttacgggttgtgtgataattta

SEQ ID NO: 57929 - DNA, 110 bp, synthetic construct
  source 1..110: mol_type = other DNA
ccgtgatgggctagatgctacaagtcaattatgttacgggttgtgtgataatttagcttgcaccaagccaaagttgaaaccgcagtgaaatgtcttgtttctcaagattg

SEQ ID NO: 57930 - DNA, 110 bp, synthetic construct
  source 1..110: mol_type = other DNA
agtacagcagccagagccactctttaaatatgagtatgttaggctttagctcaaaatcttccattagcttctcatctaacacttaaagtccttaccatgacctacaaggc

SEQ ID NO: 57931 - DNA, 110 bp, synthetic construct
  source 1..110: mol_type = other DNA
atcttccattagcttctcatctaacacttaaagtccttaccatgacctacaaggccatctgtagccttcttacctgccacctcactacctgtattagtcaggttctccag

SEQ ID NO: 57932 - DNA, 110 bp, synthetic construct
  source 1..110: mol_type = other DNA
acatctttctgatttttttttttttccaattacagcatggtcttgaggaaactgcagctgaatgcaaaaaactaggggccacgacacatgcgtttgtggtagactgcagt

SEQ ID NO: 57933 - DNA, 110 bp, synthetic construct
  source 1..110: mol_type = other DNA
agctgaatgcaaaaaactaggggccacgacacatgcgtttgtggtagactgcagtaacagagaggagatttacaactctgtaaaccaggtgagactgcaggatacaaatt

SEQ ID NO: 57934 - DNA, 110 bp, synthetic construct
  source 1..110: mol_type = other DNA
cggagggggaccgcttccttcactgctgttccttaaccaacatgttccagcagggggagctccaagtgtttgacaaggataactatggtgccttcacgtcttcccactgc

SEQ ID NO: 57935 - DNA, 110 bp, synthetic construct
  source 1..110: mol_type = other DNA
gtaggttccctctttccccactctctgatgagtttttattagaaatgagtgttgaattttgtcagaacctttttctgcatctgttgagatgatcatatagtttttattca

SEQ ID NO: 57936 - DNA, 110 bp, synthetic construct; identical to SEQ ID NO: 57935
  source 1..110: mol_type = other DNA

SEQ ID NO: 57937 - DNA, 110 bp, synthetic construct
  source 1..110: mol_type = other DNA
gtgtgcctgtttaacgagccaaattcgagatgtaggtcacggatccagtaatgtggttgactgtatgtgactcgagttccagttgccaacaatttagtcctatccggtgg

SEQ ID NO: 57938 - DNA, 110 bp, synthetic construct
  source 1..110: mol_type = other DNA
gttgactgtatgtgactcgagttccagttgccaacaatttagtcctatccggtgggcaagagagacaaccaggattttgtagtggccacctttgaacagttttaactcct

SEQ ID NO: 57939 - DNA, 110 bp, synthetic construct
  source 1..110: mol_type = other DNA
ttcagtcaatacctcaaagctacgataatcaaaacatcatgatagtgacacaaaaacagacatatggatcaacggagcagaacagaaagcccagaataaacacacacccc

SEQ ID NO: 57940 - DNA, 110 bp, synthetic construct
  source 1..110: mol_type = other DNA
atcatgatagtgacacaaaaacagacatatggatcaacggagcagaacagaaagcccagaataaacacacacccctacagtcaattgattctcaacaaaggaggcaagaa

SEQ ID NO: 57941 - DNA, 110 bp, synthetic construct
  source 1..110: mol_type = other DNA
agaaagtccggtgtgccccccgcccccccagtaataaccaacacagagccgcttgctcacctttgttcttcttgatgaggacctcagcctgttcccaaaggtcaaaggcg

SEQ ID NO: 57942 - DNA, 110 bp, synthetic construct
  source 1..110: mol_type = other DNA
aagcctgaggcactgggattacctgaggatctagaaaatgccaatgggagtgtggggagttgggggtggcacacatcctgccgccagtccgaagggatcccctggggacg

SEQ ID NO: 57943 - DNA, 110 bp, synthetic construct
  source 1..110: mol_type = other DNA
ggagttgggggtggcacacatcctgccgccagtccgaagggatcccctggggacggagtgagcagccagggtctgcaaccacggattcccatcctgaccctgtcagcccc

SEQ ID NO: 57944 - DNA, 110 bp, synthetic construct
  source 1..110: mol_type = other DNA
gcacattttggaagattaaaatcaaaaggcttatttcataattaaaagatcactgggcacccaaaacagcatttactttattctcgacctactctcctggaagtgtcttg

SEQ ID NO: 57945 - DNA, 110 bp, synthetic construct
  source 1..110: mol_type = other DNA
tgtcagtatctgaattttctattcctgataatttaaacaatctgattaagattgacaaagttaaagacaactgccaaaaacctgtttattggagttcctgtcatggctca

SEQ ID NO: 57946 - DNA, 110 bp, synthetic construct
  source 1..110: mol_type = other DNA
gtctgaaagtgctttcttctgaggtgtgctcagccaccagaagctcctctcctcaaggagcaagttcaagtcccccacccccagtcatgcacctctccccctcctccgtg

SEQ ID NO: 57947 - DNA, 110 bp, synthetic construct
  source 1..110: mol_type = other DNA
tctcgaagtcacgcagctgtaagaggtgggactgagttaggaccctaactctcaatcactaggccaggcagcctgtccagagaagctaccattacgctcttgaggaaaca

SEQ ID NO: 57948 - DNA, 110 bp, synthetic construct
  source 1..110: mol_type = other DNA
tcactaggccaggcagcctgtccagagaagctaccattacgctcttgaggaaacagccataggattatttttacagtcttttagaaaatcacttttcctgctaacacaac

SEQ ID NO: 57949 - DNA, 110 bp, synthetic construct
  source 1..110: mol_type = other DNA
cctcccttctgcatcctctccacagagctcccgacaggtgcttgagatgtcaaggtctctgcaagtcttggctgaacggatgagggaacttggggttatcctaacagagg

SEQ ID NO: 57950 - DNA, 110 bp, synthetic construct
  source 1..110: mol_type = other DNA
aacgcatggtgttggaggttagaacactggcaggcctggagggagacactagctgaaaggggaccacaggggcttctggggagctggtattgttgcttgatggttacaca

SEQ ID NO: 57951 - DNA, 110 bp, synthetic construct
  source 1..110: mol_type = other DNA
aaaggggaccacaggggcttctggggagctggtattgttgcttgatggttacacaagtgtgttcactttgagaaaatgcactgaactgtactaataatgtctgccccttt

SEQ ID NO: 57952 - DNA, 110 bp, synthetic construct
  source 1..110: mol_type = other DNA
ttcagagttgcaactaggcttaaatgacatgtcacgtgaaagccattggtaaaaagcttttgggctacacagatgcaaaccccaactgtatgggctctttctctgccttg

SEQ ID NO: 57953 - DNA, 110 bp, synthetic construct
  source 1..110: mol_type = other DNA
tgtctattctaatgaggcggattttctgcccaatcaacagtggaaaagttacagtgtaatcagccttctcccaggtgggttccgacaaccctgagcaatggtgtcccatc

SEQ ID NO: 57954 - DNA, 110 bp, synthetic construct
  source 1..110: mol_type = other DNA
gtaatcagccttctcccaggtgggttccgacaaccctgagcaatggtgtcccatcagggagccagcactggtctctgctgttggcagctaaggcccttggccatagcgtt

SEQ ID NO: 57955 - DNA, 110 bp, synthetic construct
  source 1..110: mol_type = other DNA
gaaggtttaggaagagtgcttatgctgagacgcacatgtttcccgttggaaggtgcaggacgatttccctcgaaaccggggctcagaacattcagatgtgcatcaccatg

SEQ ID NO: 57956 - DNA, 110 bp, synthetic construct
  source 1..110: mol_type = other DNA
caggacgatttccctcgaaaccggggctcagaacattcagatgtgcatcaccatgcttcagttatctttcactgccgagcagctggtccaggtgctcagcttccctttgg

SEQ ID NO: 57957 - DNA, 110 bp, synthetic construct
  source 1..110: mol_type = other DNA
agaatgattaaaatctatttttatgtagccaatgccaaagaaaaatcttcacggtcaggggcagaagaaatgaaaaagacacggctattaaaacaatgtagcagttagga

SEQ ID NO: 57958 - DNA, 110 bp, synthetic construct
  source 1..110: mol_type = other DNA
caggggcagaagaaatgaaaaagacacggctattaaaacaatgtagcagttaggaaaaggaagggagctgctaactcccacttctcggggctgacacacccgtgtggtta

SEQ ID NO: 57959 - DNA, 110 bp, synthetic construct
  source 1..110: mol_type = other DNA
ctacaatcttcacattaaaatgaatttaagccagaacaaactgtaatctaaccacatcatttacaaatgacacatattcaagctcagacaagtaacatggagaaactgaa

SEQ ID NO: 57960 - DNA, 110 bp, synthetic construct
  source 1..110: mol_type = other DNA
atcatttacaaatgacacatattcaagctcagacaagtaacatggagaaactgaaacttaggcagttacaacatcaggaattaaataaccactttcagctggcatttctt

SEQ ID NO: 57961 - DNA, 110 bp, synthetic construct
  source 1..110: mol_type = other DNA
cacctcctgttcctagtcttcacgagaaaagagtagtaaaggagtaaatccatggagctctaaagacaattttgtgaagtgctgctaaattttaaaatatgacaacgtgt

SEQ ID NO: 57962 - DNA, 110 bp, synthetic construct
  source 1..110: mol_type = other DNA
aatctgcagaaaagtgacgtttgttctccgtatctgcagattcactaaccgaggatcgtgtcgtcatgtgcagatacgtgggttctgcagttcaaactggtgctgttcaa

SEQ ID NO: 57963 - DNA, 110 bp, synthetic construct
  source 1..110: mol_type = other DNA
tcgtgtcgtcatgtgcagatacgtgggttctgcagttcaaactggtgctgttcaagggccaactatatgtcggaattttaaatgcacatacttttagtatttttttattt

SEQ ID NO: 57964 - DNA, 110 bp, synthetic construct
  source 1..110: mol_type = other DNA
tcgtgtaaattctggagacagggcacaggattctacacagtactttctaaaagcttccaggggattcagatgggaaccaatctactggacacataaataagaacaatgcc

SEQ ID NO: 57965 - DNA, 110 bp, synthetic construct
  source 1..110: mol_type = other DNA
tccaggggattcagatgggaaccaatctactggacacataaataagaacaatgcccttattagcggctcaacggtatcacagctcaggtaagctggatcttgaccttaca

SEQ ID NO: 57966 - DNA, 110 bp, synthetic construct
  source 1..110: mol_type = other DNA
gagttgtcaagggtcatctgtacttacatttctcccctcctaatctctgtgccaatggcatgcactttatttttatgtgttacaattttcatactatattttagttttgt

SEQ ID NO: 57967 - DNA, 110 bp, synthetic construct; identical to SEQ ID NO: 57966
  source 1..110: mol_type = other DNA

SEQ ID NO: 57968 - DNA, 110 bp, synthetic construct
  source 1..110: mol_type = other DNA
aaataaaaactgtagcttttatttcaagtagccatataactagatacaaatcaagagctgtgttgttatagaatttattggagtacagcccgtgtctgcactgtacactc

SEQ ID NO: 57969 - DNA, 110 bp, synthetic construct
  source 1..110: mol_type = other DNA
agctgtgttgttatagaatttattggagtacagcccgtgtctgcactgtacactcctcttcccacataaacagtacacctcctagaatactgaaaataaaaaaaataaac

SEQ ID NO: 57970 - DNA, 110 bp, synthetic construct
  source 1..110: mol_type = other DNA
agtttagcttcagaaggaatactaagtgctggactccctttctgcctcctctcatccttgaggaggaggagctgtgtaagtcctgaaacctctgtacttggtcgtctcag

SEQ ID NO: 57971 - DNA, 110 bp, synthetic construct
  source 1..110: mol_type = other DNA
ccttgaggaggaggagctgtgtaagtcctgaaacctctgtacttggtcgtctcagctgtggatcccagcaaggacagcttgctttcttctgctttatgaggtgcgggtaa

SEQ ID NO: 57972 - DNA, 110 bp, synthetic construct
  source 1..110: mol_type = other DNA
ctgctgaagacgaaaacaattcccttcactcgcctcaacccaagataaattcactttggacttccctttgtattagaggtagaacctgaagtgcttagagcagccctgag

SEQ ID NO: 57973 - DNA, 110 bp, synthetic construct
  source 1..110: mol_type = other DNA
agccggacatcatgcagactgcaggagggtacagagtcttcaggtgacttcgtaatgtcatttcatagagaggggaagttagagcaaatataatgaaaacatctgctcaa

SEQ ID NO: 57974 - DNA, 110 bp, synthetic construct
  source 1..110: mol_type = other DNA
ttgtttgcccctcgagatccactctccccctttctctgcctgtctctttgagctgagctgaatggactccgacaggtagttggacttcaggggttctcacaaggcagtga

SEQ ID NO: 57975 - DNA, 110 bp, synthetic construct
  source 1..110: mol_type = other DNA
agctgaatggactccgacaggtagttggacttcaggggttctcacaaggcagtgatgttgataccagggcatatgtgcagcatgtgaaaattctgggccattgattgaac

SEQ ID NO: 57976 - DNA, 110 bp, synthetic construct; identical to SEQ ID NO: 57974
  source 1..110: mol_type = other DNA

SEQ ID NO: 57977 - DNA, 110 bp, synthetic construct; identical to SEQ ID NO: 57975
  source 1..110: mol_type = other DNA

SEQ ID NO: 57978 - DNA, 110 bp, synthetic construct
  source 1..110: mol_type = other DNA
gactctgtctgagaccccaggcaattgcatcatgtactatgtattcatctgtaatgaaaataaatgctattttatggtactcgatgctctacgtgtccctggtaacagct

SEQ ID NO: 57979 - DNA, 110 bp, synthetic construct
  source 1..110: mol_type = other DNA
gaaaataaatgctattttatggtactcgatgctctacgtgtccctggtaacagctgagatgactttgtcctgcactgcagccttgccctcacactctgtgtcatggagca

SEQ ID NO: 57980 - DNA, 110 bp, synthetic construct
  source 1..110: mol_type = other DNA
ctcactcactgcaggtagcaggggctcagtcctgcaggggacctcggggaggtgcgatagatttagtacaacgcagagccattgcaactggggaggaaggaagctgggta

SEQ ID NO: 57981 - DNA, 110 bp, synthetic construct
  source 1..110: mol_type = other DNA
gatagatttagtacaacgcagagccattgcaactggggaggaaggaagctgggtaggtatcccttcactcctcatccatcatttgttgcgggctgcttctgtgggtgttg

SEQ ID NO: 57982 - DNA, 110 bp, synthetic construct
  source 1..110: mol_type = other DNA
aggagaaggtcgatcacctgattcaaaatccaagagagagcagaactggggcggctggcaagctggctcaggatcacaggaggcccgagggctgaggctcccaggtcttt

SEQ ID NO: 57983 - DNA, 110 bp, synthetic construct
  source 1..110: mol_type = other DNA
acagaacagttcctgcagcctgcatttgcaggctaacctggttctgcctgacctcaagttgttttcaacctctctcctcgccggctttcttctttcactataaaggctgg

SEQ ID NO: 57984 - DNA, 110 bp, synthetic construct
  source 1..110: mol_type = other DNA
aagttgttttcaacctctctcctcgccggctttcttctttcactataaaggctgggaaccgtttttgaaaattctctttccaggctcttttgctaaaagaggtgaccatg

SEQ ID NO: 57985 - DNA, 110 bp, synthetic construct
  source 1..110: mol_type = other DNA
tgcttttaggaagacaggtggaaggaagtggggaaacagcttgggcagagctgaagcccaactgcagtgtggtggcagcagaggcttcagctgattctatggatggctgt

SEQ ID NO: 57986 - DNA, 110 bp, synthetic construct
  source 1..110: mol_type = other DNA
gcccaactgcagtgtggtggcagcagaggcttcagctgattctatggatggctgtgaagttgggataccatacagagatgtctcaagttaggacaaagggtgtgtgtgtt

SEQ ID NO: 57987 - DNA, 110 bp, synthetic construct
  source 1..110: mol_type = other DNA
agaaggtcgggtgactactgcacatggagtgaactgtgttatagacgaggaaccccaagcttatggaacccaatctttttgagtgggtggttagcctggctgacctttgc

SEQ ID NO: 57988 - DNA, 110 bp, synthetic construct
  source 1..110: mol_type = other DNA
gagaattagttgactaagtagtttgtcaagcacttagaacagtgcctgactcacagtaaattctcagtaactattagatacaaaagacaggtgcatatatacgtctttat

SEQ ID NO: 57989 - DNA, 110 bp, synthetic construct
  source 1..110: mol_type = other DNA
caatttattcttatgccaacttgcagttgactgtttcctaggcttccagctgcattaatataggaagcaacagaaacccagatggataagctattcgtggagcactgatg

SEQ ID NO: 57990 - DNA, 110 bp, synthetic construct
  source 1..110: mol_type = other DNA
taatataggaagcaacagaaacccagatggataagctattcgtggagcactgatgggaggccatcctcacggagagttagaatcaaaatcagtcacatgatccctcataa

SEQ ID NO: 57991 - DNA, 110 bp, synthetic construct
  source 1..110: mol_type = other DNA
gacaccatcaagcacatcagcacaggcgtaatggtgtcccagaaggacaggaggaagagaaatgagcagacggaatattcgaagaaatagctgctgaaatttgatggaaa

SEQ ID NO: 57992 - DNA, 110 bp, synthetic construct
  source 1..110: mol_type = other DNA
agagaaatgagcagacggaatattcgaagaaatagctgctgaaatttgatggaaaacatgcctctacacattccagaagctcatcaaattccaagcaggacaaatgcaag

SEQ ID NO: 57993 - DNA, 110 bp, synthetic construct; identical to SEQ ID NO: 57991
  source 1..110: mol_type = other DNA

SEQ ID NO: 57994 - DNA, 110 bp, synthetic construct; identical to SEQ ID NO: 57992
  source 1..110: mol_type = other DNA

SEQ ID NO: 57995 - DNA, 110 bp, synthetic construct
  source 1..110: mol_type = other DNA
ctatcccagcatttccgaaatattttcgaagatgtgaaagcattttgatatctctgtaagtactaatgtggagaaacagattgaagtgaagccctttaaacatttttttt

SEQ ID NO: 57996 - DNA, 110 bp, synthetic construct
  source 1..110: mol_type = other DNA
gtaagtactaatgtggagaaacagattgaagtgaagccctttaaacatttttttttttttttctttttagggccatacccacagcatgtggaagatcccaggctaggggt

SEQ ID NO: 57997 - DNA, 110 bp, synthetic construct
  source 1..110: mol_type = other DNA
caacccaagtcactgcagtgacaacactggagccttaacccgctgggccataagaaaactccaaacaaaagatggtattttgaatgaaaaactttgcaaataattttcaa

SEQ ID NO: 57998 - DNA, 110 bp, synthetic construct; identical to SEQ ID NO: 57997
  source 1..110: mol_type = other DNA

SEQ ID NO: 57999 - DNA, 110 bp, synthetic construct
  source 1..110: mol_type = other DNA
aaagtggaagccagccaaatattagacgactggcattgccacttactgagctaggaaggatgaagagggaactggtgatggcgggcgagggcacatagagttacttttgg

SEQ ID NO: 58000 - DNA, 110 bp, synthetic construct
  source 1..110: mol_type = other DNA
aaggatgaagagggaactggtgatggcgggcgagggcacatagagttacttttgggacagtttaagtttgagatgcttccgaaccatgagtcggtttctgagtctgtcat

SEQ ID NO: 58001 - DNA, 110 bp, synthetic construct
  source 1..110: mol_type = other DNA
gaaaagccaagatagtacatggaaaggccaatcaatgaccaattctttgtgcacctccagttccatatctattgtaaagttatgtggaaagcaagccaatgttagaatca

SEQ ID NO: 58002 - DNA, 110 bp, synthetic construct
  source 1..110: mol_type = other DNA
tccagttccatatctattgtaaagttatgtggaaagcaagccaatgttagaatcaggtattttctgctcaccattccactgtgttggatgtaacacagtctgaaggtagg

SEQ ID NO: 58003 - DNA, 110 bp, synthetic construct
  source 1..110: mol_type = other DNA
accggcagtggtggctagatggatgtccagaaacgtctacagtgatgcctagagaaactggctttggtgctgtctgtaaagatattaatggaatgtccttttctaagtca

SEQ ID NO: 58004 - DNA, 110 bp, synthetic construct
  source 1..110: mol_type = other DNA
aactggctttggtgctgtctgtaaagatattaatggaatgtccttttctaagtcagttaaccccgggacgggaatttcctgttgtttcctgaaaccttccaacagcgtgt

SEQ ID NO: 58005 - DNA, 110 bp, synthetic construct
  source 1..110: mol_type = other DNA
atggagttccttcctttctgcgatcccttacttctttgttgggttaaaaggagtaaacacagatgagagtcttgaccagcactggatccttaatacacggcacaagctgc

SEQ ID NO: 58006 - DNA, 110 bp, synthetic construct
  source 1..110: mol_type = other DNA
aacaggggctgtggaattatactgccattcagtaaacagtcttaagtcctggatgtcaacaaaatacagccaactgtgggaaatcaaatgccttccacagcaagccaaca

SEQ ID NO: 58007 - DNA, 110 bp, synthetic construct
  source 1..110: mol_type = other DNA
acctgctctccctgtaattcttcccatttcaggggcatcacttttgccctttaggttgttcagccaaaattcttgaccttcctgctgacttccctctttcatacccatac

SEQ ID NO: 58008 - DNA, 110 bp, synthetic construct
  source 1..110: mol_type = other DNA
ttgttcagccaaaattcttgaccttcctgctgacttccctctttcatacccatacctagggcatgagcaactcctgttggctctaccttcaaaatacatccaaaattgtc

SEQ ID NO: 58009 - DNA, 110 bp, synthetic construct
  source 1..110: mol_type = other DNA
tccagattcttttggccagtgcagtgtctgtaacttcacatacatggaccaatgcaactcactgccggtcactttcgagtcatcctgatctgctcatgtcacgtctcacg

SEQ ID NO: 58010 - DNA, 110 bp, synthetic construct
  source 1..110: mol_type = other DNA
aactcactgccggtcactttcgagtcatcctgatctgctcatgtcacgtctcacgactgcgggatgcatgacaaatctgcctgcacacaccctctcgtacagaaacattc

SEQ ID NO: 58011 - DNA, 110 bp, synthetic construct
  source 1..110: mol_type = other DNA
gaagatccaaactacttccagaaacatccaagaacctatatatgttcccagccctgtataatgctccatcttcctgtcctgctactttccttcttgctcatgaagctcca

SEQ ID NO: 58012 - DNA, 110 bp, synthetic construct
  source 1..110: mol_type = other DNA
gtataatgctccatcttcctgtcctgctactttccttcttgctcatgaagctccaagttcccttagctttttttcacctcagggcctttgcatttgctgttaacctccac

SEQ ID NO: 58013 - DNA, 110 bp, synthetic construct
  source 1..110: mol_type = other DNA
gcttcagggttgtagaaaacatctccttttccagtatggccatgaaccagacacaaaagaatacatcccgttgccaagaactgtgaaggatctgagattttactccatgt

SEQ ID NO: 58014 - DNA, 110 bp, synthetic construct
  source 1..110: mol_type = other DNA
aaagaatacatcccgttgccaagaactgtgaaggatctgagattttactccatgtgtaagcatatatatttcatggatgctggcagaagacctgagattcttgggtccga

SEQ ID NO: 58015 - DNA, 110 bp, synthetic construct
  source 1..110: mol_type = other DNA
gtctgaacatccatatgcttttatggaaacatggctcaaaacttttaattgtgcaggagctctccgatggcccagcgggctgggcctcctgcgttctcactaatgtggct

SEQ ID NO: 58016 - DNA, 110 bp, synthetic construct
  source 1..110: mol_type = other DNA
cagttctccaggaagagcaagtgaaggcactgcagctgtgacttagagcaaacttctaaggcaaaggccaacttcacagacaaaccagaatcagtctgaagagtggagag

SEQ ID NO: 58017 - DNA, 110 bp, synthetic construct
  source 1..110: mol_type = other DNA
aagtcctctctctgaatataataccaagcgtctgttgtgattgcctgaatgaccaaaaaaaagtgggtctggaagacattacagttttacagctctgttcccaactcctc

SEQ ID NO: 58018 - DNA, 110 bp, synthetic construct
  source 1..110: mol_type = other DNA
aaaaaaagtgggtctggaagacattacagttttacagctctgttcccaactcctcctgaaaacaattttccgtctatatagctattaccccatctcctctctttaggaat

SEQ ID NO: 58019 - DNA, 110 bp, synthetic construct
  source 1..110: mol_type = other DNA
tccttgtcccatgggtggtaagaagtggggtgaggtttcaaaccctgcagtccagcaccaatctgtcctggtaaccaccctctatgagctaacgtggtcttgctgattaa

SEQ ID NO: 58020 - DNA, 110 bp, synthetic construct
  source 1..110: mol_type = other DNA
caccaatctgtcctggtaaccaccctctatgagctaacgtggtcttgctgattaagacaaacagacctcagtggcttctagtactctttttaaaatatttccttctggta

SEQ ID NO: 58021 - DNA, 110 bp, synthetic construct
  source 1..110: mol_type = other DNA
cctagacatttgtgctgctcttccctctgtctggaacactctccaaggtatctgtgcagctcacgtgcttctctatgagaaggctgtctttctcataagccaatctaatc

SEQ ID NO: 58022 - DNA, 110 bp, synthetic construct
  source 1..110: mol_type = other DNA
ccatccatggatgaaaggataaagaagatgtggtgacatgcagactgagaccctgccgtttgagaccacatggatggacctcaaaggcattaagctaagcggaataagtc

SEQ ID NO: 58023 - DNA, 110 bp, synthetic construct
  source 1..110: mol_type = other DNA
ccgtttgagaccacatggatggacctcaaaggcattaagctaagcggaataagtcagacagagaaaaaaataccatatgatgtcactcatatgcggagtctaaaaacaaa

SEQ ID NO: 58024 - DNA, 110 bp, synthetic construct
  source 1..110: mol_type = other DNA
aaaatgaaggattttcatattcttttaacactcagcttatttacttaagctcatgtccagtgacaaaagtatttattatctgaatgaaagaaaacagacaggaggagctt

SEQ ID NO: 58025 - DNA, 110 bp, synthetic construct; identical to SEQ ID NO: 58024
  source 1..110: mol_type = other DNA

SEQ ID NO: 58026 - DNA, 110 bp, synthetic construct
  source 1..110: mol_type = other DNA
taccaaataggctttaagatccagacgttctgccgggagtaagagttgaatctataattataccgttgtggttgtaaagtgtgttagtacatggaaagtaactttgtaca

SEQ ID NO: 58027 - DNA, 110 bp, synthetic construct
  source 1..110: mol_type = other DNA
ttgaccatgaaacttttgtaatgagtcagctgtggagagcggtgtctttccctcgaagtatattatgaaagtctgagactgttttcataggaaaacataagcctagaaag

SEQ ID NO: 58028 - DNA, 110 bp, synthetic construct
  source 1..110: mol_type = other DNA
ggaggagttgttcacatggcaaggtcaaggatggatggtttctaatggtaacacctgtgtcgacaaagccatctgtgtcacagtgatataaaccctcttctgactcctct

SEQ ID NO: 58029 - DNA, 110 bp, synthetic construct
  source 1..110: mol_type = other DNA
tgtgtcgacaaagccatctgtgtcacagtgatataaaccctcttctgactcctctaggaaatcctccgtaattctaccgactaactcattagttttgtgtggatgattct

SEQ ID NO: 58030 - DNA, 110 bp, synthetic construct
  source 1..110: mol_type = other DNA
aggaagacagaaacagggacttaaaagtaaccctgtattttatttcctcaaaagagctctgagggaaaaatggcaaaataccacccttgggtaaaacggaaggttgggta

SEQ ID NO: 58031 - DNA, 110 bp, synthetic construct
  source 1..110: mol_type = other DNA
gctctgagggaaaaatggcaaaataccacccttgggtaaaacggaaggttgggtacataggtatttgctatattttctcttaattttttgtatgtttgaagaatcgtttc

SEQ ID NO: 58032 - DNA, 110 bp, synthetic construct
  source 1..110: mol_type = other DNA
cacaaattagtcacacttttatgaactgatgtcttgtcttctcagttccctaagtgcagagagaccacgtgtttaaaatctctgtacatagtagcaggggcagatacact

SEQ ID NO: 58033 - DNA, 110 bp, synthetic construct
  source 1..110: mol_type = other DNA
catttatccttgccatgttggaggagaatcagttataagcatgaaactggcaatgctctcagtacactcacctgtgcccagcggctggcagtagcaagctttagcaggtg

SEQ ID NO: 58034 - DNA, 110 bp, synthetic construct
  source 1..110: mol_type = other DNA
ctctcagtacactcacctgtgcccagcggctggcagtagcaagctttagcaggtggagcagaaaatgcagattcaggtggcaaaattgtggtcatctcaagaccctggtt

SEQ ID NO: 58035 - DNA, 110 bp, synthetic construct
  source 1..110: mol_type = other DNA
cctcggcaatgttcactatgcatcttctgataactctttgctataaaaggagtgcctgttggtttggtgtattatttcaggcattttgctataacagagtgaacaactgc

SEQ ID NO: 58036 - DNA, 110 bp, synthetic construct
  source 1..110: mol_type = other DNA
aaaggagtgcctgttggtttggtgtattatttcaggcattttgctataacagagtgaacaactgcttattgcctttgcaattaaataagaaattttaaaggaagctctca

SEQ ID NO: 58037 - DNA, 110 bp, synthetic construct
  source 1..110: mol_type = other DNA
taagttcctaatggacagaggggatgatgaaaatctcccaggaaagattgggggtttgagaccacaagaaatctgtgctcagcttcagtcacgttgcacctgaaagacgc

SEQ ID NO: 58038 - DNA, 110 bp, synthetic construct
  source 1..110: mol_type = other DNA
aatgagcattttttaaaaaaatcagctaattattgttgtttgcttcttttgtgtgtggcttaatccctttaaagtattctttcaactttcctcagtttcttaagcccttg

SEQ ID NO: 58039 - DNA, 110 bp, synthetic construct
  source 1..110: mol_type = other DNA
tggcttaatccctttaaagtattctttcaactttcctcagtttcttaagcccttgggccctatgctgtgagaaggaccatgctacagcttggtttttgccaagtgtaata

SEQ ID NO: 58040 - DNA, 110 bp, synthetic construct; identical to SEQ ID NO: 58038
  source 1..110: mol_type = other DNA

SEQ ID NO: 58041 - DNA, 110 bp, synthetic construct; identical to SEQ ID NO: 58039
  source 1..110: mol_type = other DNA

SEQ ID NO: 58042 - DNA, 110 bp, synthetic construct
  source 1..110: mol_type = other DNA
ccacgagcgtctctttagaaatgtgtattgttcattttttcaatatcaaacctcaacggttcctccatagtgggagctcatctgggagatcactgattttatgtgcatat

SEQ ID NO: 58043 - DNA, 110 bp, synthetic construct
  source 1..110: mol_type = other DNA
atattcctccatcaggttcatcttcttgcaaatagctcttcttcctggcacaccttcatctgcagttggttgcgcttgagaccagctggacagctgccgtttttccatct

SEQ ID NO: 58044 - DNA, 110 bp, synthetic construct
  source 1..110: mol_type = other DNA
ccagggccaaacctgaaacctcatagttcctcgtcagattcgtttctgctgcgccacaacaggaactcctctttctttgtcacggagaatttaaatggaactcttcattt

SEQ ID NO: 58045 - DNA, 110 bp, synthetic construct
  source 1..110: mol_type = other DNA
acaacaggaactcctctttctttgtcacggagaatttaaatggaactcttcatttacatttgtggcaactgctggtcgtggctgtgacccacagcactgcaggcgtggca

SEQ ID NO: 58046 - DNA, 110 bp, synthetic construct
  source 1..110: mol_type = other DNA
attctttttcctttcagttttacagagatgcaattgacatacttcactgtataagtttaaagtgaaagttatgacgacttaatgtacatgttattgcaaagtgactatcc

SEQ ID NO: 58047 - DNA, 110 bp, synthetic construct
  source 1..110: mol_type = other DNA
tttaaagtgaaagttatgacgacttaatgtacatgttattgcaaagtgactatccagtaagtttaggaaacatccatcatcttatagagattcaaggggaaaaaaggaag

SEQ ID NO: 58048 - DNA, 110 bp, synthetic construct
  source 1..110: mol_type = other DNA
tgttccccgggccttggtgcttctgcgccgtcatcttgcccgacactgcttggtggcgacgtttgcactcgctctcaaacctggccctcctctctccctccctcccagct

SEQ ID NO: 58049 - DNA, 110 bp, synthetic construct
  source 1..110: mol_type = other DNA
gcgacgtttgcactcgctctcaaacctggccctcctctctccctccctcccagctcctctctgaaagtacatacatcagcatttattgtctcctcacaaattctcccttg

SEQ ID NO: 58050 - DNA, 110 bp, synthetic construct
  source 1..110: mol_type = other DNA
tgaaataagcacctggattatatcaccctaattaccaaaagaaatgccgccccaggaccacagcttcactttgtgccctaagtgactattcatgacaaagttaaaagtcc

SEQ ID NO: 58051 - DNA, 110 bp, synthetic construct
  source 1..110: mol_type = other DNA
tgccctgtggggggcactgtgttagggttttaaaaaatgtaaagctccaatcccgacgattctacacggtagtcactagctctgtttacacctggaaaaacgcacgcctt

SEQ ID NO: 58052 - DNA, 110 bp, synthetic construct
  source 1..110: mol_type = other DNA
tggattcatttctgctgtgccgcgacgggaactccaaaatcacttatttttaaaaaatataatttccctcgttatttcgtgatgtactacatccttataggatagctctt

SEQ ID NO: 58053 - DNA, 110 bp, synthetic construct
  source 1..110: mol_type = other DNA
cgggaactccaaaatcacttatttttaaaaaatataatttccctcgttatttcgtgatgtactacatccttataggatagctctttattttcttccaatgacaaggttgt

SEQ ID NO: 58054 - DNA, 110 bp, synthetic construct
  source 1..110: mol_type = other DNA
tgagaactataaaatgttactcaaggaatgtaaagaggactcaaagaatggaaagataccctatgctcctggattgaaagaattgctatcatttgaaatggccatactac

SEQ ID NO: 58055 - DNA, 110 bp, synthetic construct; identical to SEQ ID NO: 58054
  source 1..110: mol_type = other DNA

SEQ ID NO: 58056 - DNA, 110 bp, synthetic construct
  source 1..110: mol_type = other DNA
gaagaggtaattctccctctaaccccctgccctgcgcacaccggggtcctgccccctcttctccatgttccagatggactctagttgtgcagtgggggaagcagctggca

SEQ ID NO: 58057 - DNA, 110 bp, synthetic construct
  source 1..110: mol_type = other DNA
ctcttctccatgttccagatggactctagttgtgcagtgggggaagcagctggcagcaggtaaaactttttttttttgttccagctgcttgcaaacatttgccctttaat

SEQ ID NO: 58058 - DNA, 110 bp, synthetic construct
  source 1..110: mol_type = other DNA
tccatgtgctgcaggtgtgggcctaaaaagaaaaaaagcgtcttccctgactctcagctccagttagttgctcttcagctgtgtttctgtaactctcctaatgtttacct

SEQ ID NO: 58059 - DNA, 110 bp, synthetic construct
  source 1..110: mol_type = other DNA
gatttgaattcctctgaaatcctgctttaaaatttcaatgattgctcttttttgggcatattcctttctagtcttctttggagcgtatatatacataatcgaaaccttct

SEQ ID NO: 58060 - DNA, 110 bp, synthetic construct
  source 1..110: mol_type = other DNA
gcccagctcagcttgagatgacggcagcagctgacaccttgactgcaacctcaggaggaactctgggccggatctacccagctaaactgcatctaagttttagggtaatt

SEQ ID NO: 58061 - DNA, 110 bp, synthetic construct
  source 1..110: mol_type = other DNA
ctgaacccagtcagaacccagactgggacatgaacccatatgccgggactcgagctcagcctaaagccagatcaggacttaaacccacaggtttaaattagaatcactca

SEQ ID NO: 58062 - DNA, 110 bp, synthetic construct; identical to SEQ ID NO: 58061
  source 1..110: mol_type = other DNA

SEQ ID NO: 58063 - DNA, 110 bp, synthetic construct
  source 1..110: mol_type = other DNA
gccacccgcgccccaatttcttggggcctaaggattgggtccccagaaaactttagcaacgcgctctctcgctgttggacgtcgtcgttgggcagaaggttacttactgt

SEQ ID NO: 58064 - DNA, 110 bp, synthetic construct
  source 1..110: mol_type = other DNA
acacaattccatctgtgctctggctggctggatgctgggaaggctcttccttggggagaagggtcagggaaagaaaaacaagcacggagaagaggagggaccctgagttt

SEQ ID NO: 58065 - DNA, 110 bp, synthetic construct
  source 1..110: mol_type = other DNA
gagaagggtcagggaaagaaaaacaagcacggagaagaggagggaccctgagttttgagttaaggctcagggtttggaattgcccccttcatccttcccttgagaactgg

SEQ ID NO: 58066 - DNA, 110 bp, synthetic construct
  source 1..110: mol_type = other DNA
tctcagtgtatacgggctcaaggataatttccaatgtgcctgtttcttttttctccgaggaccgcatgtgtgtgtgtgtatctgtgtgcacatacggttagaaccatgta

SEQ ID NO: 58067 - DNA, 110 bp, synthetic construct
  source 1..110: mol_type = other DNA
cgaggaccgcatgtgtgtgtgtgtatctgtgtgcacatacggttagaaccatgtagaagcccaaacatgtgaagtgctatttctgttactgtcccagtgaattctttcct

SEQ ID NO: 58068 - DNA, 110 bp, synthetic construct
  source 1..110: mol_type = other DNA
cccatagcaaagaatttttagtacttcataacctagcacatcaaggagcttatataaaaatggaggaattgtgcattttggccaccagtttgaaatatttatgaaggtaa

SEQ ID NO: 58069 - DNA, 110 bp, synthetic construct
  source 1..110: mol_type = other DNA
gtttgcatgcagttagcttggctcaagtatcctgaagggggctgccttggattggacacatgaggcccttgaagtcgtgccaagcaaaagcactggcagcaagacaaaac

SEQ ID NO: 58070 - DNA, 110 bp, synthetic construct
  source 1..110: mol_type = other DNA
acacatgaggcccttgaagtcgtgccaagcaaaagcactggcagcaagacaaaacctaaaaagcggagctggctacctgtgttgtgaaatgcaggcgtgtcaagccgctt

SEQ ID NO: 58071 - DNA, 110 bp, synthetic construct; identical to SEQ ID NO: 58069
  source 1..110: mol_type = other DNA

SEQ ID NO: 58072 - DNA, 110 bp, synthetic construct; identical to SEQ ID NO: 58070
  source 1..110: mol_type = other DNA

SEQ ID NO: 58073 - DNA, 110 bp, synthetic construct
  source 1..110: mol_type = other DNA
taatctgataggatggtggccttctatcaaaaggaagctctctttctctctttttatccccatctctgccctgtgaggacacagaatgaaggcagcttctgcaagtcagg

SEQ ID NO: 58074 - DNA, 110 bp, synthetic construct
  source 1..110: mol_type = other DNA
atccccatctctgccctgtgaggacacagaatgaaggcagcttctgcaagtcaggaaggcagctctccccagcacttaaccctgctggcaccctgatttagaattcccag

SEQ ID NO: 58075 - DNA, 110 bp, synthetic construct
  source 1..110: mol_type = other DNA
atcacacactcaattctttcagcaaccttggatggctctgctttcaaaatacatctggaatctgaagacttctcggcacctcggcagctatatactttgtccaagctgcc

SEQ ID NO: 58076 - DNA, 110 bp, synthetic construct
  source 1..110: mol_type = other DNA
tggaatctgaagacttctcggcacctcggcagctatatactttgtccaagctgccagcattgcttatctggtttgttataatagcttcataaccagacccctgcttctac

SEQ ID NO: 58077 - DNA, 110 bp, synthetic construct
  source 1..110: mol_type = other DNA
ggaacaccaagatgagtgtttgactgaataactggggactgcagcctgggcacatttacatgtaaaacagatcgctgcattcatcagtttaagactgcgggttagattcc

SEQ ID NO: 58078 - DNA, 110 bp, synthetic construct
  source 1..110: mol_type = other DNA
ttacatgtaaaacagatcgctgcattcatcagtttaagactgcgggttagattccggatgttacatagtcatgtagatttggtactgtcgtctagaaggaagcatataca

SEQ ID NO: 58079 - DNA, 110 bp, synthetic construct
  source 1..110: mol_type = other DNA
atttacacaacagattcttctacccagaccattaaaaatctcacaggagcattcatgccacctgcagctgctactgcacttctgggtaacgacacgggcctcaacccaat

SEQ ID NO: 58080 - DNA, 110 bp, synthetic construct
  source 1..110: mol_type = other DNA
tgccacctgcagctgctactgcacttctgggtaacgacacgggcctcaacccaatgagcaacaccacgttgcctcacttttctaaatgaagtgagttgcttcaagggatg

SEQ ID NO: 58081 - DNA, 110 bp, synthetic construct
  source 1..110: mol_type = other DNA
gccacatctgtgacctaaaccacaggttgaggcaatatcaggtcctttacccactgaggaggccagggatacagcccacgtcctcatggataccagttgggttttttaac

SEQ ID NO: 58082 - DNA, 110 bp, synthetic construct; identical to SEQ ID NO: 58081
  source 1..110: mol_type = other DNA

SEQ ID NO: 58083 - DNA, 110 bp, synthetic construct
  source 1..110: mol_type = other DNA
ggggacaaataaacattataaaactaagacaacgagtcatggtgtatggtatgggttttcctctgaacgttagggagttggaaaaaaatgacctttcttgtcaaaatttc

SEQ ID NO: 58084 - DNA, 110 bp, synthetic construct
  source 1..110: mol_type = other DNA
cttagcatgaatgtgaccccttaaatagggagcaaaaccggaggaatgaattaaagcaagagccctttaattctgtcaactctaatgcctccaatccctcatttcaaaat

SEQ ID NO: 58085 - DNA, 110 bp, synthetic construct
  source 1..110: mol_type = other DNA
tatgtgcatactccaaaaaccttgagctgtgtgtttttgtgctttataatataatcagactgtgttagtctatgctattgggcagaaataacatggctaaaggaaatgca

SEQ ID NO: 58086 - DNA, 110 bp, synthetic construct
  source 1..110: mol_type = other DNA
gaggagggacttcagccaatcaaaagatgagcagagaaacaagttttccttaagccaggcattaaaagatgagatttaaagccgacaaatcacctgctaaaagcatgtgt

SEQ ID NO: 58087 - DNA, 110 bp, synthetic construct
  source 1..110: mol_type = other DNA
caggcattaaaagatgagatttaaagccgacaaatcacctgctaaaagcatgtgtaaaacagataaaggaaaaacacttgaaataatacaagtgatcaatccatcaggta

SEQ ID NO: 58088 - DNA, 110 bp, synthetic construct
  source 1..110: mol_type = other DNA
gaaggtcagcacccacctttttcagaggttgtgcaataaagaagcaaatcacaacccagggagctaagcctacctgctacttctacagccctttgaaaattactgatgct

SEQ ID NO: 58089 - DNA, 110 bp, synthetic construct
  source 1..110: mol_type = other DNA
ctccacgagatctaacgcctggatttttatacgggcttctcactgcttcttcccactccttggatggcacatccctccacagtccagctcctcaaaatcactcctacccc

SEQ ID NO: 58090 - DNA, 110 bp, synthetic construct
  source 1..110: mol_type = other DNA
ctccttggatggcacatccctccacagtccagctcctcaaaatcactcctacccccatcccccaagctccggaccctcgtgaatctcatccccctaaagttcttcccctt

SEQ ID NO: 58091 - DNA, 110 bp, synthetic construct
  source 1..110: mol_type = other DNA
agaaacatgaaatgtctcgctccaaaagccgacgagaaagagtgctgcttctgctcccgttctcggctccgagatctagccatcaccagaccctccgcaggctactcctt

SEQ ID NO: 58092 - DNA, 110 bp, synthetic construct
  source 1..110: mol_type = other DNA
aggtgcaacagggaggcttttcaggccagtgaaactactctgtgtgacaccatgacacggacacatttgtccagactcatggaatgtacaacagcaagaacgaacgctaa

SEQ ID NO: 58093 - DNA, 110 bp, synthetic construct
  source 1..110: mol_type = other DNA
gtgaccctgtgatactaacccatcaaaagctccctaaaaacctctggcacctttagggtcagatgcctgtaattcaggggccatctcactctctaaatgcagtgggtgcc

SEQ ID NO: 58094 - DNA, 110 bp, synthetic construct
  source 1..110: mol_type = other DNA
aaactcaaagaaatcactgacgttgtggcaaaatgtctatattgtaacaagaatcagagctcacagctaccattttagaaggcagactctgcaactcttgaatattgtgc

SEQ ID NO: 58095 - DNA, 110 bp, synthetic construct
  source 1..110: mol_type = other DNA
agagctcacagctaccattttagaaggcagactctgcaactcttgaatattgtgcacaatttttaatctaaaaattcactcttaggttcctgctgtggtgcagcaggtta

SEQ ID NO: 58096 - DNA, 110 bp, synthetic construct
  source 1..110: mol_type = other DNA
tcgccctcgaagatggaaggatcgagcccagcacggctcaacagagagagaatatgggcctcctgtgcaagctacagagtgtcagttaaagttttctagtggccatgtta

SEQ ID NO: 58097 - DNA, 110 bp, synthetic construct
  source 1..110: mol_type = other DNA
ttcccccaccacacaccaaaaaacactctgatggcaagtctaatgattgctctcaagtaacaagcccagcaagggagctagaagaggccatccagatcagggcactccca

SEQ ID NO: 58098 - DNA, 110 bp, synthetic construct
  source 1..110: mol_type = other DNA
tccagattctgtgttgacatacaacagaacacttaaataagtgttttatagctgctgagatggttttgccaacatggattttaaaatgttatgtgcatgtcttttgaagg

SEQ ID NO: 58099 - DNA, 110 bp, synthetic construct
  source 1..110: mol_type = other DNA
gattatattaaatctgtaggttgctttgagtaatattaaattttattttattttcctttttcattttagggccatacctgtggtatatggaaggtcccaggctaggggtc

SEQ ID NO: 58100 - DNA, 110 bp, synthetic construct; identical to SEQ ID NO: 58099
  source 1..110: mol_type = other DNA

SEQ ID NO: 58101 - DNA, 110 bp, synthetic construct
  source 1..110: mol_type = other DNA
ctagagcaccatgattggatccccccgaagatgagggcctgctccccagttataacagaggggaaggagccgtctcttcactgcagaaggggttttactgccacctttgg

SEQ ID NO: 58102 - DNA, 110 bp, synthetic construct
  source 1..110: mol_type = other DNA
actacaaggtctacgagtgaggggaaaggcaagctgactgcttgctttactgggtcaaaattgagagaatgtttgtagagggtacctgaactaccctctaaggactgctg

SEQ ID NO: 58103 - DNA, 110 bp, synthetic construct
  source 1..110: mol_type = other DNA
ttaagaacccagcatagtgtccctgacgataaggactggatttctggcctccctcattgggttaaggatctggtgtggcctcaagccgcagcataggtgacagatacggc

SEQ ID NO: 58104 - DNA, 110 bp, synthetic construct
  source 1..110: mol_type = other DNA
attgggttaaggatctggtgtggcctcaagccgcagcataggtgacagatacggcttggatcttgttgctgtggttgtggcgtaggctgggaacgtccctatgcttcagg

SEQ ID NO: 58105 - DNA, 110 bp, synthetic construct
  source 1..110: mol_type = other DNA
actaagagagtgaaggtttggaaatagatctttctgatttgaatccccatggttttttctactttgctggtcttacgcatgagtaacatacagtcctcttttaaagggaa

SEQ ID NO: 58106 - DNA, 110 bp, synthetic construct
  source 1..110: mol_type = other DNA
tttctactttgctggtcttacgcatgagtaacatacagtcctcttttaaagggaaaaaaataccgtggatccccaatattggcctaaataattttattttattaaaatgt

SEQ ID NO: 58107 - DNA, 110 bp, synthetic construct
  source 1..110: mol_type = other DNA
aatgtaccctcagacaggcatatatgcaatggaatattattcagccataaaaaagaatgaagtcctgaccttcgtgacaaatagatggacctggagggcaatgcgctaag

SEQ ID NO: 58108 - DNA, 110 bp, synthetic construct
  source 1..110: mol_type = other DNA
aatgaagtcctgaccttcgtgacaaatagatggacctggagggcaatgcgctaagtgaaataagtcagagaaaaaggcaaatactgtgtggtctcatttatatacgggat

SEQ ID NO: 58109 - DNA, 110 bp, synthetic construct
  source 1..110: mol_type = other DNA
ttccactgtttctttcaagggcagaaggtcagtccactctttcttttctctccatatctgatgttcttgtggggagcacctttctgaatttcctttcctctcacggacta

SEQ ID NO: 58110 - DNA, 110 bp, synthetic construct
  source 1..110: mol_type = other DNA
ggggagagatccaaaccagcaacggggtctggctggaagtcaggctggggcgtgcggaggcctcctcaagtgggctctttccgtcttcattgtctatctgctggagccta

SEQ ID NO: 58111 - DNA, 110 bp, synthetic construct
  source 1..110: mol_type = other DNA
ggaggcctcctcaagtgggctctttccgtcttcattgtctatctgctggagcctaattttgaactttatttctctacttttcattctaaactttattctgcttctggtcg

SEQ ID NO: 58112 - DNA, 110 bp, synthetic construct
  source 1..110: mol_type = other DNA
actgtctgcacccggtgctcactacgtagtgaaagagagtgtcgcttcgaaggcttctgcatggcaccgaccaggaagttcgccacagaatgatggggggtggggggccg

SEQ ID NO: 58113 - DNA, 110 bp, synthetic construct
  source 1..110: mol_type = other DNA
tctgcatggcaccgaccaggaagttcgccacagaatgatggggggtggggggccgtgccctcggcatacggacgtttccaggccaggggtcccatgccacagcagctgct

SEQ ID NO: 58114 - DNA, 110 bp, synthetic construct; identical to SEQ ID NO: 58112
  source 1..110: mol_type = other DNA

SEQ ID NO: 58115 - DNA, 110 bp, synthetic construct; identical to SEQ ID NO: 58113
  source 1..110: mol_type = other DNA

SEQ ID NO: 58116 - DNA, 110 bp, synthetic construct
  source 1..110: mol_type = other DNA
ggtcttgagccaggtgctgtgtaaacagacctggtctctgtcctgctcccttttatcactcggaggagcagctgtgacgtccctcccaggagtgtacccagttgaatgtt

SEQ ID NO: 58117 - DNA, 110 bp, synthetic construct
  source 1..110: mol_type = other DNA
ctgtgtcctggcctgcgaggcttgtcagttctgtcaatattacaagtgaaatataggtcagcctcacagctcccagtgttaaaaataaaagcttcctccccaggctctga

SEQ ID NO: 58118 - DNA, 110 bp, synthetic construct
  source 1..110: mol_type = other DNA
ggtcagcctcacagctcccagtgttaaaaataaaagcttcctccccaggctctgaggattggtaactggggatgggccccccttcccactaaccccaccttgcagttgct

SEQ ID NO: 58119 - DNA, 110 bp, synthetic construct
  source 1..110: mol_type = other DNA
gcatcgacccctcccgcagtcacgcgccgtcctctctgatactttctggtctactccttattctattattcttttttaacggagtctggatgtgacttgcagcgtgattt

SEQ ID NO: 58120 - DNA, 110 bp, synthetic construct
  source 1..110: mol_type = other DNA
ccttattctattattcttttttaacggagtctggatgtgacttgcagcgtgatttcacagctctgatgggtcctgcaaaccgctggctagaccgcctctgctgggagtgg

SEQ ID NO: 58121 - DNA, 110 bp, synthetic construct
  source 1..110: mol_type = other DNA
ctgttttgtaagttctttggtgtcatttattagatccctgtatgagtgatctcatctgaaagatggctgtctttcttcgctaagtgtgaccattctccgtccgaccttct

SEQ ID NO: 58122 - DNA, 110 bp, synthetic construct
  source 1..110: mol_type = other DNA
ctgaaagatggctgtctttcttcgctaagtgtgaccattctccgtccgaccttcttcgctaagtgtgaccattcctaggcccattcatgctgctgcagatgagccagggc

SEQ ID NO: 58123 - DNA, 110 bp, synthetic construct
  source 1..110: mol_type = other DNA
gtccaacttgtagttctcgccatgaaatgattgcaaaattaatgtctttgcaacacagctcttatgtgaacactttgagtgaggctgaggcccttttaaaattgaaagca

SEQ ID NO: 58124 - DNA, 110 bp, synthetic construct
  source 1..110: mol_type = other DNA
cagctcttatgtgaacactttgagtgaggctgaggcccttttaaaattgaaagcatgtgatgcataatatttgtgaaactgaagtacagtttctccctcactgatgcgaa

SEQ ID NO: 58125 - DNA, 110 bp, synthetic construct
  source 1..110: mol_type = other DNA
tctgtaaagtgggaatattagcagcattgacctctgcggggggtcaaccgaaggttagaggagtttacgtgtagcatgtgcaacagtgcttaccaggaaacagcttcatg

SEQ ID NO: 58126 - DNA, 110 bp, synthetic construct
  source 1..110: mol_type = other DNA
tagaggagtttacgtgtagcatgtgcaacagtgcttaccaggaaacagcttcatggatattgtttttctgactagccgtattgtcttaggcatgttactagcccttttta

SEQ ID NO: 58127 - DNA, 110 bp, synthetic construct
  source 1..110: mol_type = other DNA
agttgagcacgaagttgtctccatgaggacgtgggctcaatccctggcctcgctcagtgagtaggggattcggtgatgccgcgagttgtggcacagttcctagaagtgac

SEQ ID NO: 58128 - DNA, 110 bp, synthetic construct
  source 1..110: mol_type = other DNA
agtgagtaggggattcggtgatgccgcgagttgtggcacagttcctagaagtgactcggatccagtgctggtgtggctgtggcatagacttcagctgcagctcagattcg

SEQ ID NO: 58129 - DNA, 110 bp, synthetic construct
  source 1..110: mol_type = other DNA
gtccctaaggccctcccataagggggagaaggaagtttctaccgaccagcgaaaggaggtgacatcaaagcatggcttgaagaggggagagaagctgtggttgatatttg

SEQ ID NO: 58130 - DNA, 110 bp, synthetic construct
  source 1..110: mol_type = other DNA
gaggtgacatcaaagcatggcttgaagaggggagagaagctgtggttgatatttgccctttattgagggcgtgggtaaccctgcctagccctcttatccaggagaaatcc

SEQ ID NO: 58131 - DNA, 110 bp, synthetic construct
  source 1..110: mol_type = other DNA
tctccctttacttatgatggcatatctgtcctttctttcctggccaagctcctctggaaagtggtccctgtcaccttatctacctggtcacttcctttccttctgcatca

SEQ ID NO: 58132 - DNA, 110 bp, synthetic construct
  source 1..110: mol_type = other DNA
ggaaagtggtccctgtcaccttatctacctggtcacttcctttccttctgcatcactgcggagagacttctaccaccaccattctgctgaaactgctcagtaaagaccat

SEQ ID NO: 58133 - DNA, 110 bp, synthetic construct
  source 1..110: mol_type = other DNA
accgctggaactacatcttcgaagaacctagagggaagagcaccacgtgaaaatgctggaacaccttgtccagccagataaaaaccgctcgacgagctgccacaagttcc

SEQ ID NO: 58134 - DNA, 110 bp, synthetic construct
  source 1..110: mol_type = other DNA
ctggaacaccttgtccagccagataaaaaccgctcgacgagctgccacaagttcctccctctgcgcccagagagtcatcaggagcagcaaccccacgaggctgcggctcc

SEQ ID NO: 58135 - DNA, 110 bp, synthetic construct
  source 1..110: mol_type = other DNA
ctttctggaggggcccatgccgtccatctgccgtgtcctcagcagccgtggtatatttttgctccttaaacatccttcctgaggaccatactaggaactaccagagacgt

SEQ ID NO: 58136 - DNA, 110 bp, synthetic construct
  source 1..110: mol_type = other DNA
tttttgctccttaaacatccttcctgaggaccatactaggaactaccagagacgtttcggagctctggctcttacccagggctcagaaatggcaactcttttgtccctgt

SEQ ID NO: 58137 - DNA, 110 bp, synthetic construct; identical to SEQ ID NO: 58135
  source 1..110: mol_type = other DNA

SEQ ID NO: 58138 - DNA, 110 bp, synthetic construct; identical to SEQ ID NO: 58136
  source 1..110: mol_type = other DNA

SEQ ID NO: 58139 - DNA, 110 bp, synthetic construct
  source 1..110: mol_type = other DNA
aagcaagaaagatctgactgaatatttgtctcgatttggggaagtcgtagactgcacaattaaaacagatccagtcactggaagatcaagaggatttggatttgtgcttt

SEQ ID NO: 58140 - DNA, 110 bp, synthetic construct
  source 1..110: mol_type = other DNA
acaattaaaacagatccagtcactggaagatcaagaggatttggatttgtgcttttcaaagatgctgctagtgttgataaggtaggaacctgttctgcattgtgctgctc

SEQ ID NO: 58141 - DNA, 110 bp, synthetic construct
  source 1..110: mol_type = other DNA
catttgctcattttcctgggaagtgcattcctcccctttggggtcgcagaacctgacgctcttcttagctcaggccgagacaagcgcctcaaatgcctaattgccttgag

SEQ ID NO: 58142 - DNA, 110 bp, synthetic construct
  source 1..110: mol_type = other DNA
cagtaggtgttttaaactgagtattgtattgccttggggtgctgaataactataggtaggattaagaaacttggtcgatactgtaagtgaaatctttaattgaaattatt

SEQ ID NO: 58143 - DNA, 110 bp, synthetic construct
  source 1..110: mol_type = other DNA
ggcaaccaagaaacagaccggtgttgtgttaaaacactgaaactgggctcaactttggtgtaggtggctcgtgtttcttcagtattgaaactggtagtaggacaggatgt

SEQ ID NO: 58144 - DNA, 110 bp, synthetic construct
  source 1..110: mol_type = other DNA
ttttctctcacgtaaaacaatgagctcactggcgtgataaattagcaggcacctcctttcgcgtgaagtattcctgagttgcaaatcactgattttattagatggcggct

SEQ ID NO: 58145 - DNA, 110 bp, synthetic construct
  source 1..110: mol_type = other DNA
taaggcaggactgcttggtttaatgttattagtaatcattgtcttcaactagcgtctccgtttaaatgaatatcctaagggtgtttcttactacttcagttctatttgaa

SEQ ID NO: 58146 - DNA, 110 bp, synthetic construct
  source 1..110: mol_type = other DNA
aggacctcgtcctgcttgtcctgtccatggtgctgttatttttttcattcttcgccaggctagcaaacctggctttgaacctagaggacctctagtggagtttaatgcac

SEQ ID NO: 58147 - DNA, 110 bp, synthetic construct
  source 1..110: mol_type = other DNA
caggctagcaaacctggctttgaacctagaggacctctagtggagtttaatgcacagaaatcttgggttcagtttgcaaaatgaggcttcataaaccctttggacacatg

SEQ ID NO: 58148 - DNA, 110 bp, synthetic construct
  source 1..110: mol_type = other DNA
tgatgctctagcgctgtaataggaaaccaccagtggtatattttagctcattttcaggggtgggagtgactgaaaaaggatctcactataatgttgctagggattaaacg

SEQ ID NO: 58149 - DNA, 110 bp, synthetic construct
  source 1..110: mol_type = other DNA
agtggctcccctctgcctttggagggaagtccagattcctttggaaaacaaacacctgcctgtttctcttgccctttgggtctgcgccctgcccttcaagctccagcttt

SEQ ID NO: 58150 - DNA, 110 bp, synthetic construct
  source 1..110: mol_type = other DNA
ctgcctgtttctcttgccctttgggtctgcgccctgcccttcaagctccagctttcagacacaccttcccgtgcacaggcccagacgtctgtcctcacacggttcctctg

SEQ ID NO: 58151 - DNA, 110 bp, synthetic construct
  source 1..110: mol_type = other DNA
gttggagacgtttgtgccagaagacttactgtctagtgtggatgtttgcactgtttgaagtacttgccttggcggctccggatagaggctgcctgaattcagaaagccat

SEQ ID NO: 58152 - DNA, 110 bp, synthetic construct
  source 1..110: mol_type = other DNA
tgaagtacttgccttggcggctccggatagaggctgcctgaattcagaaagccattcttgatggtggttgttcgagaaaaaacccccaaggttgtttaagaagattaaaa

SEQ ID NO: 58153 - DNA, 110 bp, synthetic construct
  source 1..110: mol_type = other DNA
ctccattctctgcctgtgttccctgggcaggaagagcatcacgtgaggtcaaatctttaggctcagttccggggagaagtacctgctaaaaaccaggacctctaatctaa

SEQ ID NO: 58154 - DNA, 110 bp, synthetic construct
  source 1..110: mol_type = other DNA
gctgtttatttacttgatgacttgtttattgcctcactgtctagaatatcagctccatgagagcaaggcctttgttttgagacttgcttgtatcctgagtccctagaaga

SEQ ID NO: 58155 - DNA, 110 bp, synthetic construct
  source 1..110: mol_type = other DNA
catgagagcaaggcctttgttttgagacttgcttgtatcctgagtccctagaagagcgctgtttacagaggagtcagccagtattttagaaactgaattatgatgattaa

SEQ ID NO: 58156 - DNA, 110 bp, synthetic construct
  source 1..110: mol_type = other DNA
agtccgcgtcctgagtttcactgtgtagttgtctttggacccagatgatgccttgctgcaaaggtagggagctgcttgtattcactgtttcagtgaagccatctctccca

SEQ ID NO: 58157 - DNA, 110 bp, synthetic construct
  source 1..110: mol_type = other DNA
taaagattgtactcgccgcatcatacattaatgttaccctgggatctcagattgggcatttctgtcctctcccttgtcccggcagctagagcttgcttctctggaagctg

SEQ ID NO: 58158 - DNA, 110 bp, synthetic construct
  source 1..110: mol_type = other DNA
gcatttctgtcctctcccttgtcccggcagctagagcttgcttctctggaagctgcagtgcggacaggaccatgctcgattttctaggccagcagacgttgttctgttga

SEQ ID NO: 58159 - DNA, 110 bp, synthetic construct
  source 1..110: mol_type = other DNA
acagaacttctcagctgcagtcacacggaagcagtctgtaagcaggtccttaggaatatacaacaggcaaaatctcagttccccttaacctctgcagaagcttagctgtt

SEQ ID NO: 58160 - DNA, 110 bp, synthetic construct
  source 1..110: mol_type = other DNA
atatacaacaggcaaaatctcagttccccttaacctctgcagaagcttagctgttgaggaggtcgtgagctccttgctccctgaccaaagttgtttaaaaggaacgttgg

SEQ ID NO: 58161 - DNA, 110 bp, synthetic construct
  source 1..110: mol_type = other DNA
atttccctccttgcgctccctgtatcctgactcagctgagccatcttccctccacagtctctttcctgccatatgaggcaggatattaataaccactagcatttgctgag

SEQ ID NO: 58162 - DNA, 110 bp, synthetic construct
  source 1..110: mol_type = other DNA
tccagcggctcattctccattccttcacggagaaccccgagaagtcctccttccgctccagaaacatggccaacgaatggaccgcgggagatggggacgagtcagggctt

SEQ ID NO: 58163 - DNA, 110 bp, synthetic construct
  source 1..110: mol_type = other DNA
ctccagaaacatggccaacgaatggaccgcgggagatggggacgagtcagggcttgctgattcatttttaaaggtcatctttattttatgaggttattggtacctacagt

SEQ ID NO: 58164 - DNA, 110 bp, synthetic construct
  source 1..110: mol_type = other DNA
tgtttgaaagatctgattctatatatattctgaccctaaccagatttgggagttaaagagaaattcagttgtacaacacaccactatttgatcaactgctaagaaggggg

SEQ ID NO: 58165 - DNA, 110 bp, synthetic construct
  source 1..110: mol_type = other DNA
aagagaaattcagttgtacaacacaccactatttgatcaactgctaagaagggggcaatgctgtcagtaataactgcaaaatagcagcagttagatgacacatttctatt

SEQ ID NO: 58166 - DNA, 110 bp, synthetic construct
  source 1..110: mol_type = other DNA
ttttactttattgaagtgtagctgatctccagggctgtgttgatttctaccacacagcccaagcctccagttttatgtgtacaaatatagttgatgtggttgatacgtac

SEQ ID NO: 58167 - DNA, 110 bp, synthetic construct
  source 1..110: mol_type = other DNA
agcccaagcctccagttttatgtgtacaaatatagttgatgtggttgatacgtacagacatgagcacatgcacgtatgtgtatgtgcgtttcgtgttcttcctgttgtgg

SEQ ID NO: 58168 - DNA, 110 bp, synthetic construct
  source 1..110: mol_type = other DNA
aagctatgttaacaagttcactttctattgttggatataagcaaaagaattaatgtaacacaaactgaggagtgtgtttcagttatgaagcataatggagcccatctccc

SEQ ID NO: 58169 - DNA, 110 bp, synthetic construct; identical to SEQ ID NO: 58168
  source 1..110: mol_type = other DNA

SEQ ID NO: 58170 - DNA, 110 bp, synthetic construct
  source 1..110: mol_type = other DNA
gcaggattaagctctgggtaaaagagcatcgccatcaatcaatccaggactcatgctggaagaaatacgtaaaaacacaggaaaacatgttaggacaaaattctggaggt

SEQ ID NO: 58171 - DNA, 110 bp, synthetic construct
  source 1..110: mol_type = other DNA
ctggaagaaatacgtaaaaacacaggaaaacatgttaggacaaaattctggaggtgccagaaaaacatcaacaaagcactgcgtttcctgtctgcatttatttcccattg

SEQ ID NO: 58172 - DNA, 110 bp, synthetic construct
  source 1..110: mol_type = other DNA
agcgagggaccctgtgatgaaacaaggactgaaataactccttttttcgactccgtaccttgacgctctcgttctccggagtgtaagaaagtgctgacttgccgttctgg

SEQ ID NO: 58173 - DNA, 110 bp, synthetic construct
  source 1..110: mol_type = other DNA
attgaacctttgtcctcatggatccgagtcgggttcagtaccgctggggccaccacaaacactccctcaccttccatctcagtaaacaccaattcagactccgggctggc

SEQ ID NO: 58174 - DNA, 110 bp, synthetic construct
  source 1..110: mol_type = other DNA
caaacactccctcaccttccatctcagtaaacaccaattcagactccgggctggctcaggtcaggtccctgggcctcgtcccccctccccctttccgtggccgtatacac

SEQ ID NO: 58175 - DNA, 110 bp, synthetic construct
  source 1..110: mol_type = other DNA
ctaggaggcatttcatgctggatgtgcagctcagtgaccgttgttagacccgaagcagacccatttgactttagatgcggtgcacttggaatcagacccaccaagttctg

SEQ ID NO: 58176 - DNA, 110 bp, synthetic construct
  source 1..110: mol_type = other DNA
cctttttggatctactttttattcccgatgttctaaaatttcaaaacaatattcctttgtgtgtttatctgcaattcaatgcgctgaacattcactaaacccttcgtttt

SEQ ID NO: 58177 - DNA, 110 bp, synthetic construct
  source 1..110: mol_type = other DNA
tttgtgtgtttatctgcaattcaatgcgctgaacattcactaaacccttcgttttccttcagctttgttgcaagagggtttcttgaatttatggtccaaccattaattat

SEQ ID NO: 58178 - DNA, 110 bp, synthetic construct
  source 1..110: mol_type = other DNA
ttaaaataaatgcataactaccgaactaaaaacatttctgagtcgactaagatggtgcctcgtaaccggcaggctgtgtatcacatcccaggactcactggatgagcgac

SEQ ID NO: 58179 - DNA, 110 bp, synthetic construct
  source 1..110: mol_type = other DNA
tgcctcgtaaccggcaggctgtgtatcacatcccaggactcactggatgagcgaccactttggcacctgcactgagaatgttctttccaggacaggaacaggcttgcgcc

SEQ ID NO: 58180 - DNA, 110 bp, synthetic construct
  source 1..110: mol_type = other DNA
cactgcttcagggaaagagctttgtagcaattctaatattaacaactctaatgcttactctgtgtgctgggttgttctgtgatccccacctactgtagcatatttacgtc

SEQ ID NO: 58181 - DNA, 110 bp, synthetic construct
  source 1..110: mol_type = other DNA
tactctgtgtgctgggttgttctgtgatccccacctactgtagcatatttacgtcttaggattgtgtgaagtaaatgctgtcagcacggcccctgttattgataaggagc

SEQ ID NO: 58182 - DNA, 110 bp, synthetic construct
  source 1..110: mol_type = other DNA
acatccgaccgtggcaagggcgggatttatgtgtggcgtgacccctgcttgacgagggcagcgtgtgacaggtgtctcttctcttgggcaggaggtccatgtctagctgg

SEQ ID NO: 58183 - DNA, 110 bp, synthetic construct
  source 1..110: mol_type = other DNA
aggcatagcggtcagggaccatctcttttgttggccgttgttatccgtccagctcgctgatcggccaccagctaaaatgagaggaacgactaaagccttcggacgttaag

SEQ ID NO: 58184 - DNA, 110 bp, synthetic construct
  source 1..110: mol_type = other DNA
gctgatcggccaccagctaaaatgagaggaacgactaaagccttcggacgttaagaggcagatgtcgcatatttccattccgacctgggtctcgaaccaggtggactgac

SEQ ID NO: 58185 - DNA, 110 bp, synthetic construct
  source 1..110: mol_type = other DNA
tgactttccatccctggtgcctggcatcttgcacatgctcaataaatgtttatgaccagctgccctggaacaattcgtctcaggtgccggcaaatggctcctgcattttc

SEQ ID NO: 58186 - DNA, 110 bp, synthetic construct
  source 1..110: mol_type = other DNA
tttgcctttatatatgaaattacccagaaagagcaatggttcacagtggttcctggatgatggagtgtgtctaagtctagccattgtttttagctgttgtttctgttcat

SEQ ID NO: 58187 - DNA, 110 bp, synthetic construct
  source 1..110: mol_type = other DNA
gatgatggagtgtgtctaagtctagccattgtttttagctgttgtttctgttcatatttctggtttggcctaaagagggacaatgatgaaacaacagcatttgatcattg

SEQ ID NO: 58188 - DNA, 110 bp, synthetic construct; identical to SEQ ID NO: 58186
  source 1..110: mol_type = other DNA

SEQ ID NO: 58189 - DNA, 110 bp, synthetic construct; identical to SEQ ID NO: 58187
  source 1..110: mol_type = other DNA

SEQ ID NO: 58190 - DNA, 110 bp, synthetic construct
  source 1..110: mol_type = other DNA
tggtcaaggtctatctttgaaaagttggatgaagcggggacttttcccagagttcagcccatgaaccaccaagggagctggcagatgattttctgaagttatacaactct

SEQ ID NO: 58191 - DNA, 110 bp, synthetic construct
  source 1..110: mol_type = other DNA
agcccatgaaccaccaagggagctggcagatgattttctgaagttatacaactctggctgcaggtcacatctttggctctctccgaacaaacaaaaacaaaagatcaaaa

SEQ ID NO: 58192 - DNA, 110 bp, synthetic construct
  source 1..110: mol_type = other DNA
ataataatcttctctttgaaattatggtgataaaatgaggagaggacactgtcagggaaagttgtgagcctgtgaaatggattcaaatcaatagtggctacctgaccact

SEQ ID NO: 58193 - DNA, 110 bp, synthetic construct
  source 1..110: mol_type = other DNA
ggaaagttgtgagcctgtgaaatggattcaaatcaatagtggctacctgaccactcactcatgtagggtttctcatcactgagtgacattacgactctgtaaaatgcaga

SEQ ID NO: 58194 - DNA, 110 bp, synthetic construct
  source 1..110: mol_type = other DNA
tggtttatattctgtcttctcaactagtcggtgagcctataagggtaggaacctgccttcaggtgactattcctagagcttcttgcagcatctggcacttggttagttcc

SEQ ID NO: 58195 - DNA, 110 bp, synthetic construct
  source 1..110: mol_type = other DNA
tgcccaatttcacttatttctcttttcagctaggtagacccacagtttattccacttatcttctttttatggaccgacttacgcatgacctgacttttaaaagccttata

SEQ ID NO: 58196 - DNA, 110 bp, synthetic construct
  source 1..110: mol_type = other DNA
ttatcttctttttatggaccgacttacgcatgacctgacttttaaaagccttataaagaaggtccaggaaggctttggaagccacatgtaaatttgtgcggctgacttga

SEQ ID NO: 58197 - DNA, 110 bp, synthetic construct
  source 1..110: mol_type = other DNA
acccattgtgtggcacagagtaggtccaatgcatggtatttgtctgtcctcacagaactgttgacaatggtataaattaacagtgaagcatgtagctggggaaggccaga

SEQ ID NO: 58198 - DNA, 110 bp, synthetic construct
  source 1..110: mol_type = other DNA
aactgttgacaatggtataaattaacagtgaagcatgtagctggggaaggccagacgaatgttaggaggagtcttgtgggttctcagttcccagataagcatgtgttgat

SEQ ID NO: 58199 - DNA, 110 bp, synthetic construct
  source 1..110: mol_type = other DNA
gggggacactactccgtcccctgcagagggccaggcagtgctctcagaggtggcggatgccctccatttctgcaagggctggtgcaaccagtaaatgggtcagtctacaa

SEQ ID NO: 58200 - DNA, 110 bp, synthetic construct
  source 1..110: mol_type = other DNA
gatgccctccatttctgcaagggctggtgcaaccagtaaatgggtcagtctacaaacatgcaaataattaagccgtggtttgccaggtaatacacttctgaaggaaagat

SEQ ID NO: 58201 - DNA, 110 bp, synthetic construct
  source 1..110: mol_type = other DNA
aagttgattaggttatttaaagcaaagtcgactaggtaaggttctaacggagatcaactgccctttccagaaggtcattctgctttccaaccaagccctcacctaactgt

SEQ ID NO: 58202 - DNA, 110 bp, synthetic construct
  source 1..110: mol_type = other DNA
aactgccctttccagaaggtcattctgctttccaaccaagccctcacctaactgtactgagcaatcagtttactcttggcaccgaggtcgctccagcctaggagttgata

SEQ ID NO: 58203 - DNA, 110 bp, synthetic construct
  source 1..110: mol_type = other DNA
gaatcccaaaggctttcattaatttggctgtgggatgagctaacagcacgcaaggcattgcttggaggtgcgaccggtgtgaacaaccaacgtattgtttattcgcctcc

SEQ ID NO: 58204 - DNA, 110 bp, synthetic construct
  source 1..110: mol_type = other DNA
actagcttcttaattggtcttaatcgagatttatgaggaagtgggctagatattgtcagctgaagatgggcaaagataggcacagacacagaggaacgaaggtgagacaa

SEQ ID NO: 58205 - DNA, 110 bp, synthetic construct
  source 1..110: mol_type = other DNA
tcagctgaagatgggcaaagataggcacagacacagaggaacgaaggtgagacaaggtgtttggagagaaatgtatttatcttgttggacagttgcagggaaagaaagga

SEQ ID NO: 58206 - DNA, 110 bp, synthetic construct
  source 1..110: mol_type = other DNA
caaagctgctacagagaataaatgtgctacgcgtagagaacgcgcagacaaccaagcttgcacaccttagctactgttctcacgcaaaagaatgtaagatcatggctcct

SEQ ID NO: 58207 - DNA, 110 bp, synthetic construct
  source 1..110: mol_type = other DNA
actgcctgcctattaggtaccaggaaccgcaccagggacaaagataaatgagacttaactcctgctctcaagctgcctgtggcctcatggaggcgaatatccctcacgtg

SEQ ID NO: 58208 - DNA, 110 bp, synthetic construct
  source 1..110: mol_type = other DNA
taactcctgctctcaagctgcctgtggcctcatggaggcgaatatccctcacgtgctgactgtagtaacaggatacagatggagaaggagttcataagagaaatatctac

SEQ ID NO: 58209 - DNA, 110 bp, synthetic construct
  source 1..110: mol_type = other DNA
tttcttgtcatgaataaatacattaaaagttgtgcatcactcaaaattaactcagtacagctgacctttgaacaacgtggggcttaaggacgcccacctctcccagcgcg

SEQ ID NO: 58210 - DNA, 110 bp, synthetic construct
  source 1..110: mol_type = other DNA
cctcccaacaccatcgccctcctcgcctgtcagcttagtctgtatctcagcattttacccgaaaccagagcagatagaaaatagtactgtcacattcggaggtcccgtcg

SEQ ID NO: 58211 - DNA, 110 bp, synthetic construct
  source 1..110: mol_type = other DNA
gaggacagttaaaacttagtgactcaacttcaaagtaaacatacactgtgtcattaatttaaatttcctctaaattgggttgcactgtcactttgtgtctaacctaacac

SEQ ID NO: 58212 - DNA, 110 bp, synthetic construct
  source 1..110: mol_type = other DNA
tttcctttatgtgtaaccttttgaattcttaagtcacctctgtgcctgcttcccagaaaggttagtctgtgacagactgtacctggagtagcttgagaaacaggtgctga

SEQ ID NO: 58213 - DNA, 110 bp, synthetic construct
  source 1..110: mol_type = other DNA
gaaaggttagtctgtgacagactgtacctggagtagcttgagaaacaggtgctgagatggagtttaggaactggggtctcagcggaagccctctggtaatgaggttcaag

SEQ ID NO: 58214 - DNA, 110 bp, synthetic construct
  source 1..110: mol_type = other DNA
cctatttgttagttttgtttgcctgtcattctattatgatccattgtgactatgcattttcagcgggaacctcgctaagttaccatgcggttaacagctcttcagggagg

SEQ ID NO: 58215 - DNA, 110 bp, synthetic construct
  source 1..110: mol_type = other DNA
attttcagcgggaacctcgctaagttaccatgcggttaacagctcttcagggaggtaatctcttaaacatctaaagttaaacatcatgacagtgttttcagccagtgaat

SEQ ID NO: 58216 - DNA, 110 bp, synthetic construct
  source 1..110: mol_type = other DNA
tctttatgcagaacaaataagtgggtcaaaacgcccctggttttccttcttcttaaggtgttaattcaagacactagctgctggttcatagcaactggtatccaaactct

SEQ ID NO: 58217 - DNA, 110 bp, synthetic construct
  source 1..110: mol_type = other DNA
gacgtgcgccccacagtgacgacagttaaaactgctgggcggggtgaccgagagctgtccgggagctcctgttgcggctccgagggttacgaacctgacagcctccccga

SEQ ID NO: 58218 - DNA, 110 bp, synthetic construct
  source 1..110: mol_type = other DNA
tgtccgggagctcctgttgcggctccgagggttacgaacctgacagcctccccgaggagtcggatttgatccctgatccctggcctcgctcgtgggttaaggatctggca

SEQ ID NO: 58219 - DNA, 110 bp, synthetic construct
  source 1..110: mol_type = other DNA
ccggagtgggtagggtgagttaacgtaaaaattattacctactgccgagatgggctccggagagcttctcacgtccagcaggtggtggaagagcggatggagtggccgag

SEQ ID NO: 58220 - DNA, 110 bp, synthetic construct
  source 1..110: mol_type = other DNA
gtcgagtgtgtggggatctcacagcagatgcgagagtggtgttgccccagggtatagccttcaggatgcgagttacggagaagctcacagggcagcagtattcctgagtg

SEQ ID NO: 58221 - DNA, 110 bp, synthetic construct
  source 1..110: mol_type = other DNA
catggaacccggatttcacgtctggcgtgagcccgtgtgggtggattcgaaactaggcggagagcccatgcgggagttgaggacgtgtccgcttgaagctctttctagca

SEQ ID NO: 58222 - DNA, 110 bp, synthetic construct
  source 1..110: mol_type = other DNA
aactggctctttctgcagtaaaggcgactaatgctttctagaaatttgtgttttgtacatttcttcagctgcttcaggtactacaaagtcctctccaagtctgtgttcca

SEQ ID NO: 58223 - DNA, 110 bp, synthetic construct
  source 1..110: mol_type = other DNA
aggcaggtgcctttgaatttgtcttttggagaagacactgcctatgtattggcatgggcgtaaccgggagtatcaggcagtctgagagaacctggctaggctagctcttg

SEQ ID NO: 58224 - DNA, 110 bp, synthetic construct
  source 1..110: mol_type = other DNA
gggcgtaaccgggagtatcaggcagtctgagagaacctggctaggctagctcttgctgctccatatggaaggaaggtcattttccttccctttgcttttgttatcatagg

SEQ ID NO: 58225 - DNA, 110 bp, synthetic construct
  source 1..110: mol_type = other DNA
gtaagggctgtggtctagggtttcggggaaaactggaagaagcaggaattttgaaggtaaggatgcaaagggaggaggaaagaagaatgctctggatggtggacagacat

SEQ ID NO: 58226 - DNA, 110 bp, synthetic construct
  source 1..110: mol_type = other DNA
cctgctgtaccacaagggaatgctgctgtaggctgttgcatttccctgatgatcaggcaggttgagcatcttatatatgcttattgctcatctgcatagctttctggaat

SEQ ID NO: 58227 - DNA, 110 bp, synthetic construct
  source 1..110: mol_type = other DNA
cgcaatctgatcgagagctgacccagaaacacttagcttttagctggcaagaattactctagtcagctgtagagcttcagtatcatctggttcagtaggagcatgaccct

SEQ ID NO: 58228 - DNA, 110 bp, synthetic construct
  source 1..110: mol_type = other DNA
actctagtcagctgtagagcttcagtatcatctggttcagtaggagcatgaccctcaagacagacagacatgggttgaatcttgactctacaactttccagttttgacat

SEQ ID NO: 58229 - DNA, 110 bp, synthetic construct
  source 1..110: mol_type = other DNA
ctgcttctccagctcctagggttgcactcagggcaggccacgcgtgtcactgaatcaatgagcagatgagcctcccggggtctgcagacgaaaccccaaggaagcgaaaa

SEQ ID NO: 58230 - DNA, 110 bp, synthetic construct
  source 1..110: mol_type = other DNA
caatgagcagatgagcctcccggggtctgcagacgaaaccccaaggaagcgaaaaaagcgcaaagggcaaatctttgcagaaacctttcaactggaggcaaaagaggtcc

SEQ ID NO: 58231 - DNA, 110 bp, synthetic construct
  source 1..110: mol_type = other DNA
gaacgtggtcacagtgagaaacgctgacgcctgctcctgagcttctgtgaaggaggtggccgccgaggccagaacgcgcaggtagagtgtctgccgtgtcgtgtgtgccg

SEQ ID NO: 58232 - DNA, 110 bp, synthetic construct
  source 1..110: mol_type = other DNA
gtggccgccgaggccagaacgcgcaggtagagtgtctgccgtgtcgtgtgtgccgtgtcctggtctcttacatccactgcaagccgcttaacattcctaaaaaaattcga

SEQ ID NO: 58233 - DNA, 110 bp, synthetic construct
  source 1..110: mol_type = other DNA
gctgggccagcacacggtctctggcctcagcagagaagccttttgggaagacagattccatcggccacacttgaaatgagcagggtctataggccttgtcccagagctca

SEQ ID NO: 58234 - DNA, 110 bp, synthetic construct
  source 1..110: mol_type = other DNA
ttccatcggccacacttgaaatgagcagggtctataggccttgtcccagagctcagaaggaacccccagacgtcttgctgggccttcttttcactcagatgacagctcag

SEQ ID NO: 58235 - DNA, 110 bp, synthetic construct
  source 1..110: mol_type = other DNA
taattgaaatacaattgccttgtttatttacacttgcgttagagaggagtatagcataacagacagggctgggttttcgaggtgggtagaccgggttccagttgtagttc

SEQ ID NO: 58236 - DNA, 110 bp, synthetic construct
  source 1..110: mol_type = other DNA
ataacagacagggctgggttttcgaggtgggtagaccgggttccagttgtagttcggcctgctttccatggtcttcaacaagcgacagcttcttggagcctcagtctacg

SEQ ID NO: 58237 - DNA, 110 bp, synthetic construct
  source 1..110: mol_type = other DNA
gcagacgtcggccaagcaaatcgaggacaggtagcagaggccagtcccctgccagccctggacacgtgccatcccggctcacctgggtcccaggacccgggtgcagtgct

SEQ ID NO: 58238 - DNA, 110 bp, synthetic construct
  source 1..110: mol_type = other DNA
ccctggacacgtgccatcccggctcacctgggtcccaggacccgggtgcagtgcttgtgatggggacatgcaggtctcggggcagggaggggtttcgggtcatccctggg

SEQ ID NO: 58239 - DNA, 110 bp, synthetic construct
  source 1..110: mol_type = other DNA
ggtgagcgcacggcccctcacagtagattccgtagatttttcagttaaaactaatgagtatagttttaagaaagcgactgaagaaacagttggaaagaattctgaaagcg

SEQ ID NO: 58240 - DNA, 110 bp, synthetic construct
  source 1..110: mol_type = other DNA
gagtatagttttaagaaagcgactgaagaaacagttggaaagaattctgaaagcggtcctgtgagtcaggtacatccgcgtgggaattcctgggccagggaccaaaccca

SEQ ID NO: 58241 - DNA, 110 bp, synthetic construct
  source 1..110: mol_type = other DNA
tgctataacatggacaggccctggcgctgcccatggctccgtgctacccagaacgcccttgaatgtccgtggctgactctttgttctcaaatactctgagtcctttgtcg

SEQ ID NO: 58242 - DNA, 110 bp, synthetic construct
  source 1..110: mol_type = other DNA
ctccttcctgctctccccagcaccccacccctgaacaaagacccccctccccaagcttctagaagctcatcccatgcccggtgagagcagactggcccaggcagtgagaa

SEQ ID NO: 58243 - DNA, 110 bp, synthetic construct
  source 1..110: mol_type = other DNA
cttctagaagctcatcccatgcccggtgagagcagactggcccaggcagtgagaactgagctgcgggctggcgggcagggaagaacagcaggagccacagcctccaggca

SEQ ID NO: 58244 - DNA, 110 bp, synthetic construct
  source 1..110: mol_type = other DNA
catcagcacaccttatgggcagggaggctgagatggcaggaagttacaactacctacttgctgcattttgaaactttctggtctctgtttcttttatgttcacaggtggc

SEQ ID NO: 58245 - DNA, 110 bp, synthetic construct
  source 1..110: mol_type = other DNA
tgttggtgccacattgctgccaggagaggtgagcttcctaggaatggaaccacacgctcaggaaagcagcagagagaaggcgacaaataaaacctgcattctggccacac

SEQ ID NO: 58246 - DNA, 110 bp, synthetic construct
  source 1..110: mol_type = other DNA
tgaataaatctgtgctgtgctgaccctggagcacatcgaagccctgacctcagacacaactgttccgctgcacgtcagcatcagaagacgcccgagagaatggctggttg

SEQ ID NO: 58247 - DNA, 110 bp, synthetic construct
  source 1..110: mol_type = other DNA
acaactgttccgctgcacgtcagcatcagaagacgcccgagagaatggctggttgtgtctttgagaggctttctagctttttgtgagcaactcactaaaagtgaatttta

SEQ ID NO: 58248 - DNA, 110 bp, synthetic construct
  source 1..110: mol_type = other DNA
tccgagcgtgtttgggggactgtgagcatcctgtgggtgagagcaaatgcatgagtaagagattagtgagaaacacactgaatgggagcaagtggtgctgtcttgtgaag

SEQ ID NO: 58249 - DNA, 110 bp, synthetic construct
  source 1..110: mol_type = other DNA
taagagattagtgagaaacacactgaatgggagcaagtggtgctgtcttgtgaagagctgtgcgtgctagggagattttgacagctagctcagtcgtgtacatggacaca

SEQ ID NO: 58250 - DNA, 110 bp, synthetic construct
  source 1..110: mol_type = other DNA
ttcaacacactgcttgttctagttagtgtttattttgtttggatatgtactaacgatagttggttgctctcaatagttttaagactactttcacccagcactgtgaatgc

SEQ ID NO: 58251 - DNA, 110 bp, synthetic construct
  source 1..110: mol_type = other DNA
gccctctgaagaaggccaggcacagattattggcttcattttttatttatttattttttttcctgctctacagcatggggatcaagttagtcttacacatatgcattttt

SEQ ID NO: 58252 - DNA, 110 bp, synthetic construct
  source 1..110: mol_type = other DNA
ttttttcctgctctacagcatggggatcaagttagtcttacacatatgcattttttcccaccctttgttctgttgcaatatgagttctcaatgctactcagcaggatctc

SEQ ID NO: 58253 - DNA, 110 bp, synthetic construct
  source 1..110: mol_type = other DNA
ctcatgtctaaaatatctgttttgtatcctgagctttgtctaatgtgttactctattaaagctaagccatcagacctataagaaaatctttttacaaaggcatttacagt

SEQ ID NO: 58254 - DNA, 110 bp, synthetic construct
  source 1..110: mol_type = other DNA
ttaaagctaagccatcagacctataagaaaatctttttacaaaggcatttacagttacttcaagtttccatgatgggtagataaacaagggctcctgtcatggacaacac

SEQ ID NO: 58255 - DNA, 110 bp, synthetic construct
  source 1..110: mol_type = other DNA
tgaagcactctggagtaccaggctaccattatatctcaaaaagcacttgaaaagttggacatcacaaagtccagggactgagaataaagcagttttattcatattttcct

SEQ ID NO: 58256 - DNA, 110 bp, synthetic construct
  source 1..110: mol_type = other DNA
cagttttaaggcaacagtctccattgttcagagaacgctcattagaacttttatgctgtgagctccgtttttaaggaatggagaagatacaacctcttatgttaatgaga

SEQ ID NO: 58257 - DNA, 110 bp, synthetic construct
  source 1..110: mol_type = other DNA
ctgtgagctccgtttttaaggaatggagaagatacaacctcttatgttaatgagactaatgttggaggggactcacttcaggtgtcccaaagaaaacaaatttttaaaat

SEQ ID NO: 58258 - DNA, 110 bp, synthetic construct
  source 1..110: mol_type = other DNA
aaagcggcatagttaaggccacattacagaggagagaagtgattaccagggaaattaaactatttgcactttgtatgaagtagaagcagaagttgcacttgatcacaggc

SEQ ID NO: 58259 - DNA, 110 bp, synthetic construct
  source 1..110: mol_type = other DNA
taaactatttgcactttgtatgaagtagaagcagaagttgcacttgatcacaggccttgtaattttgcccaaccacttatcccactaacaaatactctccaatataattc

SEQ ID NO: 58260 - DNA, 110 bp, synthetic construct
  source 1..110: mol_type = other DNA
cgaagggccatgtctgtgctggctttaaccccaggatcattgcactggtggaattataggcctgtaattgatgcaggagctacgcatggggaaacgggactggagaaatc

SEQ ID NO: 58261 - DNA, 110 bp, synthetic construct
  source 1..110: mol_type = other DNA
ataggcctgtaattgatgcaggagctacgcatggggaaacgggactggagaaatcccacagagtggcttccaggcagaaaaggaggaggttcctttgatctggtcagtga

SEQ ID NO: 58262 - DNA, 110 bp, synthetic construct
  source 1..110: mol_type = other DNA
ctgaaggtgccagacagaaatatcacaatccttacaaagtctttggggacccacttagatgccgactggtgagcagctatggggtcccctcctccatgggtgaaacaagc

SEQ ID NO: 58263 - DNA, 110 bp, synthetic construct
  source 1..110: mol_type = other DNA
tagatgccgactggtgagcagctatggggtcccctcctccatgggtgaaacaagccctcctcttttctgcagaccagtttgtggggcccatgtgtcttccagagccaggg

SEQ ID NO: 58264 - DNA, 110 bp, synthetic construct
  source 1..110: mol_type = other DNA
cttccggaaagctgacagagcctgcctgtggtttctgtttcattagcaaatcaaccacaacacccagaggttccgctttgggttgccctcgccgaccatgccttagggcc

SEQ ID NO: 58265 - DNA, 110 bp, synthetic construct
  source 1..110: mol_type = other DNA
cacaacacccagaggttccgctttgggttgccctcgccgaccatgccttagggcctcccgtgggtgagtgggtttggtgtcatccccagggctgggggccctgcaggcgc

SEQ ID NO: 58266 - DNA, 110 bp, synthetic construct
  source 1..110: mol_type = other DNA
gggacggagtgggaggctggggttatgagcaggtgtaagctactatccagggaggggatgaacgaggccctactctagagcccgagcaccacatccaatgtcccacgata

SEQ ID NO: 58267 - DNA, 110 bp, synthetic construct
  source 1..110: mol_type = other DNA
ggatgaacgaggccctactctagagcccgagcaccacatccaatgtcccacgataaaccggacggaaaagagtattttaaaaagtgtatatatatctgtgtatacctgaa

SEQ ID NO: 58268 - DNA, 110 bp, synthetic construct
  source 1..110: mol_type = other DNA
gtgtgctttgcctctgggtcgccttctttcaggttccactctcctgatggcggtgttgaccttccatgtcggtcactttccctacagtcctgcttttccggagtaaaatt

SEQ ID NO: 58269 - DNA, 110 bp, synthetic construct
  source 1..110: mol_type = other DNA
ttgaccttccatgtcggtcactttccctacagtcctgcttttccggagtaaaatttaattgggccaatcttgggtcccctgcaatgacccaggaccatggcccaaggcca

SEQ ID NO: 58270 - DNA, 110 bp, synthetic construct
  source 1..110: mol_type = other DNA
ggtcaccccagggctcttccagccagcgagggagcagagactggaacagaggctgccgatcagagatctgggggccgggctgggcctgaaggtaaatactgcgtcaatcg

SEQ ID NO: 58271 - DNA, 110 bp, synthetic construct
  source 1..110: mol_type = other DNA
ccgatcagagatctgggggccgggctgggcctgaaggtaaatactgcgtcaatcgcagttttacttttttcatttaaattagttgccaatgtttttaaaatagaaagact

SEQ ID NO: 58272 - DNA, 110 bp, synthetic construct
  source 1..110: mol_type = other DNA
gacgctccagccatcgcggggtgactcggaccagcagctgcctcccagagcccctggcctgggctcctcgaaaagacatctggccctcttcttctaacaccaaggtctag

SEQ ID NO: 58273 - DNA, 110 bp, synthetic construct
  source 1..110: mol_type = other DNA
ggcctgggctcctcgaaaagacatctggccctcttcttctaacaccaaggtctagagtcttctagtaaagggccacagtaactgcaggatggctaatgagctatggattc

SEQ ID NO: 58274 - DNA, 110 bp, synthetic construct
  source 1..110: mol_type = other DNA
gagtcaggtttgttagcactgcgccacgatgggaactccgctacgcagaacacggcagctccctcatccatctgaaaaaccaatcgcagccctgtgtcttcccgactgtt

SEQ ID NO: 58275 - DNA, 110 bp, synthetic construct
  source 1..110: mol_type = other DNA
gtccccacccttaggccggtctctggaggaagcagcttttgaaaggccggtaggaagagcttgtgcagacatgaaactagctaaaagggcgggtcatcctcatttttagg

SEQ ID NO: 58276 - DNA, 110 bp, synthetic construct
  source 1..110: mol_type = other DNA
agagcttgtgcagacatgaaactagctaaaagggcgggtcatcctcatttttaggctgaaacgctgaatgtataattattatgctataaaaggctgggcaaacagacata

SEQ ID NO: 58277 - DNA, 110 bp, synthetic construct
  source 1..110: mol_type = other DNA
ccccaaacaaatgccctcgtgcccctcatttcttgtttttaggaaacaggcctcacgcagcctccgggacctcccctgggctccgaagggcaggttccaacaggtgctgt

SEQ ID NO: 58278 - DNA, 110 bp, synthetic construct
  source 1..110: mol_type = other DNA
tgacaggcttggagcactcccccaaagtaactcttgcgtcctgcggtagcatcattagacgtgggagactgagaagctgggcggcactgtattgtcccacttgtgccatc

SEQ ID NO: 58279 - DNA, 110 bp, synthetic construct
  source 1..110: mol_type = other DNA
tagacgtgggagactgagaagctgggcggcactgtattgtcccacttgtgccatcaatacgcagtgagcgtctcccccggcaggtgccttcccacccgctgtgtcactta

SEQ ID NO: 58280 - DNA, 110 bp, synthetic construct
  source 1..110: mol_type = other DNA
ggcctgccatgctggtcagctctctctgtgctaggcttgcctgtactggtctacgggagctcagattcctgtctaaccagttcacattcgcctttctcttcttgggttct

SEQ ID NO: 58281 - DNA, 110 bp, synthetic construct
  source 1..110: mol_type = other DNA
tcgcaaacgctgcccccagacccagccagggaaagggaggggtttggcaggcacgttcttctgggacaaacccagccaaccatgtctcaccgagggcatgcttggtgctc

SEQ ID NO: 58282 - DNA, 110 bp, synthetic construct
  source 1..110: mol_type = other DNA
ttcttctgggacaaacccagccaaccatgtctcaccgagggcatgcttggtgctcagctggtctcagctccgagggcaaagggaaagcttggtgactggttgtgccccat

SEQ ID NO: 58283 - DNA, 110 bp, synthetic construct
  source 1..110: mol_type = other DNA
tggtaagatacgagcatcacatcctaaaaagcactggttttgttaccgaggcagtgctcaccactccatgagggccagcactcccaaataggataagggtcagtgatggg

SEQ ID NO: 58284 - DNA, 110 bp, synthetic construct
  source 1..110: mol_type = other DNA
aaatgtgccagaaaattggttctccatatagaaaaagaacgggagctgccttgcggactgaatgtctgtgtcccccttcagccccaggtgttggtatctggacatgggta

SEQ ID NO: 58285 - DNA, 110 bp, synthetic construct
  source 1..110: mol_type = other DNA
tgttttctttaagtcacgaagatctcaacagtggttgctatcacggcaaaacgatggccaataaacaccaccatccagggtgatttttgacgtcacctctttccctctga

SEQ ID NO: 58286 - DNA, 110 bp, synthetic construct
  source 1..110: mol_type = other DNA
gaaacagaacttcggttgtgtcagaatgacaacgcaccaagtcagaagacaacgtttcccagctctccttgcagctgggccacactgagtaaatcctcatcaatgaggtg

SEQ ID NO: 58287 - DNA, 110 bp, synthetic construct
  source 1..110: mol_type = other DNA
ggtgtcttgagtggccgccctcctactctcaccaagcaagaaggcctgaaggctgtatcactggtgtttatactgtgcctggctagctacgaacccgcttgttccagaag

SEQ ID NO: 58288 - DNA, 110 bp, synthetic construct
  source 1..110: mol_type = other DNA
cagtagaaatacagtcgtctattgatcattccctgaagactattatcttggacacctcgtgcttctacacaagtcctgctcaacgcctagactgcccttctcccaccctg

SEQ ID NO: 58289 - DNA, 110 bp, synthetic construct
  source 1..110: mol_type = other DNA
ctcgtgcttctacacaagtcctgctcaacgcctagactgcccttctcccaccctgagctgcctgttgaataataactcctatgcatccttcaagatacataatgcatcac

SEQ ID NO: 58290 - DNA, 110 bp, synthetic construct
  source 1..110: mol_type = other DNA
caccctacctggggatctaacagctcttaacttcgggccaagtgactctcttcctccgctggtttttcaacagtgtcttagccagtgtggatcttcgttatttcacattt

SEQ ID NO: 58291 - DNA, 110 bp, synthetic construct
  source 1..110: mol_type = other DNA
ccgctggtttttcaacagtgtcttagccagtgtggatcttcgttatttcacatttattttattatctcacgtatattgtataagaagacacaggagagtatcttcgtaac

SEQ ID NO: 58292 - DNA, 110 bp, synthetic construct
  source 1..110: mol_type = other DNA
atccagaggcccacctgcgtccaggcgacgcaggtcagtaggacacagagaaacgggcccagacagacgacctggatcccccaggtcgagcaggaaatttctggtcccta

SEQ ID NO: 58293 - DNA, 110 bp, synthetic construct
  source 1..110: mol_type = other DNA
ggcccagacagacgacctggatcccccaggtcgagcaggaaatttctggtccctattcctctggagggcattattttaaagagttaaatcttagactctagggggtggac

SEQ ID NO: 58294 - DNA, 110 bp, synthetic construct
  source 1..110: mol_type = other DNA
cacacactgatacagacaaaggacggaatgaataaacacatggggagaagaggcatctgccggagaattccagatgctttacgcagctattcccttctccagcagcggga

SEQ ID NO: 58295 - DNA, 110 bp, synthetic construct
  source 1..110: mol_type = other DNA
tctgccggagaattccagatgctttacgcagctattcccttctccagcagcgggagccgcccttcgtggttcaccacgtggagaaacctgaccaacactgcctgagcccg

SEQ ID NO: 58296 - DNA, 110 bp, synthetic construct
  source 1..110: mol_type = other DNA
acccattaaaaaaatgtcaggcgtccccactgtggcacagtaggttaagaatgcaactgcagcagctcaggtcactgtggagacatgggttcaatgttgggcctggcgca

SEQ ID NO: 58297 - DNA, 110 bp, synthetic construct
  source 1..110: mol_type = other DNA
actgcagcagctcaggtcactgtggagacatgggttcaatgttgggcctggcgcagtgggttaaggatccagtgtcgtggcagacgtagcgtagattgcagctgcagctc

SEQ ID NO: 58298 - DNA, 110 bp, synthetic construct
  source 1..110: mol_type = other DNA
gggcaaatagcaaaactatttttttctatcagagactttaaattatttcagacatgggctgggtataaacagttatctgcactgtcatctgaaacatatctctttaatgt

SEQ ID NO: 58299 - DNA, 110 bp, synthetic construct
  source 1..110: mol_type = other DNA
aagcgggccagctgtgaagctgaagtccctgctggcccgtgggcttacaggcgtggctgtcacccagagcagcagtggttttcgctgagctgtcagctctgcttactgcc

SEQ ID NO: 58300 - DNA, 110 bp, synthetic construct
  source 1..110: mol_type = other DNA
gctgtcacccagagcagcagtggttttcgctgagctgtcagctctgcttactgcctgttctggtgacccatttcaatggaggactccagattctgagattaagaagtaac

SEQ ID NO: 58301 - DNA, 110 bp, synthetic construct
  source 1..110: mol_type = other DNA
cctccctaacagctttcatgatccccagtcctagtctagcctttctatattacagttaccttcacctaatcttcctcttgtatctcttgtctatatatcaagtttatttt

SEQ ID NO: 58302 - DNA, 110 bp, synthetic construct
  source 1..110: mol_type = other DNA
atttttctacttttattaaggttcaatttccacacagtaaaattcaccttttaatgcacggctctgcaattttgacaaatgtgtatgtatatacacaaccaccacccata

SEQ ID NO: 58303 - DNA, 110 bp, synthetic construct
  source 1..110: mol_type = other DNA
gcacggctctgcaattttgacaaatgtgtatgtatatacacaaccaccacccataccaagatacagaagttaagtgtacccccccaattctctggggccctttggtaatc

SEQ ID NO: 58304 - DNA, 110 bp, synthetic construct
  source 1..110: mol_type = other DNA
taggcaaatatcccagagccatagtagagaaccacaacagtgagatgggagccgcaggtggagaagaccttgagcctcccctcccctgactgcatccgaaccacagtgga

SEQ ID NO: 58305 - DNA, 110 bp, synthetic construct
  source 1..110: mol_type = other DNA
aatcaggtaagcctgctgctcagtcatgccacctcttgcttcctccaatctcagtcattagctgggtgttaaccttattctcaaccaaatcttaatccgtatcagcctga

SEQ ID NO: 58306 - DNA, 110 bp, synthetic construct
  source 1..110: mol_type = other DNA
ttctaaaacataccccttgatatgacactgcccaccagaggaaaaagacccagttctacccatcaatgggcaggcaccagtccctccaccatgaagactgcacaagccct

SEQ ID NO: 58307 - DNA, 110 bp, synthetic construct
  source 1..110: mol_type = other DNA
cagaggaaaaagacccagttctacccatcaatgggcaggcaccagtccctccaccatgaagactgcacaagcccttggaccaacctcaccaaccaggagacagacaccag

SEQ ID NO: 58308 - DNA, 110 bp, synthetic construct
  source 1..110: mol_type = other DNA
ttcaattcctgagcagagaattaggttttgcttcaagccatcacccactgctgcctctctgaaatcaggtggggtggggctgcgggccttccaatttgtagccaagttgg

SEQ ID NO: 58309 - DNA, 110 bp, synthetic construct
  source 1..110: mol_type = other DNA
tctctgaaatcaggtggggtggggctgcgggccttccaatttgtagccaagttggaagttgagggtaacctggaaaactactgaggcagaatactacctcaagggggcag

SEQ ID NO: 58310 - DNA, 110 bp, synthetic construct; identical to SEQ ID NO: 58308
  source 1..110: mol_type = other DNA

SEQ ID NO: 58311 - DNA, 110 bp, synthetic construct; identical to SEQ ID NO: 58309
  source 1..110: mol_type = other DNA

SEQ ID NO: 58312 - DNA, 110 bp, synthetic construct
  source 1..110: mol_type = other DNA
catctgatgagcaccactgaataaccttggtggatacaacctacttgcagtagaggaaccactcggcccagccctgcctgacctcctgaccagcaatatcttgagatatg

SEQ ID NO: 58313 - DNA, 110 bp, synthetic construct
  source 1..110: mol_type = other DNA
gaaccactcggcccagccctgcctgacctcctgaccagcaatatcttgagatatgacataactgttgttttaagctagaaaattttggcataattttgacccaatttgtc

SEQ ID NO: 58314 - DNA, 110 bp, synthetic construct
  source 1..110: mol_type = other DNA
aaactcaaaagctgatggttccaagtcagatttgcttccactacaccacgatgggaactccacggtgtataattcttactctacagttggattcagtttgatagtacttt

SEQ ID NO: 58315 - DNA, 110 bp, synthetic construct
  source 1..110: mol_type = other DNA
aactccacggtgtataattcttactctacagttggattcagtttgatagtactttttgaggatttttaaccagtgtgttttaaagtatgcgagagtaattaattaaaagg

SEQ ID NO: 58316 - DNA, 110 bp, synthetic construct
  source 1..110: mol_type = other DNA
agcattcactgactctgcaaacggagtcaggaattttccagtggcccagtttcacccggcacatccttccgaatagcaatggcaccaccacacagttccacacctgtcac

SEQ ID NO: 58317 - DNA, 110 bp, synthetic construct
  source 1..110: mol_type = other DNA
ccggcacatccttccgaatagcaatggcaccaccacacagttccacacctgtcactagctggtgacatccttgggggaaggggacacagttaatcaactcttggcccccc

SEQ ID NO: 58318 - DNA, 110 bp, synthetic construct
  source 1..110: mol_type = other DNA
gttccgaaggggagcaactgtctcgtgctcaacggttaacttagttagatttgcttccaagatctcagccctctactactctcgcctcctccacctcccggctccccagg

SEQ ID NO: 58319 - DNA, 110 bp, synthetic construct
  source 1..110: mol_type = other DNA
gccccagaaccaatgttaagagacagaggctggaaggcggggtttaaatgcaagaacgagaatgtatcgagatctccggctccggttactcactcgtagggtccgtatac

SEQ ID NO: 58320 - DNA, 110 bp, synthetic construct
  source 1..110: mol_type = other DNA
acgagaatgtatcgagatctccggctccggttactcactcgtagggtccgtatacatgaaatctgcagggaacacgatgagagggtctaggggattcgccggaaaacccc

SEQ ID NO: 58321 - DNA, 110 bp, synthetic construct
  source 1..110: mol_type = other DNA
tgtggccctagaaaaggcaaagatccaacaaacaaaagatcaccttttgttaatattttgcccatttttctttaccatttgtgtttacatgctgtgtgtgtgtctgggca

SEQ ID NO: 58322 - DNA, 110 bp, synthetic construct
  source 1..110: mol_type = other DNA
gcagggccgagcagcccggccagctctggcacccagaactttctgaccagcgcaaggatgttcgaagctgagtctgtcctccgtgcctgtggtcattgtcatcccaaggc

SEQ ID NO: 58323 - DNA, 110 bp, synthetic construct
  source 1..110: mol_type = other DNA
ctccagactcagcctccacctggcctcctgacatccccttgaaagtccaacaggaattccagacttacagatcccaagctgtgttgtcctccccgtgttccctttctgct

SEQ ID NO: 58324 - DNA, 110 bp, synthetic construct
  source 1..110: mol_type = other DNA
attccagacttacagatcccaagctgtgttgtcctccccgtgttccctttctgctgttcttctgaatcgactcctccttcaactctcagaaatggctacttcccaatcag

SEQ ID NO: 58325 - DNA, 110 bp, synthetic construct
  source 1..110: mol_type = other DNA
tgccccacaatgggaactccaacttggggcattttgtatgtagacaaagcaggaagtttcggaggaaaagaacctgatagagcttgttgatataaaagaagccaatttcg

SEQ ID NO: 58326 - DNA, 110 bp, synthetic construct
  source 1..110: mol_type = other DNA
cgccatgatgggagcccttagccgtacatttttagaggacaggccctgagctagtgagtagtaaactgccttgtgctgttatcagcattacgaagggtgtccctcccgtt

SEQ ID NO: 58327 - DNA, 110 bp, synthetic construct
  source 1..110: mol_type = other DNA
ctgagccacaatgggaactcctagaggacatagacatttaactggatagttatataacagtatagctgatgcagtgtagacgcgcatctgtactgtgggaagacaggcaa

SEQ ID NO: 58328 - DNA, 110 bp, synthetic construct
  source 1..110: mol_type = other DNA
aacagtatagctgatgcagtgtagacgcgcatctgtactgtgggaagacaggcaaagagcccctaaaacgctggaaggcagagaatttaaggaagcctggaggaaacgct

SEQ ID NO: 58329 - DNA, 110 bp, synthetic construct
  source 1..110: mol_type = other DNA
agggcacggccactacattgggcccgaagcgctcctcggtgacctgcaggcggccaggggatagatagtcaggggctggcttcggggtgggtaggagctccctacagccg

SEQ ID NO: 58330 - DNA, 110 bp, synthetic construct
  source 1..110: mol_type = other DNA
aggggatagatagtcaggggctggcttcggggtgggtaggagctccctacagccgttgcaggtcccccccccacgccacggttggagcccgtctccgcagtgagctcaaa

SEQ ID NO: 58331 - DNA, 110 bp, synthetic construct
  source 1..110: mol_type = other DNA
aagggactcaaggaagagtcggttgctgggttgaaattcagatcttcattcctgaactaggcttctccagatcaatgaagtgtccaacacagctacgagaggcttgactc

SEQ ID NO: 58332 - DNA, 110 bp, synthetic construct
  source 1..110: mol_type = other DNA
actaggcttctccagatcaatgaagtgtccaacacagctacgagaggcttgactcaaactgggtgcacacggggttgagcctattggcacgtgggagggatctgtcagga

SEQ ID NO: 58333 - DNA, 110 bp, synthetic construct
  source 1..110: mol_type = other DNA
tttatctttgttatattagctacccctgtttatcggtgtgtagtccctgggccgtgggtatcaacatcatgtgctaatttgctataaatgcaagttatgggacactcgcc

SEQ ID NO: 58334 - DNA, 110 bp, synthetic construct
  source 1..110: mol_type = other DNA
aaaaagacaaaaacgaattatttcacaattaggggaatgttgtttcttagtcccaaacagatggtcccctattctggctggagttaggaagaaatgctgagcttccaatc

SEQ ID NO: 58335 - DNA, 110 bp, synthetic construct
  source 1..110: mol_type = other DNA
aacagatggtcccctattctggctggagttaggaagaaatgctgagcttccaatcaactatgtctcaaacacttgcctttcttgtactaaaacctttacattttttggaa

SEQ ID NO: 58336 - DNA, 110 bp, synthetic construct; identical to SEQ ID NO: 58334
  source 1..110: mol_type = other DNA

SEQ ID NO: 58337 - DNA, 110 bp, synthetic construct; identical to SEQ ID NO: 58335
  source 1..110: mol_type = other DNA

SEQ ID NO: 58338 - DNA, 110 bp, synthetic construct
  source 1..110: mol_type = other DNA
ttctcccaaacctctccagaaacgccaccacgtgggaaactggcatcactcggtcctcgatcagagacgtttaaagacaaaatctccggcgtccgtcatcttttccgtgt

SEQ ID NO: 58339 - DNA, 110 bp, synthetic construct
  source 1..110: mol_type = other DNA
ctcgatcagagacgtttaaagacaaaatctccggcgtccgtcatcttttccgtgtccccacgaggacagcaatgaggtaagaaaggagatgagatctggcagaagccact

SEQ ID NO: 58340 - DNA, 110 bp, synthetic construct
  source 1..110: mol_type = other DNA
ctctgtgtgtgttttttatacctcaaagttgcaatgtttgagtttaatattagtgtctcaaaaattttagtcgattgccacaatagtgtaggtaatgaactcattgtggc

SEQ ID NO: 58341 - DNA, 110 bp, synthetic construct
  source 1..110: mol_type = other DNA
atcaaaacaaaacaaaacaaaacagacaaaaaacgctcatagaatgtgcagcaccagattccccatcatggtgtagaatatggatactggggtagttcattacgtgtatg

SEQ ID NO: 58342 - DNA, 110 bp, synthetic construct
  source 1..110: mol_type = other DNA
tttatttctcattgtcaatatgcatatctctcaaagaaccaaggcatgatatattttccatttatgtcactggtttaacctgagagcttggcatgtaataggcactcagt

SEQ ID NO: 58343 - DNA, 110 bp, synthetic construct
  source 1..110: mol_type = other DNA
ttccatttatgtcactggtttaacctgagagcttggcatgtaataggcactcagtatatatttttatgttaagtattggaggaggatcccacagtttatgtgtctatgat

SEQ ID NO: 58344 - DNA, 110 bp, synthetic construct
  source 1..110: mol_type = other DNA
cagagtcttcaccggaaacttaaaattgtggtggaagccaggttacaatagacatcaaggaagcggaaataatttgctccaaaaatattttccagaaacttgcataaaaa

SEQ ID NO: 58345 - DNA, 110 bp, synthetic construct
  source 1..110: mol_type = other DNA
taaacaagcaatagattatggtaagtactgcagtgaagtagataatagcagccggaatgggtgtcacagagcagattaataaattgacaaattaacttcagaggcataag

SEQ ID NO: 58346 - DNA, 110 bp, synthetic construct
  source 1..110: mol_type = other DNA
cgtcttagccacgccgccgagtcttcgggctcccgcttagcgctcagccactctcctgaattagctctgaaccacatcaaccccacaaggggaggagccgaggtggcagt

SEQ ID NO: 58347 - DNA, 110 bp, synthetic construct
  source 1..110: mol_type = other DNA
ctgaattagctctgaaccacatcaaccccacaaggggaggagccgaggtggcagtcaaggccacggggtgccaagggggaagaatgacgaccaaaagctccaaggcagct

SEQ ID NO: 58348 - DNA, 110 bp, synthetic construct
  source 1..110: mol_type = other DNA
ggaatccataagctctctttgcccagctgaggtccaccaaagaaatgccagctgataaacacactgcccagttgaaggcaccttaccacccctggtcccagctgtgacgc

SEQ ID NO: 58349 - DNA, 110 bp, synthetic construct
  source 1..110: mol_type = other DNA
taaacacactgcccagttgaaggcaccttaccacccctggtcccagctgtgacgctagggtacaggataagccacagaatggctgagagcacgtataatgccttaatttt

SEQ ID NO: 58350 - DNA, 110 bp, synthetic construct
  source 1..110: mol_type = other DNA
ctacccctcctccacataataagtactaactaacatgtctctctttaacttttattatgctgtctccaggatgcagaaatctatgtggaaaggaaagagagaaaaatgaa

SEQ ID NO: 58351 - DNA, 110 bp, synthetic construct
  source 1..110: mol_type = other DNA
tatgctgtctccaggatgcagaaatctatgtggaaaggaaagagagaaaaatgaactgaacagttactgaatgcttactatgtaatagacaaataccattatatcatcct

SEQ ID NO: 58352 - DNA, 110 bp, synthetic construct
  source 1..110: mol_type = other DNA
ccttgtgaagcatcacatctacaaccccaaaccccaaaaggcagttgtatgtccacctgcacaccgctggctacacgcctcctgaagcccaaattactggcctgagtgtg

SEQ ID NO: 58353 - DNA, 110 bp, synthetic construct
  source 1..110: mol_type = other DNA
cctgcacaccgctggctacacgcctcctgaagcccaaattactggcctgagtgtggctccggccgtgacttgagagtttatgcggtgccctggaaccttagccacactgc

SEQ ID NO: 58354 - DNA, 110 bp, synthetic construct
  source 1..110: mol_type = other DNA
ttagcggaggtcaaggtgacctgtactgggacacgggctccatgaactcagtgccaaatgatcagataagcaattgcacagctggcttaagaaaggccatggctgggagt

SEQ ID NO: 58355 - DNA, 110 bp, synthetic construct
  source 1..110: mol_type = other DNA
gagccacaatggaaactcctaaaggtgctcttctaaagacagcccttgctacgcccttcaggggagcttctcaggcttaattaaacatactattctaagccacacttgac

SEQ ID NO: 58356 - DNA, 110 bp, synthetic construct
  source 1..110: mol_type = other DNA
ctcttcattgtcatcaccacctttggcctggaccctgcactcattctcctctcctacgcactcatagtgcgctccgtactcgccatcgcatcccgggagggacggctaaa

SEQ ID NO: 58357 - DNA, 110 bp, synthetic construct
  source 1..110: mol_type = other DNA
catttctccatcgctgagttgaacaccgatgctagtgaaaccttaagtaaattatgcctttgtgtctaactcattacattaccctcaagacccagttcagtgtcgggagc

SEQ ID NO: 58358 - DNA, 110 bp, synthetic construct
  source 1..110: mol_type = other DNA
gcctttgtgtctaactcattacattaccctcaagacccagttcagtgtcgggagctttttggatccttagaaaaaaattaatgaataaaattatgtccataatcaccgaa

SEQ ID NO: 58359 - DNA, 110 bp, synthetic construct
  source 1..110: mol_type = other DNA
accatctctaccaagatccagtcccagacttttccctcaaacacataaccttcagttcagatggaacacatctagatctcagggctaagcttcttcccccgcatctttca

SEQ ID NO: 58360 - DNA, 110 bp, synthetic construct
  source 1..110: mol_type = other DNA
ttcagatggaacacatctagatctcagggctaagcttcttcccccgcatctttcacccgcaggagcctggtcatccctagagccctctgcctgagccgggtcccagcagg

SEQ ID NO: 58361 - DNA, 110 bp, synthetic construct
  source 1..110: mol_type = other DNA
gcatcctctgcctgcctcttctctctctgccgaagacctcatgatcctgggacgctgacggcccccccgccagagcagaagaggcgcagcatcctcagtcggatctgctt

SEQ ID NO: 58362 - DNA, 110 bp, synthetic construct
  source 1..110: mol_type = other DNA
tagttctagtgttaatttttgaggactctccatgtggttttcccaagtggctgcaccagtttacattttcaccagcagtgtgcgagctttgtccataactctggccaaag

SEQ ID NO: 58363 - DNA, 110 bp, synthetic construct
  source 1..110: mol_type = other DNA
ccagtttacattttcaccagcagtgtgcgagctttgtccataactctggccaaagacttctgccgtttaagagctaaatggtcaaaccatttttgaaattaatattgaga

SEQ ID NO: 58364 - DNA, 110 bp, synthetic construct
  source 1..110: mol_type = other DNA
acggtcacatgaacctctccgggctcgcgtctgagaagatgggacttcagcttgcgagtgcgtgttcttccgggggcttctgaggtcgtcacagagaaacgatagaaagg

SEQ ID NO: 58365 - DNA, 110 bp, synthetic construct
  source 1..110: mol_type = other DNA
gagtctctgtggtgataccatgacagaaaagtctcatctcaattttccaagctattcctctgacccgtgtccatcgcaaagaacatgtggctgtctgagaactcagagac

SEQ ID NO: 58366 - DNA, 110 bp, synthetic construct
  source 1..110: mol_type = other DNA
tcctctgacccgtgtccatcgcaaagaacatgtggctgtctgagaactcagagaccaaatcacggccatgtcaccacaaattatctcctgcacctcaagttaagtttgct

SEQ ID NO: 58367 - DNA, 110 bp, synthetic construct
  source 1..110: mol_type = other DNA
ggcggttgtaaaccacaggtatggaagagaaaactgattatatgtgtgaatacgtgtacctgaacctcatgccaacactactgggttttgctttgttttgttttgagggt

SEQ ID NO: 58368 - DNA, 110 bp, synthetic construct
  source 1..110: mol_type = other DNA
acccctgcccaccctcggggtgacagaggacttggggagtttgacaccgtgactttgggggttgacaagctcttctttgtccaccaagttcaactctcctgttttcttcc

SEQ ID NO: 58369 - DNA, 110 bp, synthetic construct
  source 1..110: mol_type = other DNA
agatcagacgttagccgcttccgcccaaagcatttctgctgagctcacaggacgcaggactatctctgaccgataaggtttaggacacgagaccattatcagagtatttt

SEQ ID NO: 58370 - DNA, 110 bp, synthetic construct
  source 1..110: mol_type = other DNA
ccttgataggacattcttatgtcctacttatctgtttatagattgaggccatcgtaaggcaagctttcatcttctctccctactctaaaaaatagtctaggtcattagct

SEQ ID NO: 58371 - DNA, 110 bp, synthetic construct
  source 1..110: mol_type = other DNA
taaatcaaacttttatcaaggatctaatggttgcctgattatcaggcaaatagtcagataatgggtttgtagagataaaatgctttactgctcttaaggaaattccatta

SEQ ID NO: 58372 - DNA, 110 bp, synthetic construct
  source 1..110: mol_type = other DNA
tcaaggatctaatggttgcctgattatcaggcaaatagtcagataatgggtttgtagagataaaatgctttactgctcttaaggaaattccattatagcttaagatttaa

SEQ ID NO: 58373 - DNA, 110 bp, synthetic construct
  source 1..110: mol_type = other DNA
ttaattttaagggtttatttacacttctttttctattttctacatgaagaaactaaagttttaacagagatgtggaagttctcgtgccagctcacacggtccatgagtaa

SEQ ID NO: 58374 - DNA, 110 bp, synthetic construct
  source 1..110: mol_type = other DNA
aagttttaacagagatgtggaagttctcgtgccagctcacacggtccatgagtaatactttttatttactttccgcaaactgtagagtatgttgtgaaactaggtttcat

SEQ ID NO: 58375 - DNA, 110 bp, synthetic construct
  source 1..110: mol_type = other DNA
tgaacaatgcattggttggggcaccaacctgcatacactcaaaaatccacatgtgactttacagatatcccttcatctcttcagttctgcagctgtgaattcaaccagcc

SEQ ID NO: 58376 - DNA, 110 bp, synthetic construct
  source 1..110: mol_type = other DNA
actttacagatatcccttcatctcttcagttctgcagctgtgaattcaaccagccatggatgaggtagtgctatatttagcacataattcttgaaaataatccatatatt

SEQ ID NO: 58377 - DNA, 110 bp, synthetic construct
  source 1..110: mol_type = other DNA
ttctccagcccaagcagtctggactgaggtttcactgggaaccgtgtcttagacgaagcagtcagctactcaccatgttttgcatccaccaggcagaatacttactcaac

SEQ ID NO: 58378 - DNA, 110 bp, synthetic construct
  source 1..110: mol_type = other DNA
tggcatatggcttctgcccagtaactggcctcttctgattcttcgtctcttcattgacagaagaatgagccctgccagtatcgttggcttctgttctgtagacacacgtg

SEQ ID NO: 58379 - DNA, 110 bp, synthetic construct
  source 1..110: mol_type = other DNA
tatgcaagagctattttctaaagtaaggcctctctgtagcaggacagtggactactgtttgaaagtgtggagttgttgccaccaggggcgactgtatggatttcaagcat

SEQ ID NO: 58380 - DNA, 110 bp, synthetic construct
  source 1..110: mol_type = other DNA
ccaagtcttcaaggagccgggaggccaagtgtgcactgagcaaagcatcgtgactcactggaggctccaggtccagagacctgcgattgctgagcttcctcctgagacag

SEQ ID NO: 58381 - DNA, 110 bp, synthetic construct
  source 1..110: mol_type = other DNA
cactggaggctccaggtccagagacctgcgattgctgagcttcctcctgagacaggaagaaggtttgctgcttgaactgtgctctccagggaaactctaggaaaagtagt

SEQ ID NO: 58382 - DNA, 110 bp, synthetic construct
  source 1..110: mol_type = other DNA
ccatgcctgtgttgcccagacattcttcattcaactcttcatggtcatggagtcttcagtgctcctggcaatggccttcgactacttcgttgctatttgtaacccactga

SEQ ID NO: 58383 - DNA, 110 bp, synthetic construct
  source 1..110: mol_type = other DNA
tcagtgctcctggcaatggccttcgactacttcgttgctatttgtaacccactgagatatgctaccattttgactgagtccagaatcgtcaacgtgtggtttgccatcct

SEQ ID NO: 58384 - DNA, 110 bp, synthetic construct
  source 1..110: mol_type = other DNA
tggaactcacactggagacatagaccctggcagcagccatttaggggagctcaccccaccatgaggacactgtctctggcaagcactatttggggatcctccctctagct

SEQ ID NO: 58385 - DNA, 110 bp, synthetic construct
  source 1..110: mol_type = other DNA
cttgttatctcatctttctgatttaatagccatgcctacaggtatgaggtgatatctcattgaatttctttatgattactaatgctgagcatcttttcattacccgttgg

SEQ ID NO: 58386 - DNA, 110 bp, synthetic construct
  source 1..110: mol_type = other DNA
ccactaaggagaagcaggttgtgggtagaaatgtccctgggtaacatgtcagtcctgacagtataagagatgtggggatggacacaaattacctgaggtgagtttgactc

SEQ ID NO: 58387 - DNA, 110 bp, synthetic construct
  source 1..110: mol_type = other DNA
tgacagtataagagatgtggggatggacacaaattacctgaggtgagtttgactctacctgtttttcaaggctcctcatgagcccaggacttctctgctaacatcacttg

SEQ ID NO: 58388 - DNA, 110 bp, synthetic construct
  source 1..110: mol_type = other DNA
gtaggtcagataaaacccagttatggaaagaagctccagtcatgtggtaatttaatggcccatgctcaagcattcagccttggccaagtagcaggccaagggctattttg

SEQ ID NO: 58389 - DNA, 110 bp, synthetic construct
  source 1..110: mol_type = other DNA
cacctcccccttcacttctatctcatatatcctgacccttcccccctctttggggtggtatttcagagctgtctgtaatgctacttttctggctgcaattaattcaacaa

SEQ ID NO: 58390 - DNA, 110 bp, synthetic construct
  source 1..110: mol_type = other DNA
tatatcctgacccttcccccctctttggggtggtatttcagagctgtctgtaatgctacttttctggctgcaattaattcaacaaaacaaaaagatgtcagagtcatctg

SEQ ID NO: 58391 - DNA, 110 bp, synthetic construct
  source 1..110: mol_type = other DNA
aatgttctatctactaaatgagattcaaagttcctcgagggtagaaaaatatgggttatgcttttccatgtctatgactaaccgattttgtttaaggtccagcaatggga

SEQ ID NO: 58392 - DNA, 110 bp, synthetic construct
  source 1..110: mol_type = other DNA
ttatgcttttccatgtctatgactaaccgattttgtttaaggtccagcaatgggaacaaaagctaatcctcccaagaagttatacgtgggagaagggaccctgtaaaatg

SEQ ID NO: 58393 - DNA, 110 bp, synthetic construct
  source 1..110: mol_type = other DNA
tcctgtcggacttcactttcttacaccctctggaaagtctctcttctccaccagcccacatctgctttgcgattttggcctgtagattaaacacttcagtttatccagtg

SEQ ID NO: 58394 - DNA, 110 bp, synthetic construct
  source 1..110: mol_type = other DNA
ccacatctgctttgcgattttggcctgtagattaaacacttcagtttatccagtgcctggatgctggccccagactaagcttcgacttaccttagcatctaggtgggccc

SEQ ID NO: 58395 - DNA, 110 bp, synthetic construct
  source 1..110: mol_type = other DNA
ggccataagaaatacgcttctcagatttgaccacagggagcatctatgatcaagagcttcagtccttgtgctttgttgtttacagcattgcctaggctctactgatgggg

SEQ ID NO: 58396 - DNA, 110 bp, synthetic construct
  source 1..110: mol_type = other DNA
gcttcagtccttgtgctttgttgtttacagcattgcctaggctctactgatggggtagagcacagcactaataaggcaggtctattcttgtggagagactggattcctca

SEQ ID NO: 58397 - DNA, 110 bp, synthetic construct
  source 1..110: mol_type = other DNA
ataactgtacgtcccactaccatcttactgagttttactgcgaggaaagatgaaatgacacaggagaatagaccttgaaaactgcaaagctatctgtcattattattgcc

SEQ ID NO: 58398 - DNA, 110 bp, synthetic construct
  source 1..110: mol_type = other DNA
tgacacaggagaatagaccttgaaaactgcaaagctatctgtcattattattgccatgcacgagtgcttttggtaccaggactgtgacgtcttcgtttctttgttcacac

SEQ ID NO: 58399 - DNA, 110 bp, synthetic construct; identical to SEQ ID NO: 58397
  source 1..110: mol_type = other DNA

SEQ ID NO: 58400 - DNA, 110 bp, synthetic construct; identical to SEQ ID NO: 58398
  source 1..110: mol_type = other DNA

SEQ ID NO: 58401 - DNA, 110 bp, synthetic construct
  source 1..110: mol_type = other DNA
tgagtctgaaatagctcagctctgatcggagcaatgagaggatcatcaagatgactcctctacatgcttttcaaaggtctcagtcccccaaaactacaactgcagaagct

SEQ ID NO: 58402 - DNA, 110 bp, synthetic construct
  source 1..110: mol_type = other DNA
tcctctacatgcttttcaaaggtctcagtcccccaaaactacaactgcagaagctgatggcgcccccacaaaaggctcaagagtaagaatgaaccattcagacaccccaa

SEQ ID NO: 58403 - DNA, 110 bp, synthetic construct
  source 1..110: mol_type = other DNA
cactcgagaaactcagaaataaacaggagcaggctgagaagctggaagcggatattgcaacgaagagagcagcctggaaggcaaggggcacgtcctgaagggcactttag

SEQ ID NO: 58404 - DNA, 110 bp, synthetic construct
  source 1..110: mol_type = other DNA
ggtcttctcggcctggaatgcccagcaggtagaaggccacgtggctagcaccagtgtggttgaagctagacatccctgaggcaggctagcgtgggcttacctttaacttc

SEQ ID NO: 58405 - DNA, 110 bp, synthetic construct
  source 1..110: mol_type = other DNA
gtggttgaagctagacatccctgaggcaggctagcgtgggcttacctttaacttcccctaatagacacagagaaatacgggttatgtaaatgtttgccttgggctgtctg

SEQ ID NO: 58406 - DNA, 110 bp, synthetic construct
  source 1..110: mol_type = other DNA
gatggaggataatgtgagaaaaagaacatatatatatgacccagtcattcatatatatgtgtttcttcatctgtaaaatgggtttaatgcatatatatgaatgaccgggt

SEQ ID NO: 58407 - DNA, 110 bp, synthetic construct; identical to SEQ ID NO: 58406
  source 1..110: mol_type = other DNA

SEQ ID NO: 58408 - DNA, 110 bp, synthetic construct
  source 1..110: mol_type = other DNA
ctgcgccacgacaggaactccagaaattctaatttgtaaccaaagttgagaaccactatcttaataatactctttgttttttgcctttttctagggcagcacccaaggca

SEQ ID NO: 58409 - DNA, 110 bp, synthetic construct
  source 1..110: mol_type = other DNA
ctaccaccaagaccccctccaaagcctctgtctgcggcttcagggttctcttatctcctgtgagctctacaactcccccaagcgggagaaacggcaaagactaccctcta

SEQ ID NO: 58410 - DNA, 110 bp, synthetic construct
  source 1..110: mol_type = other DNA
tcctgtgagctctacaactcccccaagcgggagaaacggcaaagactaccctctatgctttatatatgaaaaagcaggagttcctgtcgtggtgcaggggaaacgaatct

SEQ ID NO: 58411 - DNA, 110 bp, synthetic construct
  source 1..110: mol_type = other DNA
ggatactggggccctgactgccatttccctagcttgtaagagagcaattacactcgggcagagacaagctaagacagcatgactgtggccaccacaccaccaagggctta

SEQ ID NO: 58412 - DNA, 110 bp, synthetic construct
  source 1..110: mol_type = other DNA
accagggacctctgcctccagaaaccacggtaattcggacgtggaagcgcctctgcatacccgtcaaagcagagcggtggggaaatggagacagaaactaatacggtttt

SEQ ID NO: 58413 - DNA, 110 bp, synthetic construct
  source 1..110: mol_type = other DNA
catacccgtcaaagcagagcggtggggaaatggagacagaaactaatacggttttcaacaaatcctccgcacagccctgggattcctccggacagggccacagaacggca

SEQ ID NO: 58414 - DNA, 110 bp, synthetic construct
  source 1..110: mol_type = other DNA
tccagaaagcaacacgaggcccacaggaaagagaaacactcaggccgagaactgactctgagttattcagggcaacctgcttaggtttacagatgaggaagcagcgcctc

SEQ ID NO: 58415 - DNA, 110 bp, synthetic construct
  source 1..110: mol_type = other DNA
tctaattagctatcgtcttagttacttctttctgagcttcactttcctcatccgcagtgcacagaactgctggttcggaacagatgaaataaaatgtgcctcagggttaa

SEQ ID NO: 58416 - DNA, 110 bp, synthetic construct
  source 1..110: mol_type = other DNA
gttggaaaccatttatttccatgtctctgcttctactcttcagttatctctcatctccttttagtagaacctaattttgtactttgtgagctatttcttttgtttaatgt

SEQ ID NO: 58417 - DNA, 110 bp, synthetic construct
  source 1..110: mol_type = other DNA
aggtgctaacggcccttttggaggtggtttcctatatttgatatattaagttagtaagtatttgagcagctagtacatacactaaaaaccatctaaatcttagaaaaaca

SEQ ID NO: 58418 - DNA, 110 bp, synthetic construct
  source 1..110: mol_type = other DNA
cggtgtctgctcggacccatacagatttttggtgccatgttaaagctcgctagataaatggcttatgaatggtgatctcaagacttgcccaacccagcccctgtgcacca

SEQ ID NO: 58419 - DNA, 110 bp, synthetic construct
  source 1..110: mol_type = other DNA
gagggttcctttcggggttggggatctcaaaacatcaagagatagagattctcgcacactctggcagcatctggcctccagaacagactttattgaggcaaggaaatatg

SEQ ID NO: 58420 - DNA, 110 bp, synthetic construct
  source 1..110: mol_type = other DNA
agtaagggagtaagacatacttcatgctctagttgaggagaacagcctgcccagcgtgttctcctgttgttggaaacttttttggggaaaccagagggtctacatgtagc

SEQ ID NO: 58421 - DNA, 110 bp, synthetic construct
  source 1..110: mol_type = other DNA
gtgttctcctgttgttggaaacttttttggggaaaccagagggtctacatgtagctacataacagtctcccttttcatttttctcttacctgctttatttttcttcacca

SEQ ID NO: 58422 - DNA, 110 bp, synthetic construct
  source 1..110: mol_type = other DNA
acactttccactgctgtggaaggtactctactgctgagctccagcagggtctgccagcacaaaaagtctaaacagatcagaccagaactttgccccggctgaagataaca

SEQ ID NO: 58423 - DNA, 110 bp, synthetic construct
  source 1..110: mol_type = other DNA
ggtctgttcacgcagaggagccaaggcggacgccagggtcctgaccgctggctgggacagaattcttgtgtgagaggctgccatgaggtcacgccctgtggcccggggac

SEQ ID NO: 58424 - DNA, 110 bp, synthetic construct
  source 1..110: mol_type = other DNA
gacagaattcttgtgtgagaggctgccatgaggtcacgccctgtggcccggggacagtgggctggagagcggggcgcccgggaggtagtgtcaagggccccggccaccgc

SEQ ID NO: 58425 - DNA, 110 bp, synthetic construct
  source 1..110: mol_type = other DNA
agtacctagcacaccggggctccttcagtctgtaccactgaactacatccggatggaaggcttctaaattcaactttctggccaccagagaataactgtggtgaatggtg

SEQ ID NO: 58426 - DNA, 110 bp, synthetic construct
  source 1..110: mol_type = other DNA
ccacactcactgaaggttccagtgccacccacccacatccccgtttcaatcctcgtgcttgtgaatgggcagctcgtacctctcaggaggggacacagggaggctctcag

SEQ ID NO: 58427 - DNA, 110 bp, synthetic construct
  source 1..110: mol_type = other DNA
ccatccagtgtcagaaatgtaggacactaaccacctcctaaaccacagccgaatggtggtatagctcagcaagacattctaaatgcctgagtaatggataaataagtagg

SEQ ID NO: 58428 - DNA, 110 bp, synthetic construct
  source 1..110: mol_type = other DNA
gtggtatagctcagcaagacattctaaatgcctgagtaatggataaataagtaggtggaagatcaaacggataaactagcatctgagcgagagaacaagtaaattcagct

SEQ ID NO: 58429 - DNA, 110 bp, synthetic construct
  source 1..110: mol_type = other DNA
aacagagagatggggcagaaataattcctgtcctagagacaaatacagtctagtgagggctaagacacttatggaagaaggaagtatgtgttaaaatcagtatatatata

SEQ ID NO: 58430 - DNA, 110 bp, synthetic construct
  source 1..110: mol_type = other DNA
ttgttttgtttttccattggttgtcaaataatctttaatttttccttgcagttcttagctagctgggcattccactgcacccctgtggatgtcatctatgatggcatgag

SEQ ID NO: 58431 - DNA, 110 bp, synthetic construct
  source 1..110: mol_type = other DNA
gccaccgagagagagttctggccaagataatctgtaaatgcctaacacctttataggtaatcaaatcattgtaggcactggcggtttcatggaaacatgcatgtcagctg

SEQ ID NO: 58432 - DNA, 110 bp, synthetic construct
  source 1..110: mol_type = other DNA
ggtaatcaaatcattgtaggcactggcggtttcatggaaacatgcatgtcagctgggcggagctggccttctcctgactgtggagtcggaggctcccccccccccttttt

SEQ ID NO: 58433 - DNA, 110 bp, synthetic construct
  source 1..110: mol_type = other DNA
ttagttttcacaccgtcatctcacctaacgtcacgacctgaacccgctttacggatgagaaaacgcaggtaaacggagaccttggtcaagtccacggagcagtttggagc

SEQ ID NO: 58434 - DNA, 110 bp, synthetic construct
  source 1..110: mol_type = other DNA
tgagaaaacgcaggtaaacggagaccttggtcaagtccacggagcagtttggagctgggacctgaccccaggcaggtgggctccaatccgcgctcctgaccccttcactg

SEQ ID NO: 58435 - DNA, 110 bp, synthetic construct
  source 1..110: mol_type = other DNA
tgcaggtttgggtgcggccaccagggcctcctggtcttcttcaggcagcatttctacttcctgtaactcctcctcagtctcacgagtgtaggttagctacattcctgtta

SEQ ID NO: 58436 - DNA, 110 bp, synthetic construct
  source 1..110: mol_type = other DNA
acttcctgtaactcctcctcagtctcacgagtgtaggttagctacattcctgttactttcttgggcaaggggaaggggttcttgacgtccatggggagaggggacactgt

SEQ ID NO: 58437 - DNA, 110 bp, synthetic construct
  source 1..110: mol_type = other DNA
tggctttgaggacacctgcagaaacagaaacggatgaggagtcttgctaactgcacttccaggatggacagaatcaggagtacgggggcaggtatttttagctctgatgt

SEQ ID NO: 58438 - DNA, 110 bp, synthetic construct
  source 1..110: mol_type = other DNA
cttccaggatggacagaatcaggagtacgggggcaggtatttttagctctgatgttaaatgccacaggctgcagctgcgggcacaggggcagtgcagcactcatgtctgc

SEQ ID NO: 58439 - DNA, 110 bp, synthetic construct
  source 1..110: mol_type = other DNA
aaaccacaggagccagtgtacctacttttctggaggggtcaggggtggaaaacaggcactagggagctcagaacctggagaaatctgtctgacaaacacccagcagcccg

SEQ ID NO: 58440 - DNA, 110 bp, synthetic construct
  source 1..110: mol_type = other DNA
gggagcacagccagcctcctccccctcgtgtcactgcactgcagcagaaggaaacgaggcccatgcgtttctggggaatgaagatgccacccgctgcctgcagttatgaa

SEQ ID NO: 58441 - DNA, 110 bp, synthetic construct
  source 1..110: mol_type = other DNA
gaggcccatgcgtttctggggaatgaagatgccacccgctgcctgcagttatgaatggctcttataacaacgagctgacatctgtgcttggtttttaagatgcatcattg

SEQ ID NO: 58442 - DNA, 110 bp, synthetic construct
  source 1..110: mol_type = other DNA
atgggaactcccttccttttggattttaacccccttttcttgtaaggagttatgagcatatcatattgttttcaagttgcctttagctttactaaggttttagttacttt

SEQ ID NO: 58443 - DNA, 110 bp, synthetic construct
  source 1..110: mol_type = other DNA
gcatatcatattgttttcaagttgcctttagctttactaaggttttagttactttcctctaatgtaggcgagacgttattagtcaactcgccccttttctattccaacac

SEQ ID NO: 58444 - DNA, 110 bp, synthetic construct
  source 1..110: mol_type = other DNA
actcccaggaacagacacgagggggcgccatctttgcactgcccctttgctgcgccctagagcacctgtattttctggaaaagagttttatgtgcatcttgtgcccttat

SEQ ID NO: 58445 - DNA, 110 bp, synthetic construct
  source 1..110: mol_type = other DNA
gggtcccaggaccttaggacctcggcagccaccagtcttaaagccccagaatgtccacgtccctcatggtatagatggggagcctgggactccgaggagcgccaggcacg

SEQ ID NO: 58446 - DNA, 110 bp, synthetic construct
  source 1..110: mol_type = other DNA
aggacctcggcagccaccagtcttaaagccccagaatgtccacgtccctcatggtatagatggggagcctgggactccgaggagcgccaggcacggagcaaaaactcaca

SEQ ID NO: 58447 - DNA, 110 bp, synthetic construct
  source 1..110: mol_type = other DNA
caagggaaacctgcggtccttctccccagttcagcaaagctccctggactctgcgacctcgtgtctcgagaggggctgatgacggctacccggggtcactcgcaggccac

SEQ ID NO: 58448 - DNA, 110 bp, synthetic construct
  source 1..110: mol_type = other DNA
aactccagtcctggactgggccgggtttagtcattaaccaagccagatggaggcggcagctctgccctgttgacacagagggcgggagtacggggccagttcaggccttc

SEQ ID NO: 58449 - DNA, 110 bp, synthetic construct
  source 1..110: mol_type = other DNA
tattgatgggtaataatgctaaggcctcatccaaggattcatcttatatgaaagacatcatttttatcacatacacaggtatgcatcgatacagatagagatatacacac

SEQ ID NO: 58450 - DNA, 110 bp, synthetic construct
  source 1..110: mol_type = other DNA
cacacacacacacacacacacactatattttcttccaacttgaaggtaatgtccggtcagtggtcactagtgtattcaccatgtttcttttgaaagaggtaattttgagc

SEQ ID NO: 58451 - DNA, 110 bp, synthetic construct
  source 1..110: mol_type = other DNA
tacagtggtattctgacagagacaggtgatgagagtttgaagtgtggcgggaacatcgcgatacagagaaccagattaattataaagatccttagcagggaaaactgaca

SEQ ID NO: 58452 - DNA, 110 bp, synthetic construct
  source 1..110: mol_type = other DNA
tcgcgatacagagaaccagattaattataaagatccttagcagggaaaactgacatgattggtaatgatctagatatggaaaagctaacaagcaaggagacagcaaagac

SEQ ID NO: 58453 - DNA, 110 bp, synthetic construct
  source 1..110: mol_type = other DNA
aactgagccaacaaggacaaaggagaccttagtttaataactggcgtacctattgcaacagtagctgatagtgaacgcctcatccacagtctttgctcaccattcactac

SEQ ID NO: 58454 - DNA, 110 bp, synthetic construct
  source 1..110: mol_type = other DNA
gaaattctgacctatgctacagctacaacgtgaatgaactctgaggacatcattctgagtgaaacgacagtcgtcacaagtagacaaatactctacgattccatttttat

SEQ ID NO: 58455 - DNA, 110 bp, synthetic construct
  source 1..110: mol_type = other DNA
atttctcagcccccttgtaatgttcatatttgcttctgacaatgccttccaggccacctggagcaacccagctcccgtgcaggaccccagcccctcggtagcaacagctg

SEQ ID NO: 58456 - DNA, 110 bp, synthetic construct
  source 1..110: mol_type = other DNA
gaaagaaggtttttacccaccagggagcttccttttagggtggagtgtatggaacaagctggcagaagactcaggaggaccttaggtaggcctggctgatgctgggggtc

SEQ ID NO: 58457 - DNA, 110 bp, synthetic construct
  source 1..110: mol_type = other DNA
aagctggcagaagactcaggaggaccttaggtaggcctggctgatgctgggggtcggatgacttctgggatttttcagtgctgagcagcagactagcctgagggcgagag

SEQ ID NO: 58458 - DNA, 110 bp, synthetic construct
  source 1..110: mol_type = other DNA
ggaggctgggaggggaaggcgttgggtgcgtgcaggaaactgcaggtcacaggggatggggctggtgacagagcctcgattattcaaagctctggtaccacactgaggag

SEQ ID NO: 58459 - DNA, 110 bp, synthetic construct
  source 1..110: mol_type = other DNA
atggggctggtgacagagcctcgattattcaaagctctggtaccacactgaggagctgagttttctcctgagagcaggcaggagccacagagggttgcaaggggggaatg

SEQ ID NO: 58460 - DNA, 110 bp, synthetic construct
  source 1..110: mol_type = other DNA
cactcaggcactctgctggcccctggaatacagcagccagcagaacacaggctcggcctcctggagcttccagactggtggagacctgtctacaaacaacacatggtcgg

SEQ ID NO: 58461 - DNA, 110 bp, synthetic construct
  source 1..110: mol_type = other DNA
tcaggtcactcctgtgccgtgggttccctccctggcccaggaatttccacatgctgcaggtgcaatcaaaaagaaaaaataaggagttccccttgtggctgagcagaaac

SEQ ID NO: 58462 - DNA, 110 bp, synthetic construct; identical to SEQ ID NO: 58461
  source 1..110: mol_type = other DNA

SEQ ID NO: 58463 - DNA, 110 bp, synthetic construct
  source 1..110: mol_type = other DNA
cttaggaggcataggctgtccagtgggacactccctgcaaatcccttctcctgcacacccagccggggccggccagccagacctcttgtgcagctttatacttcctgctg

SEQ ID NO: 58464 - DNA, 110 bp, synthetic construct
  source 1..110: mol_type = other DNA
atcaaatccacatcttcacagacacaatgtcaggttcttaatccactgagccataacgggactccagaagcccactttttatagtagctgtctgcttcgttattctatct

SEQ ID NO: 58465 - DNA, 110 bp, synthetic construct
  source 1..110: mol_type = other DNA
caccaaacacacagacagacagacacacgcacgcacacaagatttaggtcccacaccaaaactactacatcaaaccacccaggaatcagaattttagacaagctccccca

SEQ ID NO: 58466 - DNA, 110 bp, synthetic construct
  source 1..110: mol_type = other DNA
ccaaaactactacatcaaaccacccaggaatcagaattttagacaagctcccccaggtgcttctgctatatggccaaattcagaaagcactggcttcaaaataaaagtcc

SEQ ID NO: 58467 - DNA, 110 bp, synthetic construct
  source 1..110: mol_type = other DNA
ggagtcagaggaagagaatgaagttctaccactctttctttcgtcaggtgaccatgaacaagtcatttaatctcacggagcttcaacttccccaggtgggaaataggaaa

SEQ ID NO: 58468 - DNA, 110 bp, synthetic construct
  source 1..110: mol_type = other DNA
cttgttttccctaaactcaaagaataagaaaaatataagcaaaataaagaagctcaagaatcattcccagttaaaaggagatagagtttcctgttgcagttcagcggtaa

SEQ ID NO: 58469 - DNA, 110 bp, synthetic construct
  source 1..110: mol_type = other DNA
taagcaaaataaagaagctcaagaatcattcccagttaaaaggagatagagtttcctgttgcagttcagcggtaaatgaatccaactagtatccatgaggacaagggttt

SEQ ID NO: 58470 - DNA, 110 bp, synthetic construct
  source 1..110: mol_type = other DNA
ctgggtagggcttgtggtctgtgcccataagctctttgtatgacaaagtgttcggcaaagaggaaatgataagatggggaccataagacggggacagcaaagacgccaca

SEQ ID NO: 58471 - DNA, 110 bp, synthetic construct
  source 1..110: mol_type = other DNA
agaagcagtggagactaagcgggcctcctgtgggaagaagtggagaggatgccacagctgcagagcttggagccagcaagaggtgcttcgtgaaactgagaggtgccccc

SEQ ID NO: 58472 - DNA, 110 bp, synthetic construct
  source 1..110: mol_type = other DNA
agctgcagagcttggagccagcaagaggtgcttcgtgaaactgagaggtgcccccgaggtgcacaacctgatcccttatttttaaaagcaaagcacatttcctaagctaa

SEQ ID NO: 58473 - DNA, 110 bp, synthetic construct
  source 1..110: mol_type = other DNA
gccgtgtctgtgaccttcaccacagcttgaggcaatgccagacccctgacccaatgattgagaccagggactgaacccgcaacctcattgttactagaaggattcatttc

SEQ ID NO: 58474 - DNA, 110 bp, synthetic construct; identical to SEQ ID NO: 58473
  source 1..110: mol_type = other DNA

SEQ ID NO: 58475 - DNA, 110 bp, synthetic construct
  source 1..110: mol_type = other DNA
attcactcagttaacatactaaattgggttctcaagcaattttcctatagagagctgtaattcaattcattgggaaatacctgcagtggttttactacaataattttatt

SEQ ID NO: 58476 - DNA, 110 bp, synthetic construct
  source 1..110: mol_type = other DNA
cactgcgccatgacgagaactcccatccttggcattttttggtattcagaagcatcaacccgatctctgctttcaccttcacgtggctttctttgtacatctctgcccaa

SEQ ID NO: 58477 - DNA, 110 bp, synthetic construct
  source 1..110: mol_type = other DNA
caacccgatctctgctttcaccttcacgtggctttctttgtacatctctgcccaaaatccatatacaccccctttatttggccatgcctgtagcacatggaagttcctgg

SEQ ID NO: 58478 - DNA, 110 bp, synthetic construct
  source 1..110: mol_type = other DNA
tcctgtgcttacatttttaaaatagctttattgagatgtaattcatgtaccatacaatttgcccatttaaagcatgcaattccatggcctttaatatatcagagttgtgc

SEQ ID NO: 58479 - DNA, 110 bp, synthetic construct
  source 1..110: mol_type = other DNA
aatttgcccatttaaagcatgcaattccatggcctttaatatatcagagttgtgcaaccatcactgcagtcagttttagaacattttcatcacccccccaaaagatgcag

SEQ ID NO: 58480 - DNA, 110 bp, synthetic construct
  source 1..110: mol_type = other DNA
tctctctggatgcttgtttctgcagggcctcctctgggaataaatggttagggatctcaacggtgggcactgctctgctccttcctcctctgcagttcctcccgtcgcct

SEQ ID NO: 58481 - DNA, 110 bp, synthetic construct
  source 1..110: mol_type = other DNA
taggcctcggtgattctcacctggcatctggggcttctgaagggactgaatccagctactttgtggtgattaggggtaatacagtacttaggggtgggagagaaagaaat

SEQ ID NO: 58482 - DNA, 110 bp, synthetic construct
  source 1..110: mol_type = other DNA
ctactttgtggtgattaggggtaatacagtacttaggggtgggagagaaagaaatcagaattttgagtcagaaataacctcatcacttactggctctcaaaacttgaaaa

SEQ ID NO: 58483 - DNA, 110 bp, synthetic construct
  source 1..110: mol_type = other DNA
acggatgcccgcattcctgattctgcaaattggtccacagggcaggcagaaacgggagaaggcttcagctagattaagacctgacagccacacacccacgggccctgaat

SEQ ID NO: 58484 - DNA, 110 bp, synthetic construct
  source 1..110: mol_type = other DNA
ctgaaacattcatgcgacccagaggagcaaattctgcatgtggattctaatgggtttgtctttctccctgactagctcaaggttcccccaaatccaactcccacttcact

SEQ ID NO: 58485 - DNA, 110 bp, synthetic construct
  source 1..110: mol_type = other DNA
tgtaaaagctgggatagtaaagtattttaggcttttgggccatatggtctctgctgcaactactcaactgtgcttttctggtgtgaaactacacacagacaatatgaaaa

SEQ ID NO: 58486 - DNA, 110 bp, synthetic construct
  source 1..110: mol_type = other DNA
gcaactactcaactgtgcttttctggtgtgaaactacacacagacaatatgaaaacaaatgggcacgatgtacttcaaaaaaactttatataatcaggcagtgacctaag

SEQ ID NO: 58487 - DNA, 110 bp, synthetic construct
  source 1..110: mol_type = other DNA
gataacgccttaagtgtattcttcaactggttccttagacttaacgtcttcatggtcctaatttataccaggagatgtacaacgcgtgcatatgcaatctgggattattt

SEQ ID NO: 58488 - DNA, 110 bp, synthetic construct
  source 1..110: mol_type = other DNA
tcctaatttataccaggagatgtacaacgcgtgcatatgcaatctgggattatttcagggcagtataacttctgaatgttttcttccaagcttgagaaaatggttcattt

SEQ ID NO: 58489 - DNA, 110 bp, synthetic construct
  source 1..110: mol_type = other DNA
ttcgttttgcttgcaatgcacccccttccagtatcactttttcaagtccttcctatcctttgaaaatccatgaagctctttcagactattctagctcactcatttgctct

SEQ ID NO: 58490 - DNA, 110 bp, synthetic construct
  source 1..110: mol_type = other DNA
tgtgtaattgagtatcactgttttcggcagtaggaagccattgaagaactcgaggccagtcaggcactgatatagatgatggattgaacaggagacacaaatggaggcag

SEQ ID NO: 58491 - DNA, 110 bp, synthetic construct
  source 1..110: mol_type = other DNA
ccagtcaggcactgatatagatgatggattgaacaggagacacaaatggaggcagagagactagttaaaaggctactcttgtattactaaattcgaaatatctgatatct

SEQ ID NO: 58492 - DNA, 110 bp, synthetic construct
  source 1..110: mol_type = other DNA
caaaaataaataaatagagttgtggttgaaatgaccctgagttatatatgaggtcagttgcatccattctgctctgtagaagcagacaagttatacatttttattggaga

SEQ ID NO: 58493 - DNA, 110 bp, synthetic construct; identical to SEQ ID NO: 58492
  source 1..110: mol_type = other DNA

SEQ ID NO: 58494 - DNA, 110 bp, synthetic construct
  source 1..110: mol_type = other DNA
gttctgacccctcccctcgcgctccacgtcccaccttccagccccttagcgcttcagactctgcgggggctgccggtggtccgctgccctccactaaaccacagctctag

SEQ ID NO: 58495 - DNA, 110 bp, synthetic construct
  source 1..110: mol_type = other DNA
agactctgcgggggctgccggtggtccgctgccctccactaaaccacagctctagaaaagcatttccactgtgcctatttcacacttggggaaactgaggcggagggtgt

SEQ ID NO: 58496 - DNA, 110 bp, synthetic construct
  source 1..110: mol_type = other DNA
tcaggttgaatttattcatataccataggcgcctcctcccctttgcttattcatagcctacaggatttggaaaacgcagctcaagttccagctcagtttacttcagctga

SEQ ID NO: 58497 - DNA, 110 bp, synthetic construct
  source 1..110: mol_type = other DNA
tatagagatagatgcatttaccttaaatgtcgttaaaacatttatgccatatatctggccccctgtgatttgatttcatgatcaataacaattttctgattctgacttcc

SEQ ID NO: 58498 - DNA, 110 bp, synthetic construct
  source 1..110: mol_type = other DNA
ggcattgctgcaagctgcagtataggtcccagatacagctcggatgccacgttgctgtggctatggtgaaggccagcagctgcggctctgattcaacacctagctcggga

SEQ ID NO: 58499 - DNA, 110 bp, synthetic construct
  source 1..110: mol_type = other DNA
tgtggctatggtgaaggccagcagctgcggctctgattcaacacctagctcgggaatttccatgtgcagcagtaatggccctaaaaagaaaaaagaaaagaaaaaataaa

SEQ ID NO: 58500 - DNA, 110 bp, synthetic construct
  source 1..110: mol_type = other DNA
ggagtacatttatatgtccccagcagctgggtgatgggtgcgtggggcccagagacctgggcagagtgccgggtgacagagtattggaacaggctaggacactggtgttc

SEQ ID NO: 58501 - DNA, 110 bp, synthetic construct
  source 1..110: mol_type = other DNA
accagcgttggacgcaggctttatgacagtgtgagacgggagaactatttcagggaaactgaaaagggcgggtttaggatgacgcggagcatttcccgtcgagaatttgg

SEQ ID NO: 58502 - DNA, 110 bp, synthetic construct
  source 1..110: mol_type = other DNA
aaactgaaaagggcgggtttaggatgacgcggagcatttcccgtcgagaatttggccacatctcctttccttgctgacacttgtcgtgcaacctcaggccggagtggaaa

SEQ ID NO: 58503 - DNA, 110 bp, synthetic construct; identical to SEQ ID NO: 58501
  source 1..110: mol_type = other DNA

SEQ ID NO: 58504 - DNA, 110 bp, synthetic construct; identical to SEQ ID NO: 58502
  source 1..110: mol_type = other DNA

SEQ ID NO: 58505 - DNA, 110 bp, synthetic construct
  source 1..110: mol_type = other DNA
aaataaaataagggaccagctatcctgaagcttctgcatgaagcccctgccccactttacttagaattatgcaaagctcacaacatgaggttggtggcttcccagcagct

SEQ ID NO: 58506 - DNA, 110 bp, synthetic construct
  source 1..110: mol_type = other DNA
ctgggtgggggtgcagggatgatgggagacgggagcagtcagggccccacttcccacctccggggtcggcggaggttccaatccccacctttcttatgcttctccttcag

SEQ ID NO: 58507 - DNA, 110 bp, synthetic construct
  source 1..110: mol_type = other DNA
acctccggggtcggcggaggttccaatccccacctttcttatgcttctccttcaggacaatcttgaccgttgtgctgccggcctcctttggccggaagtggcgagggatg

SEQ ID NO: 58508 - DNA, 110 bp, synthetic construct
  source 1..110: mol_type = other DNA
gagatgagctgcccaggactgatatggcagctctaggacatcaggggttcagactccttttgtttttctatttagacatcttcaagtgtgcctgtctccttgtggtgtga

SEQ ID NO: 58509 - DNA, 110 bp, synthetic construct
  source 1..110: mol_type = other DNA
atactagacacaaaaaaacccacaatcctgcagcctatggagccagcattcagaagcccagatcttacctgggccctggccctacccacaagttggccaacacaagcttc

SEQ ID NO: 58510 - DNA, 110 bp, synthetic construct
  source 1..110: mol_type = other DNA
acctggcaggcagcctgatttcctttttgctctcactgagcacaaatagtagggggtgtatttctcactcaaaatcttccagagccctcaatcctctttatgcaacacca

SEQ ID NO: 58511 - DNA, 110 bp, synthetic construct
  source 1..110: mol_type = other DNA
gtgtatttctcactcaaaatcttccagagccctcaatcctctttatgcaacaccaattctttttgtcaatgagccgaatacacttcagatctggtaacccgctttaaata

SEQ ID NO: 58512 - DNA, 110 bp, synthetic construct
  source 1..110: mol_type = other DNA
tttctgattctgattcttttttttctgcctcctcccagggtcaggatcccatctccaacatcatctcctctcctctcttctcgttgcttcttctaatccagtcacatggt

SEQ ID NO: 58513 - DNA, 110 bp, synthetic construct
  source 1..110: mol_type = other DNA
caacatcatctcctctcctctcttctcgttgcttcttctaatccagtcacatggtcagagacacccttactcatagcccactttttgggcctgagctaaagctcagaggc

SEQ ID NO: 58514 - DNA, 110 bp, synthetic construct
  source 1..110: mol_type = other DNA
cacaacgggagctccaggatttccaatttactgtttcccctgaccttcttctttgcctctgcagctcaattaggactttttacctgataaaacctgaaggcacaggctct

SEQ ID NO: 58515 - DNA, 110 bp, synthetic construct
  source 1..110: mol_type = other DNA
agaaactgttgtcagttacattttgcaactgaggaaacaggctcagagaggttgctacttgctcaaggtcacacagctataataaagcagtaaaagcagacttccaactc

SEQ ID NO: 58516 - DNA, 110 bp, synthetic construct
  source 1..110: mol_type = other DNA
ccttatttttcaaggagagaactgaggctcagagatgggtaaggacttggcaagggacccaacaagcccatgacaaagcttaactggaaccctggtgttctgctgcccag

SEQ ID NO: 58517 - DNA, 110 bp, synthetic construct
  source 1..110: mol_type = other DNA
atcttccctcctccgtgaggcctttgtccccctggcttgggcgtctcttttctgggttcctgcacttttctttgtcatcacttatcacactgggttgtcttgtgtctacg

SEQ ID NO: 58518 - DNA, 110 bp, synthetic construct
  source 1..110: mol_type = other DNA
gttcctgcacttttctttgtcatcacttatcacactgggttgtcttgtgtctacggctccatcaaacagccagcatttgcaggggctgtaatggagactgattgtttctg

SEQ ID NO: 58519 - DNA, 110 bp, synthetic construct
  source 1..110: mol_type = other DNA
ctcaaatattctttgacttgctgtcccatttctagctacagaatgaacaaaccagcttatcctagagaagaaagaaataaggactgtctttagccatctgaaaagctgtc

SEQ ID NO: 58520 - DNA, 110 bp, synthetic construct
  source 1..110: mol_type = other DNA
cttatcctagagaagaaagaaataaggactgtctttagccatctgaaaagctgtcatgtgagtgggagattagacttactcagtggagctcagaggacatgaactggacc

SEQ ID NO: 58521 - DNA, 110 bp, synthetic construct
  source 1..110: mol_type = other DNA
gagggtggagggagtcggttttggtccttgttgactttaaaaacatcagactagtcctgtgtgtgtgagactctgagagttcgtgcgttgcgcctggacgggtggagaac

SEQ ID NO: 58522 - DNA, 110 bp, synthetic construct
  source 1..110: mol_type = other DNA
cctgtgtgtgtgagactctgagagttcgtgcgttgcgcctggacgggtggagaacaggcagccctcagtggcaagcaggagggaagctgcctttggggatcgctgatgcc

SEQ ID NO: 58523 - DNA, 110 bp, synthetic construct
  source 1..110: mol_type = other DNA
ctgctgcagtcaggtggagccagactgtccagcttcgaacccaggctcctcgttctaccagctctgtgatctgggggaagttccttaacctctctgtgccgtgtcctcct

SEQ ID NO: 58524 - DNA, 110 bp, synthetic construct
  source 1..110: mol_type = other DNA
taccagctctgtgatctgggggaagttccttaacctctctgtgccgtgtcctcctccgaaaagcaggggtaaccatacagcagctcccctcagtgctgggcgtacaaaag

SEQ ID NO: 58525 - DNA, 110 bp, synthetic construct
  source 1..110: mol_type = other DNA
gtgaaggcccgaagctgaagcggcaccagcctcacggtgaatccgcctctgggctggaggaagggcccagaggcgatctgagcacaacccgcctgcacaaaggccctgcc

SEQ ID NO: 58526 - DNA, 110 bp, synthetic construct
  source 1..110: mol_type = other DNA
ggaggaagggcccagaggcgatctgagcacaacccgcctgcacaaaggccctgcctccagcccaacagacagacgaggctccggaacattccttcttcttgtcacgtgtc

SEQ ID NO: 58527 - DNA, 110 bp, synthetic construct
  source 1..110: mol_type = other DNA
ttgcctctatccctggctggccaggccagacaacaaaatcctgaccttcacagaatatgagcaggcagtctggatggtagagcgggaggaattggatggacctggtttaa

SEQ ID NO: 58528 - DNA, 110 bp, synthetic construct
  source 1..110: mol_type = other DNA
tatgagcaggcagtctggatggtagagcgggaggaattggatggacctggtttaaagctctggtgtgacccttactaataaatgaatggccttagacaagtcacttcacc

SEQ ID NO: 58529 - DNA, 110 bp, synthetic construct
  source 1..110: mol_type = other DNA
ggacatctgcctgtgaggctggggaaggaccaggtaaacagcccttcactgggctcagtcccacagtcagggagcacagcatccctctcctggaagctggtcagtaaagg

SEQ ID NO: 58530 - DNA, 110 bp, synthetic construct
  source 1..110: mol_type = other DNA
cagtcccacagtcagggagcacagcatccctctcctggaagctggtcagtaaaggtgtctgacccaggagggcccagggcactaggatccctgagacctaggtctcctct

SEQ ID NO: 58531 - DNA, 110 bp, synthetic construct
  source 1..110: mol_type = other DNA
tacaggttttaaacaactgagcaaaagcatatacgaaagagatgactgactgaacgccgatacccggatttaagttccggctgtagataagcaccgtcaatccactggta

SEQ ID NO: 58532 - DNA, 110 bp, synthetic construct
  source 1..110: mol_type = other DNA
gccgatacccggatttaagttccggctgtagataagcaccgtcaatccactggtagctgaagcttcgagatgtcactggcaagaagacatcccctgaatcacccttcggt

SEQ ID NO: 58533 - DNA, 110 bp, synthetic construct
  source 1..110: mol_type = other DNA
aactatgacgttgcaccaggcactggagcaggggtcacagagcttatctggcgtgctcagccagcaagacggctgttgctaaggatttgctgtggggaatgactgtccct

SEQ ID NO: 58534 - DNA, 110 bp, synthetic construct
  source 1..110: mol_type = other DNA
tgttgtcctgcgtttacttccgagctcagcagatgctacatgaggcaggcaacccaaacacagttcctgtttaggtgctgacgtgtagaaggtaccggagcacagcgaag

SEQ ID NO: 58535 - DNA, 110 bp, synthetic construct
  source 1..110: mol_type = other DNA
aaacacagttcctgtttaggtgctgacgtgtagaaggtaccggagcacagcgaagggacttcaggtctctgcatatgtgtagcatcttaccctttagattctagaatgca

SEQ ID NO: 58536 - DNA, 110 bp, synthetic construct; identical to SEQ ID NO: 58534
  source 1..110: mol_type = other DNA

SEQ ID NO: 58537 - DNA, 110 bp, synthetic construct; identical to SEQ ID NO: 58535
  source 1..110: mol_type = other DNA

SEQ ID NO: 58538 - DNA, 110 bp, synthetic construct
  source 1..110: mol_type = other DNA
agtgagaagattcttgaaaggtgtctaagtgggaaggttggagtgttggaaaacaggaagacagagtcctgggagagggtaggggctgccatgcagcagctttctgactt

SEQ ID NO: 58539 - DNA, 110 bp, synthetic construct
  source 1..110: mol_type = other DNA
ggaagacagagtcctgggagagggtaggggctgccatgcagcagctttctgacttgttgctggccccaggcccttcctctacttctacctgggaggcagaaaaattttgg

SEQ ID NO: 58540 - DNA, 110 bp, synthetic construct; identical to SEQ ID NO: 58538
  source 1..110: mol_type = other DNA

SEQ ID NO: 58541 - DNA, 110 bp, synthetic construct; identical to SEQ ID NO: 58539
  source 1..110: mol_type = other DNA

SEQ ID NO: 58542 - DNA, 110 bp, synthetic construct
  source 1..110: mol_type = other DNA
ccccagcccgcctaaggggccgggcccttgtggggagatgccccagcacatgcggacgcagacagcagaggaatcaggccccgtcaggcatgagagagcagggtcaaagc

SEQ ID NO: 58543 - DNA, 110 bp, synthetic construct
  source 1..110: mol_type = other DNA
acgcagacagcagaggaatcaggccccgtcaggcatgagagagcagggtcaaagctgaaatcaggctgctctttgacctgggagaagttctcagacatcaagaccaacag

SEQ ID NO: 58544 - DNA, 110 bp, synthetic construct
  source 1..110: mol_type = other DNA
cctgtccccaccttcctttggggagaagagagaaggaacttggggggacctgcagcaggatagaatgcaggcctagaagctcagcctgaattgagtccaactccctactc

SEQ ID NO: 58545 - DNA, 110 bp, synthetic construct
  source 1..110: mol_type = other DNA
caggatagaatgcaggcctagaagctcagcctgaattgagtccaactccctactctggccgagtagccttggccatgtcacttccttgtgtcttgatctccacaaaaatg

SEQ ID NO: 58546 - DNA, 110 bp, synthetic construct
  source 1..110: mol_type = other DNA
ctgtttctgataatctgcctgatgcagagctgagcttcagtgaaagcttgggggaaaaacctgcatccgatccctctgctttcttccctcctgcctgctgaactcttatt

SEQ ID NO: 58547 - DNA, 110 bp, synthetic construct
  source 1..110: mol_type = other DNA
gtttttgttgtacaacagtttcagatttatggaattactacaaagacgatactgagaggtaccttgaaaaccctgcacccagtttttcccattattaacatcttacctta

SEQ ID NO: 58548 - DNA, 110 bp, synthetic construct
  source 1..110: mol_type = other DNA
tgtcacacaggtcttctgtgttttcttttaaatgctttgctattgaacttcttacatttacatcaggaactgcttttctgtgtacgacgtaagagccaaggttgactttt

SEQ ID NO: 58549 - DNA, 110 bp, synthetic construct
  source 1..110: mol_type = other DNA
atttacatcaggaactgcttttctgtgtacgacgtaagagccaaggttgactttttacatatggtcaattgacccagcgccattattggaagaccgtcctttactcattg

SEQ ID NO: 58550 - DNA, 110 bp, synthetic construct
  source 1..110: mol_type = other DNA
gatttattgtgtgtggtaggcagaatttcagattctcactctcctcctacatatgtcctgtgtaatcctctcccctagggtgtggcaggacttgtgaatataatggaatt

SEQ ID NO: 58551 - DNA, 110 bp, synthetic construct
  source 1..110: mol_type = other DNA
tcctgtgtaatcctctcccctagggtgtggcaggacttgtgaatataatggaatttcactctcatgatcaaggtccctaatcatttgactgtgaatgactataaaaggtg

SEQ ID NO: 58552 - DNA, 110 bp, synthetic construct
  source 1..110: mol_type = other DNA
tatctttcattgacatttttattttaactattttttttttttttttttttttttgccaaacctgtggcatgcagaagttcccagaccaggaattgagcccatgccacagc

SEQ ID NO: 58553 - DNA, 110 bp, synthetic construct
  source 1..110: mol_type = other DNA
ccaaacctgtggcatgcagaagttcccagaccaggaattgagcccatgccacagcagtgacaacacaaggtccttcacccgctgagccaccgggaaactccttgattatt

SEQ ID NO: 58554 - DNA, 110 bp, synthetic construct
  source 1..110: mol_type = other DNA
gtgatagagccccgcgggcaggtggaccccagagctgcgtcagtttaatagttatttgctggcaaacgtaagaatctgcagggaaggcccatgttaattgaagcgttgtt

SEQ ID NO: 58555 - DNA, 110 bp, synthetic construct
  source 1..110: mol_type = other DNA
tgttaagcaaatgcacaattgttgaaagaattctactcagaatatcaaaatagttataaaaattagtgataatagggactgtgtgctctgaggaatgagggctaggagtt

SEQ ID NO: 58556 - DNA, 110 bp, synthetic construct
  source 1..110: mol_type = other DNA
ataaaaattagtgataatagggactgtgtgctctgaggaatgagggctaggagttgcgttttaatgtgaaataattgtagtagtagtaataaaaaatgaattagtaggag

SEQ ID NO: 58557 - DNA, 110 bp, synthetic construct
  source 1..110: mol_type = other DNA
acatccttctaggtctgaaatgctgtcctgttcaagaaggctgtagagattccatctttgcccatcaaaaattgacaggggcttgtggaattagaaaggactgctggctg

SEQ ID NO: 58558 - DNA, 110 bp, synthetic construct
  source 1..110: mol_type = other DNA
actggccctttgtaatcgggttctgagcgggaggccaggcctgcagaaccacagcgatggggagcccattatgggatgagctttgagggtggagtcaggtctgcagagcc

SEQ ID NO: 58559 - DNA, 110 bp, synthetic construct
  source 1..110: mol_type = other DNA
ttcccctctgccacctggggccagatcaccactcagggcctgtcttcacgtgagcggagcaggtgcgcgactgccaccttgcagagtcgttgaaaggattcaacgagatg

SEQ ID NO: 58560 - DNA, 110 bp, synthetic construct
  source 1..110: mol_type = other DNA
tggggctcgtgcgcgagctccgccagatgttcagagcggctccagatgtgcctgggggccgggacaggactttcctcctccctacccccgagcctggagctcaggtctgt

SEQ ID NO: 58561 - DNA, 110 bp, synthetic construct
  source 1..110: mol_type = other DNA
gggccgggacaggactttcctcctccctacccccgagcctggagctcaggtctgtaaacaaactctcggttcactccctggccgcttctgggggcccgtctcaaagccag

SEQ ID NO: 58562 - DNA, 110 bp, synthetic construct
  source 1..110: mol_type = other DNA
gatttctccctcttcctccccagggctgctgtgctgataagttgggataaagcagatgagaggtccacaggcctgacaagggccgcacaggttgggaaacgaccaatcac

SEQ ID NO: 58563 - DNA, 110 bp, synthetic construct
  source 1..110: mol_type = other DNA
ctctactcgagtcagttggtttggggggttcaactcctatttcacagctgaacggcctcttacaaggcactttcggatccacagatgaggatagtaaccccaccacctca

SEQ ID NO: 58564 - DNA, 110 bp, synthetic construct
  source 1..110: mol_type = other DNA
tactataaagtgatggtaataaaaacagtatcgtatagctgaaaacagacaaatcttccaatggaacaaaacagagctcccagaaacagccttgcatatacataaacttg

SEQ ID NO: 58565 - DNA, 110 bp, synthetic construct
  source 1..110: mol_type = other DNA
ttccaatggaacaaaacagagctcccagaaacagccttgcatatacataaacttggtctatgacagaggtggcatcttataccggatggattaacagactatgttgggca

SEQ ID NO: 58566 - DNA, 110 bp, synthetic construct
  source 1..110: mol_type = other DNA
gcggggcgaccttggtgactgatgtgcccaccccagcagatctccgggcacgagttggacactgttgtgggttgtaggagatctcattctccccaactttgcagctgctc

SEQ ID NO: 58567 - DNA, 110 bp, synthetic construct
  source 1..110: mol_type = other DNA
tggacactgttgtgggttgtaggagatctcattctccccaactttgcagctgctcttgggcttcatcagcttctcgattggaagccaaggggctaaaactcagaaaagca

SEQ ID NO: 58568 - DNA, 110 bp, synthetic construct
  source 1..110: mol_type = other DNA
gtgtggagcgagtactccgcagatagtaattttctgtgcctcttcagtcttcctaacagctcctgaattactttacagcatgatagccatccgcacaaggcctgatccag

SEQ ID NO: 58569 - DNA, 110 bp, synthetic construct
  source 1..110: mol_type = other DNA
acagctcctgaattactttacagcatgatagccatccgcacaaggcctgatccagcaccttctacctcttgccagttgtataaggcctgagcctgttttgcttcagaaga

SEQ ID NO: 58570 - DNA, 110 bp, synthetic construct
  source 1..110: mol_type = other DNA
atatttcatataaatggaatcatataatatatggcttttgtgtctggcttctttcactgacagagagttttcaagtttcattcgtgttggaacatgtatcagcacttcat

SEQ ID NO: 58571 - DNA, 110 bp, synthetic construct
  source 1..110: mol_type = other DNA
actgacagagagttttcaagtttcattcgtgttggaacatgtatcagcacttcattccttcttatgcctgaataatattccattgcaatggataaaacacattttattta

SEQ ID NO: 58572 - DNA, 110 bp, synthetic construct
  source 1..110: mol_type = other DNA
gtgcgactgcactctgagagcgaaagaggagggcgtttggcctcggaccacaactcccagcactccctgcgaggtctctcctttcctttcaaaacctggaggaaaagagg

SEQ ID NO: 58573 - DNA, 110 bp, synthetic construct
  source 1..110: mol_type = other DNA
cccagcactccctgcgaggtctctcctttcctttcaaaacctggaggaaaagagggacgcggagaatggaggccttctggtgtccgttctccgaaaggcgggaaaggcaa

SEQ ID NO: 58574 - DNA, 110 bp, synthetic construct
  source 1..110: mol_type = other DNA
agaatagtatacttctgtttcttctctctcatcgttgtactatggttgtcatacatttaaattttctctctcataagccctacattgcattgctattagttttactttaa

SEQ ID NO: 58575 - DNA, 110 bp, synthetic construct; identical to SEQ ID NO: 58574
  source 1..110: mol_type = other DNA

SEQ ID NO: 58576 - DNA, 110 bp, synthetic construct
  source 1..110: mol_type = other DNA
ggcaagaggcaaatacagaaatgtgtcctgtaaacacattgctttaagtaggccacaacttggtttctgggctgatttttccggaagcttcgcgatcttggtaggtcatg

SEQ ID NO: 58577 - DNA, 110 bp, synthetic construct
  source 1..110: mol_type = other DNA
caacttggtttctgggctgatttttccggaagcttcgcgatcttggtaggtcatggtgagggtgaggaataaatccaggttaagcaaaacataacttatggcagagcttt

SEQ ID NO: 58578 - DNA, 110 bp, synthetic construct
  source 1..110: mol_type = other DNA
ttgctgtagaccttctactgtatttcagagtctgacaaagttggttctgacagtttctgcctggttttaatgtttctgtgggaggatgggagcttggagctgacacctct

SEQ ID NO: 58579 - DNA, 110 bp, synthetic construct
  source 1..110: mol_type = other DNA
tctgcctggttttaatgtttctgtgggaggatgggagcttggagctgacacctctgccattttgctgcattgccgtcaacacaatattttgtcctgagtgacctggaaga

SEQ ID NO: 58580 - DNA, 110 bp, synthetic construct
  source 1..110: mol_type = other DNA
ttccattttgcggccacactctggaagcgcaggctgctcctgcagcagccgatgtccccgctttggggtaccaccagtgagagacagctcccaccattctctcatcttca

SEQ ID NO: 58581 - DNA, 110 bp, synthetic construct
  source 1..110: mol_type = other DNA
ttatctggatgggttttttttttccccccatttttctagggtggaaaaaaaaatccctgcatgaaaaggaccaaaaggagagtctggaaccagtgttattgtgcaatgtg

SEQ ID NO: 58582 - DNA, 110 bp, synthetic construct
  source 1..110: mol_type = other DNA
cctgcatgaaaaggaccaaaaggagagtctggaaccagtgttattgtgcaatgtgacagctgagagagaaggaaaccgctgaagtccaacctccccccccccgccctccc

SEQ ID NO: 58583 - DNA, 110 bp, synthetic construct
  source 1..110: mol_type = other DNA
ggctcgtgaaccactgtcccattttacagacagggaaactgaggttcccggggatgaagtaggtcacccacagccacagggccggtagaaagcagatgccagaaccgggc

SEQ ID NO: 58584 - DNA, 110 bp, synthetic construct
  source 1..110: mol_type = other DNA
gaagtaggtcacccacagccacagggccggtagaaagcagatgccagaaccgggcctgatttttctctgcccaaaggctccctgtctgtaggcgtctggccccgagggcc

SEQ ID NO: 58585 - DNA, 110 bp, synthetic construct
  source 1..110: mol_type = other DNA
caggtctcccagcgagaaccccaggacagttgtttggttacagagactcactcgggtcagagggagcaggacaatgacattcacggccggagtccacggtctcacggctc

SEQ ID NO: 58586 - DNA, 110 bp, synthetic construct
  source 1..110: mol_type = other DNA
ccagaccacaacagggagccacgcttcctctgtacgccatcaggctccacgcccacttagatgtagccgtgcaggactctccggacctctgggtctctaagcctcggttc

SEQ ID NO: 58587 - DNA, 110 bp, synthetic construct
  source 1..110: mol_type = other DNA
cttagatgtagccgtgcaggactctccggacctctgggtctctaagcctcggttccctctctgtgaaatggtgatggaaagccttgccttgcagttgggggattggcagg

SEQ ID NO: 58588 - DNA, 110 bp, synthetic construct
  source 1..110: mol_type = other DNA
atggatctgaaaatttgcatgtacatttagtgaggtgatgttccttgttttcccaaaaggttcttattagatctgcaggttaggagttcccttgtggtgtagagggttaa

SEQ ID NO: 58589 - DNA, 110 bp, synthetic construct
  source 1..110: mol_type = other DNA
aaaggttcttattagatctgcaggttaggagttcccttgtggtgtagagggttaaggatccggcattatcactgcaatggctgggttggatgagtttcctagcctgggaa

SEQ ID NO: 58590 - DNA, 110 bp, synthetic construct
  source 1..110: mol_type = other DNA
aattaacacttccagaaacaatttttaaattacaaaatgaacattcccgtaactttgggaaccccctcagtgcccttcccccgtcctgtcgccttccttccatcccagag

SEQ ID NO: 58591 - DNA, 110 bp, synthetic construct
  source 1..110: mol_type = other DNA
tgggaaccccctcagtgcccttcccccgtcctgtcgccttccttccatcccagagataatcgcactgccagatgttctgcctttctccttggctttgcttttcttttctt

SEQ ID NO: 58592 - DNA, 110 bp, synthetic construct
  source 1..110: mol_type = other DNA
attcttttccactgcgtcacaataggaactcccttctggctaatttttgattgggttttggggatttttttttgatattgatctgtaagagctgtttgcatattttggga

SEQ ID NO: 58593 - DNA, 110 bp, synthetic construct
  source 1..110: mol_type = other DNA
ttttggggatttttttttgatattgatctgtaagagctgtttgcatattttgggaatttattctttatcagatgcgttgtttgcagatattttctctcattccgaaagtt

SEQ ID NO: 58594 - DNA, 110 bp, synthetic construct
  source 1..110: mol_type = other DNA
gtctgaactttctgccttactagcttcatttcccataactctcacccttgtccctctcatatcagctgtattagactacttattgtttttagtaccatatgtatatttat

SEQ ID NO: 58595 - DNA, 110 bp, synthetic construct
  source 1..110: mol_type = other DNA
ctcatatcagctgtattagactacttattgtttttagtaccatatgtatatttatatctctgcctttcacctttttctggtaaacttgtcatatctgtcattcaggactg

SEQ ID NO: 58596 - DNA, 110 bp, synthetic construct
  source 1..110: mol_type = other DNA
catttgtcttggctcccaagttttccttgtcttatggaaaggggaattaccccagctttctttgttacttaccccactatcctctcttagtcctgggctaccttctctgt

SEQ ID NO: 58597 - DNA, 110 bp, synthetic construct
  source 1..110: mol_type = other DNA
ctttctttgttacttaccccactatcctctcttagtcctgggctaccttctctgtattttctgctagatgatcttacataatctcaaagctatgaatatgctctatatgc

SEQ ID NO: 58598 - DNA, 110 bp, synthetic construct
  source 1..110: mol_type = other DNA
tcccacaagaccttgtcattggtctgttttccatcagctttgcctcctcctcatttcattctccacccagcaagacagggccgtctttgtaatccacagatgatcatgtt

SEQ ID NO: 58599 - DNA, 110 bp, synthetic construct
  source 1..110: mol_type = other DNA
tcattctccacccagcaagacagggccgtctttgtaatccacagatgatcatgttgagccagaggtgaaactttcattgactttgccttgttcttaagataaagtccagc

SEQ ID NO: 58600 - DNA, 110 bp, synthetic construct
  source 1..110: mol_type = other DNA
tttggggcgactttgttttcctttggagcaattcaaggagtaataacttcatcctctctcacttccttgagcccgagagccttccaggccccagactcaccccaggaacc

SEQ ID NO: 58601 - DNA, 110 bp, synthetic construct
  source 1..110: mol_type = other DNA
ctctcacttccttgagcccgagagccttccaggccccagactcaccccaggaaccgtatccatggttttcatttcctattgcagctgtatcacatcaacacaaatttagt

SEQ ID NO: 58602 - DNA, 110 bp, synthetic construct
  source 1..110: mol_type = other DNA
ttcgtacaatgtagagtgacattcaagtgtaaggcgttgactttgctgttgttataatgattcggaattgtcacttgctgcccatggaagctatttattatgatggttaa

SEQ ID NO: 58603 - DNA, 110 bp, synthetic construct
  source 1..110: mol_type = other DNA
aatgattcggaattgtcacttgctgcccatggaagctatttattatgatggttaatcagtaataatggaagttgtaaaaactaatagtacctcatagggttgttgtgagc

SEQ ID NO: 58604 - DNA, 110 bp, synthetic construct
  source 1..110: mol_type = other DNA
atggtccccggggggcatcccactgccaccccccaacagcttcatgagatattgttcatgtacagacggctcactcatttaaagtgtgttcgtggacttgtgcagctgtc

SEQ ID NO: 58605 - DNA, 110 bp, synthetic construct
  source 1..110: mol_type = other DNA
aggtccccaggccaggcggctcaaggggtgtgtgtgaggtgacaagtgcctgagagaatgcagatccgcatacggggtctgtaggactgaggcctttctcccagcttggg

SEQ ID NO: 58606 - DNA, 110 bp, synthetic construct
  source 1..110: mol_type = other DNA
gaatgcagatccgcatacggggtctgtaggactgaggcctttctcccagcttgggagagcagtggggacctggaggtgagtgagcttgccaggtggcatttgggaaggga

SEQ ID NO: 58607 - DNA, 110 bp, synthetic construct
  source 1..110: mol_type = other DNA
tggagtgaggggttacagcagattcatgccctggagcttctgtgaagatgatccgggggtcttataggagcgcgcacttaacatgagggcaattgtcaaacctgtgccag

SEQ ID NO: 58608 - DNA, 110 bp, synthetic construct
  source 1..110: mol_type = other DNA
ggggtcttataggagcgcgcacttaacatgagggcaattgtcaaacctgtgccaggcgggaggggccaagacaccgcctcggatggggaactgcccaggggtagggggtg

SEQ ID NO: 58609 - DNA, 110 bp, synthetic construct
  source 1..110: mol_type = other DNA
gccagggatcaaaccagcaccccgacagagacaagccagatcattaacccactgcgacacagcgggaactcctaaactcatcgatttcttacttctgctgtgccacttgt

SEQ ID NO: 58610 - DNA, 110 bp, synthetic construct
  source 1..110: mol_type = other DNA
gacacagcgggaactcctaaactcatcgatttcttacttctgctgtgccacttgtttctcggaggacacagagaatatgtaaatagatgaagagaaatatatcattatta

SEQ ID NO: 58611 - DNA, 110 bp, synthetic construct
  source 1..110: mol_type = other DNA
ctattaaaaaccataatgggacagcacttcacacctgtcagaatgactatcatcaagaaaacaagagataataggtactggtgaggatgtgctgaaaaggggagccctta

SEQ ID NO: 58612 - DNA, 110 bp, synthetic construct
  source 1..110: mol_type = other DNA
agaaaacaagagataataggtactggtgaggatgtgctgaaaaggggagcccttaaacactgttgttgggttgggatgtaaatgaaaatagatctgattcagcaattcca

SEQ ID NO: 58613 - DNA, 110 bp, synthetic construct
  source 1..110: mol_type = other DNA
tccccacaaactgaaggatgattacaaccgcagaggttctttccaaggaaaaagggttcaagctccatgtcaggctccccatcccaaagttcctgaactgtgaatatgag

SEQ ID NO: 58614 - DNA, 110 bp, synthetic construct
  source 1..110: mol_type = other DNA
gttcaagctccatgtcaggctccccatcccaaagttcctgaactgtgaatatgagctcccagaacatttggctttgaaagccagtggggattacttttgggagagccaga

SEQ ID NO: 58615 - DNA, 110 bp, synthetic construct
  source 1..110: mol_type = other DNA
actgattctgtaacaaattttgggagccagcctggagataagtccaggtggactttttgtgcatgggtcatggcttccttgctggtattgagagcctgtggagaaatcca

SEQ ID NO: 58616 - DNA, 110 bp, synthetic construct
  source 1..110: mol_type = other DNA
tttgtgcatgggtcatggcttccttgctggtattgagagcctgtggagaaatccaagcagctgcctggtccattagttccaaggaccatcccaggattctccctgacaag

SEQ ID NO: 58617 - DNA, 110 bp, synthetic construct
  source 1..110: mol_type = other DNA
tcatgctggctcctcctattatcttccatcgagaccagctggcttcctaggaaaaacattctctgagggagctgggtttctccgtggtatgatggaagtctgtgccttgg

SEQ ID NO: 58618 - DNA, 110 bp, synthetic construct
  source 1..110: mol_type = other DNA
acattctctgagggagctgggtttctccgtggtatgatggaagtctgtgccttggttttggacatgtctgaagcctggggctgcactcctgggctggtttcacctttccc

SEQ ID NO: 58619 - DNA, 110 bp, synthetic construct
  source 1..110: mol_type = other DNA
cccaactccccagttcagactccttgaactcttgtcagaaacattaaaggaaagccttgtatcctgaggcaatgggtagggatgaagagatgggagtccatgaggcctct

SEQ ID NO: 58620 - DNA, 110 bp, synthetic construct
  source 1..110: mol_type = other DNA
cttgtatcctgaggcaatgggtagggatgaagagatgggagtccatgaggcctctgactttacctgcataactgctgatacctttgaggactttttcactttggctttct

SEQ ID NO: 58621 - DNA, 110 bp, synthetic construct
  source 1..110: mol_type = other DNA
tgaattgtttaccactgccattgctctcacagacctcaatcctagcagccaacaggctccaggagaggtaacatgatattgccgttcccatcaattgtttgggtacacat

SEQ ID NO: 58622 - DNA, 110 bp, synthetic construct
  source 1..110: mol_type = other DNA
gctccaggagaggtaacatgatattgccgttcccatcaattgtttgggtacacatgagctgctaccacctgctgctgcatctacatgcctgctgtcaaggggacaataaa

SEQ ID NO: 58623 - DNA, 110 bp, synthetic construct
  source 1..110: mol_type = other DNA
ggtctcttggggatgcaggagtcagctgtggctcactgtggtggcaggacactggacttggaggtccctggaaataatcatcagagtgagcgcctttggaggctgtcatt

SEQ ID NO: 58624 - DNA, 110 bp, synthetic construct
  source 1..110: mol_type = other DNA
acttggaggtccctggaaataatcatcagagtgagcgcctttggaggctgtcattttcgaaaaatttggccctgtccaacagcagcctgtaagcacaagtgctgagagtc

SEQ ID NO: 58625 - DNA, 110 bp, synthetic construct
  source 1..110: mol_type = other DNA
gctccagcttcacccaactagtgagctgactgggtagagcgcctgacttgcggcggccacctggaccgtatttaccagcctcctcttgctggagatgcttaaggggcatc

SEQ ID NO: 58626 - DNA, 110 bp, synthetic construct
  source 1..110: mol_type = other DNA
tgaggtatttgaccagttaggtcacagaaaagtaggcactcaagaaatctccatgtgggatcatgggatcatatggtagttcctttttttaagtatagctcatttacaat

SEQ ID NO: 58627 - DNA, 110 bp, synthetic construct
  source 1..110: mol_type = other DNA
aatctccatgtgggatcatgggatcatatggtagttcctttttttaagtatagctcatttacaatgttgtaccaatttttgctgtacatcaaagtgacccagtcatgcat

SEQ ID NO: 58628 - DNA, 110 bp, synthetic construct
  source 1..110: mol_type = other DNA
tggtaatgaaatagtctaacctcttttttgttcccctctttgtgctgcttagtttagcttcgctcatgtagagggcttgcaccaggccctccagacctgagctcctagca

SEQ ID NO: 58629 - DNA, 110 bp, synthetic construct
  source 1..110: mol_type = other DNA
agcttcgctcatgtagagggcttgcaccaggccctccagacctgagctcctagcaggagatggctgctccccacactgcagctccatgaacagccactgcctgggatctg

SEQ ID NO: 58630 - DNA, 110 bp, synthetic construct
  source 1..110: mol_type = other DNA
acatgggaacaaggttttctttaaaaataaaataattcagagttagagatggccctgatagtggagtgagaagaccctgaacacacctccttccacagacagaccagaat

SEQ ID NO: 58631 - DNA, 110 bp, synthetic construct
  source 1..110: mol_type = other DNA
tgatagtggagtgagaagaccctgaacacacctccttccacagacagaccagaattacaatttatagaataatgacctatgagaatgacctgaagtttagcagaaaagat

SEQ ID NO: 58632 - DNA, 110 bp, synthetic construct
  source 1..110: mol_type = other DNA
tgaggggcatctgcaaagctgcccaagccaccaagaaagaaggggtgagcaatatcacactgccaccagagggcctcagtgcggtactggccctgcgactgtgcccttgg

SEQ ID NO: 58633 - DNA, 110 bp, synthetic construct
  source 1..110: mol_type = other DNA
cacactgccaccagagggcctcagtgcggtactggccctgcgactgtgcccttggtcctgatcccccttctcctgtcctgaccctgacgaagtcagaaacaagggccagt

SEQ ID NO: 58634 - DNA, 110 bp, synthetic construct
  source 1..110: mol_type = other DNA
agaatatacattcttctcgagtgcacatggaatattccctcttgggccacaaatcaagcctcggtaaatttaaaagactgaaattacatcaagtatcttttccaacgaca

SEQ ID NO: 58635 - DNA, 110 bp, synthetic construct; identical to SEQ ID NO: 58634
  source 1..110: mol_type = other DNA

SEQ ID NO: 58636 - DNA, 110 bp, synthetic construct
  source 1..110: mol_type = other DNA
agccaggcctcccatccaccagctgcagaaaacccaattttgtccaccctccctcatagccatctttttagcttgaggttgtgtccatgtggctattagaccaaagaggc

SEQ ID NO: 58637 - DNA, 110 bp, synthetic construct
  source 1..110: mol_type = other DNA
atagccatctttttagcttgaggttgtgtccatgtggctattagaccaaagaggccttacacatatgaaaatataaaaaggaaaacttaccagttaaagccattgtattc

SEQ ID NO: 58638 - DNA, 110 bp, synthetic construct
  source 1..110: mol_type = other DNA
tgtgtatttctagaaagcttgagagcccatttgaaagcttggaaaatccctgacgccaagcacaaggcctgatatacagcaggtattcaacaaatgtttgtggaaatgaa

SEQ ID NO: 58639 - DNA, 110 bp, synthetic construct
  source 1..110: mol_type = other DNA
atttctaaggtacctccatactgttctccacagtggctgaaccaactattacttttggaatggattaacaatgagagcctcaatgtagcactgagaactatgtctagata

SEQ ID NO: 58640 - DNA, 110 bp, synthetic construct; identical to SEQ ID NO: 58639
  source 1..110: mol_type = other DNA

SEQ ID NO: 58641 - DNA, 110 bp, synthetic construct
  source 1..110: mol_type = other DNA
gaactcaaactttaaattgcaaattaggaggagctcctctcagatcaccctccatcacaaacaggggctcagtatttcctggccacacattgtcacctgactgcctgctg

SEQ ID NO: 58642 - DNA, 110 bp, synthetic construct; identical to SEQ ID NO: 58641
  source 1..110: mol_type = other DNA

SEQ ID NO: 58643 - DNA, 110 bp, synthetic construct
  source 1..110: mol_type = other DNA
gcaggcaggcaggcaggccggccagccagccactggctacctagcatccattccattcccctcttcccccttcctaatagagccctgatttttatctggtattcattcct

SEQ ID NO: 58644 - DNA, 110 bp, synthetic construct; identical to SEQ ID NO: 58643
  source 1..110: mol_type = other DNA

SEQ ID NO: 58645 - DNA, 110 bp, synthetic construct
  source 1..110: mol_type = other DNA
ccctgctctatctcactggccaacacctattcattctacaaagcccagctcaaatatccagtccctttgttcatccaactaatatttcttgacgttcccagggcacagca

SEQ ID NO: 58646 - DNA, 110 bp, synthetic construct
  source 1..110: mol_type = other DNA
cctattcattctacaaagcccagctcaaatatccagtccctttgttcatccaactaatatttcttgacgttcccagggcacagcagaaacgaatccaactaggaaccatg

SEQ ID NO: 58647 - DNA, 110 bp, synthetic construct
  source 1..110: mol_type = other DNA
tagcacaggagtcacaatccttgcaagcttcctgtttcctctgagtgtccctccgccaccgctgtcctgatggggctggggactgaccaaggagcaggcagcctgtcact

SEQ ID NO: 58648 - DNA, 110 bp, synthetic construct
  source 1..110: mol_type = other DNA
ggagttcctgctgtgctgcagtgggttaggaatcctaactacagctggattgctgtggaggcacaggttcaatccctggcctggcacactgggttaaaggatctggcatt

SEQ ID NO: 58649 - DNA, 110 bp, synthetic construct
  source 1..110: mol_type = other DNA
tggaggcacaggttcaatccctggcctggcacactgggttaaaggatctggcattgccactgctgcagtacaggttgtagctgtacaaccttggattcaatccctagcct

SEQ ID NO: 58650 - DNA, 110 bp, synthetic construct
  source 1..110: mol_type = other DNA
gattaacctgcgtcctcatggatattagccagatttgtttccactgagctatgacaggaactccagatgactagaattttaaaactatgtaaatgtacattctcgcacaa

SEQ ID NO: 58651 - DNA, 110 bp, synthetic construct; identical to SEQ ID NO: 58650
  source 1..110: mol_type = other DNA

SEQ ID NO: 58652 - DNA, 110 bp, synthetic construct
  source 1..110: mol_type = other DNA
aagaaacattcctggctccttttatcatgtaaattcaaatatgggaggaatggaactacaatctgtcctgacttcaaatacaaaagctaccattaattggtcttgattat

SEQ ID NO: 58653 - DNA, 110 bp, synthetic construct
  source 1..110: mol_type = other DNA
tatcccacaaaaagaaagggatcacccagtctgaaattatattctagtagagatcaaagtaagaacatgcagataaacgtgaaaaaattccaataaaagatacctgacaa

SEQ ID NO: 58654 - DNA, 110 bp, synthetic construct
  source 1..110: mol_type = other DNA
ctcaccgacatctgaggtactggtggtcacctcaaaagaatgtaccttcggcagcggtgttgggtagtgttccagaaatgccagtaacctccagtctgttgataacactg

SEQ ID NO: 58655 - DNA, 110 bp, synthetic construct
  source 1..110: mol_type = other DNA
aaaagaaatgatagatttgatttgggccctaaaacaataggcatgaactattcttctttacacttcctttcatagttagaactcgggcatggctactatcagttcccatc

SEQ ID NO: 58656 - DNA, 110 bp, synthetic construct
  source 1..110: mol_type = other DNA
caaaacaagaccctgcctttctgactccttagctaatgggtggatattcgggagccaatccaaggaaaggccctaatccagccgctccatgggtcaaagaggatcaccaa

SEQ ID NO: 58657 - DNA, 110 bp, synthetic construct
  source 1..110: mol_type = other DNA
caatccaaggaaaggccctaatccagccgctccatgggtcaaagaggatcaccaaagtgagcagttttgactcttcggacggacggacttagctgaagcgggaggacaca

SEQ ID NO: 58658 - DNA, 110 bp, synthetic construct
  source 1..110: mol_type = other DNA
ctagtcggattcgtcaaccactgtgccatgacgggaactactctttctttttttaaggctcacctgtggcatatggactttctcaggggtcgaatcggctacagctgtcg

SEQ ID NO: 58659 - DNA, 110 bp, synthetic construct
  source 1..110: mol_type = other DNA
aactactctttctttttttaaggctcacctgtggcatatggactttctcaggggtcgaatcggctacagctgtcggcctgcgccagaggcacagcaacaccagatctgag

SEQ ID NO: 58660 - DNA, 110 bp, synthetic construct
  source 1..110: mol_type = other DNA
aaaccaatgataggagacggctctggcctaaatatagttttaggaataccaagataacaggtcgtagttaaaactgtaggagtaggggttccagttgtggtgcagcggaa

SEQ ID NO: 58661 - DNA, 110 bp, synthetic construct
  source 1..110: mol_type = other DNA
ataccaagataacaggtcgtagttaaaactgtaggagtaggggttccagttgtggtgcagcggaaataattcgattagtatccacgaggatgagggttcaatccctggcc

SEQ ID NO: 58662 - DNA, 110 bp, synthetic construct
  source 1..110: mol_type = other DNA
acatctctcactttcaatcaaaagctggaaatgatgaagcttagtgaggtaggcatgtcgaggcaggcctcttgcaccaaacagttgtccaagttatgattacaaaggaa

SEQ ID NO: 58663 - DNA, 110 bp, synthetic construct
  source 1..110: mol_type = other DNA
tgtcgaggcaggcctcttgcaccaaacagttgtccaagttatgattacaaaggaaaagttgttgacggaaattaaaagtgtgcctccagtgaatccatgaatgataagaa

SEQ ID NO: 58664 - DNA, 110 bp, synthetic construct
  source 1..110: mol_type = other DNA
ggtgccctccttagctcatgttgttacagtccagcttacccttaaaagcccagctggaccatccattaagtcctttctgagagctaagcttgctttcccccaagttcccg

SEQ ID NO: 58665 - DNA, 110 bp, synthetic construct
  source 1..110: mol_type = other DNA
ggaccatccattaagtcctttctgagagctaagcttgctttcccccaagttcccgccatacattgcatggcctgctaggcttttccagactgaatttatctgtggctgct

SEQ ID NO: 58666 - DNA, 110 bp, synthetic construct
  source 1..110: mol_type = other DNA
acgacgggaactcccaatctgttttaatataaacattttctttcattaatattagagaacatagctctcggaagatgtgtggtgttttccactcctcggtagaagccagt

SEQ ID NO: 58667 - DNA, 110 bp, synthetic construct
  source 1..110: mol_type = other DNA
agaacatagctctcggaagatgtgtggtgttttccactcctcggtagaagccagtttgagtggcaaggcagcaaagtatttgttggattttattatttgtaaaattcttt

SEQ ID NO: 58668 - DNA, 110 bp, synthetic construct
  source 1..110: mol_type = other DNA
cccccatgcctttttttgttttttgtttttttttttgatatgttggttgtctagtagcatgttgtttagtctccacatttgtattctttgccgtttttccccttgctctt

SEQ ID NO: 58669 - DNA, 110 bp, synthetic construct
  source 1..110: mol_type = other DNA
gttgtctagtagcatgttgtttagtctccacatttgtattctttgccgtttttccccttgctcttgatttcttgtctcgcagcgttgtggtcagaaaagatgcttgctat

SEQ ID NO: 58670 - DNA, 110 bp, synthetic construct
  source 1..110: mol_type = other DNA
ttgaagattaattgactataggtgtgtgggttcaattcggggctctcttttctgttccattgatccatatgtcaatatactgttttaattactgtagctttgtagtatta

SEQ ID NO: 58671 - DNA, 110 bp, synthetic construct; identical to SEQ ID NO: 58670
  source 1..110: mol_type = other DNA

SEQ ID NO: 58672 - DNA, 110 bp, synthetic construct
  source 1..110: mol_type = other DNA
ctctaggctcccagtgaaccggacgtttgttagcagatcgatgtcttcatcaccccattagatctgcaggatgaactctccaatggcagaggagagggggttcatgcttg

SEQ ID NO: 58673 - DNA, 110 bp, synthetic construct
  source 1..110: mol_type = other DNA
cattagatctgcaggatgaactctccaatggcagaggagagggggttcatgcttggggacggagacgccccagcgccagggctgaacccaagctgctgcctgagaaaaca

SEQ ID NO: 58674 - DNA, 110 bp, synthetic construct
  source 1..110: mol_type = other DNA
tcatttgaatgttgctgggcagctaccagtgatacaaatgtgaggacagacaacagggtcatgttctcatccccaggtctctcacacatctctccccattcccacacttt

SEQ ID NO: 58675 - DNA, 110 bp, synthetic construct
  source 1..110: mol_type = other DNA
aatgtgtcctatactgggacccagaaccagtttgctaccacaagaatgactcaggggtcctttccacatgctctttccagtctatcatgtgggaaccactgtcatgtacc

SEQ ID NO: 58676 - DNA, 110 bp, synthetic construct
  source 1..110: mol_type = other DNA
ggtcctttccacatgctctttccagtctatcatgtgggaaccactgtcatgtacccaagggagcagcccaggcagaggaaacagcatgtgcaaaggtccccaggaggaag

SEQ ID NO: 58677 - DNA, 110 bp, synthetic construct
  source 1..110: mol_type = other DNA
agtcggattcatttccactgggccacaacgggaactcccaaaggcttctttttctttttttttttaaagtagagttactgtacaatattacgtaagttacaggtgtaatt

SEQ ID NO: 58678 - DNA, 110 bp, synthetic construct; identical to SEQ ID NO: 58677
  source 1..110: mol_type = other DNA

SEQ ID NO: 58679 - DNA, 110 bp, synthetic construct
  source 1..110: mol_type = other DNA
ctgcctggcacaggtccttgcacctggcagacattttaagcattcattgcacaataacttcctacaaggataagataatgccattttgttctcttcgggataatatagat

SEQ ID NO: 58680 - DNA, 110 bp, synthetic construct
  source 1..110: mol_type = other DNA
aacttcctacaaggataagataatgccattttgttctcttcgggataatatagatccctttgtatccaccatgacacagattcatcaatttaggatcaggcagctttaga

SEQ ID NO: 58681 - DNA, 110 bp, synthetic construct
  source 1..110: mol_type = other DNA
gcttccagaactccgggatcttctccgggaacacactgccagaggtgcctttgttaccattttaagaggtgggaagagtgacgcatagaatttaagaaaatatggccaag

SEQ ID NO: 58682 - DNA, 110 bp, synthetic construct
  source 1..110: mol_type = other DNA
accattttaagaggtgggaagagtgacgcatagaatttaagaaaatatggccaagggtaaaagaaattaaatcgagggaaagccccagactctgaactgcctaaccccag

SEQ ID NO: 58683 - DNA, 110 bp, synthetic construct
  source 1..110: mol_type = other DNA
ccactaccaccatcacagcacttaccagttgagggtcaaagtgtgataaacactgggctttacatagtatctaattctcacagcagctccgcaaggtggccatgaaattt

SEQ ID NO: 58684 - DNA, 110 bp, synthetic construct
  source 1..110: mol_type = other DNA
ggctttacatagtatctaattctcacagcagctccgcaaggtggccatgaaatttatctttctgattaggaagtggaggctcagacattaagctcccaagactaatacgt

SEQ ID NO: 58685 - DNA, 110 bp, synthetic construct
  source 1..110: mol_type = other DNA
tctcactgctcagccttcccacctgcctaagtctgggctagcccaaagcatggaggcctcttggcaggcaagagttcccatatagagctcacattccaaacaataaaggc

SEQ ID NO: 58686 - DNA, 110 bp, synthetic construct
  source 1..110: mol_type = other DNA
gcctcttggcaggcaagagttcccatatagagctcacattccaaacaataaaggcagaaactgtgctgtttaggacctacccagggatgtctcccttgctctactggtga

SEQ ID NO: 58687 - DNA, 110 bp, synthetic construct
  source 1..110: mol_type = other DNA
attatcattatttctaccttacaagtgaagaacggaggctcagagaagttaaataacttgcctgaggtcacactgttggtaaaggcagagcctgaacttgaacccaagtc

SEQ ID NO: 58688 - DNA, 110 bp, synthetic construct
  source 1..110: mol_type = other DNA
acttgcctgaggtcacactgttggtaaaggcagagcctgaacttgaacccaagtctactaggaagcccttgatttctccagggctacaagaactacatcataaattgcct

SEQ ID NO: 58689 - DNA, 110 bp, synthetic construct
  source 1..110: mol_type = other DNA
aaagggtttgatcccttcaagaaatctagatccctttcttttctcttttctgtaaaatgtcaaatgaaaggtaagcatcaggtgggaagaaaatcagagctacaaaatca

SEQ ID NO: 58690 - DNA, 110 bp, synthetic construct
  source 1..110: mol_type = other DNA
aatgtcaaatgaaaggtaagcatcaggtgggaagaaaatcagagctacaaaatcagagcaaatagcatttccccttttatggctttagtgcagaacatggtgacagagag

SEQ ID NO: 58691 - DNA, 110 bp, synthetic construct
  source 1..110: mol_type = other DNA
ttggcgctaccccagagcactgctctgagatgcagactctgctcagggtattgagggaaagagcaagcagagcccaggccccaggcaggtgcgcaggagcagagcacaaa

SEQ ID NO: 58692 - DNA, 110 bp, synthetic construct
  source 1..110: mol_type = other DNA
ggaaagagcaagcagagcccaggccccaggcaggtgcgcaggagcagagcacaaagtgaggggctggaggtcagaactgggacatggaacataggctgtttcaggaataa

SEQ ID NO: 58693 - DNA, 110 bp, synthetic construct
  source 1..110: mol_type = other DNA
ttaacacatggctgggtgctggggatgcaaagacaaagtaaccctggcccctgtctgacagagctccagacccgggcccctcgaatctggaaacctatttgagttacctg

SEQ ID NO: 58694 - DNA, 110 bp, synthetic construct
  source 1..110: mol_type = other DNA
tgacagagctccagacccgggcccctcgaatctggaaacctatttgagttacctgtgatgattttaggaagtattagtgctcacatcccacctcggagcagttaagtcag

SEQ ID NO: 58695 - DNA, 110 bp, synthetic construct
  source 1..110: mol_type = other DNA
acccgctgtgcgcttgatcccaggctccacctgtctatgactggtccgcaaggtggagttaagacccccaagaggctctgagtgatgagcacctacgggagctgtggttc

SEQ ID NO: 58696 - DNA, 110 bp, synthetic construct
  source 1..110: mol_type = other DNA
gagttaagacccccaagaggctctgagtgatgagcacctacgggagctgtggttcctcccgcctgttcagggctggagaccgacttcacgctgagcacgggacagcctca

SEQ ID NO: 58697 - DNA, 110 bp, synthetic construct
  source 1..110: mol_type = other DNA
cccaatttttttcctccaccagagcatgagctccttgaagacagggaccacatggccctcactgctgtactgccagccctgagcatgggtgctactcgctgctgcaaggg

SEQ ID NO: 58698 - DNA, 110 bp, synthetic construct
  source 1..110: mol_type = other DNA
gtcctgccaggaccgcagagcaagtagcttctgaggagcccctcgcaaggctcggaaaaacccagcctaaactcctgtcctacattttcaaagttaagtggcctttggcc

SEQ ID NO: 58699 - DNA, 110 bp, synthetic construct
  source 1..110: mol_type = other DNA
agcccaggcaggtgttgcctggatggtagggagagacagccaccatcaacgtgctttcactagccttccgacgagcttctggccggaagtgacagccaagggacacaagt

SEQ ID NO: 58700 - DNA, 110 bp, synthetic construct
  source 1..110: mol_type = other DNA
ttcactagccttccgacgagcttctggccggaagtgacagccaagggacacaagtgatggcctgtgaggtcgcagtgcagagcgttgggcagcaggctaagcccccggct

SEQ ID NO: 58701 - DNA, 110 bp, synthetic construct
  source 1..110: mol_type = other DNA
cacacttctttggatatgatgctagaggaggaacttcctctcaaataagccatccaagcgggactgggctaaggggtggggatgtcactggaacccagctggtctcgaga

SEQ ID NO: 58702 - DNA, 110 bp, synthetic construct
  source 1..110: mol_type = other DNA
aagcgggactgggctaaggggtggggatgtcactggaacccagctggtctcgagaaagttcctattgctgcctccaatggccacttggcactttttttctgccttacact

SEQ ID NO: 58703 - DNA, 110 bp, synthetic construct
  source 1..110: mol_type = other DNA
cttgaggccccggggaagtgacaatggtgaagtgtattttagctgctggcacatatcttcctactgcatccactactcggggtcagcaaggttatctacccccaagtgga

SEQ ID NO: 58704 - DNA, 110 bp, synthetic construct
  source 1..110: mol_type = other DNA
gatgccaaaactgtggaaatgacaaatgtggaaaacagaaaaggaaacctcatgattatacagccctggccttcccgttcatattttgttggtgatgttttcctgaggcc

SEQ ID NO: 58705 - DNA, 110 bp, synthetic construct
  source 1..110: mol_type = other DNA
ttaggagaatcatctggaatccatcagtgaccagggctttgggaggcttggcaaatgctcagttacctggctttgcagacgacgattttctaggtttgggggataaagat

SEQ ID NO: 58706 - DNA, 110 bp, synthetic construct
  source 1..110: mol_type = other DNA
tgctcagttacctggctttgcagacgacgattttctaggtttgggggataaagattaaactctttacaatacggtacatgtttgctgcttgctataaagcatcgatattc

SEQ ID NO: 58707 - DNA, 110 bp, synthetic construct
  source 1..110: mol_type = other DNA
aggcagcctggctctgtgggcagagtccttggggccccgatctctgggagctcgagggtgaaaggactgcccttctctttttttgtggctgcctgctcatcttttcacaa

SEQ ID NO: 58708 - DNA, 110 bp, synthetic construct
  source 1..110: mol_type = other DNA
gggtgaaaggactgcccttctctttttttgtggctgcctgctcatcttttcacaaataccgaattcagtcctgccaactgcatcctgaggttaagagctattaacctacg

SEQ ID NO: 58709 - DNA, 110 bp, synthetic construct
  source 1..110: mol_type = other DNA
ataggataagtagctgccatttactgagcttgcatcaaactctttgctggtaaaatagttcatctaatcctcagcaaccaccctctgcgatgggtattattattattatc

SEQ ID NO: 58710 - DNA, 110 bp, synthetic construct
  source 1..110: mol_type = other DNA
tagttcatctaatcctcagcaaccaccctctgcgatgggtattattattattatcaccattcttcagatgagaaaactgaggtctcagaaggaaacctgcctaaagtcac

SEQ ID NO: 58711 - DNA, 110 bp, synthetic construct; identical to SEQ ID NO: 58709
  source 1..110: mol_type = other DNA

SEQ ID NO: 58712 - DNA, 110 bp, synthetic construct; identical to SEQ ID NO: 58710
  source 1..110: mol_type = other DNA

SEQ ID NO: 58713 - DNA, 110 bp, synthetic construct
  source 1..110: mol_type = other DNA
agctgggctggggatcaaacctgtctcctggtgctgcagagaagccactgatcccatcgcacaacagcaagaactccaaccatgtaatttttttttttggctccacccac

SEQ ID NO: 58714 - DNA, 110 bp, synthetic construct
  source 1..110: mol_type = other DNA
atcgcacaacagcaagaactccaaccatgtaatttttttttttggctccacccacagccagggattgaaccctcgccagagcagtgacctgagccactgcagtgacaaca

SEQ ID NO: 58715 - DNA, 110 bp, synthetic construct
  source 1..110: mol_type = other DNA
agtatcttgggttctatgaggttggaacaggccaagagccacttccctggacaaacctgagcttacagggggaaacatgcctcgcatgtgtcttctggtaggaagttggt

SEQ ID NO: 58716 - DNA, 110 bp, synthetic construct
  source 1..110: mol_type = other DNA
cctgagcttacagggggaaacatgcctcgcatgtgtcttctggtaggaagttggtccctgggcacctcatggattcaggggaattgaaagtcatgttggctcaaattaaa

SEQ ID NO: 58717 - DNA, 110 bp, synthetic construct
  source 1..110: mol_type = other DNA
aagcggtttcgggtgaacgtcagcaggctgcccatcactggcctccggccctgctcggtggccaaggagacattcttctggccggagcctgggtcagaccaggtgtgaaa

SEQ ID NO: 58718 - DNA, 110 bp, synthetic construct
  source 1..110: mol_type = other DNA
cggtggccaaggagacattcttctggccggagcctgggtcagaccaggtgtgaaacgctgtgaacatcaccctatgtgccacaccgcagtctgcccgcctctgctgcaga

SEQ ID NO: 58719 - DNA, 110 bp, synthetic construct
  source 1..110: mol_type = other DNA
catttaaaccttaccatgcccctgaaccattcttacatgacaaatgaaagaaactgggattcagagaggtcaagtgtcttgctcagaggggcccagtaaggaaggagcac

SEQ ID NO: 58720 - DNA, 110 bp, synthetic construct
  source 1..110: mol_type = other DNA
gggattcagagaggtcaagtgtcttgctcagaggggcccagtaaggaaggagcacagccaggattcaaacctgggtctgcgtgaccctcaggctcaagctttaaatcaga

SEQ ID NO: 58721 - DNA, 110 bp, synthetic construct
  source 1..110: mol_type = other DNA
cgcagatactatgtcagattcttaacccgctgagccacagtggaaactcctccaagacttggtttctaatcctggctccaaaacatggggaaatgagtgaatttctctga

SEQ ID NO: 58722 - DNA, 110 bp, synthetic construct; identical to SEQ ID NO: 58721
  source 1..110: mol_type = other DNA

SEQ ID NO: 58723 - DNA, 110 bp, synthetic construct
  source 1..110: mol_type = other DNA
gggctcacctgtgtttacctggggagcagaggagcaccatttcctaattcatacaaaacactgggttctgctggtcaggctggctgttgtgaaggggagactttttaatg

SEQ ID NO: 58724 - DNA, 110 bp, synthetic construct
  source 1..110: mol_type = other DNA
aaacactgggttctgctggtcaggctggctgttgtgaaggggagactttttaatggaagaactggctcaggggactgttcagttcccttctagcactaatctctctctct

SEQ ID NO: 58725 - DNA, 110 bp, synthetic construct
  source 1..110: mol_type = other DNA
gactcggcaagttggcactgggccatgggtaccgctctcggaattcaactgtctgtgtccccctcccccatcaacactcttgctagaagccagacgaagctgtggggcct

SEQ ID NO: 58726 - DNA, 110 bp, synthetic construct
  source 1..110: mol_type = other DNA
tgtccccctcccccatcaacactcttgctagaagccagacgaagctgtggggccttgagaaagaaacatctagaggctgtcttcccagcacaaagccctcattgttggag

SEQ ID NO: 58727 - DNA, 110 bp, synthetic construct
  source 1..110: mol_type = other DNA
ggagggggctatgatggtggtgtccccgttagaaaccctgcagatgagtaagattagccgggggtgggggcaagttggcagaggcttacccagtgatctcccaagcagac

SEQ ID NO: 58728 - DNA, 110 bp, synthetic construct
  source 1..110: mol_type = other DNA
agccgggggtgggggcaagttggcagaggcttacccagtgatctcccaagcagacctgcccctcgcctcccccctgagcccgcaaagctctgtaatggtgcagcagaggc

SEQ ID NO: 58729 - DNA, 110 bp, synthetic construct
  source 1..110: mol_type = other DNA
tattagcatctgactgcagagaagccattgctacccctctctctgagataccctagcagaagctaaaaaaatgcctggaatggctgctttgcaccccaagctactagcac

SEQ ID NO: 58730 - DNA, 110 bp, synthetic construct
  source 1..110: mol_type = other DNA
ctcatctccccaacattttactccctgttgaagagcaggctatgagaacacccgttcaaatgccaaaaccatcggcggaacagtgtgctgttatcagaaacaagtgctcg

SEQ ID NO: 58731 - DNA, 110 bp, synthetic construct
  source 1..110: mol_type = other DNA
tcaaatgccaaaaccatcggcggaacagtgtgctgttatcagaaacaagtgctcgggagctaggaaatctggtttcaaaggcagtgctcacctttgcacgcggtgtggcc

SEQ ID NO: 58732 - DNA, 110 bp, synthetic construct
  source 1..110: mol_type = other DNA
gacctcagggagcttccagactagtgaggaatataagacaagttcacgtgtaaccgcacctccgttactagctcgtctatgccggacccttcagaatgcggctgcctctc

SEQ ID NO: 58733 - DNA, 110 bp, synthetic construct
  source 1..110: mol_type = other DNA
gcacctccgttactagctcgtctatgccggacccttcagaatgcggctgcctctccagcacacactcaagaaatgctctctggtctcctggattttcttctttttaatca

SEQ ID NO: 58734 - DNA, 110 bp, synthetic construct
  source 1..110: mol_type = other DNA
gtcattattttgagattgatccatactgttgagtttatcaagaatgcattccttttttactgctgagtaatattcccttttatggatatatcacaatttgtccacctagt

SEQ ID NO: 58735 - DNA, 110 bp, synthetic construct
  source 1..110: mol_type = other DNA
tttactgctgagtaatattcccttttatggatatatcacaatttgtccacctagtcaactgctgatggacatttgggtcatttatcgtttttggctgtgaccaattaagc

SEQ ID NO: 58736 - DNA, 110 bp, synthetic construct
  source 1..110: mol_type = other DNA
tttgggattaacatacacacatcactacatatggaatagatgaccaacaaggacctactctgtagcacagggaattagactcatatcttaaaataacctgtaatggaaaa

SEQ ID NO: 58737 - DNA, 110 bp, synthetic construct; identical to SEQ ID NO: 58736
  source 1..110: mol_type = other DNA

SEQ ID NO: 58738 - DNA, 110 bp, synthetic construct
  source 1..110: mol_type = other DNA
aagcaaatgctcaatttgttctaatgatgcaagaggtagaaagagcctctggaagccctagttacctgataacattcatggtgttcatcctttgccacagctcagactct

SEQ ID NO: 58739 - DNA, 110 bp, synthetic construct
  source 1..110: mol_type = other DNA
ccctagttacctgataacattcatggtgttcatcctttgccacagctcagactctattctgatattaaaaacaagctccaaaatgctgcacgtgagtatctgatctcaga

SEQ ID NO: 58740 - DNA, 110 bp, synthetic construct
  source 1..110: mol_type = other DNA
gaccaaaacagaggttggattgatgcgattaaggatggaagagggccacgagacaaggaatgggggccgcttccagaagctcgaaaagatgaggaaatgaatttccctgc

SEQ ID NO: 58741 - DNA, 110 bp, synthetic construct
  source 1..110: mol_type = other DNA
aggaatgggggccgcttccagaagctcgaaaagatgaggaaatgaatttccctgcagagcttccagcaggaacacagtcctgctgacgcttattaaacgtctgatgttca

SEQ ID NO: 58742 - DNA, 110 bp, synthetic construct
  source 1..110: mol_type = other DNA
gaatgtgccagagttggatttaccctcttcccaggaacagctcttttctctccgacccttatctttgtctgacttgaagcctcaaaaaaataaatgcgtcggatctgcat

SEQ ID NO: 58743 - DNA, 110 bp, synthetic construct
  source 1..110: mol_type = other DNA
cccttatctttgtctgacttgaagcctcaaaaaaataaatgcgtcggatctgcatctttccgtagggttggaaaatgactttcctatttctcctctctttctttgccttc

SEQ ID NO: 58744 - DNA, 110 bp, synthetic construct
  source 1..110: mol_type = other DNA
aaatgcatctattttgaccccaagtttaggacacttgccactacaaacaccgacttttaaaagctctgcccctgtcatttggtatttctccgcagcctttgaaggagctg

SEQ ID NO: 58745 - DNA, 110 bp, synthetic construct
  source 1..110: mol_type = other DNA
tttaaaagctctgcccctgtcatttggtatttctccgcagcctttgaaggagctgaagattaagagcatgaatcagagcagaccaagtggagattgctctctgtcttcaa

SEQ ID NO: 58746 - DNA, 110 bp, synthetic construct
  source 1..110: mol_type = other DNA
gcctggtccccattagccactctgagtacacagaaggcagctgacagcctggacctcatgggagggaagcctgaacactgcctggaaaagcctaattgtaccctgagaat

SEQ ID NO: 58747 - DNA, 110 bp, synthetic construct
  source 1..110: mol_type = other DNA
agctgaaacgtcacaactgtctctgaagagttatacaatcgcttcctcaaatcgcagagttacaaagagctcaaagagaactgttattatgccacacgcacctcactcta

SEQ ID NO: 58748 - DNA, 110 bp, synthetic construct
  source 1..110: mol_type = other DNA
ttatttcttattcattcaccctgctacacatacgggccggacatactgcttgcatcaacatcctgagtgggggccgagcatgataacgctgaaaatgagtccactgaagc

SEQ ID NO: 58749 - DNA, 110 bp, synthetic construct
  source 1..110: mol_type = other DNA
caacatcctgagtgggggccgagcatgataacgctgaaaatgagtccactgaagccagagaagttaaaggtaactgctctggcaatacagatcgtaagtgaggagacctc

SEQ ID NO: 58750 - DNA, 110 bp, synthetic construct
  source 1..110: mol_type = other DNA
ggagtcagacacctactttgtgagacaaacagtgtggctggcactgtacacgagttactttggaaaaatcccacccaagagtgattacccctccttaggagctgaggttt

SEQ ID NO: 58751 - DNA, 110 bp, synthetic construct
  source 1..110: mol_type = other DNA
tactttggaaaaatcccacccaagagtgattacccctccttaggagctgaggtttgcaaggctaagtgaattgcccaagaagaaatcatgcattaagcggcaaaggcagg

SEQ ID NO: 58752 - DNA, 110 bp, synthetic construct
  source 1..110: mol_type = other DNA
atcctctcacttgggcatctgagggtggtagaaatgcgtagtcttagattccagtgcagcctctgtggtttttcagccccagtgatggtccttgtccccactcctcaaga

SEQ ID NO: 58753 - DNA, 110 bp, synthetic construct
  source 1..110: mol_type = other DNA
gcagcctctgtggtttttcagccccagtgatggtccttgtccccactcctcaagagcgtgagtacctggagtaattatctatttatttatttagggccacaccattggca

SEQ ID NO: 58754 - DNA, 110 bp, synthetic construct
  source 1..110: mol_type = other DNA
gtgggcatgtgactgagtgccagccaatggaattgtgtctaagctatgcctactgcttctagactggtgtataaaaatcctatcattcatgttctttcttcatttttggc

SEQ ID NO: 58755 - DNA, 110 bp, synthetic construct
  source 1..110: mol_type = other DNA
cctgctttgagaatgtgaaccaactgatcattttggctgaggcaaagtccaggtaaagtaatgaggcattgaggtggaatggcccaaaggcctggagggggagtgaaccc

SEQ ID NO: 58756 - DNA, 110 bp, synthetic construct
  source 1..110: mol_type = other DNA
gacttgaaattttgcctgacatataataagagctacgatgtgttcttattgcacagaaaaatgaaagaaactcctggaataaaattttcataaggcaagtcatagtatat

SEQ ID NO: 58757 - DNA, 110 bp, synthetic construct
  source 1..110: mol_type = other DNA
ggtggtaaaaaaaagaaaaaaaaaaaaaaaaaaaaaacggaactgagagtcccagatggccacagaaacgggttcctctgacctttctgtagcacctctcctcacctcca

SEQ ID NO: 58758 - DNA, 110 bp, synthetic construct
  source 1..110: mol_type = other DNA
atggccacagaaacgggttcctctgacctttctgtagcacctctcctcacctccaaagggggctgtgccattgtcagagacgcatgcctcatggaaggctctataaccag

SEQ ID NO: 58759 - DNA, 110 bp, synthetic construct
  source 1..110: mol_type = other DNA
ttcttgctgtctctatgtatgccctgatattccttcatataaggacaccagtcggattgattagggtccattctaatggcctcattttaacttaattaccttcaaaggcc

SEQ ID NO: 58760 - DNA, 110 bp, synthetic construct
  source 1..110: mol_type = other DNA
gacacagaaccatgaatgggtgtgagctggaccgggaggatggaggagccaaagcagagaaagccccagtttcctcacagaggctggccgggttccaaggatgagcagcc

SEQ ID NO: 58761 - DNA, 110 bp, synthetic construct
  source 1..110: mol_type = other DNA
agagaaagccccagtttcctcacagaggctggccgggttccaaggatgagcagcccaagagaaacaaacgcagcatttcatcacccataagccatggatggggaagtcac

SEQ ID NO: 58762 - DNA, 110 bp, synthetic construct
  source 1..110: mol_type = other DNA
ttaaggtagcaagagaaaaacaaaaaagtcatatgcaaaagaatgccccactccccatggctatcagctcatttttctgcagaaacattgcaggcagagagagtagtgga

SEQ ID NO: 58763 - DNA, 110 bp, synthetic construct
  source 1..110: mol_type = other DNA
aaaattatttgcaaaacatgcatttgatgaagaatagtgaccaagatacatacaacctctacacctaggtatttatccaggacaaataaaaacatacatttacaaaggag

SEQ ID NO: 58764 - DNA, 110 bp, synthetic construct
  source 1..110: mol_type = other DNA
agtgaccaagatacatacaacctctacacctaggtatttatccaggacaaataaaaacatacatttacaaaggagtgtacaagactatttctaccaattttattcctttt

SEQ ID NO: 58765 - DNA, 110 bp, synthetic construct
  source 1..110: mol_type = other DNA
atgccaaggaagtggccctggaaaaggcaaaaaaaaaaaaaaagggactaggaactcccattgtggctcaatggagaatgaaactgaatagtatctatgaggttgtgcat

SEQ ID NO: 58766 - DNA, 110 bp, synthetic construct
  source 1..110: mol_type = other DNA
ggcaaaaaaaaaaaaaaagggactaggaactcccattgtggctcaatggagaatgaaactgaatagtatctatgaggttgtgcatctgatccctggcctcattcagtggg

SEQ ID NO: 58767 - DNA, 110 bp, synthetic construct
  source 1..110: mol_type = other DNA
ctagaatcagagtctcttgtttttcccacaaagtcccccttttttcctcttacaagaaaccctatcaaaagcctttaacagtgtataggcactgtggattgtaggtgata

SEQ ID NO: 58768 - DNA, 110 bp, synthetic construct
  source 1..110: mol_type = other DNA
gaaaccctatcaaaagcctttaacagtgtataggcactgtggattgtaggtgataaagagcaaagttagagagtcaagtacaacccaattaggtagatgcagaggctaaa

SEQ ID NO: 58769 - DNA, 110 bp, synthetic construct
  source 1..110: mol_type = other DNA
aaccggggaacctaggcactaatactgcccctctgtacacagaattccacatcttttaacaatgcagaaaggagccattgtatgtttcacaccggtgtaaattacaccat

SEQ ID NO: 58770 - DNA, 110 bp, synthetic construct
  source 1..110: mol_type = other DNA
ttaacaatgcagaaaggagccattgtatgtttcacaccggtgtaaattacaccataaatattcattagagctcaagactggaaacacatgctacttttctagatgatgag

SEQ ID NO: 58771 - DNA, 110 bp, synthetic construct
  source 1..110: mol_type = other DNA
ctttttcaactataaactcagaaacaaagagaaggaggttgcacatttggaaaactagccatggccaatgagcacagaggaaccagggacagaggaagcaagccctgggc

SEQ ID NO: 58772 - DNA, 110 bp, synthetic construct
  source 1..110: mol_type = other DNA
tagccatggccaatgagcacagaggaaccagggacagaggaagcaagccctgggctcagagggtagacttcacacggacgaggcagcatctctactctcttatttattta

SEQ ID NO: 58773 - DNA, 110 bp, synthetic construct
  source 1..110: mol_type = other DNA
aggtggccttagctcctgcttttcaaggtcttaagtcacaagagggccatgaattagctcttcttttggtgctagagagttttagcaaatgatcattccaaataaaatgt

SEQ ID NO: 58774 - DNA, 110 bp, synthetic construct
  source 1..110: mol_type = other DNA
atcttccttcggcaagtcagcgttccatctaggcacctcttctgaagaagggatttaatctcaaaaatatgcaaacagcgcatatagctcaacaacaaaaaaacaaacaa

SEQ ID NO: 58775 - DNA, 110 bp, synthetic construct
  source 1..110: mol_type = other DNA
cctcatatttgggatatcgacttaacaacaatcctaagtacgtactatatgttggcttcattccacaagcttacagaaagcaacccagtgattcatatctttccttcctt

SEQ ID NO: 58776 - DNA, 110 bp, synthetic construct
  source 1..110: mol_type = other DNA
cttcattccacaagcttacagaaagcaacccagtgattcatatctttccttccttccatccatccattcatccatccatccatctatctgctgatcttcctgctcatctg

SEQ ID NO: 58777 - DNA, 110 bp, synthetic construct
  source 1..110: mol_type = other DNA
aaaaaaaaaaatactattgtgctattctcttctggcctgcagattttatgcaggaaagtcagctgatagccttatgggagttgctttgtatataattagttggatttcct

SEQ ID NO: 58778 - DNA, 110 bp, synthetic construct
  source 1..110: mol_type = other DNA
aagtcagctgatagccttatgggagttgctttgtatataattagttggatttcctttgctgcttttaatattctatctttaattcctgtcattttaattacaatgtgtct

SEQ ID NO: 58779 - DNA, 110 bp, synthetic construct
  source 1..110: mol_type = other DNA
ccattgattcaaggcacaagcttccttgacttacccaaagcagtgtttataaatggataaggactaaaaacaggaaattctgataattatagggcatcacaacacacaat

SEQ ID NO: 58780 - DNA, 110 bp, synthetic construct
  source 1..110: mol_type = other DNA
attcacttggttgtggtggtctgcaaccgaacctacaatgttgctaagcatgactgtgcatgcaatcaatagtaaccctctatgtccataatcaaccataaaatgcaaaa

SEQ ID NO: 58781 - DNA, 110 bp, synthetic construct
  source 1..110: mol_type = other DNA
ctcttcctatgctctatatatggaacaataaagcctggatgagggcatatctgtttacagaaagatttactgcatatattaaacccactgcatatttgacgcctatttct

SEQ ID NO: 58782 - DNA, 110 bp, synthetic construct
  source 1..110: mol_type = other DNA
tacagaaagatttactgcatatattaaacccactgcatatttgacgcctatttctcagaaaagcaaaaaagattcctttcaaaatatgactgttcattgacaagacaact

SEQ ID NO: 58783 - DNA, 110 bp, synthetic construct
  source 1..110: mol_type = other DNA
cacattatctattcacacacattaatgttttgttatgactgactgatttgctaagatcaagtgtccaggcaatgagcatctttccataacacttgtacctgataacagaa

SEQ ID NO: 58784 - DNA, 110 bp, synthetic construct
  source 1..110: mol_type = other DNA
atcaagtgtccaggcaatgagcatctttccataacacttgtacctgataacagaacaaatactaataagttatgcttgtgttaattgagtcattggcaaaagatttttct

SEQ ID NO: 58785 - DNA, 110 bp, synthetic construct
  source 1..110: mol_type = other DNA
ggatcaaccattttatcatctttggcaataaccacactgtggtacctagaatctgctgacaaagttctcagataagtacagggatcctaggaattctatcagattatctt

SEQ ID NO: 58786 - DNA, 110 bp, synthetic construct
  source 1..110: mol_type = other DNA
ggactgatagacacacgctactacatgtaaaatggataggtaacaaggacctattgtatagcacagggttatgtactcaatattgtgtaataacttatatgggaaaagaa

SEQ ID NO: 58787 - DNA, 110 bp, synthetic construct; identical to SEQ ID NO: 58786
  source 1..110: mol_type = other DNA

SEQ ID NO: 58788 - DNA, 110 bp, synthetic construct
  source 1..110: mol_type = other DNA
tgctgctgcatctgctgctgtagccaaggccactcctctcactggcattattgtcacttcttgctgctatctccctccccactcccatccactgtaggttgcattagctc

SEQ ID NO: 58789 - DNA, 110 bp, synthetic construct
  source 1..110: mol_type = other DNA
acttcttgctgctatctccctccccactcccatccactgtaggttgcattagctcagccttgctctgtaccaggcactttgctaggtgttttatatgtgtcacaacttac

SEQ ID NO: 58790 - DNA, 110 bp, synthetic construct
  source 1..110: mol_type = other DNA
aaactgtagtattattttctctccctttgcagtttcctcatttgtactgggagcacaagtgggttgtcttctaaatagagctatagtatttttattcttcaacagagaaa

SEQ ID NO: 58791 - DNA, 110 bp, synthetic construct
  source 1..110: mol_type = other DNA
cctcatttgtactgggagcacaagtgggttgtcttctaaatagagctatagtatttttattcttcaacagagaaactaaggcatttttattttttgtggataatttttaa

SEQ ID NO: 58792 - DNA, 110 bp, synthetic construct
  source 1..110: mol_type = other DNA
agggaaaagacaattctattcatagagctgagatgcagggaagatcagaaatggttttgagggacttttcaccttagatccctcaaggcgtttcatgagggtaaaatatg

SEQ ID NO: 58793 - DNA, 110 bp, synthetic construct
  source 1..110: mol_type = other DNA
tgtccctctaaaagctgtgtttaagtcctaaacctaggcgactgtgaatgttacctcatttggatatagagtttttgcagctgcagttgagaggaagtcttgattcctag

SEQ ID NO: 58794 - DNA, 110 bp, synthetic construct
  source 1..110: mol_type = other DNA
tcatttggatatagagtttttgcagctgcagttgagaggaagtcttgattcctagaatgggtcctaatccaatgactagtgcccatgtaaactgagagaatttgggcaca

SEQ ID NO: 58795 - DNA, 110 bp, synthetic construct
  source 1..110: mol_type = other DNA
tttttttttttttttaatacttttcattatattccacaacaaagctttctctgtttgcaccatgcttgctaaagccccactatccttaatgagttttatggccaagtcta

SEQ ID NO: 58796 - DNA, 110 bp, synthetic construct
  source 1..110: mol_type = other DNA
ttaccttgtatattctatgcttcagctctaaaactggccacttatccaaggaggctgggataatactattctgttggagaatagcattagaaaccaagatcaaggcactg

SEQ ID NO: 58797 - DNA, 110 bp, synthetic construct
  source 1..110: mol_type = other DNA
acccagcagcagccaatgttgacatttgttgtatggtcttcaacttagaccattcatactcttgactttatatcctcagtttcatcttaaagagctttttttcttttaac

SEQ ID NO: 58798 - DNA, 110 bp, synthetic construct; identical to SEQ ID NO: 58797
  source 1..110: mol_type = other DNA

SEQ ID NO: 58799 - DNA, 110 bp, synthetic construct
  source 1..110: mol_type = other DNA
cttgtagacatttttgacagattctacaccctggataaggcagcacccagcactgctgttctccatctgaaattttaaattcaaatttccttctctttgaccacaagcta

SEQ ID NO: 58800 - DNA, 110 bp, synthetic construct
  source 1..110: mol_type = other DNA
ataagctggatttcattaaaatttaaaaaaatatacatctgttctgtgaaatacaatgccaaaaggatgagaaggctagacatggactggggggaaatatttgcaaagac

SEQ ID NO: 58801 - DNA, 110 bp, synthetic construct; identical to SEQ ID NO: 58800
  source 1..110: mol_type = other DNA

SEQ ID NO: 58802 - DNA, 110 bp, synthetic construct
  source 1..110: mol_type = other DNA
tgaaaaccgtcataacaaacaaaagagggacaaagtcagcttttagggaaaaatatgtttatgactaaaatatcctactaaatcacaatatggtttagccacaaaacatt

SEQ ID NO: 58803 - DNA, 110 bp, synthetic construct
  source 1..110: mol_type = other DNA
aaaaaaaggaacatagtaccaaagaacattgacttcattggccaagaacacatagacttaatcttgtctcaggcactgcatccttacattgcctttctgaactttctaag

SEQ ID NO: 58804 - DNA, 110 bp, synthetic construct
  source 1..110: mol_type = other DNA
cttgatcttgagtgtggcagctttcagcagccaaggcaatctctgaaggagctgacagctgaaggctctaataaggctgctgcctgacagcacatcagcagctgggaaat

SEQ ID NO: 58805 - DNA, 110 bp, synthetic construct
  source 1..110: mol_type = other DNA
cttctcacacacactcagtcccagcctagggcattactccaacaactccttctctcctgcttcatacactttctctttccagcgaaacatttctctcattaacacaagca

SEQ ID NO: 58806 - DNA, 110 bp, synthetic construct
  source 1..110: mol_type = other DNA
cctgcttcatacactttctctttccagcgaaacatttctctcattaacacaagcacactataatttataacaaagttacaaacctctcttgggcacacgtttttttcatc

SEQ ID NO: 58807 - DNA, 110 bp, synthetic construct
  source 1..110: mol_type = other DNA
actggcctatgaaacatgtttggaaacctgagcacttataatgtgcgacatgcaactgatgcatgagattacagcaggagagtggggtgaggtagaaaggtccaaaagta

SEQ ID NO: 58808 - DNA, 110 bp, synthetic construct
  source 1..110: mol_type = other DNA
agtaaaaagtcactggtgatggccatacacaagtggtcaaaaacacagctataggtaagcagagtgcctcagatgacagcaagggctaactaaacacctgtgaacttatt

SEQ ID NO: 58809 - DNA, 110 bp, synthetic construct
  source 1..110: mol_type = other DNA
gttactcttatttatactatgaggttaataacagaatccttctaaggatggtgctgaggaataataaggaaattcatataggaaatttattaaagggcctgcaggtggta

SEQ ID NO: 58810 - DNA, 110 bp, synthetic construct
  source 1..110: mol_type = other DNA
gaggaataataaggaaattcatataggaaatttattaaagggcctgcaggtggtaaacagtcagtacatgttagaaatgatgacaaggagaaggagaaggatgacataat

SEQ ID NO: 58811 - DNA, 110 bp, synthetic construct
  source 1..110: mol_type = other DNA
ccccatctgggaagcacatcgccttgacctctatgtccattgtcccaactccttttgccttcagccttcccacttccctcttctaagggtctttgtgattacattcagtt

SEQ ID NO: 58812 - DNA, 110 bp, synthetic construct
  source 1..110: mol_type = other DNA
tgccttcagccttcccacttccctcttctaagggtctttgtgattacattcagttcacccagattaatccaggataatcttcccgtttcaagattattaacttcatcaca

SEQ ID NO: 58813 - DNA, 110 bp, synthetic construct
  source 1..110: mol_type = other DNA
atccatttccagaactttattcattttcccgaactgatattctgtaccctttaaacaataattccccatttgctcttctgcacagcctctgttaacctctattgtacttt

SEQ ID NO: 58814 - DNA, 110 bp, synthetic construct
  source 1..110: mol_type = other DNA
caataattccccatttgctcttctgcacagcctctgttaacctctattgtactttctgtctctacgaatttgaggatcggaaaaggcaaaaaatatggaggcagtaaaaa

SEQ ID NO: 58815 - DNA, 110 bp, synthetic construct
  source 1..110: mol_type = other DNA
ctaactaaagtaactcttgcttcctgtttaatccaatctgccagcaatcgagagaaataatcctgcaatggcagattcggcttcagctcgactgctttgctgaaacactg

SEQ ID NO: 58816 - DNA, 110 bp, synthetic construct
  source 1..110: mol_type = other DNA
aataatcctgcaatggcagattcggcttcagctcgactgctttgctgaaacactgtgcccatgtcatgtgaaccttattgatatcagatgagaatgaaatatgacaaaat

SEQ ID NO: 58817 - DNA, 110 bp, synthetic construct
  source 1..110: mol_type = other DNA
gtatcccacatacagttacattggggatccaagttccactgtattttcatacactggaggagcacaattcagtccatagccacctgaatatgtacacataaaaaagataa

SEQ ID NO: 58818 - DNA, 110 bp, synthetic construct
  source 1..110: mol_type = other DNA
ttcatacactggaggagcacaattcagtccatagccacctgaatatgtacacataaaaaagataataataaatattttgtttgttgtctattgttgaatatccttcaatg

SEQ ID NO: 58819 - DNA, 110 bp, synthetic construct
  source 1..110: mol_type = other DNA
atgcattgattttccctctaggacctcttattctatattagctcttacctcatttccctctatcttccttgtgtttgtgtgtgtatccatcacaagatttaaacactatc

SEQ ID NO: 58820 - DNA, 110 bp, synthetic construct
  source 1..110: mol_type = other DNA
ccctctatcttccttgtgtttgtgtgtgtatccatcacaagatttaaacactatctcttcctagaatcttctccctaggcttctagacagggagggggacttcccttgca

SEQ ID NO: 58821 - DNA, 110 bp, synthetic construct
  source 1..110: mol_type = other DNA
tctaacatctggcaagtggtagacctgagcttaaaaccaaagccatgctaattccaggacaaacagtgctgtgttgtcacagcggtcctagaccaggaagccaggaggcc

SEQ ID NO: 58822 - DNA, 110 bp, synthetic construct
  source 1..110: mol_type = other DNA
aggacaaacagtgctgtgttgtcacagcggtcctagaccaggaagccaggaggcctaattgaagatgagttgtgataagcttaggctttggactcaagagtgttgacgtt

SEQ ID NO: 58823 - DNA, 110 bp, synthetic construct
  source 1..110: mol_type = other DNA
cgaagacaacaatcaaaacatctaaagacccgctcagatgattttaaaagtaccgtccagattctcttagcaggagcagtgcaaaaatgttatagccactctattgtcag

SEQ ID NO: 58824 - DNA, 110 bp, synthetic construct
  source 1..110: mol_type = other DNA
ttcctgggccaggatcaaatgcaagtgacaacagtaacaatgccaagtccttttcttctatgccaaaagggaactccagtgctgtttttatttaaaaaacaaaacaaaac

SEQ ID NO: 58825 - DNA, 110 bp, synthetic construct
  source 1..110: mol_type = other DNA
ttctatgccaaaagggaactccagtgctgtttttatttaaaaaacaaaacaaaacaaaaaaagattcttctctattgcattctctgtaattctaatccagggtgttcctt

SEQ ID NO: 58826 - DNA, 110 bp, synthetic construct
  source 1..110: mol_type = other DNA
gacacaggatgcttgtctgcaatggcggccagacttagcaaataaaaatacaaaatgcctgttaaatttgattttcatatgaatgtttttcagtataactatgtcccaaa

SEQ ID NO: 58827 - DNA, 110 bp, synthetic construct
  source 1..110: mol_type = other DNA
tccccttccccaacttttaaccaataaaagcaattcgagaatgtaacttttctctaaatctgtacatatatctgtgagtgtgtgcgtatacacatacataataaaatcat

SEQ ID NO: 58828 - DNA, 110 bp, synthetic construct
  source 1..110: mol_type = other DNA
ttaacctttgtgaaaccttctttcaggagaatggaaatttgctggtatggtattttagttgatctaacacctgccatatttttcctgagtattctgtcactggacctagc

SEQ ID NO: 58829 - DNA, 110 bp, synthetic construct
  source 1..110: mol_type = other DNA
ctaagtcccatatcttctctcatttctcccttctctgatcttagagaccttgtggatctataccatttaaattaatgcttgaccttgtttcattatatatagtcttacat

SEQ ID NO: 58830 - DNA, 110 bp, synthetic construct
  source 1..110: mol_type = other DNA
agcagatctgattttagtaatcttggactttctcatgaaggcctttgaatttaacatgttgttgcaggtatcactatgcttgatgttggtaggcatgcagctttgttcag

SEQ ID NO: 58831 - DNA, 110 bp, synthetic construct
  source 1..110: mol_type = other DNA
atgttgttgcaggtatcactatgcttgatgttggtaggcatgcagctttgttcagtgacgatgtacaagcaaacgactttagtacttgtattattttgttagggctgcca

SEQ ID NO: 58832 - DNA, 110 bp, synthetic construct
  source 1..110: mol_type = other DNA
gaatttgcttcttaactcagtaaagtcatgggtaggagtatgacatggaggaaaaaagactgggtttgagaatccacaagctctcaatccaagctggctctataccttat

SEQ ID NO: 58833 - DNA, 110 bp, synthetic construct
  source 1..110: mol_type = other DNA
aaaaacaggtaatctgactatgctgtacttgttcacaaaccctatgactctccattgtccttaggataaaggccaacatttttttttttttttttgtctgtttccctttt

SEQ ID NO: 58834 - DNA, 110 bp, synthetic construct
  source 1..110: mol_type = other DNA
cctttccttgcaataggcataatagtatcatctaaatgtcttggaaatcatgtacttgttgtttaaaattagatcgccaattttgattcagttagtagaacagcagttgg

SEQ ID NO: 58835 - DNA, 110 bp, synthetic construct
  source 1..110: mol_type = other DNA
aggtgatcaaagtgtacaaatttccaattataagatgagtaactttgggggatgtaatgtacaatgtggttctatatttaaccatacagtattgtatatttgaaagttgc

SEQ ID NO: 58836 - DNA, 110 bp, synthetic construct
  source 1..110: mol_type = other DNA
aatgtacaatgtggttctatatttaaccatacagtattgtatatttgaaagttgctaagagagcagatctgaaaagttcttatcaacacatgtgagatgtgaaatgatgg

SEQ ID NO: 58837 - DNA, 110 bp, synthetic construct
  source 1..110: mol_type = other DNA
gaaaatcagggattacaaaatggccttcaaaatctagggttagagcacttctcgaaaggcaaagaaatcagtattgagtctgcaaaaatttattttaaagaaagaaaaaa

SEQ ID NO: 58838 - DNA, 110 bp, synthetic construct
  source 1..110: mol_type = other DNA
ctgaccccaggaatatcatgggaaggggaggcaacattttaagggttgtgcaaggtatgtaggggtgcagtgtatggtcaggacacccaagatggctgttcttttgctct

SEQ ID NO: 58839 - DNA, 110 bp, synthetic construct
  source 1..110: mol_type = other DNA
tatgtaggggtgcagtgtatggtcaggacacccaagatggctgttcttttgctctctgtacatcccctgctcagccagtgcctcttcacctataccctgctcacttgatt

SEQ ID NO: 58840 - DNA, 110 bp, synthetic construct
  source 1..110: mol_type = other DNA
gccatttggggtttatttttgggtgtggtgtgagagtgtgttctaatgtcactgatttcaggcagatgttcagctttcccattacatgctgaagagactaccttttctcc

SEQ ID NO: 58841 - DNA, 110 bp, synthetic construct
  source 1..110: mol_type = other DNA
cctgcctgctgatgggtgtgtttgtgtcccttcccattttgttatttggcctgaggcaccccagcactggtcctatagtctgttcagtgttgccaggtcttggaactaat

SEQ ID NO: 58842 - DNA, 110 bp, synthetic construct
  source 1..110: mol_type = other DNA
gcaccccagcactggtcctatagtctgttcagtgttgccaggtcttggaactaattagctaagatgtcaatttatcagcaatagcagtgttcacagaactgaatattcct

SEQ ID NO: 58843 - DNA, 110 bp, synthetic construct
  source 1..110: mol_type = other DNA
ttgagaatgggatatgttcaacagaaacatgtcggcaagagcaacttgcaagacttgtgttttgcaaacctaggtctatagggatagctacttgggattgtacatatttt

SEQ ID NO: 58844 - DNA, 110 bp, synthetic construct
  source 1..110: mol_type = other DNA
aaagagaataaaatttacttgctgcgcataacaaatcttacagaaccggagagatgaagcagcttacaccttgcttatgatcccagaacaaataagcactatcactagaa

SEQ ID NO: 58845 - DNA, 110 bp, synthetic construct
  source 1..110: mol_type = other DNA
gaagcagcttacaccttgcttatgatcccagaacaaataagcactatcactagaaagaaagtaggctctcctggccctgatttgaataatcaaaaactaacactatgtta

SEQ ID NO: 58846 - DNA, 110 bp, synthetic construct
  source 1..110: mol_type = other DNA
ctacccacaagcacatagacctcagatgtgttggaaccacaagatagacatggctgagtcccaacgacctcaccactgatcaatccaaagaatgtccatgaactgatcac

SEQ ID NO: 58847 - DNA, 110 bp, synthetic construct
  source 1..110: mol_type = other DNA
atgtccctagagaagtaggaccagactatcatgggagtgatggttacactagaatcaacatagtaaaaattaaaagcaggcattgaactcttctgcaatgcaatgcatac

SEQ ID NO: 58848 - DNA, 110 bp, synthetic construct
  source 1..110: mol_type = other DNA
agatagaaagacttctgacctttgctcatgaatttgtttgtggcatggaggatgttttcaactctttctgctctgattaccccagctttccagatccccaggcatgaatg

SEQ ID NO: 58849 - DNA, 110 bp, synthetic construct
  source 1..110: mol_type = other DNA
cactactgttctttttggaactataaaaggtcctgagatctaatcattttttctggctcctgaatatccttttcctgaatcagcactctttccattatgccttgtaacca

SEQ ID NO: 58850 - DNA, 110 bp, synthetic construct
  source 1..110: mol_type = other DNA
tactatagatctcagcactccatctttgcatactatctggaattgaagcattgtctattgatgctgctataagaaggatactatagactgagtggctttagctttgtaaa

SEQ ID NO: 58851 - DNA, 110 bp, synthetic construct
  source 1..110: mol_type = other DNA
tattgatgctgctataagaaggatactatagactgagtggctttagctttgtaaacaacagaattttaattctcaaaattctgaaggctgggacatccaagagcaaggta

SEQ ID NO: 58852 - DNA, 110 bp, synthetic construct
  source 1..110: mol_type = other DNA
gaaatttctgcactttatcactgattccacagttctgaagagctgaaaatttgtaggcactagtgttgatggtactagaattgttgtttgcacttattacccctatgaaa

SEQ ID NO: 58853 - DNA, 110 bp, synthetic construct
  source 1..110: mol_type = other DNA
tctgggcagcaagcccctaggacctcagacatccattctctctgttttagacaccagactgtgtcactaagtcaagtcagttctattgttgaaattcaatcgcataaatc

SEQ ID NO: 58854 - DNA, 110 bp, synthetic construct
  source 1..110: mol_type = other DNA
acatacataaaatcttcagagaagctctgtcaatattacttgaatagataagatgatatataagtagagagatgggcagattgacaataggatgtgacacattagaatac

SEQ ID NO: 58855 - DNA, 110 bp, synthetic construct; identical to SEQ ID NO: 58854
  source 1..110: mol_type = other DNA

SEQ ID NO: 58856 - DNA, 110 bp, synthetic construct
  source 1..110: mol_type = other DNA
ttccccaaaatggaaaggtggaaaacaggccaaattcataaagtcccagatgttcacatcccaaaccagacccaggttcatgtccgagtcagagctgggccttcaccaaa

SEQ ID NO: 58857 - DNA, 110 bp, synthetic construct
  source 1..110: mol_type = other DNA
acatcccaaaccagacccaggttcatgtccgagtcagagctgggccttcaccaaaggtaagggctcctgctgaggcaaatgacttgaaagcacgtgagagctagtgtctt

SEQ ID NO: 58858 - DNA, 110 bp, synthetic construct
  source 1..110: mol_type = other DNA
tttaagctttatgttaacatcgcttacttctctgcaatgctacaaaaacccaaaggatcaaatagctcatttgagctcgtcatgtttgctagcgtgaataatcctctacc

SEQ ID NO: 58859 - DNA, 110 bp, synthetic construct
  source 1..110: mol_type = other DNA
gatcaaatagctcatttgagctcgtcatgtttgctagcgtgaataatcctctacctctggtgtctctttaaagaagggggaaaaagccttcctatgtgaacaaaacccag

SEQ ID NO: 58860 - DNA, 110 bp, synthetic construct
  source 1..110: mol_type = other DNA
ggaatctagggaatgggggggagtttggtggacttcactgcttagaacaaaagtagtaggaatgttagctttcaggtcaggaaggagtcaagtctggaattcaaattttg

SEQ ID NO: 58861 - DNA, 110 bp, synthetic construct
  source 1..110: mol_type = other DNA
aaatcatcatgctgtacaccttaaacaaaccaaaaaaaaaaaaaaaagattcttagtggttgaaggactaaggaagacctgtattacataattcaggagaccagatctca

SEQ ID NO: 58862 - DNA, 110 bp, synthetic construct
  source 1..110: mol_type = other DNA
aatctagagggtgaataacttcctccatgcttgttatggatatggtcaaaggaccccaaagagttattcctggagaattccagacactggattggaatgcaaactcatat

SEQ ID NO: 58863 - DNA, 110 bp, synthetic construct
  source 1..110: mol_type = other DNA
ccaaagagttattcctggagaattccagacactggattggaatgcaaactcatattctgttgactatgtaactcaccaaaccccatgcagagagccctttggacacccta

SEQ ID NO: 58864 - DNA, 110 bp, synthetic construct
  source 1..110: mol_type = other DNA
aacctgtgtgataccattactaccatatgacagaagaaaaacctgaggctctgagttactattctgcccaagggcagcagctgaaaggacaatgcaggtcttgacattca

SEQ ID NO: 58865 - DNA, 110 bp, synthetic construct
  source 1..110: mol_type = other DNA
gaaaaacctgaggctctgagttactattctgcccaagggcagcagctgaaaggacaatgcaggtcttgacattcagttctggagttcccgttgtggctcagtggttaaca

SEQ ID NO: 58866 - DNA, 110 bp, synthetic construct
  source 1..110: mol_type = other DNA
aattctagatgataagtccagaatgtccatgagagttggtaggaaaaacaggagtcaaaatgaaggcctacaaggaccagcataacttgccctctctcaagctctcaaac

SEQ ID NO: 58867 - DNA, 110 bp, synthetic construct
  source 1..110: mol_type = other DNA
ggggggtagaatgaacttaaaggaagaaactgaaaatgatcaaaagttactcaatgcttccttctcagactggcatagaaatctttgatccactgcttcatatatctgac

SEQ ID NO: 58868 - DNA, 110 bp, synthetic construct
  source 1..110: mol_type = other DNA
ctgaggtcagagattgccagcaagacttaagttatgctgcagtgcctgtcagaacagtggtctgtggaggcaggaacagctgcctatctatgctaaagaaccggagctgg

SEQ ID NO: 58869 - DNA, 110 bp, synthetic construct
  source 1..110: mol_type = other DNA
taggcaggtcctcggtctacagttggagaaaggtagggtcctatcagcgggaccctatcaagttgttgtcccttgcccaggtatagccccagagctgggacaagatgaaa

SEQ ID NO: 58870 - DNA, 110 bp, synthetic construct
  source 1..110: mol_type = other DNA
tatcaagttgttgtcccttgcccaggtatagccccagagctgggacaagatgaaaaatccagccatgtcttaagagtcagatcatgggtgactcttggtttatttctact

SEQ ID NO: 58871 - DNA, 110 bp, synthetic construct
  source 1..110: mol_type = other DNA
aaatgaaatgatgaaagtttttaatggatactacatttatgttgctctgggagaatggcagagaatcagttaacttaacagcatctatgggttgggataagaaagggtca

SEQ ID NO: 58872 - DNA, 110 bp, synthetic construct
  source 1..110: mol_type = other DNA
gtggcggtgctgacattattattctggggctgctacacatattacaggggagaaggcaaatcagtaattatgccatggcactggggtagggaattctggcacaggagaaa

SEQ ID NO: 58873 - DNA, 110 bp, synthetic construct
  source 1..110: mol_type = other DNA
gcaaatcagtaattatgccatggcactggggtagggaattctggcacaggagaaaggaaatccagttataagattaatgaggttgagtgaaatttctgtagtcatgaatt

SEQ ID NO: 58874 - DNA, 110 bp, synthetic construct
  source 1..110: mol_type = other DNA
atgtcttttatgtgtgaacatctggctgaggtcctactagcagcagaggcctccactgttgcccagtcatgtacaaagtgggcttgaggagaggattaggacactgagac

SEQ ID NO: 58875 - DNA, 110 bp, synthetic construct
  source 1..110: mol_type = other DNA
ctgttgcccagtcatgtacaaagtgggcttgaggagaggattaggacactgagaccactcacagtgcagagtaagggagaacactgcagggaataacctatctagtgact

SEQ ID NO: 58876 - DNA, 110 bp, synthetic construct
  source 1..110: mol_type = other DNA
tttaagaattccaaacctttattaatctgacctacaggaccagagtttgcccagctgggcagagcttccctcggacgtcttatcttttagaaggtaaatgagaacaatat

SEQ ID NO: 58877 - DNA, 110 bp, synthetic construct
  source 1..110: mol_type = other DNA
cccagatgtatgcagatgacaattacaaaaagagttttatgaagaatgatcttatatatgtcatgctgcagataaatcagatgagtaggtttgtttcttttcttttcttt

SEQ ID NO: 58878 - DNA, 110 bp, synthetic construct
  source 1..110: mol_type = other DNA
atatgtcatgctgcagataaatcagatgagtaggtttgtttcttttcttttcttttttttttttttttttttttgctttttagggccacacccacagcacatgtcagttc

SEQ ID NO: 58879 - DNA, 110 bp, synthetic construct
  source 1..110: mol_type = other DNA
aaggtagaacctacattcattatgtggctcaaagaaatacatttttaagaaaatggaccttgtcagctatttagtttaaatctcaactctgctacttaactacttatgca

SEQ ID NO: 58880 - DNA, 110 bp, synthetic construct
  source 1..110: mol_type = other DNA
gaccttgtcagctatttagtttaaatctcaactctgctacttaactacttatgcagtttgggcgcagtaacaacttaagaatctgtttcacagcctcaaatgaggataac

SEQ ID NO: 58881 - DNA, 110 bp, synthetic construct
  source 1..110: mol_type = other DNA
atattccggcagtgacttttcatcttcatgtcaatgcaaactgttggcatgtttcatgagctttcttacagcagcagtttggtgtcatacacagagctttagagtgactc

SEQ ID NO: 58882 - DNA, 110 bp, synthetic construct
  source 1..110: mol_type = other DNA
gaaagcggttatggccaggggcagagaatgggaactttcattttttatttatatatgtatttgaattcttaagaataagcatgcattacttttgtaattttgtattttag

SEQ ID NO: 58883 - DNA, 110 bp, synthetic construct
  source 1..110: mol_type = other DNA
aagcagaggagagcaggacaagagttcttaaaagatctttcgtaagctgggctacggggccgtagtgagagggttcctttgtcactgggtctgactttgtgtcctttcct

SEQ ID NO: 58884 - DNA, 110 bp, synthetic construct
  source 1..110: mol_type = other DNA
tgcttacttttccaagggacatcatgaagcataataattaatccattctctctacttttgcagtgatccatctgataccagtttagccccgaggacacttaggtgtggag

SEQ ID NO: 58885 - DNA, 110 bp, synthetic construct
  source 1..110: mol_type = other DNA
tgcaaagaagtcattgttggaggtctatggcagaaccccaattacaagagtccgtaaccccctctcacactccaaccagctctcctcaaatgttctcttagtggctccaa

SEQ ID NO: 58886 - DNA, 110 bp, synthetic construct
  source 1..110: mol_type = other DNA
tccttctgtgtgctgacacatagagaacctgagtttcattaagtctcgagaccaggtatgggatttcaatgaaaagacattgagtttaagtcccagctcatgggttcaag

SEQ ID NO: 58887 - DNA, 110 bp, synthetic construct
  source 1..110: mol_type = other DNA
gtatgggatttcaatgaaaagacattgagtttaagtcccagctcatgggttcaagtcccaacccaagttgtggctgactctgaatcccatctgaggtgtgactgggttcg

SEQ ID NO: 58888 - DNA, 110 bp, synthetic construct
  source 1..110: mol_type = other DNA
ctttggtttttatagcagacgctctcttaactaacctccatgttactgccttgtcaagtaaactggggctatttcttctgtacgtgttctgatcgagagctgtgggaggt

SEQ ID NO: 58889 - DNA, 110 bp, synthetic construct
  source 1..110: mol_type = other DNA
aagtaaactggggctatttcttctgtacgtgttctgatcgagagctgtgggaggtttgcagctaagaagctactctctggtttgcatgcagactttcactcccactaatt

SEQ ID NO: 58890 - DNA, 110 bp, synthetic construct
  source 1..110: mol_type = other DNA
agcctttctctgtcccccatttcttatctgtaggaaacatgcttcattcagcctccttgactttctctgagttccaaagggtaggttcaaatagttgctaatcagagaag

SEQ ID NO: 58891 - DNA, 110 bp, synthetic construct
  source 1..110: mol_type = other DNA
cccatttcttatctgtaggaaacatgcttcattcagcctccttgactttctctgagttccaaagggtaggttcaaatagttgctaatcagagaagagaggggatgcagag

SEQ ID NO: 58892 - DNA, 110 bp, synthetic construct
  source 1..110: mol_type = other DNA
ttcagcctttggagggatgggggcccagagaagtatcttggaagcttcagcccctttggcagaggattttggagggaaagagaatgtctatagaatttgagaacatcaga

SEQ ID NO: 58893 - DNA, 110 bp, synthetic construct
  source 1..110: mol_type = other DNA
ttggcagaggattttggagggaaagagaatgtctatagaatttgagaacatcagagctgtaagggtattctccggagcagtgcctccttaggggtcactgtaaataatga

SEQ ID NO: 58894 - DNA, 110 bp, synthetic construct
  source 1..110: mol_type = other DNA
aagtgaatgaatgaatgaatggagagctagacagataaacataattatgaagaagtaaacacaggccatcatgggagcaagaaggtacaagcagacgggggtggcagggt

SEQ ID NO: 58895 - DNA, 110 bp, synthetic construct
  source 1..110: mol_type = other DNA
acagtggactaacaaccagtcataaaccacagacacaagccctgctctgcaactcaggattcagacccagttcagggttaatttctctgctctctccctccttgaaccac

SEQ ID NO: 58896 - DNA, 110 bp, synthetic construct
  source 1..110: mol_type = other DNA
tgaagccatgcattcgttctttcagtcatagttaataacacccattctgtgccaggcattatgctacctagggttttagtggcgaacaagaaaaacaaggccacttttgg

SEQ ID NO: 58897 - DNA, 110 bp, synthetic construct
  source 1..110: mol_type = other DNA
gcattatgctacctagggttttagtggcgaacaagaaaaacaaggccacttttggaatttagaggaaagacagatgtagaagaaataattaccggtatgacctatcttaa

SEQ ID NO: 58898 - DNA, 110 bp, synthetic construct
  source 1..110: mol_type = other DNA
ctcttagggcctcatgatttctagcttggatttactgtcacagctgaactagactccctatttccaggctcatcactcttaagtacttcctctgcactcagcaagaacca

SEQ ID NO: 58899 - DNA, 110 bp, synthetic construct
  source 1..110: mol_type = other DNA
gaaagccagtgtgaactggtcacgggggacatggcctatcctggcaagtactccgatgcttgagaaatccctctcaatcaagggagaccaatctaaattcagtgtaggcc

SEQ ID NO: 58900 - DNA, 110 bp, synthetic construct
  source 1..110: mol_type = other DNA
atgcttgagaaatccctctcaatcaagggagaccaatctaaattcagtgtaggccggggaggtgggtttggtcaccagacttggacgtacttttattgctggtcccccct

SEQ ID NO: 58901 - DNA, 110 bp, synthetic construct
  source 1..110: mol_type = other DNA
ttaatttgggtctcacagatatattcactttgcatttatgacactgttataattgtttgcttttttttggctccccctgctaggataatgctccatggaggaaggtacga

SEQ ID NO: 58902 - DNA, 110 bp, synthetic construct
  source 1..110: mol_type = other DNA
tttgcttttttttggctccccctgctaggataatgctccatggaggaaggtacgatgtcttacttaactttgtgcactaagctcctactagagtacttaacacataatag

SEQ ID NO: 58903 - DNA, 110 bp, synthetic construct
  source 1..110: mol_type = other DNA
acctccagtcccaacctgtgccctgaacgtcagaccttcatatccagctgcattcaacatccaagcatctccatctgtctaacaggctttcatatttaaagtgtcccaaa

SEQ ID NO: 58904 - DNA, 110 bp, synthetic construct
  source 1..110: mol_type = other DNA
aacatccaagcatctccatctgtctaacaggctttcatatttaaagtgtcccaaagcaaccctgtggatcccaccccaccccccacccctactgtactcctaaaaggtac

SEQ ID NO: 58905 - DNA, 110 bp, synthetic construct
  source 1..110: mol_type = other DNA
ttatccaaatcctactggactccatagcacagtacagcatagatgaagctgtgcatgaatcatgtgtgaaacccagctctgacacttaatggctggtggtctggggtaga

SEQ ID NO: 58906 - DNA, 110 bp, synthetic construct
  source 1..110: mol_type = other DNA
tgaatcatgtgtgaaacccagctctgacacttaatggctggtggtctggggtagattacttgcttcaagtctcagttttctaatccatagaatggagagaatacaagtat

SEQ ID NO: 58907 - DNA, 110 bp, synthetic construct
  source 1..110: mol_type = other DNA
ggataattttcggggataagtatggtgccaggctctgactggagcagaaagggcccagggtctgctaaagtaagcccgtcgtcgagggttgtgatgctagctgtcattta

SEQ ID NO: 58908 - DNA, 110 bp, synthetic construct
  source 1..110: mol_type = other DNA
cagggtctgctaaagtaagcccgtcgtcgagggttgtgatgctagctgtcatttatgccgctgtctatactccagacattctaaatccatttccacctaatccttccaga

SEQ ID NO: 58909 - DNA, 110 bp, synthetic construct
  source 1..110: mol_type = other DNA
tggcagagtagatatcgtgtccttacctgagtctcttgttgatgtgatcctggagcagaattagggaaggcactgccagctgtccaaatgcaggcctagccctctcattg

SEQ ID NO: 58910 - DNA, 110 bp, synthetic construct
  source 1..110: mol_type = other DNA
cagaattagggaaggcactgccagctgtccaaatgcaggcctagccctctcattggaggcctcgctctctccagatagcatttctatattattattattattattttctt

SEQ ID NO: 58911 - DNA, 110 bp, synthetic construct
  source 1..110: mol_type = other DNA
tgttttcatcttgtttctgtcagtttgtaggtttgttaaaatattgggtatctgtggctgttgtttttgttgaagaatggagcggtagaaaggcctcaggagtgttgcat

SEQ ID NO: 58912 - DNA, 110 bp, synthetic construct
  source 1..110: mol_type = other DNA
ggctgttgtttttgttgaagaatggagcggtagaaaggcctcaggagtgttgcatataagggcaaaggttttctttactgaaaaccttcaagttagtgaagcaaacccca

SEQ ID NO: 58913 - DNA, 110 bp, synthetic construct
  source 1..110: mol_type = other DNA
tcaagtttttgcatgtgatttttctcttgctcagagtaactttccttccagtatctttcaggcaaatactcacagatgcttcagttctcagcttcagagttatattttct

SEQ ID NO: 58914 - DNA, 110 bp, synthetic construct
  source 1..110: mol_type = other DNA
tttcaggcaaatactcacagatgcttcagttctcagcttcagagttatattttctctgaagccatactgacctgtttccccatccctctttgatacccattcctacctag

SEQ ID NO: 58915 - DNA, 110 bp, synthetic construct
  source 1..110: mol_type = other DNA
gacgtatctgcttctatcttggttaaataaatcttgtccctccctgatgctaataccttttaaatatttatagactaatgacaaggtcctatcaattttgctatttcatt

SEQ ID NO: 58916 - DNA, 110 bp, synthetic construct
  source 1..110: mol_type = other DNA
gggaaagggctatgtccaatttatctttgtattcccaatatagtgcataatgcctgtcacaggcttactaagtagaccagtctctaaatattggaataaatgtacaataa

SEQ ID NO: 58917 - DNA, 110 bp, synthetic construct
  source 1..110: mol_type = other DNA
attgaattatgtctttgcttagctttgaaactcttcagcagctcatcactgctcacaggacaaagccaaaaatcctcagcttggcaaggaacaccctctatgatctgcag

SEQ ID NO: 58918 - DNA, 110 bp, synthetic construct
  source 1..110: mol_type = other DNA
tttttttcattgggactaaaaatcatgtatatcaattttaaaaatctttacagcaacctattctatgttgcatatctagttgtacaaagcatgcagcatgtgcctttgga

SEQ ID NO: 58919 - DNA, 110 bp, synthetic construct
  source 1..110: mol_type = other DNA
tatcccaatctcttgaacagagagttcccataagggggggccagtgcaaggggtttcctcgaaaggaacttctcttggtggtgaaataatccagctttcatcctggccat

SEQ ID NO: 58920 - DNA, 110 bp, synthetic construct
  source 1..110: mol_type = other DNA
tcctcgaaaggaacttctcttggtggtgaaataatccagctttcatcctggccattccttttctccctcgccgcactgcagtgataggcatgaactgtcttggactctac

SEQ ID NO: 58921 - DNA, 110 bp, synthetic construct
  source 1..110: mol_type = other DNA
ttctgctgcaccatggtgggaactccaatggcatttttttcttaatgaactgaatagagcttttggaaattagctcatgtttctagtgataaacatgaattaagggtaga

SEQ ID NO: 58922 - DNA, 110 bp, synthetic construct
  source 1..110: mol_type = other DNA
tggaagttcctggaccaaggatcaacccgtaaagttatttgtatatgtgtttctcttcctctagatttttagcagctggaggacaggggtactacatttgcaatccaatt

SEQ ID NO: 58923 - DNA, 110 bp, synthetic construct
  source 1..110: mol_type = other DNA
ttcctctagatttttagcagctggaggacaggggtactacatttgcaatccaattgttggagagagcaaatgctcagtaaatgtttgctgaattaaaataaactgaagac

SEQ ID NO: 58924 - DNA, 110 bp, synthetic construct
  source 1..110: mol_type = other DNA
taaggggattaacagacactggagccaatgtttctattatttgttatagtgattggcctccctgcatggcctttaattacccagacccaaacaagttgaggagattagga

SEQ ID NO: 58925 - DNA, 110 bp, synthetic construct
  source 1..110: mol_type = other DNA
gcctccctgcatggcctttaattacccagacccaaacaagttgaggagattaggagttcccactacagttcaaagtcagcagacctttcccaggtggaccaaaaggaaaa

SEQ ID NO: 58926 - DNA, 110 bp, synthetic construct
  source 1..110: mol_type = other DNA
tgatggtgccttgtcttacatttaagtcttgaagtcattttgattttgtttttgtgcatggtgcaagggtgtgctctacggtcactgatttacatgcagctgtccatttt

SEQ ID NO: 58927 - DNA, 110 bp, synthetic construct; identical to SEQ ID NO: 58926
  source 1..110: mol_type = other DNA

SEQ ID NO: 58928 - DNA, 110 bp, synthetic construct
  source 1..110: mol_type = other DNA
agtataagttctatgtagaggaaatagaatataaagtggaagcatgtaacaagagcacgatgcctaacagcttctcagaagaagcattatttaagctgaattcttttgga

SEQ ID NO: 58929 - DNA, 110 bp, synthetic construct
  source 1..110: mol_type = other DNA
aggcaatgtagacctcatatctgactgcactggcaaggtccttgtttcagaagacatggtttcaacaccatgtcaccctggataaatcactgctatgtgtaaaaatcctg

SEQ ID NO: 58930 - DNA, 110 bp, synthetic construct
  source 1..110: mol_type = other DNA
ccctctcagtggaacgtttttgtctatatttttgcacaatgtaataaaggctttgtacaatatttatgtacttcttttctcccattcatagttgacaaagcatgagctct

SEQ ID NO: 58931 - DNA, 110 bp, synthetic construct
  source 1..110: mol_type = other DNA
tacaatatttatgtacttcttttctcccattcatagttgacaaagcatgagctctagaatcaagacttttgagtacacattccaactctgatcgttcttagctttggacc

SEQ ID NO: 58932 - DNA, 110 bp, synthetic construct
  source 1..110: mol_type = other DNA
aagaactggacacggaagtcatggggccagacatactagcaatataaaaatcatacaaagtaaatagaccttaccctgtgccaggtatatgcaggtgcatttgatcatca

SEQ ID NO: 58933 - DNA, 110 bp, synthetic construct
  source 1..110: mol_type = other DNA
cttagtacgtgccgaacattttttagacagcttaatcctctcaacaatcccatgggatcaattctgttattactgtcagtttacagatgaggaaactgagaaatatctga

SEQ ID NO: 58934 - DNA, 110 bp, synthetic construct
  source 1..110: mol_type = other DNA
tttccagctgacctgatggatgtgccctagaagcacctcttgaccaaagaatgccatcacacagataattggaaaagaacttccttctctcactctaagtcacttgagat

SEQ ID NO: 58935 - DNA, 110 bp, synthetic construct
  source 1..110: mol_type = other DNA
gctttacatattttggtatttctttacaggcattttatttcctagagacttggacagtaggtaagtagccagccagcttttttccagcccttccttttcccatgaggtct

SEQ ID NO: 58936 - DNA, 110 bp, synthetic construct
  source 1..110: mol_type = other DNA
gttctgttggagcaggagaaggatccttaacataaaagcaaatttcagcttctatgacatccaaggaaaatcagtctgcagggaggaaaagttgcccatgaatccgggtg

SEQ ID NO: 58937 - DNA, 110 bp, synthetic construct
  source 1..110: mol_type = other DNA
gacatccaaggaaaatcagtctgcagggaggaaaagttgcccatgaatccgggtgttaggattccactgccccttcctccaggcatcaggtccaagtgaagatgttagct

SEQ ID NO: 58938 - DNA, 110 bp, synthetic construct
  source 1..110: mol_type = other DNA
aggggtcaagctcacatcctcatggatactagctgggtccttagccaactgaaccataacaggaactcctcaaggttttccacatatattctttacacacaggaatccat

SEQ ID NO: 58939 - DNA, 110 bp, synthetic construct
  source 1..110: mol_type = other DNA
ttctgacgtcaatttggagattttcatggattgtggcaataactgataactgattccagctggctttttccaaggaaatttagatcatttttccccctctttctcaatgt

SEQ ID NO: 58940 - DNA, 110 bp, synthetic construct
  source 1..110: mol_type = other DNA
cagatacttcagaaaagagctaaagcagagaaaatgtccctagaaggccccatggggtcctgctgggatttcaaatggcatctcaaattcttcctttgaaatgcgaactg

SEQ ID NO: 58941 - DNA, 110 bp, synthetic construct
  source 1..110: mol_type = other DNA
agtgcagggatctttttgtttgggttagtgttctaccctcaaggcctaacataggaatgacactcaataaatacccatagggttagtttagtgtttggagctctaactct

SEQ ID NO: 58942 - DNA, 110 bp, synthetic construct
  source 1..110: mol_type = other DNA
tgtacttttgcttcaagccctacaaacgttacagttggatctatctgggacacggtaactctgtgcaagtagttgctattataactatgccttcacaaggtgttgataca

SEQ ID NO: 58943 - DNA, 110 bp, synthetic construct
  source 1..110: mol_type = other DNA
aactttgactgactcaaggtctccaaatattctaagaaattcgaggcttgtgtgtttacacatgtctagatggccatcaaagctctcgtccatccctatctgtctgcgag

SEQ ID NO: 58944 - DNA, 110 bp, synthetic construct
  source 1..110: mol_type = other DNA
aatttattcctaagagaaagaagcttgtctgacttaatagctgtatcaccagcattttcagaacagtgcacagcatacagcagatgctaaataaaggccttttaaaatga

SEQ ID NO: 58945 - DNA, 110 bp, synthetic construct
  source 1..110: mol_type = other DNA
attccagcaagagttgaattactacatattgaatgtctactatatgccttacatatatggtttaacccttaaaataagcttgagaagtggctattattttcatattatcc

SEQ ID NO: 58946 - DNA, 110 bp, synthetic construct
  source 1..110: mol_type = other DNA
tcaccagactacctcaattgaacttctctgtcttcaaggcctgaaattagcaaagaacctgccaaaataaggtgaaaattgcttactgccctctttacaaaaggtgagat

SEQ ID NO: 58947 - DNA, 110 bp, synthetic construct
  source 1..110: mol_type = other DNA
ccaagcaaagaataattatcaaatttgagactacgcaactagagcatgattttgcatcattcctgtggccacactggagggcttaaggatagtctggtaaccaaagacaa

SEQ ID NO: 58948 - DNA, 110 bp, synthetic construct
  source 1..110: mol_type = other DNA
ttcaaagggagatagcaataattattttgagataggaacataagcagctcagtgtaagaaaagtactgaacttgaatgtacacagattcaaagactcaaattatgcctga

SEQ ID NO: 58949 - DNA, 110 bp, synthetic construct
  source 1..110: mol_type = other DNA
tgctattaaacttgaccaatattctacactctgataatgtcctattaaaattgatggattaaactggattcctagctcacactatacacaaaatcaatttttgttcagca

SEQ ID NO: 58950 - DNA, 110 bp, synthetic construct
  source 1..110: mol_type = other DNA
taagaccttagggtcaactcagatctttactgaatatgtgcagagctatacacatgcacttggccttctagttccataggaatatattagaggtcttcaaagtccttatt

SEQ ID NO: 58951 - DNA, 110 bp, synthetic construct
  source 1..110: mol_type = other DNA
aacacctccctgcacctatttccactagccccacccccccctccagattttcctctttcggatattagtttaaatgccacttcctccgggaaacctactcacacttttcc

SEQ ID NO: 58952 - DNA, 110 bp, synthetic construct
  source 1..110: mol_type = other DNA
tttcggatattagtttaaatgccacttcctccgggaaacctactcacacttttccgtggcttggttcggtttggcttttcttatgtgttttgttttgttgatgacacacg

SEQ ID NO: 58953 - DNA, 110 bp, synthetic construct
  source 1..110: mol_type = other DNA
attcttatctctcttttgcagatctgaaatggagacaagtcatttgtccaaggtacacagtttataggcaacacagagctggtccctgccctcgtgagacttgcaattta

SEQ ID NO: 58954 - DNA, 110 bp, synthetic construct
  source 1..110: mol_type = other DNA
cacagtttataggcaacacagagctggtccctgccctcgtgagacttgcaatttaatgggaaagcagacaattaaaccagtcgttaaaatgctgaatgttaatgcaagta

SEQ ID NO: 58955 - DNA, 110 bp, synthetic construct
  source 1..110: mol_type = other DNA
cctctgttcatcccacctctctgcttccttgtgctacaggtgcaaagctgagttcccaaagaacacgggcagcttcccatgcttgagtgcaggctgaagacccacagcat

SEQ ID NO: 58956 - DNA, 110 bp, synthetic construct
  source 1..110: mol_type = other DNA
ccaaagaacacgggcagcttcccatgcttgagtgcaggctgaagacccacagcatttaatgattcactggcagaacccaccgaagcgggctgccaacggaagaaggaatc

SEQ ID NO: 58957 - DNA, 110 bp, synthetic construct
  source 1..110: mol_type = other DNA
ctgagggctccaaaggcaggctgcacttaatgcagattttccgggtgtcattttgaaatgcaaagcgatgtcaaatcactgttgttaacaggaactgacatggtgttgta

SEQ ID NO: 58958 - DNA, 110 bp, synthetic construct
  source 1..110: mol_type = other DNA
tctgcacaaatgaaaaatcctatgaccaaaaaaaggttggagaatctgtggctggaatccagcaaacaattggacttccacactgtttcagtgggtgcgctccctcaatg

SEQ ID NO: 58959 - DNA, 110 bp, synthetic construct
  source 1..110: mol_type = other DNA
aatccagcaaacaattggacttccacactgtttcagtgggtgcgctccctcaatgcaaacatgaaccccgcaaaacatttgattaaaaataactatgtggtcggaaaaac

SEQ ID NO: 58960 - DNA, 110 bp, synthetic construct
  source 1..110: mol_type = other DNA
cccagccgcaactttgccaaggtctttagttttctcaggccagttagtaagtaactctttatttgtgagctggttaggtgtgatccctgcaggcttggaacatcctcagc

SEQ ID NO: 58961 - DNA, 110 bp, synthetic construct
  source 1..110: mol_type = other DNA
gttctctctgtttgaaaccctctctgctcccctccaggcctcattgtctttccagctttcctcctgcctgcctgactcctccgtaacatgtgggtctcagcagaggcctg

SEQ ID NO: 58962 - DNA, 110 bp, synthetic construct
  source 1..110: mol_type = other DNA
ctttcctcctgcctgcctgactcctccgtaacatgtgggtctcagcagaggcctgtctgttctgtcccctgtgcccaggacagtatctgatcaatagtaagtgctgagta

SEQ ID NO: 58963 - DNA, 110 bp, synthetic construct
  source 1..110: mol_type = other DNA
aagtaagactgctctttaacgaaggcttttggaaggatggcattattattgttgttggttgacttacataatcttatagctgattaatggcaaagccacatctagacttc

SEQ ID NO: 58964 - DNA, 110 bp, synthetic construct
  source 1..110: mol_type = other DNA
tggttgacttacataatcttatagctgattaatggcaaagccacatctagacttcaagacttccaacaccctcatagagattgtttaactaaatcgtgctcgccacccgg

SEQ ID NO: 58965 - DNA, 110 bp, synthetic construct
  source 1..110: mol_type = other DNA
tctgagcagccaagaatctaaaggcacaaagtcgcaatctccccagctcccaacggcagtgtcccacacttttctgggatttgtactttcacatactctcagtttctctg

SEQ ID NO: 58966 - DNA, 110 bp, synthetic construct
  source 1..110: mol_type = other DNA
tacatgtgttcaagtggaaaaggaatacaggttcattaccaaatgctcacacacatgttttcatggttttaaatggcattaaaaccataaagtaaccaagcagctggcat

SEQ ID NO: 58967 - DNA, 110 bp, synthetic construct
  source 1..110: mol_type = other DNA
acccctagaagtacttagttttcatcttaagaaagtagaaaatgagtagttagtaagacagaaaaaaacccacttggacatacgcatatattctgctctagagtagtggc

SEQ ID NO: 58968 - DNA, 110 bp, synthetic construct
  source 1..110: mol_type = other DNA
agacagaaaaaaacccacttggacatacgcatatattctgctctagagtagtggcttgaatagtattttccatacactcttaaagttcaaattaactgaataagggggaa

SEQ ID NO: 58969 - DNA, 110 bp, synthetic construct
  source 1..110: mol_type = other DNA
tttcttcaagtgaaagggtcattttcccctcccattatcaaaatgttttagccaggaaaacccagagctctctccttaatgttgtggtgtagtctgcattcctaccacta

SEQ ID NO: 58970 - DNA, 110 bp, synthetic construct
  source 1..110: mol_type = other DNA
gaaaacccagagctctctccttaatgttgtggtgtagtctgcattcctaccactagatggcagactgtacagaaaaacaacagggctctggaaagaacacatgggtccaa

SEQ ID NO: 58971 - DNA, 110 bp, synthetic construct
  source 1..110: mol_type = other DNA
tgtggcataaggggctaacttctaaggtgacataggtaggtcttctccctcgatgcagagagatgtttcaataaaagcccatcaaaaagctaaacgaaacagttccctga

SEQ ID NO: 58972 - DNA, 110 bp, synthetic construct
  source 1..110: mol_type = other DNA
gctgcatccaggtgaaagcgggaactccaagagaggtgccccatttctaggactgttttcacaggctttctgctttgtggtttcattagacagcttggatgacacaatat

SEQ ID NO: 58973 - DNA, 110 bp, synthetic construct
  source 1..110: mol_type = other DNA
ttttcacaggctttctgctttgtggtttcattagacagcttggatgacacaatatcagacaactgttcaggtcacgagcatcgagattcctcattgtgggacacaggagg

SEQ ID NO: 58974 - DNA, 110 bp, synthetic construct; identical to SEQ ID NO: 58972
  source 1..110: mol_type = other DNA

SEQ ID NO: 58975 - DNA, 110 bp, synthetic construct; identical to SEQ ID NO: 58973
  source 1..110: mol_type = other DNA

SEQ ID NO: 58976 - DNA, 110 bp, synthetic construct
  source 1..110: mol_type = other DNA
ctctgggtcctgccacacttccttcttctacccgctcacttccttattactcagagtttaaggccatcaaagagcaaaacaaccagctgacaagacacagatattgctca

SEQ ID NO: 58977 - DNA, 110 bp, synthetic construct
  source 1..110: mol_type = other DNA
gtttaaggccatcaaagagcaaaacaaccagctgacaagacacagatattgctcagtccgctatttttctgtccaacgttaattagctggttgtcctgattttcacagcc

SEQ ID NO: 58978 - DNA, 110 bp, synthetic construct
  source 1..110: mol_type = other DNA
tcagattcgttaaccactgagccgcgaagggaactcccgcccattgcttcttgacatttgggtcatgcacgttaagagataaataagaaaactttatcactattttatca

SEQ ID NO: 58979 - DNA, 110 bp, synthetic construct; identical to SEQ ID NO: 58978
  source 1..110: mol_type = other DNA

SEQ ID NO: 58980 - DNA, 110 bp, synthetic construct
  source 1..110: mol_type = other DNA
gaactaggcaccttatggtgaggttttaccttcttattactgttttttggtactaaggccctactgtgaggtagtgttagcttggagtgaagttctttttttttttcgct

SEQ ID NO: 58981 - DNA, 110 bp, synthetic construct
  source 1..110: mol_type = other DNA
gtgccagatgcattggatttataatctttcttttatatttacaatggtttgctagaatagtaaaaatcaaccatatcaaaacatgggggacttttggaaaaacgtatcaa

SEQ ID NO: 58982 - DNA, 110 bp, synthetic construct; identical to SEQ ID NO: 58981
  source 1..110: mol_type = other DNA

SEQ ID NO: 58983 - DNA, 110 bp, synthetic construct
  source 1..110: mol_type = other DNA
tttgtggcagcaagggaggcctggagcgggtggagggggtaggaattctctttgggaatagctagttggaaatggaagagataatttccatctcaacacatctgaggctt

SEQ ID NO: 58984 - DNA, 110 bp, synthetic construct
  source 1..110: mol_type = other DNA
gaatagctagttggaaatggaagagataatttccatctcaacacatctgaggcttcgggaatggtcacctaagagcagaggcaggggctgagggtaagattggcagttgg

SEQ ID NO: 58985 - DNA, 110 bp, synthetic construct
  source 1..110: mol_type = other DNA
ccgaggaagttgtgggacaaaatgtagaaaaggtaatggaaacggctccctggtgctcagattcctgcttcactcatcaaaccctcttctgaagatgttccattagctat

SEQ ID NO: 58986 - DNA, 110 bp, synthetic construct
  source 1..110: mol_type = other DNA
ctcagattcctgcttcactcatcaaaccctcttctgaagatgttccattagctatgagtccacagatatagaagagggatgttttctcaggatgttctttcttggctgag

SEQ ID NO: 58987 - DNA, 110 bp, synthetic construct
  source 1..110: mol_type = other DNA
aacttgtaggagctggattgtcaacaatctgccacgtcaggctgagactgggtacctgtcctgtttcttcagagaccagacaagccaggatgggtcccaacattccttcg

SEQ ID NO: 58988 - DNA, 110 bp, synthetic construct
  source 1..110: mol_type = other DNA
ctgtcctgtttcttcagagaccagacaagccaggatgggtcccaacattccttcgtctgagcttcctcaaatattgtcaaactcataaccttcaatccattctaactgat

SEQ ID NO: 58989 - DNA, 110 bp, synthetic construct
  source 1..110: mol_type = other DNA
aaataacctcaggggcactcagttgtaccaatcaacgtaaaaacaaagcactgaattggcttcttggaatgtgtatccaaggatcatctctagacagttcgagtttggaa

SEQ ID NO: 58990 - DNA, 110 bp, synthetic construct
  source 1..110: mol_type = other DNA
ccctgagggcctgatctttggcctcaagtaagtcatgtcatttttacctcggttgtcacatgtcaaatgaggaaagggagaaagagaaggagccaatatttgtttagctc

SEQ ID NO: 58991 - DNA, 110 bp, synthetic construct
  source 1..110: mol_type = other DNA
tcacatgtcaaatgaggaaagggagaaagagaaggagccaatatttgtttagctcctgctgcagtctgaatatggctctctgaaatccatatgtggaaatcctaatgccc

SEQ ID NO: 58992 - DNA, 110 bp, synthetic construct
  source 1..110: mol_type = other DNA
cagtgacaggggcttcaggaggaaactgggggggagggtaaggaatgcacatgtgatacttctccccccaccccacccactaaccaggtgaatgagacatgaaggacctt

SEQ ID NO: 58993 - DNA, 110 bp, synthetic construct
  source 1..110: mol_type = other DNA
atacttctccccccaccccacccactaaccaggtgaatgagacatgaaggaccttggcagtggggttcaaaagtttggtcactgagagctgagatggagacgaagtttat

SEQ ID NO: 58994 - DNA, 110 bp, synthetic construct
  source 1..110: mol_type = other DNA
ttagaccctgcgtatttttcagagtcacaatttgagaagctgtagcctctggataactgggatcatggcatttagagctggaagttacctgagaaatcatctagtagagg

SEQ ID NO: 58995 - DNA, 110 bp, synthetic construct
  source 1..110: mol_type = other DNA
actgggatcatggcatttagagctggaagttacctgagaaatcatctagtagaggattttcaaattcctagtgaaaaaaaattaactgttcaatcagaaatcattgtatt

SEQ ID NO: 58996 - DNA, 110 bp, synthetic construct
  source 1..110: mol_type = other DNA
aattatgacttagattaagctttcctatgcatgtgactcacagtggaatttcattcaataatccatgctgggtgtggatcatgttgactcactattgtcattagtgaaat

SEQ ID NO: 58997 - DNA, 110 bp, synthetic construct
  source 1..110: mol_type = other DNA
gatcctccaattccccaccacttccagactttgtgttacaagaaatatataaccttacgatttaagttattttccgttgagtgttctgttttgaagaaccagaacagccc

SEQ ID NO: 58998 - DNA, 110 bp, synthetic construct
  source 1..110: mol_type = other DNA
tacgatttaagttattttccgttgagtgttctgttttgaagaaccagaacagccccagtaggatactggtaggcttcaggagtaaagaagacttgtgcctggaaatgtgg

SEQ ID NO: 58999 - DNA, 110 bp, synthetic construct
  source 1..110: mol_type = other DNA
aagcagctgccgggaggcagaatccacttctcgggttatgacaatgaccgaccaggcaacctggtgtaccgcttctgtgacgtcaaagacgagacctatgacctgctcta

SEQ ID NO: 59000 - DNA, 110 bp, synthetic construct
  source 1..110: mol_type = other DNA
atcaaaccaagatggctgccctcgggttcattcaggacggcgtgcaggtaaggaagcccagctctcccggggcctcattcacttccctatcatgaccttaccactttact

SEQ ID NO: 59001 - DNA, 110 bp, synthetic construct
  source 1..110: mol_type = other DNA
cccatcacgtgccaggtctgtgccgatgcttcgagctgataatgataataaagatataaaaccattacgacctcatttaccatcctggaatccaaataataatcatgtct

SEQ ID NO: 59002 - DNA, 110 bp, synthetic construct
  source 1..110: mol_type = other DNA
tctccgagtaaagtatttttgcctttatttttttcccttttctcttctatgagtcttctctaggttcttcttggttattcaaataatttttagaagtatccttttccttc

SEQ ID NO: 59003 - DNA, 110 bp, synthetic construct
  source 1..110: mol_type = other DNA
acaaattactggctcttcactagtgtaataagcagagttgatcccgtactcgcacggaagctcccttgtggagcaggggcctcctgtcttgggctccagcacccaaggtc

SEQ ID NO: 59004 - DNA, 110 bp, synthetic construct
  source 1..110: mol_type = other DNA
ggaagctcccttgtggagcaggggcctcctgtcttgggctccagcacccaaggtcaggcagtatgtacacagtaggcctttgccagatatttgctgcataaaggacgtta

SEQ ID NO: 59005 - DNA, 110 bp, synthetic construct
  source 1..110: mol_type = other DNA
ggcaggcagcggggggcagagctggagggccttggttctgccctccgggttgtttcttaacctctcttggtttccatttcatcatctagaaaatgaggctgataataatg

SEQ ID NO: 59006 - DNA, 110 bp, synthetic construct
  source 1..110: mol_type = other DNA
ccttcctttttgttctaactggtacctaaataaggttgaacacgcagctctgggaggggtacattttctgaagagagaacaaagagacctggaaatttgatctgttaggc

SEQ ID NO: 59007 - DNA, 110 bp, synthetic construct
  source 1..110: mol_type = other DNA
gaggctcagcaagatcattagctgggttggacccatgctcctttcaaattactaattctttgctgggtcctggagcatgagagcttttgtgtgtgccttttaagaatgta

SEQ ID NO: 59008 - DNA, 110 bp, synthetic construct
  source 1..110: mol_type = other DNA
gagcccaggggttaatagggtgtctgccctccagaggggcccaagctaagagtaaggtgggaaggaagagcctttagggatagtgattctcaagtctgttgggagcctgc

SEQ ID NO: 59009 - DNA, 110 bp, synthetic construct
  source 1..110: mol_type = other DNA
aggccactgaggtcatctccactcagggccactcaatcagcaggtgaacacagctcgaatgttatggagggcacagagaaaccctgcttcccaagcctgtcacagggagt

SEQ ID NO: 59010 - DNA, 110 bp, synthetic construct
  source 1..110: mol_type = other DNA
cgaatgttatggagggcacagagaaaccctgcttcccaagcctgtcacagggagtcagagaatcacagaaagctagtgatggaaagcactcagaacccctcctgtctcct

SEQ ID NO: 59011 - DNA, 110 bp, synthetic construct
  source 1..110: mol_type = other DNA
gaggcttttccactccggatgacatcactctttacagctctgtatgagatctaggcattatttattacctttttaggtattatctttagtgccctggcctgggtactcat

SEQ ID NO: 59012 - DNA, 110 bp, synthetic construct
  source 1..110: mol_type = other DNA
cctgcctaggacagaggctgctggcccactgatgggtgtggctctgtccagctgtagctggcttcttggcacgtgggatccaggagctagtgccagctcactggtgagcc

SEQ ID NO: 59013 - DNA, 110 bp, synthetic construct
  source 1..110: mol_type = other DNA
agctggcttcttggcacgtgggatccaggagctagtgccagctcactggtgagccggtaagccactgacactaaggagctagagggtggactccagaaatggtgcctgca

SEQ ID NO: 59014 - DNA, 110 bp, synthetic construct
  source 1..110: mol_type = other DNA
tttaaatctaggcaatattatttcagaaccaaagcactcaaacatgttcttgaacttcaagtatatcagtcaaatgagtctcataatataagagactgaggcaaattcct

SEQ ID NO: 59015 - DNA, 110 bp, synthetic construct
  source 1..110: mol_type = other DNA
ttcaagtatatcagtcaaatgagtctcataatataagagactgaggcaaattcctcaggtagacacctaacaaacatttagagcaatcttgcgtaaccttccttaacagt

SEQ ID NO: 59016 - DNA, 110 bp, synthetic construct
  source 1..110: mol_type = other DNA
cattccctctgctcttgtctaccataggtcacagcttatactacccaggttcaccacgctgcaggtgaaactcgttccgttttttcactgattattttaggaggtcagtt

SEQ ID NO: 59017 - DNA, 110 bp, synthetic construct
  source 1..110: mol_type = other DNA
ggtagttccctgtgaagaataataaactgacaaacacccaataatactgatcaagaactaatttgaggagtaaccctttgtttgcttagtagttagcgaacccaactagc

SEQ ID NO: 59018 - DNA, 110 bp, synthetic construct
  source 1..110: mol_type = other DNA
acccaataatactgatcaagaactaatttgaggagtaaccctttgtttgcttagtagttagcgaacccaactagcatccatgaggactctggttggatccctggccttgc

SEQ ID NO: 59019 - DNA, 110 bp, synthetic construct
  source 1..110: mol_type = other DNA
gatgtgtgcagtcttcctttgcacagagcacagattgtacctagctgaatacaaaaacccaccttgagtgaggatatgagcatggtaatcaggcaaagataacttgccaa

SEQ ID NO: 59020 - DNA, 110 bp, synthetic construct
  source 1..110: mol_type = other DNA
acaacaaaagacaaataaataaataaataaataaagttatggtaggcacctttatgatggccccagtgatcttcatctcctgatatcaggctttctgtaagactctcctt

SEQ ID NO: 59021 - DNA, 110 bp, synthetic construct
  source 1..110: mol_type = other DNA
gatggccccagtgatcttcatctcctgatatcaggctttctgtaagactctccttgagtaatttgcttctgaccaatagaatataggaacattgaggagatatctctccc

SEQ ID NO: 59022 - DNA, 110 bp, synthetic construct
  source 1..110: mol_type = other DNA
agaaggcagagaaataaaagatctaagtagaaacaggcagactagctctataaacaacaaacaaaagacacaaagatggccaccaatggctttaccgcgtactacttgtg

SEQ ID NO: 59023 - DNA, 110 bp, synthetic construct
  source 1..110: mol_type = other DNA
aacaaacaaaagacacaaagatggccaccaatggctttaccgcgtactacttgtgtgacatttgtcaaagaacttagtatcacaaaactatgatcacctcctattaagat

SEQ ID NO: 59024 - DNA, 110 bp, synthetic construct
  source 1..110: mol_type = other DNA
tctcttgaaaacctctaagtatctgaggcccaactctttcagtttcccagagcacaaagttcctcaccctgtttttaccctgatctccttgcagggtgtactgtaggtca

SEQ ID NO: 59025 - DNA, 110 bp, synthetic construct
  source 1..110: mol_type = other DNA
gaaagcagctgagctttatgtcggataacgtaaagcagaaaaagtgacaggttctctgagctctgctctaatgtggtctaacgaatagcagccatagaagcaccacctag

SEQ ID NO: 59026 - DNA, 110 bp, synthetic construct
  source 1..110: mol_type = other DNA
ctgagctctgctctaatgtggtctaacgaatagcagccatagaagcaccacctaggaatttgttcgaaaagcaaaaattcttgggccccaacccagacctactgaatctc

SEQ ID NO: 59027 - DNA, 110 bp, synthetic construct
  source 1..110: mol_type = other DNA
atgagctacatgcaagaacatgaatgaatcttacaaatatactgctgaaaaaaggagcaagacatgaaataatgtgtatagcgtaattcaaaactaggtaggctgtttcc

SEQ ID NO: 59028 - DNA, 110 bp, synthetic construct
  source 1..110: mol_type = other DNA
agcaagacatgaaataatgtgtatagcgtaattcaaaactaggtaggctgtttccaccttaagggtagtaacagtgccttgccttggatagtacactcttcatcacaatt

SEQ ID NO: 59029 - DNA, 110 bp, synthetic construct
  source 1..110: mol_type = other DNA
gctgctttcccatcccagggctgctcataccatagggtcctgcaatctcccagctggtctttctgcctctggtaagactgctcgtccaaaccacaaggtgatgagacagg

SEQ ID NO: 59030 - DNA, 110 bp, synthetic construct
  source 1..110: mol_type = other DNA
ggtctttctgcctctggtaagactgctcgtccaaaccacaaggtgatgagacaggggcaagagaaattcttttgaccttattattttatcttcttccacttaaaatcttc

SEQ ID NO: 59031 - DNA, 110 bp, synthetic construct
  source 1..110: mol_type = other DNA
ttaaatcccaccaaggaagatctcttactgacaggaattctgggactatcagtaaatggtgttagtatacagagctgaggacgtgttgagtccattactctctgtagaaa

SEQ ID NO: 59032 - DNA, 110 bp, synthetic construct
  source 1..110: mol_type = other DNA
atggtgttagtatacagagctgaggacgtgttgagtccattactctctgtagaaaactttccatacttagtcctctgagaaacttgggtcaaatctatatttctttcatt

SEQ ID NO: 59033 - DNA, 110 bp, synthetic construct
  source 1..110: mol_type = other DNA
agtacagagaggttttgatggaacataactttaacagtggcagtcattggaattacatgtagctgggccctaacgtgtgagagctgattgaaaaacctttggatgaatgt

SEQ ID NO: 59034 - DNA, 110 bp, synthetic construct
  source 1..110: mol_type = other DNA
cgggggacatgccatctgagactgaagaaagcgcctttgcttgtttgctttccttttgttgttatgccaatattatgtggtgaccacctactgaaattctagccagtttg

SEQ ID NO: 59035 - DNA, 110 bp, synthetic construct
  source 1..110: mol_type = other DNA
ttgagaagggttcaggcaaatgccagtgcggtcagatgtctaaggctcttggcattctgctctcagcacagtcttctttgtttacactaatctgctctgttgcggtgaac

SEQ ID NO: 59036 - DNA, 110 bp, synthetic construct
  source 1..110: mol_type = other DNA
tctgctctcagcacagtcttctttgtttacactaatctgctctgttgcggtgaactagaattcaatccccagggtctctgtccccccaggacccgagggtccttgcctcg

SEQ ID NO: 59037 - DNA, 110 bp, synthetic construct
  source 1..110: mol_type = other DNA
actttatcagagttagaaccagagatacaggggccaatgtagaatgcctaacagttgccttctatttccaggcttttgcccccaaagccccgaagaaagacccgaatccc

SEQ ID NO: 59038 - DNA, 110 bp, synthetic construct
  source 1..110: mol_type = other DNA
gaccttattcccaataggatattttggaaatgggcaaacagaaattcatttatcccatagctgggacagtatgatgatctgcagctgtgaaattattggcaatgaggagt

SEQ ID NO: 59039 - DNA, 110 bp, synthetic construct
  source 1..110: mol_type = other DNA
tgtgaaaccctttggatgttttaagcagaggagttccatgactgatttatgtttagattattccagctgctctgtggagcaggtactatggtgaatcagagtggaatttg

SEQ ID NO: 59040 - DNA, 110 bp, synthetic construct
  source 1..110: mol_type = other DNA
gattattccagctgctctgtggagcaggtactatggtgaatcagagtggaatttgagagttcatttggtaacctgatatagtggtccaggtaaggggtaatgatggcttg

SEQ ID NO: 59041 - DNA, 110 bp, synthetic construct
  source 1..110: mol_type = other DNA
ccaaactctgcctctcagagttaatttgtaccggtgtacagaggctgcatttcggctacagagctttgggtaagtaaactcatcctctccctaagctttcatttttgtcc

SEQ ID NO: 59042 - DNA, 110 bp, synthetic construct
  source 1..110: mol_type = other DNA
gtctgaagggtgcagttttatgataatctacatacaatagtaaccattttctaccacaagaaacactatatttcaatagtaattccataaatatccaagagaaattgtcc

SEQ ID NO: 59043 - DNA, 110 bp, synthetic construct
  source 1..110: mol_type = other DNA
aagaaaataaaatcgatttcaggcaatatgtagaaagctaagagaaaataacctaaggaagcaaagatctacttttccaacaaagaaacaaggatgggagttcccaccat

SEQ ID NO: 59044 - DNA, 110 bp, synthetic construct
  source 1..110: mol_type = other DNA
aataagaactacgaataattaatgtcaaatgcttggcactttgagatgttgggcagagaacagatgttcctaaagctgtgtgaccgaaaacaaaatatagttgaaggtta

SEQ ID NO: 59045 - DNA, 110 bp, synthetic construct
  source 1..110: mol_type = other DNA
gagaacagatgttcctaaagctgtgtgaccgaaaacaaaatatagttgaaggttaaactggtcactgctgtgaactcatgaaaaggctttttaggagggaactgtcccat

SEQ ID NO: 59046 - DNA, 110 bp, synthetic construct; identical to SEQ ID NO: 59044
  source 1..110: mol_type = other DNA

SEQ ID NO: 59047 - DNA, 110 bp, synthetic construct; identical to SEQ ID NO: 59045
  source 1..110: mol_type = other DNA

SEQ ID NO: 59048 - DNA, 110 bp, synthetic construct
  source 1..110: mol_type = other DNA
cttagtttacaagtgaggagagagacgcaagaaagtgtaatccatttatccctggttagaaaagaagttgaaactccactaaccattgttacttgaacgaaaagcagggg

SEQ ID NO: 59049 - DNA, 110 bp, synthetic construct
  source 1..110: mol_type = other DNA
ttagaaaagaagttgaaactccactaaccattgttacttgaacgaaaagcaggggcactgaaacaggaggccatgaatgccacaggaagaaagcgcttagggattcttaa

SEQ ID NO: 59050 - DNA, 110 bp, synthetic construct
  source 1..110: mol_type = other DNA
aggccagtggttagcattaaggatacagattagctctaactcagtctcaaggggcttagaacaatgaaacactatgtagggaaggagaaggtggaagaaaggcactgcct

SEQ ID NO: 59051 - DNA, 110 bp, synthetic construct
  source 1..110: mol_type = other DNA
atattattatttgcctaatttttagaagacagggaagtcaagggagacaaaaagactgattcaaggtcacttaccaggtgtactgatggcagaatccatgttttttctgt

SEQ ID NO: 59052 - DNA, 110 bp, synthetic construct
  source 1..110: mol_type = other DNA
ctgattcaaggtcacttaccaggtgtactgatggcagaatccatgttttttctgttctgccatgcttcaattcaatgtaacccacgtattatgttttgtaatttataaaa

SEQ ID NO: 59053 - DNA, 110 bp, synthetic construct
  source 1..110: mol_type = other DNA
tcattaggcaaaactgcaaggtggttctcatgtctctatttcatgaccctaacctatttttcagctttctttttttctggtacgacaaaatattctagagtcacctcata

SEQ ID NO: 59054 - DNA, 110 bp, synthetic construct
  source 1..110: mol_type = other DNA
atttttcagctttctttttttctggtacgacaaaatattctagagtcacctcatacctacactgatcaaggcctaaaatcagccacatctccaagaaacattggttcctt

SEQ ID NO: 59055 - DNA, 110 bp, synthetic construct
  source 1..110: mol_type = other DNA
aggtaatctactatgaaagttgttctcaatccttgctgctcaaatccacaagaccttttttaaaaatacccagatgcgggcctccagacacagagcttcttacttaatga

SEQ ID NO: 59056 - DNA, 110 bp, synthetic construct
  source 1..110: mol_type = other DNA
ttttttaaaaatacccagatgcgggcctccagacacagagcttcttacttaatgaatatggagtcctgggcataagcattttaatggctgagaactgctgtgttcttgct

SEQ ID NO: 59057 - DNA, 110 bp, synthetic construct
  source 1..110: mol_type = other DNA
ttctcttctataaagtgggatcagtaaaatagttactccttgataggctgagtcttaaataaataagcaagctatatcaagaagttatgttacagaaattgcttcactat

SEQ ID NO: 59058 - DNA, 110 bp, synthetic construct
  source 1..110: mol_type = other DNA
taaataaataagcaagctatatcaagaagttatgttacagaaattgcttcactatgaactcattctcctgggttagattaaaactcaagagagcagtgttgtggccgtgc

SEQ ID NO: 59059 - DNA, 110 bp, synthetic construct
  source 1..110: mol_type = other DNA
ccaagaggagaagcatctctctccctacagaaatgctccttcaagtgagttcaaaaccagtaatggaagaataaagactaaaactattgaaaagcacagatcttccttcc

SEQ ID NO: 59060 - DNA, 110 bp, synthetic construct
  source 1..110: mol_type = other DNA
accagtaatggaagaataaagactaaaactattgaaaagcacagatcttccttcccagtcatcagaaccaggaaaaaatggatacagagagcctctctactcatagattc

SEQ ID NO: 59061 - DNA, 110 bp, synthetic construct
  source 1..110: mol_type = other DNA
acaacactttgcttgagatggtatggctttgctggaccttactgcagcaaaaggatcaactactttcaagtgctatttctatgtagggtgaaagcgatgattttttaatg

SEQ ID NO: 59062 - DNA, 110 bp, synthetic construct
  source 1..110: mol_type = other DNA
tcaactactttcaagtgctatttctatgtagggtgaaagcgatgattttttaatggatatgttgggactcaaagtagaaacagaagtcattttgcaaataggaagtgatt

SEQ ID NO: 59063 - DNA, 110 bp, synthetic construct
  source 1..110: mol_type = other DNA
ttttttcataacccatttggtggtactacctgacttgaatcgatggaatggtaataaggggaggcagatacttctgcataaaagtttagacagaagtattttcttacaga

SEQ ID NO: 59064 - DNA, 110 bp, synthetic construct
  source 1..110: mol_type = other DNA
ggaccaggaggaggatgtatgacctcagcattcagacgcagtgggccctaagccactgaggtcttcctttgaggagacttggactgttataagacactggttcctgtgga

SEQ ID NO: 59065 - DNA, 110 bp, synthetic construct
  source 1..110: mol_type = other DNA
tttgccttttatccaactgagtgctttcactctaattatattcttaggtcagggatcattaaagcatcagatcttctatcttgaactcctttataatccttgatttgtta

SEQ ID NO: 59066 - DNA, 110 bp, synthetic construct
  source 1..110: mol_type = other DNA
gggagggacagggagcccaggatcaccaccgcagaggttcccaggaccctgctggcccagaagcggtgtccctgtgggaagcctgccttcctgcagctgagcctccaggg

SEQ ID NO: 59067 - DNA, 110 bp, synthetic construct
  source 1..110: mol_type = other DNA
agaaaccagatttcaaaaccaatattgtactcaagaggctggcttcccttgccagacaggccagagcttcccacagcagcagatctgaggagcagctctgtgggacacac

SEQ ID NO: 59068 - DNA, 110 bp, synthetic construct
  source 1..110: mol_type = other DNA
acaggccagagcttcccacagcagcagatctgaggagcagctctgtgggacacacagagaagcgaaggggctcttctgtgaagctgacaagaccctgctgtgtggcccct

SEQ ID NO: 59069 - DNA, 110 bp, synthetic construct
  source 1..110: mol_type = other DNA
tctccttcaaatctgaatgagagccttactgggtaaaataatcttggttgtaggttttttcccttcatcgcagagtttcagctgaaaaatctgctgataactttatcagg

SEQ ID NO: 59070 - DNA, 110 bp, synthetic construct; identical to SEQ ID NO: 59069
  source 1..110: mol_type = other DNA

SEQ ID NO: 59071 - DNA, 110 bp, synthetic construct
  source 1..110: mol_type = other DNA
ttttcaagcagcctggtattcagcaccctactccttccttcgtccttacctggagcatctccacatctgctttaaggcacatttccttcagctccccatatattcttctc

SEQ ID NO: 59072 - DNA, 110 bp, synthetic construct
  source 1..110: mol_type = other DNA
catctccacatctgctttaaggcacatttccttcagctccccatatattcttctcaggagtttccccatgtgaatcattctggttacattccccctgagtcgccgaaaaa

SEQ ID NO: 59073 - DNA, 110 bp, synthetic construct
  source 1..110: mol_type = other DNA
taatttttgtgtgtctcctttaactgcttattgtagatacaggtgattttactgctttcgcttttaacttcccttctaatttgtgtgtgaataatttctacctttaacgt

SEQ ID NO: 59074 - DNA, 110 bp, synthetic construct
  source 1..110: mol_type = other DNA
cgtacaagctgaaatgcctcagctctgaaacacacaagtctggaatgctgggcgtcatgggcatcttggctatggatcaaattttgagagttaatgaagtatcttaagaa

SEQ ID NO: 59075 - DNA, 110 bp, synthetic construct
  source 1..110: mol_type = other DNA
tatgtatggtttctcctgcgggattaatcttgagttcctccctttgtcccttgtttctccagacatgccattctcagatgcctcaacaatttgagagagcagataagtct

SEQ ID NO: 59076 - DNA, 110 bp, synthetic construct
  source 1..110: mol_type = other DNA
tctccagacatgccattctcagatgcctcaacaatttgagagagcagataagtctagttggcaaatttttagtaaaattattaagcattattttgcattcttgtgtaaaa

SEQ ID NO: 59077 - DNA, 110 bp, synthetic construct
  source 1..110: mol_type = other DNA
tcatccttaattcttttcagggtgtactgtgggtcattgacaacagtggctatttacttacagacctggactgggggcaaagttctttggtttacgagggcttaagcctt

SEQ ID NO: 59078 - DNA, 110 bp, synthetic construct
  source 1..110: mol_type = other DNA
acttacagacctggactgggggcaaagttctttggtttacgagggcttaagccttttaaaataactttaagattttatagaatgtattgtcagtcgtttccaaaaagtgg

SEQ ID NO: 59079 - DNA, 110 bp, synthetic construct
  source 1..110: mol_type = other DNA
gtgaaggcttcaagagtagttttatcagatcccaaagccatcccgccatgttgttttccttctcattttgtttttcttcatggttacacaatgttgtggcaattcaaagc

SEQ ID NO: 59080 - DNA, 110 bp, synthetic construct
  source 1..110: mol_type = other DNA
ttccttctcattttgtttttcttcatggttacacaatgttgtggcaattcaaagcctcttatttgcattccacatcacacagagcaaaagcaagaaggaaaacacctccc

SEQ ID NO: 59081 - DNA, 110 bp, synthetic construct
  source 1..110: mol_type = other DNA
tgcagctgcaggcctatgccacaaccacagccatgctacatctgcaacctatgtgacagcttgtggtaatgtccttaatccactgagtgaggccagtgatcaaacctgca

SEQ ID NO: 59082 - DNA, 110 bp, synthetic construct; identical to SEQ ID NO: 59081
  source 1..110: mol_type = other DNA

SEQ ID NO: 59083 - DNA, 110 bp, synthetic construct
  source 1..110: mol_type = other DNA
tgttaactctgaatataaattcacaaactatcatttggaatttgctttttttaaacctaagttcctttgagttgaattagtgtgaatctgtccatcaaagctcaatcctc

SEQ ID NO: 59084 - DNA, 110 bp, synthetic construct
  source 1..110: mol_type = other DNA
tttttttaaacctaagttcctttgagttgaattagtgtgaatctgtccatcaaagctcaatcctcgtaacaacttttttcttttcttccagttttattgagatgtaattg

SEQ ID NO: 59085 - DNA, 110 bp, synthetic construct
  source 1..110: mol_type = other DNA
catgagacctgtcattctgcagctggatattacttcagatccagaatgtttggcccacttgtaatgagtgccctcccactgagaaacacgtctatatgatcctcacagtg

SEQ ID NO: 59086 - DNA, 110 bp, synthetic construct
  source 1..110: mol_type = other DNA
cacttgtaatgagtgccctcccactgagaaacacgtctatatgatcctcacagtggcaatagtggcctgaaagccaccctgatggtcccttgggtctatgatgagtgact

SEQ ID NO: 59087 - DNA, 110 bp, synthetic construct
  source 1..110: mol_type = other DNA
ttaatgtttgcaaccagcaaagataaggggcttcttctcaccagctcaagacagaaaatgctattgaaggatttaattgaccctgcttgggtcataggccctttcctaat

SEQ ID NO: 59088 - DNA, 110 bp, synthetic construct
  source 1..110: mol_type = other DNA
caagagaagaggcaacaaggagatggtacttgaaacatttggcagcttgcccatggagaaccattcttaattagaattattaccccccaaagaaactggcataatacctt

SEQ ID NO: 59089 - DNA, 110 bp, synthetic construct
  source 1..110: mol_type = other DNA
caaagcggtatgattataaggtcactaacaccaaattgttgaattagttttctatgctgcatgataaattaccacaaacctagcagcttaaaataacacacatttagcta

SEQ ID NO: 59090 - DNA, 110 bp, synthetic construct
  source 1..110: mol_type = other DNA
gctgcatgataaattaccacaaacctagcagcttaaaataacacacatttagctaacgattcctgtgcatcaggattctgggcacccctaagctgggtgcctatgcaaga

SEQ ID NO: 59091 - DNA, 110 bp, synthetic construct
  source 1..110: mol_type = other DNA
aatatgatgagtcccataacttgggactttcacctaatcttgtaatatatttatttaagaacctcacattttcagcacaagcatcatttttcttcctctaataggcagct

SEQ ID NO: 59092 - DNA, 110 bp, synthetic construct
  source 1..110: mol_type = other DNA
taagaacctcacattttcagcacaagcatcatttttcttcctctaataggcagctgaaatcacctcttttacaaatctctgcaaagctcagcttcaccttcgcagtaaac

SEQ ID NO: 59093 - DNA, 110 bp, synthetic construct
  source 1..110: mol_type = other DNA
atgtggggtcttctgatctctgaagtgccctgtttctgcagatttctttttttttgatgtttcactctgtgaactcttgccaccttggcttcggagctttcttctctcca

SEQ ID NO: 59094 - DNA, 110 bp, synthetic construct
  source 1..110: mol_type = other DNA
ttcataggcacacatctggacacacacactctttgtgtcatgtgcatctgtcccccaaccaatttttttttttttaaccaggatttcttcttgcaggaaggctaacttgg

SEQ ID NO: 59095 - DNA, 110 bp, synthetic construct
  source 1..110: mol_type = other DNA
caaccaatttttttttttttaaccaggatttcttcttgcaggaaggctaacttggaaacacggggaggcgggagggaagatacgtgtattttcatgggtcatgctagcat

SEQ ID NO: 59096 - DNA, 110 bp, synthetic construct
  source 1..110: mol_type = other DNA
ttcaaactagcttccatttactgggcactttctattggataggcacatattataattgatcttgaatatttattgcaatgacatgagaaagatatcaatcccttcaattt

SEQ ID NO: 59097 - DNA, 110 bp, synthetic construct
  source 1..110: mol_type = other DNA
tcctataattatccccatttcacaggtgaaaaaattgagcttcctgaggtttaagtattttgcacaaggttagaccatgtggtaagtttctgagactggctttcaacaca

SEQ ID NO: 59098 - DNA, 110 bp, synthetic construct
  source 1..110: mol_type = other DNA
tcaaagcctagagacgttcccatctacttaagctgatttatttattgagccagcattattaataggcaccattgtaggcattttaaattcaagaacgtaattagtcatca

SEQ ID NO: 59099 - DNA, 110 bp, synthetic construct
  source 1..110: mol_type = other DNA
cagtttatgcatttagacaaattataatgacataaatccattattatagtaccatatagagcatttcagctgccctaaaaatcctctgagctctgcctgttcatctctct

SEQ ID NO: 59100 - DNA, 110 bp, synthetic construct
  source 1..110: mol_type = other DNA
cgtctaggtttgcctgtacagaatatgaatatacacgaccaaaaacccattgctacagggttaaaaatgcaacagagattctgtaggacaaatttggaagactggagctt

SEQ ID NO: 59101 - DNA, 110 bp, synthetic construct
  source 1..110: mol_type = other DNA
cagggttaaaaatgcaacagagattctgtaggacaaatttggaagactggagctttgcctaaggatggagagaattccttaacactagaaacgcctaagacataagaaag

SEQ ID NO: 59102 - DNA, 110 bp, synthetic construct
  source 1..110: mol_type = other DNA
cgttttgaagtccaaagctttaataataagttgatatagctaattggtagccacagtaaaattcaagatcgattcttccaggtcccaaagtttatactctaggctgacct

SEQ ID NO: 59103 - DNA, 110 bp, synthetic construct
  source 1..110: mol_type = other DNA
tcagctagagccatggaaattttaacatgtaaaatttgttatttaggaattcagttggaaggaaattgtagccaatgagaactgggaaagaatgggaaaaatcagtttgg

SEQ ID NO: 59104 - DNA, 110 bp, synthetic construct; identical to SEQ ID NO: 59103
  source 1..110: mol_type = other DNA

SEQ ID NO: 59105 - DNA, 110 bp, synthetic construct
  source 1..110: mol_type = other DNA
tgatcaatagaatcttatatggttacctggccaggttgcctctcagatctcatctcctaccacgccagctggataactccaccgtagccacaaggatctattcacccttc

SEQ ID NO: 59106 - DNA, 110 bp, synthetic construct
  source 1..110: mol_type = other DNA
cctaccacgccagctggataactccaccgtagccacaaggatctattcacccttcctcctgctgccaagaaacctctgcctcagggctccttataccttcagcttctttg

SEQ ID NO: 59107 - DNA, 110 bp, synthetic construct
  source 1..110: mol_type = other DNA
agttgctttctcctcctattctgtcccatgctaccacattatggattattacccggatttctcttctctaagctgccatgtctcaagcacagacttaacattgtgattcc

SEQ ID NO: 59108 - DNA, 110 bp, synthetic construct
  source 1..110: mol_type = other DNA
cagcacagaggcagcagattttaaagtgcccagcctttcaagagtactccagcatagccctagcccgtagcagtgtctagctctagacccaccccccgaccaaggtggtg

SEQ ID NO: 59109 - DNA, 110 bp, synthetic construct
  source 1..110: mol_type = other DNA
gggccccaagcatctacgcctcatctcatgtgatgagcattcaaaagccaagaggacaaggtaaggagacctgaagatcctgtccccacatccaacaggcacacagctcc

SEQ ID NO: 59110 - DNA, 110 bp, synthetic construct
  source 1..110: mol_type = other DNA
acaaggtaaggagacctgaagatcctgtccccacatccaacaggcacacagctccaaaaaggggatgccactcagagaaaagcatgcccttgccctttccctcaactcca

SEQ ID NO: 59111 - DNA, 110 bp, synthetic construct
  source 1..110: mol_type = other DNA
ttgaaagtaatattctgtaacctttgccgtgtcctccttgttagaagagagccactgggtccagcacacactccagatgagagagttacacaaagctatggctaccagga

SEQ ID NO: 59112 - DNA, 110 bp, synthetic construct
  source 1..110: mol_type = other DNA
acaacacagaatcattcctgtttctccgagtgtcaaaatctatgtcatagtgaagaagttgcaagacattgctcttcaggacaagagggttaaagggccaaagagtcttg

SEQ ID NO: 59113 - DNA, 110 bp, synthetic construct
  source 1..110: mol_type = other DNA
tcaaaaactgtatgagaataagtttgtagtccattaaaacagtaaattcctggtaattcattatagcaacaacagaaaactaacatgtctagctaactcatggatggata

SEQ ID NO: 59114 - DNA, 110 bp, synthetic construct
  source 1..110: mol_type = other DNA
attcattatagcaacaacagaaaactaacatgtctagctaactcatggatggatatggccatgtgagcaagatatgaccaggaaatattgatgaaatcaatgtgcctgat

SEQ ID NO: 59115 - DNA, 110 bp, synthetic construct
  source 1..110: mol_type = other DNA
ttccctaggtttttatatagctgtccaggttttactctacttattttacagatataaaaaacggaagactgggagttcccactgtggcaccacaggttaaggacccagca

SEQ ID NO: 59116 - DNA, 110 bp, synthetic construct
  source 1..110: mol_type = other DNA
cttccaatttttaaatagtgctgactgctactttttaattaagatccgacagtggaaatttgcattccaaaagctcattgaattctatggaattagattgcctattttgc

SEQ ID NO: 59117 - DNA, 110 bp, synthetic construct
  source 1..110: mol_type = other DNA
ataggtccagctgtatcagctgccagaaactctgatctctgcctcttcagcttgcagagatcatcatgcttttcttggattctagatcaccgttccatagttgggatatt

SEQ ID NO: 59118 - DNA, 110 bp, synthetic construct
  source 1..110: mol_type = other DNA
agagatcatcatgcttttcttggattctagatcaccgttccatagttgggatatttttcaaaagcagagagtcagcataattagagagcatggcttacaagttttctgtc

SEQ ID NO: 59119 - DNA, 110 bp, synthetic construct
  source 1..110: mol_type = other DNA
tgatcacattggttctgaattcctatgtcacaataattacagacacaaaggggtagctagtcccttcagaagaaccaagtacatccaaaccaccctgcctagacaattgc

SEQ ID NO: 59120 - DNA, 110 bp, synthetic construct
  source 1..110: mol_type = other DNA
gctagtcccttcagaagaaccaagtacatccaaaccaccctgcctagacaattgcacttaatttgatatgcctccacaggtattcacgttgtgaccggcaataaagtttt

SEQ ID NO: 59121 - DNA, 110 bp, synthetic construct
  source 1..110: mol_type = other DNA
aaagatgtttggcataaattccaaaaatattcttcttcagaacactgactataagaccgaatgaaagtagaatagttgagttcaacagaagtagcctttctgacagggaa

SEQ ID NO: 59122 - DNA, 110 bp, synthetic construct
  source 1..110: mol_type = other DNA
accgaatgaaagtagaatagttgagttcaacagaagtagcctttctgacagggaaatattttgcaggttttcagattttagaaaataaagtgtttgattaccctatttca

SEQ ID NO: 59123 - DNA, 110 bp, synthetic construct
  source 1..110: mol_type = other DNA
agtctggggagcatccttccccacaagcgagggctcaatttttgcagagcaccgcctagctgctgctggtatctatgaggagacttgattaaggtggtgcgagaggggga

SEQ ID NO: 59124 - DNA, 110 bp, synthetic construct
  source 1..110: mol_type = other DNA
caggacagtgctaatcatatttaatgggctgtacatcacatccttagtacttacgtatcttctaactggaaggtcctagcttttgactgcctttatccaattcccttccc

SEQ ID NO: 59125 - DNA, 110 bp, synthetic construct
  source 1..110: mol_type = other DNA
tcatgcctgatggtctaaaagaaaaatataatcaatactttcagagaatctagatacaaaaaatgtctattgtttcaactcacctatatctgttgtccactttcacaact

SEQ ID NO: 59126 - DNA, 110 bp, synthetic construct; identical to SEQ ID NO: 59125
  source 1..110: mol_type = other DNA

SEQ ID NO: 59127 - DNA, 110 bp, synthetic construct
  source 1..110: mol_type = other DNA
gggttgtcaaggtactttaaatcgggcgttgaaagggctcattgttttattaaggatcttttggttgcattaactaaaaccaacttgatctagagtcagcaaaggaaaaa

SEQ ID NO: 59128 - DNA, 110 bp, synthetic construct; identical to SEQ ID NO: 59127
  source 1..110: mol_type = other DNA

SEQ ID NO: 59129 - DNA, 110 bp, synthetic construct
  source 1..110: mol_type = other DNA
aaccctctgaaatctgtgctaaaaataaattaattagttaattaattttgaaaaagaataatcaattcagccacaccaaggcatcaacgaacaatgactaggtgttccaa

SEQ ID NO: 59130 - DNA, 110 bp, synthetic construct
  source 1..110: mol_type = other DNA
gaataatcaattcagccacaccaaggcatcaacgaacaatgactaggtgttccaagtgtttcctcttctggtacccgtctctttggtttactttttctcacagtgggacc

SEQ ID NO: 59131 - DNA, 110 bp, synthetic construct
  source 1..110: mol_type = other DNA
attcctgggtggtgtcaagtcacgaatgccttaatacgtagtaagttcaaccattcccaagcatccaccaacacctataaagcgacctttctttgccacgagctacctcc

SEQ ID NO: 59132 - DNA, 110 bp, synthetic construct
  source 1..110: mol_type = other DNA
cccaagcatccaccaacacctataaagcgacctttctttgccacgagctacctccccagctgagctctagctgctcataaaacacctctactcgtatgtttgcccattgc

SEQ ID NO: 59133 - DNA, 110 bp, synthetic construct
  source 1..110: mol_type = other DNA
ccgcccaagtcctagccgtgaacattcagtgtgagactctctaaggtctatcagagtggctgctacaagcttgacggtggtagggagattcaatagcatagttggatata

SEQ ID NO: 59134 - DNA, 110 bp, synthetic construct
  source 1..110: mol_type = other DNA
gtggctgctacaagcttgacggtggtagggagattcaatagcatagttggatatactggcctgggagcatgagaagacactgctcgtaccctgagcatgcagccaaaacc

SEQ ID NO: 59135 - DNA, 110 bp, synthetic construct
  source 1..110: mol_type = other DNA
caggaagtctgagaaaatgggaatggaagtcaagagctggtacctcggacagccaaaaaaaaccacagttaataccgccaacggaagttactatcttctcttaccacccc

SEQ ID NO: 59136 - DNA, 110 bp, synthetic construct
  source 1..110: mol_type = other DNA
tacccatcattacagtatcatacagaatattttccctgccttaaaaatcatccacgttgcacctgttcatctctttccctccccagctcctgacaaccacggacctttct

SEQ ID NO: 59137 - DNA, 110 bp, synthetic construct
  source 1..110: mol_type = other DNA
gttgcacctgttcatctctttccctccccagctcctgacaaccacggacctttctactgtcttcatagttttgcctttcccagatgtcatagagttggaatattgcagtg

SEQ ID NO: 59138 - DNA, 110 bp, synthetic construct
  source 1..110: mol_type = other DNA
acagaattaagtatttatttgcttttctcaagactccccatcttcagtgctattacccattctgaactggcctggggatgtcgccggatcaatcagatagaagagaaagt

SEQ ID NO: 59139 - DNA, 110 bp, synthetic construct
  source 1..110: mol_type = other DNA
cccattctgaactggcctggggatgtcgccggatcaatcagatagaagagaaagttacaaagggaggaccttatattatttgatcaaatatctttacattttgcttgcaa

SEQ ID NO: 59140 - DNA, 110 bp, synthetic construct
  source 1..110: mol_type = other DNA
agaataatctggaggcaggcacagggctgggaggaaatgtctggggcactattgttgtaggtgtgggctaatgaaaatgtcttgagtgtggctgtgcctcacaggagaat

SEQ ID NO: 59141 - DNA, 110 bp, synthetic construct
  source 1..110: mol_type = other DNA
tgtaggtgtgggctaatgaaaatgtcttgagtgtggctgtgcctcacaggagaatcagctctctaggacctgtgttattggagcaattacatgtccagggtgtggtgatt

SEQ ID NO: 59142 - DNA, 110 bp, synthetic construct
  source 1..110: mol_type = other DNA
gtatctgtggtggactataaaaaagtgtcaaataattcccaccatttggcatgatctaacatccacagtttcttcaaatcccatgactgctagcaccccagacttctgga

SEQ ID NO: 59143 - DNA, 110 bp, synthetic construct
  source 1..110: mol_type = other DNA
ctaacatccacagtttcttcaaatcccatgactgctagcaccccagacttctggacgcctcctacaagcctgctttctaattcctcccaagcttggtgtccccaggcctc

SEQ ID NO: 59144 - DNA, 110 bp, synthetic construct
  source 1..110: mol_type = other DNA
taaatatacctttggataaggaaatgtttacccatgacacattctctttgatgagcctactcgttttcgaactgtcctttctattttattctgatccagcttttcttttc

SEQ ID NO: 59145 - DNA, 110 bp, synthetic construct
  source 1..110: mol_type = other DNA
cctactcgttttcgaactgtcctttctattttattctgatccagcttttcttttcttttctttttttatagccacatctgcggcatatggaagttcccaggccagggact

SEQ ID NO: 59146 - DNA, 110 bp, synthetic construct
  source 1..110: mol_type = other DNA
gggtcatctctgccattaactaggaaaaataaacgatactttctaaagagagtgttaattatagaaagtgctttatttcccatttggcatccttagaaatgaaatgtttt

SEQ ID NO: 59147 - DNA, 110 bp, synthetic construct
  source 1..110: mol_type = other DNA
taattatagaaagtgctttatttcccatttggcatccttagaaatgaaatgttttgccctctataggaacagagatgcacagttgttcttgtcaccgggccgaaagtaac

SEQ ID NO: 59148 - DNA, 110 bp, synthetic construct
  source 1..110: mol_type = other DNA
tcaaatagttgcattgttttatgttcctggtttgctgggaaccacactagcttagctctttggtgaaggggcagctaaacctgatctaggaaaagaaagggttcccacgt

SEQ ID NO: 59149 - DNA, 110 bp, synthetic construct
  source 1..110: mol_type = other DNA
agaggaagcatcttgagatgaaagagagagtttagtggagaataacaaagatctgcatttatgctggattacagaatttagtatgtttcttctggaagagaatcccaccc

SEQ ID NO: 59150 - DNA, 110 bp, synthetic construct
  source 1..110: mol_type = other DNA
catttatgctggattacagaatttagtatgtttcttctggaagagaatcccacccacaagcagatgcatcatgatcagtgccgaatgagaaaagagcggaactcatgaaa

SEQ ID NO: 59151 - DNA, 110 bp, synthetic construct
  source 1..110: mol_type = other DNA
gaagtttcggaagatttagaaagagcctattgtatgttttaaattgtggttttctattcgtttcttttgtaagcagcacacttgagcaatggcttcgctgtttgctttac

SEQ ID NO: 59152 - DNA, 110 bp, synthetic construct; identical to SEQ ID NO: 59151
  source 1..110: mol_type = other DNA

SEQ ID NO: 59153 - DNA, 110 bp, synthetic construct
  source 1..110: mol_type = other DNA
ctcctgcagaatcatctgtttcattcatatggatgcagctaataaggacacagtgaaagaccaagatcagaaggaggcttttgctgcaggaattgagggcggatgaacct

SEQ ID NO: 59154 - DNA, 110 bp, synthetic construct
  source 1..110: mol_type = other DNA
aaagaccaagatcagaaggaggcttttgctgcaggaattgagggcggatgaaccttcacatcccatgaggcacggtggcaggggagagccgtaaccacaaactcagcctt

SEQ ID NO: 59155 - DNA, 110 bp, synthetic construct
  source 1..110: mol_type = other DNA
tggaccagattatttctaaactttgtcagcgccttggccattacaccatgccgacctggcttgtgacataaacagctcacatcaaaagttgtcaccagtcccttgaaagc

SEQ ID NO: 59156 - DNA, 110 bp, synthetic construct
  source 1..110: mol_type = other DNA
ctggcttgtgacataaacagctcacatcaaaagttgtcaccagtcccttgaaagcaatgagcattttagaaacccaccccaggatgagattctttcgtgatgcaccgggt

SEQ ID NO: 59157 - DNA, 110 bp, synthetic construct
  source 1..110: mol_type = other DNA
tactacttcctgaaagacttgaagcagctcccagtgctctaagagaaagatgcaaatcctcaccatggcccgcaaggagcatgttctgctgggacagcccctcaagcccc

SEQ ID NO: 59158 - DNA, 110 bp, synthetic construct
  source 1..110: mol_type = other DNA
agctcaaggaggtctttgatggataactttagagctgaaacttcagcatcagttgggccatctccctttgatcacatagttgctctgcattataggcaactttgactatt

SEQ ID NO: 59159 - DNA, 110 bp, synthetic construct
  source 1..110: mol_type = other DNA
ggccatctccctttgatcacatagttgctctgcattataggcaactttgactattccagcctgttctgtaacaggtgcccttctccttcccaaactgtacttggcagttt

SEQ ID NO: 59160 - DNA, 110 bp, synthetic construct
  source 1..110: mol_type = other DNA
tgatccttactgaaccaatagctccttacccataagtagctttaatttcccccgcattgtaggttgcgtgtcaagacaagaatgattgtaaaccttggagttcccttcgt

SEQ ID NO: 59161 - DNA, 110 bp, synthetic construct
  source 1..110: mol_type = other DNA
gggtggttctgtgacattatatcagtcactgcccgagagctcccccagggtggcctcccaggaagtttggattcaaggtacctcctgtaaggagcctgaccccagagatg

SEQ ID NO: 59162 - DNA, 110 bp, synthetic construct
  source 1..110: mol_type = other DNA
tcttttgacatcagggaagccactcagcttccctctgaccctacacctttctccgtaaaacctcatttttctggcccttctccggataactgtatttgaagtttcttgga

SEQ ID NO: 59163 - DNA, 110 bp, synthetic construct
  source 1..110: mol_type = other DNA
taaaacctcatttttctggcccttctccggataactgtatttgaagtttcttggaggaaatgtgtcaacttcaataagtggttatgagtgtagccatgggtgctcagcga

SEQ ID NO: 59164 - DNA, 110 bp, synthetic construct
  source 1..110: mol_type = other DNA
ctgtcttctcctcatgcatctttccctttgctttaactgctcctcagaaacagaaggggtggtgagggaagagtctgaacactcttggctgggaaacgatagtcattctt

SEQ ID NO: 59165 - DNA, 110 bp, synthetic construct
  source 1..110: mol_type = other DNA
ggggtggtgagggaagagtctgaacactcttggctgggaaacgatagtcattcttttgcatacctatgtattcctgtaatgatcacgcatcctccatgtaaatatggaag

SEQ ID NO: 59166 - DNA, 110 bp, synthetic construct
  source 1..110: mol_type = other DNA
ctatttgcccacctttctccataccctacatggaaaccaggatgtgggagaacatggactaggcacaaagctcctgtgtttaacatgaaagattaagatctttaaccagt

SEQ ID NO: 59167 - DNA, 110 bp, synthetic construct
  source 1..110: mol_type = other DNA
tgttattagagtcaataggtttttcccactggaggtttgtttctttgcctttcatgccaaggtctgtttgagaccaccctgctgatttttcatgagctactacagtgaac

SEQ ID NO: 59168 - DNA, 110 bp, synthetic construct
  source 1..110: mol_type = other DNA
gccaaggtctgtttgagaccaccctgctgatttttcatgagctactacagtgaacagctgtcttggaatcaaggggctgtttttcattcatatcatccaaacttcttctt

SEQ ID NO: 59169 - DNA, 110 bp, synthetic construct
  source 1..110: mol_type = other DNA
agaggaggggaaattgaagagcaaagctggatgtgtcttaagagaatctggatgcatgtgggagccttcgggcaaaatagagtgcaaagtaaccacataatagatgcaca

SEQ ID NO: 59170 - DNA, 110 bp, synthetic construct
  source 1..110: mol_type = other DNA
gattccagctatgttcctttctgtccaccccccccccgcccccaactacatcttgctgcctccaacaagttaatacaaatcagaacctggttgtgcaaacaaattaaact

SEQ ID NO: 59171 - DNA, 110 bp, synthetic construct
  source 1..110: mol_type = other DNA
ctgcctccaacaagttaatacaaatcagaacctggttgtgcaaacaaattaaactctccaagatagtttgagtccctgagaggtccttgaagcttatgagaatgttgata

SEQ ID NO: 59172 - DNA, 110 bp, synthetic construct
  source 1..110: mol_type = other DNA
gatcgcagtagcagcttgtcccagcagtagctctgtttattaaggtcattacttcacattaaaatgtaggggattttcctcacttaaatatgtgtcgccttagcctgtct

SEQ ID NO: 59173 - DNA, 110 bp, synthetic construct
  source 1..110: mol_type = other DNA
acattaaaatgtaggggattttcctcacttaaatatgtgtcgccttagcctgtctagttatggccatttaatatgaacaccgtagggaaatggttaagtactgtttaaat

SEQ ID NO: 59174 - DNA, 110 bp, synthetic construct
  source 1..110: mol_type = other DNA
ccatgctctccctggctttcagtcttgtttctacaactcattttatccaaaaccgcaactgggcatctatagaccagattaagccttccgggaatgggaggggaagggag

SEQ ID NO: 59175 - DNA, 110 bp, synthetic construct
  source 1..110: mol_type = other DNA
caactgggcatctatagaccagattaagccttccgggaatgggaggggaagggagaagaggaggggacagttcaatcaaatgcttctcaccaggccgctgtgtcccccgc

SEQ ID NO: 59176 - DNA, 110 bp, synthetic construct; identical to SEQ ID NO: 59174
  source 1..110: mol_type = other DNA

SEQ ID NO: 59177 - DNA, 110 bp, synthetic construct; identical to SEQ ID NO: 59175
  source 1..110: mol_type = other DNA

SEQ ID NO: 59178 - DNA, 110 bp, synthetic construct
  source 1..110: mol_type = other DNA
tctccccctaaataacctaaacatgctgggcagcagtttaagcccaaagagctatttacagtttctattttctaagagctcttgccatttactctgctgctgttctggat

SEQ ID NO: 59179 - DNA, 110 bp, synthetic construct
  source 1..110: mol_type = other DNA
ttacagtttctattttctaagagctcttgccatttactctgctgctgttctggatgctgaggcacctagcaccacaaatcatgtacatggtaccgttgggctaacatctg

SEQ ID NO: 59180 - DNA, 110 bp, synthetic construct
  source 1..110: mol_type = other DNA
tggttttacctattgtgagaagaatcctctttaccttaagaggccatcagctggagcactggaagcaattaccactattctacacttggacgtcaacgtgggaactgctc

SEQ ID NO: 59181 - DNA, 110 bp, synthetic construct
  source 1..110: mol_type = other DNA
gcactggaagcaattaccactattctacacttggacgtcaacgtgggaactgctctctgtggcagacattctttccgcattggaagggaagccggcaaaagtggggcagg

SEQ ID NO: 59182 - DNA, 110 bp, synthetic construct; identical to SEQ ID NO: 59180
  source 1..110: mol_type = other DNA

SEQ ID NO: 59183 - DNA, 110 bp, synthetic construct; identical to SEQ ID NO: 59181
  source 1..110: mol_type = other DNA

SEQ ID NO: 59184 - DNA, 110 bp, synthetic construct
  source 1..110: mol_type = other DNA
tgcttaggatgagaaacaatgaaattaagggaaggagatataatacatcatcatttctcttcctttaacccagcttcgaggtggacagagggagacacattatataaatg

SEQ ID NO: 59185 - DNA, 110 bp, synthetic construct
  source 1..110: mol_type = other DNA
tctcttcctttaacccagcttcgaggtggacagagggagacacattatataaatgagaaagatgggcagagttggtgataaagtcacattcacttccctttcagagtagc

SEQ ID NO: 59186 - DNA, 110 bp, synthetic construct
  source 1..110: mol_type = other DNA
atggtaaattgctttggctgatcagtcagactcatgtttaattaagagatgagattattgactagacccacagaagctgctcccctaggatcttctgtcctaattttaca

SEQ ID NO: 59187 - DNA, 110 bp, synthetic construct
  source 1..110: mol_type = other DNA
gaactcagaatcacacaaaaatagttacatcaaaggatagcttgggataaggacagtttgttcattacaaatattcactacaggattactgtaaataggttgccccatgt

SEQ ID NO: 59188 - DNA, 110 bp, synthetic construct
  source 1..110: mol_type = other DNA
tctgtctgatgtatttaagtatttaatcatttatttatattagtatgggttcatatatatttgctggagtatgtaccccaaacgctgctactgattttgttgttcacatg

SEQ ID NO: 59189 - DNA, 110 bp, synthetic construct
  source 1..110: mol_type = other DNA
tatatttgctggagtatgtaccccaaacgctgctactgattttgttgttcacatggttccagctgtggtcactgtgagatctgtcaggccgcctcctgtgtgcctttgat

SEQ ID NO: 59190 - DNA, 110 bp, synthetic construct
  source 1..110: mol_type = other DNA
aatcatacgatgaaggtagtagtacttacaagggaactggaaattcatctaggcaaggactcaaataacactggcattcaacaagaagttgaaggggccagaagtcatat

SEQ ID NO: 59191 - DNA, 110 bp, synthetic construct
  source 1..110: mol_type = other DNA
aggactcaaataacactggcattcaacaagaagttgaaggggccagaagtcatatggggttccccatgattatcaacctcagaggaagttaattaaaacaaaaaaaatgc

SEQ ID NO: 59192 - DNA, 110 bp, synthetic construct; identical to SEQ ID NO: 59190
  source 1..110: mol_type = other DNA

SEQ ID NO: 59193 - DNA, 110 bp, synthetic construct; identical to SEQ ID NO: 59191
  source 1..110: mol_type = other DNA

SEQ ID NO: 59194 - DNA, 110 bp, synthetic construct
  source 1..110: mol_type = other DNA
agaaaagtgtaatagtgaaaataattagtggaagacccctgggcttaaagggagaataattttttatgtcatctagttggagagagaacttcacctggagaactttaaaa

SEQ ID NO: 59195 - DNA, 110 bp, synthetic construct
  source 1..110: mol_type = other DNA
cccctgggcttaaagggagaataattttttatgtcatctagttggagagagaacttcacctggagaactttaaaaaaaaaaaaagtttcccctttttcttttgcaaaaac

SEQ ID NO: 59196 - DNA, 110 bp, synthetic construct
  source 1..110: mol_type = other DNA
taagtttccagaagaagagtcaagccacatccatgctgattctctagctgcaggggaatcagcaagctatccaaatgattccctttcatcctctcttagtttgtgttagg

SEQ ID NO: 59197 - DNA, 110 bp, synthetic construct
  source 1..110: mol_type = other DNA
gaatcagcaagctatccaaatgattccctttcatcctctcttagtttgtgttaggtgtcaaccaaaaaaaaaacaaaaacaaaaatcccaaacaaaaaccaaacaaaaca

SEQ ID NO: 59198 - DNA, 110 bp, synthetic construct
  source 1..110: mol_type = other DNA
aacaggaggcgcttgttagttctctctctagggtgaaaaaaaacagtctccttggacagcagttaatgtaaaagctatgtacgaaaagaacctaacaggagtttctgctg

SEQ ID NO: 59199 - DNA, 110 bp, synthetic construct
  source 1..110: mol_type = other DNA
acagcagttaatgtaaaagctatgtacgaaaagaacctaacaggagtttctgctgtggcacagtgggttgagaacccacctggagcggctcaggtcactgcagaggtgtg

SEQ ID NO: 59200 - DNA, 110 bp, synthetic construct
  source 1..110: mol_type = other DNA
aaaaagttcttcaatataataaagaactttaaaaactaatcactagctcaatacaatctcagacagtggttacctgctgaatgaaaaattcagacccagtctcagtgacc

SEQ ID NO: 59201 - DNA, 110 bp, synthetic construct
  source 1..110: mol_type = other DNA
atctcagacagtggttacctgctgaatgaaaaattcagacccagtctcagtgacctcttttgcagtggtagtacaaaatagatcacaaactttggcatgtaccaagtagc

SEQ ID NO: 59202 - DNA, 110 bp, synthetic construct
  source 1..110: mol_type = other DNA
tttgtcctaaactgtgttcctgaaccttgaaactatgagcttcgaatagctgggctaaggaatagtttctcttgataaataagcaattaagatatacaaaaacattaact

SEQ ID NO: 59203 - DNA, 110 bp, synthetic construct
  source 1..110: mol_type = other DNA
gttcctgaaccttgaaactatgagcttcgaatagctgggctaaggaatagtttctcttgataaataagcaattaagatatacaaaaacattaactcaaagtgaatcaaag

SEQ ID NO: 59204 - DNA, 110 bp, synthetic construct
  source 1..110: mol_type = other DNA
cagaggacctgtggctccctgagaggtagcttagtgcagcaagtgtgagagcatagacccaatcactcagccacacgtcaggtgcagaagtttaggattttgcccgagtg

SEQ ID NO: 59205 - DNA, 110 bp, synthetic construct
  source 1..110: mol_type = other DNA
gcctgggaatctccacatgccacaagtttggccctaaaatgacaaaagacaaaaatgatcgagctaaaacaggacagaaggggcagaaggagggatggcccaggagaaag

SEQ ID NO: 59206 - DNA, 110 bp, synthetic construct; identical to SEQ ID NO: 59205
  source 1..110: mol_type = other DNA

SEQ ID NO: 59207 - DNA, 110 bp, synthetic construct
  source 1..110: mol_type = other DNA
gtaggacgtgaaatagtgtattttcttcaattcaagcatcataacaggtctgctgatttcctgacactgatgttttcagtgattccagtctagataccagtaggaggctc

SEQ ID NO: 59208 - DNA, 110 bp, synthetic construct
  source 1..110: mol_type = other DNA
atttcctgacactgatgttttcagtgattccagtctagataccagtaggaggctctgggtatctagtcttgtgccccgatggttacaccacagacagagcatagctgcca

SEQ ID NO: 59209 - DNA, 110 bp, synthetic construct
  source 1..110: mol_type = other DNA
attttccgccaaacacatttcaaccccatccctataccggcccttcaattcttagctgagacattgcctcgactggaaccaccccgcgtctgtaaacagcattcatttcc

SEQ ID NO: 59210 - DNA, 110 bp, synthetic construct
  source 1..110: mol_type = other DNA
ctgagacattgcctcgactggaaccaccccgcgtctgtaaacagcattcatttcctggaggagccgtcacaaaccacaaacagagtggctgaaaacagcataaatttatt

SEQ ID NO: 59211 - DNA, 110 bp, synthetic construct
  source 1..110: mol_type = other DNA
cagactgattactcatgaaagggaaaaaaatggtttacataaactattcacatatagacttaaacgtgtcattaggtaactagtttatcttacatatggggaagtgcaat

SEQ ID NO: 59212 - DNA, 110 bp, synthetic construct
  source 1..110: mol_type = other DNA
acctgggtccaagttttacaaatttaattatgattaactgatttcttatagggtctggacaatctttccaacagcttgtgccagagtgttcttcacaggaagggagccaa

SEQ ID NO: 59213 - DNA, 110 bp, synthetic construct
  source 1..110: mol_type = other DNA
tggacaatctttccaacagcttgtgccagagtgttcttcacaggaagggagccaacatgctaatctaccaagtatttttagcattgaagcaagagattcttctcagggca

SEQ ID NO: 59214 - DNA, 110 bp, synthetic construct
  source 1..110: mol_type = other DNA
agtctagagaataaggcttgcagtagaatcaggatcaaaggaagctagatagtgagaaccacagccagggccgtggcactactcttgccatcccaacactactgccttca

SEQ ID NO: 59215 - DNA, 110 bp, synthetic construct
  source 1..110: mol_type = other DNA
ttgaagatagtttcatatctgggcataaaatggtgttttaagtgcacgtctcccctcaacagtctgagctgatcatgttctttttcttgaaaacaacaaacacacccaaa

SEQ ID NO: 59216 - DNA, 110 bp, synthetic construct
  source 1..110: mol_type = other DNA
tcaacagtctgagctgatcatgttctttttcttgaaaacaacaaacacacccaaatggctacaggatgttcagaagttgccatgcccctgaacctcgtgtctggaccaac

SEQ ID NO: 59217 - DNA, 110 bp, synthetic construct
  source 1..110: mol_type = other DNA
ctctctctctttaggggaagtggggcaactccataaccctggataccatggcagtgagacattcccagctaccactctcttaccggggccattgagtgagcagcagcttc

SEQ ID NO: 59218 - DNA, 110 bp, synthetic construct
  source 1..110: mol_type = other DNA
tctaggacttgtgcctacatggttgtcccagggccctgtagtcagttccaaatccaggagggtgggctggtgggtggatagctcctgctggcaggcatgctcttttggga

SEQ ID NO: 59219 - DNA, 110 bp, synthetic construct
  source 1..110: mol_type = other DNA
tatttgcatgtgttgctttacaaaaacagatttgctgaccctcgttctaaaatatgaggtggggggaatgtcagtgtttcaactaccaaatttagaacttacgagctggt

SEQ ID NO: 59220 - DNA, 110 bp, synthetic construct
  source 1..110: mol_type = other DNA
gaggtggggggaatgtcagtgtttcaactaccaaatttagaacttacgagctggtttgatatatgaggggatatgtaaatagaaataaagataaatatattttaaaattt

SEQ ID NO: 59221 - DNA, 110 bp, synthetic construct
  source 1..110: mol_type = other DNA
tgtgctgtgtttgagcaacagtgcactgaaagcaaagccagcttgtatcccaggacagaagctgccagtgtgcgctggatctcggccctgctgccatggggtcatcctcc

SEQ ID NO: 59222 - DNA, 110 bp, synthetic construct
  source 1..110: mol_type = other DNA
cagaagctgccagtgtgcgctggatctcggccctgctgccatggggtcatcctccccactccttgtcctcttgctgggaaaggcgcctgctctcttagaatcacggccag

SEQ ID NO: 59223 - DNA, 110 bp, synthetic construct
  source 1..110: mol_type = other DNA
gcacgtggcccctctccgatttcagatgttattcacatgggaaaaaggggtgggtgcaggttaccagctggagaactcggcacccggagggtctttccagcagaagagct

SEQ ID NO: 59224 - DNA, 110 bp, synthetic construct
  source 1..110: mol_type = other DNA
gcaggttaccagctggagaactcggcacccggagggtctttccagcagaagagctgttgggcttggcgggggcagggagcccaccgttggcccaggaggtccttcgttca

SEQ ID NO: 59225 - DNA, 110 bp, synthetic construct; identical to SEQ ID NO: 59223
  source 1..110: mol_type = other DNA

SEQ ID NO: 59226 - DNA, 110 bp, synthetic construct; identical to SEQ ID NO: 59224
  source 1..110: mol_type = other DNA

SEQ ID NO: 59227 - DNA, 110 bp, synthetic construct
  source 1..110: mol_type = other DNA
tgatcatttacttggtcactgagacagctgcctttgtaaaggaacctagagctagagaagtatgtcctaaaaatgagaccttatgaaattctaacgtggccaacacacaa

SEQ ID NO: 59228 - DNA, 110 bp, synthetic construct
  source 1..110: mol_type = other DNA
agaagtatgtcctaaaaatgagaccttatgaaattctaacgtggccaacacacaacatcgagaataaacagacccaggaggggccaaaagaggtcatgcctttctcctgg

SEQ ID NO: 59229 - DNA, 110 bp, synthetic construct
  source 1..110: mol_type = other DNA
aatattctttgctgaaacggcaggtgcattgtatatgtggtctgcagagctgagtggagacagaaggctggagagggagacatgggccccaacaagaatcataaggattt

SEQ ID NO: 59230 - DNA, 110 bp, synthetic construct
  source 1..110: mol_type = other DNA
ggagacagaaggctggagagggagacatgggccccaacaagaatcataaggatttgaacagtttccagagagtagcaggaattcacagaagggtgaaatagagactgaag

SEQ ID NO: 59231 - DNA, 110 bp, synthetic construct
  source 1..110: mol_type = other DNA
ctgaaaaggtgaaatttctaaaacaacttttaaatttttaaaacagaaggagaagttcccactgtagcacaatggcattggtggcatcttgggaatgctgggacataggt

SEQ ID NO: 59232 - DNA, 110 bp, synthetic construct
  source 1..110: mol_type = other DNA
ttctaaaacaacttttaaatttttaaaacagaaggagaagttcccactgtagcacaatggcattggtggcatcttgggaatgctgggacataggttcaatccccagcctg

SEQ ID NO: 59233 - DNA, 110 bp, synthetic construct
  source 1..110: mol_type = other DNA
tttaaatctttcctgaagcaccatggagcacacacagataaacagaaaacatttttgctgcatggaatcttcggtgcttgtaagttcctctctccagaagcagttaattg

SEQ ID NO: 59234 - DNA, 110 bp, synthetic construct
  source 1..110: mol_type = other DNA
tgctgcatggaatcttcggtgcttgtaagttcctctctccagaagcagttaattgactttcagagcattcactatagaccaagaggcagacgtatgttttggaaagattt

SEQ ID NO: 59235 - DNA, 110 bp, synthetic construct
  source 1..110: mol_type = other DNA
tgacttggaaatgttcactacgtctcccactgtttgtggtgcttctcctgcccatctcctgtcttacctccctggctcatccatcccagctcccaacatccctgttcgtt

SEQ ID NO: 59236 - DNA, 110 bp, synthetic construct
  source 1..110: mol_type = other DNA
ctcctgtcttacctccctggctcatccatcccagctcccaacatccctgttcgtttctcacgcacaggagtttaactctctgttttccttttagtcagagacacacacac

SEQ ID NO: 59237 - DNA, 110 bp, synthetic construct
  source 1..110: mol_type = other DNA
ttttttttccacataccctttctgatgctgtgtccctccctcacccccaagtcctttgacacccaatttgctccaagctggttacccttccttccaaagcacaagataca

SEQ ID NO: 59238 - DNA, 110 bp, synthetic construct
  source 1..110: mol_type = other DNA
tgccaacggcagagggggtatggctgcttttgctgtccctgatacacgtggtcctcttcaactcctgcacccattgtgtcaatccagctgtcctcagtacgtgcccagag

SEQ ID NO: 59239 - DNA, 110 bp, synthetic construct
  source 1..110: mol_type = other DNA
cttcaactcctgcacccattgtgtcaatccagctgtcctcagtacgtgcccagagctgtttttcttttcaaaagcagccgggtggagcggagagggcagggatttggggg

SEQ ID NO: 59240 - DNA, 110 bp, synthetic construct
  source 1..110: mol_type = other DNA
tagtgggcatttttcaagtaaacggatcttcactgcttcatctctttttttccgacttcctctcttgacttctcagccaggctcttgctctttatttccagctgcccaaa

SEQ ID NO: 59241 - DNA, 110 bp, synthetic construct
  source 1..110: mol_type = other DNA
ggcaggagatacagagagagactggagttcacacctcggcctccatcctgttacagcaccaccggattgaaagaaaagtcatgggtcactggtgccaaggaggggatggt

SEQ ID NO: 59242 - DNA, 110 bp, synthetic construct
  source 1..110: mol_type = other DNA
atgcagaccccgtgatgctcattttttggtcactgaccttgtcttagagggaactagaagtgagatgattcccttagggcggagcagtgccgagggagctcatcgagtgg

SEQ ID NO: 59243 - DNA, 110 bp, synthetic construct
  source 1..110: mol_type = other DNA
agaagtgagatgattcccttagggcggagcagtgccgagggagctcatcgagtggctgtctcttggcttagcagagagatgacccctgggcccgtctctctggaaggcct

SEQ ID NO: 59244 - DNA, 110 bp, synthetic construct
  source 1..110: mol_type = other DNA
cgccacgacgggcactccgactttttcattaaggtgtattttttagtggcctataatgtacatctttgttgttgtggatgcccatttctattctgagaaccagaagcagc

SEQ ID NO: 59245 - DNA, 110 bp, synthetic construct; identical to SEQ ID NO: 59244
  source 1..110: mol_type = other DNA

SEQ ID NO: 59246 - DNA, 110 bp, synthetic construct
  source 1..110: mol_type = other DNA
agattgcctgaagattaaggagcccaaccagccccctaccatgttggcttagtcgatagctcacagggaaaagcgagtctgtctctggacttctgatccttggaacctgt

SEQ ID NO: 59247 - DNA, 110 bp, synthetic construct
  source 1..110: mol_type = other DNA
gacgctccccctcctccgccccgaaattccggtgtcactggctgcagtgcaaatgttagaacagatgcgcggctgcggctgacacccactcagctagcatttggtccgtg

SEQ ID NO: 59248 - DNA, 110 bp, synthetic construct
  source 1..110: mol_type = other DNA
cctttaagacttctgatttgtcacctcctccagaaaggctaggcccccggggggaggtccacttcctgagttagatccgccccgtgatgctccctataacgtctctattt

SEQ ID NO: 59249 - DNA, 110 bp, synthetic construct
  source 1..110: mol_type = other DNA
ggtccacttcctgagttagatccgccccgtgatgctccctataacgtctctatttttggactcgccacgttggcttataaatacctgctcctgggtctgttccccccagt

SEQ ID NO: 59250 - DNA, 110 bp, synthetic construct
  source 1..110: mol_type = other DNA
gggctgccacgccctaagaattgtggtccatgcgttccttgaaaaactcttccttcctcacagggctctctctgctttgacaggtacctctacctccacgatccatttct

SEQ ID NO: 59251 - DNA, 110 bp, synthetic construct
  source 1..110: mol_type = other DNA
cctcacagggctctctctgctttgacaggtacctctacctccacgatccatttctccccagctctttttgctctaggtctcacctgagcagacactgctaacgaagccaa

SEQ ID NO: 59252 - DNA, 110 bp, synthetic construct; identical to SEQ ID NO: 59250
  source 1..110: mol_type = other DNA

SEQ ID NO: 59253 - DNA, 110 bp, synthetic construct; identical to SEQ ID NO: 59251
  source 1..110: mol_type = other DNA

SEQ ID NO: 59254 - DNA, 110 bp, synthetic construct
  source 1..110: mol_type = other DNA
agcaccaaggcagtcctgtccagaccactcacctcagtttttttccgctgtacaactaggcttcagtaagcttaattttgccttaactgtctattctagagtcaagtctg

SEQ ID NO: 59255 - DNA, 110 bp, synthetic construct
  source 1..110: mol_type = other DNA
ctaggcttcagtaagcttaattttgccttaactgtctattctagagtcaagtctggccacgtggcactaatggacaacccatatatttggagagactccaagaaatccat

SEQ ID NO: 59256 - DNA, 110 bp, synthetic construct
  source 1..110: mol_type = other DNA
gtacataacacaagtgcctgagagatctttgtagacatggagcccatgacgtcattcctctacgcaaacctcctacacctgacgttgcccacgggacaccaccagcagtc

SEQ ID NO: 59257 - DNA, 110 bp, synthetic construct
  source 1..110: mol_type = other DNA
tcctctacgcaaacctcctacacctgacgttgcccacgggacaccaccagcagtcctgagcttggtgtgaggctctttaggaccagaccaaacctctcccttcaggctgt

SEQ ID NO: 59258 - DNA, 110 bp, synthetic construct
  source 1..110: mol_type = other DNA
aagtgagaaaagcgggatgaaaaagagccagatgaagatgtatattcaggggaaggctagctttaccttgatctcatggggaacagtagacagcgagtaacagcacagaa

SEQ ID NO: 59259 - DNA, 110 bp, synthetic construct
  source 1..110: mol_type = other DNA
gctagctttaccttgatctcatggggaacagtagacagcgagtaacagcacagaactttcccacactaaggcaagcggggataagttttgcatcccttcatcagtcagcc

SEQ ID NO: 59260 - DNA, 110 bp, synthetic construct; identical to SEQ ID NO: 59258
  source 1..110: mol_type = other DNA

SEQ ID NO: 59261 - DNA, 110 bp, synthetic construct; identical to SEQ ID NO: 59259
  source 1..110: mol_type = other DNA

SEQ ID NO: 59262 - DNA, 110 bp, synthetic construct
  source 1..110: mol_type = other DNA
tccagtaaagcctatgcatccctgatttgaagagagcgatatcctaacaagcctgccaggatctgatacctgaaaaatgtccgcacaagatgctgaatgacttgcctgct

SEQ ID NO: 59263 - DNA, 110 bp, synthetic construct
  source 1..110: mol_type = other DNA
ccaggatctgatacctgaaaaatgtccgcacaagatgctgaatgacttgcctgctggataaggttgcttaagactatgccgtttattgttgggggaggggattgattgct

SEQ ID NO: 59264 - DNA, 110 bp, synthetic construct
  source 1..110: mol_type = other DNA
aaataagaaagaatgatagaaatttcatcttcaaggagattatgagactccagaaatacaactacatgatatccgaaaagacaataggctgtcaagaactttgtagtgtg

SEQ ID NO: 59265 - DNA, 110 bp, synthetic construct
  source 1..110: mol_type = other DNA
tgtctagattattctttttctctacatgttttaaagatgctgctccattgtcttccagcttgaatagttctaacaagaaatctcctataattgcatctttgttccttagc

SEQ ID NO: 59266 - DNA, 110 bp, synthetic construct; identical to SEQ ID NO: 59265
  source 1..110: mol_type = other DNA

SEQ ID NO: 59267 - DNA, 110 bp, synthetic construct; identical to SEQ ID NO: 59265
  source 1..110: mol_type = other DNA

SEQ ID NO: 59268 - DNA, 110 bp, synthetic construct; identical to SEQ ID NO: 59265
  source 1..110: mol_type = other DNA

SEQ ID NO: 59269 - DNA, 110 bp, synthetic construct
  source 1..110: mol_type = other DNA
cccagttgatctggatggaaggtactattgttgagtgggtggattcgtttaaaagaggggcaaaaaagcttcaatttcatgacatcatttatcctgttacacacaatgag

SEQ ID NO: 59270 - DNA, 110 bp, synthetic construct
  source 1..110: mol_type = other DNA
aggggcaaaaaagcttcaatttcatgacatcatttatcctgttacacacaatgaggaaagagatcacaggaaagtggacagagcaaactgttgctcatctttaggaaaca

SEQ ID NO: 59271 - DNA, 110 bp, synthetic construct
  source 1..110: mol_type = other DNA
gagtgtgtcccttccatcttgcaatggactattgctgtgtccagctgactttatgacttggtgagtccaaaaaaactcaactactaatagacagttccagtggcatggtc

SEQ ID NO: 59272 - DNA, 110 bp, synthetic construct
  source 1..110: mol_type = other DNA
aatagatgattctccagtggaaatggggctgttatcgctaaaaaaagaacaatggttgctgggcagctgtctttatagtgtcaaaggcactgctggtatcagaaggggag

SEQ ID NO: 59273 - DNA, 110 bp, synthetic construct
  source 1..110: mol_type = other DNA
ttgctgggcagctgtctttatagtgtcaaaggcactgctggtatcagaaggggagacagggcaaagggaggggagaaaaggagccagccaccactgtgatcaatagaatg

SEQ ID NO: 59274 - DNA, 110 bp, synthetic construct
  source 1..110: mol_type = other DNA
gggtcaactaggtggcatatggtattggtggaggtgaccaggcagtattcagctgggaaatggattagtctgaaagatcaaaaatgacctgattgacttctgttatcttg

SEQ ID NO: 59275 - DNA, 110 bp, synthetic construct
  source 1..110: mol_type = other DNA
ggaaatggattagtctgaaagatcaaaaatgacctgattgacttctgttatcttgctggggataacaggactctattggtcaaagcagtcacagtcttctcaggttcaaa

SEQ ID NO: 59276 - DNA, 110 bp, synthetic construct
  source 1..110: mol_type = other DNA
tgacaccactgatgctttagtgaaacttggtctaagctttgcacaaccactctaccttggccttagacagcttcaagatctgatttggaagaggaatgtagtaaaaatcc

SEQ ID NO: 59277 - DNA, 110 bp, synthetic construct
  source 1..110: mol_type = other DNA
cttggccttagacagcttcaagatctgatttggaagaggaatgtagtaaaaatcctggaggaataacagttgtccactttcagtagtgaactgaaagcgcatgctctggg

SEQ ID NO: 59278 - DNA, 110 bp, synthetic construct
  source 1..110: mol_type = other DNA
tccaggctgccatgctgatctatcagtctgttcccaggagcatcaaactgttttaaataagataaacagataatgagaatctgcatttgacttccttaccttttcatttt

SEQ ID NO: 59279 - DNA, 110 bp, synthetic construct
  source 1..110: mol_type = other DNA
ttgaacataaaatatgaatagagtgggccctcaattcactgtttcctgcgtccttactctgtatgccaagccctgatcccagcactctccaaaccctaggctaagaccag

SEQ ID NO: 59280 - DNA, 110 bp, synthetic construct
  source 1..110: mol_type = other DNA
ttcacatagtcatttttactctttttaatttccagatctgagtttgcagaacagcatattaggagagcctcgtttctacatccattatatttcattagggctaatttagc

SEQ ID NO: 59281 - DNA, 110 bp, synthetic construct
  source 1..110: mol_type = other DNA
ccgttcttcttaaaatccccttggaatgaccataagcaaagaagaggaagaattcctgcaagagctgggattggggaggggggcatcaatgtaatttactagaagtcagt

SEQ ID NO: 59282 - DNA, 110 bp, synthetic construct
  source 1..110: mol_type = other DNA
ctgcaagagctgggattggggaggggggcatcaatgtaatttactagaagtcagtaagacagactctagatggtgtggttcccaaggaagagcaggagtaggtgggggtc

SEQ ID NO: 59283 - DNA, 110 bp, synthetic construct
  source 1..110: mol_type = other DNA
gataccaaaacactgtaaaagtataatggatcataatgcttatcccatgttctataggaagcttggtcttcactgttttctacattattatttctcttgtttacattctt

SEQ ID NO: 59284 - DNA, 110 bp, synthetic construct
  source 1..110: mol_type = other DNA
gcatccacatagatactagtcaggttcttcacttgctgagccacaatgggcattccttgactctttatttagggccctatcatttctatgttggctctttttttcttctc

SEQ ID NO: 59285 - DNA, 110 bp, synthetic construct
  source 1..110: mol_type = other DNA
attaggaccagttgtgactgaatccaagatgtggaaactggattcaaaaattggttgtggaagcccaaatgaagttggccagctctgtgttcttgtttcatcactagaca

SEQ ID NO: 59286 - DNA, 110 bp, synthetic construct
  source 1..110: mol_type = other DNA
tgtggaagcccaaatgaagttggccagctctgtgttcttgtttcatcactagacatagcacagcacatgtgagaaaagtgaaaaagtgagagggtgaatctggggaagaa

SEQ ID NO: 59287 - DNA, 110 bp, synthetic construct
  source 1..110: mol_type = other DNA
catctgcaatttgcaaaacaaattcaagataaagtacccagctgggcaagttagtacagtagatctcacaaactggtttgccgttcaatcgatctttcttttttccctgc

SEQ ID NO: 59288 - DNA, 110 bp, synthetic construct
  source 1..110: mol_type = other DNA
acagtagatctcacaaactggtttgccgttcaatcgatctttcttttttccctgcttgtctctttccccctttccctcttctttccctgtccctgtgaactaactgctca

SEQ ID NO: 59289 - DNA, 110 bp, synthetic construct
  source 1..110: mol_type = other DNA
aaggtcaccaccaagcctagctggatggatgatttaagatggggaagagaagcgccctcagcgaggtgtggaagacatccccatggataaaagaggttccattaggattt

SEQ ID NO: 59290 - DNA, 110 bp, synthetic construct
  source 1..110: mol_type = other DNA
aattcacacaagtcagccccaagtagccctggttttgcaaatcccactctctcagtgttgtggcttctgcagctgtgatctcagagactcgggccctccctacacttgca

SEQ ID NO: 59291 - DNA, 110 bp, synthetic construct
  source 1..110: mol_type = other DNA
gccaccactgaagagcatcatttactgagtaaacatctaagcccaagaatacggtggtcaaatgcagtgagcttagaccttcagtttaaaagattctctgtgctttattc

SEQ ID NO: 59292 - DNA, 110 bp, synthetic construct
  source 1..110: mol_type = other DNA
ggtcaaatgcagtgagcttagaccttcagtttaaaagattctctgtgctttattccagccactatcagcagattctaaatcacgcgggagcagagcccatgggcctgatg

SEQ ID NO: 59293 - DNA, 110 bp, synthetic construct
  source 1..110: mol_type = other DNA
ggagaagttttttacacaatggaacggggttttcagtgtgcacagtggaaagaactggaagggaagtcagtgaaaggaagataagctgttggaagaaagggaggattcct

SEQ ID NO: 59294 - DNA, 110 bp, synthetic construct
  source 1..110: mol_type = other DNA
tggaagggaagtcagtgaaaggaagataagctgttggaagaaagggaggattcctgtaccagatgacatcagaagagaggattcatgaccccagagcttttgggggtgag

SEQ ID NO: 59295 - DNA, 110 bp, synthetic construct
  source 1..110: mol_type = other DNA
atatgattgacataaaagagctctacgtatttaatgtacacaactcaatgagtctggggataaatacatacccaggaaaccatcaccactgtcaaggccaaaaacatatc

SEQ ID NO: 59296 - DNA, 110 bp, synthetic construct
  source 1..110: mol_type = other DNA
aatcaagcgatgtcaacatatcttttgcatatgatttttgcctggtgccatctgttcgggggggggaaacaacaatcacttttcctttataaaatatttaaacaactgga

SEQ ID NO: 59297 - DNA, 110 bp, synthetic construct
  source 1..110: mol_type = other DNA
tcgggggggggaaacaacaatcacttttcctttataaaatatttaaacaactggacaaagatttcttcccatagttttaggaagatacctggttggctggttagaaacaa

SEQ ID NO: 59298 - DNA, 110 bp, synthetic construct
  source 1..110: mol_type = other DNA
gatctgataagttaatactttcatgtttggttttgttcttttcttcctcatatactgaagtgttgctagtgttaatgagatgctcactgttgttcccttcactttcaact

SEQ ID NO: 59299 - DNA, 110 bp, synthetic construct
  source 1..110: mol_type = other DNA
tctttttaagtcccaggttggagtattagtctgccaagccatggaaccctgaaaattaatctaagctcctctcacttcatttgtctctaaactgtgtgttttactagtac

SEQ ID NO: 59300 - DNA, 110 bp, synthetic construct
  source 1..110: mol_type = other DNA
ttaatctaagctcctctcacttcatttgtctctaaactgtgtgttttactagtacctacttcatggggtgattgggagcattaaatgattcgtaagtgtctagaccaata

SEQ ID NO: 59301 - DNA, 110 bp, synthetic construct
  source 1..110: mol_type = other DNA
aacattgaatagaccccctgtgctatatagtagctccttgttaatcatctattttatatacagtagagtgtatgtgttatccgtcatcttttgtttgtatgctcagtttt

SEQ ID NO: 59302 - DNA, 110 bp, synthetic construct
  source 1..110: mol_type = other DNA
ccctgtgctatatagtagctccttgttaatcatctattttatatacagtagagtgtatgtgttatccgtcatcttttgtttgtatgctcagttttttaaaatatgtgttc

SEQ ID NO: 59303 - DNA, 110 bp, synthetic construct
  source 1..110: mol_type = other DNA
atgcataaatagaatgtctggtagtcaggctcttgacaagggttaaacagcaggtaacttagggttatattttctgacaagaacctgggattcaaatatgtatgaatccc

SEQ ID NO: 59304 - DNA, 110 bp, synthetic construct
  source 1..110: mol_type = other DNA
agaatctgcattctcagcctccccctctgcctcctttggctgagctcacttcagcccgggttggtgcactgttcaagacagatcactgtcgtctccactctgaggggtcc

SEQ ID NO: 59305 - DNA, 110 bp, synthetic construct
  source 1..110: mol_type = other DNA
gtgtcatcttagagctaccacactataattaagcaaagaaaataaataggacaatagcgaggaatcaattaaatattgttgtataacaaaacaccttacagtgatagcaa

SEQ ID NO: 59306 - DNA, 110 bp, synthetic construct
  source 1..110: mol_type = other DNA
agcgaggaatcaattaaatattgttgtataacaaaacaccttacagtgatagcaaattaaggctggccttgtgaaattggcttagctgttctgcttatctgccccaagct

SEQ ID NO: 59307 - DNA, 110 bp, synthetic construct
  source 1..110: mol_type = other DNA
gcagagtgtgaagcaatgtaatggtgcccaaagctgagaaacagcagcaggaggaagtctgtgctggcaggagaagctcagcactgccttacaggcaaggaaatgaggcc

SEQ ID NO: 59308 - DNA, 110 bp, synthetic construct
  source 1..110: mol_type = other DNA
agtctgtgctggcaggagaagctcagcactgccttacaggcaaggaaatgaggcctcacattgtaaacctccctgtggctagcagctgcagccactgtttctggaacaga

SEQ ID NO: 59309 - DNA, 110 bp, synthetic construct; identical to SEQ ID NO: 59307
  source 1..110: mol_type = other DNA

SEQ ID NO: 59310 - DNA, 110 bp, synthetic construct; identical to SEQ ID NO: 59308
  source 1..110: mol_type = other DNA

SEQ ID NO: 59311 - DNA, 110 bp, synthetic construct
  source 1..110: mol_type = other DNA
caggtggcaataattcgtagttcattggattgcttttgttgtaggtgggggcagcagtgtctcctgcaatccatcctgctacgaggtagctttaaggactttcttctgta

SEQ ID NO: 59312 - DNA, 110 bp, synthetic construct
  source 1..110: mol_type = other DNA
agtgtctcctgcaatccatcctgctacgaggtagctttaaggactttcttctgtagtaggcaatttcagcagctgctcttacagcctctccctttgctgcaaaggctcta

SEQ ID NO: 59313 - DNA, 110 bp, synthetic construct
  source 1..110: mol_type = other DNA
aacacagactctcctctgtgtcatgtggacatcaccatcctgtgcaacagcaagggagctcactttgagggtctgatgtggcagatgctcgcctgggaagttctgtgcat

SEQ ID NO: 59314 - DNA, 110 bp, synthetic construct
  source 1..110: mol_type = other DNA
gagctcactttgagggtctgatgtggcagatgctcgcctgggaagttctgtgcatgtgtggcaccacctccagtgaacactcatgggaggtcatgcctgacttctccttc

SEQ ID NO: 59315 - DNA, 110 bp, synthetic construct
  source 1..110: mol_type = other DNA
tatgagaagaactgaataaagtgacatcattggatttgctgggttcacacagtgtcgattccaccagcaccaacatccctgccacctcataccgaggaagctatatttgt

SEQ ID NO: 59316 - DNA, 110 bp, synthetic construct
  source 1..110: mol_type = other DNA
cgattccaccagcaccaacatccctgccacctcataccgaggaagctatatttgtggaaaacgaagttaattgtttgttttttgtggggttttaattttttttttgtttt

SEQ ID NO: 59317 - DNA, 110 bp, synthetic construct; identical to SEQ ID NO: 59315
  source 1..110: mol_type = other DNA

SEQ ID NO: 59318 - DNA, 110 bp, synthetic construct; identical to SEQ ID NO: 59316
  source 1..110: mol_type = other DNA

SEQ ID NO: 59319 - DNA, 110 bp, synthetic construct
  source 1..110: mol_type = other DNA
tggatagactgccttttctggccaactataaaccatgctgcatatagaaatttaagtaaataagactctctacagtcatatcattaccactgaatgatgttgaatagaag

SEQ ID NO: 59320 - DNA, 110 bp, synthetic construct
  source 1..110: mol_type = other DNA
gtaaataagactctctacagtcatatcattaccactgaatgatgttgaatagaagttttctattggctgatttctaaaaccataagacaacaggcagtgagtactttcat

SEQ ID NO: 59321 - DNA, 110 bp, synthetic construct
  source 1..110: mol_type = other DNA
tatacactgattctctcaggaagctccatttttactgtcaattttatttgattggtttttaaatcaacatatttctttttgacatgctatcttttgaaatagctgtgtcc

SEQ ID NO: 59322 - DNA, 110 bp, synthetic construct
  source 1..110: mol_type = other DNA
tatcaaattgacatctgctgtttcagtgatgcaatatggacattttaggcttgcattcaaaacagaagtggaattgcagtacattgaaaacaagagccagggacactaat

SEQ ID NO: 59323 - DNA, 110 bp, synthetic construct
  source 1..110: mol_type = other DNA
tcttggctgtttaaaagaataacatagctgtttactaggaaatccttccaagttgtctcaattcagggaggggctcacatggggctctctgttgagggtagctgtggggg

SEQ ID NO: 59324 - DNA, 110 bp, synthetic construct
  source 1..110: mol_type = other DNA
tctcaattcagggaggggctcacatggggctctctgttgagggtagctgtgggggcttctggaaggccactaacttggaagacttctgtatacagacttgtagtctcttc

SEQ ID NO: 59325 - DNA, 110 bp, synthetic construct
  source 1..110: mol_type = other DNA
gaacatcttacatatacatgtgccagtaaaagggagaagatatgtgctaataatctttcccagctcttctttgtcttgattactcattgacctcttgaccatagtcactc

SEQ ID NO: 59326 - DNA, 110 bp, synthetic construct
  source 1..110: mol_type = other DNA
tttcccagctcttctttgtcttgattactcattgacctcttgaccatagtcactcatgagaaatccttttttcatcatgtttatctcaaataccactactgctaataaat

SEQ ID NO: 59327 - DNA, 110 bp, synthetic construct
  source 1..110: mol_type = other DNA
aactattgtatcaagctgtaatgaacaaagggatgcatatatctgttctacttggtgtttttgtattctttggatcaagtcccaggtctggaaatgctggaccatatagc

SEQ ID NO: 59328 - DNA, 110 bp, synthetic construct
  source 1..110: mol_type = other DNA
ctggtgacatatatcttagtaatcttgagcctacagagaagttttccattgtttatgtgaccatactggagagattatgtccgaagaccacacaggggtagagaaagata

SEQ ID NO: 59329 - DNA, 110 bp, synthetic construct
  source 1..110: mol_type = other DNA
tgtgaccatactggagagattatgtccgaagaccacacaggggtagagaaagataactgagaggcccctgttgttccagtccccagctgcctgcatgctcttggaccaga

SEQ ID NO: 59330 - DNA, 110 bp, synthetic construct
  source 1..110: mol_type = other DNA
aaagaagggaattcttaggaaatagtgtgggctaaagaaaaataaaacataagcagcttcacagtgtctggatcctcaaaatgtcacagtgggtgagagagttttctctt

SEQ ID NO: 59331 - DNA, 110 bp, synthetic construct
  source 1..110: mol_type = other DNA
gcttcacagtgtctggatcctcaaaatgtcacagtgggtgagagagttttctcttacaagttactttccatctccttgactgaaacctgtcagaagaaacaacaaagggg

SEQ ID NO: 59332 - DNA, 110 bp, synthetic construct
  source 1..110: mol_type = other DNA
caaaactgtatcttatgtcaaactagaaagcatttataaaccatagtttcatctaacaaaaaggacctgacttgcaataaaaagtgaaatcttttctcgctgtgggctat

SEQ ID NO: 59333 - DNA, 110 bp, synthetic construct
  source 1..110: mol_type = other DNA
tccaggcagacaggagcccagctgcttcaggacctgctgggaggtgccaccgctggagtaaaaggtaaagaaaacctggggagaagcttcctggatgtggctgactgctg

SEQ ID NO: 59334 - DNA, 110 bp, synthetic construct
  source 1..110: mol_type = other DNA
attgcttgaggttagatggtgcatcttgatagttcatcagtggttttgagtgttagtgaaactatcagaatggtattaaaacctacaactgtgcaaagctacaaaatata

SEQ ID NO: 59335 - DNA, 110 bp, synthetic construct
  source 1..110: mol_type = other DNA
gtgaaactatcagaatggtattaaaacctacaactgtgcaaagctacaaaatatagagaactgtggctccaaggaagtgatattaaaagagaacagcttgtgcaaatatt

SEQ ID NO: 59336 - DNA, 110 bp, synthetic construct
  source 1..110: mol_type = other DNA
tttcattactatgtttttcatgtggtatgaggtatccagggtttttctgtggtcattgcaggccacaagctttaggtatttttatcgctgaatgatatatcattatatgg

SEQ ID NO: 59337 - DNA, 110 bp, synthetic construct
  source 1..110: mol_type = other DNA
ctaagatttttattttgatagggaatactataccatcctgttcagataacactatttcatactaatgttgaaacctcactgaggaggtgaaagacatgtatgataaaaac

SEQ ID NO: 59338 - DNA, 110 bp, synthetic construct; identical to SEQ ID NO: 59337
  source 1..110: mol_type = other DNA

SEQ ID NO: 59339 - DNA, 110 bp, synthetic construct
  source 1..110: mol_type = other DNA
tcttgtttctttgtagttatcaatgtgggtctgagaccttacccatcagcatagtcagtagtcaggaagatgagttggacgtgaggtggagaatagggacaagagagggg

SEQ ID NO: 59340 - DNA, 110 bp, synthetic construct
  source 1..110: mol_type = other DNA
gaaggaagaataagattggtttatggacaggtaggctaagtatagagatgcaatccaaaaatggaggcagcttcaaaacaaccaccttgtttgtacaggactcaaaggca

SEQ ID NO: 59341 - DNA, 110 bp, synthetic construct
  source 1..110: mol_type = other DNA
caaaaatggaggcagcttcaaaacaaccaccttgtttgtacaggactcaaaggcagccggaaatgagtgactgatgcttttaccatttttccgtctttctggagcatgaa

SEQ ID NO: 59342 - DNA, 110 bp, synthetic construct
  source 1..110: mol_type = other DNA
agtaaatgctagtgttaaatctataactcactagaactcgaagaatggccatgctacagaatacataggacaagattaaaaagcactcaggagaaaagagacaaaattcc

SEQ ID NO: 59343 - DNA, 110 bp, synthetic construct
  source 1..110: mol_type = other DNA
ttttaaattagtgttacaagaccgtatcatatgaacttcttagcactttatagcaggaaagaggctggtcggaagctcaaagtggtagaatctgcgagatctgttttctg

SEQ ID NO: 59344 - DNA, 110 bp, synthetic construct; identical to SEQ ID NO: 59343
  source 1..110: mol_type = other DNA

SEQ ID NO: 59345 - DNA, 110 bp, synthetic construct; identical to SEQ ID NO: 59343
  source 1..110: mol_type = other DNA

SEQ ID NO: 59346 - DNA, 110 bp, synthetic construct; identical to SEQ ID NO: 59343
  source 1..110: mol_type = other DNA

SEQ ID NO: 59347 - DNA, 110 bp, synthetic construct
  source 1..110: mol_type = other DNA
catgtccaggattactgatgtgatactttccccttattttatccattaaatttagatattccccagtgttctttcctcagcttattttgtctgtccctttctttattctc

SEQ ID NO: 59348 - DNA, 110 bp, synthetic construct
  source 1..110: mol_type = other DNA
tcccatgtggtgttcattatatccctgtgggttagatattattatacttattttacagaaaaggaaactaaaaatgaaagtacatagagactttccaaggtcatacacaa

SEQ ID NO: 59349 - DNA, 110 bp, synthetic construct
  source 1..110: mol_type = other DNA
cagaaaaggaaactaaaaatgaaagtacatagagactttccaaggtcatacacaaagacagattcaaaacttgcaatttacttctttatatcagatatgccattacaccc

SEQ ID NO: 59350 - DNA, 110 bp, synthetic construct
  source 1..110: mol_type = other DNA
aagaatgaagagaactgcaaagagaatttaacaggctctcaacagatttagtgtttgtagtaatattgccactattcttttgaatcttatcatcagcagaatattaaatc

SEQ ID NO: 59351 - DNA, 110 bp, synthetic construct; identical to SEQ ID NO: 59350
  source 1..110: mol_type = other DNA

SEQ ID NO: 59352 - DNA, 110 bp, synthetic construct
  source 1..110: mol_type = other DNA
aaaaatattaaattttattgctttaaattttgtatgcatttcctcatacagagttgaggtagttgagggtaacaatagcttacacttctcttctcacccttgcaacacct

SEQ ID NO: 59353 - DNA, 110 bp, synthetic construct
  source 1..110: mol_type = other DNA
cctttgttgctttgacacatgccagggtagggagctattactttcaagtgggagattcagtaaagaaaggcccaattactaggtctagaatatttaaataagcataaaga

SEQ ID NO: 59354 - DNA, 110 bp, synthetic construct
  source 1..110: mol_type = other DNA
ggtagggagctattactttcaagtgggagattcagtaaagaaaggcccaattactaggtctagaatatttaaataagcataaagagtagtagagacatatattcaaagta

SEQ ID NO: 59355 - DNA, 110 bp, synthetic construct
  source 1..110: mol_type = other DNA
ataaagaagaatgtcaactgaatatctcatgtctaacgtaggtcattttaaaggagagttgaaacagcctgaaagagtagaaggatgaatataaaaatgttctactattg

SEQ ID NO: 59356 - DNA, 110 bp, synthetic construct
  source 1..110: mol_type = other DNA
aactggacacaaaacataaccattcttaagttggccccagtttaccaatatctctcttcattactagcttcccaaattgagtgtagaattccagactctccagtgaagtg

SEQ ID NO: 59357 - DNA, 110 bp, synthetic construct
  source 1..110: mol_type = other DNA
cttcattactagcttcccaaattgagtgtagaattccagactctccagtgaagtgctatgtaaatcaaatttgaaaatacggagttcagtgttactgaggctctcatctg

SEQ ID NO: 59358 - DNA, 110 bp, synthetic construct
  source 1..110: mol_type = other DNA
aaacatcatgtgctaataaaatttaacacacaggcagttgtgctcagggtgtctattatttagcctagagtagattatgtttagggtgtaattaagccagggagaagcac

SEQ ID NO: 59359 - DNA, 110 bp, synthetic construct; identical to SEQ ID NO: 59358
  source 1..110: mol_type = other DNA

SEQ ID NO: 59360 - DNA, 110 bp, synthetic construct
  source 1..110: mol_type = other DNA
ctctatgtttacagcaaccccactgaactgtcttttttgtagatgagaagtacgtttgtcaagatagtgtggatatgccatgttcataaataatttccaaatcagtgatt

SEQ ID NO: 59361 - DNA, 110 bp, synthetic construct
  source 1..110: mol_type = other DNA
gcctatcggtttctttataaaagcaaggctttggggctggaagctaatacaagaatatgctcccctccttcctaaattatacagacttcacagttttttgttcttctttt

SEQ ID NO: 59362 - DNA, 110 bp, synthetic construct
  source 1..110: mol_type = other DNA
aatgtcctagcccttatatccccaccatacttagtcactggctaagggcttcccaagagagacatggccttagctcaaaaccaaagattctgagggtagtaaaacatcta

SEQ ID NO: 59363 - DNA, 110 bp, synthetic construct
  source 1..110: mol_type = other DNA
agagagacatggccttagctcaaaaccaaagattctgagggtagtaaaacatctagatatagtcagcttactgtgctccttgaaagtgagcagcaaattcttccttgaat

SEQ ID NO: 59364 - DNA, 110 bp, synthetic construct
  source 1..110: mol_type = other DNA
agtatttttgccatttgacatgcagatagccttggagaacatatcacacaatgcctgtcaactatttttgtcctttatctttccaacagtatatgaaagattcatcagga

SEQ ID NO: 59365 - DNA, 110 bp, synthetic construct
  source 1..110: mol_type = other DNA
tcttctcatttgtggggtcacccacctgggatatgggtcttgactaaaccatgtctctgccgcttttatgcatctccttgtcattccttctttgtgtctttagttgtaaa

SEQ ID NO: 59366 - DNA, 110 bp, synthetic construct
  source 1..110: mol_type = other DNA
ggagagtggaaagccccctgggctgagttttgcaaaagcttttaagtcttttgaagaggagggcagagtttgttggagagctatggcaaagtatgtgagaatcacttaca

SEQ ID NO: 59367 - DNA, 110 bp, synthetic construct
  source 1..110: mol_type = other DNA
gaggagggcagagtttgttggagagctatggcaaagtatgtgagaatcacttacagtgatgttagggagataaaggacaaacatctttaggacctttaggttgaacacta

SEQ ID NO: 59368 - DNA, 110 bp, synthetic construct
  source 1..110: mol_type = other DNA
agatcaaccataacagcatttctaagagatggtaaatagcctgaagttcaaattatttatctgttaaataaatataaaattccatcagtgctttggccagagctctagtg

SEQ ID NO: 59369 - DNA, 110 bp, synthetic construct
  source 1..110: mol_type = other DNA
tttatctgttaaataaatataaaattccatcagtgctttggccagagctctagtggatgctccaagtttgtggatgtggagaatgggaaggaaactttaagagactccat

SEQ ID NO: 59370 - DNA, 110 bp, synthetic construct
  source 1..110: mol_type = other DNA
taacagcagctgctcctgctgtctctctgtttgtcagggatgctcttggggctgctttctgtagctatgtggtcaggtgcttttctgtagttgcttcctttggctgatct

SEQ ID NO: 59371 - DNA, 110 bp, synthetic construct
  source 1..110: mol_type = other DNA
agggatgctcttggggctgctttctgtagctatgtggtcaggtgcttttctgtagttgcttcctttggctgatctagggagcattctctgtagccccaagggtgtgggct

SEQ ID NO: 59372 - DNA, 110 bp, synthetic construct
  source 1..110: mol_type = other DNA
aggctaggggtctaattggagctgcaactacaggcttacacaacagccatagcaacactatatcctagccccatctgtgacctatgccacagcttgcaacaatgctggat

SEQ ID NO: 59373 - DNA, 110 bp, synthetic construct
  source 1..110: mol_type = other DNA
cactatatcctagccccatctgtgacctatgccacagcttgcaacaatgctggatacttagcccacttagttatgccagagatcaaacctacgtcctcttggatactagt

SEQ ID NO: 59374 - DNA, 110 bp, synthetic construct
  source 1..110: mol_type = other DNA
aggctattgagtgagaaaattaaagccaactttgaagatattaattgagtttaagtgttgcaacctagttttaattaaaatcggcagtaattatttagcacacatctgtg

SEQ ID NO: 59375 - DNA, 110 bp, synthetic construct
  source 1..110: mol_type = other DNA
tgttgcaacctagttttaattaaaatcggcagtaattatttagcacacatctgtgacttatcagatatcctgacagattgtgcagcagcagaaatatggccgtgttctag

SEQ ID NO: 59376 - DNA, 110 bp, synthetic construct
  source 1..110: mol_type = other DNA
agaacacattaactgctatagaaatttattagatcctattagtcctacacccagatctctcatgtctggttaacacacccttctggcagctatgtcttctccagagaagt

SEQ ID NO: 59377 - DNA, 110 bp, synthetic construct
  source 1..110: mol_type = other DNA
tgaaagactatatataattgaatcatgttggggagaatcttggtaaaaattcaggttcttgggactttcccataggaattctgcttcagtaggcctgtagtagagtttgg

SEQ ID NO: 59378 - DNA, 110 bp, synthetic construct
  source 1..110: mol_type = other DNA
ttcttgggactttcccataggaattctgcttcagtaggcctgtagtagagtttggagatatttattttgactgcatcactagcaattattatgctcagttaggtgaggga

SEQ ID NO: 59379 - DNA, 110 bp, synthetic construct
  source 1..110: mol_type = other DNA
ttcctttatcaatcatgtccattttcatactaaaactaattctctccaggagtgtactaagacatgaaacagtccatggggattttctcctctagtatactttcattcag

SEQ ID NO: 59380 - DNA, 110 bp, synthetic construct
  source 1..110: mol_type = other DNA
gatgcctatttttcctgatacatgcttaaactattctctgaatgtttaaaaagcaaaatgtattccaattcatcatgagaatataagcttagatatgggttttcccacaa

SEQ ID NO: 59381 - DNA, 110 bp, synthetic construct; identical to SEQ ID NO: 59380
  source 1..110: mol_type = other DNA

SEQ ID NO: 59382 - DNA, 110 bp, synthetic construct
  source 1..110: mol_type = other DNA
tagtacccttgtaaaagactagctcacctgttctggcatgtgaggatacaggaagttacctgtctggaaaatgtccctcactagaacttgaccatgctgacattttcatc

SEQ ID NO: 59383 - DNA, 110 bp, synthetic construct
  source 1..110: mol_type = other DNA
aatgaaaacatttaaggctgtccctactgggacaaaaagaacttaggtaagttatatttgctctagtcagagcttgaagggaaagggacccaatgaagtcaggggtgcta

SEQ ID NO: 59384 - DNA, 110 bp, synthetic construct
  source 1..110: mol_type = other DNA
gagacaacattggatctttaacccgctaaaccacagtcggaaactcctggtgatgcttttaaacactttgtcaatttcattgtcccttacttatcaaagttctccactca

SEQ ID NO: 59385 - DNA, 110 bp, synthetic construct
  source 1..110: mol_type = other DNA
cttttaaacactttgtcaatttcattgtcccttacttatcaaagttctccactcagaggtctttactgactgtctccatctctttagcactccagcatttcttagcttct

SEQ ID NO: 59386 - DNA, 110 bp, synthetic construct; identical to SEQ ID NO: 59384
  source 1..110: mol_type = other DNA

SEQ ID NO: 59387 - DNA, 110 bp, synthetic construct; identical to SEQ ID NO: 59385
  source 1..110: mol_type = other DNA

SEQ ID NO: 59388 - DNA, 110 bp, synthetic construct
  source 1..110: mol_type = other DNA
agggccaagcactgtgctaaataaattatatgtattattccaattaaagctaaccttggcattcccactgtggctcaacgggttaagaatccaacatagtgtccatgagg

SEQ ID NO: 59389 - DNA, 110 bp, synthetic construct
  source 1..110: mol_type = other DNA
actgaaagattgtatctcagagctccgtgttctctatccctttcattttcttcgtcgctggcacatgccctgattatcggctctcactacgcactctctggttgtgattc

SEQ ID NO: 59390 - DNA, 110 bp, synthetic construct
  source 1..110: mol_type = other DNA
aaaaccaaagtatatcttcccaaaagagcaatttacatttattgtatcatcgcagtatcctaactttccttcacaccttaacctgttacaaaccacatcctgccctggag

SEQ ID NO: 59391 - DNA, 110 bp, synthetic construct
  source 1..110: mol_type = other DNA
agagaagaaatatgagttagagtgttgaaaggtaagtgtcatcagccagaagggggagagaccaggaggatactttctaagcggagagcttggcagtattctgtgcagtt

SEQ ID NO: 59392 - DNA, 110 bp, synthetic construct
  source 1..110: mol_type = other DNA
agaattctgttcttttccttcagtctgctcttcagaaatctgtcatcatgataaaatcttagctctagaagggcctttagacatcatgtggtccctggaagaaattctac

SEQ ID NO: 59393 - DNA, 110 bp, synthetic construct
  source 1..110: mol_type = other DNA
atcttagctctagaagggcctttagacatcatgtggtccctggaagaaattctaccctctccagttattcctgctcccttagttggtggtattgactaacggcttccatg

SEQ ID NO: 59394 - DNA, 110 bp, synthetic construct
  source 1..110: mol_type = other DNA
tagctatctgatgtttaacctctgttgagactaggaggaagataaaaagcgaaaaaatagggttgaatttctggttttaaagcagcaggcctgaatacatttgaaggtca

SEQ ID NO: 59395 - DNA, 110 bp, synthetic construct
  source 1..110: mol_type = other DNA
aatagggttgaatttctggttttaaagcagcaggcctgaatacatttgaaggtcataaaatatgtgggtataatttccgtctcctctctcttctcagttcctcctaccac

SEQ ID NO: 59396 - DNA, 110 bp, synthetic construct
  source 1..110: mol_type = other DNA
atgaacctgatacctcaatatacttctgtttgtctcctttcactttggttaaatgagtgttattgttgtggctcttgcagatcggatttgaaaggtgtgaattgagctgg

SEQ ID NO: 59397 - DNA, 110 bp, synthetic construct
  source 1..110: mol_type = other DNA
agtgttattgttgtggctcttgcagatcggatttgaaaggtgtgaattgagctggatatgaaggcttattacaggcaatgaatcctaaatttgaatgcttggagttaaat

SEQ ID NO: 59398 - DNA, 110 bp, synthetic construct
  source 1..110: mol_type = other DNA
ttttgtttaggtaccccagtttcattaatatttgagcatgaatttttttttcttggtgattgacaccattctcatagctggtatttcttgggatatatcaaatttctaga

SEQ ID NO: 59399 - DNA, 110 bp, synthetic construct
  source 1..110: mol_type = other DNA
aggataccttttctcttaccatcatgagaaccaatcatttttgtgtacctgccaccacacaaggcctggtaaatagaaacacagcaggagtgcaaaagagcagacagcct

SEQ ID NO: 59400 - DNA, 110 bp, synthetic construct
  source 1..110: mol_type = other DNA
atgtacaaatgtaattatgaagcacattttggtatatttgtatacatcagatatcgtatccatttttttgaaagaaacattcgtcctggaactctcgtcacaactggttg

SEQ ID NO: 59401 - DNA, 110 bp, synthetic construct
  source 1..110: mol_type = other DNA
gtatccatttttttgaaagaaacattcgtcctggaactctcgtcacaactggttgctttaaagttcataggcttatgagtcctttttttttttagtggaagttcgtatta

SEQ ID NO: 59402 - DNA, 110 bp, synthetic construct
  source 1..110: mol_type = other DNA
ttttcctagtctctgcagtctcaaaacattgctaaattcaaactttttataggatttaacattttaaaaagatttcagaatggaacaggatttgagtctgtctctgacat

SEQ ID NO: 59403 - DNA, 110 bp, synthetic construct
  source 1..110: mol_type = other DNA
ttctcagctcgcatagtctttggaaatactcggttgtgtttcatagcattgaaaactgtacaaacctggatacaaatcatctgttaacactctgtaatgtttgttttctt

SEQ ID NO: 59404 - DNA, 110 bp, synthetic construct
  source 1..110: mol_type = other DNA
ctgtacaaacctggatacaaatcatctgttaacactctgtaatgtttgttttcttacattaggaccccttggttttacatggattaaacattattgtacatatgataagg

SEQ ID NO: 59405 - DNA, 110 bp, synthetic construct
  source 1..110: mol_type = other DNA
cttatcccactcaagagtgtgcatagtaacctgaattatggtttcatcaaagcatataatacctgggttgcatcagtccattacctctctgtggtccactagactgtgag

SEQ ID NO: 59406 - DNA, 110 bp, synthetic construct
  source 1..110: mol_type = other DNA
ataatacctgggttgcatcagtccattacctctctgtggtccactagactgtgagctccagaaaaccatattctatggccccaggaagagctctgtgtaaggtgctgccc

SEQ ID NO: 59407 - DNA, 110 bp, synthetic construct
  source 1..110: mol_type = other DNA
tttatgagattatctggctatgtatttcctgtaaaatttaagagatgtggaaattccccatatctaatgggtatttaaaaggtatgctttgaggaaaagaaagttatgcc

SEQ ID NO: 59408 - DNA, 110 bp, synthetic construct
  source 1..110: mol_type = other DNA
ccccatatctaatgggtatttaaaaggtatgctttgaggaaaagaaagttatgcccttccttgggttatctgctagtccatttaactttatcactggacacatggttgtt

SEQ ID NO: 59409 - DNA, 110 bp, synthetic construct
  source 1..110: mol_type = other DNA
tttttccttacatcaggcttatccagagctcccccatagacagcctatcaaaacttcttcactagaactgggtcatctgcccaccactaaataagttactcaaagggaaa

SEQ ID NO: 59410 - DNA, 110 bp, synthetic construct
  source 1..110: mol_type = other DNA
gtaggtatgttattattcccaatctacattggaagagaggatcattaaatttctccaatttaactactaatttcaagttaacgatagtttcacaatctctgactgcaggg

SEQ ID NO: 59411 - DNA, 110 bp, synthetic construct
  source 1..110: mol_type = other DNA
caatttaactactaatttcaagttaacgatagtttcacaatctctgactgcagggcatcaggattgcagccatgccttgataaaataggagcctgtgttcactcaactga

SEQ ID NO: 59412 - DNA, 110 bp, synthetic construct
  source 1..110: mol_type = other DNA
agcctggctgaaagtgcctgggagtttgcatctccctggggccacccttagccaaagactggtgggccagcatatgaaagtcgaggcaggacttcagaattcgtctgcag

SEQ ID NO: 59413 - DNA, 110 bp, synthetic construct
  source 1..110: mol_type = other DNA
agactggtgggccagcatatgaaagtcgaggcaggacttcagaattcgtctgcaggaccaggtgggagtcacacttagccggcttttgcctgcatcacacagttctgtgg

SEQ ID NO: 59414 - DNA, 110 bp, synthetic construct
  source 1..110: mol_type = other DNA
cccagacgttattataactcttttgtttaaaacgaacaaccctttaagttcccaatgccagatgttcccagttcctgagcaagtcaacaaaaataggcaagccttttcca

SEQ ID NO: 59415 - DNA, 110 bp, synthetic construct
  source 1..110: mol_type = other DNA
tttcgccctgagggcatttgcccacatgaaacgatagctgagaaaaagacaggggtttttgtggcttctcagaatgagggcaactaaaccaaaagccagtgcctacttca

SEQ ID NO: 59416 - DNA, 110 bp, synthetic construct
  source 1..110: mol_type = other DNA
tcagaagacttgtctaggctgagaatttaactgtctgtgaaattcttccactccgtgcttgatgttcatctgtgtttatcctccaaatgtaggagaaaagaatttcttta

SEQ ID NO: 59417 - DNA, 110 bp, synthetic construct
  source 1..110: mol_type = other DNA
gctctaagcaatttccaggttttcttgactgtaagtatactaaactagtatgagccccttgatagtttttagttggtcctataaaattaaaagaactctaaagaaattaa

SEQ ID NO: 59418 - DNA, 110 bp, synthetic construct
  source 1..110: mol_type = other DNA
atatactccattcacatataagtctgtctttatgcaagtaccacactactttgattaccatggatttatagtaagttttaaaagcaggaagtgtgagacatccacttttg

SEQ ID NO: 59419 - DNA, 110 bp, synthetic construct
  source 1..110: mol_type = other DNA
taccatggatttatagtaagttttaaaagcaggaagtgtgagacatccacttttgttcttgatcaagattatttcagctatttggggtcccttgagatttcatacacatt

SEQ ID NO: 59420 - DNA, 110 bp, synthetic construct
  source 1..110: mol_type = other DNA
aattctaactgtcatgaataacaagcagctaccgaagccaaacctggctttaaataagacccaacgatttaacatctgtgcactatcagctgaagaacagaaaatcctac

SEQ ID NO: 59421 - DNA, 110 bp, synthetic construct
  source 1..110: mol_type = other DNA
aagacccaacgatttaacatctgtgcactatcagctgaagaacagaaaatcctacagtcccttaatcgtctcaatgaaaggttgtactgtaagtatagaaaaacacgtta

SEQ ID NO: 59422 - DNA, 110 bp, synthetic construct; identical to SEQ ID NO: 59420
  source 1..110: mol_type = other DNA

SEQ ID NO: 59423 - DNA, 110 bp, synthetic construct; identical to SEQ ID NO: 59421
  source 1..110: mol_type = other DNA

SEQ ID NO: 59424 - DNA, 110 bp, synthetic construct
  source 1..110: mol_type = other DNA
tgttgaaagcttacaatatgtcaaatcttatgcaaagttatttatatgcagaacctcatctaatcctcctagcaacccaatgaggtgtccatattttaaacgaggggagt

SEQ ID NO: 59425 - DNA, 110 bp, synthetic construct; identical to SEQ ID NO: 59424
  source 1..110: mol_type = other DNA

SEQ ID NO: 59426 - DNA, 110 bp, synthetic construct
  source 1..110: mol_type = other DNA
ctctaaagtgttccttttatttgtgataaataaagtggaaactaacataagaatagaaattaactcaaatgagtttcaggatcaagcaaaaagttctccatgctcaaagt

SEQ ID NO: 59427 - DNA, 110 bp, synthetic construct
  source 1..110: mol_type = other DNA
ttaggcagaaggattattttgaactgattatttgagaaacagcagatacaggagaagctcttaaaacagtgatgttttcctttggaaaagggcatttacattgataaaga

SEQ ID NO: 59428 - DNA, 110 bp, synthetic construct
  source 1..110: mol_type = other DNA
tagttcaaaatagatctatgtcagctattatgttagttcctagccaggctatcgagcacctaaaatgtggcctagtttgaatcgagatatgtggtaagtataaaatagac

SEQ ID NO: 59429 - DNA, 110 bp, synthetic construct
  source 1..110: mol_type = other DNA
gtgggttgtgttcattgtggatgttgacatctgggatatattctgtgaaacacttgttattttgggtgtagaccttatggtggtggaagtcgtatttgttgagacctgtg

SEQ ID NO: 59430 - DNA, 110 bp, synthetic construct
  source 1..110: mol_type = other DNA
aaaagcaaaagctaaatgagtccatcactatactggccttatgagaaaacacaagaaggtgctaatcagtaacagagaaacatatgaaataataaatatcactggtaaag

SEQ ID NO: 59431 - DNA, 110 bp, synthetic construct
  source 1..110: mol_type = other DNA
aaggtgctaatcagtaacagagaaacatatgaaataataaatatcactggtaaaggtaaaattcagaataatgtaaggttggtagattaatcactcatagagctagagtg

SEQ ID NO: 59432 - DNA, 110 bp, synthetic construct
  source 1..110: mol_type = other DNA
gaacgggtgttcaacaaattcaccaagctcatactgaagcacgcatgatctctataccccaaattgtacctcaccctcccttctcaggctccctgtttctctggatgagg

SEQ ID NO: 59433 - DNA, 110 bp, synthetic construct
  source 1..110: mol_type = other DNA
tgttttctgtaaaggtccaatagttaatattttgggtttcatcatgtggtttccgacatcatggtacaaaagcagtagtagatgatatttaaacaaacaggcgtggctgg

SEQ ID NO: 59434 - DNA, 110 bp, synthetic construct
  source 1..110: mol_type = other DNA
taggaagcttcagggtcacgattttatgaacagctgttcctacttaaggctgcctccattctcttataatccttggggtggctggcatttatgttttggggtgttaaata

SEQ ID NO: 59435 - DNA, 110 bp, synthetic construct
  source 1..110: mol_type = other DNA
ggcactgtggatgtatgaatgaataaatatatgagtaagggaagaatgttctgatcataacaagattagcagctttaggagggtgttgtatgaagaagctctggactgta

SEQ ID NO: 59436 - DNA, 110 bp, synthetic construct
  source 1..110: mol_type = other DNA
cataacaagattagcagctttaggagggtgttgtatgaagaagctctggactgtaaaacatgattttctgaatagatattgaacaacttccatcagtgtcatctggaata

SEQ ID NO: 59437 - DNA, 110 bp, synthetic construct
  source 1..110: mol_type = other DNA
cccgttactttcagcccaaagaattgttgcatttgctttagtttttcaactactaggccactgttccttttcttttccactggcaccccatcactattcaggttgtagta

SEQ ID NO: 59438 - DNA, 110 bp, synthetic construct
  source 1..110: mol_type = other DNA
tctaggaacaggaatgactcacttgagatcttgttgaagcaaatttgtccctatagcagatgtgtccaacagtagcttgaaaagcccagcacaggaatacctcagagata

SEQ ID NO: 59439 - DNA, 110 bp, synthetic construct
  source 1..110: mol_type = other DNA
gggaccccacatcttggttttttcatgatgtccaaggtgttatcatcaagctttccagtcacctctaagccgaaaaaagactgcatttctttaagcctgtcaaccacgga

SEQ ID NO: 59440 - DNA, 110 bp, synthetic construct
  source 1..110: mol_type = other DNA
gcttgtgattgaccaagtcctgtggataaatccctcatggaatttgtggtcgcaccagcttgtcacaaactctggtcttacagaaacttgtagcatctttttacattcct

SEQ ID NO: 59441 - DNA, 110 bp, synthetic construct
  source 1..110: mol_type = other DNA
agccaatcctcctctgccctagggtagtgtcagaggagaatttaagaagagtcagagcttttaccatcactacaggaacaagggcaccaccccaatagtgtcaaaggaga

SEQ ID NO: 59442 - DNA, 110 bp, synthetic construct
  source 1..110: mol_type = other DNA
taactggaaactggcacaagtgctcctatacaaccaagcctgcaacagaggtctccatgtagttgataggatgggaaaaatgggtatcaggtcgctcccttagaagggat

SEQ ID NO: 59443 - DNA, 110 bp, synthetic construct
  source 1..110: mol_type = other DNA
catgtagttgataggatgggaaaaatgggtatcaggtcgctcccttagaagggatctttaaggaaaagcaggttcaagtgggtgaccctcaccctggggagcgagcagat

SEQ ID NO: 59444 - DNA, 110 bp, synthetic construct
  source 1..110: mol_type = other DNA
agaaatcattggtagtcattaccaagtatttgctgtgtttttaattattgttatgtcaagcactgtggaagcaacagtagccactttctcgttttagtttcatggtcgta

SEQ ID NO: 59445 - DNA, 110 bp, synthetic construct
  source 1..110: mol_type = other DNA
ctgatcctctgatccttgctcactctagctgagccaaacttgccacacttgtttgagtttctgcctaagagtctttgcattttctgtttcctttgcctggagcattcatc

SEQ ID NO: 59446 - DNA, 110 bp, synthetic construct
  source 1..110: mol_type = other DNA
cccagaagcagcccagatttctgacagcagctgctctacaccacagctcaatccaccctcctaccccaataaacagagagaaactacatgggccccacctcccctgtgga

SEQ ID NO: 59447 - DNA, 110 bp, synthetic construct
  source 1..110: mol_type = other DNA
gtgggaaactatggcctttcggctgaggatgctgccatccacatatagcctgccccagctccaggtgcagtagttgagccaagaaagggcaggccatgaggactgatagc

SEQ ID NO: 59448 - DNA, 110 bp, synthetic construct
  source 1..110: mol_type = other DNA
aatgaaaataacaataataatggcgataataattattgcagctacaatgtgttaggaactgaatatggcccagcactacgttgcatacttagttatatatttaaatcccc

SEQ ID NO: 59449 - DNA, 110 bp, synthetic construct
  source 1..110: mol_type = other DNA
agggatgtataatttgtcctgaaatctgaagccggatggatggactagcagagctcccatgtgcatgaatcagatgtaggatgagcatattagagggggctcgttacaca

SEQ ID NO: 59450 - DNA, 110 bp, synthetic construct
  source 1..110: mol_type = other DNA
cccatgtgcatgaatcagatgtaggatgagcatattagagggggctcgttacacattctaacaagaaatatctctaaggaaatcgatccagaaggagagtttctcctaca

SEQ ID NO: 59451 - DNA, 110 bp, synthetic construct
  source 1..110: mol_type = other DNA
tacaggatgaagtagtgagaggtgaagctaaaatgtttggttggtaacaaaaggatgacatgtttttaatactatgctatagagaacggaaatcctatataaaatgagaa

SEQ ID NO: 59452 - DNA, 110 bp, synthetic construct
  source 1..110: mol_type = other DNA
caactttaagattatgaacatttggctgtattttcccacatttttctgctattatataaaacaggagcttggccaggtgaatgtttaaaagtttgttattactttcattg

SEQ ID NO: 59453 - DNA, 110 bp, synthetic construct
  source 1..110: mol_type = other DNA
ccacaatttctcttctcttatttaaagggatgaaaaagctatttttttacagagtggttttcttgaaaataccttaaaaaactcttacgaaaaatcttgactcacaccga

SEQ ID NO: 59454 - DNA, 110 bp, synthetic construct
  source 1..110: mol_type = other DNA
ttgtggaagccgagcaaccaccttgaatagtacacagaattcagcatctggtgagagcagctctaaaccacaagtgatacttggtaaaagtgagcatctgtattccaact

SEQ ID NO: 59455 - DNA, 110 bp, synthetic construct
  source 1..110: mol_type = other DNA
agcagctctaaaccacaagtgatacttggtaaaagtgagcatctgtattccaactggaagtaatggtattccctaaggcagtggcagggaattagcaccaggtgacattg

SEQ ID NO: 59456 - DNA, 110 bp, synthetic construct
  source 1..110: mol_type = other DNA
acggtcccctttcttatatattaggatataaaccattaatttgtagttttaagttatggaagctaaaaataacagctgaaatactaaacctgactttcttggcatttgtg

SEQ ID NO: 59457 - DNA, 110 bp, synthetic construct; identical to SEQ ID NO: 59456
  source 1..110: mol_type = other DNA

SEQ ID NO: 59458 - DNA, 110 bp, synthetic construct
  source 1..110: mol_type = other DNA
tgagtttataaaccctgctttaaagtctctctaaaaaatttaaacatgaataaaaggaccttcccaaagcactggtcaagctataaatgatcatctatccctgttgagca

SEQ ID NO: 59459 - DNA, 110 bp, synthetic construct
  source 1..110: mol_type = other DNA
ggaccttcccaaagcactggtcaagctataaatgatcatctatccctgttgagcaagaatcaaatggaagagttttatcaaaaagccacacagatctagagtctatatac

SEQ ID NO: 59460 - DNA, 110 bp, synthetic construct; identical to SEQ ID NO: 59458
  source 1..110: mol_type = other DNA

SEQ ID NO: 59461 - DNA, 110 bp, synthetic construct; identical to SEQ ID NO: 59459
  source 1..110: mol_type = other DNA

SEQ ID NO: 59462 - DNA, 110 bp, synthetic construct
  source 1..110: mol_type = other DNA
tagagatggagataggcacttaatattttaaatttggttctccttgacactatttctagaaatgttaggccccagagctattgcattattttttttctaataagtctgaa

SEQ ID NO: 59463 - DNA, 110 bp, synthetic construct
  source 1..110: mol_type = other DNA
ctagaaatgttaggccccagagctattgcattattttttttctaataagtctgaagtgactgtagctgtcaacataatactgaaaatataaaccccataaagtatgacct

SEQ ID NO: 59464 - DNA, 110 bp, synthetic construct
  source 1..110: mol_type = other DNA
gaaaaatgctctgctatgtacgagagctgggaaatgtgctgcaatatgcaacatgcattgcatactggctgccatccacccttctcttaatgacccagggtcattatttg

SEQ ID NO: 59465 - DNA, 110 bp, synthetic construct
  source 1..110: mol_type = other DNA
tatgatatcaacagtgctttcaagtggaccaaaccaagctctgagtgctgttgttttcccaggtatttcatttgcaggctcaagccaaaggaaggccctaccttccctct

SEQ ID NO: 59466 - DNA, 110 bp, synthetic construct
  source 1..110: mol_type = other DNA
ccataagtcactcaacatggctaaggccttctacagtagccgatgttatgatgtatcagggagctagggtgtgggccttgctactgcatctccattatggatttggaacc

SEQ ID NO: 59467 - DNA, 110 bp, synthetic construct
  source 1..110: mol_type = other DNA
acctttgtcctcacgggtactgctcagattcatctccgctgagccaagacaggaactcctctctttgttcctttcttaatcctagcattaggtagcagctaatagtagca

SEQ ID NO: 59468 - DNA, 110 bp, synthetic construct
  source 1..110: mol_type = other DNA
ctcctctctttgttcctttcttaatcctagcattaggtagcagctaatagtagcaacaggggcaaaacaatgccactcaaatgtaaagacagttctatcattagacaatg

SEQ ID NO: 59469 - DNA, 110 bp, synthetic construct
  source 1..110: mol_type = other DNA
ttaccatatctacattcaccaatattctcttgatttttcaagctatgcattcttatttaagttttaaaagatgtttctacactagcctttctgccttttgacctttgtac

SEQ ID NO: 59470 - DNA, 110 bp, synthetic construct; identical to SEQ ID NO: 59469
  source 1..110: mol_type = other DNA

SEQ ID NO: 59471 - DNA, 110 bp, synthetic construct
  source 1..110: mol_type = other DNA
acatgaggttgggttttagaactcaagaatagaaggactctacgtagatcccagtttaaaactttttggactgttccaccctgccaaagtctttctggattgaatgtatt

SEQ ID NO: 59472 - DNA, 110 bp, synthetic construct
  source 1..110: mol_type = other DNA
ttaaaactttttggactgttccaccctgccaaagtctttctggattgaatgtatttgctgccctctaccagctccattcatctgtgaataagattattaatgttttgaac

SEQ ID NO: 59473 - DNA, 110 bp, synthetic construct
  source 1..110: mol_type = other DNA
gcccagggtcaaatgaggggaggtcttttgatacatttgctgatttgttggggttatgtactttcctatagggtcaaggagaggagctgacaaaatacctttccttatat

SEQ ID NO: 59474 - DNA, 110 bp, synthetic construct
  source 1..110: mol_type = other DNA
ccagggaggtagagtgtgccatcacgtcatgctagagaaagtagcaaaaggagttcccattgtggcttagcgggttaagaacttgatatagcatccgtaatgtggatttg

SEQ ID NO: 59475 - DNA, 110 bp, synthetic construct
  source 1..110: mol_type = other DNA
gtgccatcacgtcatgctagagaaagtagcaaaaggagttcccattgtggcttagcgggttaagaacttgatatagcatccgtaatgtggatttgatccctggcctgtct

SEQ ID NO: 59476 - DNA, 110 bp, synthetic construct
  source 1..110: mol_type = other DNA
cgaggagcagaccatgaaagatttttttaaaaattttattttaatgtagttcctatcgtggctcagtggaaacaaatctgagaacaggtttgatgagagaacacaggttc

SEQ ID NO: 59477 - DNA, 110 bp, synthetic construct
  source 1..110: mol_type = other DNA
agcccacatcagaaacaagaatccacaatggctagttaaatctgttagttgagtgctgccagggggcatagttgaaggagctaccatagtaatatttgctttagggatgc

SEQ ID NO: 59478 - DNA, 110 bp, synthetic construct
  source 1..110: mol_type = other DNA
aagtgactagatatatttcccagtgctatacagttatttttctttttatggcctagcttgcagcatatgaaaattcccaggcgaggggtcaaatcagagctgcactgggg

SEQ ID NO: 59479 - DNA, 110 bp, synthetic construct; identical to SEQ ID NO: 59478
  source 1..110: mol_type = other DNA

SEQ ID NO: 59480 - DNA, 110 bp, synthetic construct
  source 1..110: mol_type = other DNA
acaatcttttttctcacattatcatgctgcatcataagtgactagatatatttcccagtgctatacagttatttttctttttatggcctagcttgcagcatatgaaaatt

SEQ ID NO: 59481 - DNA, 110 bp, synthetic construct; identical to SEQ ID NO: 59478
  source 1..110: mol_type = other DNA

SEQ ID NO: 59482 - DNA, 110 bp, synthetic construct
  source 1..110: mol_type = other DNA
tccaagagattactgatacacaataatgaccaatgacttcacactgatggagctatcaataataaactcaacattgaagtaactggaaaaaagtttaaatataaagagca

SEQ ID NO: 59483 - DNA, 110 bp, synthetic construct
  source 1..110: mol_type = other DNA
tggcaagtcaatgacaagtctggggtttgctattccggtctgctgttaacttttgattttttatctcaggagcctagatagttaagcttccatggaggatgagggaagta

SEQ ID NO: 59484 - DNA, 110 bp, synthetic construct
  source 1..110: mol_type = other DNA
tgttgcattttatgtatcttagttttgtgaagccagtggaacattcagttgaatatgcagttagagctaaatgtccctggagatcagaggagagttctggatgagagcga

SEQ ID NO: 59485 - DNA, 110 bp, synthetic construct
  source 1..110: mol_type = other DNA
gaacttcccaggtgagcagccgccacatcagacccactaagtgagctcccttgctgttgcacaggatggtgatgtccacataatgcagagaacagtctatgttatgtaga

SEQ ID NO: 59486 - DNA, 110 bp, synthetic construct
  source 1..110: mol_type = other DNA
aaagagatttcctgttgttcttcaacctctccagcaactgatactgtcaggttttgtttgtttttttaatttttagggctgcacccactgcatatggaagttaccaggct

SEQ ID NO: 59487 - DNA, 110 bp, synthetic construct
  source 1..110: mol_type = other DNA
tgttcttcaacctctccagcaactgatactgtcaggttttgtttgtttttttaatttttagggctgcacccactgcatatggaagttaccaggctatgggttgaatcgga

SEQ ID NO: 59488 - DNA, 110 bp, synthetic construct
  source 1..110: mol_type = other DNA
atatattctatcagaatagaaaagttaagtaatatatccaaagtaatgtggccaagaagctaggggcctaaatatgaacctatttattttactataaaagcctgaggtct

SEQ ID NO: 59489 - DNA, 110 bp, synthetic construct
  source 1..110: mol_type = other DNA
gaagctaggggcctaaatatgaacctatttattttactataaaagcctgaggtctttgaagcagacaaaccgttctgcgtttctaaatattgtggattcctccagtatac

SEQ ID NO: 59490 - DNA, 110 bp, synthetic construct; identical to SEQ ID NO: 59488
  source 1..110: mol_type = other DNA

SEQ ID NO: 59491 - DNA, 110 bp, synthetic construct; identical to SEQ ID NO: 59489
  source 1..110: mol_type = other DNA

SEQ ID NO: 59492 - DNA, 110 bp, synthetic construct
  source 1..110: mol_type = other DNA
actaaatctttctttccctcttcctctttcttcttcacccccaactccaagcattaaaaatggtaggtcagctctatagtgaaactgccctcttcttttaattcctactg

SEQ ID NO: 59493 - DNA, 110 bp, synthetic construct
  source 1..110: mol_type = other DNA
tttgctaatgacaaaataaacaaagccgaagcagaaaatgatccctagaaaactcactgtgttttctaaagcataaatgtaagcttgcaaactatttcccttgctaaatt

SEQ ID NO: 59494 - DNA, 110 bp, synthetic construct
  source 1..110: mol_type = other DNA
gatttgagatacatccaggcctatcagtaaagataattgctattaatatttctaagcctatgaccataggtaagatagtctctctcttcttaataataagtaaagctatt

SEQ ID NO: 59495 - DNA, 110 bp, synthetic construct; identical to SEQ ID NO: 59494
  source 1..110: mol_type = other DNA

SEQ ID NO: 59496 - DNA, 110 bp, synthetic construct
  source 1..110: mol_type = other DNA
gctctaagacaaggacagcaaagattagaagcaaaccatcagaagctgggaaaaggcagtttcccctacaggcttcagagggagcatatagccctgcccatgccttgatt

SEQ ID NO: 59497 - DNA, 110 bp, synthetic construct
  source 1..110: mol_type = other DNA
cccagtcacctgtgagcaagtgccagctttgaaatatctcagatcccataactacccatgttagtagatggctcttcccaccagaaggccaaaactagatccaagacact

SEQ ID NO: 59498 - DNA, 110 bp, synthetic construct
  source 1..110: mol_type = other DNA
agcccaagcagttccttcttagggctttttacactggctatttcctttggttggaatgtttttcctccagctcttggcttggctaaacccctctcccacatcaaagctcg

SEQ ID NO: 59499 - DNA, 110 bp, synthetic construct
  source 1..110: mol_type = other DNA
tggcttgtacctctgtcccgttagctcttctccaagtgtgagtggcgtaactaccctatacgctctaggcctttgtccctcccttcgctccctcggaagccccgccccac

SEQ ID NO: 59500 - DNA, 110 bp, synthetic construct
  source 1..110: mol_type = other DNA
aaaaaaggaaggaaggaaggaaataaataaataaattaacttctgttgtctcgaggtactgagaactaggttttgtatgcaatagcagctaagaataaaatgggcaattc

SEQ ID NO: 59501 - DNA, 110 bp, synthetic construct
  source 1..110: mol_type = other DNA
gtactgagaactaggttttgtatgcaatagcagctaagaataaaatgggcaattccctttggttaatgacataactaaagctgctacatatgaaccagaatatgacagca

SEQ ID NO: 59502 - DNA, 110 bp, synthetic construct; identical to SEQ ID NO: 59500
  source 1..110: mol_type = other DNA

SEQ ID NO: 59503 - DNA, 110 bp, synthetic construct; identical to SEQ ID NO: 59501
  source 1..110: mol_type = other DNA

SEQ ID NO: 59504 - DNA, 110 bp, synthetic construct
  source 1..110: mol_type = other DNA
ttttaataatatctgctcttctaaatctaaaatagaaacaaacttaaagggatttcacccaacaagctcaaagagctaaacacgtccactgccactcacaagattgctaa

SEQ ID NO: 59505 - DNA, 110 bp, synthetic construct
  source 1..110: mol_type = other DNA
cacccaacaagctcaaagagctaaacacgtccactgccactcacaagattgctaatgatctagaaagagtcagactaactaatctgcaaatttctccaggaagttcttac

SEQ ID NO: 59506 - DNA, 110 bp, synthetic construct
  source 1..110: mol_type = other DNA
tatataagtttagtattttgggttatctgacacggccctctgtatttgaaataagtatacgatcctaaaacttaaaattttcccatgtccccaacttgaaacttaacctc

SEQ ID NO: 59507 - DNA, 110 bp, synthetic construct
  source 1..110: mol_type = other DNA
tatacgatcctaaaacttaaaattttcccatgtccccaacttgaaacttaacctctacacatctcatcccccccaaaaaggtggtgacgacactgtcattgtgattatga

SEQ ID NO: 59508 - DNA, 110 bp, synthetic construct
  source 1..110: mol_type = other DNA
ccatatccaactgagaattctatccccagtcaactatcaatcaagtgacaaggtaaaataaagatgttttcaggagctccttctgaggtgcaatgggatcagcagcatct

SEQ ID NO: 59509 - DNA, 110 bp, synthetic construct
  source 1..110: mol_type = other DNA
atcaatcaagtgacaaggtaaaataaagatgttttcaggagctccttctgaggtgcaatgggatcagcagcatcttgggagccattgagacaagggtacaatccctggcc

SEQ ID NO: 59510 - DNA, 110 bp, synthetic construct
  source 1..110: mol_type = other DNA
aggtgctatatttacccatgattccaaccttcttggtgtgtttggccatttcgatgcaaacctggtccgagcccagagagctcacttccctttagtggatggcagaggtt

SEQ ID NO: 59511 - DNA, 110 bp, synthetic construct
  source 1..110: mol_type = other DNA
gcagggatgcggggtggggagagtgagaaggaggggattagcactgggtaaggttgtgctgctgtttcaagagtctagatggctagagtttacggccctgtgacggatgc

SEQ ID NO: 59512 - DNA, 110 bp, synthetic construct
  source 1..110: mol_type = other DNA
gtgctgctgtttcaagagtctagatggctagagtttacggccctgtgacggatgcacagccttccctctaccccacccagtctggcaaaggcaccaagaaaacagactaa

SEQ ID NO: 59513 - DNA, 110 bp, synthetic construct
  source 1..110: mol_type = other DNA
aagcgcagattggagtgatgtactttgaagatggaggaggctccacaagccaaggaaagaaggcagctgcttggaggcttagcgcctggagaaggaagtaacccccctga

SEQ ID NO: 59514 - DNA, 110 bp, synthetic construct
  source 1..110: mol_type = other DNA
aaagaaggcagctgcttggaggcttagcgcctggagaaggaagtaacccccctgaaagccttgctagagcccagtactactgattgtggactttgacctcgagaactgta

SEQ ID NO: 59515 - DNA, 110 bp, synthetic construct
  source 1..110: mol_type = other DNA
tcacagagggcacatggagatgtggtaatagaaaatgtcagcagggacatgccataaagagcttgctgcttactgaagagattcagcaccaggaagcaagggaacatgat

SEQ ID NO: 59516 - DNA, 110 bp, synthetic construct
  source 1..110: mol_type = other DNA
aaagagcttgctgcttactgaagagattcagcaccaggaagcaagggaacatgatgatcattgtcacgtgtgatggagggggcagaaacactagttagggagttctcgtt

SEQ ID NO: 59517 - DNA, 110 bp, synthetic construct; identical to SEQ ID NO: 59515
  source 1..110: mol_type = other DNA

SEQ ID NO: 59518 - DNA, 110 bp, synthetic construct; identical to SEQ ID NO: 59516
  source 1..110: mol_type = other DNA

SEQ ID NO: 59519 - DNA, 110 bp, synthetic construct
  source 1..110: mol_type = other DNA
actatcagtaggcctcgtgtgtgcccgattccgttttaaaaactcgggatatagtttctcaaaaaagtaacagaaatcctcactctcatggagcttctcttctactgggg

SEQ ID NO: 59520 - DNA, 110 bp, synthetic construct
  source 1..110: mol_type = other DNA
ttctcaaaaaagtaacagaaatcctcactctcatggagcttctcttctactggggggagatgggctataaccaaataagttgaaaaaactatatggtatattagagtgtt

SEQ ID NO: 59521 - DNA, 110 bp, synthetic construct
  source 1..110: mol_type = other DNA
tgtaaccctgacccctgtcctccataactcaccttccatcacacctacaagacactggagttggggtcttgctgtaaacctctgcaccagttttgccacagggtggtctc

SEQ ID NO: 59522 - DNA, 110 bp, synthetic construct
  source 1..110: mol_type = other DNA
tgagattgggactagatctgaattcagccagatatctgcccctaaattgttatgggtgaggtcccactgtggcccaataggattggcagcatcttggtagtactgggata

SEQ ID NO: 59523 - DNA, 110 bp, synthetic construct
  source 1..110: mol_type = other DNA
gtgaggtcccactgtggcccaataggattggcagcatcttggtagtactgggatacaggttccattcccagcccaacagtgttgctgcagctgcagtataggttggatct

SEQ ID NO: 59524 - DNA, 110 bp, synthetic construct
  source 1..110: mol_type = other DNA
tcagcctatttattatgttaaataagggcgagaataaagatttccttgtgtctcctcatactccacattagttagtttctccctttctaattcttcatgtccctttgtct

SEQ ID NO: 59525 - DNA, 110 bp, synthetic construct
  source 1..110: mol_type = other DNA
attgtgtatttcacagtatgcagctgcataaatatataattgttcaagtgaatgacggggttaaatatactaacacagttaaatgttgagtgagaaaaaagcaaattgca

SEQ ID NO: 59526 - DNA, 110 bp, synthetic construct; identical to SEQ ID NO: 59525
  source 1..110: mol_type = other DNA

SEQ ID NO: 59527 - DNA, 110 bp, synthetic construct
  source 1..110: mol_type = other DNA
gagtcaataaataaagttttcagaggtgaaagccaaatgagtcaattagtaatactttcattgacagtagccattaacaaagtgcctggcccagatgaggaactcaataa

SEQ ID NO: 59528 - DNA, 110 bp, synthetic construct
  source 1..110: mol_type = other DNA
cttaaaggtgttttcctgtggcattggcagatagatgaactatcatctggctgaggaactaattccattccatcacgtatttcgggtttgctggtctggcgctcggcgta

SEQ ID NO: 59529 - DNA, 110 bp, synthetic construct
  source 1..110: mol_type = other DNA
gaactaattccattccatcacgtatttcgggtttgctggtctggcgctcggcgtatttctggaatgtgtttgaagaaaatagaaagactaatccaaactttattccattg

SEQ ID NO: 59530 - DNA, 110 bp, synthetic construct
  source 1..110: mol_type = other DNA
atccacttagccacaaggactgtgctagtcccggagcttgagattttcatatacgctttctcttatttatttcttccaagaacttgtgaggtaggtatttgtcaccacat

SEQ ID NO: 59531 - DNA, 110 bp, synthetic construct
  source 1..110: mol_type = other DNA
tatttggggtatacaaagtcaatttacactttgcctttctttttatgttcctcatctgttttggacccgatggctcgcaaacagtatgaatggttagctctaagtacttc

SEQ ID NO: 59532 - DNA, 110 bp, synthetic construct
  source 1..110: mol_type = other DNA
ctgttttggacccgatggctcgcaaacagtatgaatggttagctctaagtacttctccaaggaaaagcaagggtacagaagcatctgagagtagggctctgccgtgttag

SEQ ID NO: 59533 - DNA, 110 bp, synthetic construct
  source 1..110: mol_type = other DNA
gacgcgtcttagaccatctggacaccatccacctgccagatgcctggagccaggtgagtgatcccaggtgagaggaggagaaacacccagctgagcccagcacaaatgac

SEQ ID NO: 59534 - DNA, 110 bp, synthetic construct
  source 1..110: mol_type = other DNA
gagtgatcccaggtgagaggaggagaaacacccagctgagcccagcacaaatgactgggaattgtgagctaagaagcagaagtcattttaagcctttaatctttgggatg

SEQ ID NO: 59535 - DNA, 110 bp, synthetic construct
  source 1..110: mol_type = other DNA
gtggaatcatacagtatttgtctttttgtgactagctgatatcactcagcataatatcctcaaattttatccatgtcgtagcgttgtcagaatttccttctttcttaagg

SEQ ID NO: 59536 - DNA, 110 bp, synthetic construct
  source 1..110: mol_type = other DNA
atttgtctttttgtgactagctgatatcactcagcataatatcctcaaattttatccatgtcgtagcgttgtcagaatttccttctttcttaaggctaaataatatttca

SEQ ID NO: 59537 - DNA, 110 bp, synthetic construct
  source 1..110: mol_type = other DNA
gtggtctggatctcctattttagctacagccacaagtgatctgtagggcctagtggttaagtttcctgctatcaaacaattacgatccatctgttgagtatccattgttc

SEQ ID NO: 59538 - DNA, 110 bp, synthetic construct
  source 1..110: mol_type = other DNA
aaagggagatatttttctgtggaggatgttttcctagcctctttccatttcaccatatagctgaatttgtctgtgaaagaaatagttttgatatatttagagaaattgtc

SEQ ID NO: 59539 - DNA, 110 bp, synthetic construct
  source 1..110: mol_type = other DNA
tcagatttgaattcggacacagaggacccacctacattcttcagagaaagcaaaagcctaggattcttctcccattaattcaatctgtggtcatttttaaaaaccttgat

SEQ ID NO: 59540 - DNA, 110 bp, synthetic construct
  source 1..110: mol_type = other DNA
attcttcagagaaagcaaaagcctaggattcttctcccattaattcaatctgtggtcatttttaaaaaccttgatatgtttagaatttatatgactagttttttctcacc

SEQ ID NO: 59541 - DNA, 110 bp, synthetic construct
  source 1..110: mol_type = other DNA
cctgaaagattattaaggcaaacaaaccttatttttcgggcaaggacacaggtgtccagagcttaagaaattcattcaggattaggcactgaacaagtgaaagggccagg

SEQ ID NO: 59542 - DNA, 110 bp, synthetic construct
  source 1..110: mol_type = other DNA
ccagagcttaagaaattcattcaggattaggcactgaacaagtgaaagggccaggacgttaagccaagtctcccaacccccagatcagtgccctgacatctttgtgccct

SEQ ID NO: 59543 - DNA, 110 bp, synthetic construct
  source 1..110: mol_type = other DNA
tcctaccaaaatgccgctctcactgtatcagtctattgtttaagaatctcctggtttttttcccttttgcttattagctaaagttaaagctcctgtttagaaatctgcct

SEQ ID NO: 59544 - DNA, 110 bp, synthetic construct
  source 1..110: mol_type = other DNA
gagcagcattttttcatttttttagattccacatagacgtgatcccatatggtagttttacttctctgtctgacttacttcgatgggtatgataatatctaggtccattc

SEQ ID NO: 59545 - DNA, 110 bp, synthetic construct
  source 1..110: mol_type = other DNA
attccacatagacgtgatcccatatggtagttttacttctctgtctgacttacttcgatgggtatgataatatctaggtccattcatgttgctgcaagtagcattatttc

SEQ ID NO: 59546 - DNA, 110 bp, synthetic construct
  source 1..110: mol_type = other DNA
agcatcacttactgaagagactgtttttctccattgtatattcttgcctccattgtcgtagattaagaccctaaatatgtggatttaattctgggctctcctgtttcatc

SEQ ID NO: 59547 - DNA, 110 bp, synthetic construct
  source 1..110: mol_type = other DNA
tcgtagattaagaccctaaatatgtggatttaattctgggctctcctgtttcatcaatctatatttccttttttgtgccagtacaatactgtttgattactgtatactat

SEQ ID NO: 59548 - DNA, 110 bp, synthetic construct
  source 1..110: mol_type = other DNA
tacagagtattttcactgccctaataagcttctgtgctctctgcctgctcatcttccctctcccccaacccagaacaaccactcgtctttctgctgtctccatagttgtg

SEQ ID NO: 59549 - DNA, 110 bp, synthetic construct
  source 1..110: mol_type = other DNA
gtgcagcttgtgtgcgcacacgaatcatctacagggggtggggagaagatagggaggaaggcagctctgattttggaaccaccccttccctctcttcagaatgaggctgc

SEQ ID NO: 59550 - DNA, 110 bp, synthetic construct
  source 1..110: mol_type = other DNA
ggaaggcagctctgattttggaaccaccccttccctctcttcagaatgaggctgctctttagggagattctgttataaaccgtctagcgactagaacactgtaaggggct

SEQ ID NO: 59551 - DNA, 110 bp, synthetic construct
  source 1..110: mol_type = other DNA
taagacatacttcttagcctccaggagctctcagactagtgatgggatagttacgtaaaaatgtatatcctcctatatcagaggtataaacttgtaaagagaggtcctac

SEQ ID NO: 59552 - DNA, 110 bp, synthetic construct
  source 1..110: mol_type = other DNA
atatattgctgttttaagtctactcagtttgtgattatttgttatagcaagcactaggagattgattatatacagtgtcctttctaagctcttttcttctgatttctctg

SEQ ID NO: 59553 - DNA, 110 bp, synthetic construct
  source 1..110: mol_type = other DNA
aggagattgattatatacagtgtcctttctaagctcttttcttctgatttctctgtttttgggagggagaaggtctctcttccactatttttctttctgtggccccactg

SEQ ID NO: 59554 - DNA, 110 bp, synthetic construct
  source 1..110: mol_type = other DNA
ttgtagttatggcactacatacatcacctcatctaatgcttataaaatccagacgtatgaagctattgtcctcatcttactgatgtagaaaccctgaaagtggtgtagga

SEQ ID NO: 59555 - DNA, 110 bp, synthetic construct
  source 1..110: mol_type = other DNA
tttttttccatgcagaatacatcaatgttgaaggcagcaggaacagaatgggtatcctttcttccttgtgaagtctctcatgctcacccatttttatatctcttttcctt

SEQ ID NO: 59556 - DNA, 110 bp, synthetic construct
  source 1..110: mol_type = other DNA
tgggaactcccaaatacccaatgtttacttggataactagggaccaaagcttggccaagtggatgctcaagagtcagaactgccccttctccagagaagtgctcttaggt

SEQ ID NO: 59557 - DNA, 110 bp, synthetic construct; identical to SEQ ID NO: 59556
  source 1..110: mol_type = other DNA

SEQ ID NO: 59558 - DNA, 110 bp, synthetic construct
  source 1..110: mol_type = other DNA
tacatcctcctggatactaggcaggttcttaacccactgagccacaatgggaactctaaaagcttatttttattttttgtctttttagggctacactcacagcatatgga

SEQ ID NO: 59559 - DNA, 110 bp, synthetic construct; identical to SEQ ID NO: 59558
  source 1..110: mol_type = other DNA

SEQ ID NO: 59560 - DNA, 110 bp, synthetic construct
  source 1..110: mol_type = other DNA
aagaacacagtttggagctcaagtgtgcatattggggagcgattaaccttcaacagtaatgtagaggacaccaaacagcttatttaagcatctcccttcgtgaaatgccg

SEQ ID NO: 59561 - DNA, 110 bp, synthetic construct
  source 1..110: mol_type = other DNA
agcaatgcaatagatagattcagattttatgttgactgtctttgagcggaggtaatgacaagccaagtttgtccaaggacagatggaaaagattgcggggagtaaaagaa

SEQ ID NO: 59562 - DNA, 110 bp, synthetic construct
  source 1..110: mol_type = other DNA
caaatttgcactgtgcttctcaaacttttatgctcatataaaccaacttgttagtaggtctggcttgacactaagagtctgcgtcgatgaccagcttccaggtgatcctg

SEQ ID NO: 59563 - DNA, 110 bp, synthetic construct
  source 1..110: mol_type = other DNA
aggtctggcttgacactaagagtctgcgtcgatgaccagcttccaggtgatcctgaagctgctggggcacagagaacttttgaatagcaagaaactaatgtctttccagg

SEQ ID NO: 59564 - DNA, 110 bp, synthetic construct
  source 1..110: mol_type = other DNA
taagggtcatgacttcaagcattaaggtcaattcaaaaatgtgtaaagtgcatgaacaggttttttagattgttttaaaagcatgatagacatgcagctgactgccagat

SEQ ID NO: 59565 - DNA, 110 bp, synthetic construct
  source 1..110: mol_type = other DNA
acaggttttttagattgttttaaaagcatgatagacatgcagctgactgccagataaatgccgtaggtggaacacacattcacctctgttctttctgaaaaagagatttt

SEQ ID NO: 59566 - DNA, 110 bp, synthetic construct
  source 1..110: mol_type = other DNA
cccagcattacctgcaagagaatacaacacttgtgcccccagcataagccacaactgagttgacttcttcccatgaaaaggccgaccacattctgccttttcaaaaggtc

SEQ ID NO: 59567 - DNA, 110 bp, synthetic construct
  source 1..110: mol_type = other DNA
tgagttgacttcttcccatgaaaaggccgaccacattctgccttttcaaaaggtcactaatcttttatgtgcagtcaaaattagattttttttttttttggtctttttgc

SEQ ID NO: 59568 - DNA, 110 bp, synthetic construct
  source 1..110: mol_type = other DNA
tttaaggtagcaccacactgctctccatagtggttgcatcaactaaccaacattcccaccagcagtataggagggttcccttctctccacaccctctccagcattgattg

SEQ ID NO: 59569 - DNA, 110 bp, synthetic construct
  source 1..110: mol_type = other DNA
cactgctctccatagtggttgcatcaactaaccaacattcccaccagcagtataggagggttcccttctctccacaccctctccagcattgattgtttatagactttttt

SEQ ID NO: 59570 - DNA, 110 bp, synthetic construct
  source 1..110: mol_type = other DNA
gtcagctcccccgacccgcagctggaagagaatctcaagtgtcagcacatgcacccccacagccgccttaattcccaacccttcctgcagaacttccacgaccccttagc

SEQ ID NO: 59571 - DNA, 110 bp, synthetic construct
  source 1..110: mol_type = other DNA
aacctcctcccatagacgcctcctcaggtggttcccttcaactgtgcactcatcgcaaggccactaagcgactggtttctcaagcctcgcgctgtggccacgttcctccc

SEQ ID NO: 59572 - DNA, 110 bp, synthetic construct
  source 1..110: mol_type = other DNA
gtcaaggcacttctattggtgcagctaaaacaaacaaacaccccttagtatagtgcctggcactttaaccaacccagaatatcaattaattcactaaacaaatgtttaca

SEQ ID NO: 59573 - DNA, 110 bp, synthetic construct
  source 1..110: mol_type = other DNA
tactatcatattgcactgcatagaagtcggaccattttacacacaagccaactcagaatatattagagtgcctgcttctccatagcttcgccaatattgtgctgtcaaac

SEQ ID NO: 59574 - DNA, 110 bp, synthetic construct
  source 1..110: mol_type = other DNA
agccaactcagaatatattagagtgcctgcttctccatagcttcgccaatattgtgctgtcaaacattagatgtttctctttttagggccacaccagcagcatatggaag

SEQ ID NO: 59575 - DNA, 110 bp, synthetic construct
  source 1..110: mol_type = other DNA
cccttttcttggaccaacctccccaggctgccccacctagtgagagggtgggcgtctgagctgtaactcctctctctgttagaggtctgttaagagcttgaccacagcag

SEQ ID NO: 59576 - DNA, 110 bp, synthetic construct
  source 1..110: mol_type = other DNA
ctttgtgtagtaatcatgagcggtcttggagctcttccatggccccagcgaaaccccatcctgtgctagtgagagcttcattatgatgtggttaatgggcacaccttgaa

SEQ ID NO: 59577 - DNA, 110 bp, synthetic construct
  source 1..110: mol_type = other DNA
ccatcctgtgctagtgagagcttcattatgatgtggttaatgggcacaccttgaaacagccaccatcgactcagaattcacgccgagcagcaggataccagaacttatca

SEQ ID NO: 59578 - DNA, 110 bp, synthetic construct
  source 1..110: mol_type = other DNA
ggaaagctggaggaggtgcctggctcagagtccactggccgagattaggtttactcacgtgcctccaacctaacttcaaggggagctgggaaatgtaggctgggaaacat

SEQ ID NO: 59579 - DNA, 110 bp, synthetic construct
  source 1..110: mol_type = other DNA
gaaattgctgttgtgtagtgagtgattatctaactttataagagactgacaaactatatctgaattggttgtaccattttacattcctaccagcaaaatataggattctc

SEQ ID NO: 59580 - DNA, 110 bp, synthetic construct
  source 1..110: mol_type = other DNA
atatctgaattggttgtaccattttacattcctaccagcaaaatataggattctcattcttccacaccctcaccaatatttattattgtcatttaaaaagtgagttactc

SEQ ID NO: 59581 - DNA, 110 bp, synthetic construct
  source 1..110: mol_type = other DNA
tcttcttgattcagttttttaggtctgtatgtctctagaaagctgtccatttcttctaggttgtcaagcatataattgttcatagcattctcttatgattttttttattg

SEQ ID NO: 59582 - DNA, 110 bp, synthetic construct; identical to SEQ ID NO: 59581
  source 1..110: mol_type = other DNA

SEQ ID NO: 59583 - DNA, 110 bp, synthetic construct
  source 1..110: mol_type = other DNA
cctctctcaatgcctggaggagccaatctaatacagtagttacattatacatccagtgcaactgcaataaataaacattgacctcatttgctcatcacttgggtgtagaa

SEQ ID NO: 59584 - DNA, 110 bp, synthetic construct
  source 1..110: mol_type = other DNA
ctgggaaacataatgaagcatctctctacttggaaactgatcttaagtttggtccctgttgtaggagctgccattctcattatagtatttattgctgtatcagaattatc

SEQ ID NO: 59585 - DNA, 110 bp, synthetic construct
  source 1..110: mol_type = other DNA
ctgttgtaggagctgccattctcattatagtatttattgctgtatcagaattatctcacgcctagcactattatgatttgaaaatgtccatgctcagtctctgagggcag

SEQ ID NO: 59586 - DNA, 110 bp, synthetic construct; identical to SEQ ID NO: 59584
  source 1..110: mol_type = other DNA

SEQ ID NO: 59587 - DNA, 110 bp, synthetic construct; identical to SEQ ID NO: 59585
  source 1..110: mol_type = other DNA

SEQ ID NO: 59588 - DNA, 110 bp, synthetic construct
  source 1..110: mol_type = other DNA
ctctgtttatctttttgaacttctgcaaaccacttcttgtctctaagtcacatggagacattacctactccctaggactgttagaagaattcagtgacctgatgaaatat

SEQ ID NO: 59589 - DNA, 110 bp, synthetic construct
  source 1..110: mol_type = other DNA
agacattacctactccctaggactgttagaagaattcagtgacctgatgaaatataaaaagctatatttccattccctctgcctccacccttcggtggccatttacagtc

SEQ ID NO: 59590 - DNA, 110 bp, synthetic construct
  source 1..110: mol_type = other DNA
atatcttgttcccagcaaggtgcaaatcaaatagaaggcacatttcaaaagagaaaagacaattccatcttcccagggacttcgaaaaaaaaaataatctgtgaattaat

SEQ ID NO: 59591 - DNA, 110 bp, synthetic construct
  source 1..110: mol_type = other DNA
aagacaattccatcttcccagggacttcgaaaaaaaaaataatctgtgaattaatatccttcctctggcctggaagagagaggaactaagttgggtgtaggatgaggaag

SEQ ID NO: 59592 - DNA, 110 bp, synthetic construct
  source 1..110: mol_type = other DNA
gctctgcttgtctccttagagggcagtcaaggtcacttcatgggggctctgcagtcactttaatttctatctgcagtactcttgccaaggttcagtaaaccaaggcgcat

SEQ ID NO: 59593 - DNA, 110 bp, synthetic construct
  source 1..110: mol_type = other DNA
cactttaatttctatctgcagtactcttgccaaggttcagtaaaccaaggcgcatcacagagctgagtttatcttatttttgtctggagagaaacctctaaagggtgtgt

SEQ ID NO: 59594 - DNA, 110 bp, synthetic construct
  source 1..110: mol_type = other DNA
aatagggacttgactgcacagaactttaagaccaaggcagttaaagttatcccaaagcagtgagactgtgggattctgagtgaatggatggcacatgcaaagttgtgctt

SEQ ID NO: 59595 - DNA, 110 bp, synthetic construct
  source 1..110: mol_type = other DNA
agcagtgagactgtgggattctgagtgaatggatggcacatgcaaagttgtgcttagtgaataagtataactcgagcatagcttgagggaagagggaacgttgatattct

SEQ ID NO: 59596 - DNA, 110 bp, synthetic construct
  source 1..110: mol_type = other DNA
acttggtttattataagtccttggtgcatctcaaaggcctgtttcattgatcctgccagagcaaagaaaccatcttctccacgaagtattgagtgaaactttgggtagct

SEQ ID NO: 59597 - DNA, 110 bp, synthetic construct
  source 1..110: mol_type = other DNA
taagaaggaaaacaagaaatgtcacttgctactttctttttcctaaatcaggaaacaaccaatgagatggcccctctgcaatgaaatgagctagtaaagaatgtgtgaca

SEQ ID NO: 59598 - DNA, 110 bp, synthetic construct
  source 1..110: mol_type = other DNA
ttatattacatatccatctaaatatttcccaggtcaccatagaggacatggtagtaattacagctataaatgattatatgcaaaagttttataccatgacctatcactac

SEQ ID NO: 59599 - DNA, 110 bp, synthetic construct
  source 1..110: mol_type = other DNA
atggacatttaggttgtttcagaacacaggactttcaatgctaaatcccggaaagtcccaggcaaacaggacaaatgggtcacccaacaaggatcaatgctagagctgcc

SEQ ID NO: 59600 - DNA, 110 bp, synthetic construct
  source 1..110: mol_type = other DNA
tcccaggcaaacaggacaaatgggtcacccaacaaggatcaatgctagagctgcctcttggtaatgtgtgatccgtggttttgaaggagtccctggggacaagaggaagg

SEQ ID NO: 59601 - DNA, 110 bp, synthetic construct
  source 1..110: mol_type = other DNA
cctaatgaatgaaaatacagcatgttgaacaacaaacctgtcacaccgcagagtagctgtatcgcaaagtggccactattgtacccagacacaaagattgccctggcccc

SEQ ID NO: 59602 - DNA, 110 bp, synthetic construct
  source 1..110: mol_type = other DNA
gctgtatcgcaaagtggccactattgtacccagacacaaagattgccctggccccatgtggcagctttggtgacctgagcaccccttgggtcaacacagccctaccccca

SEQ ID NO: 59603 - DNA, 110 bp, synthetic construct
  source 1..110: mol_type = other DNA
cagaacaaggaaagcccgtggatcataaaatatcttttcaaataaacattgtgaggcctccaggcttatatttccacaggacgcatatagggggaaaaaaaggattcagc

SEQ ID NO: 59604 - DNA, 110 bp, synthetic construct
  source 1..110: mol_type = other DNA
gcctccaggcttatatttccacaggacgcatatagggggaaaaaaaggattcagctgagggatacagataaagccatcagtggcattaaactcagacattctatattcaa

SEQ ID NO: 59605 - DNA, 110 bp, synthetic construct
  source 1..110: mol_type = other DNA
gggaaacatcagtgatggcttttcccatatttccacaaccccataaggtttgtgacttcccttaaataaacaaatttgcgttaataattcattgacctagacaccgtgta

SEQ ID NO: 59606 - DNA, 110 bp, synthetic construct
  source 1..110: mol_type = other DNA
cttcccttaaataaacaaatttgcgttaataattcattgacctagacaccgtgtaagaaaagatggagtgccatgaatagaaaagaccaaaaataagctctccgaccaac

SEQ ID NO: 59607 - DNA, 110 bp, synthetic construct
  source 1..110: mol_type = other DNA
gccagagccatgtgctcctggacaagaaccaagatggagcaaaaagacaggcctggcagcaggatggccttgtcctcgacagcgtccttgccgttggcttgtgcagggtc

SEQ ID NO: 59608 - DNA, 110 bp, synthetic construct
  source 1..110: mol_type = other DNA
gcagcaggatggccttgtcctcgacagcgtccttgccgttggcttgtgcagggtcatgagtgctcagcagcctcagctcccaggattgttcttccctgctgggagccatt

SEQ ID NO: 59609 - DNA, 110 bp, synthetic construct
  source 1..110: mol_type = other DNA
agatggccagcaactcataccctgtgttcttgaaaaatgacatgaaatcaaatcaaacccatccattccatagtcatcacccgtatttatctaggctttcatcagctcat

SEQ ID NO: 59610 - DNA, 110 bp, synthetic construct
  source 1..110: mol_type = other DNA
aacccatccattccatagtcatcacccgtatttatctaggctttcatcagctcatgtctcagttgtgaagatttcgtgtttttacctccctcccctgttccttttccggt

SEQ ID NO: 59611 - DNA, 110 bp, synthetic construct
  source 1..110: mol_type = other DNA
atttaagctgggtatgctgtcctttcccctagcatttgtctctaccaggaaaacaggtttcaagacagagatttccgctgcccgtggagtctaggccagcagggactagc

SEQ ID NO: 59612 - DNA, 110 bp, synthetic construct
  source 1..110: mol_type = other DNA
ggtttcaagacagagatttccgctgcccgtggagtctaggccagcagggactagcagccctaaatgggctttgttttcctttcttctagcatttcccctttggcttatga

SEQ ID NO: 59613 - DNA, 110 bp, synthetic construct
  source 1..110: mol_type = other DNA
gatgcaagaggtgccacctcagcggaggcaggggatgcggggcagaccgtgggacagagagggaggggagggcacattcggcgcatccgcgcctgcggccactacttagg

SEQ ID NO: 59614 - DNA, 110 bp, synthetic construct
  source 1..110: mol_type = other DNA
agagagggaggggagggcacattcggcgcatccgcgcctgcggccactacttaggatgcttcacttgacttcagtctccaagccgggctcgacggagcccgactgtcctc

SEQ ID NO: 59615 - DNA, 110 bp, synthetic construct
  source 1..110: mol_type = other DNA
taccatttcctaagaaattttaaaagacagcacaatttgagtactgattcgttgataaggttccctcagaccatctgtcagataataaaaacctatgcaccaaagagcat

SEQ ID NO: 59616 - DNA, 110 bp, synthetic construct; identical to SEQ ID NO: 59615
  source 1..110: mol_type = other DNA

SEQ ID NO: 59617 - DNA, 110 bp, synthetic construct
  source 1..110: mol_type = other DNA
tttctgtttggggtttttttttggttttgttttgttttgtttgtctttttttgtctttttagggccgcacccatggcatgtggagctgccaggctaggggtccaatcgga

SEQ ID NO: 59618 - DNA, 110 bp, synthetic construct; identical to SEQ ID NO: 59617
  source 1..110: mol_type = other DNA

SEQ ID NO: 59619 - DNA, 110 bp, synthetic construct
  source 1..110: mol_type = other DNA
aggacctcattgcctatccattctaaacgtgtaatattttttaaagtcagtttttaattaaacagttaacatatgaatccattctcttcatgatgatgaacctcacaggc

SEQ ID NO: 59620 - DNA, 110 bp, synthetic construct; identical to SEQ ID NO: 59619
  source 1..110: mol_type = other DNA

SEQ ID NO: 59621 - DNA, 110 bp, synthetic construct
  source 1..110: mol_type = other DNA
aggtcaaaatttgttattgtatcttcagtacattttatcttgaatgtctcttaaatcagtttttacgtgccagttttgtttcggcaaacattcttactgttacgcagaat

SEQ ID NO: 59622 - DNA, 110 bp, synthetic construct
  source 1..110: mol_type = other DNA
tcagtttttacgtgccagttttgtttcggcaaacattcttactgttacgcagaatttaacttttcagagaaaagtaaattggaaagttttcagagtcctctaccttgtct

SEQ ID NO: 59623 - DNA, 110 bp, synthetic construct
  source 1..110: mol_type = other DNA
gttgttattgttgtttgtttgtttgttttctttttatggtctgcagcatgttgaggtttccaggctaggggttgaattggagttgcagctgctggccgcagccacagcaa

SEQ ID NO: 59624 - DNA, 110 bp, synthetic construct
  source 1..110: mol_type = other DNA
gtttccaggctaggggttgaattggagttgcagctgctggccgcagccacagcaatgctggatctgagccttatcttcgacctttgctgcagcttgtggcagtgcaggat

SEQ ID NO: 59625 - DNA, 110 bp, synthetic construct
  source 1..110: mol_type = other DNA
tcttcctgtttccccttcctttttgtgcagtctgaatctcatagctcatcatttgtatctactcttttgccaggatcttaaattccgaactcatttgcctttctcctaca

SEQ ID NO: 59626 - DNA, 110 bp, synthetic construct
  source 1..110: mol_type = other DNA
atgtagatcattgggcttcattttcagagattctggctcagtagacccaaaaaggggccaaggatctgcattttatctaccccctcactccttatcttggtgccttaaca

SEQ ID NO: 59627 - DNA, 110 bp, synthetic construct
  source 1..110: mol_type = other DNA
ttgccttttgatcatcttttcttttctcctacagcacaacagaaaatgtagctgtatatatatgggaaaacctccagaaatatcttcctgcgggagttctttataaagta

SEQ ID NO: 59628 - DNA, 110 bp, synthetic construct
  source 1..110: mol_type = other DNA
atatatatgggaaaacctccagaaatatcttcctgcgggagttctttataaagtaaaagtatatgaaactgacaataatattgtagtctataaaggagaatagctcttag

SEQ ID NO: 59629 - DNA, 110 bp, synthetic construct; identical to SEQ ID NO: 59627
  source 1..110: mol_type = other DNA

SEQ ID NO: 59630 - DNA, 110 bp, synthetic construct; identical to SEQ ID NO: 59628
  source 1..110: mol_type = other DNA

SEQ ID NO: 59631 - DNA, 110 bp, synthetic construct
  source 1..110: mol_type = other DNA
aaatgcaacatcagaatatgagcaaagcaaagctttacgtcgcagcgctgggcctagttgctttgggcaatacaggtgatacgcatcggtgaataatgaggggaagacgc

SEQ ID NO: 59632 - DNA, 110 bp, synthetic construct
  source 1..110: mol_type = other DNA
agttgctttgggcaatacaggtgatacgcatcggtgaataatgaggggaagacgcctgtatctcagagaaaagagaaaggtgaacttgcggggctgggatggaaactgcc

SEQ ID NO: 59633 - DNA, 110 bp, synthetic construct
  source 1..110: mol_type = other DNA
ccaggccacacttctcctacctgcaaactcagacaccatgagaccaatctcctacgtggtgcaggcatccctccacactacctccagagatggtcaaggtcagcttgatt

SEQ ID NO: 59634 - DNA, 110 bp, synthetic construct
  source 1..110: mol_type = other DNA
gtggtgcaggcatccctccacactacctccagagatggtcaaggtcagcttgattagctccctgtccagcactcactctgcacagctctgttttcagggagcccttctgg

SEQ ID NO: 59635 - DNA, 110 bp, synthetic construct
  source 1..110: mol_type = other DNA
aaatggcatgactttggtggtgagtgtaggcttgtcctgtccctggcagagaaccctcgcctgtccccggcattgctccctagatagaggcaggaagactgaggccagag

SEQ ID NO: 59636 - DNA, 110 bp, synthetic construct
  source 1..110: mol_type = other DNA
cttgctgctctatctgcaaagaatagttgagagtgatggatgggatgcaaggtatgaaagagggaaaagccctgagtgagcccattacggatgctgacagtggctttgga

SEQ ID NO: 59637 - DNA, 110 bp, synthetic construct
  source 1..110: mol_type = other DNA
gaaagagggaaaagccctgagtgagcccattacggatgctgacagtggctttggaagagaaaggctgtgcggagaggttttggggttgggctgggggggatccccagttc

SEQ ID NO: 59638 - DNA, 110 bp, synthetic construct
  source 1..110: mol_type = other DNA
ccaaccccagctctaaatttcagactgatctggtctcaggaacaagaagaagttctgcctgttggaacctccaccttgaagcttgtctctctgaaaagttttctctgctc

SEQ ID NO: 59639 - DNA, 110 bp, synthetic construct
  source 1..110: mol_type = other DNA
tgcctgttggaacctccaccttgaagcttgtctctctgaaaagttttctctgctctccccaatggtttaaatggaaaaaagggaaacactccgcaaagctgttcaatcca

SEQ ID NO: 59640 - DNA, 110 bp, synthetic construct
  source 1..110: mol_type = other DNA
ggtctgagggatagctcctccaggattaggggggctgagggggaggggtgggttgcacttgccctctgtcctcgagctgctgccttcctcttcccagtcccccttctagg

SEQ ID NO: 59641 - DNA, 110 bp, synthetic construct
  source 1..110: mol_type = other DNA
cacttgccctctgtcctcgagctgctgccttcctcttcccagtcccccttctaggctccagcataagaaagactgcggagttcccactgtggctcagcactaatgaacct

SEQ ID NO: 59642 - DNA, 110 bp, synthetic construct
  source 1..110: mol_type = other DNA
gcatccacgtctgtggggtcttaaagtagcatcctcttttccataacgatctgtcttttgattcgagacagaacctgaagcagtgaagcagcccagaaggacccccttgc

SEQ ID NO: 59643 - DNA, 110 bp, synthetic construct
  source 1..110: mol_type = other DNA
ctgatggcctcttctaggttctgggagtaccgtcttgggtaacaaatgaagaagctcatcttatggaattaacgaggggaaaaaagacaataaacaaagaagaaacccag

SEQ ID NO: 59644 - DNA, 110 bp, synthetic construct
  source 1..110: mol_type = other DNA
tcatcttatggaattaacgaggggaaaaaagacaataaacaaagaagaaacccagtctggctgtgctacaaggattggtgctgtgcagcaaaacaaggcccaggaagggt

SEQ ID NO: 59645 - DNA, 110 bp, synthetic construct
  source 1..110: mol_type = other DNA
ggctcccacgcctgagggcttggccctgtctccagccttttgtcacctgctggccactccctggctcctgctctcattcccatgagctcaatcctgtctgcctttcctgc

SEQ ID NO: 59646 - DNA, 110 bp, synthetic construct
  source 1..110: mol_type = other DNA
tgagactgaagtttcttcccgggctccaccgcagcgctggctcccatctgaaccccacctcttccaggcagtcgaccccaggatcttcctgttcagagcagatgtaccac

SEQ ID NO: 59647 - DNA, 110 bp, synthetic construct
  source 1..110: mol_type = other DNA
cacctcttccaggcagtcgaccccaggatcttcctgttcagagcagatgtaccacgtacatgggagggggtcttttaggcaccaacacagtaattgcaaccttcccaaga

SEQ ID NO: 59648 - DNA, 110 bp, synthetic construct
  source 1..110: mol_type = other DNA
tcttaaaaattactgtgtcatagaatttttctaatacttttggttgtttggggaaggaagataaatccagctcatggtactttatctctactggaaacacgaatctcttt

SEQ ID NO: 59649 - DNA, 110 bp, synthetic construct
  source 1..110: mol_type = other DNA
aggccagagaggcaaagagctttgaccgagatcacaaagctgaaccctgccatcggtcccctgctgccatccctcctctgtgtttgttctcaggctattggcctcttggt

SEQ ID NO: 59650 - DNA, 110 bp, synthetic construct
  source 1..110: mol_type = other DNA
gttctgcattctcctctctcccccaggccctgttctcagctgggaagctgatacgtggcactaaagtgatactggatggtaataagttaatgtgttaccctctcccggta

SEQ ID NO: 59651 - DNA, 110 bp, synthetic construct
  source 1..110: mol_type = other DNA
gatgggcaaaacacagcacacggccaacaactcagtccctgtggtctcctcagctccacagcagaggcctgagctgcgatataagtcctagctttgggagaaatccctca

SEQ ID NO: 59652 - DNA, 110 bp, synthetic construct
  source 1..110: mol_type = other DNA
ccacagcagaggcctgagctgcgatataagtcctagctttgggagaaatccctcagtaatcaaaggacctatgaggaatctagtccaacctcctgggccttggcctcaca

SEQ ID NO: 59653 - DNA, 110 bp, synthetic construct
  source 1..110: mol_type = other DNA
ggaggatgttccggcccaaatggagctccgattcatctgcattttgatgttccagacagaacacaggatgccaagtcaaaaagatctggattcacatcgtgctcttgaca

SEQ ID NO: 59654 - DNA, 110 bp, synthetic construct
  source 1..110: mol_type = other DNA
cctgtcctaaaagatgtcacacaagctggtgggggagatagattcagaaataattaattagatatgaaacctcagtatggaggtgaggccacaagattctgcaggcatct

SEQ ID NO: 59655 - DNA, 110 bp, synthetic construct
  source 1..110: mol_type = other DNA
cattctaaattacagagtattttggtgtgtcccaggccgacaattggtgtccagatgagtctgcttctttgtggcttacttttcaggggtgagtgtttatggggacaggg

SEQ ID NO: 59656 - DNA, 110 bp, synthetic construct
  source 1..110: mol_type = other DNA
catatgttgaggatatggccctaaagagaaaaaagagaaaaaaaaaaaggcccctggagtcatataagcttgaggaatattgcgataaacacagtcaaagggcttccttt

SEQ ID NO: 59657 - DNA, 110 bp, synthetic construct
  source 1..110: mol_type = other DNA
ggagtcatataagcttgaggaatattgcgataaacacagtcaaagggcttcctttgctgggagacttctgagagtccttctaacagtgtgcagactcaaaccgccctgga

SEQ ID NO: 59658 - DNA, 110 bp, synthetic construct; identical to SEQ ID NO: 59656
  source 1..110: mol_type = other DNA

SEQ ID NO: 59659 - DNA, 110 bp, synthetic construct; identical to SEQ ID NO: 59657
  source 1..110: mol_type = other DNA

SEQ ID NO: 59660 - DNA, 110 bp, synthetic construct
  source 1..110: mol_type = other DNA
ccatgatgtcaacattgtcctcaaattttaatgttggattttaaagattaactcatagtaagctcagacttgaggaatgttttctgctttgtggcctctagtatatgcat

SEQ ID NO: 59661 - DNA, 110 bp, synthetic construct
  source 1..110: mol_type = other DNA
acaaaataagatcaatttgcatattcttcttaactacatcgaagcgcatgtagaactttgatttgactgttgggccctgtagagcagtgctgggctccaaaggctagaac

SEQ ID NO: 59662 - DNA, 110 bp, synthetic construct
  source 1..110: mol_type = other DNA
gccttggcaggcgcacagatgtagggttttgaagtcacagagccctgctctcttcggggtcacagccacctgttctcccgcatggagcttttcctcccactgtaactcgt

SEQ ID NO: 59663 - DNA, 110 bp, synthetic construct
  source 1..110: mol_type = other DNA
ggaatgccgagtacgaggtctacgtagtggctgagaaccagcaggggaagtccaaggcggctcacttcgtgttcaggacctcggcgcagcccacggccatcccaggtacg

SEQ ID NO: 59664 - DNA, 110 bp, synthetic construct
  source 1..110: mol_type = other DNA
ggcggctcacttcgtgttcaggacctcggcgcagcccacggccatcccaggtacgacgcctctgctttctgtgagtttcccgcttggaattaatgcacaagtgccgcacc

SEQ ID NO: 59665 - DNA, 110 bp, synthetic construct
  source 1..110: mol_type = other DNA
tcattcaaaaacagctgagaggtaatacatctaaagtacctggagaggagacgcgggcatacagtgctgtcaaattctaaccccttcagccaatttgtagcttttcttcg

SEQ ID NO: 59666 - DNA, 110 bp, synthetic construct
  source 1..110: mol_type = other DNA
gttataagcacatatctatgttatcagattttttcagaagcctctggggtgcctgaccccacagtttggctgtttcagtaggtaggtcaacaccaacacatcccgcaccc

SEQ ID NO: 59667 - DNA, 110 bp, synthetic construct
  source 1..110: mol_type = other DNA
agtgctgagagtgctctgatccatcgagaggagaggccgatgggatgaagggagaaacacacaggccctggtggagcatctcgtctcctcctgtccccaaatcctggccc

SEQ ID NO: 59668 - DNA, 110 bp, synthetic construct
  source 1..110: mol_type = other DNA
aacacacaggccctggtggagcatctcgtctcctcctgtccccaaatcctggcccctctgatgggggtcagggccgccttcgccggaggctcaggtccccagcacagaca

SEQ ID NO: 59669 - DNA, 110 bp, synthetic construct
  source 1..110: mol_type = other DNA
gggagctttcaggctggaaatcgcctttggtctgtgagatggagccaggaacccgagtgggtgggtgaggcaccgggataacgagctcggacgagggcagactcctgaca

SEQ ID NO: 59670 - DNA, 110 bp, synthetic construct
  source 1..110: mol_type = other DNA
tcaaaggctccccaggcaattccaaagtgtagtcaggattgagcatccctgtcgcagtctctctggcccggggccgtcctgatgcagccagttgggctctccagatctgt

SEQ ID NO: 59671 - DNA, 110 bp, synthetic construct
  source 1..110: mol_type = other DNA
cccagatccaagggagggatcatagacaccatttctcagtggggagtgtgtctaggaatttgaggccattaaaaaaaatttaaagcagttttagacttatgacaaaaatg

SEQ ID NO: 59672 - DNA, 110 bp, synthetic construct
  source 1..110: mol_type = other DNA
gaatttgaggccattaaaaaaaatttaaagcagttttagacttatgacaaaaatgtatttttcatataccccctgcccccactcatgcatagcctccctattaccagcat

SEQ ID NO: 59673 - DNA, 110 bp, synthetic construct
  source 1..110: mol_type = other DNA
aagacaataaataagggggttaacctcttgttacatgatgtcagggagttaatggcccttgaagagtagcatttctgcatgtcgccaagacaggaagataagtgaaaggg

SEQ ID NO: 59674 - DNA, 110 bp, synthetic construct
  source 1..110: mol_type = other DNA
cccttgaagagtagcatttctgcatgtcgccaagacaggaagataagtgaaaggggaaagaaactaggtgaagggagacagtgtattgaagcctgagatgagtaacctac

SEQ ID NO: 59675 - DNA, 110 bp, synthetic construct
  source 1..110: mol_type = other DNA
gtttaaagggccattaaccatactgtgctccaatcagcttagcaggaagcagaaccccagagagaggcaaacccagagatatattctggggtgtccaaggagggaggtgg

SEQ ID NO: 59676 - DNA, 110 bp, synthetic construct
  source 1..110: mol_type = other DNA
tcctgcttcctagttggattagtttctgctgcaccatgacgggaactccaatgaccatagactttaaaagaaagacatcagatattatttatacttggaacccccccaaa

SEQ ID NO: 59677 - DNA, 110 bp, synthetic construct
  source 1..110: mol_type = other DNA
atgacgggaactccaatgaccatagactttaaaagaaagacatcagatattatttatacttggaacccccccaaaaaatacaaagaaacttatttacaaaacagaaatag

SEQ ID NO: 59678 - DNA, 110 bp, synthetic construct
  source 1..110: mol_type = other DNA
tgcaaggaagtggcatcacttcattataaataaaagtcggcccatcatggcactgcttttatattgcacatatccatatacatatatagatatattacccacatacatat

SEQ ID NO: 59679 - DNA, 110 bp, synthetic construct; identical to SEQ ID NO: 59678
  source 1..110: mol_type = other DNA

SEQ ID NO: 59680 - DNA, 110 bp, synthetic construct
  source 1..110: mol_type = other DNA
tccaggaaaccttaataaaaggaaaaacatccaagttcatggattggaagactgtattattcagggctctccagagaaacagaaccaatagggtgtgcaagtgcatttgt

SEQ ID NO: 59681 - DNA, 110 bp, synthetic construct
  source 1..110: mol_type = other DNA
ttgtacttacatgtcaccctctagcctaaatattgtcttctcaatagcggcaaagggttttctatgtcctagctccattttaaatatgatgaacggaggcatgaaagatg

SEQ ID NO: 59682 - DNA, 110 bp, synthetic construct
  source 1..110: mol_type = other DNA
tccacttccaaaatgtaccccaaccccacccactccttttcatctactcaccattgactaagtagaagctaccagattctttcttcctttctttctttctttctttcttt

SEQ ID NO: 59683 - DNA, 110 bp, synthetic construct
  source 1..110: mol_type = other DNA
aactacctgtcatggagtaaaatcatttcatcttgtggcttgagtacccaatccgagcccttgtgtttgaagaagcccatctccagatattcagcttctaagaacctacg

SEQ ID NO: 59684 - DNA, 110 bp, synthetic construct
  source 1..110: mol_type = other DNA
acgctttgtgttcagatctaatttaactccctcccattagccctgtttcccatgctcgggtgatgaaacgcttggtcgttgaacgtgaataaatccagtggctgccaagt

SEQ ID NO: 59685 - DNA, 110 bp, synthetic construct
  source 1..110: mol_type = other DNA
tcgggtgatgaaacgcttggtcgttgaacgtgaataaatccagtggctgccaagtatagcaagtcattttggagaaacatcctctctctcacggtgtctcttctccaaag

SEQ ID NO: 59686 - DNA, 110 bp, synthetic construct
  source 1..110: mol_type = other DNA
cttttgttaggggggaagtaggaccagactgtggaaggatgggctgtcgctgaaaacctgtagcccctttaatttctgtatcctcacctgaggacctgcagctctgtatt

SEQ ID NO: 59687 - DNA, 110 bp, synthetic construct
  source 1..110: mol_type = other DNA
acctgtagcccctttaatttctgtatcctcacctgaggacctgcagctctgtattactctctctagaaaagaccttccagaaaaaggaatcattgcatttatatgtgatg

SEQ ID NO: 59688 - DNA, 110 bp, synthetic construct
  source 1..110: mol_type = other DNA
cgcggggaatgccattgtccttcctcatattttcaaggctcaggcagctcctacccctcttcagtcagctccaggttggccttgatcccaggccaaggcagaatgcaagg

SEQ ID NO: 59689 - DNA, 110 bp, synthetic construct
  source 1..110: mol_type = other DNA
tagtttcctaaggctgttgcgacaaatcgccgcaacttgatggcttaaactgacggagagttgttttctcccagtcgtggaggccagagatccagaaccgaggcgtggag

SEQ ID NO: 59690 - DNA, 110 bp, synthetic construct
  source 1..110: mol_type = other DNA
tgcttttctatgtgccggaagaggcaaggatctttggctggtggaaaccattcctttgatatgcaccatagctatcctgtgcgagggtcttgcttccccatcctgagtcc

SEQ ID NO: 59691 - DNA, 110 bp, synthetic construct
  source 1..110: mol_type = other DNA
ttgatatgcaccatagctatcctgtgcgagggtcttgcttccccatcctgagtcccctcagggtgcaccgttggggatgcctgcagtggctgaaagcccggcagtgggct

SEQ ID NO: 59692 - DNA, 110 bp, synthetic construct
  source 1..110: mol_type = other DNA
gaaaacgtgatttagacaggtttcacaaccagctcaaggtcatcaggtagaaccagaatttgtatccagggctttcctacctgtattcttagaagctgtggtactggtag

SEQ ID NO: 59693 - DNA, 110 bp, synthetic construct
  source 1..110: mol_type = other DNA
aaaagacaaagacaaaaaaaaggaagaatttccttccttccttttcaagggtgaatattcctctgtgtatgtgtgtgtatcgatcatattttgtttagcattcatctatt

SEQ ID NO: 59694 - DNA, 110 bp, synthetic construct
  source 1..110: mol_type = other DNA
tattcctctgtgtatgtgtgtgtatcgatcatattttgtttagcattcatctattgattgacatttggtttggtttcacttcttggctagtatgagcaatgctattatga

SEQ ID NO: 59695 - DNA, 110 bp, synthetic construct
  source 1..110: mol_type = other DNA
attgttgtttatccattctgtacttaatagtttgtatctgctaatctcaaactcctaattcatccctcctccatccccgctgccctttggcatccacaagtctgttctct

SEQ ID NO: 59696 - DNA, 110 bp, synthetic construct
  source 1..110: mol_type = other DNA
atctgctaatctcaaactcctaattcatccctcctccatccccgctgccctttggcatccacaagtctgttctctgtgtctgtgatcctgtttctgtttgtagatcggtc

SEQ ID NO: 59697 - DNA, 110 bp, synthetic construct
  source 1..110: mol_type = other DNA
atggtgactactacattcagatctcctatttcctggagtttgagaggactgtatacatgtggagaaggaagcagttgatggggattgatgtgagagacctagggatcaaa

SEQ ID NO: 59698 - DNA, 110 bp, synthetic construct
  source 1..110: mol_type = other DNA
catgtggagaaggaagcagttgatggggattgatgtgagagacctagggatcaaacaacaacggctgacatttatttgaagatttgttacctgcctggtcctgttagtgc

SEQ ID NO: 59699 - DNA, 110 bp, synthetic construct
  source 1..110: mol_type = other DNA
gctaatatggaagacatgagcaggccatttgaaatggtaaagaagttctttactggtattatcaagcctctttcaaaaattcatgcatgcacaatggaatgaaactagaa

SEQ ID NO: 59700 - DNA, 110 bp, synthetic construct
  source 1..110: mol_type = other DNA
ttctttactggtattatcaagcctctttcaaaaattcatgcatgcacaatggaatgaaactagaaatcagtaacaacaaaagaaaaacaggaaaagctacaaatatgtgg

SEQ ID NO: 59701 - DNA, 110 bp, synthetic construct
  source 1..110: mol_type = other DNA
tctcgctttcaagttgggctgtaccttgtgtaagacctgtcaccataaacaaatgtatgtcttgaatcactttggcttggaacatttgctctgctccattaacaaaatgg

SEQ ID NO: 59702 - DNA, 110 bp, synthetic construct
  source 1..110: mol_type = other DNA
acatggattgggtggagatgggtttgggatatcagctgatgtccctgctgaaataacttgtttaaaaagaaacagagcaaaacatttctgcagcaaagataaaaagtata

SEQ ID NO: 59703 - DNA, 110 bp, synthetic construct
  source 1..110: mol_type = other DNA
acttgaaggtggagatgcctgccaatggtatgaattccaggtgttggggggctccggagcgagtggtcagtaatggaccacatcaacccattctccagcttttcctcccc

SEQ ID NO: 59704 - DNA, 110 bp, synthetic construct
  source 1..110: mol_type = other DNA
ggagcgagtggtcagtaatggaccacatcaacccattctccagcttttcctccccacctcaacccagagtgcaggtggcctctctttattttgttcccttgggacacagc

SEQ ID NO: 59705 - DNA, 110 bp, synthetic construct
  source 1..110: mol_type = other DNA
accaaaaaaaaaataatcaagtctcatgtgaagttttgaggcccttagaagcagatagctcacttagaggaactgcttccagactaagttctagatctgctctttaacgt

SEQ ID NO: 59706 - DNA, 110 bp, synthetic construct
  source 1..110: mol_type = other DNA
tagctcacttagaggaactgcttccagactaagttctagatctgctctttaacgtccgaacacatcaatcatgaggtcaaagtatctatacagaaaccataggaaaacag

SEQ ID NO: 59707 - DNA, 110 bp, synthetic construct
  source 1..110: mol_type = other DNA
ggatgggccgaccatacaggaggaacacagggaaggctcatggcagaggagacacccaactgaagcttaaaagaatagttcatatgggctgggagcagaggaggtgggag

SEQ ID NO: 59708 - DNA, 110 bp, synthetic construct
  source 1..110: mol_type = other DNA
ccaactgaagcttaaaagaatagttcatatgggctgggagcagaggaggtgggagggaggtcaaaacaagcagagaggacagtaaatgaaaaatgcaggaggagaaaaac

SEQ ID NO: 59709 - DNA, 110 bp, synthetic construct
  source 1..110: mol_type = other DNA
tgtgaagaacttagaggcacaaaagaattcagcaaatgatagctatcactgttactgaaaagagaaagtggtacctcaaaaaattaaagactaatatgcaggtgcagatt

SEQ ID NO: 59710 - DNA, 110 bp, synthetic construct
  source 1..110: mol_type = other DNA
ggattgggggaggtgaagggaaagcaggaataataacatcctattttaaatgtgcaaatacatctggcaacactaaagtgtcgtcagctccttatactttaagggcacga

SEQ ID NO: 59711 - DNA, 110 bp, synthetic construct
  source 1..110: mol_type = other DNA
aaatacatctggcaacactaaagtgtcgtcagctccttatactttaagggcacgatgcgggacagagactcccccctgactctgagccagaggaggagggagcactcagc

SEQ ID NO: 59712 - DNA, 110 bp, synthetic construct
  source 1..110: mol_type = other DNA
gggtcctggttccattttctccctgacactctccccaacacgtccaaatgcccaatggagcccagcattcctgctgagggtcattcccctggcctatggctggttcacag

SEQ ID NO: 59713 - DNA, 110 bp, synthetic construct
  source 1..110: mol_type = other DNA
tggagcccagcattcctgctgagggtcattcccctggcctatggctggttcacagacctttcccactgaggagtaaagcgtttctattatggagtggcaggagtttggat

SEQ ID NO: 59714 - DNA, 110 bp, synthetic construct
  source 1..110: mol_type = other DNA
ttgtttatcagccattcagtttatggtatcttgttatattagcctgaatatacgaagataacacacaaattcttttcataaagcagctataacatttctaccaaaacttg

SEQ ID NO: 59715 - DNA, 110 bp, synthetic construct
  source 1..110: mol_type = other DNA
aaacagggcagggagtcaatatgagaaacaagctggattgcactgctgctgctgacgaaccatccttattgctggcaaaagaagaccagaagctgagggccagctggtta

SEQ ID NO: 59716 - DNA, 110 bp, synthetic construct
  source 1..110: mol_type = other DNA
cgaaccatccttattgctggcaaaagaagaccagaagctgagggccagctggttacggacccaggcaggctgcctcgattggaatccctgctcatcttgctgctttgtga

SEQ ID NO: 59717 - DNA, 110 bp, synthetic construct
  source 1..110: mol_type = other DNA
ttgctggcttaaccagtgagtatggccaagccaaacctaccagaaggataggacttagaagaaagaagctggggtggccaggagtagggcaccaactggtcttgctccaa

SEQ ID NO: 59718 - DNA, 110 bp, synthetic construct
  source 1..110: mol_type = other DNA
tagaagaaagaagctggggtggccaggagtagggcaccaactggtcttgctccaagttggcagtctccatgagggtgctctgagtgacatcatgcctttcaagaattcac

SEQ ID NO: 59719 - DNA, 110 bp, synthetic construct
  source 1..110: mol_type = other DNA
tttacactccactctgccttccagtctgcagagtaaacatctccgccctgtcgattctgggctcgtgactcgctttgattaaagggatgtgagtggatgtgccatgagca

SEQ ID NO: 59720 - DNA, 110 bp, synthetic construct
  source 1..110: mol_type = other DNA
tctgggctcgtgactcgctttgattaaagggatgtgagtggatgtgccatgagcaggagctgaagtgtgcttgcgtggtttggcttggtggtttgtgcctctgcaatctg

SEQ ID NO: 59721 - DNA, 110 bp, synthetic construct
  source 1..110: mol_type = other DNA
caaagacctgggttctagttctcttcctcaccctcaaggacatatatattttacagatacttatttataagggtaatctctctggctatcttcagatactcactttgatc

SEQ ID NO: 59722 - DNA, 110 bp, synthetic construct
  source 1..110: mol_type = other DNA
gatacttatttataagggtaatctctctggctatcttcagatactcactttgatcacaaagtttactgccaccagttaatcaccgagacaactttcctgccttctgtcat

SEQ ID NO: 59723 - DNA, 110 bp, synthetic construct
  source 1..110: mol_type = other DNA
acccacactgcagctgcaacctgcaccacagctgcagcaacaccagactcttaacccaccgtgccccacaggaacttccaaggctggttattcttcataaatcttttgga

SEQ ID NO: 59724 - DNA, 110 bp, synthetic construct
  source 1..110: mol_type = other DNA
ctgccaccacgctgaccagagaacacgggaaattagacttcgaacagcactggtttataagctcctctgagacgacaaaatataccaaggacagaactaatcaaaagagc

SEQ ID NO: 59725 - DNA, 110 bp, synthetic construct
  source 1..110: mol_type = other DNA
tataagctcctctgagacgacaaaatataccaaggacagaactaatcaaaagagcccaaacccttaaaagcagaatccagcaaaacacacagacaaccccccccccccac

SEQ ID NO: 59726 - DNA, 110 bp, synthetic construct
  source 1..110: mol_type = other DNA
aaacacacaacaggctgggaatactgcctgttcccacgggacggaataaaaacctcataattcccaggcatcatacagagtattcaaagaggtattgcctccgtagtggg

SEQ ID NO: 59727 - DNA, 110 bp, synthetic construct
  source 1..110: mol_type = other DNA
cataattcccaggcatcatacagagtattcaaagaggtattgcctccgtagtgggaatacttagtcctagactaaacactgctccagttccacctaacaaatcttaaaag

SEQ ID NO: 59728 - DNA, 110 bp, synthetic construct
  source 1..110: mol_type = other DNA
aatcaaatctctgtcaaaggcatcatattctttagtccctaaggccttactgttccttccctcatcaccccgcccttctccttggcaacagacacactgacagtatgtac

SEQ ID NO: 59729 - DNA, 110 bp, synthetic construct
  source 1..110: mol_type = other DNA
ctacccataacggggctagttaattaaaatcaaatataattaaaaattcagctgctcagttatactaaccacatttcaagtgctcaggagtcacttatggctactggcta

SEQ ID NO: 59730 - DNA, 110 bp, synthetic construct
  source 1..110: mol_type = other DNA
tgagaagcaagaatttgtgattaggtttctgaaagggcaatgtcgtgatcctgtccaggaaagaattacagctgtggtaggcggacttcgttctgactcgcagaggctgg

SEQ ID NO: 59731 - DNA, 110 bp, synthetic construct
  source 1..110: mol_type = other DNA
caggaaagaattacagctgtggtaggcggacttcgttctgactcgcagaggctggggtcaggggaattggttaggaagcttctgcagtaaaacatggtttggggaggacg

SEQ ID NO: 59732 - DNA, 110 bp, synthetic construct
  source 1..110: mol_type = other DNA
tgatcacagccattcaagaactttcctcccttccccaaagatcagggcttggctggagctgagtacatcaagctcagcaggtcacacatggggaggatgcaggtcattcc

SEQ ID NO: 59733 - DNA, 110 bp, synthetic construct
  source 1..110: mol_type = other DNA
gaggcagcccaaagcacaggctttggggtccagacgcagacctcgcaatgccatgagctctgccatctgtgaaatgtccacggggagactttcaaaaggttgttgcaggg

SEQ ID NO: 59734 - DNA, 110 bp, synthetic construct
  source 1..110: mol_type = other DNA
aaaatacccagatgctgagtttcaggcttggagcctggtttgactaaaggacttaatggagggggttggcactgtctgcttgctgctattgaaaaataaattcaaaccat

SEQ ID NO: 59735 - DNA, 110 bp, synthetic construct
  source 1..110: mol_type = other DNA
atggagggggttggcactgtctgcttgctgctattgaaaaataaattcaaaccattttattgaccatcttccacgtgcatagttttgggtcccccgggagctgggagacg

SEQ ID NO: 59736 - DNA, 110 bp, synthetic construct
  source 1..110: mol_type = other DNA
actcagggaggccgatgataggcctgaggctctaatctcgtgaacagaagagccgagattagaactcagcttccctcgggctgtgctgagttgctcttataataacactg

SEQ ID NO: 59737 - DNA, 110 bp, synthetic construct
  source 1..110: mol_type = other DNA
gggccagtctgagtctgcagttgaacatttttagtatctccaggtaggcaggactagagagggcaggagctctaaaatcagcgactttgtaaatataaacctataaatta

SEQ ID NO: 59738 - DNA, 110 bp, synthetic construct
  source 1..110: mol_type = other DNA
agagagggcaggagctctaaaatcagcgactttgtaaatataaacctataaattatgataaacatcagatcctctctcttttgggtcaggtgccaggtgttcttgtagtc

SEQ ID NO: 59739 - DNA, 110 bp, synthetic construct; identical to SEQ ID NO: 59737
  source 1..110: mol_type = other DNA

SEQ ID NO: 59740 - DNA, 110 bp, synthetic construct; identical to SEQ ID NO: 59738
  source 1..110: mol_type = other DNA

SEQ ID NO: 59741 - DNA, 110 bp, synthetic construct
  source 1..110: mol_type = other DNA
cagtgtatggggtgtggagcctgcaatccaagcttcctccaagggaactttctccaggctctccacctgcaccttctaccaattcccaattaaactcagccccagctaga

SEQ ID NO: 59742 - DNA, 110 bp, synthetic construct
  source 1..110: mol_type = other DNA
aggctctccacctgcaccttctaccaattcccaattaaactcagccccagctagactagttccttcatagaccactccacatacctggtctctttcaaaatctatgtctt

SEQ ID NO: 59743 - DNA, 110 bp, synthetic construct
  source 1..110: mol_type = other DNA
tatgtaatatcctgggtgttcagcaaggtcactccactatcactggtcagattttgaaaggcttccagccatatgtgaattctggaagtgtttttttagctaatcacaaa

SEQ ID NO: 59744 - DNA, 110 bp, synthetic construct
  source 1..110: mol_type = other DNA
gaaaggcttccagccatatgtgaattctggaagtgtttttttagctaatcacaaactaaaagtggtcatttccccagcatcaagggattttatttgatggtgtataattc

SEQ ID NO: 59745 - DNA, 110 bp, synthetic construct
  source 1..110: mol_type = other DNA
gacagctggcctccaaccagatatggagtttccttgggcaagtccctgagatttctgtactattgagcagagatcattttgctgcctctgagcaggaggggcagctgaga

SEQ ID NO: 59746 - DNA, 110 bp, synthetic construct
  source 1..110: mol_type = other DNA
tgtactattgagcagagatcattttgctgcctctgagcaggaggggcagctgagatggaaagaggaggggaggggcttaacgtttgtagaaaggtgagcagccccataga

SEQ ID NO: 59747 - DNA, 110 bp, synthetic construct
  source 1..110: mol_type = other DNA
cttggggaatatttaaatacaatacattttattttggtgcatcatcctcgcactgtgtcgcccacgactcttgccagctcactcggcctgggaatcaacaagcacccccc

SEQ ID NO: 59748 - DNA, 110 bp, synthetic construct
  source 1..110: mol_type = other DNA
tttcttctgagacctttccccttgggaggccctaccattatctcccctctagattgttctcacccaaatcagctcccatccaagggtgctgggcagttctgtggggataa

SEQ ID NO: 59749 - DNA, 110 bp, synthetic construct
  source 1..110: mol_type = other DNA
ttttctacattgttacatagtctctgctattattgtttttaatggcagtagaatagtctgtaactcacttaacagtcccccccattgttggcatttagattgcttccagt

SEQ ID NO: 59750 - DNA, 110 bp, synthetic construct; identical to SEQ ID NO: 59749
  source 1..110: mol_type = other DNA

SEQ ID NO: 59751 - DNA, 110 bp, synthetic construct
  source 1..110: mol_type = other DNA
aacttcatggaagtgagtttgcatttctcatgatggctcccacggcatcaatagcagtggggaaggcactagaagtcctgacacaggactaccactggaaagtaaactgt

SEQ ID NO: 59752 - DNA, 110 bp, synthetic construct
  source 1..110: mol_type = other DNA
agtggggaaggcactagaagtcctgacacaggactaccactggaaagtaaactgtgatgaaaaagagattgtaaaccctaaaataaccaattaaaaaaaataaagttata

SEQ ID NO: 59753 - DNA, 110 bp, synthetic construct
  source 1..110: mol_type = other DNA
cagagcgccactgaggtgccatacctcccattctcattctattcaaacaatgacctgttgcccatcttgcacgtggagagacgagacaataattaaatataatgcgcttg

SEQ ID NO: 59754 - DNA, 110 bp, synthetic construct
  source 1..110: mol_type = other DNA
agcctatgaggttggtaccattagggaacattacgattcccattttaaagatgagcaactgaagtttagagagaaactaaattgttcagaatctcacagctagtccacaa

SEQ ID NO: 59755 - DNA, 110 bp, synthetic construct
  source 1..110: mol_type = other DNA
caactgaagtttagagagaaactaaattgttcagaatctcacagctagtccacaagtctgtatctgcatcaagagtctgggttacttcatattacctgcaaagcctttgt

SEQ ID NO: 59756 - DNA, 110 bp, synthetic construct
  source 1..110: mol_type = other DNA
gtcacttggtgcttttatgcccagagataatacttaacatgaaattatagaaatcacagcccagtaggggctaccaggggcttagctgcctcatggataaaggctgggtg

SEQ ID NO: 59757 - DNA, 110 bp, synthetic construct
  source 1..110: mol_type = other DNA
acagcccagtaggggctaccaggggcttagctgcctcatggataaaggctgggtgtccttatcaagaccagtcacaatactaggaaaatccagaatggttggtaggagag

SEQ ID NO: 59758 - DNA, 110 bp, synthetic construct
  source 1..110: mol_type = other DNA
gtttcataggccctgcccccaccctgcctccagcggagctgaagttccaaggacgacatagatgtgggctcagaggaaatcctctgaagcacttaatgagaatgttagca

SEQ ID NO: 59759 - DNA, 110 bp, synthetic construct
  source 1..110: mol_type = other DNA
ttgtctgaagccgctgggcctgacctcctctgcctggcggctgatggggtttcagtggtgggtcacattcatcagagaggatgggcagggctgtgaatcccacagggcaa

SEQ ID NO: 59760 - DNA, 110 bp, synthetic construct
  source 1..110: mol_type = other DNA
tggtgggtcacattcatcagagaggatgggcagggctgtgaatcccacagggcaaaatggctgggcaggggccgatgcccacagcacacccaccccaccccaccccaccc

SEQ ID NO: 59761 - DNA, 110 bp, synthetic construct
  source 1..110: mol_type = other DNA
gcccagtgcctgactcagaaagagagcccagtacaagcaagctgagggaatgaaggaatgaatgaatgaatgaaatcctcccggccacctgaggtggacctgggtgagtg

SEQ ID NO: 59762 - DNA, 110 bp, synthetic construct
  source 1..110: mol_type = other DNA
gaatgaatgaatgaatgaaatcctcccggccacctgaggtggacctgggtgagtgtgtgcttccccacatctggtgcattctctccctcagagagagaccgcaaaagcaa

SEQ ID NO: 59763 - DNA, 110 bp, synthetic construct
  source 1..110: mol_type = other DNA
aacagtatcccctggatttatgtcgagagacagcccaggtggatccctacacacataatgtgagcagcttcataggacagctcaggatgttgagaaacgccagtagaatt

SEQ ID NO: 59764 - DNA, 110 bp, synthetic construct
  source 1..110: mol_type = other DNA
agattctctgacccagagttcgctcctgcttctgtcatcagtgctgccaaacaagtaccacgcagccagctcttggtggtgatggcctcctggtggaccagatccccaga

SEQ ID NO: 59765 - DNA, 110 bp, synthetic construct
  source 1..110: mol_type = other DNA
taccacgcagccagctcttggtggtgatggcctcctggtggaccagatccccagagccttccttgtgcatagatgcctttgtctgctgtggtcctgctgggctctggggc

SEQ ID NO: 59766 - DNA, 110 bp, synthetic construct
  source 1..110: mol_type = other DNA
tggctcattcatctccatgttcccagaatggagctcagggaacgcattagactgctgactgtggatccaccattactggcctccttttgtgtcttcttatttatatgaat

SEQ ID NO: 59767 - DNA, 110 bp, synthetic construct
  source 1..110: mol_type = other DNA
tggggaagggactgttcctaggaaagcccaggaagctggggaaggagcagacatggatggcacagaagactctgtgggcgaagggctggctctctggtctctactcccta

SEQ ID NO: 59768 - DNA, 110 bp, synthetic construct
  source 1..110: mol_type = other DNA
gtgacattactttatgatcatacaggaggtgcacaattaagggggaaatgtcttactgtcagccactcatgcacaatgaatccgagatcgttccctcggtgcctgcttca

SEQ ID NO: 59769 - DNA, 110 bp, synthetic construct
  source 1..110: mol_type = other DNA
ctgtcagccactcatgcacaatgaatccgagatcgttccctcggtgcctgcttcaggttcaatctgcacagggcctgcagggaggcagccttcaggaatagttctagtct

SEQ ID NO: 59770 - DNA, 110 bp, synthetic construct
  source 1..110: mol_type = other DNA
ggagtgtggccatacggcaaactctgtgtggagtgggctgaaccagaagaaaataatgctgcatgggaagttccaaaagtactagactggatgtgcttaccctttcctct

SEQ ID NO: 59771 - DNA, 110 bp, synthetic construct
  source 1..110: mol_type = other DNA
gctctctgccatgcagaagcgaggggatggcttccttcagaccctccacacatgtgggaagggagttggaggaaccagggccaaggggtccagccagcccattccagcag

SEQ ID NO: 59772 - DNA, 110 bp, synthetic construct
  source 1..110: mol_type = other DNA
ctgcaagaaactgagtcatagattctttgtgaccacataaaactgcttagagctggggaaacagaagacatctgtgtgccaggaggcatgagaagaatgcgaggaagaag

SEQ ID NO: 59773 - DNA, 110 bp, synthetic construct
  source 1..110: mol_type = other DNA
gggaaacagaagacatctgtgtgccaggaggcatgagaagaatgcgaggaagaagcagttagcaggagattcatgttgcttacaggtacttggacagagggtctggtctg

SEQ ID NO: 59774 - DNA, 110 bp, synthetic construct
  source 1..110: mol_type = other DNA
aggatgccatataacaggcctttcaagaatgttattcagactttttagatgaagtacaaatgtttctcacattacaccaatatactagcaaaggtggctcagcgaatttt

SEQ ID NO: 59775 - DNA, 110 bp, synthetic construct
  source 1..110: mol_type = other DNA
cagagagcttccccagatcaaagaatgcgctttttctcccctttgagagagaactggagaaaatgctatgaatgaggcccaatggtcagaaggctaaacaaagctgtgtt

SEQ ID NO: 59776 - DNA, 110 bp, synthetic construct
  source 1..110: mol_type = other DNA
gaacctactcttttgatcaaagggatttaaggcttggaggcagaggggaaggaaattgaggaggatgaccctgaaagcctccgtttactcaatgaaccaggatggcagct

SEQ ID NO: 59777 - DNA, 110 bp, synthetic construct
  source 1..110: mol_type = other DNA
ttgaggaggatgaccctgaaagcctccgtttactcaatgaaccaggatggcagctgtgactcattctgtcacagcctactcactactgggtctgttttaggcactggaga

SEQ ID NO: 59778 - DNA, 110 bp, synthetic construct
  source 1..110: mol_type = other DNA
aggcagcatggtaggagacagtgttcatgtatcagcttagagttgctgcagctcttgatagagccctgtggatactttgggaatgaaggatgttaggtaacctattgagc

SEQ ID NO: 59779 - DNA, 110 bp, synthetic construct
  source 1..110: mol_type = other DNA
tgatagagccctgtggatactttgggaatgaaggatgttaggtaacctattgagcttccaggagcactggggcggatgggggtgtgggttttcagagggataaggctcct

SEQ ID NO: 59780 - DNA, 110 bp, synthetic construct
  source 1..110: mol_type = other DNA
aattgctgctttcttctcagtgttggggccttccatgggtccccatctgtcaattgtccgtttgtccttctccaagaggaaggagcgaagtgttccctgcccatctcatg

SEQ ID NO: 59781 - DNA, 110 bp, synthetic construct
  source 1..110: mol_type = other DNA
aaaagggcatccgtccctcctcgtccacagcacctggggacagagcaggggaaatgggagctgagatgagggcctgataacatcagttatctttgattcatcatctggga

SEQ ID NO: 59782 - DNA, 110 bp, synthetic construct
  source 1..110: mol_type = other DNA
tatcatcatttcatcccattatcacaatagcttctctactggtcttggcacacccatgcttgacctctctaaatgtttctgcactgtggctagaatggtgttttcagagt

SEQ ID NO: 59783 - DNA, 110 bp, synthetic construct
  source 1..110: mol_type = other DNA
ctacaccaggattctctgattctgtgagacttcggtcgagatcccagtccaatttccaaggctcagctctctgcttctgtttctcttctctctcttcttagaccatttct

SEQ ID NO: 59784 - DNA, 110 bp, synthetic construct
  source 1..110: mol_type = other DNA
cgtgtgacattgtcttatgggaaatctcccgagaagagaggcggttcctccatgctcaggatgtaaaggggaaggagggagcatcccagggtctccaggagcaggaggag

SEQ ID NO: 59785 - DNA, 110 bp, synthetic construct
  source 1..110: mol_type = other DNA
tcaggatgtaaaggggaaggagggagcatcccagggtctccaggagcaggaggaggggatggagaccaggaactctgctctaggagccagctgaccggggctcctggagc

SEQ ID NO: 59786 - DNA, 110 bp, synthetic construct
  source 1..110: mol_type = other DNA
cgttacaatcgcgggtgaatgaagatgcctggatttgaatcctctctcaaccacctgttagctttgtgtctctaggcaagttatttaacctctctgagtccttccatctc

SEQ ID NO: 59787 - DNA, 110 bp, synthetic construct
  source 1..110: mol_type = other DNA
tgttagctttgtgtctctaggcaagttatttaacctctctgagtccttccatctccctctgtgggggatggagatgatggggaataatgactatatcctcctaccgagga

SEQ ID NO: 59788 - DNA, 110 bp, synthetic construct
  source 1..110: mol_type = other DNA
gtcacacgatcaaagaacaagtaggaattaatatccctgaggtggtccagagcctctgataccagcagaaaattacaggacacgagacaggaacattacagaatgaatgg

SEQ ID NO: 59789 - DNA, 110 bp, synthetic construct
  source 1..110: mol_type = other DNA
ctgataccagcagaaaattacaggacacgagacaggaacattacagaatgaatgggaggggacaagagatttccatggctaatcttgttaacaagacaatttcttatcaa

SEQ ID NO: 59790 - DNA, 110 bp, synthetic construct
  source 1..110: mol_type = other DNA
agccctgtggtttgtcaagtactggaggatgaagcccttgtaggaagctgctttatcgtttggtgcccatcactaccctgtacggggggaaagccaggtgctttatgctc

SEQ ID NO: 59791 - DNA, 110 bp, synthetic construct
  source 1..110: mol_type = other DNA
aagagttggggagggggctattttatttatttactaggctaccctgtccactcgagcctcagtgtcttcatccataaaggggattgctaagctgctagccccttgcagtg

SEQ ID NO: 59792 - DNA, 110 bp, synthetic construct
  source 1..110: mol_type = other DNA
gcctcagtgtcttcatccataaaggggattgctaagctgctagccccttgcagtgaggatccaatgaggcagagcctgaagaggtgtgcggcagatcccacagctccacg

SEQ ID NO: 59793 - DNA, 110 bp, synthetic construct
  source 1..110: mol_type = other DNA
ttttgatagagatggaaagaaactggaggccctgaaaatagttaggaagtgattgcaggttgcacgggtgaaagatgatgaccgcccgaaacttgctgaatgtaggttac

SEQ ID NO: 59794 - DNA, 110 bp, synthetic construct
  source 1..110: mol_type = other DNA
caggttgcacgggtgaaagatgatgaccgcccgaaacttgctgaatgtaggttactcaacagctatttattgttgaaagaaaacatctccatacaggcctgcagtaggcg

SEQ ID NO: 59795 - DNA, 110 bp, synthetic construct
  source 1..110: mol_type = other DNA
ttgatccctggtctcactcagtgggctaaagatctggcattgccaagagcttcagtataggtcaaacaaggctcagacctggtgtggctgtggctattgcgtaggccagc

SEQ ID NO: 59796 - DNA, 110 bp, synthetic construct
  source 1..110: mol_type = other DNA
actcagtgggctaaagatctggcattgccaagagcttcagtataggtcaaacaaggctcagacctggtgtggctgtggctattgcgtaggccagcagctgcagctccaat

SEQ ID NO: 59797 - DNA, 110 bp, synthetic construct
  source 1..110: mol_type = other DNA
gagctacgtattttcccattcatcatgggccaaggaccataaggaaacagaaaagatatcctgtctttaaaacgtgaggtcatatctgtgacagtgccaggcacagtatc

SEQ ID NO: 59798 - DNA, 110 bp, synthetic construct
  source 1..110: mol_type = other DNA
atatcctgtctttaaaacgtgaggtcatatctgtgacagtgccaggcacagtatctggtccacagtccagcagctgaataaatgctggcctgcagtgctccctgcttctg

SEQ ID NO: 59799 - DNA, 110 bp, synthetic construct
  source 1..110: mol_type = other DNA
ccagcaggtgttgccaaaagactagctcctggaaccttggggtaggggtggggtggggtgaggtagggtggctgctgctccatcgagaagatgatgtttccatgctagat

SEQ ID NO: 59800 - DNA, 110 bp, synthetic construct
  source 1..110: mol_type = other DNA
gggtgaggtagggtggctgctgctccatcgagaagatgatgtttccatgctagatccggtcggacatgggggcagtggaagaaagttcagcctgtgatatttctcttaga

SEQ ID NO: 59801 - DNA, 110 bp, synthetic construct
  source 1..110: mol_type = other DNA
agatgtggaaacagacgtctcaggtcatggaggctttcagttgctggagatcaatctaaaccctttccgactttcaccaaaaacacagtttgcatccaacaggctatctg

SEQ ID NO: 59802 - DNA, 110 bp, synthetic construct
  source 1..110: mol_type = other DNA
aaggtctgtccactcagagattcttagagaatgttacttgacaattctttgtatagagaagtttccaattttctctatggtaggttttctatgctaagttagctccttat

SEQ ID NO: 59803 - DNA, 110 bp, synthetic construct
  source 1..110: mol_type = other DNA
tgatagtgcgttagatgtgtgatgtcactttaaggtcccaggactgagaattcagcctcaatccaggtgtaagtcctcatgcaaacatttgtcgatgacctttggcaaac

SEQ ID NO: 59804 - DNA, 110 bp, synthetic construct
  source 1..110: mol_type = other DNA
cctcaatccaggtgtaagtcctcatgcaaacatttgtcgatgacctttggcaaacttttcatcttctctaagttccggtttcctcatctataaaatgggaataataattc

SEQ ID NO: 59805 - DNA, 110 bp, synthetic construct
  source 1..110: mol_type = other DNA
ttccaaaggaggcaaccgggcccaggagatgttaaatgattcacctaaggtgaacagtagctcaaaaaatagcgcagcaggtaaacaggaggggcagtctttatcacacc

SEQ ID NO: 59806 - DNA, 110 bp, synthetic construct
  source 1..110: mol_type = other DNA
agtagctcaaaaaatagcgcagcaggtaaacaggaggggcagtctttatcacaccaaagtccaccttccctccctgccatttctctccctgttaaggtttaaaaggacaa

SEQ ID NO: 59807 - DNA, 110 bp, synthetic construct; identical to SEQ ID NO: 59805
  source 1..110: mol_type = other DNA

SEQ ID NO: 59808 - DNA, 110 bp, synthetic construct; identical to SEQ ID NO: 59806
  source 1..110: mol_type = other DNA

SEQ ID NO: 59809 - DNA, 110 bp, synthetic construct
  source 1..110: mol_type = other DNA
tgtgccctccctctgttctgctcccctgagggtaccaaagcatccttaggttttatttaactggctctgagaaacccctttccatcccaaataatcttccctcccagcaa

SEQ ID NO: 59810 - DNA, 110 bp, synthetic construct
  source 1..110: mol_type = other DNA
tttaactggctctgagaaacccctttccatcccaaataatcttccctcccagcaagtgataacctgggattccaccattaagagctgaaattccttaaatcagagattca

SEQ ID NO: 59811 - DNA, 110 bp, synthetic construct
  source 1..110: mol_type = other DNA
gaggccaaagcagacggggttccccttgcaaagtcctggaaaagagagagctgcaaagggtccctgggtcttgggcttctgagccacacatgagtgtgaggaggccacct

SEQ ID NO: 59812 - DNA, 110 bp, synthetic construct
  source 1..110: mol_type = other DNA
tcacaaaggatcctgacataaagtatctctgcagaatctctgatgaggctgaacacactatttcctaatccacaggactccctcactcagccatgctgaacctgctaatc

SEQ ID NO: 59813 - DNA, 110 bp, synthetic construct
  source 1..110: mol_type = other DNA
aaagaactccaagtaggatgctggagcttggacacagtaataactgccatttggtacaaaactcactttgaatatcttcacatctcacaaccttagaaagtacttcccgc

SEQ ID NO: 59814 - DNA, 110 bp, synthetic construct
  source 1..110: mol_type = other DNA
gtgtgagaactgcgtggaggtggatctgatggcagtggtcacaatcattgtagttgacatctgcatcactctgggtttgctgatggtggtgtattactacagcaagagta

SEQ ID NO: 59815 - DNA, 110 bp, synthetic construct
  source 1..110: mol_type = other DNA
gacatctgcatcactctgggtttgctgatggtggtgtattactacagcaagagtagaaaggccaaggccatgcctgtgacgagaggagcgggtgctggaggcaggcccag

SEQ ID NO: 59816 - DNA, 110 bp, synthetic construct
  source 1..110: mol_type = other DNA
tacattgttgttgttgttttttttcctgtgcagcttcagacaagcagacactgttatccaatgaccaactttatcaggtaagggaatgtggaatgaaagagacattgctc

SEQ ID NO: 59817 - DNA, 110 bp, synthetic construct
  source 1..110: mol_type = other DNA
atccaatgaccaactttatcaggtaagggaatgtggaatgaaagagacattgctcgataatagtggtaaaatttcagaatgggagaggtgggccagttatttggtagtta

SEQ ID NO: 59818 - DNA, 110 bp, synthetic construct
  source 1..110: mol_type = other DNA
aatgcccccagaattgtctagaaatgttagagtctctcttcctctaaaaaatacggataacttttctgacttgcattagcgtttggtagtatgattctgtaagcagtttt

SEQ ID NO: 59819 - DNA, 110 bp, synthetic construct
  source 1..110: mol_type = other DNA
ctctctgctctgttccaccttgaagctgaaattggatttatttactctgttttatccctaggactggggtgggggcagggaagcagttgagaaatatttgtaaatactct

SEQ ID NO: 59820 - DNA, 110 bp, synthetic construct
  source 1..110: mol_type = other DNA
gggtcctcagctgacaaggcctgggtcctgggtgtcagagacaagaaagcacagagttacaggttgggccctgtagagctttttgtgcttcctgtgtgtggcaagggcca

SEQ ID NO: 59821 - DNA, 110 bp, synthetic construct
  source 1..110: mol_type = other DNA
atagattctgctctctctcccttgtgagcagaagagaggggttctcgggggcccagggacactgggattggtttgaggcggaggaaggagaatcagaactgaagaagttt

SEQ ID NO: 59822 - DNA, 110 bp, synthetic construct
  source 1..110: mol_type = other DNA
gggacactgggattggtttgaggcggaggaaggagaatcagaactgaagaagtttgtctggacacccttgcagaagaggttgggacagctttaggtgaggtgagggtgtg

SEQ ID NO: 59823 - DNA, 110 bp, synthetic construct; identical to SEQ ID NO: 59821
  source 1..110: mol_type = other DNA

SEQ ID NO: 59824 - DNA, 110 bp, synthetic construct; identical to SEQ ID NO: 59822
  source 1..110: mol_type = other DNA

SEQ ID NO: 59825 - DNA, 110 bp, synthetic construct
  source 1..110: mol_type = other DNA
ctcattctgaaaacaaataatgataatcaattgccttcccctggcccacccctcccagcctttggggccaacctgtattataatgctgggtccaatttgaaaataattga

SEQ ID NO: 59826 - DNA, 110 bp, synthetic construct
  source 1..110: mol_type = other DNA
gtatcagcatgtgttgaggaaataagaggcaatagctgaggctggagagcctgtcaggagtcactctataaacagcctatgtcaggcactgaaatttatacattaaccta

SEQ ID NO: 59827 - DNA, 110 bp, synthetic construct
  source 1..110: mol_type = other DNA
tttggcatgtcatggttgtggccaaaaaaacccaactattagaagtgtagcattctgagacatttggtatacagacaaatagttttctaagttgtattatactccattgt

SEQ ID NO: 59828 - DNA, 110 bp, synthetic construct
  source 1..110: mol_type = other DNA
ttgtggccaaaaaaacccaactattagaagtgtagcattctgagacatttggtatacagacaaatagttttctaagttgtattatactccattgttatcaattgagaaca

SEQ ID NO: 59829 - DNA, 110 bp, synthetic construct
  source 1..110: mol_type = other DNA
ggttggctgtgggtctctcccctgctctgggcctcagggtcctcccatgtcaacgtctgtttagctgggtcgtctgtgatattaataatttacatgcaaacctagttcct

SEQ ID NO: 59830 - DNA, 110 bp, synthetic construct
  source 1..110: mol_type = other DNA
atgtatcattccttctcaaaactagcctaggtggaggtcttctgtggcataacatttaaagacctggccttgtcactgcagcggcttcggtcactgctgtagcacaggtt

SEQ ID NO: 59831 - DNA, 110 bp, synthetic construct
  source 1..110: mol_type = other DNA
cagcaacccaagccactgcaattggattcctaacccactgtgctacagtgagaactcccaaaacttgttttttaaatagagagaggatggggagctgggacctcattagc

SEQ ID NO: 59832 - DNA, 110 bp, synthetic construct
  source 1..110: mol_type = other DNA
tcccaaaacttgttttttaaatagagagaggatggggagctgggacctcattagccactgataacttccagcaccacctgggtgagggaaaaggtgcagaaaaagaaagt

SEQ ID NO: 59833 - DNA, 110 bp, synthetic construct; identical to SEQ ID NO: 59831
  source 1..110: mol_type = other DNA

SEQ ID NO: 59834 - DNA, 110 bp, synthetic construct; identical to SEQ ID NO: 59832
  source 1..110: mol_type = other DNA

SEQ ID NO: 59835 - DNA, 110 bp, synthetic construct
  source 1..110: mol_type = other DNA
ctgttgatgcctcaagtgagaagacagtctaccttattggaaagggagtgtttacagttcagtattacatgatcagtatgcagttgagctgatgagtacctgttatttta

SEQ ID NO: 59836 - DNA, 110 bp, synthetic construct
  source 1..110: mol_type = other DNA
gagtgtttacagttcagtattacatgatcagtatgcagttgagctgatgagtacctgttattttaaatgttagctcagcctttgtgtttttttttgtttttttgtttttt

SEQ ID NO: 59837 - DNA, 110 bp, synthetic construct
  source 1..110: mol_type = other DNA
tgcctggaaacagaagtggccgcagaagaaactgctctgcttcccctggccagcagaaagccaggtggcatctgtcagtctacaccctgaactcagccctccacccagct

SEQ ID NO: 59838 - DNA, 110 bp, synthetic construct
  source 1..110: mol_type = other DNA
cgccacgacgggaactccaaaattttacatttttgcaaatttttaaaacctgcttcaggaaacattttgtactttgttgtattaaaatccactggtctacattggagttc

SEQ ID NO: 59839 - DNA, 110 bp, synthetic construct
  source 1..110: mol_type = other DNA
ctctactgctttggttgttaccacaaataacttgtatcttttttctatgttagatttgaaaacatgctagttaggagttcccataatggctcagcggaagctaatctgac

SEQ ID NO: 59840 - DNA, 110 bp, synthetic construct
  source 1..110: mol_type = other DNA
aataacttgtatcttttttctatgttagatttgaaaacatgctagttaggagttcccataatggctcagcggaagctaatctgactaggaaccatgagggtgtgggttcg

SEQ ID NO: 59841 - DNA, 110 bp, synthetic construct
  source 1..110: mol_type = other DNA
aactttcaacaagccaatccatcggatccaaaagttccatactagaatgaaagaaaagcatgggaggcacctcttcccttatatcacccaccaggactgaaatcctcttg

SEQ ID NO: 59842 - DNA, 110 bp, synthetic construct
  source 1..110: mol_type = other DNA
aagcatgggaggcacctcttcccttatatcacccaccaggactgaaatcctcttgacagcattttctcattcccatatccaacctgagctgtgggacacagcattttttg

SEQ ID NO: 59843 - DNA, 110 bp, synthetic construct
  source 1..110: mol_type = other DNA
aatattccccagtagaagccaatgaaacacacaggcggtttccccctgcagtgaaacactaggcgcaggaagggtatggcaccttacgctaatccggggctcagctagcc

SEQ ID NO: 59844 - DNA, 110 bp, synthetic construct
  source 1..110: mol_type = other DNA
acactaggcgcaggaagggtatggcaccttacgctaatccggggctcagctagccattttgctctaagcctaatgtttccattttgaaggtgatcctgtttacctatggt

SEQ ID NO: 59845 - DNA, 110 bp, synthetic construct
  source 1..110: mol_type = other DNA
atgcaactgggagaaggcgaagcaagtatgatgccagcttgctcctctgtcttgaatcctctcttcagggtgatctcgtccatggccttggcttgattctgagctgttac

SEQ ID NO: 59846 - DNA, 110 bp, synthetic construct
  source 1..110: mol_type = other DNA
atcctctcttcagggtgatctcgtccatggccttggcttgattctgagctgttacaggttctggtcttttctggagtgagtgtctagctctttgattctgaaactcaact

SEQ ID NO: 59847 - DNA, 110 bp, synthetic construct; identical to SEQ ID NO: 59845
  source 1..110: mol_type = other DNA

SEQ ID NO: 59848 - DNA, 110 bp, synthetic construct; identical to SEQ ID NO: 59846
  source 1..110: mol_type = other DNA

SEQ ID NO: 59849 - DNA, 110 bp, synthetic construct
  source 1..110: mol_type = other DNA
tccactgatggaatctcgtagcccaggaccccttgcatctcagacctgaggccgcttactgctttggaactgagggttggctccagagctgaggctggaagcccagggtg

SEQ ID NO: 59850 - DNA, 110 bp, synthetic construct
  source 1..110: mol_type = other DNA
aaaccatctcaggcaccgggccctgggatcagctttcctgccctgtagctgaaggagtggaccctctgacccatctccagtcctgtcattctactttcttagtctgaggg

SEQ ID NO: 59851 - DNA, 110 bp, synthetic construct
  source 1..110: mol_type = other DNA
aaagagaatatttgggcttctaaaaccaatgcctgcagcttccgccaggctggcgggcaatgctctggcgccaggctaggccaggaagcatgagaactacacctcccagc

SEQ ID NO: 59852 - DNA, 110 bp, synthetic construct
  source 1..110: mol_type = other DNA
gtggcttctgatgagagcaggggcttgactcccccactgctgggcaccttggccctcagctgccttgctgctggagtgctttgtggggaccgtgagggctaaagacagag

SEQ ID NO: 59853 - DNA, 110 bp, synthetic construct
  source 1..110: mol_type = other DNA
cctgcgcccaggtgcctgtgggatatttacagctccctcggttgccaaggcactgggttgagctcggggcgctggagagcagggcatgaggagggggccgcgtggagact

SEQ ID NO: 59854 - DNA, 110 bp, synthetic construct
  source 1..110: mol_type = other DNA
ggttgagctcggggcgctggagagcagggcatgaggagggggccgcgtggagactgggttcctgacaaacagggacgatagcatctctcccacctcttcccccgggagcc

SEQ ID NO: 59855 - DNA, 110 bp, synthetic construct
  source 1..110: mol_type = other DNA
tgggaaagccctcatccagcccagccagatggcaggtatacaatcagcatcagttaaagctcatcctggttttgtataaggatgatcactccacacatatgggcctgtgt

SEQ ID NO: 59856 - DNA, 110 bp, synthetic construct
  source 1..110: mol_type = other DNA
aaagctcatcctggttttgtataaggatgatcactccacacatatgggcctgtgttcccatcaagaaacagccattggagttcccgttgtggctcagcaggttaaggaca

SEQ ID NO: 59857 - DNA, 110 bp, synthetic construct
  source 1..110: mol_type = other DNA
ttgaacatgggaggccgttatctcccagcttggccatcaactctacgcccagtaagaggagagtgggagggaggggggaagatgtccttggagcgaagatgtttcccctt

SEQ ID NO: 59858 - DNA, 110 bp, synthetic construct
  source 1..110: mol_type = other DNA
cttaggctgcatgactacctatgcctggcacgatctgtgagggggtagaatgtggactctaggtgaccgggcactgggaccatgctaggtaacaagggagcctggttgct

SEQ ID NO: 59859 - DNA, 110 bp, synthetic construct
  source 1..110: mol_type = other DNA
actctaggtgaccgggcactgggaccatgctaggtaacaagggagcctggttgctgggccagcagcgtgtggcaagtcataccaaacagaaatggtaaagctgggtgctg

SEQ ID NO: 59860 - DNA, 110 bp, synthetic construct
  source 1..110: mol_type = other DNA
ataagatcatttgctcccttgagcttcagcttcctcgtttgtaaattgggattacagtatttagctcttagagttttgatgaagcttaagataaggaaagtaaagactga

SEQ ID NO: 59861 - DNA, 110 bp, synthetic construct
  source 1..110: mol_type = other DNA
agtatttagctcttagagttttgatgaagcttaagataaggaaagtaaagactgagtgtttatgaccccatccccccatcataccctgaaatccgaaaatccaagatgat

SEQ ID NO: 59862 - DNA, 110 bp, synthetic construct; identical to SEQ ID NO: 59860
  source 1..110: mol_type = other DNA

SEQ ID NO: 59863 - DNA, 110 bp, synthetic construct; identical to SEQ ID NO: 59861
  source 1..110: mol_type = other DNA

SEQ ID NO: 59864 - DNA, 110 bp, synthetic construct
  source 1..110: mol_type = other DNA
agatagaacagaaagttctaacctgatgatcctgactggattttctagccatcaatcctcatcctggagctgtcttgcaccccgccccactcccttaacccaacgggaat

SEQ ID NO: 59865 - DNA, 110 bp, synthetic construct
  source 1..110: mol_type = other DNA
tcctcatcctggagctgtcttgcaccccgccccactcccttaacccaacgggaatcatctaattagcatgccgaatatacccatcactcaggagactcagtgggtttttc

SEQ ID NO: 59866 - DNA, 110 bp, synthetic construct
  source 1..110: mol_type = other DNA
agcttaagcgaattatgtagtaaggctggcaggtgatttgctgagttgggtgcgtcctttgtagtatgtacctaggttacttggtggtggttggtgaattgaactagact

SEQ ID NO: 59867 - DNA, 110 bp, synthetic construct
  source 1..110: mol_type = other DNA
aattcaggcccctcctcatgggtcccactaatgtactggaatctgggtttaatgtgctgaatttattttttataagaatctgtaactgaacctactcaatggatggagag

SEQ ID NO: 59868 - DNA, 110 bp, synthetic construct
  source 1..110: mol_type = other DNA
ggagagttagaggtgacagtgacatgcaggatgagtgccctcctctcctcgtctcccctcccttggccccaccagcaaggctgctcttcctctgacctgtagagtacatt

SEQ ID NO: 59869 - DNA, 110 bp, synthetic construct
  source 1..110: mol_type = other DNA
ccctcccttggccccaccagcaaggctgctcttcctctgacctgtagagtacatttgtccctagaggttccctgattcaatcaaaccccaccatttaggcgaatctctct

SEQ ID NO: 59870 - DNA, 110 bp, synthetic construct
  source 1..110: mol_type = other DNA
gagtcttcccatcaggcagagccctttgttttattctctgctgtttccctagtgcataaagcagtgcctggtatacagaaggtgctcactaaatgcctactgaatgggtg

SEQ ID NO: 59871 - DNA, 110 bp, synthetic construct
  source 1..110: mol_type = other DNA
gctgttgggagacaggggaggatgaggcagcctggagcccatcccacctgcacaaacccgggataattgttgtccttccggagcctcattcaaaggctttcatttgtttt

SEQ ID NO: 59872 - DNA, 110 bp, synthetic construct
  source 1..110: mol_type = other DNA
gcaccgtaaaggcatcactctggtagctgtgtggaggtgtgcctgggacatgctggctagtggttaacactctggtagcaaaacgaagtgagagttaagcggttgcagtc

SEQ ID NO: 59873 - DNA, 110 bp, synthetic construct
  source 1..110: mol_type = other DNA
tcagagccacagtgtgatataaataaagggaggaaatggcaccttcttgactgtgggcaagaactaagctgggcactggagggtcaataggagttttccagtcagagggg

SEQ ID NO: 59874 - DNA, 110 bp, synthetic construct
  source 1..110: mol_type = other DNA
ggcaagaactaagctgggcactggagggtcaataggagttttccagtcagaggggcaagagagggtccagaccatggtcgtctgtgggtgctaatggactcctttgcaga

SEQ ID NO: 59875 - DNA, 110 bp, synthetic construct
  source 1..110: mol_type = other DNA
acaaacctgcctgttccactgttgggaagttttcattgaggtctagcatccatctaggaggccacacaaatcataggtgcacagcttagcaaacattctccaaatgagca

SEQ ID NO: 59876 - DNA, 110 bp, synthetic construct
  source 1..110: mol_type = other DNA
atccaagaagtgatgatttgccgatcataactgaagacagagcaggtggtgagtgggtagagattcagatctattcagagatgcccccttccttccaggttgctgttccc

SEQ ID NO: 59877 - DNA, 110 bp, synthetic construct
  source 1..110: mol_type = other DNA
gaatatttttcctaccagtgccaggtattgacttggatgatacatctgttcacaccataagaggagtttcctttgaggattgaacaatcttaacttgttacagattttcc

SEQ ID NO: 59878 - DNA, 110 bp, synthetic construct
  source 1..110: mol_type = other DNA
ggctagaccttcatgggatgaaagagagctggcctcatggagcttacagtccatcaggggggggatgtatgataaataagtcatcatgggtgaggtgaatgttatgtaaa

SEQ ID NO: 59879 - DNA, 110 bp, synthetic construct
  source 1..110: mol_type = other DNA
cacagcaagctgggccttttcatttacccttcccttgcctgaaatgcccctagatatccacttcgcttgctttctcatcttcggcttgcccagctttcccatcaaatctc

SEQ ID NO: 59880 - DNA, 110 bp, synthetic construct
  source 1..110: mol_type = other DNA
atccacttcgcttgctttctcatcttcggcttgcccagctttcccatcaaatctcaccttctcatagaggctttgctcaccaccccctcacacatacacacacttaattt

SEQ ID NO: 59881 - DNA, 110 bp, synthetic construct
  source 1..110: mol_type = other DNA
aaggtatatatgaggaggacagtggcgagctcacagacagagagtgcagatgaattggttcaggatgtgggtcgtggaaccctgattttcctgtgctgttctgaggttta

SEQ ID NO: 59882 - DNA, 110 bp, synthetic construct
  source 1..110: mol_type = other DNA
tgtgtcctttggtaataaatatttctgaggataattcagccaaggacacgacaatttgtttaaaactgtctaaactggtaggaaagctattttctcttctgagaggagaa

SEQ ID NO: 59883 - DNA, 110 bp, synthetic construct
  source 1..110: mol_type = other DNA
ggctttggtgaggaattttttaaagggccgtcagatttgtaaaagcagtaaatcagaagtattccaggcaatgactgttgcttgggcaaagctcatgtaacatgcatgat

SEQ ID NO: 59884 - DNA, 110 bp, synthetic construct
  source 1..110: mol_type = other DNA
gaagtattccaggcaatgactgttgcttgggcaaagctcatgtaacatgcatgatacacttattcctctttatcggagataagtatatgttaaaaagacacttaatggat

SEQ ID NO: 59885 - DNA, 110 bp, synthetic construct; identical to SEQ ID NO: 59883
  source 1..110: mol_type = other DNA

SEQ ID NO: 59886 - DNA, 110 bp, synthetic construct; identical to SEQ ID NO: 59884
  source 1..110: mol_type = other DNA

SEQ ID NO: 59887 - DNA, 110 bp, synthetic construct
  source 1..110: mol_type = other DNA
aggctctgatgcactgtgggagacagaccagctcgtcttcccggtctgggtctttgggtctcggcactagggctcttatttctggattggcgggtgtgaaagttggaagt

SEQ ID NO: 59888 - DNA, 110 bp, synthetic construct
  source 1..110: mol_type = other DNA
aggggaaagatattttcatttctgccaaaggccatatgtgagtgcctgtggggaaaagcgtatccatagctttgtgactgaaccaataactcatatctgattcagaagct

SEQ ID NO: 59889 - DNA, 110 bp, synthetic construct
  source 1..110: mol_type = other DNA
taccaagcggagtcctggtgtgggcagagcttgctggagttcaatcagggcctccctccagcagcctcctggcttgcaccagtttgtagactgtatctgatggaaacctt

SEQ ID NO: 59890 - DNA, 110 bp, synthetic construct
  source 1..110: mol_type = other DNA
tttgtccaccaaaggaccatgctagacgtgttctacatcctcaaagtgtttatactcaagctaacttaatttctttggttaaactctgtctagaaacagggtgaaaaatt

SEQ ID NO: 59891 - DNA, 110 bp, synthetic construct; identical to SEQ ID NO: 59890
  source 1..110: mol_type = other DNA

SEQ ID NO: 59892 - DNA, 110 bp, synthetic construct
  source 1..110: mol_type = other DNA
atccactgaggtcaggtacccaggaccacagtagtcacacacctggacccaccatggagttatggaagcagctcaggctccgaccctgcctttgaatgcacacacccaca

SEQ ID NO: 59893 - DNA, 110 bp, synthetic construct
  source 1..110: mol_type = other DNA
ggagttatggaagcagctcaggctccgaccctgcctttgaatgcacacacccacaaatcccacagctgccagggccagacccatcacagccacaggagcacatgttgttc

SEQ ID NO: 59894 - DNA, 110 bp, synthetic construct; identical to SEQ ID NO: 59892
  source 1..110: mol_type = other DNA

SEQ ID NO: 59895 - DNA, 110 bp, synthetic construct; identical to SEQ ID NO: 59893
  source 1..110: mol_type = other DNA

SEQ ID NO: 59896 - DNA, 110 bp, synthetic construct
  source 1..110: mol_type = other DNA
aggtagcccttagctgtaggttttactttgcagctacaatcctaaggtttccatcgatagatcagcaaccagcaaatacaaggcaccgattttatgagtaagaatgcaca

SEQ ID NO: 59897 - DNA, 110 bp, synthetic construct
  source 1..110: mol_type = other DNA
agtatggccctgctgatactttgactgtggagatctagcatctagaactgaaggatcataaacctctgtcattttaagcgcctctagtttgtggttctttgttgtggctg

SEQ ID NO: 59898 - DNA, 110 bp, synthetic construct
  source 1..110: mol_type = other DNA
tcataaacctctgtcattttaagcgcctctagtttgtggttctttgttgtggctgccccagcaaactgttacactcacctgttaggctccctacctgtccctgtctcctg

SEQ ID NO: 59899 - DNA, 110 bp, synthetic construct
  source 1..110: mol_type = other DNA
gaggctcccaggcagcatgtcacccacttggggtggcccaaatcatcccctgcgcacattatttccctcatttgaaggttgagccttttagcctcttacgtggattccac

SEQ ID NO: 59900 - DNA, 110 bp, synthetic construct
  source 1..110: mol_type = other DNA
tccaggaaagacgtggtctaaaaaggaccctgttccaatataaatatgctctgcgggcgaaacaatctcaactatttataaatgctctcagaggtggcccattcattcaa

SEQ ID NO: 59901 - DNA, 110 bp, synthetic construct
  source 1..110: mol_type = other DNA
ggcgaaacaatctcaactatttataaatgctctcagaggtggcccattcattcaacacatttttgagtaccaactacatactagacattgttaggcgctggccttctggt

SEQ ID NO: 59902 - DNA, 110 bp, synthetic construct; identical to SEQ ID NO: 59900
  source 1..110: mol_type = other DNA

SEQ ID NO: 59903 - DNA, 110 bp, synthetic construct; identical to SEQ ID NO: 59901
  source 1..110: mol_type = other DNA

SEQ ID NO: 59904 - DNA, 110 bp, synthetic construct
  source 1..110: mol_type = other DNA
attccatccgagagttcagctgagtatcgcgacgctggtttctgcacatctgtgagtcctattagtgcttacgagatcgacttgcctgtggattgatttggaactgtggt

SEQ ID NO: 59905 - DNA, 110 bp, synthetic construct
  source 1..110: mol_type = other DNA
ggatgtttttattctattattagacaatctgggggacatccttaaaagagtaatgccaaatggccttaattatggaagaactggacttaagagagtttttttttaacaaa

SEQ ID NO: 59906 - DNA, 110 bp, synthetic construct
  source 1..110: mol_type = other DNA
acttgtcctgttttgtgagaggacccagcgcccgggaagggtggagctctgcaagagagtggtggaatgcaagtgccaccaggctattttcattaaaaagtgatgacagc

SEQ ID NO: 59907 - DNA, 110 bp, synthetic construct
  source 1..110: mol_type = other DNA
atcacctaggtgactatatggtatggacaaatttaacctcccatccctgctgggaaggcctcttgttcattccatgggagaaactgctgactcagtggtcaaggctactc

SEQ ID NO: 59908 - DNA, 110 bp, synthetic construct
  source 1..110: mol_type = other DNA
tggctccagaaggttacaacccagataagaaggtttaagacatgcacaaagcaaataaatgaaccatagataaagctctactgggagactagagtcttcggcagaagcag

SEQ ID NO: 59909 - DNA, 110 bp, synthetic construct
  source 1..110: mol_type = other DNA
taaatgaaccatagataaagctctactgggagactagagtcttcggcagaagcagcccaattgcgcactagccccatgaggacaaaccagaaacaaaggcagatcagcac

SEQ ID NO: 59910 - DNA, 110 bp, synthetic construct; identical to SEQ ID NO: 59908
  source 1..110: mol_type = other DNA

SEQ ID NO: 59911 - DNA, 110 bp, synthetic construct; identical to SEQ ID NO: 59909
  source 1..110: mol_type = other DNA

SEQ ID NO: 59912 - DNA, 110 bp, synthetic construct
  source 1..110: mol_type = other DNA
tacaaatcctaatcaaggagagaatcccaaacatgagagacgcataaatgggatgaaacattaagttgtagcctggaggcgagcttgtaaacaggaaatgaatctgggag

SEQ ID NO: 59913 - DNA, 110 bp, synthetic construct
  source 1..110: mol_type = other DNA
tgaccctctagagggcctacccgtgaagggccaatgagcaccactcttggttcaagtatgggcctgagcatctgggagatgacagagtcgtaggtctgttcctcagcttc

SEQ ID NO: 59914 - DNA, 110 bp, synthetic construct
  source 1..110: mol_type = other DNA
gtatgggcctgagcatctgggagatgacagagtcgtaggtctgttcctcagcttccaggtaataaatcctgactgttgtagggtttgttgcaaccctcctggtcatttta

SEQ ID NO: 59915 - DNA, 110 bp, synthetic construct
  source 1..110: mol_type = other DNA
accagatacagaaacagtccaatgagcgtggggaagatgctcaaattcaagtctatcttaatagatagtcaaacactccccccgatcagaagcttgggcttatcacttaa

SEQ ID NO: 59916 - DNA, 110 bp, synthetic construct
  source 1..110: mol_type = other DNA
gatgctcaaattcaagtctatcttaatagatagtcaaacactccccccgatcagaagcttgggcttatcacttaacacaacttggaatagatttacaaggagatcctgct

SEQ ID NO: 59917 - DNA, 110 bp, synthetic construct
  source 1..110: mol_type = other DNA
ccagagccaccaaggaattttaaaggcagcaaaaattagctgctcccttacaacctggctacgtgataaaaaggaaaataatgctcaaaccaaatgcgtacaagaattta

SEQ ID NO: 59918 - DNA, 110 bp, synthetic construct
  source 1..110: mol_type = other DNA
agaggctgggtggtcattctgtggcagggccttgtgctgtggacagggcctgcctgctggcttaattgtgctctcagaggtatattcaaagctacccacagcaggccctg

SEQ ID NO: 59919 - DNA, 110 bp, synthetic construct
  source 1..110: mol_type = other DNA
gctggcttaattgtgctctcagaggtatattcaaagctacccacagcaggccctggtccatcttcccaggcctgggcttctgatcaccaaggagggcagtaggtcagagt

SEQ ID NO: 59920 - DNA, 110 bp, synthetic construct
  source 1..110: mol_type = other DNA
cagatgttgggaccacaaagtatccaagaaatgatctctgcctcaggtagctcacaatctattgcagaagatagatcctttaaatgtaatgcagaagatgctaggataca

SEQ ID NO: 59921 - DNA, 110 bp, synthetic construct
  source 1..110: mol_type = other DNA
gcaattttagacgggctggtcagcttcggcgctcttgagccatagcagttaaaccagcagttgaggctgagtggaagcaggtcatggtgaggagctaagtgagtggggtg

SEQ ID NO: 59922 - DNA, 110 bp, synthetic construct
  source 1..110: mol_type = other DNA
agcagttgaggctgagtggaagcaggtcatggtgaggagctaagtgagtggggtgctggggagacagaatgcgtgcaaaagcccccaagtgggaaggagctaagggttgg

SEQ ID NO: 59923 - DNA, 110 bp, synthetic construct
  source 1..110: mol_type = other DNA
gagaaaaatggccacagtaagtcaacatatgtgacctgatgtttgaaaagtgaagttcattaatgtattgccttgaattgggagggtaaaaatcaaagtttgatttttag

SEQ ID NO: 59924 - DNA, 110 bp, synthetic construct
  source 1..110: mol_type = other DNA
tataaatttgctgaatatcttgccatcataaatattgtaaaatatcatcagctgtgtgctttcacacaaaaacattaggtgagacaaaaacactccacagtttactactg

SEQ ID NO: 59925 - DNA, 110 bp, synthetic construct
  source 1..110: mol_type = other DNA
cctgccttccttcctctccctccccagggcaaatgcagtgctgaagcgagggtaaggaagctggaatcggagggttctcttctgtgtcactaccctacattaggaataaa

SEQ ID NO: 59926 - DNA, 110 bp, synthetic construct
  source 1..110: mol_type = other DNA
tgttcctagcctcactgaggaagtgggaccggaggaacctcattcaaagaatctgagctgcagagttcccactggggctcagtggtaacaaccctgactagtaagcatga

SEQ ID NO: 59927 - DNA, 110 bp, synthetic construct
  source 1..110: mol_type = other DNA
ccctctaccaaccagcagcagcctaaaggtttacttgctaaagaggttgaaccagagacattctggaatcagggataccaggcatagctgaggcaagggaatcatcctaa

SEQ ID NO: 59928 - DNA, 110 bp, synthetic construct
  source 1..110: mol_type = other DNA
agacattctggaatcagggataccaggcatagctgaggcaagggaatcatcctaagaacaaggatttaccaaaacagtgagattccctggccccttctttcactcaatcc

SEQ ID NO: 59929 - DNA, 110 bp, synthetic construct
  source 1..110: mol_type = other DNA
agccttcttctaaaaagtaatttgaatcatgtcattctcctgcttcagttgttcgcttgcttcccatttcaccgaggacaaaatctgaactgactgcagcctacaaagct

SEQ ID NO: 59930 - DNA, 110 bp, synthetic construct
  source 1..110: mol_type = other DNA
cagagatgcacctcccagctttagttagacccaagattgagagctgtagaaaacctggaccaatccttgagtagattatcctggctctaaccaggcacttatacccctga

SEQ ID NO: 59931 - DNA, 110 bp, synthetic construct
  source 1..110: mol_type = other DNA
ttgatggctgaggcagggcatgtgccaagctggagctgtcaaaggtggcttggtgtcaggtaattgggggacgtcttcaccagagtttggagttcagatttcattccaag

SEQ ID NO: 59932 - DNA, 110 bp, synthetic construct
  source 1..110: mol_type = other DNA
ctgacacatctccctcccctccgcggggaacaggaagcagcgtctgcagacccgcgagacagttaaaacgagcaggcttgcacctgcagctcctcagccttgttgcccac

SEQ ID NO: 59933 - DNA, 110 bp, synthetic construct
  source 1..110: mol_type = other DNA
gccttcaggaggtggctcctcctcagaagctgtgctgatagtctggaaaggtggttgtcctgtgtcttcttttcatagcatcatcttcctagtacagttgcctgtattct

SEQ ID NO: 59934 - DNA, 110 bp, synthetic construct
  source 1..110: mol_type = other DNA
tgtcctgtgtcttcttttcatagcatcatcttcctagtacagttgcctgtattctttctaaaaactagatgcgtctcgaatgtaaattggtgcagccaccatggccagaa

SEQ ID NO: 59935 - DNA, 110 bp, synthetic construct
  source 1..110: mol_type = other DNA
aagagtccaggaaagaactgacagaggcttagactaggtgatagtggtcaagctggacagaagtagtactggtcagaacattttgaaagacagaaccaggaacatttgct

SEQ ID NO: 59936 - DNA, 110 bp, synthetic construct
  source 1..110: mol_type = other DNA
gacagaagtagtactggtcagaacattttgaaagacagaaccaggaacatttgctgatagattggctgtaggatatatgagaaaagagaggtcaagaatgatcccccagt

SEQ ID NO: 59937 - DNA, 110 bp, synthetic construct
  source 1..110: mol_type = other DNA
aagggagtgggggtggggcagtctttaaggcatgctgtgaacttccttttcttagcaaaggaataaagctattttttttctccttcacccaaacctctccgagagtttct

SEQ ID NO: 59938 - DNA, 110 bp, synthetic construct
  source 1..110: mol_type = other DNA
ttgcatggtaaaccctggtttcagttgtttgtatttttgcatagtgcttagattcttgtaaaattttctggcccaatctctgcactactcacttgcctctttcatcctat

SEQ ID NO: 59939 - DNA, 110 bp, synthetic construct
  source 1..110: mol_type = other DNA
atacactgtaaaagagatgaatgaaaccggcacagggctaggagtcctatgacaagctgcatttatatttaatgaaaggacaaccacagagggaaaagatttagtggcct

SEQ ID NO: 59940 - DNA, 110 bp, synthetic construct
  source 1..110: mol_type = other DNA
tcggacagtctgtgggcttctcatggcagcctcctgggtagggggcttcattcactccattgtacaggttggactgaccatgaagctgccattctgtggccctgacaagc

SEQ ID NO: 59941 - DNA, 110 bp, synthetic construct
  source 1..110: mol_type = other DNA
tccattgtacaggttggactgaccatgaagctgccattctgtggccctgacaagctggacaacttttactgtgatgtacctcagctcatcaagttggcctgcacggatac

SEQ ID NO: 59942 - DNA, 110 bp, synthetic construct
  source 1..110: mol_type = other DNA
aatgactaacatataattgcggaatgaaaagttcactgaaattgtgccgtttggggcagagcttcgagtcttgttctctctcatacacagtaggttactggttgcccatt

SEQ ID NO: 59943 - DNA, 110 bp, synthetic construct
  source 1..110: mol_type = other DNA
atatcaaacaggagaaagtaaagtcactctgctcagctttgaatttacaaatattaaaaagaaaaagagaactaaattacagtttataagtggtagagcagagaccagga

SEQ ID NO: 59944 - DNA, 110 bp, synthetic construct
  source 1..110: mol_type = other DNA
actctgctcagctttgaatttacaaatattaaaaagaaaaagagaactaaattacagtttataagtggtagagcagagaccaggacttgggtattcagattctaaatagc

SEQ ID NO: 59945 - DNA, 110 bp, synthetic construct
  source 1..110: mol_type = other DNA
taaaacacctctaacataattctgtaaaatgcctttccacctccaatgtcatcatccatgttaagcaatgttttctctcacaagcaggaagttagaatagttaataaaca

SEQ ID NO: 59946 - DNA, 110 bp, synthetic construct
  source 1..110: mol_type = other DNA
ccatgttaagcaatgttttctctcacaagcaggaagttagaatagttaataaacaggtcattctcctccctacctatctctttttctctctctttcctttcatttacccc

SEQ ID NO: 59947 - DNA, 110 bp, synthetic construct
  source 1..110: mol_type = other DNA
taggagactccatgggctgcagagtctgagagcaatggttgaggactttgtaaaggtgcgagcttacttttcctctgtcctgcaatcatagtgtgtactcatgtagtact

SEQ ID NO: 59948 - DNA, 110 bp, synthetic construct
  source 1..110: mol_type = other DNA
gtgcgagcttacttttcctctgtcctgcaatcatagtgtgtactcatgtagtactgagattgatgacatatctgccccaggctgaggtagctggcagcacatatatacag

SEQ ID NO: 59949 - DNA, 110 bp, synthetic construct
  source 1..110: mol_type = other DNA
aagctgtggttcgtggaggtgaaaataacttgagctatgccaaaagaattatgctgggtaatacatatatagtgcttcctgtgtacctggcattgttccgtggtttagat

SEQ ID NO: 59950 - DNA, 110 bp, synthetic construct
  source 1..110: mol_type = other DNA
gagctccatggaccaagggaaagtgtcctctgtgttttatactattgctgtgcccatgctgaatcccctgatctacagcctaaggaataaagatgtcactgttgccctaa

SEQ ID NO: 59951 - DNA, 110 bp, synthetic construct
  source 1..110: mol_type = other DNA
atgctgaatcccctgatctacagcctaaggaataaagatgtcactgttgccctaaaaaaaatgctagagagaagaatattcttgtgatcagatataatatgatttactca

SEQ ID NO: 59952 - DNA, 110 bp, synthetic construct
  source 1..110: mol_type = other DNA
aagaccacaaagaaaaagagctgtgccatgcactcggagtaaaggattatattcttcttccctaggaagtttaccagcattttaggggtaatgacagaggaatagcaaag

SEQ ID NO: 59953 - DNA, 110 bp, synthetic construct
  source 1..110: mol_type = other DNA
gtgacagcacagagaaaactgcaacactatttctaaaagcaactggaacagactgtacctctattaatattggaaatgcataattcaaatgatgtcacagagcctttaaa

SEQ ID NO: 59954 - DNA, 110 bp, synthetic construct
  source 1..110: mol_type = other DNA
tacctctattaatattggaaatgcataattcaaatgatgtcacagagcctttaaacagcccaggtgatcccttcggcctcccactcactaagggacaaggatatctcagc

SEQ ID NO: 59955 - DNA, 110 bp, synthetic construct
  source 1..110: mol_type = other DNA
cctgcctccattgtcatagattaattgaccatatgtgcatgagtttatttatgagctctagattctagtctattgacatctatgcctgtttttgcgccaacaccatataa

SEQ ID NO: 59956 - DNA, 110 bp, synthetic construct
  source 1..110: mol_type = other DNA
ctctagattctagtctattgacatctatgcctgtttttgcgccaacaccatataacattgattgctgtagctttgtaatgcactctgaagtgagggagaatgacaccttc

SEQ ID NO: 59957 - DNA, 110 bp, synthetic construct
  source 1..110: mol_type = other DNA
tgtaagagataatattcccctttgataagaaacctgccagcatttttggtgtaaatactgaagaatagcagagatctatggaggacaggttaaagaggaaaaagtacatg

SEQ ID NO: 59958 - DNA, 110 bp, synthetic construct
  source 1..110: mol_type = other DNA
tactgaagaatagcagagatctatggaggacaggttaaagaggaaaaagtacatgggggtgtggaggtatgaatttttcatgatgagaattatcaatcccgaatttccca

SEQ ID NO: 59959 - DNA, 110 bp, synthetic construct
  source 1..110: mol_type = other DNA
agcagatgtgggctcaatccctggccttgctcagttagttaaggatctggggttagcatgagctgtggtgtaagtctcagtcactactcagactctgtgttgcatagtct

SEQ ID NO: 59960 - DNA, 110 bp, synthetic construct
  source 1..110: mol_type = other DNA
gcatgagctgtggtgtaagtctcagtcactactcagactctgtgttgcatagtctggcagcttcagctccaattcgaccccagcctaggaacttccataggttgcaggtg

SEQ ID NO: 59961 - DNA, 110 bp, synthetic construct
  source 1..110: mol_type = other DNA
tatacatcaacctcaggagaaaaaaaaaaaatagcaactctcattttcaccagaaccccagctggcatatcatgaagaacttcatgctgcttgctgatctcaatctgctt

SEQ ID NO: 59962 - DNA, 110 bp, synthetic construct
  source 1..110: mol_type = other DNA
ccccagctggcatatcatgaagaacttcatgctgcttgctgatctcaatctgcttaaatacaatttcattcccctgcgaatttctcagagatttgtccctataggaaaga

SEQ ID NO: 59963 - DNA, 110 bp, synthetic construct
  source 1..110: mol_type = other DNA
ttctcataatccctgtctttttgattctgtcccctgaccatagctgtgcctggggtccaaattccagagtacttctgcttcatactctccaaagagtaaaccttaacatt

SEQ ID NO: 59964 - DNA, 110 bp, synthetic construct
  source 1..110: mol_type = other DNA
agatttgttaaagcaggtctaatttagagttgggcaaatttagtcctactcctaaattattacctacctggatcctgtactgaatgtcctggatgtttcttcagatgtta

SEQ ID NO: 59965 - DNA, 110 bp, synthetic construct
  source 1..110: mol_type = other DNA
attattacctacctggatcctgtactgaatgtcctggatgtttcttcagatgttactaagctggatagtggaaattcagacatctccaggccttgtatgagttctgggaa

SEQ ID NO: 59966 - DNA, 110 bp, synthetic construct
  source 1..110: mol_type = other DNA
aatcacttctaggtaggtattattaatttcttcatctttcagatatagaaattgacttttaggtcagtgataaagctctatcatatcaccttgacactgcatcaatttca

SEQ ID NO: 59967 - DNA, 110 bp, synthetic construct
  source 1..110: mol_type = other DNA
cttttaggtcagtgataaagctctatcatatcaccttgacactgcatcaatttcagatagatattcataggatctcattcagtaaatatttaagacgtgcataactgaca

SEQ ID NO: 59968 - DNA, 110 bp, synthetic construct
  source 1..110: mol_type = other DNA
cttaataattccatatacttcaatatcaggggtagaagctgacatgagaagaagtcagggacagacagacttcttgagaccccagtacaaagggcacagagcagagggga

SEQ ID NO: 59969 - DNA, 110 bp, synthetic construct
  source 1..110: mol_type = other DNA
cttttctctgttaaaagctggccctactaaaggtgaccatacattttggtttgcctaggacatccctaccttgccatgttctagcaaaatcattaatagctcctcctttt

SEQ ID NO: 59970 - DNA, 110 bp, synthetic construct
  source 1..110: mol_type = other DNA
taggacatccctaccttgccatgttctagcaaaatcattaatagctcctccttttcactcacaggtgccccagtttctgtaaattaccgtggcgcagagtagaacttgac

SEQ ID NO: 59971 - DNA, 110 bp, synthetic construct
  source 1..110: mol_type = other DNA
aaatgccactaacaaaatgttaatgtatcctaagagagctattccactggattgtaaactccatgaggtaaggataatgtctgccttatctgctgcatcccagagcccaa

SEQ ID NO: 59972 - DNA, 110 bp, synthetic construct
  source 1..110: mol_type = other DNA
tacttagtctaagatggtcagtattgcctgggatccgcccaccctcaaatgagggaggaggccccaagctgatctgctgagggtaaaatatcccgcctgtgtcagaaaat

SEQ ID NO: 59973 - DNA, 110 bp, synthetic construct
  source 1..110: mol_type = other DNA
actcaaggtcaccccaattcaagttgtctccagggccccatagccctcacccaacaaggacagaggaggtgctgaaagaacagctccagggcgcagcctcttttggagtg

SEQ ID NO: 59974 - DNA, 110 bp, synthetic construct
  source 1..110: mol_type = other DNA
ccacccttcacaatcagcaccagcttcctgatggataggagacctctctctgagcctggtcaccctctgtatatctgactctagtcatttctgcatttcattaaaatgat

SEQ ID NO: 59975 - DNA, 110 bp, synthetic construct
  source 1..110: mol_type = other DNA
ctttgcttggattacaaatatgtagtccatataatcctcggggcagaacctcctcgtttacccacttgtgtccctcacaagcatcctatcttaataaatgtatctttggc

SEQ ID NO: 59976 - DNA, 110 bp, synthetic construct
  source 1..110: mol_type = other DNA
gtttacccacttgtgtccctcacaagcatcctatcttaataaatgtatctttggcctatcaaaaaaaaaaaaaaaaaaaaaagaaaagaaaaacaaagggagaaggctca

SEQ ID NO: 59977 - DNA, 110 bp, synthetic construct
  source 1..110: mol_type = other DNA
taacaatttcacctcccccagtctgctcctcacttcctgaggtctgcctccctacaggttgtccttacatgtatctgctgccaccactggttaactgagagcagggctgc

SEQ ID NO: 59978 - DNA, 110 bp, synthetic construct
  source 1..110: mol_type = other DNA
ccatgaggacaaaggtgcgatccctggcctcacacaacgggctaaagatccggcgttcctgtgagctttggtgtaggtcgcacacacagcttggacctggcattgctgtg

SEQ ID NO: 59979 - DNA, 110 bp, synthetic construct; identical to SEQ ID NO: 59978
  source 1..110: mol_type = other DNA

SEQ ID NO: 59980 - DNA, 110 bp, synthetic construct
  source 1..110: mol_type = other DNA
cctcccaaaaaaatcttcactgcttccccattttactgtagaatcttatactctggaaaagactttacagatttttcagaccagctctctgcttgatgcatgagtcctct

SEQ ID NO: 59981 - DNA, 110 bp, synthetic construct
  source 1..110: mol_type = other DNA
gcacagaagactaggaccttaaatcactttttaaaaaattgctgcttaccactggcctgtcacccggtgctcattaaatgtgtaagcaccttcacccgaggcctgtgccg

SEQ ID NO: 59982 - DNA, 110 bp, synthetic construct
  source 1..110: mol_type = other DNA
cttcagcatctcacaggctgccttcctgcctctggctggtgacatggccagctttctctctcttctgggctctaattcaatggaggaaacttccatctgtccccatgtat

SEQ ID NO: 59983 - DNA, 110 bp, synthetic construct
  source 1..110: mol_type = other DNA
tcccccagtgaaaccaatgaagctcttcttcccatcccctagagcatcaaacatccccgtggcagtcccatccctcagaggctgcatggcaatgggctgggcagcctggt

SEQ ID NO: 59984 - DNA, 110 bp, synthetic construct
  source 1..110: mol_type = other DNA
aatcccttatcaaagacaccttaagttatcgacacagccacaactaggccatacatttttctatcacctgaatgggatgtggacaagtgtgtactctgactttctcactg

SEQ ID NO: 59985 - DNA, 110 bp, synthetic construct
  source 1..110: mol_type = other DNA
tttttctatcacctgaatgggatgtggacaagtgtgtactctgactttctcactgtcaaaagaacagaaagttccatgaaccaagaaagatttgtacctgatctgctgtg

SEQ ID NO: 59986 - DNA, 110 bp, synthetic construct
  source 1..110: mol_type = other DNA
acagggaccatgccagatccttgacccaccgagcccccaaggaactccttagctatcattatctgaacacgaaagaaacccatgatattcactctcctctcttacttaga

SEQ ID NO: 59987 - DNA, 110 bp, synthetic construct
  source 1..110: mol_type = other DNA
tcattatctgaacacgaaagaaacccatgatattcactctcctctcttacttagatcaccttattctgcatgttgtagtacacagatgaacaacagaagttacctgggtt

SEQ ID NO: 59988 - DNA, 110 bp, synthetic construct
  source 1..110: mol_type = other DNA
gcttggcttgagtcggacaacaaaactaggatttccaggtctgtggctgagcttctttggagtaggtaaaggtgtgctgttagtagttccttttctttacatgaagtgtg

SEQ ID NO: 59989 - DNA, 110 bp, synthetic construct
  source 1..110: mol_type = other DNA
tgctgcgggtgttgggactgaggccaggatcctagactttccctctggggaaactccctgcagagcccagacttaggaaggaatctgttttaggagtcctagtgttacca

SEQ ID NO: 59990 - DNA, 110 bp, synthetic construct
  source 1..110: mol_type = other DNA
ccctgcagagcccagacttaggaaggaatctgttttaggagtcctagtgttaccaggaagccctctcctttctctttaagctcaggctgcaactgtggcttctgaggggc

SEQ ID NO: 59991 - DNA, 110 bp, synthetic construct
  source 1..110: mol_type = other DNA
ccttggaagcggatccttcccagtcgagccacaagatgactacagcatggtacgtaccaacacctatagtacgtctgtgagagactctgaggcaaaggacccagctcagc

SEQ ID NO: 59992 - DNA, 110 bp, synthetic construct
  source 1..110: mol_type = other DNA
ctaaagatggcaagactatcaggcagtaaacaagggagtgaataaggacaatgaaaatgaaagcaggtaataaatagattttctagagctgaattaaggcccttccagac

SEQ ID NO: 59993 - DNA, 110 bp, synthetic construct
  source 1..110: mol_type = other DNA
caggtcttcagcctgctgtaatttcctaattttttcagcttctaatctttgactgctttgcttttgtgccacaggattacagatcgaaaccatatagtgggtctgcacca

SEQ ID NO: 59994 - DNA, 110 bp, synthetic construct; identical to SEQ ID NO: 59993
  source 1..110: mol_type = other DNA

SEQ ID NO: 59995 - DNA, 110 bp, synthetic construct
  source 1..110: mol_type = other DNA
gagaaagagctgggattcagaaagccctgggcagcaggaaggttggtttccattccagcttcagggccctgaattagcaggttggatctagcaggagcaggaatgatggt

SEQ ID NO: 59996 - DNA, 110 bp, synthetic construct
  source 1..110: mol_type = other DNA
cagcttcagggccctgaattagcaggttggatctagcaggagcaggaatgatggtatactgacagcctgctgggcactgtgtgtgtgtgggggtgtgtgtgtgaatttta

SEQ ID NO: 59997 - DNA, 110 bp, synthetic construct
  source 1..110: mol_type = other DNA
tctgaaagccaatgctttagacttttaattctgtcctaaccaagggcccacctgaaaacacaaaatacctgcaatgactttgaaaaccaaaagcattagtgccccaaaga

SEQ ID NO: 59998 - DNA, 110 bp, synthetic construct
  source 1..110: mol_type = other DNA
aggtcactgagatcaaaggtcacacgtagaaaaaggcaacagtgaggggctgctagctctaacaggagtcaatctggtcttaattacacaccaaaaagagaaggggtctg

SEQ ID NO: 59999 - DNA, 110 bp, synthetic construct
  source 1..110: mol_type = other DNA
aggaagagtgctcccaccacatggtcacagtggccacagtggccttcccttcctaggagctgtcttgtcttttccttgggaagggtggcttcctgtgacaaccagctcac

SEQ ID NO: 60000 - DNA, 110 bp, synthetic construct
  source 1..110: mol_type = other DNA
gtcccaaaggggaaggttcccacaaagagagcgagacccaggaggtgcagaccaagagccacaggtagactggccctcatggtcaagaaatttgctaggagtttccgtgg

SEQ ID NO: 60001 - DNA, 110 bp, synthetic construct
  source 1..110: mol_type = other DNA
accttgtggtgctgctgctggccctgcacctccttctcgatgatggggatgtccacgactcctgctgagggcaccgggacgcgcacagtaatagccctggagggacacac

SEQ ID NO: 60002 - DNA, 110 bp, synthetic construct
  source 1..110: mol_type = other DNA
cgactcctgctgagggcaccgggacgcgcacagtaatagccctggagggacacacagacccttgctttagccacaaaggtgagtgacatgttcctctgagttggctactt

SEQ ID NO: 60003 - DNA, 110 bp, synthetic construct
  source 1..110: mol_type = other DNA
gggattaatataacttttctctttcacatccctctccagcgaactagtaatgtacgatccacatttttcaaggactgtttatatgaagtatttgatgacttggagtcaaa

SEQ ID NO: 60004 - DNA, 110 bp, synthetic construct
  source 1..110: mol_type = other DNA
tctccttccactgcgcctccgctcccttgcgtgttcctcgtctgtgcccttatagcttccctttaccagctgggagcagaggccactgttaagctctccatttagactca

SEQ ID NO: 60005 - DNA, 110 bp, synthetic construct
  source 1..110: mol_type = other DNA
catgccctgtgctaggctctgaagggtcaccaggataaacagcattgatgtcctgtagtcttgtagggaagctagacatgcaatccgaccactacagtgtaatgggatga

SEQ ID NO: 60006 - DNA, 110 bp, synthetic construct
  source 1..110: mol_type = other DNA
tagtcttgtagggaagctagacatgcaatccgaccactacagtgtaatgggatgagcattttggtgctctgtctataaggaacagtggtgacacaagggggatgatcagc

SEQ ID NO: 60007 - DNA, 110 bp, synthetic construct
  source 1..110: mol_type = other DNA
ggggataaggatccaccacgaggggatctgctgggtaaagtatgaccctatattgctttgtcttcaactttgactcactgactctcaagttagacactgttgggaatgca

SEQ ID NO: 60008 - DNA, 110 bp, synthetic construct
  source 1..110: mol_type = other DNA
cttgggtctggttagatgtcagacttggggaagcccctgtgtattggagggtttcacctcttcaagtacagggattgcagggagctgcgaacaggttggggagaccatgg

SEQ ID NO: 60009 - DNA, 110 bp, synthetic construct
  source 1..110: mol_type = other DNA
ggctgttagtgggcagctttttgggtcaagatgaaaccacctgggctgatttccggatctctgctgagccacttactagggccttggtctaggcggggatgcagagcccc

SEQ ID NO: 60010 - DNA, 110 bp, synthetic construct
  source 1..110: mol_type = other DNA
ctgacccgaggaggcagctgacggcaactgaactctaaattaggacgaggcagtttctggggtagctaagcccatcccctggcctccaggcatgtgtgcccaatttaaag

SEQ ID NO: 60011 - DNA, 110 bp, synthetic construct
  source 1..110: mol_type = other DNA
tctggggtagctaagcccatcccctggcctccaggcatgtgtgcccaatttaaagagtgggaccctttcctggaggatgtcccagggatgctgggctcctgggaagccaa

SEQ ID NO: 60012 - DNA, 110 bp, synthetic construct
  source 1..110: mol_type = other DNA
agtgtgggcttcggcagtggcggtgggggagggcagagatggcagcccatgaaggctagggcctggatgtcatttcagacctgctgctggctgttctgggggccctggct

SEQ ID NO: 60013 - DNA, 110 bp, synthetic construct
  source 1..110: mol_type = other DNA
tcctctaaccccctgtgtggctggctctctgcttctcccttttctctcctggcatctggctggatgtgggtcaggcacagaggggcctgcagagaaaatgaggcccactt

SEQ ID NO: 60014 - DNA, 110 bp, synthetic construct
  source 1..110: mol_type = other DNA
gtgtgcacgtgtgctggccccatagcgtgtttctcatcgtctagacatacctcggctctctccagaccgagggcaggagctggaccctggagtaggactgaccagggccc

SEQ ID NO: 60015 - DNA, 110 bp, synthetic construct
  source 1..110: mol_type = other DNA
cctggattctaaaatttcaagcgtcctagccttttcttcagtaagcttgacttggagcataaagcttggggtctggcttcatcctaggcaagcagatgtcacatccctgc

SEQ ID NO: 60016 - DNA, 110 bp, synthetic construct
  source 1..110: mol_type = other DNA
aggattctgaggtctcttttgtgcagccctgcactctggctgccccacggggatgactgcataaggagctgtctgtgggcggccttccctcccctggctttctccctgtc

SEQ ID NO: 60017 - DNA, 110 bp, synthetic construct
  source 1..110: mol_type = other DNA
tccaggttttggaaagacaactctgaaatcagtgtagaggatggaccagagaagggagaccctgcagactgatgctgcttctgagagaaaggtaaaggagctggagaggg

SEQ ID NO: 60018 - DNA, 110 bp, synthetic construct
  source 1..110: mol_type = other DNA
gagaccctgcagactgatgctgcttctgagagaaaggtaaaggagctggagagggtgggatggccagagccacagcagtgatggtggcagcaggaggagagggaggatca

SEQ ID NO: 60019 - DNA, 110 bp, synthetic construct; identical to SEQ ID NO: 60017
  source 1..110: mol_type = other DNA

SEQ ID NO: 60020 - DNA, 110 bp, synthetic construct; identical to SEQ ID NO: 60018
  source 1..110: mol_type = other DNA

SEQ ID NO: 60021 - DNA, 110 bp, synthetic construct
  source 1..110: mol_type = other DNA
gaggcacagctttcctgtctgtctttcactgtccctcacatgtcattccagcattttgatatttattcatggcctcctatgtgacgaagagtgtcctaggcaccaggggg

SEQ ID NO: 60022 - DNA, 110 bp, synthetic construct
  source 1..110: mol_type = other DNA
ttgatatttattcatggcctcctatgtgacgaagagtgtcctaggcaccaggggggtgaaagaaatggatattttaaccagttagttaataaaagttcctgtctagggtt

SEQ ID NO: 60023 - DNA, 110 bp, synthetic construct
  source 1..110: mol_type = other DNA
ggagttccaagcagccacttctacgtggtgagcacccactccctgtgtgtacattctggtacagagaggacgagtgttgattcgcatcccgatcctccccctgctagctg

SEQ ID NO: 60024 - DNA, 110 bp, synthetic construct
  source 1..110: mol_type = other DNA
ctggtacagagaggacgagtgttgattcgcatcccgatcctccccctgctagctgaggctttggacaagtcactctgcctctataaactttgatgtctcatctgtacaat

SEQ ID NO: 60025 - DNA, 110 bp, synthetic construct
  source 1..110: mol_type = other DNA
ctgggaactttcatatgccacaggtgcgaccctaaaaaaaaaaagagcaaataaaaacagagtgatgggaacttaaaaggcaactttgctgcctaaagaatcctccacga

SEQ ID NO: 60026 - DNA, 110 bp, synthetic construct; identical to SEQ ID NO: 60025
  source 1..110: mol_type = other DNA

SEQ ID NO: 60027 - DNA, 110 bp, synthetic construct
  source 1..110: mol_type = other DNA
catcttgcctgtgctctatgatgacttctctatcagaacacctttcgtcctcatagagaaagtgcagggctggagcaaagggtcacccagagaaaaatttgctctgctgt

SEQ ID NO: 60028 - DNA, 110 bp, synthetic construct
  source 1..110: mol_type = other DNA
ctacaccagcctaccttcaaaggtaaatacatttttttttcatccccagggacttaatttgttctcaattctttagcagaagcatcatttcaaaaacagcaagttccttg

SEQ ID NO: 60029 - DNA, 110 bp, synthetic construct
  source 1..110: mol_type = other DNA
ccagtcttgctgaaattctgtgtttctggagctgtgttcctacagtctttacaaataccccttgcactgggcatgtgatttacatcttttatatcggaacaagattttcc

SEQ ID NO: 60030 - DNA, 110 bp, synthetic construct
  source 1..110: mol_type = other DNA
gcctggggcatcaatgacccaggtggaatctaatttactggatactaggtcctctttgatggttgaaccattagctagcagacgtgtgattccagattgaggagaaaata

SEQ ID NO: 60031 - DNA, 110 bp, synthetic construct
  source 1..110: mol_type = other DNA
ttgatggttgaaccattagctagcagacgtgtgattccagattgaggagaaaataatttcagaaaatttacttgtgaagggaattcattaagaagaccacatccgagtgg

SEQ ID NO: 60032 - DNA, 110 bp, synthetic construct
  source 1..110: mol_type = other DNA
ttaacaatgttttatctacttaaattaggcagtattttctgctgtattcaactaagaacactcaccaatacttggtgatttggggttgataaagacttagaaaagctgca

SEQ ID NO: 60033 - DNA, 110 bp, synthetic construct
  source 1..110: mol_type = other DNA
gaacactcaccaatacttggtgatttggggttgataaagacttagaaaagctgcacttgggaagaagaaatgtgttgatttgttccattgagagtgaccctagtctaagt

SEQ ID NO: 60034 - DNA, 110 bp, synthetic construct
  source 1..110: mol_type = other DNA
taatatgttgccggccaaccttacctatctggagggaaaacgctatgtctacagacggaggtcgtggccacatgaaagcagcgtactttcttgagcagcttcccatgctt

SEQ ID NO: 60035 - DNA, 110 bp, synthetic construct
  source 1..110: mol_type = other DNA
cggaggtcgtggccacatgaaagcagcgtactttcttgagcagcttcccatgcttattaggtgataacaaacaagatcaactatgcataacctgggagttctggtcatgg

SEQ ID NO: 60036 - DNA, 110 bp, synthetic construct
  source 1..110: mol_type = other DNA
aatctatttttcccattagggaaaattagatatatgaaagcaatggcaaatggtcaaagtcatacaatgaatatcaatgctagaggctaaaatgaaacccgggtgaccag

SEQ ID NO: 60037 - DNA, 110 bp, synthetic construct
  source 1..110: mol_type = other DNA
aaagtcatacaatgaatatcaatgctagaggctaaaatgaaacccgggtgaccagctccctagtaaactagatagcatgagaacaaatggcttaggatattgtatttgaa

SEQ ID NO: 60038 - DNA, 110 bp, synthetic construct
  source 1..110: mol_type = other DNA
cccttggattctatctttgactctttggggacgtcacagctctcaggtaagaatcctcagaatacagccacaatagactgaaggtgaagccaggtccaggtatgtctcag

SEQ ID NO: 60039 - DNA, 110 bp, synthetic construct
  source 1..110: mol_type = other DNA
tacagaggctcttactctaggcaatcccaatgtttaaaaatctgggtttatatgaaggccaaatttagaaactaattattcatgttttaaaggcttcacagtaggacata

SEQ ID NO: 60040 - DNA, 110 bp, synthetic construct
  source 1..110: mol_type = other DNA
tctaggcaatcccaatgtttaaaaatctgggtttatatgaaggccaaatttagaaactaattattcatgttttaaaggcttcacagtaggacataagtcaatagaaaact

SEQ ID NO: 60041 - DNA, 110 bp, synthetic construct
  source 1..110: mol_type = other DNA
ccttttcatagcatgcacaccaaattaactaaaactacaaattgtccccgactatggcaagtttgcccttcaaaaacggtttgcagtagaggtgattatacatatattca

SEQ ID NO: 60042 - DNA, 110 bp, synthetic construct
  source 1..110: mol_type = other DNA
gcctctcatttacatgaggcatggcttgtatcattcagaagcttcagaaaaagaagggatgtatgaatgttgggtgaggaccaccccaccttcccctccaccataaacct

SEQ ID NO: 60043 - DNA, 110 bp, synthetic construct
  source 1..110: mol_type = other DNA
gggatgtatgaatgttgggtgaggaccaccccaccttcccctccaccataaacctttctttagggcatatgccatatccctcaggtaatattgggacgaatgctcagtgt

SEQ ID NO: 60044 - DNA, 110 bp, synthetic construct
  source 1..110: mol_type = other DNA
cctttcatcttctttcacccttagaccttctgaagttagatgataaaatgaattgggacgtctgtccaaaaagcccagtgctgtgaaaatgcagacatactgcctgggag

SEQ ID NO: 60045 - DNA, 110 bp, synthetic construct
  source 1..110: mol_type = other DNA
ggacgtctgtccaaaaagcccagtgctgtgaaaatgcagacatactgcctgggagatgggtcttagggggcaattaaaagataatgtcaatagggccagacaacgtgaca

SEQ ID NO: 60046 - DNA, 110 bp, synthetic construct
  source 1..110: mol_type = other DNA
gcaccaaatatgtattttatgttgtgccaggtgctggagagagaaataagaaaagtagaacccaaattcattctccttgagcaaattccaaaaacatacaccaactaaga

SEQ ID NO: 60047 - DNA, 110 bp, synthetic construct
  source 1..110: mol_type = other DNA
tagaacccaaattcattctccttgagcaaattccaaaaacatacaccaactaagagacgtgtgatatattttcagtcattgccatagtaagatctcattctagaactaag

SEQ ID NO: 60048 - DNA, 110 bp, synthetic construct
  source 1..110: mol_type = other DNA
attgcccatccattccaaatataaacattgaatacttcagctttataatgtactctctccaaagggttcaaagatctttatgaaagagcaatcggagcaaggttgtacca

SEQ ID NO: 60049 - DNA, 110 bp, synthetic construct
  source 1..110: mol_type = other DNA
tagaggttattcaattaaatatgactgtattgttaagtttctagcatgaaataaaagctctgcaattgacagaagttatggccgtgtggccattagatcacgtgataact

SEQ ID NO: 60050 - DNA, 110 bp, synthetic construct
  source 1..110: mol_type = other DNA
agctctgcaattgacagaagttatggccgtgtggccattagatcacgtgataactatacatggcctccagacataacaggaaagggtggcgatgatgccactactacttg

SEQ ID NO: 60051 - DNA, 110 bp, synthetic construct
  source 1..110: mol_type = other DNA
ttgtagccaaggtgaatattggacaagaaagatcatctcagagataagcactggggcaacatgcttagctaaccaaggaactccttacaatgaaagggcaaagatttgag

SEQ ID NO: 60052 - DNA, 110 bp, synthetic construct
  source 1..110: mol_type = other DNA
tctcatggctctgcaccgtgaagtcctggaattcagaaggtctaccaaagtcttcagtttccttctgatgtctttttgcaggctatgccacattcactaagaaacagact

SEQ ID NO: 60053 - DNA, 110 bp, synthetic construct
  source 1..110: mol_type = other DNA
agtttccttctgatgtctttttgcaggctatgccacattcactaagaaacagacttagaagaaatacaattgacactttctgaaagggacaccccgggtgcatttaggta

SEQ ID NO: 60054 - DNA, 110 bp, synthetic construct
  source 1..110: mol_type = other DNA
caggaagcatggcccagtcacagggtccagctgccccttgtggagactgtatgaggagagcagtcttcccctagccattcagtgaatacaaagtcagggccaatgtcatg

SEQ ID NO: 60055 - DNA, 110 bp, synthetic construct
  source 1..110: mol_type = other DNA
ccacagcatgtgaaagttcctgggccaggagaacccacagcagaatagctcctcaagctgctgcagtgacaatactgacacttaaactgttgtaccgcaagaaaactttt

SEQ ID NO: 60056 - DNA, 110 bp, synthetic construct
  source 1..110: mol_type = other DNA
agctgctgcagtgacaatactgacacttaaactgttgtaccgcaagaaaacttttcccaactaataattctggcatttgtgttattttctctgagtcttataataacctt

SEQ ID NO: 60057 - DNA, 110 bp, synthetic construct
  source 1..110: mol_type = other DNA
ttggaagggcaagtcaccccacatctgagctggagaaagacctcagtacagctggatttggcccacaaaccaccttccggagtggtgtggggagaatgaagaggttggaa

SEQ ID NO: 60058 - DNA, 110 bp, synthetic construct
  source 1..110: mol_type = other DNA
atttggcccacaaaccaccttccggagtggtgtggggagaatgaagaggttggaaagggtgtgggagtgacaaagcttccctaccgaaaaaagaccgtccttgtcccaca

SEQ ID NO: 60059 - DNA, 110 bp, synthetic construct
  source 1..110: mol_type = other DNA
gataatgcaaagacacctgtggcatcaaaagaccacctgacaaagagaagaaccatctaccgatgactgaaaaggtgtcctgcatttcagctccatcagaacaggaattg

SEQ ID NO: 60060 - DNA, 110 bp, synthetic construct
  source 1..110: mol_type = other DNA
tctaccgatgactgaaaaggtgtcctgcatttcagctccatcagaacaggaattggaagaagatgggccatagatgtgtggccggttcgtgggggaggagcctctttgaa

SEQ ID NO: 60061 - DNA, 110 bp, synthetic construct
  source 1..110: mol_type = other DNA
acattctttcttctaatgggcaaccttcatttgctaaataaccatcccagggtggagaggctcagagagagccagactttcatgttagattcatgacacacaatgttcct

SEQ ID NO: 60062 - DNA, 110 bp, synthetic construct
  source 1..110: mol_type = other DNA
tattatatccagagaaccatctggattaaaaggttgagttccctaaagctacactttcagtagagcagggacaaaggggtggaagaaaaaaaaggagagttcccatcgtg

SEQ ID NO: 60063 - DNA, 110 bp, synthetic construct
  source 1..110: mol_type = other DNA
atcatgggctgacttcctcatccttaagctcaaaaaagaaaaagaaaaaaaatccagaaagatctctcctgccaggttctcaaaatctctctcctggattctaacagaag

SEQ ID NO: 60064 - DNA, 110 bp, synthetic construct
  source 1..110: mol_type = other DNA
agtcacagacagcaaatccgaccttggtctagaatctgctgggtgtcacacgttgagctacaaagaccacctttgtcatttggactcagttggcaggaacagcatgtgtg

SEQ ID NO: 60065 - DNA, 110 bp, synthetic construct
  source 1..110: mol_type = other DNA
tcatcccatcaccaaatcttgatcccaggaaagtgtcttggttataacccgacgttttgcttccttttcaggttcactgttggcctataacacaacctcccacacggacc

SEQ ID NO: 60066 - DNA, 110 bp, synthetic construct
  source 1..110: mol_type = other DNA
cttctgggtagcagacggctaatttcttgtgccctcacatggcaggaagcaggcgagctacctctgtgacctcttcttctacgggcactaatcccattctactctcatga

SEQ ID NO: 60067 - DNA, 110 bp, synthetic construct
  source 1..110: mol_type = other DNA
gcgaagcatgagtcctccctgaggggagtcacctgagagagctggggtcgttccggctgcaaagacagcattaacctgctgctttcaacagtgttatgctgcatatttaa

SEQ ID NO: 60068 - DNA, 110 bp, synthetic construct
  source 1..110: mol_type = other DNA
tattttttatttaatggccagacccaagacatgtggaatttcttggggtcagggattgaatccaagccacagctgggatctatgctgcagttgtggcaccaggagatcct

SEQ ID NO: 60069 - DNA, 110 bp, synthetic construct
  source 1..110: mol_type = other DNA
ttgaatccaagccacagctgggatctatgctgcagttgtggcaccaggagatcctttaacccattgcactgggctggggttgcacctccacagcaacctgagcagcagca

SEQ ID NO: 60070 - DNA, 110 bp, synthetic construct
  source 1..110: mol_type = other DNA
gattgtgtgggctcaggtgcctggccttgctccccagggtcacaggttattggccacaatgggacatattctaagctgctcagcctggtggtactcagctttggccctta

SEQ ID NO: 60071 - DNA, 110 bp, synthetic construct
  source 1..110: mol_type = other DNA
acaatgggacatattctaagctgctcagcctggtggtactcagctttggcccttaaggtctaaaagccagggatgctttttcgttgacattaacaagttggaaactcagg

SEQ ID NO: 60072 - DNA, 110 bp, synthetic construct
  source 1..110: mol_type = other DNA
tttcttttctgtgtatgtgataattttcctttaaatttgttatgttcattatacggaaattgcatatttgagataatctcctcctttacatttttttggccacacccatg

SEQ ID NO: 60073 - DNA, 110 bp, synthetic construct
  source 1..110: mol_type = other DNA
agaaagtaaaagtccttttaatttaaagcttgcttattagctttctactaatattaagactgtgttcaggacaaaataattcgaaaacacaaccagaagaaatcggcctg

SEQ ID NO: 60074 - DNA, 110 bp, synthetic construct; identical to SEQ ID NO: 60073
  source 1..110: mol_type = other DNA

SEQ ID NO: 60075 - DNA, 110 bp, synthetic construct
  source 1..110: mol_type = other DNA
ttgtagtacagaagcctttttttgtttttttccttttctgtcttagggccatatgcacagcactggaaattcccaggctagggggcaaatcaaagtgcagctgccagatc

SEQ ID NO: 60076 - DNA, 110 bp, synthetic construct
  source 1..110: mol_type = other DNA
aaaggattcacacggaggttgaaatcactggagctgtatttcaggccaagttcatgaaacagaggcatgttcaaagaccatggaagagtccaaaccagagaggatgaaga

SEQ ID NO: 60077 - DNA, 110 bp, synthetic construct
  source 1..110: mol_type = other DNA
atcagagcaaaaagaacatacacattgaatgaatcaagctgcaaagtcgaagggcacaaacacctaaatttattactagataaatattagatgtcaatgtatatgctata

SEQ ID NO: 60078 - DNA, 110 bp, synthetic construct
  source 1..110: mol_type = other DNA
gttcccagtcagatttgtcaaccactgagccacgacgggaactcctctgctaatatttataggatttttacactgatattcatttgtgagactgagtaagctttccaaca

SEQ ID NO: 60079 - DNA, 110 bp, synthetic construct
  source 1..110: mol_type = other DNA
cgggaactcctctgctaatatttataggatttttacactgatattcatttgtgagactgagtaagctttccaacatacaatctttaccaagtttcgttagcatcttttaa

SEQ ID NO: 60080 - DNA, 110 bp, synthetic construct
  source 1..110: mol_type = other DNA
ttggttcagggctggagtagagctgggcccatggagagaaggcgacatcaatgcctgaaggaagcaggtttggcaaggctggactcagatcctctaacaggacttgtcca

SEQ ID NO: 60081 - DNA, 110 bp, synthetic construct
  source 1..110: mol_type = other DNA
aacggtgctccttttggggtcttttctctggacccgctcagaaacactggctctgacttcccgttgacacactgccatctggtggagcagggcctggggaccggctttca

SEQ ID NO: 60082 - DNA, 110 bp, synthetic construct
  source 1..110: mol_type = other DNA
tcattgtccttgtatattgttaggtctgtgattcagagcgagttccagatgaaacccctttaagtaactggtgggtctagtttacgattgcattacagtcatgcagggta

SEQ ID NO: 60083 - DNA, 110 bp, synthetic construct
  source 1..110: mol_type = other DNA
cagaaaatattcattgagcgcctactctttgccatgttgaaggagcagctacagggatgaatgaccccctcaaagagcctactgagtcgtagagtaactgcagacatgcc

SEQ ID NO: 60084 - DNA, 110 bp, synthetic construct
  source 1..110: mol_type = other DNA
cctgagtccatttattgcaacttgtatattaaatgcatctcccatcaccttcaccatctctttccccagatgcttgcaaaccatttccctgaccacagagcacagggtgc

SEQ ID NO: 60085 - DNA, 110 bp, synthetic construct
  source 1..110: mol_type = other DNA
atctctttccccagatgcttgcaaaccatttccctgaccacagagcacagggtgctggacgcttctggctccttctcataatgaaattgttcacagtcataaatggagga

SEQ ID NO: 60086 - DNA, 110 bp, synthetic construct
  source 1..110: mol_type = other DNA
ctcccctccttggaaactggtctgcgcctctttgcgggggctggagggtaagcttccagcagcagtctgcctcctgcactcagctttgtcctaaggcgggatacggacgg

SEQ ID NO: 60087 - DNA, 110 bp, synthetic construct
  source 1..110: mol_type = other DNA
cttgcccttaagtcctgggagattcctggaagaagcctgggtctgagggctgcccaccaggagctcgcaggccagctgacatgacaagatcctcaacccaagaagagggg

SEQ ID NO: 60088 - DNA, 110 bp, synthetic construct
  source 1..110: mol_type = other DNA
agcaactgtttcattggtttcacctagactccagtctttaggtaattgttaaataagagagtcatttttttggctactttgtgacagataattatgccaaacacacagaa

SEQ ID NO: 60089 - DNA, 110 bp, synthetic construct
  source 1..110: mol_type = other DNA
tatcttagcaaaatacgcctcaaagatccgctgggctctgaaatgcagcttgtctctcacaggcctgcaccagccaaccaagtctggctccggctggtactaggaagctg

SEQ ID NO: 60090 - DNA, 110 bp, synthetic construct
  source 1..110: mol_type = other DNA
gattgagtgagagggcagacacattagccaggaataaaaagtcagtgtataacagtggtggaagtgttacccaactcagtttcagctgctcgtggctcaggaatccaata

SEQ ID NO: 60091 - DNA, 110 bp, synthetic construct
  source 1..110: mol_type = other DNA
tgtataacagtggtggaagtgttacccaactcagtttcagctgctcgtggctcaggaatccaatactgagacagaagtgttgggtaaaaggaaaaatagctttattgagg

SEQ ID NO: 60092 - DNA, 110 bp, synthetic construct
  source 1..110: mol_type = other DNA
atgcactccacccccacccccatcccttaaatgcacaaggactgtaaacacagagggacagcttccttcaaaacgctatattgtcctcaccgatgacaaaaatccaggcc

SEQ ID NO: 60093 - DNA, 110 bp, synthetic construct
  source 1..110: mol_type = other DNA
ggacagcttccttcaaaacgctatattgtcctcaccgatgacaaaaatccaggcctggatcacagcaggtcatggcctgttctaagcaccagcactattcaaactccact

SEQ ID NO: 60094 - DNA, 110 bp, synthetic construct
  source 1..110: mol_type = other DNA
caggtcatttgggagaaaattgaattacaatgaaaaagtatattagcctggcatttttctttcagagattatatcgtggaaacattttcctaatacctctagagggtgtc

SEQ ID NO: 60095 - DNA, 110 bp, synthetic construct
  source 1..110: mol_type = other DNA
tttctttcagagattatatcgtggaaacattttcctaatacctctagagggtgtcctggtgaaagatttggggagagaatttctgcccttgaaggtcccactccaaatcc

SEQ ID NO: 60096 - DNA, 110 bp, synthetic construct
  source 1..110: mol_type = other DNA
acttgagagattgggagagattacataaaagccacaatcttatacccaacattaaagcattattcagaggaaatgagctcaggagagagaattccgtttggaaaccactt

SEQ ID NO: 60097 - DNA, 110 bp, synthetic construct
  source 1..110: mol_type = other DNA
agcattattcagaggaaatgagctcaggagagagaattccgtttggaaaccacttctgccaacaagggctattatgatggtggacatccaggctcagctgagaatgagtg

SEQ ID NO: 60098 - DNA, 110 bp, synthetic construct
  source 1..110: mol_type = other DNA
ccaaagcctagcactaatactacaccgtactattcaagtgtcagacatttgtggaatgccaaatctccagaaggcctttccacaacaacagctccaaaaccagtcatcat

SEQ ID NO: 60099 - DNA, 110 bp, synthetic construct
  source 1..110: mol_type = other DNA
atgccaaatctccagaaggcctttccacaacaacagctccaaaaccagtcatcatctccccaccccctcctcctgccccaggcttgctcctgcatcagaagtggttgcca

SEQ ID NO: 60100 - DNA, 110 bp, synthetic construct
  source 1..110: mol_type = other DNA
agctttgtatccactgccatacaccatttcttcttcaatgagtgggccttttctggtgagctcagcttgcctcagggaagtgtaccacaagctttggagtcagacagatt

SEQ ID NO: 60101 - DNA, 110 bp, synthetic construct
  source 1..110: mol_type = other DNA
cctgggatggcaaagtgaactacaaatacagtttcactttaaatggtgttgtagctagtgattaaattccacaggattgttggcacattaatgaacctcagaaacattaa

SEQ ID NO: 60102 - DNA, 110 bp, synthetic construct
  source 1..110: mol_type = other DNA
acagggaagtgagactggatttgattacctgggcattgactgacagtaaaaactttgacttataaaaaccccaagttagaatatattcttcagcagcgtgtttaaatatt

SEQ ID NO: 60103 - DNA, 110 bp, synthetic construct
  source 1..110: mol_type = other DNA
tgacttataaaaaccccaagttagaatatattcttcagcagcgtgtttaaatatttgcaccatcagaataaatctaatcaagaacaaacctccatggaacggcttaaaac

SEQ ID NO: 60104 - DNA, 110 bp, synthetic construct
  source 1..110: mol_type = other DNA
atttgggaatttcacagaagttccccagaagacccaagactgagtgacttctccccccaattcccagccgtttgctgtagcttgtacctggtttgcttatgggatagata

SEQ ID NO: 60105 - DNA, 110 bp, synthetic construct
  source 1..110: mol_type = other DNA
ccctaaggagcacaggtcccaaagttgtggcttctgaccttgcacatgggttattggagtgtctggaatactaatgatcatcgctgagtttatggagcatgtgccatgtc

SEQ ID NO: 60106 - DNA, 110 bp, synthetic construct
  source 1..110: mol_type = other DNA
gtattaagagcaaatcatttaaaaactctcactggcattgcttgcttttcctcgtaagtttaccctgtcctgggccaagtttcctctgcctggtgagaggtgattctgac

SEQ ID NO: 60107 - DNA, 110 bp, synthetic construct
  source 1..110: mol_type = other DNA
aggagcacatttacagggagtccttggttctgggacttttaggggacactgcgatgaggaaagagcagggatattgtaatagaagggataagggggttcaatggcagtct

SEQ ID NO: 60108 - DNA, 110 bp, synthetic construct
  source 1..110: mol_type = other DNA
gaggaaagagcagggatattgtaatagaagggataagggggttcaatggcagtcttcatttccaacttctgagccctactgccttgagctaaaggctgaggcccagggag

SEQ ID NO: 60109 - DNA, 110 bp, synthetic construct
  source 1..110: mol_type = other DNA
gtgcagctggcccgacggcagtgcagcaaccccgccccggccaacggcggcaagtactgcgagggcgtgagggtgaagtaccgctcgtgcaacctggagtcctgccctag

SEQ ID NO: 60110 - DNA, 110 bp, synthetic construct
  source 1..110: mol_type = other DNA
gtgtttcccattccttgcagtggatttgatggctttatgatttatcacctgcttttccaagcaaagctttcaccctcattctcagctctcctttcttgaatgtgctaaga

SEQ ID NO: 60111 - DNA, 110 bp, synthetic construct
  source 1..110: mol_type = other DNA
ccagggaagggctttggggctgggtttctggggccagtggtgggaacaggtccctccctggaggctagaaggaggcagtgaactttgagaaatctccactgaagcattga

SEQ ID NO: 60112 - DNA, 110 bp, synthetic construct
  source 1..110: mol_type = other DNA
gcaccaggcttaaaatccctttcctcatttccaggcgatgtggcctggggctcaggcagggggtagagggaagggacatccccgaatagcagatcctgcagttcctggag

SEQ ID NO: 60113 - DNA, 110 bp, synthetic construct
  source 1..110: mol_type = other DNA
gcagggggtagagggaagggacatccccgaatagcagatcctgcagttcctggagggcttgacctgactttggtgggaaaagcctgcaggttcagtcctgactctaagct

SEQ ID NO: 60114 - DNA, 110 bp, synthetic construct
  source 1..110: mol_type = other DNA
gttggttcttctgtgcaccgtcacagcccagatccataacagctcctcatcacgaagactcttcatttatccctttacagagaaacaccactttcctcccaccacctcac

SEQ ID NO: 60115 - DNA, 110 bp, synthetic construct
  source 1..110: mol_type = other DNA
ccttctagctttctgtgccagtctttcttctagtccacatgaagcactggccagtcctgtggaccctcagctctcttgtcttggtggattttctccacatatgggaaatc

SEQ ID NO: 60116 - DNA, 110 bp, synthetic construct
  source 1..110: mol_type = other DNA
cacgcacacacgtatatattctctttttagtaatagaacactatgaattttattttgccgctggtccacagatcacattttgattagctaggtcccaaggctattccgtt

SEQ ID NO: 60117 - DNA, 110 bp, synthetic construct
  source 1..110: mol_type = other DNA
ctcatttcagtagctgggttcttcctaccctaataggagtattgttgcaagaggctcttcagctatgtatgcaaatacatcccggacaaatccgaacatcagtctgacat

SEQ ID NO: 60118 - DNA, 110 bp, synthetic construct
  source 1..110: mol_type = other DNA
tcttcagctatgtatgcaaatacatcccggacaaatccgaacatcagtctgacatacgtgcttcaacatggctcaacccctgtgaaaattattcaggtgaaggatggtgc

SEQ ID NO: 60119 - DNA, 110 bp, synthetic construct
  source 1..110: mol_type = other DNA
aggagttgctcctatgagtatcttgggctcggtcccacagtgcagaacatgcctctgagctgcggtccctgagggctaagcatgctcctgcagccagaggaagctcccag

SEQ ID NO: 60120 - DNA, 110 bp, synthetic construct
  source 1..110: mol_type = other DNA
tcacacttgaggaagacgatgacccaaagaagctaagctttaaatccacaaggtcattagatgtattattgttcggctaaaggctttccagtattaaactattgttaatc

SEQ ID NO: 60121 - DNA, 110 bp, synthetic construct
  source 1..110: mol_type = other DNA
attagatgtattattgttcggctaaaggctttccagtattaaactattgttaatctggaacttgaagaggatttcttgcctcctgtggaacagagagtgtgctcaggaat

SEQ ID NO: 60122 - DNA, 110 bp, synthetic construct
  source 1..110: mol_type = other DNA
ccctgtggtttcctgtctccacattcctggtgttgtgctcctctcccctgctcaggccagttctggagaacaaatcaggaaactaaatgacatggtgaaagtacaaaaga

SEQ ID NO: 60123 - DNA, 110 bp, synthetic construct
  source 1..110: mol_type = other DNA
gccagttctggagaacaaatcaggaaactaaatgacatggtgaaagtacaaaagataaagagggtttttcccattttaaaaggggggaaactggggttatatcgttagac

SEQ ID NO: 60124 - DNA, 110 bp, synthetic construct; identical to SEQ ID NO: 60122
  source 1..110: mol_type = other DNA

SEQ ID NO: 60125 - DNA, 110 bp, synthetic construct; identical to SEQ ID NO: 60123
  source 1..110: mol_type = other DNA

SEQ ID NO: 60126 - DNA, 110 bp, synthetic construct
  source 1..110: mol_type = other DNA
ggcttctctgaccgtgacaagtcaccgtgtgtgggtgactcccaagtcttttcttccaactatatcttgctgtcatcgcctggaagtcactcatgccctggtgtcccacg

SEQ ID NO: 60127 - DNA, 110 bp, synthetic construct
  source 1..110: mol_type = other DNA
gatctattgctaccttttccatccattatctataataacgctgtgtaagaaaaccaaccacatacacacaaagcccagtgatataaagcagggaacactcattatctcac

SEQ ID NO: 60128 - DNA, 110 bp, synthetic construct
  source 1..110: mol_type = other DNA
aaccacatacacacaaagcccagtgatataaagcagggaacactcattatctcactgttagctcggctgggagtggctggtccaggagggcctcagacctgacagcctgg

SEQ ID NO: 60129 - DNA, 110 bp, synthetic construct
  source 1..110: mol_type = other DNA
cacactggtaaacacacacacgcatacacaacttaaacaagcgtttcatgaaacactatttaccctaactatgtgggatgcattttgatagcttttgtcctagtttattt

SEQ ID NO: 60130 - DNA, 110 bp, synthetic construct
  source 1..110: mol_type = other DNA
ctatttaccctaactatgtgggatgcattttgatagcttttgtcctagtttatttttaaaatgttcattgaaacccacttaatttcaaggccaagttataaatggttcat

SEQ ID NO: 60131 - DNA, 110 bp, synthetic construct
  source 1..110: mol_type = other DNA
tttaagagcacagttctacaattctgaaagctgtattcccaagaggatgccacccccaaatgaagaagtagagcatttctgccacctactcctcactcatgccttctcca

SEQ ID NO: 60132 - DNA, 110 bp, synthetic construct
  source 1..110: mol_type = other DNA
gtaaggctacaaacatgtggggctaagtggaactccatgctgagcctgatggtatttacgcagctccttcctttctgctctactggcttgttacatgtttactttatgtc

SEQ ID NO: 60133 - DNA, 110 bp, synthetic construct
  source 1..110: mol_type = other DNA
agagaacttacattaaggtacattagagctgcttttctgggctgtgttttttatttagaagggaagcggcatgctcattatttcatttgatgggttcagtttggcaaatg

SEQ ID NO: 60134 - DNA, 110 bp, synthetic construct
  source 1..110: mol_type = other DNA
gatgatgtctcgctggtcaggaactggcaaggtattaaaggacctgtgcaccacgccattccttctcccagctccacgggaatctggaagtggtttcctaagtcagctgc

SEQ ID NO: 60135 - DNA, 110 bp, synthetic construct
  source 1..110: mol_type = other DNA
ggaggcagcttacagaggggcaggagctacagacccccacccccaccccaataccagccatccacctggtgccctctggggaagaggtttctaaagatcagcttgagaag

SEQ ID NO: 60136 - DNA, 110 bp, synthetic construct
  source 1..110: mol_type = other DNA
cctcaggcagatttattttacttctactcagaagacacattttaaaattaagtcgatcatgttttatcagctctgttacgtgatttgtagacaagtgtgggtttttgctc

SEQ ID NO: 60137 - DNA, 110 bp, synthetic construct
  source 1..110: mol_type = other DNA
ctggttggatggttgcctgggaagcattggtgatgccggctttggacagtctgcatgcgtggtctccgcaatgggtcatcctttgcatctggcatcatcccttcgtggga

SEQ ID NO: 60138 - DNA, 110 bp, synthetic construct
  source 1..110: mol_type = other DNA
tgcgtggtctccgcaatgggtcatcctttgcatctggcatcatcccttcgtgggaggttttcaaggtctgtgcacggatcagtgccccattcctcgtgttttcccactgt

SEQ ID NO: 60139 - DNA, 110 bp, synthetic construct
  source 1..110: mol_type = other DNA
tggacagagtcaggatttgccaaggggtgagctctccacctgtgacctacaaaaccttcttactgggtgcagttctccgaggcaattttcaccctctgcttctgagtttg

SEQ ID NO: 60140 - DNA, 110 bp, synthetic construct
  source 1..110: mol_type = other DNA
agaagggctgagaacctcaagtttccttagaactcattttgcagtaggagctgcgctatgagttggcaggtgcagagtcaagatcgagcagagtcaagatagatagagca

SEQ ID NO: 60141 - DNA, 110 bp, synthetic construct
  source 1..110: mol_type = other DNA
acagttaccaaattatatatatataattttatgggcacactcatggcatatggaagttcccgggccagaaactgaatccaagcttcatctgcagcctacatcgcagctga

SEQ ID NO: 60142 - DNA, 110 bp, synthetic construct
  source 1..110: mol_type = other DNA
gttcccgggccagaaactgaatccaagcttcatctgcagcctacatcgcagctgaggcaacaccagatcctttaatccaccaaaccgggccgggaatcaaacccggactt

SEQ ID NO: 60143 - DNA, 110 bp, synthetic construct
  source 1..110: mol_type = other DNA
tttagagaatgagaaaataattccaagttcatggttccaagtacagtattcctggggctgcaaaaccagcggtagagaggctaagcttgcctggccttctggaatttgag

SEQ ID NO: 60144 - DNA, 110 bp, synthetic construct
  source 1..110: mol_type = other DNA
ggctgcaaaaccagcggtagagaggctaagcttgcctggccttctggaatttgagagcgaaccggaagaccatgttcaactgatacaaccccgcagatctaactcatatg

SEQ ID NO: 60145 - DNA, 110 bp, synthetic construct
  source 1..110: mol_type = other DNA
gggaacaggattttatataatcaaatgttgaagtgacaaagttttccagcctgaagtgggagggaagataggatgaggtggtccagggatgaaggaggagcctaggccat

SEQ ID NO: 60146 - DNA, 110 bp, synthetic construct
  source 1..110: mol_type = other DNA
aaattttaccttaaggccatagagcgtaatgattaaacgcagggtctggagctagacctctctctgggttcaaatcctggttctgccgcttggcaggtgtgtgacctttg

SEQ ID NO: 60147 - DNA, 110 bp, synthetic construct
  source 1..110: mol_type = other DNA
atggtaggtgttctctgggggaggcaaagggctttctttgacttttttgtagggaaagccctttttggtggcttttcttctggcttcaagctccatgtgcaactggcctg

SEQ ID NO: 60148 - DNA, 110 bp, synthetic construct
  source 1..110: mol_type = other DNA
aagccctttttggtggcttttcttctggcttcaagctccatgtgcaactggcctgaaagcgaattcctcctttggaatgtgatgggatggcttttgcctatgatactctc

SEQ ID NO: 60149 - DNA, 110 bp, synthetic construct
  source 1..110: mol_type = other DNA
ggtggttccatgagcggctctatgatttattttcaccgtacatggccccaaaaggagtgtctcatcttccagtctgtagtttcctaagtggcagatcaaacaactagaat

SEQ ID NO: 60150 - DNA, 110 bp, synthetic construct
  source 1..110: mol_type = other DNA
gttagtgtgtcttccattgctggatgaccttggagtccattgaaaggagatgctggagctgggcagacagagatttgagcatgcatcatctctctaaattgtgtaacaag

SEQ ID NO: 60151 - DNA, 110 bp, synthetic construct
  source 1..110: mol_type = other DNA
gagctgggcagacagagatttgagcatgcatcatctctctaaattgtgtaacaagttatccgagcctcattgtcatatctgtaaaatggagggatcatactgtatgtact

SEQ ID NO: 60152 - DNA, 110 bp, synthetic construct
  source 1..110: mol_type = other DNA
ttacctcctactggggtcccccatgtcccttctgttcatgttcacagcttagcgtctgtggagtaagtggctgacttgagtgcttcgcaggctatgcctgcccagccctg

SEQ ID NO: 60153 - DNA, 110 bp, synthetic construct
  source 1..110: mol_type = other DNA
gaaaagctgatgagaagtgatcaagccgagtgaaccctggttttatagatagtactggctacactcatggaagcaagtttattcccacccgctccatgccctgatgctga

SEQ ID NO: 60154 - DNA, 110 bp, synthetic construct
  source 1..110: mol_type = other DNA
cctgcatgtacattgtgcattggctgtaggaatgtcagtgcaagttcaatgaattgagcttctgaagggttgcagatgcctcagacatcaaagtcaactgatgaaaaata

SEQ ID NO: 60155 - DNA, 110 bp, synthetic construct
  source 1..110: mol_type = other DNA
aacacttcacgcgatttggattggtccatggccaatttgagacacaatcccctcgtcgggcctcctctcatttctatcctgcatggccagaagaaacaatgcacaacaca

SEQ ID NO: 60156 - DNA, 110 bp, synthetic construct
  source 1..110: mol_type = other DNA
tcgggcctcctctcatttctatcctgcatggccagaagaaacaatgcacaacacaaaggagctggacaacagagcagtggtataactgcttgagcggttttccctacagg

SEQ ID NO: 60157 - DNA, 110 bp, synthetic construct
  source 1..110: mol_type = other DNA
ctccctcgtgccatttcccagctgtctctctgaggctgattttcatttgatcttaccagcaacttcttttctgttgctgcctctgttttgtgttgattctgcctctcacg

SEQ ID NO: 60158 - DNA, 110 bp, synthetic construct
  source 1..110: mol_type = other DNA
caactctttggccttaccagatttcaaagtagacacagtctgtctagggtttctcaagtataggaagagagttcagatagctcgaaagaatggcaaatgccctctgtgtg

SEQ ID NO: 60159 - DNA, 110 bp, synthetic construct
  source 1..110: mol_type = other DNA
aagtataggaagagagttcagatagctcgaaagaatggcaaatgccctctgtgtgtcccatgaggtgagtctacccaaccagtatttctcatctcaacaaacgagaccaa

SEQ ID NO: 60160 - DNA, 110 bp, synthetic construct; identical to SEQ ID NO: 60158
  source 1..110: mol_type = other DNA

SEQ ID NO: 60161 - DNA, 110 bp, synthetic construct; identical to SEQ ID NO: 60159
  source 1..110: mol_type = other DNA

SEQ ID NO: 60162 - DNA, 110 bp, synthetic construct
  source 1..110: mol_type = other DNA
ttgagcagggcatcaaaacttccttctcctctctcagtccgtcccgggcctgggctcccaagtaaattaactgaaccatttcaacaggcttgaattctgtcagcagctca

SEQ ID NO: 60163 - DNA, 110 bp, synthetic construct
  source 1..110: mol_type = other DNA
ccccaaggaaggaggaatgaggatgaaggtgagccagaggaagggaagcaaggcaggaggtgttccagccagagctggttgccgtacctgttgaccagcatgctacctgg

SEQ ID NO: 60164 - DNA, 110 bp, synthetic construct
  source 1..110: mol_type = other DNA
ggaggtgttccagccagagctggttgccgtacctgttgaccagcatgctacctggtgacctaggcttgggatcgatgcagtacagtcaagtgagacacctgcaccaggtg

SEQ ID NO: 60165 - DNA, 110 bp, synthetic construct
  source 1..110: mol_type = other DNA
ctgggcggggatggtgatttaccagtttacataaagcaagtcagtaaacctcaggtaggctggtaaagctcccttgatctaaaggctgttgacgtccacatcccgcagga

SEQ ID NO: 60166 - DNA, 110 bp, synthetic construct
  source 1..110: mol_type = other DNA
gcaggagactgttctgaggttcttcctgctgccatcctcacccctctgctggccactgtgcgaggaagggtctcaagccagctctctactttcacctctcactgtttttt

SEQ ID NO: 60167 - DNA, 110 bp, synthetic construct
  source 1..110: mol_type = other DNA
actagtgaagaaccagaaattttggccctggtggagcaactgggttaatattctcgccttatgtaactaggaaaccaactgaacacaggagcccagatttcactccctga

SEQ ID NO: 60168 - DNA, 110 bp, synthetic construct
  source 1..110: mol_type = other DNA
aaaccaacaggccaccagtcaatcaactatcccacatgcatttaaaaaaatacctcttacactctgaatgttaaagccaagaaggagattttattccaaaccaccaggga

SEQ ID NO: 60169 - DNA, 110 bp, synthetic construct
  source 1..110: mol_type = other DNA
cttacactctgaatgttaaagccaagaaggagattttattccaaaccaccagggagttctttccaggtatccttaggctctcagatcatttctctcactgcaagctagag

SEQ ID NO: 60170 - DNA, 110 bp, synthetic construct
  source 1..110: mol_type = other DNA
gatttgcaggtatgatgaagtcagccagtcggctcctagtatagttctctcctcacatctttaaatgctctctcaattccaatccctctggagagtctggaaataaggac

SEQ ID NO: 60171 - DNA, 110 bp, synthetic construct
  source 1..110: mol_type = other DNA
catctttaaatgctctctcaattccaatccctctggagagtctggaaataaggaccactttcacgttttctcacgttgggaaagggggagtggtccatgactgagtatcg

SEQ ID NO: 60172 - DNA, 110 bp, synthetic construct
  source 1..110: mol_type = other DNA
ctgctggtgcctaattttggcctgcaacatcataatcactcaacagatgcccagggagatgggaaagaacaaacaaatgactaacccacttaaatgccataaacaaagac

SEQ ID NO: 60173 - DNA, 110 bp, synthetic construct
  source 1..110: mol_type = other DNA
gaccaaaggctataaaatccaagacagttgtcctcaaccttgaccccgacctagactcgcttaggcatttttaaccaaagctggctaaaaaaagtcccatgtccagatgt

SEQ ID NO: 60174 - DNA, 110 bp, synthetic construct
  source 1..110: mol_type = other DNA
aggagctccctttctgcatgcaggggacccgttcatggagtggttcctgagatgctttgcaaggtactctaacacgaaatcctagatgagcatctggacaagcgggcaca

SEQ ID NO: 60175 - DNA, 110 bp, synthetic construct
  source 1..110: mol_type = other DNA
tttgcaaggtactctaacacgaaatcctagatgagcatctggacaagcgggcacagcacggatgggagttcacattcctggttgcggcacttagagatgaccgtttattg

SEQ ID NO: 60176 - DNA, 110 bp, synthetic construct; identical to SEQ ID NO: 60174
  source 1..110: mol_type = other DNA

SEQ ID NO: 60177 - DNA, 110 bp, synthetic construct; identical to SEQ ID NO: 60175
  source 1..110: mol_type = other DNA

SEQ ID NO: 60178 - DNA, 110 bp, synthetic construct
  source 1..110: mol_type = other DNA
aactctgttcctctgcatgtactcttagcctaagggaacttggccaatccagtctccttgctaaaaacccaaatggacttcttcagctaagaactctctttctgctcctg

SEQ ID NO: 60179 - DNA, 110 bp, synthetic construct
  source 1..110: mol_type = other DNA
ccttgctaaaaacccaaatggacttcttcagctaagaactctctttctgctcctggcctgtatatccaacaaattccttcacatttgcacttaaggacttcaaaggtatc

SEQ ID NO: 60180 - DNA, 110 bp, synthetic construct
  source 1..110: mol_type = other DNA
cctcttttggccaagcctaaaataaagccctggcaagatccaaagtgggtacagagtttggaggctgaatcttgggaaattatattaatgtgatcagtcagtgaatcaat

SEQ ID NO: 60181 - DNA, 110 bp, synthetic construct
  source 1..110: mol_type = other DNA
gtttggaggctgaatcttgggaaattatattaatgtgatcagtcagtgaatcaattacctgctaaagcaagaattcatagtcttcagagtaagattatagaacctagaaa

SEQ ID NO: 60182 - DNA, 110 bp, synthetic construct
  source 1..110: mol_type = other DNA
ttcatgtctaccccttagagttttcctcctctaagcttgtctcatacatagaagggattcctcctgccgaacccattcagggggctcaggcatccacctgaacacatcgc

SEQ ID NO: 60183 - DNA, 110 bp, synthetic construct
  source 1..110: mol_type = other DNA
caaacctacccctttactgcccctgctcatttctccttttggtttaattaatcaaaagctctgagacatgctcaccatacatgtcatggtccacttgttctctgcctcat

SEQ ID NO: 60184 - DNA, 110 bp, synthetic construct
  source 1..110: mol_type = other DNA
aatgaggattccaggacagggttctcggcatgactgccttagcatcaccagggaccttgtaagaaacttggatctcagctcactccctgctgaatcagaaactctgggaa

SEQ ID NO: 60185 - DNA, 110 bp, synthetic construct
  source 1..110: mol_type = other DNA
cttgtaagaaacttggatctcagctcactccctgctgaatcagaaactctgggaatctgttttaacaaaccctctggatgatcctgataccggctaaagtttgagaacca

SEQ ID NO: 60186 - DNA, 110 bp, synthetic construct
  source 1..110: mol_type = other DNA
gggcaataaaacgtaacaaaataaaactgtaacgcacactctgagccatgaggctctcgattgtgtgtggtggtaggaaatgcagtccagcgagctaggaagagaggaag

SEQ ID NO: 60187 - DNA, 110 bp, synthetic construct
  source 1..110: mol_type = other DNA
ctcgattgtgtgtggtggtaggaaatgcagtccagcgagctaggaagagaggaagcagaatccattcttgactctccctcctccaggcatcaggaagtcttgggaaagag

SEQ ID NO: 60188 - DNA, 110 bp, synthetic construct
  source 1..110: mol_type = other DNA
ggactttggtcagatgtcacctccccagagagggctggcctgcccacaccacccaaaggagcctctttcccaccccactcactctcatcctggtgtcctgccttatgttt

SEQ ID NO: 60189 - DNA, 110 bp, synthetic construct
  source 1..110: mol_type = other DNA
agggtccagctgggaaaagagaaacacaccaccgtttcctaaggaggacacaccagccccagctctgctaaactccacttctgacaaagagtaggatctgtgtctcggtg

SEQ ID NO: 60190 - DNA, 110 bp, synthetic construct
  source 1..110: mol_type = other DNA
gccccagctctgctaaactccacttctgacaaagagtaggatctgtgtctcggtgtccttagtccatattaacaataaataaagcttcaataaatatgcaaagcaaaaac

SEQ ID NO: 60191 - DNA, 110 bp, synthetic construct
  source 1..110: mol_type = other DNA
ttataaacttcttcagggttaggccttaattggattgattagtgaattcacatccttgtttggagatagtgactgatccctaccagctgaaaagcaaccctctccatcct

SEQ ID NO: 60192 - DNA, 110 bp, synthetic construct
  source 1..110: mol_type = other DNA
ggagtgagcatgatgattttcatggggtcccaagtttgggggtcaacagaggccaacagtgagtgacaaaaaaaagaaaaacaacaactgtgtcctgaatacaaaggaag

SEQ ID NO: 60193 - DNA, 110 bp, synthetic construct
  source 1..110: mol_type = other DNA
acagtgagtgacaaaaaaaagaaaaacaacaactgtgtcctgaatacaaaggaagctgaaagtcaaaactgaggtcaagctgacacagctttaaataataaagtaaggaa

SEQ ID NO: 60194 - DNA, 110 bp, synthetic construct; identical to SEQ ID NO: 60192
  source 1..110: mol_type = other DNA

SEQ ID NO: 60195 - DNA, 110 bp, synthetic construct; identical to SEQ ID NO: 60193
  source 1..110: mol_type = other DNA

SEQ ID NO: 60196 - DNA, 110 bp, synthetic construct
  source 1..110: mol_type = other DNA
agggaccaaacctgcatgctcatggatactaatcaggttcattaccactgagctacaacaggaactccttgttgaatgtttattaactgctacctgactggtattgtcct

SEQ ID NO: 60197 - DNA, 110 bp, synthetic construct
  source 1..110: mol_type = other DNA
caacaggaactccttgttgaatgtttattaactgctacctgactggtattgtcctatgtgttggggatatagatattatcaaagcaaaggtcctgccttgatggatcttt

SEQ ID NO: 60198 - DNA, 110 bp, synthetic construct
  source 1..110: mol_type = other DNA
caggcttcctggtatgaggggttgtgtctgccactggtggatagagctgtgtcgtggtctcctggtgggcagggccatataaaaaggcaggtctagaggtggttgtgggc

SEQ ID NO: 60199 - DNA, 110 bp, synthetic construct
  source 1..110: mol_type = other DNA
tgggcaagtttggggggcagccagagagataaccctagagaaggaggaaccctcagatgcctgaggcctccctctgacctccagatttgatagcatcttgctcaagagct

SEQ ID NO: 60200 - DNA, 110 bp, synthetic construct
  source 1..110: mol_type = other DNA
gatgcctgaggcctccctctgacctccagatttgatagcatcttgctcaagagctattatccaacacgctttgtcctccaccatcaggccacctccttacagatggactt

SEQ ID NO: 60201 - DNA, 110 bp, synthetic construct
  source 1..110: mol_type = other DNA
tggtcacatcactgagttgccacagctccaccctcctctatctcatgccactggccttcactgcctccatctctgaatttcattggcacagcatctcagagcatttataa

SEQ ID NO: 60202 - DNA, 110 bp, synthetic construct
  source 1..110: mol_type = other DNA
tctttctgtgacatcagcctggggcctgacatcaccatcccacctacagcaccaccacagatggcaccaggaagtcctcacacaagctcgctcgacctggaaggcacgca

SEQ ID NO: 60203 - DNA, 110 bp, synthetic construct
  source 1..110: mol_type = other DNA
gctttcttgccaaatcactatgcatttttaaatgttttgtttttaatatacgttcctaatgctttaaagcattctatactggaagtcttcctgtgtatgctgagtctgcc

SEQ ID NO: 60204 - DNA, 110 bp, synthetic construct
  source 1..110: mol_type = other DNA
ctaatgctttaaagcattctatactggaagtcttcctgtgtatgctgagtctgccttaccccgaaagaaagaaaggaaagaaagaaagaaagaaagaaaggagaaaggaa

SEQ ID NO: 60205 - DNA, 110 bp, synthetic construct
  source 1..110: mol_type = other DNA
cgatttgtaactactgtctcctaaactggggcttgtctacattttcttaatgggatgtgtggaagcttttaattttgtaattttcaagttttaaattttgacaaagtcca

SEQ ID NO: 60206 - DNA, 110 bp, synthetic construct
  source 1..110: mol_type = other DNA
aggtttgtagccactgcaaactatccaagtgaagctggtgtgaggactatctttccgaacctatgtgccctacaatgaccagcagaaggagggagagatgctctgagaat

SEQ ID NO: 60207 - DNA, 110 bp, synthetic construct
  source 1..110: mol_type = other DNA
aaattctttgagactcacacccaaagttcatccctatcctggaggcagacgtgctgctggataggggtgagaacaaatatcttagccttgaccaagggcggcccacctgc

SEQ ID NO: 60208 - DNA, 110 bp, synthetic construct
  source 1..110: mol_type = other DNA
gctggataggggtgagaacaaatatcttagccttgaccaagggcggcccacctgccacctgggtagaagagttatttccaataattgaaaaatcttccaggagatcagaa

SEQ ID NO: 60209 - DNA, 110 bp, synthetic construct
  source 1..110: mol_type = other DNA
ggtataaatttggtggccctgttggcctctctctctgcatacagggcatgactgatgctaacatcagggaggaaatagccaccctctccccttcgcctccctcgacggct

SEQ ID NO: 60210 - DNA, 110 bp, synthetic construct
  source 1..110: mol_type = other DNA
tgccatcaccactgagtcaatctgctaccacagcccctgcctctccctgcaagtgagtgagcaaggctgcctccctaggagctgaaggcccacttgtccagctcctcctg

SEQ ID NO: 60211 - DNA, 110 bp, synthetic construct
  source 1..110: mol_type = other DNA
gttcaagtcaatcagctgccaggtgggaagagagccaggtctccagctgctaggtctgaggccccacaacaactcaggtacttgtgttccttcccttggaagtgaaattc

SEQ ID NO: 60212 - DNA, 110 bp, synthetic construct
  source 1..110: mol_type = other DNA
cagaactgaggcttagaacatgtgagatttgcccacacacagctggagggaccgaaatttgacccagatcagttgtgtcaggatgcctgccctgtcctctatagtttgaa

SEQ ID NO: 60213 - DNA, 110 bp, synthetic construct
  source 1..110: mol_type = other DNA
gaggcccaggttacctggacaaggaggctctagggctgcagctcctagagcgatcttgaggggtgtctcatgttagaaagtagaaagaggatgagtgctcctggtactat

SEQ ID NO: 60214 - DNA, 110 bp, synthetic construct
  source 1..110: mol_type = other DNA
tttgcaaacttgctgtaggttcggattttccacgtctcattttcccaaacttcaactcatttctgtccgtccctagctccgtaagatcttccttattcctaattgtccta

SEQ ID NO: 60215 - DNA, 110 bp, synthetic construct
  source 1..110: mol_type = other DNA
ctcatttctgtccgtccctagctccgtaagatcttccttattcctaattgtcctattgctttgtttcttttggcaagaactgacttgccaacgatgctcagcgtccaggc

SEQ ID NO: 60216 - DNA, 110 bp, synthetic construct
  source 1..110: mol_type = other DNA
tgtgttcttccaagagagagtctggctgggacgcctggggagcttcaggggagaacctgagccctcccccgctgtgagtttactgcttttgcaatgtgattgctgcaact

SEQ ID NO: 60217 - DNA, 110 bp, synthetic construct
  source 1..110: mol_type = other DNA
ctgcccggtgcctcagcctctgagaccaagtcctggtttaactaggtgtccgacaccctcctctggacgtggaccagagctacgccgcctcttggtggacacccagggcc

SEQ ID NO: 60218 - DNA, 110 bp, synthetic construct
  source 1..110: mol_type = other DNA
taagatcttctctctggaagtgaagctagggttcagaggggagaagatgcctgagaaacttcccacctatctaccagccccacttactgaactgactttcggtgggaagg

SEQ ID NO: 60219 - DNA, 110 bp, synthetic construct
  source 1..110: mol_type = other DNA
gggagtctcttgagtttcctatctgtcacactagctctgtgtgatccctaaagtttcctgatgtctcccagtaaaatccctctgaaggggcacagactaaacataaggct

SEQ ID NO: 60220 - DNA, 110 bp, synthetic construct
  source 1..110: mol_type = other DNA
gtgacaccccacctcctaactggagactctggatcccctgtcactgtattcacatgcacacacaaacacatagctgtacttagaggcatgcaaacacacacacacacaca

SEQ ID NO: 60221 - DNA, 110 bp, synthetic construct
  source 1..110: mol_type = other DNA
cttccccttacctctgtggtacagcccctcagagctacagagagaccatctcctgggctatagtcctcagtaaggtccccgaacaaaatgtaacttttattttatttatt

SEQ ID NO: 60222 - DNA, 110 bp, synthetic construct
  source 1..110: mol_type = other DNA
taagaagctgatctctggacacggtcatttgtgaaccacaggttcaggggctcctccgcttaattagagtaattgcatggaagaagtgtctatggttattttcatagagg

SEQ ID NO: 60223 - DNA, 110 bp, synthetic construct
  source 1..110: mol_type = other DNA
tctgctatcctcctcaagtttttgagctgtgttggaattcttcctgcatctactgtatgcttcccaaggacctgttctgtgttccaacaacatcagtgaatgtgttgtga

SEQ ID NO: 60224 - DNA, 110 bp, synthetic construct
  source 1..110: mol_type = other DNA
gaatcggggacgagggccagggatttctcattgccctgagaggactgaacggagggaggatcaatgtcggtgaggacccaaggctgggggcagggggcaggggtgcaacc

SEQ ID NO: 60225 - DNA, 110 bp, synthetic construct
  source 1..110: mol_type = other DNA
gaggatcaatgtcggtgaggacccaaggctgggggcagggggcaggggtgcaaccctgtccctggctcacaggagatgtcggtaccctccttcctagcgtcctgctccct

SEQ ID NO: 60226 - DNA, 110 bp, synthetic construct
  source 1..110: mol_type = other DNA
tgatgggaactcctctttatctcttctcaatgattaacaaccaattggccaaagtcttttcagggaggaacctagagtctgacagtcagatttcctgattatcaggaggg

SEQ ID NO: 60227 - DNA, 110 bp, synthetic construct; identical to SEQ ID NO: 60226
  source 1..110: mol_type = other DNA

SEQ ID NO: 60228 - DNA, 110 bp, synthetic construct
  source 1..110: mol_type = other DNA
tcctaaatgtttcagtttgtgtggcttcacagacttggaatcatctgtttctctaaggagttctgaggggccatgtttttgtactaagaaactagaacatttctagtttt

SEQ ID NO: 60229 - DNA, 110 bp, synthetic construct
  source 1..110: mol_type = other DNA
aggagttctgaggggccatgtttttgtactaagaaactagaacatttctagttttgtggaagctattttaaagctttaggctggggatctgctgcccagctttgcatttc

SEQ ID NO: 60230 - DNA, 110 bp, synthetic construct
  source 1..110: mol_type = other DNA
tgcttccatgtttagtcagatggcctcactctgctggccatcatagggaccctcgtctgcttctgagtccccccagatacccctggtcctggcacccagtggctttctgc

SEQ ID NO: 60231 - DNA, 110 bp, synthetic construct
  source 1..110: mol_type = other DNA
aaacttgcatcctcgtggatactagttgggtttgtttagagctgagccaccacggggattccgaaataagcagtcttatcataatatctgcagggaaaatggtcagaatg

SEQ ID NO: 60232 - DNA, 110 bp, synthetic construct
  source 1..110: mol_type = other DNA
ctctgctcagtgatttacctgcttcaggtggagcagtcagtgcctgctcatccagaagcctctgtacacatattcaacccactgctcatgagtctccaacatgcccctaa

SEQ ID NO: 60233 - DNA, 110 bp, synthetic construct
  source 1..110: mol_type = other DNA
aagcctctgtacacatattcaacccactgctcatgagtctccaacatgcccctaagagagagggatgtccaagcatccacaggtcaggtatagaaaccggcacagcaagc

SEQ ID NO: 60234 - DNA, 110 bp, synthetic construct
  source 1..110: mol_type = other DNA
atatatttaaaatatgaggcatttaaattgctctcaagacacctaaatccagaccaagggaggaactggttcaggagcaggcggtgcccccaggacacaggctggaggat

SEQ ID NO: 60235 - DNA, 110 bp, synthetic construct
  source 1..110: mol_type = other DNA
aagggaggaactggttcaggagcaggcggtgcccccaggacacaggctggaggattggggccagtctgggccgagggctccctgaccaagcccaaaagccatcaggggct

SEQ ID NO: 60236 - DNA, 110 bp, synthetic construct
  source 1..110: mol_type = other DNA
tgtagttccaggtgaatccaggtctctaagctctggccccttcttctcaatgcagtggggctagcaaccttggttgggttttattccctctcactgagttttgaagctct

SEQ ID NO: 60237 - DNA, 110 bp, synthetic construct
  source 1..110: mol_type = other DNA
tggggctagcaaccttggttgggttttattccctctcactgagttttgaagctcttccaaggtagaattgtagcgtaatcacagagctaatcacattgcttctacaccct

SEQ ID NO: 60238 - DNA, 110 bp, synthetic construct
  source 1..110: mol_type = other DNA
cagagggaggtctgaacccccaagctgctcaccttgagatggccagtagcagtcccatcaatgaaccctagtggcctcagccatcctactgtactctgtgtgtgcatatg

SEQ ID NO: 60239 - DNA, 110 bp, synthetic construct
  source 1..110: mol_type = other DNA
catcaatgaaccctagtggcctcagccatcctactgtactctgtgtgtgcatatgtgaaggacgcaaggtaacacacagcatgccaggcacacacacacacatacacaca

SEQ ID NO: 60240 - DNA, 110 bp, synthetic construct
  source 1..110: mol_type = other DNA
agtggacagacacacacaaacacagacagtgagtgagtcagcagagtctccgggctctgagcagcatcggcacagggtgccattgttgttattattatcactgactttat

SEQ ID NO: 60241 - DNA, 110 bp, synthetic construct
  source 1..110: mol_type = other DNA
catgtccaaagctggattgatgacgctccccaacaatatccctctgcacctcagttgttcccccccaaccatgcggaatgagccatggcagttactgcttacttcccctt

SEQ ID NO: 60242 - DNA, 110 bp, synthetic construct
  source 1..110: mol_type = other DNA
gttcttaacccactaagccacaatggaaaattttcattttcagtttatttttgcatgtgatgtgaggaaatgttacaatttcattgtcttacatgcagtggtctggtatt

SEQ ID NO: 60243 - DNA, 110 bp, synthetic construct
  source 1..110: mol_type = other DNA
attatgtgaataaacttacttgcatgaagctaatcattactatggcttagatgctgctagaacagtcccagacaaattagtcttggtttatttggacttcagtgatatgt

SEQ ID NO: 60244 - DNA, 110 bp, synthetic construct
  source 1..110: mol_type = other DNA
gctagaacagtcccagacaaattagtcttggtttatttggacttcagtgatatgtgcttgatctcagttctctaaatgctattgaccaaattatgttccatctcccagat

SEQ ID NO: 60245 - DNA, 110 bp, synthetic construct
  source 1..110: mol_type = other DNA
atgatgccctcctagaactgaacatatttgagaatgtctgaaatatatggtgcaaacagtgtcaaattgactaccaaggcaggcacaggcaaagtcaagattgagaaggc

SEQ ID NO: 60246 - DNA, 110 bp, synthetic construct
  source 1..110: mol_type = other DNA
caaagtttgtttttagtctatataaatgcaagagaatgctgttaattttgtatcctgtgactttaccaatttattgatgaactctaagtttccaggtggagtctaggatt

SEQ ID NO: 60247 - DNA, 110 bp, synthetic construct; identical to SEQ ID NO: 60246
  source 1..110: mol_type = other DNA

SEQ ID NO: 60248 - DNA, 110 bp, synthetic construct
  source 1..110: mol_type = other DNA
caaaccctcatcctcatggatactagttaggtttgtttccactgagctgcagtgggaactcctaagcttttttaaaatcatgtgttactcgggtgttttcaattcttctc

SEQ ID NO: 60249 - DNA, 110 bp, synthetic construct; identical to SEQ ID NO: 60248
  source 1..110: mol_type = other DNA

SEQ ID NO: 60250 - DNA, 110 bp, synthetic construct
  source 1..110: mol_type = other DNA
gtttctgtaagctcctcttggctgggactggttttcagattttctttgattttgatggccttgacaattttgaggtatcctactcaggtgttctctaggatgttcttgta

SEQ ID NO: 60251 - DNA, 110 bp, synthetic construct
  source 1..110: mol_type = other DNA
tggccttgacaattttgaggtatcctactcaggtgttctctaggatgttcttgtattaggatttgtctgatggtttttctcatgactaatctgtcacagtttgtgaaagg

SEQ ID NO: 60252 - DNA, 110 bp, synthetic construct
  source 1..110: mol_type = other DNA
agtgtttttcattctgagcgatgggctctgggcgacagaccacagcggctcattaaaagagcccaagtcaaagcagttacactgaggtgtcagttccagagataattccc

SEQ ID NO: 60253 - DNA, 110 bp, synthetic construct
  source 1..110: mol_type = other DNA
aaagagcccaagtcaaagcagttacactgaggtgtcagttccagagataattcccttcaactcacaactgctctggagctgagctgattgttccattctggagagactgc

SEQ ID NO: 60254 - DNA, 110 bp, synthetic construct
  source 1..110: mol_type = other DNA
aataactgacagtaaaaagcagcaggaaagaggagttaagaacaactgttgtgactctgatagatccatactgatacacattttatgggtaataaattgaaatagaaagt

SEQ ID NO: 60255 - DNA, 110 bp, synthetic construct
  source 1..110: mol_type = other DNA
gtgggcacaaggctgagggcctgaaggccatgggggatcttccctgtctagcatatggacttgaaaatgaggcaagagaaagagagggtctgataggacgtgatttcact

SEQ ID NO: 60256 - DNA, 110 bp, synthetic construct
  source 1..110: mol_type = other DNA
aaatgcctgctcccatcaggaagactggaaaaccacattataggcattggagattgtactcagagggttcttgccttagagtgggaggagtaattagctttacatgaaac

SEQ ID NO: 60257 - DNA, 110 bp, synthetic construct
  source 1..110: mol_type = other DNA
ggccacaggaaatttgatactctaaggacaaagccagaacacacatgggattgtactctcagtagaaaagtggactaggaaaaagaaattcactgtctgattgaaatttg

SEQ ID NO: 60258 - DNA, 110 bp, synthetic construct
  source 1..110: mol_type = other DNA
tttatttaggatgccagcagtggagagcaggggggcaggtaagaagtagggcaaacattaaaataaaaagcaccctaaaattccagctccttaatgttaaagtcaataaa

SEQ ID NO: 60259 - DNA, 110 bp, synthetic construct
  source 1..110: mol_type = other DNA
agcaggggggcaggtaagaagtagggcaaacattaaaataaaaagcaccctaaaattccagctccttaatgttaaagtcaataaaatatgtcatgtgaaaagaaggacat

SEQ ID NO: 60260 - DNA, 110 bp, synthetic construct
  source 1..110: mol_type = other DNA
aggacccactgaagaaagagacagcaagtttccaagccaaaagcagtacttaccacaacagcaaattagcaagccctcacaagctaaacagggatgctccaagactacag

SEQ ID NO: 60261 - DNA, 110 bp, synthetic construct
  source 1..110: mol_type = other DNA
aggaatctgaagatattttggaattttgagaagaggataacttacccaaatttatagatagatattgcaggtggaatcgaataccaaagccttggtgagactttcctagt

SEQ ID NO: 60262 - DNA, 110 bp, synthetic construct
  source 1..110: mol_type = other DNA
tacatgatgtgagagagtcttctaattttgttaatttatatctagctgtctagcattcctaactccacatgttgaagaaactgtctctccattgtattgtatgttcttgc

SEQ ID NO: 60263 - DNA, 110 bp, synthetic construct
  source 1..110: mol_type = other DNA
ctgtctagcattcctaactccacatgttgaagaaactgtctctccattgtattgtatgttcttgcttcctttttcatagattgaccataggtacagggatttatttctgg

SEQ ID NO: 60264 - DNA, 110 bp, synthetic construct
  source 1..110: mol_type = other DNA
atgaaaatgccatgtttgcacaggccccatccacccaaccttggccaaatatggagggacccacatagcgcccgtctcgaaaaaggcaccaaacgagcttctgggagctg

SEQ ID NO: 60265 - DNA, 110 bp, synthetic construct
  source 1..110: mol_type = other DNA
attgtttatcagtcatagacatatgggccctatttttttctcttcactctgcttcatccctctctgagaaagagaaaatccatacccttgaatgaccctgcctctcttag

SEQ ID NO: 60266 - DNA, 110 bp, synthetic construct
  source 1..110: mol_type = other DNA
ttgtatctgggcctataggaaaagagggcttagatgactttgtatggaagaaatccaaagttcccaaaattcaaacacaggccgttctgggtgcctgatgttcctgtcct

SEQ ID NO: 60267 - DNA, 110 bp, synthetic construct
  source 1..110: mol_type = other DNA
tgggggtaaagttataaacacagcacaggaatttcagcctctgcctgcaaaacgaagctgcttcttttaccagccttgccatattgtaagtaaagtgacataggactcag

SEQ ID NO: 60268 - DNA, 110 bp, synthetic construct
  source 1..110: mol_type = other DNA
gccagtcacctatataaaaagcataggtgacaaccagggcagcttgaaattagcacctgaaatgggagagagggcaatcttacaggactgaacacttaacctgtagaatc

SEQ ID NO: 60269 - DNA, 110 bp, synthetic construct
  source 1..110: mol_type = other DNA
gaaattagcacctgaaatgggagagagggcaatcttacaggactgaacacttaacctgtagaatctgatgctttctctaggtaaatagtgtcagaattgagttcaattgt

SEQ ID NO: 60270 - DNA, 110 bp, synthetic construct
  source 1..110: mol_type = other DNA
aatcatttcccggtgagtcatctctacctaaggccatgcctactcttcttctaattcttctagatgtgactgatttgtaattgtaaatacttcctcatgattatagacaa

SEQ ID NO: 60271 - DNA, 110 bp, synthetic construct
  source 1..110: mol_type = other DNA
gcttccacccttgccctttgagaagccatcctccttttagttgttataaaacagacacttccctaatcgaaactctccaatagcttccctacacatttggatttcagact

SEQ ID NO: 60272 - DNA, 110 bp, synthetic construct
  source 1..110: mol_type = other DNA
gggctctcctgaccccatctgatggtatccggccctcagcttccaatacctcctctccaaaacccacgactgttcctccagagcctggcacccaagggcactcaataaat

SEQ ID NO: 60273 - DNA, 110 bp, synthetic construct
  source 1..110: mol_type = other DNA
caaatgatctccaggagaaagaaacccacttctttgaggctgatgtctgctcctccagcagcctgtgatcaggaaagatagcactggcacatggcccaacaaagcatagt

SEQ ID NO: 60274 - DNA, 110 bp, synthetic construct
  source 1..110: mol_type = other DNA
cagcagcctgtgatcaggaaagatagcactggcacatggcccaacaaagcatagtgcattggaaaagagtcctgggcttggagggaaaatctgtgggttatagtccaggt

SEQ ID NO: 60275 - DNA, 110 bp, synthetic construct
  source 1..110: mol_type = other DNA
aggtgacctattaaataacaagtccctttgtttttggcaattccacttctcagaatggctctgtcctgtgttcctccagcccaggccctcttatctctcaagatctagat

SEQ ID NO: 60276 - DNA, 110 bp, synthetic construct
  source 1..110: mol_type = other DNA
tggctctgtcctgtgttcctccagcccaggccctcttatctctcaagatctagattgagacttaccttttctggaaggtcttcttccatactagcccactctccactgac

SEQ ID NO: 60277 - DNA, 110 bp, synthetic construct
  source 1..110: mol_type = other DNA
cataaaaaccacagcggtgacaatgccagatcctgaaccctctgagccatgagggaaatcttgcatttgctttttctagaagctagaagcactcctgatcatggacagcc

SEQ ID NO: 60278 - DNA, 110 bp, synthetic construct
  source 1..110: mol_type = other DNA
ggcaggacttagaagtagcatgcataggaaagcttttagggttttaggggatgctaagcttagtacaatattaaaagctggtgaaaatgaacattcaccctagaaggggt

SEQ ID NO: 60279 - DNA, 110 bp, synthetic construct
  source 1..110: mol_type = other DNA
tccttttggatctgtctctggcttgcagtgcacctcaggagaagctgaggcccggtactgagtgcactgctgagattggaacacaggtggaaagggccctgcttggacac

SEQ ID NO: 60280 - DNA, 110 bp, synthetic construct
  source 1..110: mol_type = other DNA
ctccctgcctgtttgaatcaggcattgaagtgtactctctccttagaaacccagtgggctgtcggttctaaggaattctattggttgtaagccaatgacagatacgtgtt

SEQ ID NO: 60281 - DNA, 110 bp, synthetic construct
  source 1..110: mol_type = other DNA
gggctgtcggttctaaggaattctattggttgtaagccaatgacagatacgtgttgggtcagactgcttcctcagtgcttgacctaatggattgtttagaatgagcactg

SEQ ID NO: 60282 - DNA, 110 bp, synthetic construct
  source 1..110: mol_type = other DNA
gcctgctttgcaactttctgggaagctcaggataagaaggagggagagaaggtaggtaggtctcagcttcaggtcccaatgttctctgataaccccaaccttgtgacagc

SEQ ID NO: 60283 - DNA, 110 bp, synthetic construct
  source 1..110: mol_type = other DNA
gtaggtctcagcttcaggtcccaatgttctctgataaccccaaccttgtgacagcccaaccagcaggatggcaaacaagcctgtggagatcttctcagctcctcctgagc

SEQ ID NO: 60284 - DNA, 110 bp, synthetic construct
  source 1..110: mol_type = other DNA
ctcatgagagctccagctcccccattagatgagagcttcctgatcctccaaacaacatcctctccctccagggccctgtagaagcctgtcctgggagtggactcagaagg

SEQ ID NO: 60285 - DNA, 110 bp, synthetic construct
  source 1..110: mol_type = other DNA
gctgcttcttgtctctgtgaatttgtgcctcgagtaagcatgtcacataagtgaaatcacaaatggctgtcctttggttttttggcttctttcaccaagcgtaatgtttt

SEQ ID NO: 60286 - DNA, 110 bp, synthetic construct
  source 1..110: mol_type = other DNA
cactggggagtgtgacactggcggggagcgtgtgcatgcagcatgggagaaggtggccgagcagagggtgaggaaggcactttggggagctttctcttctctctgccaga

SEQ ID NO: 60287 - DNA, 110 bp, synthetic construct
  source 1..110: mol_type = other DNA
gccgagcagagggtgaggaaggcactttggggagctttctcttctctctgccagagtcggagtgttcaaaaaaaggcattcaccagataggagttcctatcgtggcacag

SEQ ID NO: 60288 - DNA, 110 bp, synthetic construct
  source 1..110: mol_type = other DNA
attccccaggttctcaaaggtgttctccagagaacaggcctgttcctctctgctgattggctagaaatcccagaagtaaaccaggagaggtgagaagtgaaatggatagt

SEQ ID NO: 60289 - DNA, 110 bp, synthetic construct
  source 1..110: mol_type = other DNA
attggctagaaatcccagaagtaaaccaggagaggtgagaagtgaaatggatagtctaagctaaacacagcttatccacaactttggtttcagttacttgttgtcaaccg

SEQ ID NO: 60290 - DNA, 110 bp, synthetic construct; identical to SEQ ID NO: 60288
  source 1..110: mol_type = other DNA

SEQ ID NO: 60291 - DNA, 110 bp, synthetic construct; identical to SEQ ID NO: 60289
  source 1..110: mol_type = other DNA

SEQ ID NO: 60292 - DNA, 110 bp, synthetic construct
  source 1..110: mol_type = other DNA
aatgaccagtatgtggagtctgatttagctttccagaattgacttttggggttgtattggcaaatcacagtcttaaataatggatattaaatgatgcactatgtttttgt

SEQ ID NO: 60293 - DNA, 110 bp, synthetic construct; identical to SEQ ID NO: 60292
  source 1..110: mol_type = other DNA

SEQ ID NO: 60294 - DNA, 110 bp, synthetic construct
  source 1..110: mol_type = other DNA
ccattctttggcatgctgcttctttcttttcttttttggccctcttgtgatatgtggagctcctaggccagagatcagatccgagatgcagtgatgcaattgccacagtt

SEQ ID NO: 60295 - DNA, 110 bp, synthetic construct
  source 1..110: mol_type = other DNA
ccttgtgcataaggccgtgtgttcttagttttctcagggatggagtccactactgtgaccttgtggccttaaaaagaaccctacactttttcatcaaacagattttcttc

SEQ ID NO: 60296 - DNA, 110 bp, synthetic construct
  source 1..110: mol_type = other DNA
ggcccagtggtgggacggtggcattggtgataagagggaatgtatggatcaggcagaaacaaagtggaggagaagagaggtcactgctggcttatatgatttaagactct

SEQ ID NO: 60297 - DNA, 110 bp, synthetic construct
  source 1..110: mol_type = other DNA
gggaatgtatggatcaggcagaaacaaagtggaggagaagagaggtcactgctggcttatatgatttaagactctcgggagttcctgtcctggcgcagtggttaacgaat

SEQ ID NO: 60298 - DNA, 110 bp, synthetic construct
  source 1..110: mol_type = other DNA
gttacctcatctaagtggaatcatacagtatttgtctttttttgtgattggcttgtttcacttagtgcagtgtccttcaaggctcatctgtgtggtagcttgtgacatat

SEQ ID NO: 60299 - DNA, 110 bp, synthetic construct
  source 1..110: mol_type = other DNA
tttcacttagtgcagtgtccttcaaggctcatctgtgtggtagcttgtgacatatttctgcccttccaaaggctgctgcataatattccctgtatgcacacaccaccttt

SEQ ID NO: 60300 - DNA, 110 bp, synthetic construct
  source 1..110: mol_type = other DNA
cctcatgttatctctctgacctattcagaaccccttaaccacaaggccccagttctgcctagcggaacttctgtgatgatggcaatgtgctataactatgctgtccacaa

SEQ ID NO: 60301 - DNA, 110 bp, synthetic construct
  source 1..110: mol_type = other DNA
tgcctagcggaacttctgtgatgatggcaatgtgctataactatgctgtccacaagccgcatatgactatccagcacttgaaatgtggctaatgtgacatttgatttaat

SEQ ID NO: 60302 - DNA, 110 bp, synthetic construct
  source 1..110: mol_type = other DNA
ctaggattctccatgggtgccactttttctaatgtctccttgaaggaagtggcccaaagaaagaacatcagctgccaaaaaaccagtgcattcatcctggtgagaagatg

SEQ ID NO: 60303 - DNA, 110 bp, synthetic construct
  source 1..110: mol_type = other DNA
aaagaaagaacatcagctgccaaaaaaccagtgcattcatcctggtgagaagatgcaggttttggaagtgacctgaggccaagacagagaaagggaagagggattcagtc

SEQ ID NO: 60304 - DNA, 110 bp, synthetic construct
  source 1..110: mol_type = other DNA
gagaacagtcatacacgcccttggggagcttacattctagaacgcgagccaacgagcacacaggcaccagcctttcggagtgctggctatctgtccagcactgttctaag

SEQ ID NO: 60305 - DNA, 110 bp, synthetic construct
  source 1..110: mol_type = other DNA
ggggaaatgggggagactgaagctaaaacgcatcgcttcccagtaaacttcccgccacgtctgcctgtccatctgtatctctgaatgctggcacggctcacacacctgtg

SEQ ID NO: 60306 - DNA, 110 bp, synthetic construct
  source 1..110: mol_type = other DNA
gacgacgaagcactttcctagccccatactgaatttagcctctcactaccctggggtctggaaagcagctggcatccctacaaagtagcatctgcagtggctggatcaaa

SEQ ID NO: 60307 - DNA, 110 bp, synthetic construct
  source 1..110: mol_type = other DNA
gtctggaaagcagctggcatccctacaaagtagcatctgcagtggctggatcaaataccacactgcctttccacctccgttaggcaccacggcggcagggcgggggcaga

SEQ ID NO: 60308 - DNA, 110 bp, synthetic construct
  source 1..110: mol_type = other DNA
atcttccagccttacctagggtcatatattgagatggatggactcaagctgcacgcggaaagtggcaacaccaggccagaggaagaaaatggtcccagccttgggagcaa

SEQ ID NO: 60309 - DNA, 110 bp, synthetic construct
  source 1..110: mol_type = other DNA
tgcctttatctaaggctcagagaagtagatctctagacatcctttgaagctagacaggggagtcttaaagaggggatgccaggtgataaggggggttcagagagggatga

SEQ ID NO: 60310 - DNA, 110 bp, synthetic construct
  source 1..110: mol_type = other DNA
aggggagtcttaaagaggggatgccaggtgataaggggggttcagagagggatgatggagctcctcaccaggcccaggaggttgaggaagaggtgggtgtgcttgcgaat

SEQ ID NO: 60311 - DNA, 110 bp, synthetic construct
  source 1..110: mol_type = other DNA
aggcaggtgtggctgccacttgcctgggccccaacttccctctcccctgccagagttcccgccttcctccctggctccttaaccctcaggttctttgtctgtaaaataac

SEQ ID NO: 60312 - DNA, 110 bp, synthetic construct
  source 1..110: mol_type = other DNA
gctgcaccaagccggggcggggaagaccaaggccgcatttccccctaagaaccaaccagggcttttggctttgccctagctttttcaaggagactctggaccaggctccc

SEQ ID NO: 60313 - DNA, 110 bp, synthetic construct
  source 1..110: mol_type = other DNA
ggaaggtgaataacttaacactgaagaatacaaagtctggcatttttctgaagagctgaaaaggtggcctctgattatgcttccggctttctccgctcccagtttttttt

SEQ ID NO: 60314 - DNA, 110 bp, synthetic construct
  source 1..110: mol_type = other DNA
ctgaaaaggtggcctctgattatgcttccggctttctccgctcccagttttttttaatttttaaaatttctcttaaactcccactatgtgtttggaaacaggaaaagcgc

SEQ ID NO: 60315 - DNA, 110 bp, synthetic construct; identical to SEQ ID NO: 60313
  source 1..110: mol_type = other DNA

SEQ ID NO: 60316 - DNA, 110 bp, synthetic construct; identical to SEQ ID NO: 60314
  source 1..110: mol_type = other DNA

SEQ ID NO: 60317 - DNA, 110 bp, synthetic construct
  source 1..110: mol_type = other DNA
ctctttttctcattatcagaccagtacctttctattctgttaggtacaggtctgttagtgtttagaatgataataagtagataaaactagcagttgggggtaagtttcct

SEQ ID NO: 60318 - DNA, 110 bp, synthetic construct
  source 1..110: mol_type = other DNA
tagtgtttagaatgataataagtagataaaactagcagttgggggtaagtttcctgttgtagaacccctaacacactgtcagtcatgtttataatatgttatctctttct

SEQ ID NO: 60319 - DNA, 110 bp, synthetic construct
  source 1..110: mol_type = other DNA
atctcttgttagccccgggttgattctttctctttctcttcgctttgtaccaaggcatagctccatctggagctaaattgctcttgccctggggaagcaaagggcagaac

SEQ ID NO: 60320 - DNA, 110 bp, synthetic construct
  source 1..110: mol_type = other DNA
cgtggccccgaagggcagaggcgctggaccaggtgaggttggtggagactgtgttgggtggggagacccaagacagcaggatatgataggggtgggtctcctgcacccgg

SEQ ID NO: 60321 - DNA, 110 bp, synthetic construct
  source 1..110: mol_type = other DNA
gggtggggagacccaagacagcaggatatgataggggtgggtctcctgcacccggagctccagcccccatcccttgtctctgcccggctgcaggggagcccggccaacaa

SEQ ID NO: 60322 - DNA, 110 bp, synthetic construct
  source 1..110: mol_type = other DNA
tagatatagagagtatatcttagccaacctcattgtcatcccaggagcacaggtggatgcagaggggtgccagctgtgtattgtggtgagagagaggcgtgctggggtgc

SEQ ID NO: 60323 - DNA, 110 bp, synthetic construct
  source 1..110: mol_type = other DNA
actaaacgctgtttatttttccttctgtttgccccgaggcagacctattgtggctcctgggatccagagtgggtaatcaaggtgatttccatggttggggagctggggac

SEQ ID NO: 60324 - DNA, 110 bp, synthetic construct
  source 1..110: mol_type = other DNA
cctgggatccagagtgggtaatcaaggtgatttccatggttggggagctggggacctcaggggctttcacaataaaaaataaagagaattgcaactccagctttaaaggg

SEQ ID NO: 60325 - DNA, 110 bp, synthetic construct
  source 1..110: mol_type = other DNA
atctttcttcccatagggtctcactcactttcagaaaagccttggacttcaagagggacgtggataatcctcccctcccacatgcataagaaatcagctgagccacagaa

SEQ ID NO: 60326 - DNA, 110 bp, synthetic construct
  source 1..110: mol_type = other DNA
ggacgtggataatcctcccctcccacatgcataagaaatcagctgagccacagaaaactcatttcatttgacttgcccatggttgccttgccaagactttgtgggttttt

SEQ ID NO: 60327 - DNA, 110 bp, synthetic construct
  source 1..110: mol_type = other DNA
ctggtaagggctggcatctccatgtcctgctgttggctgtcctggataccttcggtggtgtggaggtggggtgacctcctctgggtcctccaaagctcctgactccctgt

SEQ ID NO: 60328 - DNA, 110 bp, synthetic construct
  source 1..110: mol_type = other DNA
gctttgccttcttcttgtcagcggagcatgtgccactgcccacttcaccgctcgccagttcaggcctcattcagggaagccagcaggtgtttggctttctggaatctaga

SEQ ID NO: 60329 - DNA, 110 bp, synthetic construct
  source 1..110: mol_type = other DNA
cagctgactctggattttaaaaaatcaaaatccctgcctactcctcccgaagaacacaatccccccaggctccttggtgtctatcccttagagccatgactcccagcctg

SEQ ID NO: 60330 - DNA, 110 bp, synthetic construct
  source 1..110: mol_type = other DNA
atggttgccatggaaggcttgggtgctggaggtgtcagttttgttcttcaatccgtggaaaagaggggggcaagtggctccccccacccaacccgtcccaatccctggcc

SEQ ID NO: 60331 - DNA, 110 bp, synthetic construct
  source 1..110: mol_type = other DNA
tagttcttttccaatctcaagttaccacctaaagctcttgctccaccttccacatcccacctccctctggataactcaccatcggtggaactgctgttcacaaccaggcc

SEQ ID NO: 60332 - DNA, 110 bp, synthetic construct
  source 1..110: mol_type = other DNA
cccacctccctctggataactcaccatcggtggaactgctgttcacaaccaggccttctaacaccggattccaggctctttcctctttcccggatctctaactgccctgc

SEQ ID NO: 60333 - DNA, 110 bp, synthetic construct
  source 1..110: mol_type = other DNA
ggtgggaggttggagtccatggatactggagccagagcggcggtctcggcttctccacttgtttactttcggcagatgacttggtctctctgagcatcctctccaaagta

SEQ ID NO: 60334 - DNA, 110 bp, synthetic construct
  source 1..110: mol_type = other DNA
cacttgtttactttcggcagatgacttggtctctctgagcatcctctccaaagtaagaagagtaataacaacacatatctcttgggtgaaaaaactcaagtaaagcactc

SEQ ID NO: 60335 - DNA, 110 bp, synthetic construct
  source 1..110: mol_type = other DNA
aaaaaggctctgatttagcatattgctcgatgcttgagaatctttctgattaatctcattgggaagccatgccaagaaaacaaggaagggagaagaaaggaaacagaagc

SEQ ID NO: 60336 - DNA, 110 bp, synthetic construct; identical to SEQ ID NO: 60335
  source 1..110: mol_type = other DNA

SEQ ID NO: 60337 - DNA, 110 bp, synthetic construct
  source 1..110: mol_type = other DNA
ctggttgttcttattttaaattattcgtgaattcaattatgcaagctctccctggactcccataatcagagatcaaaaagttgactgaactagccaggggctctcaagga

SEQ ID NO: 60338 - DNA, 110 bp, synthetic construct
  source 1..110: mol_type = other DNA
tccttgaccttcctccaagtctggatttggggggtgtgctcactgcatccttttctacctctttggataccccattaccgggaccccagagctgggccagtatctgtagc

SEQ ID NO: 60339 - DNA, 110 bp, synthetic construct
  source 1..110: mol_type = other DNA
tggacagtgacgtgaacacaaagggggctgcatgggggtgagtgcaggtggcccgggatgcccatctttactggcacctcatataacaaactgtgagtccttccaccccc

SEQ ID NO: 60340 - DNA, 110 bp, synthetic construct
  source 1..110: mol_type = other DNA
tgatctcaatctctcgccgaatgtgcatcagatcttgctcatctttgattctgtctttccggattgacttgatggccacctgagaacagagaatgcaggagagtgaggtc

SEQ ID NO: 60341 - DNA, 110 bp, synthetic construct
  source 1..110: mol_type = other DNA
tttccggattgacttgatggccacctgagaacagagaatgcaggagagtgaggtctggcaggtaaaggtgtcgctgaggacgctctgggagccctgaccctggtgatctg

SEQ ID NO: 60342 - DNA, 110 bp, synthetic construct
  source 1..110: mol_type = other DNA
ggatcattgccagtgatgaaaacaagcaatggctttttggcagtggtctgatgttaggtgatgaaataaagaaagcatgttccagttgaaattagcaggctggggtccag

SEQ ID NO: 60343 - DNA, 110 bp, synthetic construct
  source 1..110: mol_type = other DNA
accacggaactcgagaatccaggtcttgtgccaccaccccccaccacccgtgtgccagccagttgagaagagggaaggtggaggcagagattcacccattctgtaagtag

SEQ ID NO: 60344 - DNA, 110 bp, synthetic construct
  source 1..110: mol_type = other DNA
gcctgaggtcttgcttggaggggcagcagggtgcgagtccctctttagtggatgagccaggtagagctgcctctatgaggctgggaagagatgccagggaagaaaactgg

SEQ ID NO: 60345 - DNA, 110 bp, synthetic construct
  source 1..110: mol_type = other DNA
gccaggtagagctgcctctatgaggctgggaagagatgccagggaagaaaactggcacgggagaagggtaggggacaccaaaggatttggaggcaattttcgcaagggca

SEQ ID NO: 60346 - DNA, 110 bp, synthetic construct
  source 1..110: mol_type = other DNA
tgctgctggtctggccataaaaagaagaacaaaaaatttaaaaataaaaagaactatttctaaatctggtttccagttaaggagcatcccagcatcagctaggtagtgaa

SEQ ID NO: 60347 - DNA, 110 bp, synthetic construct
  source 1..110: mol_type = other DNA
gagagatgtcctgctctcaaggggctcaccctctccactgtgtatcccgtttcctttctctgcctctttacccagctctttgtgatacgtcgctgacgcaaaataaatga

SEQ ID NO: 60348 - DNA, 110 bp, synthetic construct
  source 1..110: mol_type = other DNA
tttaaatcctggctctgccagttacttcccctcactgagcttcactttcctcacgtgtaaaataggaatagcaaacctaactctcaagattgttctaagtgccaggtaca

SEQ ID NO: 60349 - DNA, 110 bp, synthetic construct
  source 1..110: mol_type = other DNA
agatccaaaccacatctgcagcctataccatggctcaccatgccggattcttaacccactgagcaaggctgaggatcaaatctgcatcctcagggatactagtcgacttt

SEQ ID NO: 60350 - DNA, 110 bp, synthetic construct; identical to SEQ ID NO: 60349
  source 1..110: mol_type = other DNA

SEQ ID NO: 60351 - DNA, 110 bp, synthetic construct
  source 1..110: mol_type = other DNA
atttgctcagggtcaaagttaaagttaagtggtattggtggaaataaaacatacgcttttttttttgcttttcagggccacacctgtggcatatatatggaggttcccag

SEQ ID NO: 60352 - DNA, 110 bp, synthetic construct
  source 1..110: mol_type = other DNA
actcccctgttgatggcctttatgcaaggtgttgtgctaggaatgttctctgactcatgttgtttaattctcacatcgaccccgtgtccatttgaggaagctgaggttcg

SEQ ID NO: 60353 - DNA, 110 bp, synthetic construct
  source 1..110: mol_type = other DNA
catgttgtttaattctcacatcgaccccgtgtccatttgaggaagctgaggttcgcagagatgaagtaatgttagtgctgggatttaaattcaaaatccaggtcagtctg

SEQ ID NO: 60354 - DNA, 110 bp, synthetic construct
  source 1..110: mol_type = other DNA
agcctcacatctacccccaggaagtaggaagccttcgcctggatattggatcaaattaacattttaaaggccactcatgcacatagcacacggtatctgacttctctggt

SEQ ID NO: 60355 - DNA, 110 bp, synthetic construct
  source 1..110: mol_type = other DNA
ttaacattttaaaggccactcatgcacatagcacacggtatctgacttctctggtggatctggtgtttgagttggaagagttctaaagagacggggaccccttgtactag

SEQ ID NO: 60356 - DNA, 110 bp, synthetic construct
  source 1..110: mol_type = other DNA
taatacggagttgaggttccaaggttatgtttgttttcttttcacctaatgaataggctaagtaaccgtctgttgtcttaaaatgagttctattaataatgatgacagct

SEQ ID NO: 60357 - DNA, 110 bp, synthetic construct
  source 1..110: mol_type = other DNA
ggctaagtaaccgtctgttgtcttaaaatgagttctattaataatgatgacagctcatattttgatcattacagcatgtaaaaaataatcattcgcagggagggttggag

SEQ ID NO: 60358 - DNA, 110 bp, synthetic construct
  source 1..110: mol_type = other DNA
gacacaacaaccagagcaatcttttgtaaaaaatggagttcacatcctgttgctccttcgttcagacccactggtggtttttgctttccagacgtgattgggcccctgct

SEQ ID NO: 60359 - DNA, 110 bp, synthetic construct
  source 1..110: mol_type = other DNA
cttcgttcagacccactggtggtttttgctttccagacgtgattgggcccctgctatctacctgaccttgccttctcctgctctccccctctgactcttgtttctcagta

SEQ ID NO: 60360 - DNA, 110 bp, synthetic construct
  source 1..110: mol_type = other DNA
ggttggagtttgggcccttaagtcacgctgtgtgggtttgaatcccagctccaccacctaatagcttgacttcctcaagagtcggttttctcatctttaaattagggata

SEQ ID NO: 60361 - DNA, 110 bp, synthetic construct
  source 1..110: mol_type = other DNA
acctaatagcttgacttcctcaagagtcggttttctcatctttaaattagggataaaaatagtacctacctactaggatgagagaattcattaggcgccctgccagagga

SEQ ID NO: 60362 - DNA, 110 bp, synthetic construct
  source 1..110: mol_type = other DNA
aagactacccctttcctgttctctctgctgattcttttttttttttttttttctttttagggctgcatccagggcacatggacgttcccaggccagggctcaaatcggag

SEQ ID NO: 60363 - DNA, 110 bp, synthetic construct; identical to SEQ ID NO: 60362
  source 1..110: mol_type = other DNA

SEQ ID NO: 60364 - DNA, 110 bp, synthetic construct
  source 1..110: mol_type = other DNA
gaaggaactcagggttacaagtttgggacggcaggttcaggaatggggttggcgtaaagagggacggcaacaccaaggaagttgctatagaaagccggtgacgtttgagt

SEQ ID NO: 60365 - DNA, 110 bp, synthetic construct
  source 1..110: mol_type = other DNA
tcagataccagttgtaagagtatgttgtcacccatgcttcggaccaacaggctgtaggtgggaggttgccacagctctgtctttgggctcaatgcatttgttagagcagc

SEQ ID NO: 60366 - DNA, 110 bp, synthetic construct
  source 1..110: mol_type = other DNA
tttgtatttagaccagtgcttctcaaccttagctgcacactggactcacctggccagctttagcaaatgtgaatacctgggtcccatagctggagagtccgatctccttg

SEQ ID NO: 60367 - DNA, 110 bp, synthetic construct
  source 1..110: mol_type = other DNA
aagtgagagcgaagttactaaaggcccatccacgggtgatgggaggaaatatatgggaaatatctgattcttgaggcaagcatgctatcaggagaaaggcaaggatcagt

SEQ ID NO: 60368 - DNA, 110 bp, synthetic construct
  source 1..110: mol_type = other DNA
ccagggtctgggctccaagctgcctccagttgtaggaatagccagtaagcttacagctaacttaatgtcagaaaccagcagtggtatacctctgagcagtgtcttgccaa

SEQ ID NO: 60369 - DNA, 110 bp, synthetic construct
  source 1..110: mol_type = other DNA
ctgtggtgtaggttcgatccctggtcctgggacttcacatgcctcaggcttggccaaaaaagaaataaaaaaataaaaggcttttggtactggattctcctttgtaagtt

SEQ ID NO: 60370 - DNA, 110 bp, synthetic construct
  source 1..110: mol_type = other DNA
ctcctctccagggtgattcagattccatcaccacgactgttcctaatctcagcggagcttcctgtccattggcgggctcttttacttgggctctctatcggctctctcct

SEQ ID NO: 60371 - DNA, 110 bp, synthetic construct
  source 1..110: mol_type = other DNA
ctgggcaatgacaatgaggttgggatggggacagaataaaggagccaggggctatagcaccagctcatacttggtccctgaacaagcatttgaaggcttctcttccagaa

SEQ ID NO: 60372 - DNA, 110 bp, synthetic construct
  source 1..110: mol_type = other DNA
tcatccctccctcgtgctgaaagccctcttggacctctgggtcctctctggccccttctccttcctagcactcatttcgcaaacctgacagcacccagcccccacctgca

SEQ ID NO: 60373 - DNA, 110 bp, synthetic construct
  source 1..110: mol_type = other DNA
ggcattgtgtaaagcctctgggcttgagctgccgtcccactgctggtgcagcccgggggtcagtcacatgcaaactgagattggcaacaggaagaatggcaacatcagag

SEQ ID NO: 60374 - DNA, 110 bp, synthetic construct
  source 1..110: mol_type = other DNA
agacagaagagaataggtggaagaatccaacgctttcaggaggaaatcttcctcatctttctccaggtacagaagccactttaaccagatattttgcttggaagctggtt

SEQ ID NO: 60375 - DNA, 110 bp, synthetic construct
  source 1..110: mol_type = other DNA
tctttctccaggtacagaagccactttaaccagatattttgcttggaagctggtttttccttggatataagttatccttgataccacaggggcaggaagaaaaattaaaa

SEQ ID NO: 60376 - DNA, 110 bp, synthetic construct
  source 1..110: mol_type = other DNA
aggatatagtactgcagcaagctggggcgtaagtcacagatgcagctcagatccagtgttgccatggttgtggtgtgggcctcagattcgacccctagcctgggaacttc

SEQ ID NO: 60377 - DNA, 110 bp, synthetic construct; identical to SEQ ID NO: 60376
  source 1..110: mol_type = other DNA

SEQ ID NO: 60378 - DNA, 110 bp, synthetic construct
  source 1..110: mol_type = other DNA
ctatctaattcagattcagccccctcccatctcctcacttggaattactctctcttacgagtgaagtgtttctgcagaagctaacactcactgctttgtgttctaacatt

SEQ ID NO: 60379 - DNA, 110 bp, synthetic construct
  source 1..110: mol_type = other DNA
tacgagtgaagtgtttctgcagaagctaacactcactgctttgtgttctaacatttgtgtgcctgtcttttcttccactctaggctgtaatttctcaaagacatggatcc

SEQ ID NO: 60380 - DNA, 110 bp, synthetic construct
  source 1..110: mol_type = other DNA
tgacatgccatgatggcatctccccaagaggatttctttatctactctgcctgccatacctgactgatagctacagttaaaaagaaagaggccccaaatgaagtcacttg

SEQ ID NO: 60381 - DNA, 110 bp, synthetic construct
  source 1..110: mol_type = other DNA
agtaattttttacctctgaacatagccttcgtgtcaaaaggatctctttttctatctctctgccagtattttctttttcaaaagtaattttatttgactgctggtacatg

SEQ ID NO: 60382 - DNA, 110 bp, synthetic construct
  source 1..110: mol_type = other DNA
taatactgaagacattaatgaatacaatacaatcactacttcaatgtaagagtgcttcaagtttcttcaagaacatacactgctgtcactcttcatttgatctctattta

SEQ ID NO: 60383 - DNA, 110 bp, synthetic construct
  source 1..110: mol_type = other DNA
ttcaagtttcttcaagaacatacactgctgtcactcttcatttgatctctatttaatgtgtttagctgcttgaagtttgtttcttagatattcacaaggcaacgttctca

SEQ ID NO: 60384 - DNA, 110 bp, synthetic construct
  source 1..110: mol_type = other DNA
agacaagtgctggtaggaaagacaaggttgttttattcagaaggcagaccatctggggagaaggcagacacctattccagagtcaactctgaagattctgcttggccgag

SEQ ID NO: 60385 - DNA, 110 bp, synthetic construct
  source 1..110: mol_type = other DNA
gggagaaggcagacacctattccagagtcaactctgaagattctgcttggccgagaaaaaatttttaaagggaaaagggggacgtactctcagctaatcattgaaacagg

SEQ ID NO: 60386 - DNA, 110 bp, synthetic construct; identical to SEQ ID NO: 60384
  source 1..110: mol_type = other DNA

SEQ ID NO: 60387 - DNA, 110 bp, synthetic construct; identical to SEQ ID NO: 60385
  source 1..110: mol_type = other DNA

SEQ ID NO: 60388 - DNA, 110 bp, synthetic construct
  source 1..110: mol_type = other DNA
gtagagaataaattcatcagagaacctcaagctgcgttaggacctcagtcttcgtgggcacctcaccttgtctgtaaaggactgagtaaaaatgaagccacatacttcag

SEQ ID NO: 60389 - DNA, 110 bp, synthetic construct
  source 1..110: mol_type = other DNA
agtatcccacttcttatcctgggcaggtgggaagacaccagatctctgtcagctagtgtttctgagcagagcagccctggcccacagctttgttgaatcagctatgcggc

SEQ ID NO: 60390 - DNA, 110 bp, synthetic construct
  source 1..110: mol_type = other DNA
caccaaccagtcagaagaaaatttgcacccagtagaagataaaaactctgacctgctcctcaaatgattgtctctttacaaacttttatgctcatgcaaaatctttggag

SEQ ID NO: 60391 - DNA, 110 bp, synthetic construct
  source 1..110: mol_type = other DNA
aatttgaacttcaagggtccacttttatattgttggtttttttttttttttttcaataaatacgtactacaacgctacacaagtcaccattggttgaatctgtggaagtg

SEQ ID NO: 60392 - DNA, 110 bp, synthetic construct
  source 1..110: mol_type = other DNA
ataaatacgtactacaacgctacacaagtcaccattggttgaatctgtggaagtggaacttgggtattcgactacatagcaggttgatgcccctaacctctaaactgttt

SEQ ID NO: 60393 - DNA, 110 bp, synthetic construct
  source 1..110: mol_type = other DNA
taaaagtctctgactagaggtgggggcagctacttctgggaattgaaaatgaatgagaaagcccagtcctctttatctgggtctgattctttgggtcacaaagtctgtgt

SEQ ID NO: 60394 - DNA, 110 bp, synthetic construct
  source 1..110: mol_type = other DNA
tcatgtgtgctggctcctatgttgtttctaagtgatccgttttggtggtattagtattagctaaaatggccttatggctataaaacaagaaacattgattctgtcttaac

SEQ ID NO: 60395 - DNA, 110 bp, synthetic construct
  source 1..110: mol_type = other DNA
tgctagtcttgtgcaatcattcagctcttttgttcattacacaattaacaattcacttccaagattttaatgatattttcaacaagacaaaacatacaggggaagttccc

SEQ ID NO: 60396 - DNA, 110 bp, synthetic construct
  source 1..110: mol_type = other DNA
tatggcactgggaccaataattcactattgagaatggcatcaagagggtaagataaagaattatgaaatatctgtgtgaagttctatagctttaggcttagcttgttcac

SEQ ID NO: 60397 - DNA, 110 bp, synthetic construct
  source 1..110: mol_type = other DNA
tgcaacccaagctgcagtagctgcaatgccatatccttaacccactgcaccagacctgagatggaacctgagtcccagtgctcccaagatgccgtatatccccatgtgcc

SEQ ID NO: 60398 - DNA, 110 bp, synthetic construct
  source 1..110: mol_type = other DNA
cacagtgaatgcaggagacaggtgacaacttggtaacctgcaatttgaatcctgatcattgatgagctctaccccctccagaagactttcttcttaactcctcttggata

SEQ ID NO: 60399 - DNA, 110 bp, synthetic construct
  source 1..110: mol_type = other DNA
ctgctgcaaataatagtctacaaatgtcacagtcacatcatgaaggctgacctcccttcccttgcccaaagctccataggttcgtctaaatgactcataatcagatctag

SEQ ID NO: 60400 - DNA, 110 bp, synthetic construct
  source 1..110: mol_type = other DNA
tcttcgatatagattcaaagcactatgtctggcactgggaatgcaaagaatgcaaagatgaaaggcccttaaggagctcacatggagccaatgatccaatcttcccactg

SEQ ID NO: 60401 - DNA, 110 bp, synthetic construct
  source 1..110: mol_type = other DNA
ataatactcgattgctgtggtcttgctccggcaaactccctatcctagtctaatcatgagaaagacagctgaggaaatccaaatagagtacagagtttagtttgtaataa

SEQ ID NO: 60402 - DNA, 110 bp, synthetic construct
  source 1..110: mol_type = other DNA
ctcccaggatcccagtacagaaagtccagccctctctcaccctgtcctgctctagagcttgtctttttccctattactgacatctcacaccttagactactttttttcat

SEQ ID NO: 60403 - DNA, 110 bp, synthetic construct
  source 1..110: mol_type = other DNA
tccctgctttgcctgggaggctcttaggactgctctctgtaatggtaagggcaaatgcccttctgcagtcattccccttctctttgtagccccaagggtgggggaatgct

SEQ ID NO: 60404 - DNA, 110 bp, synthetic construct
  source 1..110: mol_type = other DNA
gattctgctactcccttgtccccttagacaaagctgaacatcttgccaggacattaagtggcactcgaatcacctttcttggagagcttgtctcatggctaagattccat

SEQ ID NO: 60405 - DNA, 110 bp, synthetic construct
  source 1..110: mol_type = other DNA
ttctgtttgccattaattcccaagtgaaagtgaagcagtgtctaggtgagcaaatctcaatgaccatttctcccccagatagctgttacaaatgttgaattttttaaaaa

SEQ ID NO: 60406 - DNA, 110 bp, synthetic construct
  source 1..110: mol_type = other DNA
ggaatgatgtggccaaagctctgagctggagcatagtcaaatttgtaagcttaataattttgaaaactatgtgataaactcactggcaatatcaagccagagtggatgct

SEQ ID NO: 60407 - DNA, 110 bp, synthetic construct
  source 1..110: mol_type = other DNA
aattttgaaaactatgtgataaactcactggcaatatcaagccagagtggatgcttgtggaagaaggttaaactggagttagagaatatggataaataaatctttaacta

SEQ ID NO: 60408 - DNA, 110 bp, synthetic construct
  source 1..110: mol_type = other DNA
acagtatcactgtagtattattcattttggctgcacagttatattgtaacaaagtaatttaggaaagtcagataagctgaataaattgcttcatagacaaggcaacactc

SEQ ID NO: 60409 - DNA, 110 bp, synthetic construct
  source 1..110: mol_type = other DNA
aatggtggacttccaggtgtttgcaggtgggactgtggcatcttttggacaggccatatctttggcaagaactgggcttaccgtgtgatctcactgtcaagtcctatagc

SEQ ID NO: 60410 - DNA, 110 bp, synthetic construct
  source 1..110: mol_type = other DNA
atatctttggcaagaactgggcttaccgtgtgatctcactgtcaagtcctatagcttctctctactgtgaatccctcttactcctcaggagtttgcatctgtatcacaaa

SEQ ID NO: 60411 - DNA, 110 bp, synthetic construct
  source 1..110: mol_type = other DNA
ttatgatgtcaggatcccatatgagaataggatctcattgtatcttttctaacgggatgcatgggttctagctctaaaaatagtaacaaactttggcaagctgaaactat

SEQ ID NO: 60412 - DNA, 110 bp, synthetic construct
  source 1..110: mol_type = other DNA
ggtcaaatagctctaagtgataattttgcattagagggaatctgatagctctaaagtctggaaactccttttccacatttgtaactctagtaaggaaattagcaaggaat

SEQ ID NO: 60413 - DNA, 110 bp, synthetic construct
  source 1..110: mol_type = other DNA
ttttccacaatttatcaaagaagtttactcagcacattttttaaacaagcttgctctatcttagagactcaaataatgtatggaggtttcattagccaaatcgctcttgc

SEQ ID NO: 60414 - DNA, 110 bp, synthetic construct
  source 1..110: mol_type = other DNA
tatctgacaatggcatgtcatttcagagctaaaatctcctacttttttaggcctaagaagtacatcttgcattatcccaagtagggcttgacaaagtacatcttgcactc

SEQ ID NO: 60415 - DNA, 110 bp, synthetic construct
  source 1..110: mol_type = other DNA
gatgagcaaacaaccagcagatacatactcaccaagtatcacattggtagaatgggtgggagctggatttaaaccagttctacgattctatgtagtaatggagctacatg

SEQ ID NO: 60416 - DNA, 110 bp, synthetic construct
  source 1..110: mol_type = other DNA
taagatttttttccacacttagggaactaatatgtaagtcctgcagaggaggcatctccagcttacactgttcttcacaattttaaatcaacattaaaactgattctgat

SEQ ID NO: 60417 - DNA, 110 bp, synthetic construct
  source 1..110: mol_type = other DNA
tccaacttgccccttcaagtgctctactcacagtgccaagcaactgctggaggccccgccaagcttaccctttctaggtataaagccatgaaacagtgccaatatatttg

SEQ ID NO: 60418 - DNA, 110 bp, synthetic construct
  source 1..110: mol_type = other DNA
taagaaaatactgaattagtaaaattggagacaaggaaactagtcaagttcttcgtgtcactcagctgtcaaagtctaggacatgagtgttttgaaaatggtctttcctt

SEQ ID NO: 60419 - DNA, 110 bp, synthetic construct
  source 1..110: mol_type = other DNA
caagccatgggagattctacagttctaataccaagattcttcaacaaatacagctgacatcttgtctgattgcagcagacaggacttccaatactatgttaaaaagaagt

SEQ ID NO: 60420 - DNA, 110 bp, synthetic construct
  source 1..110: mol_type = other DNA
caagacttaattggtgccggtgtacagaggccgggtttcagctacaacatcaggaggcttggtctgggtccgtatttcacaaaatgtagtatatggatatatggaccatt

SEQ ID NO: 60421 - DNA, 110 bp, synthetic construct
  source 1..110: mol_type = other DNA
atctttagacatatagttacatttactgtacattttaaataaatggagttaggtgacatgctattttgggggactcctctctttaaatgatttactttgctcctcccaaa

SEQ ID NO: 60422 - DNA, 110 bp, synthetic construct; identical to SEQ ID NO: 60421
  source 1..110: mol_type = other DNA

SEQ ID NO: 60423 - DNA, 110 bp, synthetic construct
  source 1..110: mol_type = other DNA
gctccagtcaccatccaagagtgtctttgcttggatcacagctgtgcttcagcaatatcaggaatgtgggtgcgaaacgcctgcccgggtcaaggacaagatttccacac

SEQ ID NO: 60424 - DNA, 110 bp, synthetic construct
  source 1..110: mol_type = other DNA
caagattttttccttcagggccaactatgggataggctgatatccatgacccttttactttgagacatagctctacacctccatgctggtgccaatgacttaaggaaaag

SEQ ID NO: 60425 - DNA, 110 bp, synthetic construct
  source 1..110: mol_type = other DNA
tactttgagacatagctctacacctccatgctggtgccaatgacttaaggaaaagtccttttttgaggcaaaattttactgtaaatgtcactccatcagtgtaagtggct

SEQ ID NO: 60426 - DNA, 110 bp, synthetic construct; identical to SEQ ID NO: 60424
  source 1..110: mol_type = other DNA

SEQ ID NO: 60427 - DNA, 110 bp, synthetic construct; identical to SEQ ID NO: 60425
  source 1..110: mol_type = other DNA

SEQ ID NO: 60428 - DNA, 110 bp, synthetic construct
  source 1..110: mol_type = other DNA
gggccttgaaaggcgagggcaaatgagaactcatagagcttaggctatacccatacatgtattctagtaagtattttcaaaagaggacacacacagtcttgtatagactt

SEQ ID NO: 60429 - DNA, 110 bp, synthetic construct
  source 1..110: mol_type = other DNA
tcatactgttttggttcactaaagtattagcttctgaccactttcacatctacatccagagttcagttataggactggcctctgaattttaattctgatgggtgcaacat

SEQ ID NO: 60430 - DNA, 110 bp, synthetic construct
  source 1..110: mol_type = other DNA
cttttaccctcaccttcctataagatatttgcttgacataatgaccttgtagttccagagtggtggaatccacagcaagataactttctagtagcaaatgtaagcaggaa

SEQ ID NO: 60431 - DNA, 110 bp, synthetic construct
  source 1..110: mol_type = other DNA
cagagtggtggaatccacagcaagataactttctagtagcaaatgtaagcaggaaagcctatttgcttatttcctgccaccccatctgtttgtttgtttgtttgtttttt

SEQ ID NO: 60432 - DNA, 110 bp, synthetic construct
  source 1..110: mol_type = other DNA
cgtgtttattatcaatgtctgtggattagcaatgtattcatggcctagctaggtgcctctgctttaaggtctcttataggctacaatcgtggtgtcacctgaaggtccca

SEQ ID NO: 60433 - DNA, 110 bp, synthetic construct
  source 1..110: mol_type = other DNA
cctctgctttaaggtctcttataggctacaatcgtggtgtcacctgaaggtcccactgggaaaggatctacccaagttcacatggttgttgacagaattcagttcctagc

SEQ ID NO: 60434 - DNA, 110 bp, synthetic construct
  source 1..110: mol_type = other DNA
taaggtgggcacgtcccagcccctccactcctggctctgctttcattaagattttctatgtgaaatcagtctcacagctgaaagaaaggttggaaacccctgggctaacg

SEQ ID NO: 60435 - DNA, 110 bp, synthetic construct
  source 1..110: mol_type = other DNA
ctatgtgaaatcagtctcacagctgaaagaaaggttggaaacccctgggctaacggtatcttaaggtcctcccaggtccagagttctgtgaaaaaaacagaagtcagtgt

SEQ ID NO: 60436 - DNA, 110 bp, synthetic construct
  source 1..110: mol_type = other DNA
ccaccaggacctgtaacgtttgctgcctccgcacccttttctccttcaacaacatcaaactcggcagtctctccatctcctatactgtgaaggtacttcctggggttgtt

SEQ ID NO: 60437 - DNA, 110 bp, synthetic construct
  source 1..110: mol_type = other DNA
tcaacaacatcaaactcggcagtctctccatctcctatactgtgaaggtacttcctggggttgttattctttatggcagtctggtatacaaatacatcttccttggtgtc

SEQ ID NO: 60438 - DNA, 110 bp, synthetic construct
  source 1..110: mol_type = other DNA
ccatcacctttgccatatgctattgcctagaagcaagtcacagcttttgtttgcatgcagtgggaagggtttcttcaagggcctgaccagctgaaggtcgtctaaattct

SEQ ID NO: 60439 - DNA, 110 bp, synthetic construct
  source 1..110: mol_type = other DNA
tgcagtgggaagggtttcttcaagggcctgaccagctgaaggtcgtctaaattctgcctgcctcctgttacgtaacctctctgtgtctcattttcccatcagtaaaatgg

SEQ ID NO: 60440 - DNA, 110 bp, synthetic construct
  source 1..110: mol_type = other DNA
tgcttgatatgtttgcttcttacctctgacttttattcttaaacactctgagaagataatagctctggaggctccagtaagtgtgataaatctgcagagggaaccgtggc

SEQ ID NO: 60441 - DNA, 110 bp, synthetic construct
  source 1..110: mol_type = other DNA
ataatagctctggaggctccagtaagtgtgataaatctgcagagggaaccgtggcgtattctaaaacacctagcagacattccttccactttccctcccccacctccccc

SEQ ID NO: 60442 - DNA, 110 bp, synthetic construct
  source 1..110: mol_type = other DNA
ttatctcttccatatcaccataagaggctaaactgtatgtcatttgccttttttaaaaaaaaatcttctctttttacatttttcttgttatcttggatcgtgtccagtct

SEQ ID NO: 60443 - DNA, 110 bp, synthetic construct
  source 1..110: mol_type = other DNA
gaatgcactgccaaagccaaaaataatactccctggcatgtactcaaactaaattccaaatttaaaggttccagtatttttacagtgtattaatgagctttagcataaag

SEQ ID NO: 60444 - DNA, 110 bp, synthetic construct
  source 1..110: mol_type = other DNA
tttccaagtgtggatagtcccacagagctgcaagagaactaactgagagaggaaggatgtcaagtgcctcatattacccgagaagcatcaaggcactgcagcgcggccat

SEQ ID NO: 60445 - DNA, 110 bp, synthetic construct
  source 1..110: mol_type = other DNA
atagaaccaaacttgtgagcactaagatcttcatgattccccaagtgctccttgctgacattcattctatgttctgggcatctggagctgatctggctttgtttaatgac

SEQ ID NO: 60446 - DNA, 110 bp, synthetic construct
  source 1..110: mol_type = other DNA
cagataatgtagttatttcaggaggtacctacacattagcctctaaagctttgattctgaacagagggcagttttagcccccaggagtcatttgacaatgtctggacaca

SEQ ID NO: 60447 - DNA, 110 bp, synthetic construct
  source 1..110: mol_type = other DNA
ttaaactactcattacagggataaataacacaccactttatttaaaccgtttcctccatacatgtaaattccagcggaagtgccccagtatttgcaagcccggaggagag

SEQ ID NO: 60448 - DNA, 110 bp, synthetic construct
  source 1..110: mol_type = other DNA
ccatacatgtaaattccagcggaagtgccccagtatttgcaagcccggaggagagctgtttgggggcccgcagcctggtggtgcactgtctagattgctgctcaagctgg

SEQ ID NO: 60449 - DNA, 110 bp, synthetic construct
  source 1..110: mol_type = other DNA
ttctacataatgcccctgacactgtcccagtgtctggtacataccagatttcactatatggtagctgttgtaactatcaggtgctgtaagcccaagatgaaatgaagaac

SEQ ID NO: 60450 - DNA, 110 bp, synthetic construct
  source 1..110: mol_type = other DNA
tctagacagtggtcatcaaccgtgacaactatgtggagcgaccactgctgctacagaatacagccagcaaggagtatggtcagtatcaggaagagtatctcgctggcagc

SEQ ID NO: 60451 - DNA, 110 bp, synthetic construct
  source 1..110: mol_type = other DNA
atcttggcatgaattaacactggagcttgtcaaaagtataaataaccaaggtttagttactcatctcctgcaccaggctgctagcaccttgagaatatggaccatgcttg

SEQ ID NO: 60452 - DNA, 110 bp, synthetic construct; identical to SEQ ID NO: 60451
  source 1..110: mol_type = other DNA

SEQ ID NO: 60453 - DNA, 110 bp, synthetic construct
  source 1..110: mol_type = other DNA
ttgtgcgtctgtaatcattaagaaagaatacttaaatctagatttatatctgagtggcaaaaaggaaaatcagagaatcacaaaaataatattacactgccagggtagaa

SEQ ID NO: 60454 - DNA, 110 bp, synthetic construct
  source 1..110: mol_type = other DNA
actggacttggaaccacgtatcaactccaaatactatactcactcatttgtgactaaaagcaaagacgtttcatcgatactattcttcagagaatagaaccagatggaat

SEQ ID NO: 60455 - DNA, 110 bp, synthetic construct
  source 1..110: mol_type = other DNA
atcctatggagattgtgattttattttgattttatttttttaaacagacaacctagttaggctcaggccacaagttctgtttcaccctccccatacagatttcttttccg

SEQ ID NO: 60456 - DNA, 110 bp, synthetic construct
  source 1..110: mol_type = other DNA
ttgtaagtagaatctagtaaggtttggagaatgtcatcaattttttcttctgattgtctgcgtttctggattgccttatagaaaatattcttgatctctcgatgtgctct

SEQ ID NO: 60457 - DNA, 110 bp, synthetic construct
  source 1..110: mol_type = other DNA
gctttgaggaagagcacttgtgcttttgtttgaggtatgagttgaattacttatattttcataaaagagcattttaaactaacaacaacaaaaaaagatggttgttcaga

SEQ ID NO: 60458 - DNA, 110 bp, synthetic construct
  source 1..110: mol_type = other DNA
tttctggaagtggaattactatatcaaaaggtacaaatgtttcctcccttaatctactattatttcttaccagtgttgttctgtccagctttaacagccctgcaccactt

SEQ ID NO: 60459 - DNA, 110 bp, synthetic construct
  source 1..110: mol_type = other DNA
tccttaaatggaaaggattcgtagatcctccgctggaaggaactaccaaggtacagctcattctgcagtacccgttccccccgaagtttctacgacacatctccacctag

SEQ ID NO: 60460 - DNA, 110 bp, synthetic construct
  source 1..110: mol_type = other DNA
gctcattctgcagtacccgttccccccgaagtttctacgacacatctccacctagaaggctcacagagatacatgcaggagaagacaacctgccatgctatttccaactc

SEQ ID NO: 60461 - DNA, 110 bp, synthetic construct; identical to SEQ ID NO: 60459
  source 1..110: mol_type = other DNA

SEQ ID NO: 60462 - DNA, 110 bp, synthetic construct; identical to SEQ ID NO: 60460
  source 1..110: mol_type = other DNA

SEQ ID NO: 60463 - DNA, 110 bp, synthetic construct
  source 1..110: mol_type = other DNA
agtaggagtttgttaggctgagaaggcgaaagttagtttaagctgaaagacagtctaatggctttaaggcacaaaacctaatggtatgccatcgtttaaagcaagaggaa

SEQ ID NO: 60464 - DNA, 110 bp, synthetic construct
  source 1..110: mol_type = other DNA
taatggctttaaggcacaaaacctaatggtatgccatcgtttaaagcaagaggaaagaggtctatagaggcaaggtgacaggggtgtgtggctgagctggagatggagag

SEQ ID NO: 60465 - DNA, 110 bp, synthetic construct
  source 1..110: mol_type = other DNA
aatatgtgaacatctgaactaatgaataaggcccatctaaattttaaaaagcccgagtttaagtatatgtgccttgcttttatttgtgcatttataagcacttactacat

SEQ ID NO: 60466 - DNA, 110 bp, synthetic construct
  source 1..110: mol_type = other DNA
ctgagttttctgctattggcccatctgaactttctacaatgagaacctgtcaatttttaatagcaaaaaaagtcattttaaaaacaagaattataaaagcgatttttccc

SEQ ID NO: 60467 - DNA, 110 bp, synthetic construct
  source 1..110: mol_type = other DNA
gttggcttgttctgtccctaaagggcatccatctttccggacccctttcagggtaggcggggagaaaacagaactggcacagcagcgggggtgcctgcgcggatcacgtt

SEQ ID NO: 60468 - DNA, 110 bp, synthetic construct
  source 1..110: mol_type = other DNA
tccttaacccactgagccacaagggaactctaggaaatgacattttaaaatacctgaaacataatacatagtttgtaaaattatctatatagcagttaaaaatctgagac

SEQ ID NO: 60469 - DNA, 110 bp, synthetic construct
  source 1..110: mol_type = other DNA
tgcttaaaaggaaatgtaaatatcgaatatacatgcctgaaaagccagaggctgtaccataaatttgccaatttaaagtacagatcttgggtctaaaaaaaattgttttt

SEQ ID NO: 60470 - DNA, 110 bp, synthetic construct
  source 1..110: mol_type = other DNA
aaggcaagtcattttaatacctttgctccttagtttcctcatcagtgaaaatacgtgattaaaccagatgatgtttaagagcccttttagctttgatgttttatgctatc

SEQ ID NO: 60471 - DNA, 110 bp, synthetic construct
  source 1..110: mol_type = other DNA
gtaataatacttggggaaaaatgtagtgtttcttttagagaaagctttctgaagtcatttcagtatgtatctcctgagagtctggtacattggaggtgttcggtaaatgt

SEQ ID NO: 60472 - DNA, 110 bp, synthetic construct
  source 1..110: mol_type = other DNA
tggatgagatttctgggagggacacatttcaggaggaaatcatcacgctcagtttcatgtatgttaaatgcactgaaggtgagagagatcagagctagcatataaattct

SEQ ID NO: 60473 - DNA, 110 bp, synthetic construct
  source 1..110: mol_type = other DNA
catgtatgttaaatgcactgaaggtgagagagatcagagctagcatataaattctgagcttttggaatgtggatgggcatttaaaactgtgggagcaggtgaaatcatct

SEQ ID NO: 60474 - DNA, 110 bp, synthetic construct
  source 1..110: mol_type = other DNA
tctagtctttcaatttttttatcagtaaccaaaaggatttatgctttaaagaaaagacatttctatgctgcgggcatttctgtccagctactgcaagcagcatgtggcca

SEQ ID NO: 60475 - DNA, 110 bp, synthetic construct; identical to SEQ ID NO: 60474
  source 1..110: mol_type = other DNA

SEQ ID NO: 60476 - DNA, 110 bp, synthetic construct
  source 1..110: mol_type = other DNA
agattcactattttaatagctcctcttttccttgtggacattgtctgcacaattccatgtgaaagagcaataagaacaagctgccttgagctaccagaagaaaacagagt

SEQ ID NO: 60477 - DNA, 110 bp, synthetic construct
  source 1..110: mol_type = other DNA
acccacccctagagaccgtgccaccccggctccttcagccgctgcttgggggacagcaccacctgggagcctgtggagagggtctccagtgggcgaggtggtgaaagtga

SEQ ID NO: 60478 - DNA, 110 bp, synthetic construct
  source 1..110: mol_type = other DNA
caggaccagcaaggacgccgccctggcagaaagcctggagggcacctcagaccaccaccggtacactgcccgcttgatagcctgctaagagccatttgacagagggccac

SEQ ID NO: 60479 - DNA, 110 bp, synthetic construct
  source 1..110: mol_type = other DNA
ttcagtagagatcattatgagctacctcgggaccatcctgatactcaaggaactcaactgaggagagtcatctttttctttggattttgcatgattaaaatgatcacata

SEQ ID NO: 60480 - DNA, 110 bp, synthetic construct
  source 1..110: mol_type = other DNA
attagaaattttacatcctctgtcacagtatatttgatgcatgttacatgtggtagtccgtttcacagtgattgttttgggcaaatatttaagctgtttgttaattttat

SEQ ID NO: 60481 - DNA, 110 bp, synthetic construct
  source 1..110: mol_type = other DNA
atcgtagatgttaactaagacatgaagaccacactccctatttgaaaactgccgaaagaaatctattagaaggacatctccacccatgtgttcagcattttaaagagggg

SEQ ID NO: 60482 - DNA, 110 bp, synthetic construct
  source 1..110: mol_type = other DNA
aggatgtcagctgtgttctgatccttggatcctgtctcctttaaaaaagctggaggcagtgtctgctgagagctcttacctgaagtagggctatcagattagtctctgcc

SEQ ID NO: 60483 - DNA, 110 bp, synthetic construct
  source 1..110: mol_type = other DNA
tgtagggggagggaggagatggcacactggtccccagctcttgggtctgagtcaccccctctgtggctgtcagattctccttagcacagcaggatctccaacctagaatc

SEQ ID NO: 60484 - DNA, 110 bp, synthetic construct
  source 1..110: mol_type = other DNA
aatagataactaacacaactagcaaatcaatgaaaatatccaaagaaaacattcaggagtgtcacattcaggaatgtgcaagcttcttatattgaaggtacattaggaaa

SEQ ID NO: 60485 - DNA, 110 bp, synthetic construct
  source 1..110: mol_type = other DNA
taattgaaatccattaccttttagttggaattagaacaagatctatttattttcagtggattcttgcacatgttggaaattggacaaagcaaatgatgcctgtaactttt

SEQ ID NO: 60486 - DNA, 110 bp, synthetic construct
  source 1..110: mol_type = other DNA
gcaaatattttcccttgcctagaggcagggtttgaatacttagaaagagaactaatattttgattgttaatgatttagcctctaagggtaatgagccatcaaagtttatt

SEQ ID NO: 60487 - DNA, 110 bp, synthetic construct
  source 1..110: mol_type = other DNA
tattttgattgttaatgatttagcctctaagggtaatgagccatcaaagtttattatgaagggaaaaaaagggtggggataagtgcctgtgagaaagtctgaagagaagg

SEQ ID NO: 60488 - DNA, 110 bp, synthetic construct
  source 1..110: mol_type = other DNA
tcccatggtcactatctttgtttggctgctctaggaagcactatctgtagccccaaaggcagcggctgttctctagctgatgataaaaggcactatctgtagctgcaaaa

SEQ ID NO: 60489 - DNA, 110 bp, synthetic construct
  source 1..110: mol_type = other DNA
aggcgtcctcctacccaagctgttccctctgcctagacccttactttctcatttgttgaacaggctaatttgtacttatttaaaactcgtattagggagttcctggcatg

SEQ ID NO: 60490 - DNA, 110 bp, synthetic construct
  source 1..110: mol_type = other DNA
agcacacatgctagtgagtggccaccctgggatttctgtgcaattctcagtcttcaagtgctagtggatgtctcctacaaccttccactcccatccttatttcctgacat

SEQ ID NO: 60491 - DNA, 110 bp, synthetic construct
  source 1..110: mol_type = other DNA
ctgaatctaaaaagcaaccgacagcccatagctgcagccactacttctttgttcccaccattatggcggccaatatctccacaaaggccttaacgctgtctgtgaattct

SEQ ID NO: 60492 - DNA, 110 bp, synthetic construct
  source 1..110: mol_type = other DNA
atttgtagtgcacaccacagctcatgacaataataacaccggatccttacccattgagcgatgccaggggttgaacgcacatccttatagatactagtcagtttgaaacc

SEQ ID NO: 60493 - DNA, 110 bp, synthetic construct
  source 1..110: mol_type = other DNA
cttgctggagctgagtttaagagcatacctccatagctgcaatctagtaatcaggaagttagatttaaactgccgctgctgtggccacagttgcctcttaacaccagaaa

SEQ ID NO: 60494 - DNA, 110 bp, synthetic construct
  source 1..110: mol_type = other DNA
ggagctctaagtgagatgagctttggagtttgaaagagcctggccccatgttctcactgcaagaagtgatctgcatttatctcccccgctccctgtttctttgtttcttt

SEQ ID NO: 60495 - DNA, 110 bp, synthetic construct
  source 1..110: mol_type = other DNA
agccaaatcatgacgcatcctttgagttcacaaaatccaaccttcccctttaaaccctctccaaaggatttctccaagattatttctaggttgttcaaaacaaacagcat

SEQ ID NO: 60496 - DNA, 110 bp, synthetic construct
  source 1..110: mol_type = other DNA
accatcgtatccactaagacttgtgttttacttctgagctgtagtacaataagataataactttgtgttgttttaggccactaaatttttggtaaattgttactgcagta

SEQ ID NO: 60497 - DNA, 110 bp, synthetic construct
  source 1..110: mol_type = other DNA
ttataaactggtacaccaccagtttgacaccttctaatgaagaaaaagctaaatacagccaatgacccagtaattccactcacagatatagaacccagcagacctgccca

SEQ ID NO: 60498 - DNA, 110 bp, synthetic construct
  source 1..110: mol_type = other DNA
tttaggatccaaagttgaactcgtctctaagaaatcactcctggttagcccaactcacacagctcttcctcttgggatttctattaattcccctttttcaacctatatcc

SEQ ID NO: 60499 - DNA, 110 bp, synthetic construct
  source 1..110: mol_type = other DNA
agtagcacctcaagcaggggacagatgaggccacttggatctgaggagacttatgaggtgggtctggtacaggggtgacagcaaatggtgaaaaactaagcatgtctgga

SEQ ID NO: 60500 - DNA, 110 bp, synthetic construct
  source 1..110: mol_type = other DNA
ccagccctccctacacaaggtctgaaagtttaaggcagcttccaagtccctgcaccccaagctgggccttatgtccccactcaccgaagtccagcagctgctttatggac

SEQ ID NO: 60501 - DNA, 110 bp, synthetic construct
  source 1..110: mol_type = other DNA
ttggcaactgactacctctctgagtgttatggtttgaagtagagaagcttctagcctttctccacctgtggtacaatcctgagtaaattaaaaacaaagtaaccacaata

SEQ ID NO: 60502 - DNA, 110 bp, synthetic construct
  source 1..110: mol_type = other DNA
caagaagttggggcaagggggaaatgataaaatatttggaggacaattaggaaaatgagaatgccgactgggtatgagaagatataaaattgatgtcggtttttagatag

SEQ ID NO: 60503 - DNA, 110 bp, synthetic construct
  source 1..110: mol_type = other DNA
tgagaatgccgactgggtatgagaagatataaaattgatgtcggtttttagataggatagtgttattatgcttatttggaagaatgttcagggtgaggcagaatactaac

SEQ ID NO: 60504 - DNA, 110 bp, synthetic construct
  source 1..110: mol_type = other DNA
tcattcatcctcactccacccttatcctgtccccttttccccttttctagcgagaaggtacagcacttcatgtatccacagcttatggtttctaatgtctaaattgtgta

SEQ ID NO: 60505 - DNA, 110 bp, synthetic construct
  source 1..110: mol_type = other DNA
aaaacccttgtgtccgctctggtcatggaagagctacttgtccccttttattccgatagagaaataacaagggaaattgctaactattggtaaccttggtaactgttgat

SEQ ID NO: 60506 - DNA, 110 bp, synthetic construct
  source 1..110: mol_type = other DNA
tcgaagtagagcgcggcccgcaggccttctgaaagcctttgctgggtaatgcctgcgtttgcttctttggtagcagggcctccattttcaagtgtgatagtgaaatgaat

SEQ ID NO: 60507 - DNA, 110 bp, synthetic construct
  source 1..110: mol_type = other DNA
cgtttgcttctttggtagcagggcctccattttcaagtgtgatagtgaaatgaattttagaaacaaacaaggagcaccctctggtggtgaaattttaaaccaactgttct

SEQ ID NO: 60508 - DNA, 110 bp, synthetic construct
  source 1..110: mol_type = other DNA
agaacactggagagggagccggcagatctgagttctaacctgagctctgccactagctggctgtgtgaacttggggagacttacactgcacagatgccaccgtccattag

SEQ ID NO: 60509 - DNA, 110 bp, synthetic construct
  source 1..110: mol_type = other DNA
gctggctgtgtgaacttggggagacttacactgcacagatgccaccgtccattaggtggaaagactaaactaaatcattagtagggaagaggaagaggagaagaagaagg

SEQ ID NO: 60510 - DNA, 110 bp, synthetic construct
  source 1..110: mol_type = other DNA
tttgtcaaagattaattgaccataggtatctggatggctaacttttaatttgtgtttctaatatgccgagcactatgccaactgctctgaaggcataatcttattttacc

SEQ ID NO: 60511 - DNA, 110 bp, synthetic construct
  source 1..110: mol_type = other DNA
ttctaatatgccgagcactatgccaactgctctgaaggcataatcttattttaccctcataacatcaagtgaggcagccacagttactgttttcattttagagctcaaaa

SEQ ID NO: 60512 - DNA, 110 bp, synthetic construct
  source 1..110: mol_type = other DNA
tttccactctgtgtcctccattgtccctgttgtctcaacaacatggcagaagtataggtatgatgtaaagctaggttgaaaattaaaaagagactctgctgtcttcagag

SEQ ID NO: 60513 - DNA, 110 bp, synthetic construct
  source 1..110: mol_type = other DNA
ccaaaagtcactagcatccagcctgtgttttagtgagtagcacacagttttaaacataatttgagcttattataaagatagatagatagacagacagacagaaagactga

SEQ ID NO: 60514 - DNA, 110 bp, synthetic construct
  source 1..110: mol_type = other DNA
ataatttgagcttattataaagatagatagatagacagacagacagaaagactgatagactgaccaatcgatggatctgacagcctaggcctccttctgacatcatagca

SEQ ID NO: 60515 - DNA, 110 bp, synthetic construct
  source 1..110: mol_type = other DNA
tctttcacattaaaaaaaaaaaaaaagctataaatgatttttagaagtaactgcaactaatcatgaccagaacttgtcctctccacacacgagtcctggaaaactaaata

SEQ ID NO: 60516 - DNA, 110 bp, synthetic construct
  source 1..110: mol_type = other DNA
gagagtccacagagcagcactgcctgtgatctcaaagggatggggaagctgccgcgctggcttgaggtcaaactgtgtgtggtgacagggaaaggaatgtggactttggc

SEQ ID NO: 60517 - DNA, 110 bp, synthetic construct
  source 1..110: mol_type = other DNA
aagcactttgtaaactctaaagtggctacaaatgtaatgagtgtaaagaacttcgaaagctgtttaatttaccaaagctacacatttataccaattttactaaatcagtt

SEQ ID NO: 60518 - DNA, 110 bp, synthetic construct
  source 1..110: mol_type = other DNA
actttgtttcggtaactaactggggatgtagatttggggatatgtgaatttataggctatgcaaaaaccttaggagtcttttgtgtgggcagcaaacataatgcttagga

SEQ ID NO: 60519 - DNA, 110 bp, synthetic construct
  source 1..110: mol_type = other DNA
aaaagatgcagagtagatgatactgagctgtttacacccttcctcttgggtcccgtctttatcaaaaatccatcccatatgttcccactagatttattttgcttaaaaat

SEQ ID NO: 60520 - DNA, 110 bp, synthetic construct
  source 1..110: mol_type = other DNA
taatcttacttctatgtttgccatatgggcatctttactttttatgtaattaaaattaagagtttcctttacagcttctggtttgggtatcttgataagctttctatttc

SEQ ID NO: 60521 - DNA, 110 bp, synthetic construct
  source 1..110: mol_type = other DNA
cactgggaaaagctggaaaagtatacaatactctcggtgtatgtgctttaggctgtagctatggagacattaacaaagaggtcatatatttcaatctcggtgtgctttcc

SEQ ID NO: 60522 - DNA, 110 bp, synthetic construct
  source 1..110: mol_type = other DNA
attgaaaactaagacaggtgagacattcgaaactgcattaacatagtttaaaggctcaaaatgaataattacatctctgggtactaaaatcagagtcagcaattctgaga

SEQ ID NO: 60523 - DNA, 110 bp, synthetic construct
  source 1..110: mol_type = other DNA
tgcacttgactttcatgacaactttgggaagtacctacgtagttattgatgtgcccattttacatataagaaaactgtttaaggaaaaatttttaaaaacatacatgatg

SEQ ID NO: 60524 - DNA, 110 bp, synthetic construct
  source 1..110: mol_type = other DNA
gggaagtacctacgtagttattgatgtgcccattttacatataagaaaactgtttaaggaaaaatttttaaaaacatacatgatgctacaagaagagaaaattacaggcc

SEQ ID NO: 60525 - DNA, 110 bp, synthetic construct
  source 1..110: mol_type = other DNA
tatggctgtaaaaaggaaaaaaaaagaaatgaaaatgtgaggaaagctatcttactctcaactttataaacattgatgatatacctcattgtgtcttgcacaatggaaca

SEQ ID NO: 60526 - DNA, 110 bp, synthetic construct
  source 1..110: mol_type = other DNA
gtacagtgtcgagagcctgatttcagagtcaggcaaagagatgtgaaagctgtagaggccccaagccacaagaaagacagaaaaggaacagggaggggttctggctaaaa

SEQ ID NO: 60527 - DNA, 110 bp, synthetic construct
  source 1..110: mol_type = other DNA
gatgctgtggggcaggtgcacccaggtgcaggattgagatagcttcacctggccccctagaacccaaacctgctcactaaaacagactgcagaggtaggtcaagaaataa

SEQ ID NO: 60528 - DNA, 110 bp, synthetic construct
  source 1..110: mol_type = other DNA
gccagtgaaagatgaaacacagtctctaggaggatatttgagtgggaagatatcttagaagtagcattgccagatttaatgataaaacatgtaagagaacaacaaatata

SEQ ID NO: 60529 - DNA, 110 bp, synthetic construct
  source 1..110: mol_type = other DNA
ctaggaggatatttgagtgggaagatatcttagaagtagcattgccagatttaatgataaaacatgtaagagaacaacaaatataaacaggacactcagttaaatctgaa

SEQ ID NO: 60530 - DNA, 110 bp, synthetic construct; identical to SEQ ID NO: 60528
  source 1..110: mol_type = other DNA

SEQ ID NO: 60531 - DNA, 110 bp, synthetic construct; identical to SEQ ID NO: 60529
  source 1..110: mol_type = other DNA

SEQ ID NO: 60532 - DNA, 110 bp, synthetic construct
  source 1..110: mol_type = other DNA
caagatttttcctgttcatctatatttttgccccttttgattcactccaacttccccaacggcttcatttgataatagcttccaagattttcctttgtctcttgacttgc

SEQ ID NO: 60533 - DNA, 110 bp, synthetic construct
  source 1..110: mol_type = other DNA
cttttgtgcttatcacatgcatacaagctgctgctggttgggctcccaagaaattggactgaatgctgagatggatggagtgcagtgtggaggttgttcatttgggaatg

SEQ ID NO: 60534 - DNA, 110 bp, synthetic construct
  source 1..110: mol_type = other DNA
gggcacacagagacccagttgggtggcatgacatcacagtggagagagcaggcgccaggataaagtgttacaagcttgttaacatgacaagtatgcagtacccagctctt

SEQ ID NO: 60535 - DNA, 110 bp, synthetic construct
  source 1..110: mol_type = other DNA
tagatttaatagatatctccaggatattccatataaaacaagcagaatatattcttttcaagtgcacatggaacattctccagaataaatcacatgctgggccacaaaac

SEQ ID NO: 60536 - DNA, 110 bp, synthetic construct; identical to SEQ ID NO: 60535
  source 1..110: mol_type = other DNA

SEQ ID NO: 60537 - DNA, 110 bp, synthetic construct
  source 1..110: mol_type = other DNA
catctataagatgaaggttaaaaaaaagagtccacagcttttgtttaaatccattaaagcatcagattgttagacagctgaccaggtcttatgcttaatctgtgtgtttg

SEQ ID NO: 60538 - DNA, 110 bp, synthetic construct
  source 1..110: mol_type = other DNA
aaagcatcagattgttagacagctgaccaggtcttatgcttaatctgtgtgtttgggacaaaaggaaacatcttaaaacttgttttaaaatttttttatttccccactgt

SEQ ID NO: 60539 - DNA, 110 bp, synthetic construct
  source 1..110: mol_type = other DNA
agaacatggaggagaaagtagttggggctgcttggtagtataaaacttacaagttggacacagagaatcaaggatcctccccgaatgtgttattggaattgatgtatgac

SEQ ID NO: 60540 - DNA, 110 bp, synthetic construct
  source 1..110: mol_type = other DNA
ggacacagagaatcaaggatcctccccgaatgtgttattggaattgatgtatgaccttcagatttcacagtagaagaatggctaggcacccagccaattattcctagatc

SEQ ID NO: 60541 - DNA, 110 bp, synthetic construct
  source 1..110: mol_type = other DNA
gatcttgcttaaacaggagaatgaatgacacctgatacttacattacataattaaaggagaagcacacaccacctctttttatagctcctttccccataaatctattgca

SEQ ID NO: 60542 - DNA, 110 bp, synthetic construct
  source 1..110: mol_type = other DNA
aggagaagcacacaccacctctttttatagctcctttccccataaatctattgcattgcctatcttcacaaatgtttatcaaaaggcaaagatcgtgagaggaagaagag

SEQ ID NO: 60543 - DNA, 110 bp, synthetic construct
  source 1..110: mol_type = other DNA
aaggatctggtatcagtactagaggccttagtttgaatttagaccatcatgtaataattctttcagaacaacttcactttaaacctgaaattcaaaagtagactgggttg

SEQ ID NO: 60544 - DNA, 110 bp, synthetic construct
  source 1..110: mol_type = other DNA
catagtgatatagggacataagaagttttacacgaactaagtaggagagctcctcagctttaggaggatcaggggaggctttccagagaaattggcatctgagattagtt

SEQ ID NO: 60545 - DNA, 110 bp, synthetic construct
  source 1..110: mol_type = other DNA
agctttaggaggatcaggggaggctttccagagaaattggcatctgagattagtttaactgtgaaaagaaattatccaggtatgaaggaagacttagagaataatgcatt

SEQ ID NO: 60546 - DNA, 110 bp, synthetic construct; identical to SEQ ID NO: 60544
  source 1..110: mol_type = other DNA

SEQ ID NO: 60547 - DNA, 110 bp, synthetic construct; identical to SEQ ID NO: 60545
  source 1..110: mol_type = other DNA

SEQ ID NO: 60548 - DNA, 110 bp, synthetic construct
  source 1..110: mol_type = other DNA
aagcagaggcagaacatggagatggcctcctaagttctaggcccctagaggtgcgctaaattaggatcctgaccctcaggctgcagctttttcaagatgtgcaaatatcc

SEQ ID NO: 60549 - DNA, 110 bp, synthetic construct
  source 1..110: mol_type = other DNA
acctgttcgcaagaatggagctatcattatagatgtgtcaattggaaaaaaaacccaaaaaacaaaaacgcgtaacataaaagttgagaattatgttttattcagcaaac

SEQ ID NO: 60550 - DNA, 110 bp, synthetic construct
  source 1..110: mol_type = other DNA
actgctgagccacgatgggaatctccgagactgattcttaaatacacttccatatactaggaatccacagctctgaagcatggcccaggatccaaagtgtgtgtgtggtg

SEQ ID NO: 60551 - DNA, 110 bp, synthetic construct
  source 1..110: mol_type = other DNA
aagatgggtttatttttagatcaaagaaatagtcactgattttgcatcactccactgtcttaactggcttctaatgtagtttttgttcaacttaactgtttattagcttc

SEQ ID NO: 60552 - DNA, 110 bp, synthetic construct
  source 1..110: mol_type = other DNA
tgtcttaactggcttctaatgtagtttttgttcaacttaactgtttattagcttccttaaagatattctttcgaagtataatcagcctctgtttcagggttgcccatact

SEQ ID NO: 60553 - DNA, 110 bp, synthetic construct
  source 1..110: mol_type = other DNA
gttctgccaaacttaatagcacaggccattcctaagcaaccatccccccaccccaccccccacagctgctgccaggcagggccagctcccaccactgcctcctggctttc

SEQ ID NO: 60554 - DNA, 110 bp, synthetic construct
  source 1..110: mol_type = other DNA
attcataaataagtcctatcctgaatcaggaatgtcagctaaaaaggcaagtcaaaaagaggatggagaaggagtgtttaaatcccattagctctgcacttaaaccatct

SEQ ID NO: 60555 - DNA, 110 bp, synthetic construct
  source 1..110: mol_type = other DNA
aaagaggatggagaaggagtgtttaaatcccattagctctgcacttaaaccatctactcttgtccaattattttaccattagttgcctgtgcacccaaccaaagggaaag

SEQ ID NO: 60556 - DNA, 110 bp, synthetic construct
  source 1..110: mol_type = other DNA
ggatgtcaggtctggtgctcaggacagtgattcaagctggaggcagattcaagtaatgccagtgtacagttggctgttgaaacggggatggcagatgagattgcatctct

SEQ ID NO: 60557 - DNA, 110 bp, synthetic construct
  source 1..110: mol_type = other DNA
agagatggagagagtcctccatccacatcccaggaggaagagtagggagtcccaccaggaatagtgtcagcttcaaacatccaccaagaccagaggacccagtgccatct

SEQ ID NO: 60558 - DNA, 110 bp, synthetic construct
  source 1..110: mol_type = other DNA
caggaatagtgtcagcttcaaacatccaccaagaccagaggacccagtgccatctaagaatagaccagcccagaaagaacttccatgccctcccctacgtctcgcaccat

SEQ ID NO: 60559 - DNA, 110 bp, synthetic construct
  source 1..110: mol_type = other DNA
taaggctctgcctagagcactgaggacttgtgtgagctctttttacatatttttggttcagtatttgagacattctggccctaactgtcacatcagaagggatgctgagg

SEQ ID NO: 60560 - DNA, 110 bp, synthetic construct
  source 1..110: mol_type = other DNA
gcattgggcagaggtgtgatattgccagaactgaataatggtggccttttcacagttagtaggaaaaaaataagctgatggaatttcaagtatttaattcttaaattttt

SEQ ID NO: 60561 - DNA, 110 bp, synthetic construct
  source 1..110: mol_type = other DNA
gcagaaaatgcagatagactccaaagctaatcaatgcctggtacgtaatatgcactcactaatactgtgccttggttctgcttccagcaccattccagagactgtagcag

SEQ ID NO: 60562 - DNA, 110 bp, synthetic construct
  source 1..110: mol_type = other DNA
gagtttctcctttcaaccttcccttataccttgctgcttactcttctccacttctctcctctcccagttcaccagcagaatgcgatcatgatgacaggctcgtgacagcc

SEQ ID NO: 60563 - DNA, 110 bp, synthetic construct
  source 1..110: mol_type = other DNA
ctcctctcccagttcaccagcagaatgcgatcatgatgacaggctcgtgacagcccctttctcatcttcttatataacaatgtacctttttatcctagaagaggtggagg

SEQ ID NO: 60564 - DNA, 110 bp, synthetic construct
  source 1..110: mol_type = other DNA
ggccccagctggtgctccttgagtcattgacaagctgccagcatggctgggtctcctgaatattgactcggggcagctgtcccaagtcatcacactctagggaccatgga

SEQ ID NO: 60565 - DNA, 110 bp, synthetic construct
  source 1..110: mol_type = other DNA
cagtgatatttagcacattttcctgtactctaatttcccatttatatgtcttccgtagaaaatgtctattcagatcattggcccattttttaatatagttatttgtgggt

SEQ ID NO: 60566 - DNA, 110 bp, synthetic construct
  source 1..110: mol_type = other DNA
gggcaagccacaaaatctggacttcagtctgccacttatagttgagctttggcgcagttcacataggcagttgttataaaattctgtaattttgcaagatattgtggaaa

SEQ ID NO: 60567 - DNA, 110 bp, synthetic construct
  source 1..110: mol_type = other DNA
tgggcactccgtcagatgtggagtatctaagttgcttatgtgctctcaccctagcccgagacagtgggggtcccccaccactaagagttgcacctcacaccagcagcttc

SEQ ID NO: 60568 - DNA, 110 bp, synthetic construct
  source 1..110: mol_type = other DNA
ccgagacagtgggggtcccccaccactaagagttgcacctcacaccagcagcttctcacaggtgggacccatcctcctccaccccgcccctctctagcccccaccctgca

SEQ ID NO: 60569 - DNA, 110 bp, synthetic construct; identical to SEQ ID NO: 60567
  source 1..110: mol_type = other DNA

SEQ ID NO: 60570 - DNA, 110 bp, synthetic construct; identical to SEQ ID NO: 60568
  source 1..110: mol_type = other DNA

SEQ ID NO: 60571 - DNA, 110 bp, synthetic construct
  source 1..110: mol_type = other DNA
catttggaagtcaactaattataagtgtttttttcttcagtcactgcaagttctctgtgcagagagaatatatttgtactcatggccatgttaatttttaagctgctgcc

SEQ ID NO: 60572 - DNA, 110 bp, synthetic construct
  source 1..110: mol_type = other DNA
tgtgcagagagaatatatttgtactcatggccatgttaatttttaagctgctgccgccctagaggctgccgaggcagaagaggcagatactgggaaagcatggctcatga

SEQ ID NO: 60573 - DNA, 110 bp, synthetic construct
  source 1..110: mol_type = other DNA
tcataggtcactttatcacagtcactgtcattttaattgactaccctcttctatattctccagggagcttatgggaggaccatatcttgatttcgttaccccagaactga

SEQ ID NO: 60574 - DNA, 110 bp, synthetic construct
  source 1..110: mol_type = other DNA
cacattcttactttggggcataacaaggtgttctaattctttccctgccccaatttggaattcagctatttctccacagagccctgattccttttaatggagaacagggt

SEQ ID NO: 60575 - DNA, 110 bp, synthetic construct
  source 1..110: mol_type = other DNA
tggaattcagctatttctccacagagccctgattccttttaatggagaacagggtatatagaaacaaagatcttggctctatgtaggcccactgctactgggatgcaatt

SEQ ID NO: 60576 - DNA, 110 bp, synthetic construct
  source 1..110: mol_type = other DNA
cacaatatcagcaagagttttccaactcagatcctcctctcacttgacctttgactaagctccccttctttgatttctcaggaaacactctctattcctttgcatctttt

SEQ ID NO: 60577 - DNA, 110 bp, synthetic construct
  source 1..110: mol_type = other DNA
gtgctatatagtagatcctagctattcgttttaatatagtagtgtgtttacatgtaaacctcagactcctaatttatcgatcttaagtgcctgacaagtttctctcaaaa

SEQ ID NO: 60578 - DNA, 110 bp, synthetic construct; identical to SEQ ID NO: 60577
  source 1..110: mol_type = other DNA

SEQ ID NO: 60579 - DNA, 110 bp, synthetic construct
  source 1..110: mol_type = other DNA
catttttagtggattatcacagaaaggagtattatgtgtatattatagtaaagactagctttttttcctggtatgagtatagacaaaaacacaactcatgaactccctat

SEQ ID NO: 60580 - DNA, 110 bp, synthetic construct; identical to SEQ ID NO: 60579
  source 1..110: mol_type = other DNA

SEQ ID NO: 60581 - DNA, 110 bp, synthetic construct
  source 1..110: mol_type = other DNA
aaagattcctgaggaaaaagcatcccttcttagactgatatattttttgttttagtctttgctttgtagctgacagaactcacaagggtggttctttgacccagctccaa

SEQ ID NO: 60582 - DNA, 110 bp, synthetic construct; identical to SEQ ID NO: 60581
  source 1..110: mol_type = other DNA

SEQ ID NO: 60583 - DNA, 110 bp, synthetic construct
  source 1..110: mol_type = other DNA
ctaattggataaatgaataggataaggaactatttcttagtctagaaataaagtccatatatagatattcacgtctatatgagagaggaaaatggactcgggggaggtgg

SEQ ID NO: 60584 - DNA, 110 bp, synthetic construct
  source 1..110: mol_type = other DNA
aataatctaggaaaataaaatgccaagaaagttgtttgggagatccaaggggaagaaaccaaaattattcagattgttttttgcataggcagaaaaattcagctatctgt

SEQ ID NO: 60585 - DNA, 110 bp, synthetic construct
  source 1..110: mol_type = other DNA
aaaccaaaattattcagattgttttttgcataggcagaaaaattcagctatctgtgaaggcaagactctccactgtatcttttttgttgttgttgttctggaaattgacc

SEQ ID NO: 60586 - DNA, 110 bp, synthetic construct
  source 1..110: mol_type = other DNA
atgtctcaaaaatatcaagttattatttccttgggaatctgagcttctgttggctacaatgaatgattaattactactcagtatgttctcatatgccgttactgtgtata

SEQ ID NO: 60587 - DNA, 110 bp, synthetic construct
  source 1..110: mol_type = other DNA
atatcagtgcataaagttttaaagctatcgaataaataagtatggaggtcataatgtactaagtgttgggggtgtagaatgtgtggaaaagtcttctattttgatggtct

SEQ ID NO: 60588 - DNA, 110 bp, synthetic construct; identical to SEQ ID NO: 60587
  source 1..110: mol_type = other DNA

SEQ ID NO: 60589 - DNA, 110 bp, synthetic construct
  source 1..110: mol_type = other DNA
gttttattaaaaaacccagctgtccatctcactggttaccctttgatgatattcccttcctcattttcttttgcctctattgattttctctttattattggttcatagca

SEQ ID NO: 60590 - DNA, 110 bp, synthetic construct
  source 1..110: mol_type = other DNA
ttaccctttgatgatattcccttcctcattttcttttgcctctattgattttctctttattattggttcatagcagttttactgtgaaatatgtaccctagcggtttttt

SEQ ID NO: 60591 - DNA, 110 bp, synthetic construct
  source 1..110: mol_type = other DNA
aagtagaactgggctagtgtttcctctataattaatatttagtagcctttaaagtgaaaggaaccctacatttgatggagacacacaggagtaattatgggctttcaata

SEQ ID NO: 60592 - DNA, 110 bp, synthetic construct
  source 1..110: mol_type = other DNA
gaaaggaaccctacatttgatggagacacacaggagtaattatgggctttcaataaatgcctgaaagttcacaaattcctctgggagataaagtctctagaaaagcttgc

SEQ ID NO: 60593 - DNA, 110 bp, synthetic construct
  source 1..110: mol_type = other DNA
agaacaagcaaaggattcttagaagaggtagcctataaactgagggaataaataaaaataagtaatgtggtgttttaggaagtaaagagtcatcagccatgtcagatgca

SEQ ID NO: 60594 - DNA, 110 bp, synthetic construct
  source 1..110: mol_type = other DNA
tttatatttgcatcaaatatatgtcttagttggacatttggtatatggtcaagttggtattgcagatgtgtggggaaaatatagaattctcaataaatgttactgagaca

SEQ ID NO: 60595 - DNA, 110 bp, synthetic construct
  source 1..110: mol_type = other DNA
ggtattgcagatgtgtggggaaaatatagaattctcaataaatgttactgagacaaatagctgtccatttgagaataaaatttaaaagaacatggaagggaggaaggaag

SEQ ID NO: 60596 - DNA, 110 bp, synthetic construct
  source 1..110: mol_type = other DNA
acaaggcaattttagatgtagtaccttgaatcataaaaatgacagtctatactataacattctaaaggtttaaaacacagtttgggaatctgctgttaaggggatttcca

SEQ ID NO: 60597 - DNA, 110 bp, synthetic construct
  source 1..110: mol_type = other DNA
agggaagggttgagtacactccagaagcaaaactgatattgacaagcagtggccgtaagcttcacataaagtgaaagtcatacccatagaggtaaaaactggaaagtttt

SEQ ID NO: 60598 - DNA, 110 bp, synthetic construct
  source 1..110: mol_type = other DNA
ccgaaatgtacatttagagcacaaactcttatctgttgttatcagaaaagacattgaaaattactggtttaaaatcccactatgtcttatatcaaggatgccattttaaa

SEQ ID NO: 60599 - DNA, 110 bp, synthetic construct
  source 1..110: mol_type = other DNA
ttttttttggtcctttcagggccatacctgtggcatattgagtttcctgggctagatgtcaaattgaagctgtaactgccggcctctgcatagccacagcaatacaggat

SEQ ID NO: 60600 - DNA, 110 bp, synthetic construct
  source 1..110: mol_type = other DNA
tctatccagtctgggccatcaggctctactctttcttctcttctcacaaaggaacaaagctactccattcagacctcttaaacacatgcttcttattttctcatcacatt

SEQ ID NO: 60601 - DNA, 110 bp, synthetic construct
  source 1..110: mol_type = other DNA
tggcaaagagactgtggctgccattttaactccaagctcttgatgccaagcagaaagcaggcccagtattggcaaacattctaatcatgcaaaagaacctgtatataaag

SEQ ID NO: 60602 - DNA, 110 bp, synthetic construct
  source 1..110: mol_type = other DNA
atgcactttataaagaaaaataatggtgtttcttccacgattcaagagggtcatcagatcatatgtttaacatttagctagtatagatttatgcctgacctaggctatta

SEQ ID NO: 60603 - DNA, 110 bp, synthetic construct; identical to SEQ ID NO: 60602
  source 1..110: mol_type = other DNA

SEQ ID NO: 60604 - DNA, 110 bp, synthetic construct
  source 1..110: mol_type = other DNA
ttccttctgtgtaggccccagagagatctcaatgggacagctccaccattccttcacaagaagaagagaaatttatgcagtttatccatgcaataagagtccatggtttg

SEQ ID NO: 60605 - DNA, 110 bp, synthetic construct
  source 1..110: mol_type = other DNA
aagagttaagagaagcaacttggggtccagatgactgtacaaaagggcagtggatggtataatctgatgatatgagttttaaagctatggctatttaggggcaagaagag

SEQ ID NO: 60606 - DNA, 110 bp, synthetic construct
  source 1..110: mol_type = other DNA
agaacaaatcctggctgtcttgaagaaaagtctgtagtcagtatatttcacataatttgaaaagagtgattatcaacaaacccgatatttgaaaatattgaaatgccttt

SEQ ID NO: 60607 - DNA, 110 bp, synthetic construct
  source 1..110: mol_type = other DNA
tttgaaaagagtgattatcaacaaacccgatatttgaaaatattgaaatgcctttaaaagttctcggccatccaaagttgcagctgagggagttccggttgtggcacagc

SEQ ID NO: 60608 - DNA, 110 bp, synthetic construct
  source 1..110: mol_type = other DNA
agtatcttagattggaagccatttttgttgccctttctctcatttcgctaaagcagaaaataagtcaatttaaaacaccttcttcctttgatatacagcaaatatttctt

SEQ ID NO: 60609 - DNA, 110 bp, synthetic construct
  source 1..110: mol_type = other DNA
gctggtgggacagcatctccaagtgcctttgcaggtcatagttacaaagaaggaggctatagagtagatgctgcaacagaactctggccagaactgattacttgataggt

SEQ ID NO: 60610 - DNA, 110 bp, synthetic construct
  source 1..110: mol_type = other DNA
gatgtcatcaaaaatcgctctgtctttcagaaatatagtggacattgttctgcactttggttctggttttagctaggaagggatgactgttcacatgggatccatggcat

SEQ ID NO: 60611 - DNA, 110 bp, synthetic construct
  source 1..110: mol_type = other DNA
cctaccatggataaataatgaaaagaaaaggtggttgctgaggatggcagggcgggacagaaggatgtggagttggtggactaactctgatttgtctacctctgaactta

SEQ ID NO: 60612 - DNA, 110 bp, synthetic construct
  source 1..110: mol_type = other DNA
taaggaaagttgtgtggtcctaatacatgattaggttccaacttctacacctccatgtagcatgtcttaagggttagcatgaaatgggagtgaacatgctcaggaaatag

SEQ ID NO: 60613 - DNA, 110 bp, synthetic construct
  source 1..110: mol_type = other DNA
tgtagcatgtcttaagggttagcatgaaatgggagtgaacatgctcaggaaatagcagagagctgagggcagtgaggcagtagggttcttggaagaacatttctgcctgg

SEQ ID NO: 60614 - DNA, 110 bp, synthetic construct; identical to SEQ ID NO: 60612
  source 1..110: mol_type = other DNA

SEQ ID NO: 60615 - DNA, 110 bp, synthetic construct; identical to SEQ ID NO: 60613
  source 1..110: mol_type = other DNA

SEQ ID NO: 60616 - DNA, 110 bp, synthetic construct
  source 1..110: mol_type = other DNA
ttcctgcttatcataacactcatcctatctcaaggctctctcttgggagcaaatggcttattcatttagctattaaaagatgtaataagattggcctcagtatttttgat

SEQ ID NO: 60617 - DNA, 110 bp, synthetic construct
  source 1..110: mol_type = other DNA
taggttataacatacattactgtccaacctaactagacatatctcattcttttgcttgtcattgttcgcaagacaatttaggaggttttttttatctgtactacaaaata

SEQ ID NO: 60618 - DNA, 110 bp, synthetic construct; identical to SEQ ID NO: 60617
  source 1..110: mol_type = other DNA

SEQ ID NO: 60619 - DNA, 110 bp, synthetic construct
  source 1..110: mol_type = other DNA
atggtttctatttcctgcagccctctcaagcagaggctcttccattctcttacatgtttcatcagtggggtaggtgtcttgttcttgatatagcattgtttctttaaaca

SEQ ID NO: 60620 - DNA, 110 bp, synthetic construct
  source 1..110: mol_type = other DNA
atacactgttccaaaaaggcttgcaaccagctttcaaaatccacacatagcaaaatcattacataagaatgaatgaaggtggagttcctgccatggctcagtggaaacac

SEQ ID NO: 60621 - DNA, 110 bp, synthetic construct
  source 1..110: mol_type = other DNA
caggaagactagttaggaagaagctatgcaataatcctgacaagagatgatggtttgaatcaaaatagtaggagtgaaagtggtcatgtactacaggagtgggacacatt

SEQ ID NO: 60622 - DNA, 110 bp, synthetic construct
  source 1..110: mol_type = other DNA
gatggagatggcattagttcctcctctccttagcagacactgtattccctgcctgctaaacctgagctaatacttcagcattgtaaatcacagtccgaccccggtcaccc

SEQ ID NO: 60623 - DNA, 110 bp, synthetic construct
  source 1..110: mol_type = other DNA
tctgaaccatgcttataattcagggactagcaaaggaataagcccacatttgggacaaataatataatgcaagtttgacacactggcagctattccccaagaccctagaa

SEQ ID NO: 60624 - DNA, 110 bp, synthetic construct
  source 1..110: mol_type = other DNA
caaataatataatgcaagtttgacacactggcagctattccccaagaccctagaagaccttgctaactgttaatgccagttttaaccactaagtagagatgtagcctctc

SEQ ID NO: 60625 - DNA, 110 bp, synthetic construct
  source 1..110: mol_type = other DNA
ttttttccaaagtacctgaatgatttgtgtttgcctaatgctgtagggcaatgtacaaggcaagaaccatgagcttattgacttttttcaagataaaatatgcactcaac

SEQ ID NO: 60626 - DNA, 110 bp, synthetic construct
  source 1..110: mol_type = other DNA
acttctgaagaaaaaagtaaaacacaaacaacactcctctcttaagctattatacttcttggcagaatgtggtttaaaatgtacatattcaactgtctttacagctccct

SEQ ID NO: 60627 - DNA, 110 bp, synthetic construct; identical to SEQ ID NO: 60626
  source 1..110: mol_type = other DNA

SEQ ID NO: 60628 - DNA, 110 bp, synthetic construct
  source 1..110: mol_type = other DNA
aggtttaaacaaccaattcacatatgacacgtaaatattacattttaacttggtgtcataatcggcagcctaatggataagagattaattaaaacattccacacaacact

SEQ ID NO: 60629 - DNA, 110 bp, synthetic construct; identical to SEQ ID NO: 60628
  source 1..110: mol_type = other DNA

SEQ ID NO: 60630 - DNA, 110 bp, synthetic construct
  source 1..110: mol_type = other DNA
tccccccaaaaggggcgaacttagacttctacaggacaatagataattatttgaaattcatagctctaatcactactgaaaacataattttggtgatgaacatagtttga

SEQ ID NO: 60631 - DNA, 110 bp, synthetic construct
  source 1..110: mol_type = other DNA
gctgagcctcccaaggacccaggcaggagagcgtgtgcaaatacgcaatgcctggcagtctcttactcgtatgtcactttcccgtttcatttacaactctcctctttcca

SEQ ID NO: 60632 - DNA, 110 bp, synthetic construct
  source 1..110: mol_type = other DNA
cagtctcttactcgtatgtcactttcccgtttcatttacaactctcctctttccaatttttaatctttaattaaaattatctttaatctctgatgaagatgaggagataa

SEQ ID NO: 60633 - DNA, 110 bp, synthetic construct
  source 1..110: mol_type = other DNA
tgtcccaggggactgtggatagagaagcatttcccaaagaacaaaggcaggagaccaaaaggacaatggataaaggagtttctcagagagaaggccaggatttcatcaag

SEQ ID NO: 60634 - DNA, 110 bp, synthetic construct
  source 1..110: mol_type = other DNA
caaaaggacaatggataaaggagtttctcagagagaaggccaggatttcatcaaggaacttaatccaatgacagtgagtagagtctgtaatttttacccagaaagatttc

SEQ ID NO: 60635 - DNA, 110 bp, synthetic construct
  source 1..110: mol_type = other DNA
acatttgttaccctgctgtgcctgtggccgttgcctgtggggagggagtgcctgttgtaaaccagaatcaaacctgcagtttgccttccatccaggggtcctcatagccc

SEQ ID NO: 60636 - DNA, 110 bp, synthetic construct
  source 1..110: mol_type = other DNA
tgaacttccctccctttcacatttccaacatcctctttatcctttctcacattgtccccactgtcacagagaagagctaacttcaggaagcttcttggcctaggtggaag

SEQ ID NO: 60637 - DNA, 110 bp, synthetic construct
  source 1..110: mol_type = other DNA
agaatatatgtgggtttcttgtcaattttaactttttaaattatattcttcctcttgtgttagaaattctacaaccctttcagtgtgcattgtggtggttttcaagttct

SEQ ID NO: 60638 - DNA, 110 bp, synthetic construct
  source 1..110: mol_type = other DNA
agaataggaagatagaaagtgtgtggaggggagaggaagggcaggcattgctgttttaaatgagtgaactagaaaaagctttgcacttcagaaagaggttatttgtgtaa

SEQ ID NO: 60639 - DNA, 110 bp, synthetic construct
  source 1..110: mol_type = other DNA
atctgtcttgataacctatcaagtaccacattccctctagggcacatttctactttgcttatctagctcctcttcaggtctttgctgtcaagtggaattttggctgccat

SEQ ID NO: 60640 - DNA, 110 bp, synthetic construct
  source 1..110: mol_type = other DNA
cttaatatcagtttcctggacaatcagttcacaaagtcatgtgaagctgattagaattcactgcagtggaggccacaaccatgacagccttagcagtttctcaggaagga

SEQ ID NO: 60641 - DNA, 110 bp, synthetic construct
  source 1..110: mol_type = other DNA
ggccttcacagggccactggtaggggccctgcagcttgtacctttctccagatgggtagcctgcagctatggcagggaacatgcacttacatccctctcttgactctttc

SEQ ID NO: 60642 - DNA, 110 bp, synthetic construct
  source 1..110: mol_type = other DNA
caaaaaaattttgatttctgtatcttatttatctatttatttatttatggctgccccacaggatatggaactcccatgcaagggattagatctgagctgcagtctcaacc

SEQ ID NO: 60643 - DNA, 110 bp, synthetic construct
  source 1..110: mol_type = other DNA
ccacaggatatggaactcccatgcaagggattagatctgagctgcagtctcaacctaaactggagcattgctggatcctttacccactatgcttggttagagatctaacc

SEQ ID NO: 60644 - DNA, 110 bp, synthetic construct
  source 1..110: mol_type = other DNA
tgcatagtatttgcaagtgttttgaaaatgatgtaaaagctttcattgttgagtcacaaccatgtcgtataccttcagaactgagtaactaagacatatgtctagtgtga

SEQ ID NO: 60645 - DNA, 110 bp, synthetic construct
  source 1..110: mol_type = other DNA
gtgagtttaggattaattctcattgtggttttacttaatctgatttgtaaaatcctattcattttccagtactagcttcacatgtcactatttccatgaattgtgttttg

SEQ ID NO: 60646 - DNA, 110 bp, synthetic construct
  source 1..110: mol_type = other DNA
acttccacacatcctttcttggtttatttcttttttatcatttgggaatgtcagatgttaaacttcttgagaacatatttgaagatgattaactttgtgttctccacaat

SEQ ID NO: 60647 - DNA, 110 bp, synthetic construct
  source 1..110: mol_type = other DNA
tattattcaatttaatttaaaaaatcatgcttgactatgcaacagtaaacccagaaaccacactcagggcctggctatcagagttcttgataattcttccagttcaatag

SEQ ID NO: 60648 - DNA, 110 bp, synthetic construct; identical to SEQ ID NO: 60647
  source 1..110: mol_type = other DNA

SEQ ID NO: 60649 - DNA, 110 bp, synthetic construct
  source 1..110: mol_type = other DNA
tgaaatgctagagggagggaaaaagaagcagtgcccggtgagggagtagcagacgaaagaaaaggacatgatcagcctcaccgatttggtacggtatgttacctccacat

SEQ ID NO: 60650 - DNA, 110 bp, synthetic construct
  source 1..110: mol_type = other DNA
atagcaatgaaacaaaaaaaaaaaaagtatgtcacgtggacaggatcattaaagtcagcactggggcttttgggaaatggcgatttaccttacagtctagaaagacagaa

SEQ ID NO: 60651 - DNA, 110 bp, synthetic construct
  source 1..110: mol_type = other DNA
actcaaatttttacttgaaattggtaaactgtcctgggaatatctctatgaaatactggatctttgctctcttagtagttaagaagtcttatgctttaaaactttcaaca

SEQ ID NO: 60652 - DNA, 110 bp, synthetic construct
  source 1..110: mol_type = other DNA
ctatgaaatactggatctttgctctcttagtagttaagaagtcttatgctttaaaactttcaacaatacagtagttgcctcttgaggaaaagcttagaatttaatttcta

SEQ ID NO: 60653 - DNA, 110 bp, synthetic construct
  source 1..110: mol_type = other DNA
atgtggatatatgttcagagtcactgttcaaatgctttctgaacgtgtttaacagcagcatttatttacagatatagcggtccataatctatcagatggcaccggtgcca

SEQ ID NO: 60654 - DNA, 110 bp, synthetic construct
  source 1..110: mol_type = other DNA
cagcatttatttacagatatagcggtccataatctatcagatggcaccggtgccactagcttcagggacttgaaggttttcttggcagtgttccagaacactatatcagt

SEQ ID NO: 60655 - DNA, 110 bp, synthetic construct
  source 1..110: mol_type = other DNA
ctactgtagtggtgcctagaataaggtagtgaaatgtagagcagggaagccagacatggagggcatgtagaaactgcaccataaacagtttttctttaagatgtatagct

SEQ ID NO: 60656 - DNA, 110 bp, synthetic construct
  source 1..110: mol_type = other DNA
atggagggcatgtagaaactgcaccataaacagtttttctttaagatgtatagctctgggagacaaaaaaaatcactgaacattatcactggtaacttcatttttattta

SEQ ID NO: 60657 - DNA, 110 bp, synthetic construct
  source 1..110: mol_type = other DNA
atgcctaagaattttgaactttgttatgcaacagggaatcctaaagtttctgatcatgataatgacctttagctaaatatttaacaatgtacttgcgatgtgtatggcac

SEQ ID NO: 60658 - DNA, 110 bp, synthetic construct
  source 1..110: mol_type = other DNA
gattgctgagtcataaggtattgatctattgaattgtttttaattgcttttttgagtcacttctgcagcatatggatattcccagaataggggtcaaattggagcctcag

SEQ ID NO: 60659 - DNA, 110 bp, synthetic construct
  source 1..110: mol_type = other DNA
gtttttaattgcttttttgagtcacttctgcagcatatggatattcccagaataggggtcaaattggagcctcagctgccatcctaagccacagccacagcaacagagga

SEQ ID NO: 60660 - DNA, 110 bp, synthetic construct
  source 1..110: mol_type = other DNA
ggattcaaaaaaaaagatgaaaaagaaaggggccttctagaatttagctagccattaaatcattcatatacctactggattaagttcagtgacatcccattcaaggtact

SEQ ID NO: 60661 - DNA, 110 bp, synthetic construct
  source 1..110: mol_type = other DNA
gccacatgatatccaaagccatgagagttaaactagctacacttaagaaaaattacagttaggaatattcagaatgtttacctgattttcactgaaaatttgtcttttta

SEQ ID NO: 60662 - DNA, 110 bp, synthetic construct
  source 1..110: mol_type = other DNA
agaaaagtgattgcactctaaaaactcaaggacagtataaggacactgaataggaatcagtagccagtgaaggagtttttcataggataaagacttgatgaagataataa

SEQ ID NO: 60663 - DNA, 110 bp, synthetic construct
  source 1..110: mol_type = other DNA
atcagtagccagtgaaggagtttttcataggataaagacttgatgaagataataattgcggggaaaacaggaaagtaccacaggaaactacaaaatggaagtaaagcatg

SEQ ID NO: 60664 - DNA, 110 bp, synthetic construct; identical to SEQ ID NO: 60662
  source 1..110: mol_type = other DNA

SEQ ID NO: 60665 - DNA, 110 bp, synthetic construct; identical to SEQ ID NO: 60663
  source 1..110: mol_type = other DNA

SEQ ID NO: 60666 - DNA, 110 bp, synthetic construct
  source 1..110: mol_type = other DNA
ttcaattcctggtctgggaactaagatcccacatcaaaccactgtactcagtggccaaataaataaataaagaggctcgggcgctactgtgaaggcagtaagaaacaagg

SEQ ID NO: 60667 - DNA, 110 bp, synthetic construct
  source 1..110: mol_type = other DNA
caaataaataaataaagaggctcgggcgctactgtgaaggcagtaagaaacaaggaaagaactgcaaaaaagggcagaaaccaatcactcttggaaaatgaaattttgga

SEQ ID NO: 60668 - DNA, 110 bp, synthetic construct
  source 1..110: mol_type = other DNA
taccagacacctggagttcaacaaagctactgtgatgacaaccaaggggcatttaggtggcatgttgaaacctggccggggattagggtaaaagaagtgagggaatgtgg

SEQ ID NO: 60669 - DNA, 110 bp, synthetic construct
  source 1..110: mol_type = other DNA
gctgagcagctggagtcaagttaatgtacttacatgatcatacaatagtatgtaataataatatatgttattgtatccataatatccacagaagaaaaacactcctgcag

SEQ ID NO: 60670 - DNA, 110 bp, synthetic construct; identical to SEQ ID NO: 60669
  source 1..110: mol_type = other DNA

SEQ ID NO: 60671 - DNA, 110 bp, synthetic construct
  source 1..110: mol_type = other DNA
gaacctagatttacctgatcaattaaataaatattaaaatcactacattaaattccaggtagctaggaaaaatgctcgtgattaccttaatagatgtctgtctctaagga

SEQ ID NO: 60672 - DNA, 110 bp, synthetic construct
  source 1..110: mol_type = other DNA
gtgtctttcaaatagctcattgttcacttacctgactccagcacagatatcatttaccttgaaaggtacttcacccattgagtatcaatagataggctccaactccagtt

SEQ ID NO: 60673 - DNA, 110 bp, synthetic construct
  source 1..110: mol_type = other DNA
aaaaccacaatcaaaaggataaggaattcttcaaaattccaaagtttggggccttgacaaaacactggctgagagccctaaaacctggattctcatcctttctgtcatga

SEQ ID NO: 60674 - DNA, 110 bp, synthetic construct
  source 1..110: mol_type = other DNA
ttttttagtgttggcctatgaccgatggctatccatagtgtcaatgtcatttggcactaagctgagaagagtctgtattgatcatggctgcagagtttcaaagagagaag

SEQ ID NO: 60675 - DNA, 110 bp, synthetic construct
  source 1..110: mol_type = other DNA
agcaggaactcctcctttatcaaatattaattgatcatatatgttcaagtttatttctgaactcttatgttcagttggtctaattgccagtaccatgaggttttgatgac

SEQ ID NO: 60676 - DNA, 110 bp, synthetic construct
  source 1..110: mol_type = other DNA
tctgaactcttatgttcagttggtctaattgccagtaccatgaggttttgatgactatagctttacagtataatgtgatattttgtggttggacataaattttaagtcaa

SEQ ID NO: 60677 - DNA, 110 bp, synthetic construct
  source 1..110: mol_type = other DNA
gaacaccaaaaaactactggaagctgtggaactgattcttcctcacagctctcagaaggaaccaaccccccagccccccatatcttgactttaaatttctagcctctaca

SEQ ID NO: 60678 - DNA, 110 bp, synthetic construct
  source 1..110: mol_type = other DNA
ggagtagagaatgacatataattggtttacaaatatttgttcactgattgagtgaactgaattgaattgactactgaccaaagagtcattgattacagactactggaaaa

SEQ ID NO: 60679 - DNA, 110 bp, synthetic construct
  source 1..110: mol_type = other DNA
accttggacatctggaatgttcaaagcaaattcatcttctacatcttcactccagaggcaccttgaatataaatgtctcatagtttgctcttgatagcaatttaattttc

SEQ ID NO: 60680 - DNA, 110 bp, synthetic construct
  source 1..110: mol_type = other DNA
gatgggccaccgtgagtgcacagcccacagcctggggtaacacagcctcgaggcctacctggtgcaaaaccgttctcatccctgctgcgcctgcgcaccttctccagcgc

SEQ ID NO: 60681 - DNA, 110 bp, synthetic construct
  source 1..110: mol_type = other DNA
tacctggtgcaaaaccgttctcatccctgctgcgcctgcgcaccttctccagcgcccggaccgccatcttccgctcccacttccgatgcaagggagcggttacggggaga

SEQ ID NO: 60682 - DNA, 110 bp, synthetic construct
  source 1..110: mol_type = other DNA
ggtaaccagaaaggccatgattacagcactaggtcttatatgtgggccttttccctattaactcattcagaaagtgttgtcaaggagttggttcaggttcaagaatgaac

SEQ ID NO: 60683 - DNA, 110 bp, synthetic construct
  source 1..110: mol_type = other DNA
atagggccctgcccagttacaaatggatgacctcttgttctcctgtgcctccattgcttgaccagtgcctgcttcacttataccctcctcataggattgaccttcctacc

SEQ ID NO: 60684 - DNA, 110 bp, synthetic construct
  source 1..110: mol_type = other DNA
ttacattcatctcagtctcacttgctgtaacatacttgaaactgagtcaatatcactctcattctagctttctgtcttggaagcatgacctgctaacaccatagcatttt

SEQ ID NO: 60685 - DNA, 110 bp, synthetic construct
  source 1..110: mol_type = other DNA
tagatgtccacaaaaattattaacataaagcttgactcggcgcaattaactaaattgtcttctttgcaaaaaagcaaattaaaatctaagaaggagatcttattgtgacg

SEQ ID NO: 60686 - DNA, 110 bp, synthetic construct
  source 1..110: mol_type = other DNA
atttcagaaagggaataaaaaagatgtaagtacttagctcgttttctgaccagaagtggtccaacccaacttttactagcagtggtccacaagtccctgcctctctgacc

SEQ ID NO: 60687 - DNA, 110 bp, synthetic construct
  source 1..110: mol_type = other DNA
ggtgatcaatatgtacagataaactaagagattaaaatactcttgcccaggttgtctaagatgggctatccagcttggaataaaggcccaaggtccaagttgtttacaca

SEQ ID NO: 60688 - DNA, 110 bp, synthetic construct
  source 1..110: mol_type = other DNA
accaggctcaaaaaactgtgaatgaactacttgcctttaaggtagttcaacctacagccaggggttctcctagctgggacctgaaagctaataactatcagctgttacaa

SEQ ID NO: 60689 - DNA, 110 bp, synthetic construct
  source 1..110: mol_type = other DNA
tggtttaagttatcaccatacatggttaaatgcgacatgttttgtgtcctcaaggaactcaagtctaaaaggggaggctgatctatagtaaatattttgcaaaagaatgt

SEQ ID NO: 60690 - DNA, 110 bp, synthetic construct
  source 1..110: mol_type = other DNA
aactcaagtctaaaaggggaggctgatctatagtaaatattttgcaaaagaatgtgacagacacggcattcgaagatgaacaggagataaaatacttaattctaagagtc

SEQ ID NO: 60691 - DNA, 110 bp, synthetic construct
  source 1..110: mol_type = other DNA
ggagtttagtgtcattaaatgcttcagttttaatacaatgttccccaaccccccccccactacactacagccattagaaaataatgtagtcatcctctttttaacatata

SEQ ID NO: 60692 - DNA, 110 bp, synthetic construct
  source 1..110: mol_type = other DNA
aagaaagaagatcaatgattacaatttttaaccataaaaaggctcatattgttcagtcaatagcattcggaggaaaagtagacgcctcatgggatcctagatcaccattt

SEQ ID NO: 60693 - DNA, 110 bp, synthetic construct
  source 1..110: mol_type = other DNA
gtcaatagcattcggaggaaaagtagacgcctcatgggatcctagatcaccatttaagcaaaaaccagcccagagagtaccttcaggtatttttttaagaagaaaaaaat

SEQ ID NO: 60694 - DNA, 110 bp, synthetic construct
  source 1..110: mol_type = other DNA
ttgcagttggttagtttgttgctaattggaattgctgcctggggcattggctttgggctgatttccagtctccgagtggtcggcgtggtcatcgcagtgggaatcttctt

SEQ ID NO: 60695 - DNA, 110 bp, synthetic construct
  source 1..110: mol_type = other DNA
gaaactactgagccagaagagcaagctgcctgggacttggttcttccgcccaaagaagttggatggagtttaaaaggcccttagacaggaatgctgtgaaaagaataccc

SEQ ID NO: 60696 - DNA, 110 bp, synthetic construct
  source 1..110: mol_type = other DNA
agctttgtgatatttctttagaagaaaaaaattgctttcgaattagagaagtttgcacaacagagactctggagttgcaattcactcttagtgattttctcatctgtttt

SEQ ID NO: 60697 - DNA, 110 bp, synthetic construct
  source 1..110: mol_type = other DNA
attattcattgaaacttggacatgtttggtattgtatgagaattttattttattttttaaatgttctgttttagctgttgtcctctgactccactttgatagagccagga

SEQ ID NO: 60698 - DNA, 110 bp, synthetic construct
  source 1..110: mol_type = other DNA
cactttgaaagcagaactgcagtgggcacattgaagcatttcatgaaatattgcttagctgcctctttttagaaaattcagatgcagagatacatttttggcatgtggca

SEQ ID NO: 60699 - DNA, 110 bp, synthetic construct
  source 1..110: mol_type = other DNA
tggtctggggtgaaattcaggaatctgcattgtaacaggtagctcaggtgatttggactctagttatctattgatctcagtaagggaaactgtcttagactctgcacttc

SEQ ID NO: 60700 - DNA, 110 bp, synthetic construct
  source 1..110: mol_type = other DNA
aatgtgtagagatggtagcaggtttgagagagtagtagacaggatacaggagcggatttgtattttcagccaccttttgggggagctttcttataactttggaggtggtt

SEQ ID NO: 60701 - DNA, 110 bp, synthetic construct
  source 1..110: mol_type = other DNA
atccatgggtttctcaacctcagctccaccacgagtttgggactggttgttcctggtatggaaagctgtcttatgcactgtagcatgttagcagcatctctgggctctgg

SEQ ID NO: 60702 - DNA, 110 bp, synthetic construct
  source 1..110: mol_type = other DNA
tcctttcttgtccaaatcaaatcaagctacaatagactattttgagttcattcgctcacatccctcccctcttctctcctattactcaacatctacacaatataagtgaa

SEQ ID NO: 60703 - DNA, 110 bp, synthetic construct
  source 1..110: mol_type = other DNA
agataaatacagagggtcagagactgagaagctgggaattaggcagggtaaggctggaagtctatgattggcacatacttgcctggcacccaagtaaccagcagaccaaa

SEQ ID NO: 60704 - DNA, 110 bp, synthetic construct
  source 1..110: mol_type = other DNA
accctgaggacaaacacacaggtgacagccattcttgggagctgcttctactatatggacactgatgctggtgggcacaatggtggaattctgtctctggatcattagca

SEQ ID NO: 60705 - DNA, 110 bp, synthetic construct
  source 1..110: mol_type = other DNA
aaagaaagaaactagaacttttttgtaggatccaaggttcccagctccttgatgctaaaccagaccagtgaaagctaagaaatgaaacatgtttttttttgtttgtttgt

SEQ ID NO: 60706 - DNA, 110 bp, synthetic construct
  source 1..110: mol_type = other DNA
ccttggtctgtaacccagaaatctcatatcttctgccaaaatccatgaaacagacagactaagtgatgatcttgtagctagggtaaaccatccataattcacattagaat

SEQ ID NO: 60707 - DNA, 110 bp, synthetic construct
  source 1..110: mol_type = other DNA
agaaagtttaactaacttttaggaagtcatggagctggttaaatagaatagcctgtagagcccctgaggctgcagcaatgggaatagaccagagcatgtaccaaggctac

SEQ ID NO: 60708 - DNA, 110 bp, synthetic construct
  source 1..110: mol_type = other DNA
gtcataaaagttttttccaagctcctatctcagagacccaagtgagaaaggaaagcatttataacaggatagcatcactgtatatcaacatgtactcaacatgtgagtac

SEQ ID NO: 60709 - DNA, 110 bp, synthetic construct
  source 1..110: mol_type = other DNA
catttataacaggatagcatcactgtatatcaacatgtactcaacatgtgagtacaaaggaaggaggcagtcacctcaccctgggaagaagcagcaaacagaccaggtat

SEQ ID NO: 60710 - DNA, 110 bp, synthetic construct
  source 1..110: mol_type = other DNA
ttttcagcaaagaataatgatgagaaatcattacccaatggatgggtgaggtggttcaacccagggagggccttggaaggaacagtgggtccaactgtatgggtacaggt

SEQ ID NO: 60711 - DNA, 110 bp, synthetic construct
  source 1..110: mol_type = other DNA
tcaacccagggagggccttggaaggaacagtgggtccaactgtatgggtacaggtgtagggtggcaatgctaccagcagtaatatcccaggtagatcatcctgtggcaga

SEQ ID NO: 60712 - DNA, 110 bp, synthetic construct; identical to SEQ ID NO: 60710
  source 1..110: mol_type = other DNA

SEQ ID NO: 60713 - DNA, 110 bp, synthetic construct; identical to SEQ ID NO: 60711
  source 1..110: mol_type = other DNA

SEQ ID NO: 60714 - DNA, 110 bp, synthetic construct
  source 1..110: mol_type = other DNA
tggcctgagaatgagattacataaattgcttcaccggttccagctcatcatcagtaacactcacacacacacacaaacatgtaaagagcaatggcctagcacacatgttt

SEQ ID NO: 60715 - DNA, 110 bp, synthetic construct
  source 1..110: mol_type = other DNA
agcctgccttattatcagaaacataagctaataaacacaaaagacatgcaaaagttcaacttcagagtttttcctttttgcagcacttctgccattgaaacactgaaatt

SEQ ID NO: 60716 - DNA, 110 bp, synthetic construct
  source 1..110: mol_type = other DNA
tcaacttcagagtttttcctttttgcagcacttctgccattgaaacactgaaattttcctgggtatactgaagcaacagggaaacaataatggtataataaagccagatg

SEQ ID NO: 60717 - DNA, 110 bp, synthetic construct
  source 1..110: mol_type = other DNA
gaatggcttaatcctagcaaaggactttataccctctcctcaaagaaagaagagccaggtgggctattgtgctcactcatttttggtctttggatttgagcaatacaaaa

SEQ ID NO: 60718 - DNA, 110 bp, synthetic construct
  source 1..110: mol_type = other DNA
aaccacctcacttttttatctgaaaggtgacagcgtacttattatggtccatttcataaatactcacaaatagacttcttcatacctgggtgtggctatttggagacaca

SEQ ID NO: 60719 - DNA, 110 bp, synthetic construct
  source 1..110: mol_type = other DNA
ataaatactcacaaatagacttcttcatacctgggtgtggctatttggagacacacagaagaaatcctctcaatgtgaattacttcttggattcagatgttaaggtgaca

SEQ ID NO: 60720 - DNA, 110 bp, synthetic construct; identical to SEQ ID NO: 60718
  source 1..110: mol_type = other DNA

SEQ ID NO: 60721 - DNA, 110 bp, synthetic construct; identical to SEQ ID NO: 60719
  source 1..110: mol_type = other DNA

SEQ ID NO: 60722 - DNA, 110 bp, synthetic construct
  source 1..110: mol_type = other DNA
gactgtagttacctgtattttgtgcggaatttccaggaagaattaaaatcctctggtgtaatgggatcaggggttgaatccactggttgtaaatgataaatttccatgaa

SEQ ID NO: 60723 - DNA, 110 bp, synthetic construct
  source 1..110: mol_type = other DNA
gtgtaatgggatcaggggttgaatccactggttgtaaatgataaatttccatgaaaaattcccctcatacacacctctgtttggaaccattttgagttttagagcttttt

SEQ ID NO: 60724 - DNA, 110 bp, synthetic construct
  source 1..110: mol_type = other DNA
acaggttctcaaaattaggtttcatactgtcatattcaacatgcgtctatcttgcacagctaaagaccaaaccacagtttcacataaaccttttcccagtcaaaggtggt

SEQ ID NO: 60725 - DNA, 110 bp, synthetic construct
  source 1..110: mol_type = other DNA
tgaggtagagctaaaattgcaacccagataatggatgagttcaaaaagctatgctcttggccaccatgtttttgaaaatctacagggatgagctgaatttgagttaggct

SEQ ID NO: 60726 - DNA, 110 bp, synthetic construct
  source 1..110: mol_type = other DNA
ttttatgctaagtagtcaggaaagctctttctgaggagatgaggttaggtgactccagccacataaaggattgggggaagggctcttcaggaaggggattagcaggtgac

SEQ ID NO: 60727 - DNA, 110 bp, synthetic construct
  source 1..110: mol_type = other DNA
aaaaagagttagtacaacctgtccttgtgaaagtttcatggtttccatagtaaaagtttattatttaccttttcccctgccattttatgtttgttaaagagtgatctatt

SEQ ID NO: 60728 - DNA, 110 bp, synthetic construct; identical to SEQ ID NO: 60727
  source 1..110: mol_type = other DNA

SEQ ID NO: 60729 - DNA, 110 bp, synthetic construct
  source 1..110: mol_type = other DNA
acatcacacacagatggcacttgaaaaagttgtttcattggaagggaagcaaagcacatagatgttaattaattgattgcccattgtcatttgcctttgtgtggtaaagc

SEQ ID NO: 60730 - DNA, 110 bp, synthetic construct
  source 1..110: mol_type = other DNA
atcagctcagaattggtttcctgcacgctcaaattcatcagactttcttcctcttttataatacaggaccagccactcagcaatgccttattcccttctggcaggcaggt

SEQ ID NO: 60731 - DNA, 110 bp, synthetic construct
  source 1..110: mol_type = other DNA
ttataatacaggaccagccactcagcaatgccttattcccttctggcaggcaggtacatgcctgtgggggaaataccatagaaactgaggtttattggaaacttattccc

SEQ ID NO: 60732 - DNA, 110 bp, synthetic construct
  source 1..110: mol_type = other DNA
ctgttttaggaggtgacagggcaatgtagagctgttcatggcacaggaatataggaaaatggaatccccgattggctggagcagaagatacacttctgggtagactgccc

SEQ ID NO: 60733 - DNA, 110 bp, synthetic construct
  source 1..110: mol_type = other DNA
attctaagtgtaaaaggagtggtttaaagggtaaatgaagaaatgagttgatgatccagctctgaagtgcaactgttcctatatccttgtcttactccctaaaagttcaa

SEQ ID NO: 60734 - DNA, 110 bp, synthetic construct
  source 1..110: mol_type = other DNA
atatgataatgtaaagcttttgtggatcacatttatcaggttctaatgtaccctttaaaaatattaaatattacacaatctccatgtacctttacacacacacaagcacc

SEQ ID NO: 60735 - DNA, 110 bp, synthetic construct; identical to SEQ ID NO: 60734
  source 1..110: mol_type = other DNA

SEQ ID NO: 60736 - DNA, 110 bp, synthetic construct
  source 1..110: mol_type = other DNA
tttaaagttttatttgctaattgaagggattttcagtgaagctagatgatatagaaatgcacatattgagtaattgttacttagtgaacttcactgtattacagggcata

SEQ ID NO: 60737 - DNA, 110 bp, synthetic construct
  source 1..110: mol_type = other DNA
ctctgcaaagaacttcaatggcttctaatcacttttctggtaaattccaaatcgtcagaattctttgctccatgaactgaccaaagctacttctcagcctcattattact

SEQ ID NO: 60738 - DNA, 110 bp, synthetic construct
  source 1..110: mol_type = other DNA
cagaattctttgctccatgaactgaccaaagctacttctcagcctcattattactttctatcaaaattcatgaccttcaactataagatagggatatgtcacttatgcct

SEQ ID NO: 60739 - DNA, 110 bp, synthetic construct
  source 1..110: mol_type = other DNA
atgaggaaaggatccaggggtttcaaagccagcagcttcaagtcctttcccgatatttcttggaagtgacgggtacttcaccttcagaagtggaagggaggggaagcata

SEQ ID NO: 60740 - DNA, 110 bp, synthetic construct
  source 1..110: mol_type = other DNA
aggctaccaaggacctccccaataaaaatttctgtggccacaatattgagcttgtcagtggcaatttatacagataataactcccttctttttttaacctcccttggtat

SEQ ID NO: 60741 - DNA, 110 bp, synthetic construct
  source 1..110: mol_type = other DNA
tattaaccccctacaaaatacaaaagggtgctctttcatagaaatagctctccaaggctacagtttgtcttccgtaaactcacagagaaaaagaaaaatataagcaagac

SEQ ID NO: 60742 - DNA, 110 bp, synthetic construct; identical to SEQ ID NO: 60741
  source 1..110: mol_type = other DNA

SEQ ID NO: 60743 - DNA, 110 bp, synthetic construct
  source 1..110: mol_type = other DNA
cctgggcgatagtgcttagagagttcccagaataaaactgcaactcatagctctcatattatgtgtttttatttcagtcaatgatagtaaatctagaaatgaatgaaatg

SEQ ID NO: 60744 - DNA, 110 bp, synthetic construct
  source 1..110: mol_type = other DNA
tgtgcttcttcctgacttggaatgtgactagttcaacttagaaacggaatatctatttttaaaaaattaaatttaaatagtcacatgtggataggattgtggccactgta

SEQ ID NO: 60745 - DNA, 110 bp, synthetic construct
  source 1..110: mol_type = other DNA
tccagtttggaccaattctgtgcctctcagtgcttccgagcttcggataaaagcttcagcattcctttcttctgcttccctgactaacccatttttcaccctgaaagtcc

SEQ ID NO: 60746 - DNA, 110 bp, synthetic construct
  source 1..110: mol_type = other DNA
ctatcccaaagccaaagaaaatttctttatggcattcttttaaaactgatatgtgaccattaatattcatgcatcagtcagtcctggtaactttggaagtagttgtttct

SEQ ID NO: 60747 - DNA, 110 bp, synthetic construct
  source 1..110: mol_type = other DNA
accattaatattcatgcatcagtcagtcctggtaactttggaagtagttgtttctacttggttggaaatttcactttgtttcattgtaagcatggaacagaaccatctta

SEQ ID NO: 60748 - DNA, 110 bp, synthetic construct
  source 1..110: mol_type = other DNA
cttcttaaaggctgaatagagtcttagagctcaacatttacttacaacaagtgggaaagtaggtaaatacctttaaaactgatttaagaactttaaacattcagaaacaa

SEQ ID NO: 60749 - DNA, 110 bp, synthetic construct
  source 1..110: mol_type = other DNA
aacaagtgggaaagtaggtaaatacctttaaaactgatttaagaactttaaacattcagaaacaatacacattagtaagtctttgaatattccaatcaagctttggcccc

SEQ ID NO: 60750 - DNA, 110 bp, synthetic construct
  source 1..110: mol_type = other DNA
agatttccagaaaaaaaaaatgtggatggtagatatgtctggcagcatcacagaataaggaacctgggaatgcctggataaggtaatgggctctggtctagacactgtta

SEQ ID NO: 60751 - DNA, 110 bp, synthetic construct
  source 1..110: mol_type = other DNA
tatgtgctttctgctggatttagtaaaaaaccccaccaagttaaactttgtctgattatacctgtgaataaaagtcctagtagtgctaagaaaagaaatttacaatggtt

SEQ ID NO: 60752 - DNA, 110 bp, synthetic construct; identical to SEQ ID NO: 60751
  source 1..110: mol_type = other DNA

SEQ ID NO: 60753 - DNA, 110 bp, synthetic construct
  source 1..110: mol_type = other DNA
gaagagggaacatacttaaagggaagagccatctctgaatcaacccttagggcttctgctccagcaacttgggatctgcccctgcccccagtaggatgatgacagctact

SEQ ID NO: 60754 - DNA, 110 bp, synthetic construct
  source 1..110: mol_type = other DNA
ctgctccagcaacttgggatctgcccctgcccccagtaggatgatgacagctactgagtagcagggaagccctgcctcaaacccaactccagccctagcctctctctatc

SEQ ID NO: 60755 - DNA, 110 bp, synthetic construct
  source 1..110: mol_type = other DNA
gagatgagcaaagcttcctttcctcaggaatttctgcattttagaataatccctgttgtattttgaaagtaaagtgaagctggttttatacttgccttgagggtcaacta

SEQ ID NO: 60756 - DNA, 110 bp, synthetic construct
  source 1..110: mol_type = other DNA
ttgtattttgaaagtaaagtgaagctggttttatacttgccttgagggtcaactaatatggttcagaggaaagaacatgggacctataatcaaagaactagatcaagatt

SEQ ID NO: 60757 - DNA, 110 bp, synthetic construct
  source 1..110: mol_type = other DNA
tgtaactgtctttctgttattctctattccatataggacagtgtttaagaaaaaagtctctgcagtcagaactgggttccagcttggtccctgtgcttactagctatgtg

SEQ ID NO: 60758 - DNA, 110 bp, synthetic construct
  source 1..110: mol_type = other DNA
tatgttaagaacacaatgttacagcaaacaactagtgttaggactcagtcacttgccatatcattaaccaaaagagctgtccactccctgcatgctaacctgacatcatt

SEQ ID NO: 60759 - DNA, 110 bp, synthetic construct
  source 1..110: mol_type = other DNA
tgataattagggaaggctctgatctccagtggccttcccacttatcaacctggccctctgccaggtctccatctagctactgcttccactctactcaatgacaagaaaga

SEQ ID NO: 60760 - DNA, 110 bp, synthetic construct
  source 1..110: mol_type = other DNA
ctctgccaggtctccatctagctactgcttccactctactcaatgacaagaaagaacagagcaagaaattctttcacaaggagcttggctcaatacccaaacattttcta

SEQ ID NO: 60761 - DNA, 110 bp, synthetic construct
  source 1..110: mol_type = other DNA
gaaaacttgacttcaggatgcagagacgacctgctcctgaggcagagcctgagtgggaaggcagctagctgccactgttagtatttactcaagtggtgccccagaaactt

SEQ ID NO: 60762 - DNA, 110 bp, synthetic construct
  source 1..110: mol_type = other DNA
ggaaggcagctagctgccactgttagtatttactcaagtggtgccccagaaacttcctagatttctgatggcagctgctccatcacagctggcctcctgatacacagtag

SEQ ID NO: 60763 - DNA, 110 bp, synthetic construct
  source 1..110: mol_type = other DNA
tacacccaatgttctcttttgagacttttatcatctggaggatcactgactgaggcaacaagcatcatctcacttattttctggccacagcaagtcacatggccatgcct

SEQ ID NO: 60764 - DNA, 110 bp, synthetic construct
  source 1..110: mol_type = other DNA
agacaccagccttccaagagtaacagtgaatactaggggaataatggaaagagctggataatgcaggtcagatcacagaaggattaggacttcctgtgtagtaggcaccc

SEQ ID NO: 60765 - DNA, 110 bp, synthetic construct
  source 1..110: mol_type = other DNA
catggtggtagtaccagtggtctgtgcagctctctctctgcttttccctcctcagtccaactgctgcacttttttccaaggctctgaggttccccctccatcccaactga

SEQ ID NO: 60766 - DNA, 110 bp, synthetic construct
  source 1..110: mol_type = other DNA
tccaactgctgcacttttttccaaggctctgaggttccccctccatcccaactgatctcccagtcagttaggtggcatcccagggtgcaaatcccttttctgtttcatat

SEQ ID NO: 60767 - DNA, 110 bp, synthetic construct
  source 1..110: mol_type = other DNA
actcttagaaggagccttgtgattacatttgtgtcatgaagataatccaggataagctgcccatctcaagattcttaacttagtcacttctgcaaagtcccttctgacat

SEQ ID NO: 60768 - DNA, 110 bp, synthetic construct
  source 1..110: mol_type = other DNA
tccaggataagctgcccatctcaagattcttaacttagtcacttctgcaaagtcccttctgacatagaggcaaccatattcacaggttccaggaattaggatgtggacat

SEQ ID NO: 60769 - DNA, 110 bp, synthetic construct
  source 1..110: mol_type = other DNA
aaaagagttacccaggaacatgttcattatttcttttgtggaggggctaatggatgaagatacaaattagagatatttctttaaataaggaatgggcggagacactaaag

SEQ ID NO: 60770 - DNA, 110 bp, synthetic construct
  source 1..110: mol_type = other DNA
aatgtgatcatttcaacaccataacagtgggattttttatgttgggggaaaaaaagcacatccttgtaccccaaaacatattaatgtcctacttatattaacctaaaaac

SEQ ID NO: 60771 - DNA, 110 bp, synthetic construct
  source 1..110: mol_type = other DNA
gcacatccttgtaccccaaaacatattaatgtcctacttatattaacctaaaaacagaattaattcacaccttccattatcactgactacaaactcagtgaatgtttttg

SEQ ID NO: 60772 - DNA, 110 bp, synthetic construct
  source 1..110: mol_type = other DNA
tgacagaacacactgtaagtacaactggcagccctgtgttcccaactcgccacaaagaacgtacgaactctttgtgcctgacactttacacaatatgctccttggcttta

SEQ ID NO: 60773 - DNA, 110 bp, synthetic construct
  source 1..110: mol_type = other DNA
ttcactccttacacggcaatgaacaaatgcttgggtttgatctgtaaaagcctcggcacatatttaaattgcaatcaacctgacagaagattgtgtcagaacgtttaaat

SEQ ID NO: 60774 - DNA, 110 bp, synthetic construct
  source 1..110: mol_type = other DNA
gcacatatttaaattgcaatcaacctgacagaagattgtgtcagaacgtttaaatctttaccttccttctcactcccttatatgtatattgtataagccaaatgatttgt

SEQ ID NO: 60775 - DNA, 110 bp, synthetic construct
  source 1..110: mol_type = other DNA
tttatgatgaaaatcagattgtgtgttcctgtgtgctgcctctaactgcaaagtcttttacaaatagggagacttccccaagctaggctgaggttttgtgggcaggaaag

SEQ ID NO: 60776 - DNA, 110 bp, synthetic construct
  source 1..110: mol_type = other DNA
tctgacttggaatctttgattattcaaaatcatttcctctgtgaacttgtcactaactcccctgttagagccagggggcaaatctcttccctctgcgctgctgtcacatt

SEQ ID NO: 60777 - DNA, 110 bp, synthetic construct
  source 1..110: mol_type = other DNA
caggaagaagaggggcttttaccagggtgtttaatggtgttgcacattctctcctcacaaattggcgaattgttttacagaagaggccttggaataacctgcttgagaga

SEQ ID NO: 60778 - DNA, 110 bp, synthetic construct
  source 1..110: mol_type = other DNA
tccactgtcattctctaagatccatatgtcttctgcacaggccaagttggtgcgtttaatggggatgtagtgggaatcaccactcttgcatccttcaagtcctcgatggt

SEQ ID NO: 60779 - DNA, 110 bp, synthetic construct
  source 1..110: mol_type = other DNA
tatcaataaaaaatattcaagattagagttccctagtttcctagtgagttaggatctggtttcatcactgctgtagctccgatcactgctgtggtgcaggttcaatacct

SEQ ID NO: 60780 - DNA, 110 bp, synthetic construct
  source 1..110: mol_type = other DNA
gtcagacttttaaaattgtttcaaacaccttataaggatttaaatcaaagaatgacactcattgcttgagcagaatggtgtgatatggagaaaaggcagagcttctcact

SEQ ID NO: 60781 - DNA, 110 bp, synthetic construct
  source 1..110: mol_type = other DNA
gtatgtcctgaagcatatagtgctccaccaactggtctcatcaaattttaaaaccaactttgagatttggttcctaccagggcaacccagaagttctccagtttagccta

SEQ ID NO: 60782 - DNA, 110 bp, synthetic construct
  source 1..110: mol_type = other DNA
gtgcagttcaagtccatgttgttcaaaggtcagctgaagtttcttttcactcacaactttataggcataggtttagccttccatggcctgattctttttctgagaaagaa

SEQ ID NO: 60783 - DNA, 110 bp, synthetic construct
  source 1..110: mol_type = other DNA
atgtaattttcttgtttctaattatggtcttttattttctgcctagagaggtttctttagctggttttgtggtataagttatcttttgagtgattccccaccccacccct

SEQ ID NO: 60784 - DNA, 110 bp, synthetic construct
  source 1..110: mol_type = other DNA
tttagctggttttgtggtataagttatcttttgagtgattccccaccccaccccttcctcctcttaccaaaacataattttgagcctggttgtcagacttccagtgagga

SEQ ID NO: 60785 - DNA, 110 bp, synthetic construct
  source 1..110: mol_type = other DNA
ctgtgcacatacacagtgcttttagggttcaccaaaactcgctctgccaagtcgtcctgtggctgtaagaatccctgggccacatcgtcctttagatctagaaaggggtg

SEQ ID NO: 60786 - DNA, 110 bp, synthetic construct
  source 1..110: mol_type = other DNA
agtgacctataagggaaggctgttattttgatcagggattatgagctagaagctgcttttctcagcgtcagaggtgatttcacagggtgtccttgagtgtggtaggaagg

SEQ ID NO: 60787 - DNA, 110 bp, synthetic construct
  source 1..110: mol_type = other DNA
cttttctcagcgtcagaggtgatttcacagggtgtccttgagtgtggtaggaagggacattgccatttagagagactctggaaagtgcagacctcaaagcatacactaaa

SEQ ID NO: 60788 - DNA, 110 bp, synthetic construct
  source 1..110: mol_type = other DNA
tcattggatacactatacaggacttttaccaggggtgccttctcctgccctagaagaagactggatatatgacccaagctttgccagtttgattcccacatctccagaat

SEQ ID NO: 60789 - DNA, 110 bp, synthetic construct
  source 1..110: mol_type = other DNA
gctccccttgcattattctttcatctgaatattggtttaatgattcttccttgagaactaggactatctttctctgctgctctgttcaccagcaggacaaagctactcaa

SEQ ID NO: 60790 - DNA, 110 bp, synthetic construct
  source 1..110: mol_type = other DNA
aactaggactatctttctctgctgctctgttcaccagcaggacaaagctactcaataacacaagtttataggttacagttccaactctcccttcactgtgtcccaatcct

SEQ ID NO: 60791 - DNA, 110 bp, synthetic construct
  source 1..110: mol_type = other DNA
taagggattcagtgcatagtccctcattatgcctcctagagctagaattatattggtctgtgattctacaaccccgtgtcctctgggtagttcccttggctgaggagtct

SEQ ID NO: 60792 - DNA, 110 bp, synthetic construct
  source 1..110: mol_type = other DNA
gctagcgaaattgcgtttacctgggaacaacaggggagctgaaattcaggacatcaaaggaaccacaggcaaagaggagagcaaagaaggagagtgttcttctacagagg

SEQ ID NO: 60793 - DNA, 110 bp, synthetic construct
  source 1..110: mol_type = other DNA
cgaaaacataagggagtcaacttaacttctcatgccacagtttcctcagtttgaattgggactttatctttttttaaagaatggtattttttgaagtcaagtttcacatg

SEQ ID NO: 60794 - DNA, 110 bp, synthetic construct
  source 1..110: mol_type = other DNA
agggttttttgttgttgttgttgtttgcttttttgtttgtttgtttgttttgcaagcagctgaaacccactttgactactggctatggccaaagtgtgtgccttcaaaac

SEQ ID NO: 60795 - DNA, 110 bp, synthetic construct
  source 1..110: mol_type = other DNA
ttatgggaactcctgaaattttttaatgaaacacacacacacgcagctgataaaagtccttcaggcgatcttgggatctctgagatgtaattgagtagtgtcacattata

SEQ ID NO: 60796 - DNA, 110 bp, synthetic construct
  source 1..110: mol_type = other DNA
gctctgcttcccttttgccactcatttccctcattccaccctttgtcccatcataccctggaaagttcacacaggccagaacagccctgagtcagctccatctctctatg

SEQ ID NO: 60797 - DNA, 110 bp, synthetic construct
  source 1..110: mol_type = other DNA
tgggcctcagctgtatcacccataaagtggatgtcacatcaatacccagtagagttgtagctggacttaaagagaataggatagctaatgcatctggcgggagaacatgg

SEQ ID NO: 60798 - DNA, 110 bp, synthetic construct
  source 1..110: mol_type = other DNA
acattctgaatgaaaaataaaacccatacctttgacttattctagactaactttcatgaccaagatcagcttttacactgctaaatcaaattattccgttctcatttatt

SEQ ID NO: 60799 - DNA, 110 bp, synthetic construct
  source 1..110: mol_type = other DNA
aaactgcgcatctgcaaacccattcatgtggatcctgtttcatttcatttcttttcctccttccttcctttatttctaaaaaattaaaagtcaaaatgcattgcaactag

SEQ ID NO: 60800 - DNA, 110 bp, synthetic construct
  source 1..110: mol_type = other DNA
cctccttccttcctttatttctaaaaaattaaaagtcaaaatgcattgcaactaggaaagctaagtatttttcacaaatgtgaattagatgtgtgccaggtcaggccctt

SEQ ID NO: 60801 - DNA, 110 bp, synthetic construct
  source 1..110: mol_type = other DNA
aaaagcaactccaagttttttgcgttcacccctcctcttgaggcatcgttgctgtaagagatattgcataagggactccattctgagaacttcctcaattttcaggtttt

SEQ ID NO: 60802 - DNA, 110 bp, synthetic construct
  source 1..110: mol_type = other DNA
cagagaggatgcaggaagtcttgaaggtgctgtaggcacttgagctaaaacaatgcggtttgggacatggaactaggcaggttgacccactctttctctattcttcaaca

SEQ ID NO: 60803 - DNA, 110 bp, synthetic construct
  source 1..110: mol_type = other DNA
ttgtttttgttcctttctgtcttccctaactatacacacttggttagaaataatctattctattagatcctctaaagaaattagggcacacccctagcccaaggtgaaag

SEQ ID NO: 60804 - DNA, 110 bp, synthetic construct
  source 1..110: mol_type = other DNA
cagagcatgggctgagatattgaccttgttggagagggcatggccatggttcagagactagtagagaagtcactgtattgttgcactggtagaaactttcaaacagctgc

SEQ ID NO: 60805 - DNA, 110 bp, synthetic construct
  source 1..110: mol_type = other DNA
ccccagcctgggaatttcagtatgccgagggtatggccctaaaaaaaaagtacgtacctggaaggtcttgggtcatgaagcgatgcttaatttttcaaaactgtctccca

SEQ ID NO: 60806 - DNA, 110 bp, synthetic construct
  source 1..110: mol_type = other DNA
agaaaataagtagtaaaagggtctgggagagaggtaaaatacgtcataggtaggccagcagaatcccctggtattaccattatatgtgatgctttcagatgggttgttag

SEQ ID NO: 60807 - DNA, 110 bp, synthetic construct
  source 1..110: mol_type = other DNA
cagcagaatcccctggtattaccattatatgtgatgctttcagatgggttgttagtacctcaattttgagggaaaagagtgaaagaaaccagccaatgcttttgcatgct

SEQ ID NO: 60808 - DNA, 110 bp, synthetic construct
  source 1..110: mol_type = other DNA
tgggaggggtgccagcagagagaacagctaattcagactccaaagtgagaacacgcctggtctttctgaaggacaagagatcaaaacagcaagagtgcaagtgaacatgg

SEQ ID NO: 60809 - DNA, 110 bp, synthetic construct
  source 1..110: mol_type = other DNA
agaaaacagaagatcctgtaagcaagagagtgcagagagagaacatagccagcgaagaactcacagaaaatgcccaactgagatgacagcaccaggggacagaggcagcc

SEQ ID NO: 60810 - DNA, 110 bp, synthetic construct
  source 1..110: mol_type = other DNA
ggttcgactgaaggaacttggctcctcccaccgctgatagaaagtgggtctcttcaagatctgccatggtttcagctttgggacaacacttggctcagtctacaaaggca

SEQ ID NO: 60811 - DNA, 110 bp, synthetic construct
  source 1..110: mol_type = other DNA
aagatctgccatggtttcagctttgggacaacacttggctcagtctacaaaggcaggaaccagatgtcttcatgaactgccaggaggtaccatcacgggagtaaaagatg

SEQ ID NO: 60812 - DNA, 110 bp, synthetic construct
  source 1..110: mol_type = other DNA
gttctgcttctttaatctaggggaacactatgcccatgttcagtaggaagcagcttcagaaggcagagctttgcccttcagcacccctcaagagtgaggagcaggaacaa

SEQ ID NO: 60813 - DNA, 110 bp, synthetic construct
  source 1..110: mol_type = other DNA
tcagaaggcagagctttgcccttcagcacccctcaagagtgaggagcaggaacaaggaagagaggattttgttgccagagttgtgccaaatctttgctccaaacctatca

SEQ ID NO: 60814 - DNA, 110 bp, synthetic construct
  source 1..110: mol_type = other DNA
gtacagagtactactccctggatccttatgaaaaactgaaaattgctattggctggtcagttgcattgtaaaaagtcttagttttcaaaattgattaccattttatccca

SEQ ID NO: 60815 - DNA, 110 bp, synthetic construct
  source 1..110: mol_type = other DNA
tcccccaaagatcagtagactttcttatctgattataaagatctcttttttttccctgactattggtaagcttactgccaaattttgatacagcgaactcatgacagcaa

SEQ ID NO: 60816 - DNA, 110 bp, synthetic construct
  source 1..110: mol_type = other DNA
atcaattcctttcctctctacatgcatgccaatgtatcaccaagagatagaaagtctatttccatattctctttgaacttgttgtggccttgtgaccttccatgatcaat

SEQ ID NO: 60817 - DNA, 110 bp, synthetic construct
  source 1..110: mol_type = other DNA
ctatttccatattctctttgaacttgttgtggccttgtgaccttccatgatcaataggatgggattaaaagcaataatgtgccaattctgcacctagcctttaagaggcc

SEQ ID NO: 60818 - DNA, 110 bp, synthetic construct
  source 1..110: mol_type = other DNA
tccatcttttgtggcgcgaaaataaccctttgctccttcacattggttttgtttttgttgagggggggtggggggtgaaattgggctctcctcttcttgctctcattttt

SEQ ID NO: 60819 - DNA, 110 bp, synthetic construct
  source 1..110: mol_type = other DNA
agcattaagtattcactttcttgtgcacctatcactattatacatctctagaactttttcttcatcccagagtaaaactctgtaccctaaactttaaaccataactccat

SEQ ID NO: 60820 - DNA, 110 bp, synthetic construct; identical to SEQ ID NO: 60819
  source 1..110: mol_type = other DNA

SEQ ID NO: 60821 - DNA, 110 bp, synthetic construct
  source 1..110: mol_type = other DNA
gaggtattaataaaaactgaataaacacatatacaaacttataaagtatgataaatgctccaaaggagaggagaccataccaaagaagaacttaggaaagttacctggaa

SEQ ID NO: 60822 - DNA, 110 bp, synthetic construct; identical to SEQ ID NO: 60821
  source 1..110: mol_type = other DNA

SEQ ID NO: 60823 - DNA, 110 bp, synthetic construct; identical to SEQ ID NO: 60821
  source 1..110: mol_type = other DNA

SEQ ID NO: 60824 - DNA, 110 bp, synthetic construct; identical to SEQ ID NO: 60821
  source 1..110: mol_type = other DNA

SEQ ID NO: 60825 - DNA, 110 bp, synthetic construct
  source 1..110: mol_type = other DNA
attgccgtggctaggacttccaaaactattcttaggccaaatataatccttcagttttctaattattttctttctgtctgtctggtttttttttagagccacacctgcag

SEQ ID NO: 60826 - DNA, 110 bp, synthetic construct; identical to SEQ ID NO: 60825
  source 1..110: mol_type = other DNA

SEQ ID NO: 60827 - DNA, 110 bp, synthetic construct
  source 1..110: mol_type = other DNA
atacaaaagccaccaaaaagatatactttcatatgacactaatcagcctgaggatgtaggaatagaagtctggtttgtgataggacagctgatatttcgaaacttctttt

SEQ ID NO: 60828 - DNA, 110 bp, synthetic construct
  source 1..110: mol_type = other DNA
tctggatccttaacccactaagcgaggccaggcatcaatcccgcatcctcagagagacaaccttaacacattgagccacaaaaggagctcctcacttggcaattttaatg

SEQ ID NO: 60829 - DNA, 110 bp, synthetic construct
  source 1..110: mol_type = other DNA
gacaaccttaacacattgagccacaaaaggagctcctcacttggcaattttaatgtatggaatagtaatattaattttgctgaactctgaatgtgctggtcctgaagtgg

SEQ ID NO: 60830 - DNA, 110 bp, synthetic construct
  source 1..110: mol_type = other DNA
ggttaaactgaagcattattttaatctgtttaacttattcatacagtgatctcactatattccatgcacgtgccatggtattcattcatagaaaattgagtgtgccatgt

SEQ ID NO: 60831 - DNA, 110 bp, synthetic construct
  source 1..110: mol_type = other DNA
accctgccaacttttgcttcctagcctttcctattgtcttggtttccaaggccagctaatgggatttcaaaatatactacatgcattcaggccgcagtctagtcttgcca

SEQ ID NO: 60832 - DNA, 110 bp, synthetic construct
  source 1..110: mol_type = other DNA
ctaatgggatttcaaaatatactacatgcattcaggccgcagtctagtcttgccaaaaggaagccattctttgtatagtcacttggcatatttctactctgacggggtga

SEQ ID NO: 60833 - DNA, 110 bp, synthetic construct
  source 1..110: mol_type = other DNA
attcctttttaaggattctagtcatattagcttagagggccacccttctctaatatgacctgatcttaattcactccatctgcaatgaacctatttccacatacagtcac

SEQ ID NO: 60834 - DNA, 110 bp, synthetic construct
  source 1..110: mol_type = other DNA
cagctgcagcaatgccggatacttcaacccaccatgccaggcctagatcaaactcaggccattgcagtgacccaagctgctacagtaggatctcaatccattgcaccata

SEQ ID NO: 60835 - DNA, 110 bp, synthetic construct
  source 1..110: mol_type = other DNA
aggccattgcagtgacccaagctgctacagtaggatctcaatccattgcaccatagttggaactcccgaactgtcttttaaatgacaccactgtgcgtataaccaacttt

SEQ ID NO: 60836 - DNA, 110 bp, synthetic construct
  source 1..110: mol_type = other DNA
tctcaactacatcagaatgtgactttacttggaaataaggtgattgcaaatataactaattaaaataagtttaggtcatactggagtagggtgggtccctaatcctgttt

SEQ ID NO: 60837 - DNA, 110 bp, synthetic construct
  source 1..110: mol_type = other DNA
ctaattaaaataagtttaggtcatactggagtagggtgggtccctaatcctgtttgatcagtgtccctacaaaagcgaaaaattggagacagacacaggtgcagggagaa

SEQ ID NO: 60838 - DNA, 110 bp, synthetic construct
  source 1..110: mol_type = other DNA
cagctatatggaccaggcattgttctaagcatgtagacttatttatgcatttaaaaacaatcatttgttatggggctactcattattcacatgtaaatgatactacttta

SEQ ID NO: 60839 - DNA, 110 bp, synthetic construct
  source 1..110: mol_type = other DNA
caggaaagtaattgagctgagcttaagaaggagccaggtatttgggggctctgtaggaagaatattctagatcgaaggagcagaaaatacagtttctatggctggaatat

SEQ ID NO: 60840 - DNA, 110 bp, synthetic construct
  source 1..110: mol_type = other DNA
gtcctctcctagcaaaccagcaattagtctcaagtgtttggaaacaaaaggcttatttctagtggaaccgatgtctgagatttaccgaagagatgcagaactgttcttct

SEQ ID NO: 60841 - DNA, 110 bp, synthetic construct
  source 1..110: mol_type = other DNA
tttctagtggaaccgatgtctgagatttaccgaagagatgcagaactgttcttctttcaatccctggctccctctccctgcttctctctctctctctctctctctctctc

SEQ ID NO: 60842 - DNA, 110 bp, synthetic construct
  source 1..110: mol_type = other DNA
gaggaaactttcactgaacagaataatttggggtgaagatgaaaactagagaggaggttttcttttgaatttgataaaagactgaaaattttagttgaatcaaagaaaat

SEQ ID NO: 60843 - DNA, 110 bp, synthetic construct
  source 1..110: mol_type = other DNA
tattaattgactcattcatttactcattcaggcttttagtaaatatttgagtttctattataaactaggcctttagctacaccttggtgattcagcaatgatacatcatc

SEQ ID NO: 60844 - DNA, 110 bp, synthetic construct
  source 1..110: mol_type = other DNA
cactccagatattaaatctgaaagccacatccatgacctacaccacagctgtgacaatgaatgctgaatctttaatccactgtgccaagccaggggttgaacccatgcca

SEQ ID NO: 60845 - DNA, 110 bp, synthetic construct
  source 1..110: mol_type = other DNA
aagcggagccagtccctactagcagggtggcccactttccctttgaaagtgtacttttgctttaataaacctgctgtaacactttcactttggcaaacctgtttgtgctt

SEQ ID NO: 60846 - DNA, 110 bp, synthetic construct
  source 1..110: mol_type = other DNA
tttgctttaataaacctgctgtaacactttcactttggcaaacctgtttgtgctttctaaagagctataacactttctagctgcaacacttttgctctaaagagctcact

SEQ ID NO: 60847 - DNA, 110 bp, synthetic construct
  source 1..110: mol_type = other DNA
aacatttttctctggggtatcagtcatttgaactcatgcactgttgggattacaaattgtggcagccactatggaaatcagtatgggggggttcctcaagaaattaaaaa

SEQ ID NO: 60848 - DNA, 110 bp, synthetic construct
  source 1..110: mol_type = other DNA
ctattaggtaaatgaaagcacaagctccatactgggagaatatatttccaaattatatgtggtgaacagatgttagataattcctcatagtttcctcctggtatctatct

SEQ ID NO: 60849 - DNA, 110 bp, synthetic construct
  source 1..110: mol_type = other DNA
tagcagtcactgagcaaacaccccccttcaccagaccccatccaaatctaggtcacctgctaagttgttgtgagacctttgacagttttcttcatcttaacacatggaat

SEQ ID NO: 60850 - DNA, 110 bp, synthetic construct
  source 1..110: mol_type = other DNA
cctgctaagttgttgtgagacctttgacagttttcttcatcttaacacatggaatatgtgagaattaagtgaacctaatatataagaagccttaagcaccgtacctgaaa

SEQ ID NO: 60851 - DNA, 110 bp, synthetic construct
  source 1..110: mol_type = other DNA
aacaaaccactagtagggaggttggtgacaacaggactctgatttcaaggcagggaataaagtctagtcctggacacctctacgagttttgaatgatatcgcgggcatgg

SEQ ID NO: 60852 - DNA, 110 bp, synthetic construct
  source 1..110: mol_type = other DNA
aataaagtctagtcctggacacctctacgagttttgaatgatatcgcgggcatggtggcagagcagggaagactgacgtgaatgagaacttatccagagcagtgagttgg

SEQ ID NO: 60853 - DNA, 110 bp, synthetic construct
  source 1..110: mol_type = other DNA
cttccatgagcaagaaatattgttattcaataaatattcaagtatctactttgtggtaggacatgtgctgagacccagggcacagtaagaaacaacaaatagcgtcttgt

SEQ ID NO: 60854 - DNA, 110 bp, synthetic construct
  source 1..110: mol_type = other DNA
gtaggacatgtgctgagacccagggcacagtaagaaacaacaaatagcgtcttgtacctgcctttctggaaattccaatctcatacatgaggaaagacaacaaactggtg

SEQ ID NO: 60855 - DNA, 110 bp, synthetic construct
  source 1..110: mol_type = other DNA
cctgcttgagccatccagctactaagagaatcctggctcctggcaacctaaatattggctttcaggggaccttgctggaacctgcagtgtggcacttaggaaccaaattg

SEQ ID NO: 60856 - DNA, 110 bp, synthetic construct
  source 1..110: mol_type = other DNA
cactggataatttcagcaaaaagggaataagtgaattgtaaacatattcagattgataaagcttagaaatagacttgaggcaagagaaggcctgtttgtccccacttaaa

SEQ ID NO: 60857 - DNA, 110 bp, synthetic construct
  source 1..110: mol_type = other DNA
ataaagcttagaaatagacttgaggcaagagaaggcctgtttgtccccacttaaatttttatagttggatatagagttctgctgtgcctattttgagattttctgaaaca

SEQ ID NO: 60858 - DNA, 110 bp, synthetic construct
  source 1..110: mol_type = other DNA
ttcagagcatggttccagtaatttctaccgtgctgcatgttaatcatgtcagcgcaggggctcagtttcatgtcagaatcataaacagtggctcattgttttccagtgtc

SEQ ID NO: 60859 - DNA, 110 bp, synthetic construct
  source 1..110: mol_type = other DNA
gagcaaactatttgacccaagtcctggaagaaaataaaacagctcacaaaatccggaagcccaggaaagcagaacaaagtacttcaaaggaatgtaaaagaatcatttcc

SEQ ID NO: 60860 - DNA, 110 bp, synthetic construct
  source 1..110: mol_type = other DNA
caatcctctttgtgaatccacagctgtagccctctctcttagccctctctcttccagggctattaagtaaccaagaattctgcctttcatctattccagtgtcattgtat

SEQ ID NO: 60861 - DNA, 110 bp, synthetic construct
  source 1..110: mol_type = other DNA
agggaaaaagggatagtttaggaaatcagactgttaaaatgttgccaacatagcctaaccagagcttggatataaaagcagagataagagaaagaaggcagatccattta

SEQ ID NO: 60862 - DNA, 110 bp, synthetic construct
  source 1..110: mol_type = other DNA
taaccagagcttggatataaaagcagagataagagaaagaaggcagatccatttaatattacacatacacactcagcagctacatgagatgcatttcaagtgtagtggtg

SEQ ID NO: 60863 - DNA, 110 bp, synthetic construct
  source 1..110: mol_type = other DNA
accaattcataaactctgcttttgggcaataaaataattttaaactatcacatactcactgatttcccctagagttcaaaaactctaaatcacttttcatggctaaatag

SEQ ID NO: 60864 - DNA, 110 bp, synthetic construct; identical to SEQ ID NO: 60863
  source 1..110: mol_type = other DNA

SEQ ID NO: 60865 - DNA, 110 bp, synthetic construct
  source 1..110: mol_type = other DNA
gctttttcttttttaatatgattttggccatcctatgttctctgaatttctatgtacactttaggatcagtttgccaatatcgaccaaaaaaaaaaaaagcctactggga

SEQ ID NO: 60866 - DNA, 110 bp, synthetic construct
  source 1..110: mol_type = other DNA
acactttaggatcagtttgccaatatcgaccaaaaaaaaaaaaagcctactgggattttgatatataaatttaggtattatacagacctatctttagaaaggggaaatac

SEQ ID NO: 60867 - DNA, 110 bp, synthetic construct
  source 1..110: mol_type = other DNA
gtatacacaaatttattaatgccctcagaaagagcaggccacattgagattagagaccagccctcttcacagttgggtttcccttatgtcccatgctgcagacttgactg

SEQ ID NO: 60868 - DNA, 110 bp, synthetic construct
  source 1..110: mol_type = other DNA
tttatctctgatcactttctcagggctacttgaatgaaaggaattcataagcagaaataggtagaagtgtcaaatataaattgttaaatgctgatgagtatgatctcgct

SEQ ID NO: 60869 - DNA, 110 bp, synthetic construct
  source 1..110: mol_type = other DNA
aataggtagaagtgtcaaatataaattgttaaatgctgatgagtatgatctcgcttcaagttatattatcatccaggactttagatcctactacttttcagaggttttat

SEQ ID NO: 60870 - DNA, 110 bp, synthetic construct
  source 1..110: mol_type = other DNA
cttctgacattattcagttgaatgaacactattagtcaggtccatgtggagacggaaattggcatttaaagattttttttttccttgtgaacatgagcaaactgaatctc

SEQ ID NO: 60871 - DNA, 110 bp, synthetic construct
  source 1..110: mol_type = other DNA
tatgctgacttttaagcacccgttaattaatagttaattgttggttttaaatagaatcctaagaatgagcttgtatatttttatgggatactcagtgtgtccagatactt

SEQ ID NO: 60872 - DNA, 110 bp, synthetic construct; identical to SEQ ID NO: 60871
  source 1..110: mol_type = other DNA

SEQ ID NO: 60873 - DNA, 110 bp, synthetic construct
  source 1..110: mol_type = other DNA
ttcaaatgtgatatggaaacaaatctgtgctttaacaagaggaacttaaagctgcagcatatcaggctaggaacatcttggatttaacagatggttgactaggtttgacc

SEQ ID NO: 60874 - DNA, 110 bp, synthetic construct
  source 1..110: mol_type = other DNA
caaggtatatctctcctttcttctgtaggagtgtgtggtcttgagtatgaaatcagaagactaatgggagtataactcccatttcaatgaaatataaagaagtcctgtat

SEQ ID NO: 60875 - DNA, 110 bp, synthetic construct
  source 1..110: mol_type = other DNA
tggggaaaaagccctctggaagccttattttatggtcatgtgagcagatgagtatagatgttgaacgaccattcatttaaaaaaacacaagtaaccacaaacatcctctc

SEQ ID NO: 60876 - DNA, 110 bp, synthetic construct
  source 1..110: mol_type = other DNA
agatgttgaacgaccattcatttaaaaaaacacaagtaaccacaaacatcctctctgaacagagcaataaggatacgagtcttttttaactttgaattatatattctatg

SEQ ID NO: 60877 - DNA, 110 bp, synthetic construct
  source 1..110: mol_type = other DNA
tatctcctattacattcagtataaaatttaccttccctggagttgctaaaagaaacatctatttacatgcatataaatagggatatgcatttggatatggaggaaatgtt

SEQ ID NO: 60878 - DNA, 110 bp, synthetic construct
  source 1..110: mol_type = other DNA
tcttacccatgcaagtaccaaagcttcaccctttcccttcttataggagggcagcatacatcacaggccatggaatagggcacccaagagtcagaaataaaggatccctg

SEQ ID NO: 60879 - DNA, 110 bp, synthetic construct
  source 1..110: mol_type = other DNA
tttttattgccacatttaatgcaaaggtgtaatttctttgtttatagccctgttttcttttctagactgtgagctccttgagggcagggtttgtatctaatttatctctg

SEQ ID NO: 60880 - DNA, 110 bp, synthetic construct
  source 1..110: mol_type = other DNA
aattaaaatgagaatggtgtgatagaaggtcagtgaatgacattgattctgggattttaatgaaaataaaaagctagtcacaagagttccctcatggtgcagtgggttaa

SEQ ID NO: 60881 - DNA, 110 bp, synthetic construct
  source 1..110: mol_type = other DNA
aaggtcagtgaatgacattgattctgggattttaatgaaaataaaaagctagtcacaagagttccctcatggtgcagtgggttaaggatctggtggtgtcactgcagcgg

SEQ ID NO: 60882 - DNA, 110 bp, synthetic construct
  source 1..110: mol_type = other DNA
ccctttcctgaatcaatttttatttttctaaactgtaattcatagaggaatctcagctatcacatagtttcaactatctgtattcactttgctgaatttggaaagtactt

SEQ ID NO: 60883 - DNA, 110 bp, synthetic construct
  source 1..110: mol_type = other DNA
gttctggaggggttcttatatcaaaaattcaatggaagggccagaattgacagatatcactgtcacattgtcccatgtcatcgtttctctcaaaggcagaggggcaaaaa

SEQ ID NO: 60884 - DNA, 110 bp, synthetic construct
  source 1..110: mol_type = other DNA
atcactgtcacattgtcccatgtcatcgtttctctcaaaggcagaggggcaaaaatgtttcgtgggtggtattaatagtaaccacaatctgcccttctggttgtttggct

SEQ ID NO: 60885 - DNA, 110 bp, synthetic construct
  source 1..110: mol_type = other DNA
tgaatccttttgttctgaaaatccaaaactggtaaagcagctagagtttatgaggggaacacaatatgagctgtgtcactaccaaacctgaagacacatggttaataatg

SEQ ID NO: 60886 - DNA, 110 bp, synthetic construct
  source 1..110: mol_type = other DNA
ggaacacaatatgagctgtgtcactaccaaacctgaagacacatggttaataatgcaactgtcaagagattataagcacgaggaacacaaggttttggtaaccaaaattc

SEQ ID NO: 60887 - DNA, 110 bp, synthetic construct
  source 1..110: mol_type = other DNA
gtttatttggcaaatattccaacctattggtttatgttgagattgctgtcactctttctaagggtttttcacacagatgctaagccagctctttcctttatttcacatgt

SEQ ID NO: 60888 - DNA, 110 bp, synthetic construct
  source 1..110: mol_type = other DNA
gttatgtaattgtcagctgtcatcgtcaccagcagtagcagcaacatcgtcatcttcattcctttaacttctccagtggcataagctattcacaaatctgaattcctagt

SEQ ID NO: 60889 - DNA, 110 bp, synthetic construct
  source 1..110: mol_type = other DNA
tcattcctttaacttctccagtggcataagctattcacaaatctgaattcctagtcataacacatcttttgatatcctgcatcacatttctacaatgacttgtcatcatc

SEQ ID NO: 60890 - DNA, 110 bp, synthetic construct; identical to SEQ ID NO: 60888
  source 1..110: mol_type = other DNA

SEQ ID NO: 60891 - DNA, 110 bp, synthetic construct; identical to SEQ ID NO: 60889
  source 1..110: mol_type = other DNA

SEQ ID NO: 60892 - DNA, 110 bp, synthetic construct
  source 1..110: mol_type = other DNA
ccacaccaaagtctgcagaagacttccacaccaggattggggtgatgctcccaggggaatctgggaaagctaatttctaaccctataatagaagacaaatacaagaaagt

SEQ ID NO: 60893 - DNA, 110 bp, synthetic construct
  source 1..110: mol_type = other DNA
ttttaaagtacttgtgtgattaggttagctaatcaagatattctccatcacttttggacttaattacatctgcaaatccctttgcaggaatatctagattagtatttggt

SEQ ID NO: 60894 - DNA, 110 bp, synthetic construct
  source 1..110: mol_type = other DNA
ggacttaattacatctgcaaatccctttgcaggaatatctagattagtatttggttgagtagccaagacaggaatttcggggtatatatactcacacatatgcaacatat

SEQ ID NO: 60895 - DNA, 110 bp, synthetic construct
  source 1..110: mol_type = other DNA
gtagtattcccattactgctgaagagaaactgaagggacttgccaagaacaaattgggggatgcctaaacacaacatgactgcttacagaacagctggaaaggtggttct

SEQ ID NO: 60896 - DNA, 110 bp, synthetic construct
  source 1..110: mol_type = other DNA
gggggatgcctaaacacaacatgactgcttacagaacagctggaaaggtggttcttggatcatattcttagaatttcctgggtgctttaaaacaagggagaaaattagct

SEQ ID NO: 60897 - DNA, 110 bp, synthetic construct
  source 1..110: mol_type = other DNA
taataagatgcattcaaggtattggccttggctgtagtctgaaagttaactgaagctggaagttccaggctcacttttgttactgctagcaggagactttagttcctcac

SEQ ID NO: 60898 - DNA, 110 bp, synthetic construct
  source 1..110: mol_type = other DNA
gtaagtcatgaacactacagctcagaggagctgcgtaaccccttcaagatgctctagcaagtcagagcagggctgggaatggattcctgcagggcagtgtcttctggaac

SEQ ID NO: 60899 - DNA, 110 bp, synthetic construct
  source 1..110: mol_type = other DNA
tgacggacgttgttgtgaaagaggagaaaccatccaaaaagagaagttctggagctaaagttcgtggacagtatgatgaaatgggggaaaatctggcagatgacccccgc

SEQ ID NO: 60900 - DNA, 110 bp, synthetic construct
  source 1..110: mol_type = other DNA
taaagttcgtggacagtatgatgaaatgggggaaaatctggcagatgacccccgctgctttaaaaagatagtggacagtggtgtccaaacagatgatgaagatgcggcgg

SEQ ID NO: 60901 - DNA, 110 bp, synthetic construct; identical to SEQ ID NO: 60899
  source 1..110: mol_type = other DNA

SEQ ID NO: 60902 - DNA, 110 bp, synthetic construct; identical to SEQ ID NO: 60900
  source 1..110: mol_type = other DNA

SEQ ID NO: 60903 - DNA, 110 bp, synthetic construct
  source 1..110: mol_type = other DNA
ttttttgcacatctcactatcatataaagtaaacgtgttatttagttggagaggtgaatcttgtaccatctgtagcaatagggtgatgggaatcttaatcccacctagaa

SEQ ID NO: 60904 - DNA, 110 bp, synthetic construct
  source 1..110: mol_type = other DNA
ctcccactaagctttgccataaacttaggtttcatcttttcctaccactgacatttccaacaatggagaacctgacagattatatggaccatgtagtaggagcattttta

SEQ ID NO: 60905 - DNA, 110 bp, synthetic construct
  source 1..110: mol_type = other DNA
tccaacaatggagaacctgacagattatatggaccatgtagtaggagcatttttaccataccctgaaccaactcagaaccctattctactctgggacttattcaaagact

SEQ ID NO: 60906 - DNA, 110 bp, synthetic construct
  source 1..110: mol_type = other DNA
tcctgtgttctacttatttcttcactcgccctccaccccatcatgtttagcatgtagggggtgagcaggagaaagctgaatggatctggagtctttcggaggaccttgcc

SEQ ID NO: 60907 - DNA, 110 bp, synthetic construct
  source 1..110: mol_type = other DNA
tgcctctagaaattcttctctcttggaaggttatcaactgaatggttgttagagattctaccaactatgttatcttctagtagacctttatgggaaaggactagttttat

SEQ ID NO: 60908 - DNA, 110 bp, synthetic construct
  source 1..110: mol_type = other DNA
ttttaatgattttcagaaaagacaaatgaaatttagtgagctttagtgacttgtgacttgtccagttttaggcacgtgatagttgccagtgcagggaattgaattcagta

SEQ ID NO: 60909 - DNA, 110 bp, synthetic construct
  source 1..110: mol_type = other DNA
ggcttgacagtttaccaccaactaatgtgagagtgggggtttgtttaaatatcaaattgtactgtatgtgcaaaaaagacatgatttggattgttccttttcctatgtgc

SEQ ID NO: 60910 - DNA, 110 bp, synthetic construct
  source 1..110: mol_type = other DNA
ttccttaaatccatgcactgagaggaatgcaggaagttaagagttcacaaatgttatatgttcacaaaaatataaccaccaaatatatcttattttggattctgccttgt

SEQ ID NO: 60911 - DNA, 110 bp, synthetic construct
  source 1..110: mol_type = other DNA
gcccagttctccttatgggttcccttgactgtggtgctccaatccaaagccaacggtacactgcttactcccccctgaggctgcttccacacagccaaccccttattctc

SEQ ID NO: 60912 - DNA, 110 bp, synthetic construct
  source 1..110: mol_type = other DNA
ttaaaaatatttccaaaactggaaatgcagcttgaggtagttcagattctatccactccttttcatcaacccaaaaacatttcctacttatctcaaaaggattctaacct

SEQ ID NO: 60913 - DNA, 110 bp, synthetic construct
  source 1..110: mol_type = other DNA
cctttttttttttttaaagttgatcttaattaaaaatcatgacattggttgcttccaagttttggcaatcatgaattaagctactgaaaatatcagtgtgcaggtggttg

SEQ ID NO: 60914 - DNA, 110 bp, synthetic construct; identical to SEQ ID NO: 60913
  source 1..110: mol_type = other DNA

SEQ ID NO: 60915 - DNA, 110 bp, synthetic construct
  source 1..110: mol_type = other DNA
caaaattccaacttaaagggctgctttctaagcactaaaggaccagctgttctcgtttgatttccctttaaaagccaaacctgaaagaaggacttggaggtatatagatt

SEQ ID NO: 60916 - DNA, 110 bp, synthetic construct
  source 1..110: mol_type = other DNA
agttttccacttccatttcctagttattgggctggactaatgcactaatgctggttaaagcaggaaatatgtggaccctggcacagtcagatctgaatacattccttgca

SEQ ID NO: 60917 - DNA, 110 bp, synthetic construct
  source 1..110: mol_type = other DNA
gtcttttaccatactttgtgcatttattactgtggctattaatttaataaagtggcttaactaaaatgtgttaaatggagaaataagaccaagcacttcctttggtttaa

SEQ ID NO: 60918 - DNA, 110 bp, synthetic construct
  source 1..110: mol_type = other DNA
ccgacttcttcatgacagtagtgtaagtggtcttctaatgcagttggtaatgatatgatcttgtctttctaagtgactgtcattcaaagtaatgccataagaacacattt

SEQ ID NO: 60919 - DNA, 110 bp, synthetic construct
  source 1..110: mol_type = other DNA
cagtagtgtaagtggtcttctaatgcagttggtaatgatatgatcttgtctttctaagtgactgtcattcaaagtaatgccataagaacacatttttataaaaatgacaa

SEQ ID NO: 60920 - DNA, 110 bp, synthetic construct
  source 1..110: mol_type = other DNA
gctattcgctttgctcagatctgtttttctctagacatctgtgtttttcatgcctcatgtctttgatagctttgtctacattttactgaagtgaacagtcgctgcaccac

SEQ ID NO: 60921 - DNA, 110 bp, synthetic construct
  source 1..110: mol_type = other DNA
gacccctagcctgggaccctccatatgtggcgggtgcagccctcaaatgacaaaaacaaacaaacgaaaaacccactcaatttaaatttccaaaccacgtaactattgaa

SEQ ID NO: 60922 - DNA, 110 bp, synthetic construct; identical to SEQ ID NO: 60921
  source 1..110: mol_type = other DNA

SEQ ID NO: 60923 - DNA, 110 bp, synthetic construct
  source 1..110: mol_type = other DNA
ctgaggtggaaacagatttgggggtgattagcttatgttgaccactagatttgcctatttaacccagaaagagatggaccgtaaagagtctgctagaattgacaatgatc

SEQ ID NO: 60924 - DNA, 110 bp, synthetic construct
  source 1..110: mol_type = other DNA
tgaattctgttctcttaaacatctagctgaataactctgttatcattctttctcgaatgccactgctacttaaaatttcaaaacctcaattataatcactgatctttaat

SEQ ID NO: 60925 - DNA, 110 bp, synthetic construct
  source 1..110: mol_type = other DNA
aagaatttaacatgctctcctttttctcagtttcatagaattattattcccatttgcaaaatatctagaaagttgagagggagcttgcttgttcttatcctctggagatc

SEQ ID NO: 60926 - DNA, 110 bp, synthetic construct
  source 1..110: mol_type = other DNA
gagatccacagagaattgtctcttaatattgactcccttaaagattttttttcgtcagggcacttgcccttgtcgatatgtaacttttgggccattaccatgaaatatta

SEQ ID NO: 60927 - DNA, 110 bp, synthetic construct
  source 1..110: mol_type = other DNA
gggtcctactcttatggcttcatttacccttaactacctccataaaggccctagtacagtcacattaggggttaagcttcaacatatgaacaaggggtaagggcaccaat

SEQ ID NO: 60928 - DNA, 110 bp, synthetic construct
  source 1..110: mol_type = other DNA
ccactatttctgctccaacacccaggtccgaggaagtctgaacgtcctcagtacagcaacccagcgggccgctcggccgctgggaggctgaagaaacgtccgcactgggc

SEQ ID NO: 60929 - DNA, 110 bp, synthetic construct
  source 1..110: mol_type = other DNA
cacaaacctcagcctgcatggccagtcttcagctgtgcttctaacctctgacaatcacctctttggtctctcatggacctacagctatgtacatgggtaatgagatttcc

SEQ ID NO: 60930 - DNA, 110 bp, synthetic construct
  source 1..110: mol_type = other DNA
ctttgctttctgttgatctaactttaggaaaatttaaatggaagaattaaaattgttggctcaataatgtatccagtgggagttcacgttgtgactcagtgggttaagaa

SEQ ID NO: 60931 - DNA, 110 bp, synthetic construct
  source 1..110: mol_type = other DNA
gcacttttagcacaaaagatgaaagtgtacccaacaacatggatatcaatgactctgagtttaaatatgatcaaaaaagctggactctgaacatgaagaattttagaaat

SEQ ID NO: 60932 - DNA, 110 bp, synthetic construct
  source 1..110: mol_type = other DNA
gaaagtacattttcagagagagagatagtgcccttgtgcaagcaaaaagagggtccacctcactttaaaattgtttttatatccccatggataccttatttgcgtgggga

SEQ ID NO: 60933 - DNA, 110 bp, synthetic construct
  source 1..110: mol_type = other DNA
agttaccatccaaaaagtaattattcttgaatgattttagaagtgagtagggtgatctgtctgcttaagctttttagttatctaaattctgtgtaaaatacagtcctatc

SEQ ID NO: 60934 - DNA, 110 bp, synthetic construct
  source 1..110: mol_type = other DNA
gccaagccattcttggacagtcttatgatgagccacatcatagagttctgccttccctgggagccaagttagagatggctgtaattgagttagattcccatccctggtac

SEQ ID NO: 60935 - DNA, 110 bp, synthetic construct
  source 1..110: mol_type = other DNA
gcattacagtgcagcatatacctgtgggggggaaaagagagagggaaaaaaaaggggggtcttgcatagttggcttggtttagattactcacaggtgagctggtggtaga

SEQ ID NO: 60936 - DNA, 110 bp, synthetic construct
  source 1..110: mol_type = other DNA
atccattccctttcatattcttttcccatatagccattgcacagtactgagtgtattacaagttatagctcttccttttatgtctgcaagtgacatccagtggagggtgt

SEQ ID NO: 60937 - DNA, 110 bp, synthetic construct
  source 1..110: mol_type = other DNA
ttacaagttatagctcttccttttatgtctgcaagtgacatccagtggagggtgtgagagcttcccattcaggcctcccaattccactttaaatgagatttctgtatact

SEQ ID NO: 60938 - DNA, 110 bp, synthetic construct
  source 1..110: mol_type = other DNA
agccgaactaaggctacacagttgtttgctaggcagcaaaccccagaacctaagtttgctgatgcccagcttaggctcttttcattattgcagggtgcttctcataaaga

SEQ ID NO: 60939 - DNA, 110 bp, synthetic construct
  source 1..110: mol_type = other DNA
aaatagaataagagaggaatctctgttctaagaggacctcttcattgcctttcagataatgtccaggggaggaggctttccatatctaatccaggccttagcactgtaca

SEQ ID NO: 60940 - DNA, 110 bp, synthetic construct
  source 1..110: mol_type = other DNA
ggattgcctttacccctatggggtacataggaaatacaggctcatattctgggcatgtcttaaaagtttagtgttgcataacataactttggctatcaaggtagcaatat

SEQ ID NO: 60941 - DNA, 110 bp, synthetic construct
  source 1..110: mol_type = other DNA
tgtcttaaaagtttagtgttgcataacataactttggctatcaaggtagcaatattcagctaaaagttagatggttctgaaacttaggagagatgtgcgctggaggtatg

SEQ ID NO: 60942 - DNA, 110 bp, synthetic construct
  source 1..110: mol_type = other DNA
agagatgtgatgtccctttcagatttgttaatctagtgttcttttattaccatcatgtgatgctttttcaacaatttctggcaaagtagagctagagcaattactacttt

SEQ ID NO: 60943 - DNA, 110 bp, synthetic construct
  source 1..110: mol_type = other DNA
attaccatcatgtgatgctttttcaacaatttctggcaaagtagagctagagcaattactactttgaaagcatcaagtgtatgtgttttgtaataaattctagtctatcc

SEQ ID NO: 60944 - DNA, 110 bp, synthetic construct
  source 1..110: mol_type = other DNA
aaggactatagaagcacattctttttctctgtcatttaaagtccaatatgtttctccaatgggatagatttgtctggattctgtctagagagacaaatctttaacattat

SEQ ID NO: 60945 - DNA, 110 bp, synthetic construct
  source 1..110: mol_type = other DNA
ttaaagtccaatatgtttctccaatgggatagatttgtctggattctgtctagagagacaaatctttaacattatttacttttagaatttctccttgtgtaacttatgag

SEQ ID NO: 60946 - DNA, 110 bp, synthetic construct
  source 1..110: mol_type = other DNA
caggctaggcatcaaatcagagcttcacctgaggcctatgccacagccagggcaacaaaagatctgagcccagacctgagccgcatctgtgactgcagttttcaggaatg

SEQ ID NO: 60947 - DNA, 110 bp, synthetic construct
  source 1..110: mol_type = other DNA
ctatgccacagccagggcaacaaaagatctgagcccagacctgagccgcatctgtgactgcagttttcaggaatgccggatccttaacccacctagtgaggccagggatc

SEQ ID NO: 60948 - DNA, 110 bp, synthetic construct
  source 1..110: mol_type = other DNA
aagtgttatttactccagttattctcagtgatgccctaatgtccccttcctgtcaaacttttttcaggaacttgttttacactttaattatttgaaaactataacctaac

SEQ ID NO: 60949 - DNA, 110 bp, synthetic construct
  source 1..110: mol_type = other DNA
cagtgatgccctaatgtccccttcctgtcaaacttttttcaggaacttgttttacactttaattatttgaaaactataacctaacattctactccacaaaagtcattttt

SEQ ID NO: 60950 - DNA, 110 bp, synthetic construct
  source 1..110: mol_type = other DNA
gtgtaattctctacaattgtatcacatgtatagctccatataactattaactagaaagattcatcaccatgaggctccctcatctttatttactgctttatagtcttacc

SEQ ID NO: 60951 - DNA, 110 bp, synthetic construct
  source 1..110: mol_type = other DNA
aagtgccttgactgtcagtaactagtttgttaacacccacagtaggaccagtaagttgtaagaagctcatccagaaatcctcagacatggagagctgagagaaaatagat

SEQ ID NO: 60952 - DNA, 110 bp, synthetic construct
  source 1..110: mol_type = other DNA
ccatctcagtcaccttgatatttcaaaagtaccagacaatcaaacaagagatgataaactaatagttaaaaagatattttctaaacaagcaatacgataggcacaggtaa

SEQ ID NO: 60953 - DNA, 110 bp, synthetic construct
  source 1..110: mol_type = other DNA
tgttgattcagcctttttaaacccaagaaagtaaatttagtgaatggaaacattgacttgacaaagaggaaaaaatatctctctccagaccaagccgctctttcacgatt

SEQ ID NO: 60954 - DNA, 110 bp, synthetic construct
  source 1..110: mol_type = other DNA
aaaaattattctccctactacttccccctcttcatatccattcccaagatctttttcagtttggtttctgaaacgaccctccattcaagctcctgtctggtcagcactcc

SEQ ID NO: 60955 - DNA, 110 bp, synthetic construct
  source 1..110: mol_type = other DNA
gtatgaaggaaagactcaagctaagtcctggttttccacttagcaatttggggttttaggacacttcaagtctatgagcctcagatgtctcatctgttaacaatgggatg

SEQ ID NO: 60956 - DNA, 110 bp, synthetic construct
  source 1..110: mol_type = other DNA
agatttagatgctgagaaagggagttttcttggcagctgggtgaaaaatttagccagtgtttaaggtgctagtaaaattccctgtttctggtttctatacttctggtcag

SEQ ID NO: 60957 - DNA, 110 bp, synthetic construct
  source 1..110: mol_type = other DNA
tctgaatctgagacttttcctgggtattccatgttagtcttggctgtaggacagtggtggtatgtgcctgcttaatggtacaagactttgctaagattacagagaaaacc

SEQ ID NO: 60958 - DNA, 110 bp, synthetic construct
  source 1..110: mol_type = other DNA
gcattctggagtcctgcagggacagccctggagcaaggatgagctctctccccaagagaccccactatgcacagagaagagaggcccctgggtcacggtctcatttgagt

SEQ ID NO: 60959 - DNA, 110 bp, synthetic construct
  source 1..110: mol_type = other DNA
aaaaaaaagcacttggttcaagacaagttttctttctttcttttttttttttcaatggctttttaagttttagctcagtaacgcagccagaagggagtaaaagtccctga

SEQ ID NO: 60960 - DNA, 110 bp, synthetic construct
  source 1..110: mol_type = other DNA
tggctttttaagttttagctcagtaacgcagccagaagggagtaaaagtccctgacacctttctcccttgctgcccctgacctagccctctgcctgagggttagggtgcc

SEQ ID NO: 60961 - DNA, 110 bp, synthetic construct
  source 1..110: mol_type = other DNA
tgaggaggtgtcccacaggagggcagtgacagaatccttaccatcgacagagagctggcctcagacagcaacatcccttccatagaaatgaaaagagagaagaaaacaca

SEQ ID NO: 60962 - DNA, 110 bp, synthetic construct
  source 1..110: mol_type = other DNA
tggcctcagacagcaacatcccttccatagaaatgaaaagagagaagaaaacacaatttatgtgtgatgatgtttatctatttggtagagtcatagaaaaaaaaaatgct

SEQ ID NO: 60963 - DNA, 110 bp, synthetic construct; identical to SEQ ID NO: 60961
  source 1..110: mol_type = other DNA

SEQ ID NO: 60964 - DNA, 110 bp, synthetic construct; identical to SEQ ID NO: 60962
  source 1..110: mol_type = other DNA

SEQ ID NO: 60965 - DNA, 110 bp, synthetic construct
  source 1..110: mol_type = other DNA
atggtgtgactttctattccgaagaatactctcagaagtcctatctgcatgacggcgtaatgggtatcctgtttcaggaccttcttcactggagacttcgtcggagacat

SEQ ID NO: 60966 - DNA, 110 bp, synthetic construct
  source 1..110: mol_type = other DNA
gagctttatgttagttctcaagtgctttaaagataattttgttgtagcatttaccatagagtataatttgtttgaattttggttcccctatgatgcagaggtgtcttaag

SEQ ID NO: 60967 - DNA, 110 bp, synthetic construct
  source 1..110: mol_type = other DNA
caaaagacccatcttttacaactcaatcatagattcattgcctttataatcagtagcatccatcacctctacctgcaactacacatgagctcttgcctacccactccaat

SEQ ID NO: 60968 - DNA, 110 bp, synthetic construct
  source 1..110: mol_type = other DNA
tattagaatataatgctatcagtcttatgcatcacttcagagatacatttttagaccactaagaacagtagacacacaggcatgaatcatggctcatttttaatacataa

SEQ ID NO: 60969 - DNA, 110 bp, synthetic construct; identical to SEQ ID NO: 60968
  source 1..110: mol_type = other DNA

SEQ ID NO: 60970 - DNA, 110 bp, synthetic construct
  source 1..110: mol_type = other DNA
aatcatagattactcaaatagcaagaaggcctgagatctgcataaagtgtagggtctcaattacatattagactaatctgaggggctttaaaaatactgattccctggct

SEQ ID NO: 60971 - DNA, 110 bp, synthetic construct
  source 1..110: mol_type = other DNA
gggaggccactgtggtggaaggaatggctagtactggtccatttgcaactaacgcatactcttcttgctgcagctagattcccttaggtgaccagtggatcaataacggg

SEQ ID NO: 60972 - DNA, 110 bp, synthetic construct
  source 1..110: mol_type = other DNA
tttgtatgtaagttcatttgtatcatttttttaaattgcacatataagctttgttactttagaccagacacacctttcacctgtttgagccccagtgtcctcatctgtaa

SEQ ID NO: 60973 - DNA, 110 bp, synthetic construct
  source 1..110: mol_type = other DNA
cgagccctttcccttttgcgctcagcagctccagtaatgttgctgactgactgcaatccctgtgctgtcatgaagggatgctccaagggcctggggaggccaggcaggca

SEQ ID NO: 60974 - DNA, 110 bp, synthetic construct
  source 1..110: mol_type = other DNA
tagtcacctcatgtgatgctgtgcctgtggaggcagaagttcagatttctggatagtttagagcttttctctgtccctagcagcgcctatttatctattaggcaaagaca

SEQ ID NO: 60975 - DNA, 110 bp, synthetic construct
  source 1..110: mol_type = other DNA
ttatgataagagaccccaggtaacaatcttaattttcccaaattcctttaaagtacatttacaaaatggagttactgttttgcttggtgtaattatgttgtttgttggca

SEQ ID NO: 60976 - DNA, 110 bp, synthetic construct
  source 1..110: mol_type = other DNA
atgcattcaacaaatatttaccaagagctgattctgtggttgaagctctactggtgctggaaataccggtttgcagtgaacaaaagagaaaaaaatccctgtccttacaa

SEQ ID NO: 60977 - DNA, 110 bp, synthetic construct
  source 1..110: mol_type = other DNA
gaattcctctgctggagctgttcacctgtgagtgtggtctgttgtgtcacctctttctcagtgtgtggactcacagagtgcactgttgttggcactgctctcagtcacac

SEQ ID NO: 60978 - DNA, 110 bp, synthetic construct
  source 1..110: mol_type = other DNA
tctcagtgtgtggactcacagagtgcactgttgttggcactgctctcagtcacaccttagctgtgggtatatttgtaattggcctttgtgtctctcaggcattattttca

SEQ ID NO: 60979 - DNA, 110 bp, synthetic construct; identical to SEQ ID NO: 60977
  source 1..110: mol_type = other DNA

SEQ ID NO: 60980 - DNA, 110 bp, synthetic construct
  source 1..110: mol_type = other DNA
ggtctgttgtgtcacctctttctcagtgtgtggactcacagagtgcactgttgttggcactgctctcagtcacaccttagctgtgggtatatttgtaattggcctttgtg

SEQ ID NO: 60981 - DNA, 110 bp, synthetic construct
  source 1..110: mol_type = other DNA
attgctctccagcccacttcccagccaccctgtccaccacgaagcctatgtgtaaaccacacacacgtctgagcttatgcacacattgctgcttctgtttagaattgtct

SEQ ID NO: 60982 - DNA, 110 bp, synthetic construct
  source 1..110: mol_type = other DNA
tttctactccaacctgtacctaatagttcagccttgctggctgcctcaacctggtgttggaacttcccgtctaaactatagcatttgccaaaaatcctctaccttttggt

SEQ ID NO: 60983 - DNA, 110 bp, synthetic construct
  source 1..110: mol_type = other DNA
ttcacatcctttcacctgcagattattttttcttgcaagaattaggcaacagcacccaccagctccagaggacacgggtctggtgctctgagtggttctctagctgtcct

SEQ ID NO: 60984 - DNA, 110 bp, synthetic construct
  source 1..110: mol_type = other DNA
gaggttttgggtgagacaggcgatttcaagtgaaattgtaaaatcagagcatgaccctcaaaaggtctcgggttagaccagtagtctcaggtgataccaggatcagaaca

SEQ ID NO: 60985 - DNA, 110 bp, synthetic construct
  source 1..110: mol_type = other DNA
cctcaaaaggtctcgggttagaccagtagtctcaggtgataccaggatcagaacatgatcctggaaaatgaatgtctcaggtgaaactggtgatttcgggtgaaatggga

SEQ ID NO: 60986 - DNA, 110 bp, synthetic construct
  source 1..110: mol_type = other DNA
gagtgaggaaaagaagctttccaccttccgtacagcctggccgtggccttgcaccccgccagcagatccttgcagggtttcgcgtctgcgtcctcgtgggcctgggccag

SEQ ID NO: 60987 - DNA, 110 bp, synthetic construct
  source 1..110: mol_type = other DNA
ccgccagcagatccttgcagggtttcgcgtctgcgtcctcgtgggcctgggccagagtgcgcgctagtgaggcacccacacacgcaaatggatttcctgatccattttac

SEQ ID NO: 60988 - DNA, 110 bp, synthetic construct
  source 1..110: mol_type = other DNA
ctccgtgactctacgtctctgtgttggacaaaagtggagaatattctaaagaagttatataaatggccaaaaacacatgggaaacacatgatcataagtcattagagaaa

SEQ ID NO: 60989 - DNA, 110 bp, synthetic construct
  source 1..110: mol_type = other DNA
ggcataatgctgggcagtggagactaagaaagacaatgaaattggcagtatgtgggatgatgaggagagctttctgtttggagcagaggactcaagtttggaagaagaaa

SEQ ID NO: 60990 - DNA, 110 bp, synthetic construct
  source 1..110: mol_type = other DNA
gatgtccacggcgagtgcttctcttcacccagaattgtcttccaggctcactgcccacaggccagctggacatgaagtgaaatggatgcagtttttttcccaatgatact

SEQ ID NO: 60991 - DNA, 110 bp, synthetic construct
  source 1..110: mol_type = other DNA
cacaggccagctggacatgaagtgaaatggatgcagtttttttcccaatgatactgttcatcagactgactttggtctgattacctggaaattccatttacactgtggtt

SEQ ID NO: 60992 - DNA, 110 bp, synthetic construct
  source 1..110: mol_type = other DNA
atttaaaattgtacctgtggctcacattatacgtctattggacagtgctgaactggagctcagagggagatctgtactgctcatcaactagagaaacattatcacacagg

SEQ ID NO: 60993 - DNA, 110 bp, synthetic construct
  source 1..110: mol_type = other DNA
taaactaagccaacaacaaaatgcactggaaagcacatgctacattcagactttaagaactgtataaccttctatgatccaaaaactgtgctagcattgtaatctgggtt

SEQ ID NO: 60994 - DNA, 110 bp, synthetic construct
  source 1..110: mol_type = other DNA
agaactgtataaccttctatgatccaaaaactgtgctagcattgtaatctgggttttattaactagaaaagcaaaaagagatatttggaactagtttcctgttggcacaa

SEQ ID NO: 60995 - DNA, 110 bp, synthetic construct
  source 1..110: mol_type = other DNA
tcctctgattttgaaggcttataaattaaagtatccaagtaacttagaaatagtgtggggaaaagtattttaaatcttagttataagaggagcgattctcactaacaact

SEQ ID NO: 60996 - DNA, 110 bp, synthetic construct
  source 1..110: mol_type = other DNA
gactgggaatcagaaatctttggctgccgtggtccagaagttggcagcttttccacatttacaaataggaagtgggcaacaaattaaactaggcattgaaacaatcaagt

SEQ ID NO: 60997 - DNA, 110 bp, synthetic construct
  source 1..110: mol_type = other DNA
ttacaagcttttgcacagcaagggaaatcataaatagcaaaaagacaatttacagaatgggagaatatatctgcaagtgaagcgaccaacaaggccttaatttccaaaat

SEQ ID NO: 60998 - DNA, 110 bp, synthetic construct
  source 1..110: mol_type = other DNA
caatttacagaatgggagaatatatctgcaagtgaagcgaccaacaaggccttaatttccaaaatatacaaatacttcatacaactcaacaacaacaaaaccaacaacaa

SEQ ID NO: 60999 - DNA, 110 bp, synthetic construct
  source 1..110: mol_type = other DNA
aaccaaactaaaaatctgatcaactgcactataatacacctagagaaaaaaatgtattaccaaaacatgagtagtgtgcatgcaggagagaccagaaaacaagaaatcca

SEQ ID NO: 61000 - DNA, 110 bp, synthetic construct
  source 1..110: mol_type = other DNA
cggctaactttgaaagtctgttctagcaccaaggctctccttgtggtcagtcaaggctgtcaatggcctgccttgcagctccacttctccctccttccaaccctgcttcc

SEQ ID NO: 61001 - DNA, 110 bp, synthetic construct
  source 1..110: mol_type = other DNA
tgtaagtgtgtgtccagttcaagaatttttttttcagtaaacttctatagttgtgcaaccatcaccataatccagatttagaacatttaaatttcccctaaagttctctt

SEQ ID NO: 61002 - DNA, 110 bp, synthetic construct; identical to SEQ ID NO: 61001
  source 1..110: mol_type = other DNA

SEQ ID NO: 61003 - DNA, 110 bp, synthetic construct
  source 1..110: mol_type = other DNA
ttgcttagatgggactcaggggagtgataataacagtctacaaacgtttaaaatgtgtaaaacaccgagagaaagaagaattatttgaatatgccatgtgggtataataa

SEQ ID NO: 61004 - DNA, 110 bp, synthetic construct
  source 1..110: mol_type = other DNA
cccccccccgtgtttgtctttgcctaagatgttcctgtttctccagttggctctcaccatttggttgttctttgaatcctcaatatccaccaaccattttactgactaag

SEQ ID NO: 61005 - DNA, 110 bp, synthetic construct
  source 1..110: mol_type = other DNA
accatttggttgttctttgaatcctcaatatccaccaaccattttactgactaagatttagagagtacttatttggtaggtacccctccaaggtctttttatattagccc

SEQ ID NO: 61006 - DNA, 110 bp, synthetic construct
  source 1..110: mol_type = other DNA
aacaaggacttttccgtgtataaagacaaattgtagactgacggggtggagagactagacataaaaacagcagcccacacattgcctggggtgggcagggagatgttagg

SEQ ID NO: 61007 - DNA, 110 bp, synthetic construct
  source 1..110: mol_type = other DNA
ccagcctctaccctcatttccacctcacctcctctccaaaagcactggaggttctctcttctctttctctatcctggggtctattacagtcttgatgttcattgacagta

SEQ ID NO: 61008 - DNA, 110 bp, synthetic construct
  source 1..110: mol_type = other DNA
aaagtaggcactctgggagtttgtgaagtgttgaaaagacccatttttcaaatataccttgttgaaagattatgctcttcttcatttcagagacataaaactaggaggtt

SEQ ID NO: 61009 - DNA, 110 bp, synthetic construct
  source 1..110: mol_type = other DNA
catttttcttccagtaagtactcggtaaaatattgtcattccccaacattgacttggataattatcacaacaactacttttcaatttttagacaacagtcgactattttt

SEQ ID NO: 61010 - DNA, 110 bp, synthetic construct
  source 1..110: mol_type = other DNA
acattgacttggataattatcacaacaactacttttcaatttttagacaacagtcgactattttttcttctttaggggtacatggtgtgggaaacattaacgaacataat

SEQ ID NO: 61011 - DNA, 110 bp, synthetic construct
  source 1..110: mol_type = other DNA
gaactctaggtccccaaagcagttttttaaataggcttctcatgcccagtcatttggtcttttagtaacccatgctgacaaccaaaaccaacattttctacctaccaaaa

SEQ ID NO: 61012 - DNA, 110 bp, synthetic construct
  source 1..110: mol_type = other DNA
ggcatgatcaattactaactcaatttcttctctggagaatggagggtagcactgaaaattccatagtataagctgtcatctcatcttgatattgtaagctgccaaattgc

SEQ ID NO: 61013 - DNA, 110 bp, synthetic construct
  source 1..110: mol_type = other DNA
gatggcctcttcttccacttgagtgagtgctggtgcaaaagcctaccctccttaatgggaaccaagactccctgaaaggtaaatttccactttggctcagtgctaaccaa

SEQ ID NO: 61014 - DNA, 110 bp, synthetic construct
  source 1..110: mol_type = other DNA
cagaggttaacaaaacgtgcaattgtcattttaacggggctttctttttccatggttaagtccatgaatcctttttcataaagcaaagaatcatcactgacttaacattt

SEQ ID NO: 61015 - DNA, 110 bp, synthetic construct
  source 1..110: mol_type = other DNA
gaagtttctcatattggctgagcaggtctgcggatacagacgcatatttctctagcgaggaaaatctccatttttaacttagtgttattcttagtttcagtcctgctatc

SEQ ID NO: 61016 - DNA, 110 bp, synthetic construct
  source 1..110: mol_type = other DNA
ttgtgtagtaaactgtgtcaagaggatccagcaaaaggatcacaagagaatataatttctttgtaaaaggtatattatactctggctggaatacttggcctttttctgtg

SEQ ID NO: 61017 - DNA, 110 bp, synthetic construct
  source 1..110: mol_type = other DNA
ataaagtatttctgcttttttgcattgccagcttgctagtacttaatagctttcatttgaatcatgaggttatataaaggatctatggcttgtttacatgctggaactta

SEQ ID NO: 61018 - DNA, 110 bp, synthetic construct
  source 1..110: mol_type = other DNA
tgccagcttgctagtacttaatagctttcatttgaatcatgaggttatataaaggatctatggcttgtttacatgctggaacttaacctgcctttgcactgaattttttt

SEQ ID NO: 61019 - DNA, 110 bp, synthetic construct
  source 1..110: mol_type = other DNA
accccctcctccaccaccacctgctccaggaccacaccttgtacaacagccgagttcccatcagcaacaccctgtagcacacgtagtgggacctgttcatgccgtcaccc

SEQ ID NO: 61020 - DNA, 110 bp, synthetic construct
  source 1..110: mol_type = other DNA
tcccatcagcaacaccctgtagcacacgtagtgggacctgttcatgccgtcacccccgggtcacatattcattctcaaactgctggacaccatttgccaccaccaccccc

SEQ ID NO: 61021 - DNA, 110 bp, synthetic construct
  source 1..110: mol_type = other DNA
gctgtagctctgattcaatccctagcccgggaacttccacatgtcatgggtgtggctctaaaaagacaataaatacatacatacatacatacagtacttttcaaattgta

SEQ ID NO: 61022 - DNA, 110 bp, synthetic construct; identical to SEQ ID NO: 61021
  source 1..110: mol_type = other DNA

SEQ ID NO: 61023 - DNA, 110 bp, synthetic construct
  source 1..110: mol_type = other DNA
aaataatttgctgttgtggatgctgtttcacaaactctagaacgctagcagcaaccctggcctcccgccaccacacatcagttgttcccatcaaaaatgtgtccagatac

SEQ ID NO: 61024 - DNA, 110 bp, synthetic construct
  source 1..110: mol_type = other DNA
taagccctctctgcctagctagacagtgctgagcaaaggatgggatcctaaataaatatgtgttcaattagttaataaagtacagtaggtctgttccactttaaatagct

SEQ ID NO: 61025 - DNA, 110 bp, synthetic construct
  source 1..110: mol_type = other DNA
atatgtgttcaattagttaataaagtacagtaggtctgttccactttaaatagcttttctatgcttttaatccaccttctccttcttactaccaaccttaaccttttttc

SEQ ID NO: 61026 - DNA, 110 bp, synthetic construct
  source 1..110: mol_type = other DNA
aacaccatccacaaatttagctaattcagaaacctgggattcatcctagactcttcccctctcctcccacataaactggacactaaatccagtgacttctctgttgatac

SEQ ID NO: 61027 - DNA, 110 bp, synthetic construct
  source 1..110: mol_type = other DNA
ggcttggcggaaatgaatctgactcgtatccatgaagacacaggttcaacccctggccgtgagtatctggcgttgccttgagctatggtgttggtcacagatgcagctca

SEQ ID NO: 61028 - DNA, 110 bp, synthetic construct
  source 1..110: mol_type = other DNA
gtatccatgaagacacaggttcaacccctggccgtgagtatctggcgttgccttgagctatggtgttggtcacagatgcagctcagatctggctggctgtggctgaggcg

SEQ ID NO: 61029 - DNA, 110 bp, synthetic construct
  source 1..110: mol_type = other DNA
ctccagtttaggtttggccaaattgcaggttatctctgcacccagacaagtgtaagcttcccaagctagctacaaaaagaccgtttcactagaagttattcaactacaat

SEQ ID NO: 61030 - DNA, 110 bp, synthetic construct
  source 1..110: mol_type = other DNA
gcttcccaagctagctacaaaaagaccgtttcactagaagttattcaactacaatttatatgtgctcaggagaaaccatatacagagcttcaaactctttctggaagaag

SEQ ID NO: 61031 - DNA, 110 bp, synthetic construct
  source 1..110: mol_type = other DNA
aaaaaactaccaaaaacccctccctttcctatctgctccctcatgacaacagttaacagaacgagaccctgactgactcttcctcttgcctttgtgagagggtggctgac

SEQ ID NO: 61032 - DNA, 110 bp, synthetic construct
  source 1..110: mol_type = other DNA
ttggacttgggcagccaggcacagcttaccggggttccacagaaaatgccagcactctgggcagacatgcctcacttattcaccctcactgagtccctgtggtctctact

SEQ ID NO: 61033 - DNA, 110 bp, synthetic construct
  source 1..110: mol_type = other DNA
tgtgctggcagctcatggggctctctgactctggggtgcatctaagccaacaagttagcaggtcccagttgcaagccggcacgtgacctgagcagggtcacagcttgagc

SEQ ID NO: 61034 - DNA, 110 bp, synthetic construct
  source 1..110: mol_type = other DNA
tagcaggtcccagttgcaagccggcacgtgacctgagcagggtcacagcttgagccaaccgtgggacttgggccgaatgaaataaacaattcccagcatagcctgaccct

SEQ ID NO: 61035 - DNA, 110 bp, synthetic construct
  source 1..110: mol_type = other DNA
atgctcctctcccgtgccctttctgctcatctgcagcttctgaaaaaggtcacgtctcctttccacttggcagttaagtgcatctgacactaagtgcggactccagaact

SEQ ID NO: 61036 - DNA, 110 bp, synthetic construct
  source 1..110: mol_type = other DNA
ggaactactgccttcagtttagaggaaaatgaggcgcagaaaggtcatacaatgagcccaaggtctcacagctagtaacctaggtctgttggactcccaagttcatgatt

SEQ ID NO: 61037 - DNA, 110 bp, synthetic construct
  source 1..110: mol_type = other DNA
aaacaacaacgtgatgctgcttcacacccacgagcatggctataaccagaaagacagacaataacaaatgctggcaaggatacggagaaattggaaccctcatacattgc

SEQ ID NO: 61038 - DNA, 110 bp, synthetic construct
  source 1..110: mol_type = other DNA
agacaataacaaatgctggcaaggatacggagaaattggaaccctcatacattgctggtgggaagataaaatgatgcagctgcttgggaaaataatttggcagtccctca

SEQ ID NO: 61039 - DNA, 110 bp, synthetic construct
  source 1..110: mol_type = other DNA
tcttactaatcagggaggggctcctagctggcatcaactgccagccaccttaaatgctttgcctgcatagtcatagctaacagttaatatggtgctatggagtgtaccaa

SEQ ID NO: 61040 - DNA, 110 bp, synthetic construct
  source 1..110: mol_type = other DNA
ctgggcttcccctcctcccccagtggacctgcttgggccagggtccattgcctctttgaggaacatataaggtgttcttaaatctagctgatggttagagtcactagggg

SEQ ID NO: 61041 - DNA, 110 bp, synthetic construct
  source 1..110: mol_type = other DNA
taggatatatcccctccaggcagcccacctacacttccccaggcgcacagccctcactacaaagcttccccactcctctggccgcctttgagtctctgccaaaatgcgcg

SEQ ID NO: 61042 - DNA, 110 bp, synthetic construct
  source 1..110: mol_type = other DNA
ttttttgacttttttttttttaaagccagcattattattttgagactcatcaacgttgtgtatatcaacagcttattcctttttattgctgggtggtattccattgtgcg

SEQ ID NO: 61043 - DNA, 110 bp, synthetic construct
  source 1..110: mol_type = other DNA
tttggatgatctgtccagagtgtttctgtactcttctaagagttttatagtattttgtcttagttacatttaggctccttacggtttctttttgttttgtgtatccctga

SEQ ID NO: 61044 - DNA, 110 bp, synthetic construct
  source 1..110: mol_type = other DNA
tgtcttagttacatttaggctccttacggtttctttttgttttgtgtatccctgagctgcttgttgtggatataaggggttttacttctaatctttaaacttcctaacaa

SEQ ID NO: 61045 - DNA, 110 bp, synthetic construct
  source 1..110: mol_type = other DNA
catgtgacgtggttaaaactgtaaattgcttatggattactttcatgcactatatatattatttttcccacaaggaccaaattggcatcttctattttaatctactaaca

SEQ ID NO: 61046 - DNA, 110 bp, synthetic construct
  source 1..110: mol_type = other DNA
ctgggttctttgctcataatctccatggtttgtaatcaaggtgtttgccagggctgtggtctcatgtggggctcagggtcctctttcgtgttcatttgactattggcaga

SEQ ID NO: 61047 - DNA, 110 bp, synthetic construct
  source 1..110: mol_type = other DNA
ggtggcgctgggcagataagcaaattttccaacaatatactcaaactacaaggaccccaagtagctctctaaccacaaagaattgtagaaccaacctgtttgggcgcagt

SEQ ID NO: 61048 - DNA, 110 bp, synthetic construct
  source 1..110: mol_type = other DNA
cccaagtagctctctaaccacaaagaattgtagaaccaacctgtttgggcgcagtaacacattagggaaaaacaggcacctctgcctgaaaactgaatttcatcttggtt

SEQ ID NO: 61049 - DNA, 110 bp, synthetic construct
  source 1..110: mol_type = other DNA
gatttggaaatctgtaccaataaaccttaaattgctcattgttttaaacacaggaaacccagttcctgaaatcatcaaaataaatgttcagatttatgagtcagaggaag

SEQ ID NO: 61050 - DNA, 110 bp, synthetic construct
  source 1..110: mol_type = other DNA
tctgctagcaacattctactttcaatcagaccagaatcttgattatttcagaaaggtcaaaggggaaaataatcaaaccttcatatttttcttgacacagatcaggggga

SEQ ID NO: 61051 - DNA, 110 bp, synthetic construct
  source 1..110: mol_type = other DNA
ccctttcattgctaagatgcactgagctgaattgtgccccctcaccaacaccatcaaattcatgctctcagaacctcagagggtagccttctccagaaagagggtctttg

SEQ ID NO: 61052 - DNA, 110 bp, synthetic construct
  source 1..110: mol_type = other DNA
tctacctgggagcttgccctactctcccaagaaagcctcactgtgtgagtaataggccctcttggttcacatggcattaccaattttgacatatgaaccacaaagtggtt

SEQ ID NO: 61053 - DNA, 110 bp, synthetic construct
  source 1..110: mol_type = other DNA
gccctcttggttcacatggcattaccaattttgacatatgaaccacaaagtggttctctgcctctgaggaatgcccacagatactctaccccaaatcctcccacaccata

SEQ ID NO: 61054 - DNA, 110 bp, synthetic construct
  source 1..110: mol_type = other DNA
acctagtgactcaggctacaacatggtattatgggcaaagctccaaacaaggcacctgaaggacctgggctcccatcctattctgccatctaatggctacatgatagtgt

SEQ ID NO: 61055 - DNA, 110 bp, synthetic construct
  source 1..110: mol_type = other DNA
ggggttgccgagttgcagcagaagctctatttctcagacccttgcaatatctgtggttccatgactaatttgtggccaataaaatgtagatggaaatgccatttgccatt

SEQ ID NO: 61056 - DNA, 110 bp, synthetic construct
  source 1..110: mol_type = other DNA
ggattcgttaatcacggcaccacgacgggaactcccaggctactttgttacagtgacaacagttaacagcgttccttccttttatccaggatgtctgcgtcaaggcttac

SEQ ID NO: 61057 - DNA, 110 bp, synthetic construct
  source 1..110: mol_type = other DNA
ttagtgattaaacaataaagatgaaacaagaaagcacctgtcgacaattgcctgtgtgttattttatttttaatggttatctcattggaaaccaggccttttgttctcat

SEQ ID NO: 61058 - DNA, 110 bp, synthetic construct
  source 1..110: mol_type = other DNA
gacactaagtccattttaacagttccaccctcatgacctaattagcccataaggggccccttccaaataccatcacactggggattatggtttcaatacaaggcatgggg

SEQ ID NO: 61059 - DNA, 110 bp, synthetic construct
  source 1..110: mol_type = other DNA
gccccttccaaataccatcacactggggattatggtttcaatacaaggcatggggtgggggggaagacaaacattaaatgcatagcatcaatcatggaaagtggacctga

SEQ ID NO: 61060 - DNA, 110 bp, synthetic construct
  source 1..110: mol_type = other DNA
ctttagatctttcagttaagtgtttcaaacttttaaaaaatgctgcttttttaattctcaggtccttcttgaattctgttgcatgtgtaaggtaaatagtctgactctaa

SEQ ID NO: 61061 - DNA, 110 bp, synthetic construct
  source 1..110: mol_type = other DNA
aatgatgcagatatacctaagaaaggggccaagaactgattaagtcctgtttgcttggtttgtaggattgtaatagtgtttgtgggtcctagaaaaactaaaaaaaattg

SEQ ID NO: 61062 - DNA, 110 bp, synthetic construct
  source 1..110: mol_type = other DNA
atatgtattccttcttggcagaggtgacatgtatcacctccaggctgaagcttcgggagtataggggaggaaaaattctcctgtaccctctttgggtctctggctgagtt

SEQ ID NO: 61063 - DNA, 110 bp, synthetic construct
  source 1..110: mol_type = other DNA
gggtaggacttcgttgttagaaaaccttttaaaataaattaagggtcagagaacataatttcctggtgtatgcagtgaagaggggagaggagtggcacaagttcattttt

SEQ ID NO: 61064 - DNA, 110 bp, synthetic construct
  source 1..110: mol_type = other DNA
agctagacctcttacagtagatatgcagcttgataaatcaactgatgctaagtctactgctgctgtttgttaggcacatagaggaaaaaaggaccacaagagacttgttg

SEQ ID NO: 61065 - DNA, 110 bp, synthetic construct
  source 1..110: mol_type = other DNA
tgaaaaataacttagctaaaggatgagtgtgtgctagtaagaaaatatagatcccatggaggccacaaatacaaaggaaggcacacccattcacaggttctttgtcagac

SEQ ID NO: 61066 - DNA, 110 bp, synthetic construct
  source 1..110: mol_type = other DNA
aaatagatacacagaagtgaagtcaatgtaggtataaatgactagctcctaactatatggtagatctgcttaagactgccttgacagagatgatgaaactaataagcaca

SEQ ID NO: 61067 - DNA, 110 bp, synthetic construct
  source 1..110: mol_type = other DNA
aagcaaagcatgaatccaaatgtctatttaaactgattcaccccaagttggaaaagtgttattctgatggcaggtaataagggcactcagtctctcagtagtgcgagtat

SEQ ID NO: 61068 - DNA, 110 bp, synthetic construct
  source 1..110: mol_type = other DNA
gtgttattctgatggcaggtaataagggcactcagtctctcagtagtgcgagtatccccatcagtttttaccaccagctcaggattttgaccagagttagtaaattacct

SEQ ID NO: 61069 - DNA, 110 bp, synthetic construct; identical to SEQ ID NO: 61067
  source 1..110: mol_type = other DNA

SEQ ID NO: 61070 - DNA, 110 bp, synthetic construct; identical to SEQ ID NO: 61068
  source 1..110: mol_type = other DNA

SEQ ID NO: 61071 - DNA, 110 bp, synthetic construct
  source 1..110: mol_type = other DNA
taagtaaatgacgtctgcatactaattgcaggacttcttccttaacccacaatgacagcagccagtctggtcttctgacttccaggcagaagaccacacaagtccttttc

SEQ ID NO: 61072 - DNA, 110 bp, synthetic construct
  source 1..110: mol_type = other DNA
cagcagccagtctggtcttctgacttccaggcagaagaccacacaagtccttttctaggcaggaatctctctgacccaagaggaaagacagtgacagagccatgggtgtt

SEQ ID NO: 61073 - DNA, 110 bp, synthetic construct
  source 1..110: mol_type = other DNA
tatgataaaggagccaagaatatacagtggagagatgataatctcttcagtcaatgatgttaggaaaactgaacagccacatacaaaggaatgaaactggaccactatct

SEQ ID NO: 61074 - DNA, 110 bp, synthetic construct
  source 1..110: mol_type = other DNA
aagaatatacagtggagagatgataatctcttcagtcaatgatgttaggaaaactgaacagccacatacaaaggaatgaaactggaccactatcttatattacattacaa

SEQ ID NO: 61075 - DNA, 110 bp, synthetic construct
  source 1..110: mol_type = other DNA
tccatatgccacaggaagaaaaagaaaaaaaatacaatccataattaatggacctcaaattgaatttaaacttcttacctgagtggaatcagaaagcttatcaattgtag

SEQ ID NO: 61076 - DNA, 110 bp, synthetic construct
  source 1..110: mol_type = other DNA
atgacaacttacaactgggtcctgaacacgatggtcaggagctgaaatgccacactagccgccaggcctaaaccgagccccaggacaacagcaaagatgaaggtcatgat

SEQ ID NO: 61077 - DNA, 110 bp, synthetic construct
  source 1..110: mol_type = other DNA
atttccgcatatgtagaatggaaataatgaccccttatgctagagaggagagaatattttagccctaggccaaacatctagctgggcagggacccaggcccacccaccag

SEQ ID NO: 61078 - DNA, 110 bp, synthetic construct
  source 1..110: mol_type = other DNA
attctttttcgtattcttttctgttacgttttattgcaggatattgaacatagtcccctgtgctatacagtaggaccttgtcatttatccattctatatataagagttta

SEQ ID NO: 61079 - DNA, 110 bp, synthetic construct
  source 1..110: mol_type = other DNA
ccctgtgctatacagtaggaccttgtcatttatccattctatatataagagtttacatctactaatcccaaactcccagttcttctttccccctctgccccacttggcaa

SEQ ID NO: 61080 - DNA, 110 bp, synthetic construct
  source 1..110: mol_type = other DNA
tactaatatcgcatcacctgcagagatttaaaaatatccatgtccagataccaactcagactgattgaccaatacatctctgggggttgggccccagcaccagcattttt

SEQ ID NO: 61081 - DNA, 110 bp, synthetic construct
  source 1..110: mol_type = other DNA
tatcggatgggctctggagggattctgaatatcgggtgtaacctcaggtctagagcatggagtcccagctctgtacataagcagcccacacgatcccacaaactcagaat

SEQ ID NO: 61082 - DNA, 110 bp, synthetic construct
  source 1..110: mol_type = other DNA
catggagtcccagctctgtacataagcagcccacacgatcccacaaactcagaatacataaccgactccagtctagaagtatgcctgccagcgacctgccaaacatgctc

SEQ ID NO: 61083 - DNA, 110 bp, synthetic construct
  source 1..110: mol_type = other DNA
ccctctatttgaaaatctcctttctggcatttggcttcccctgccccacaaacacaaagctgtagacactgattcgctcctcgtgtcaccaagaaaaaccctcctctaga

SEQ ID NO: 61084 - DNA, 110 bp, synthetic construct
  source 1..110: mol_type = other DNA
accctttctccctaaaccaggtccagctttacaagttgttttgaccaacaggacgtggaagaaatgctgttgcaggacgtcaagagcctggcgtcttctgccccttctca

SEQ ID NO: 61085 - DNA, 110 bp, synthetic construct
  source 1..110: mol_type = other DNA
acaggcttctgggaaccttccctgtcacagtcccatgctgaaaagggacagaaggagcagagaatgtcagtcacctggcctgcggctcatgtccagctccagaataaagt

SEQ ID NO: 61086 - DNA, 110 bp, synthetic construct
  source 1..110: mol_type = other DNA
agcagagaatgtcagtcacctggcctgcggctcatgtccagctccagaataaagttctttcctctactgagaatcttcccaactctcatttgaaaagtaaacatatgaaa

SEQ ID NO: 61087 - DNA, 110 bp, synthetic construct
  source 1..110: mol_type = other DNA
acagggaaaaggaaatatgcccacgcctacttcacggattttgcccagctgtgtaccatgatgagaaaagccacacagatttattttgtaggtatttcttccatgcaaaa

SEQ ID NO: 61088 - DNA, 110 bp, synthetic construct
  source 1..110: mol_type = other DNA
atgcttcgggtgtggccattaaaaaaaaaaaaaagccaaaaagctggccccatacatcaatgtggtaaaagccacctcacactcgccaaggagagtccaatgagagatcc

SEQ ID NO: 61089 - DNA, 110 bp, synthetic construct
  source 1..110: mol_type = other DNA
ccaaggcaagcctgtggtgtctttttggatttccatttaggaaggttgatttaagaaaagtgaatatggagattggaaactacttagggccatctgtacctgcgattcct

SEQ ID NO: 61090 - DNA, 110 bp, synthetic construct
  source 1..110: mol_type = other DNA
aaaagtgaatatggagattggaaactacttagggccatctgtacctgcgattccttcaaactgtgcttaggcaaagctctgaagagttcctcttagaaacctgttgtcaa

SEQ ID NO: 61091 - DNA, 110 bp, synthetic construct
  source 1..110: mol_type = other DNA
gaaatgttgaacaaaataattgccacctccctcccaatctaagcacctctggacatgggacgtgtccttgacttgcacctggataagtcttttttttaaggcccacaccc

SEQ ID NO: 61092 - DNA, 110 bp, synthetic construct
  source 1..110: mol_type = other DNA
tgggacgtgtccttgacttgcacctggataagtcttttttttaaggcccacacccatggcatatagaagttcccagtctaggggttgagttggagctactacagctgctg

SEQ ID NO: 61093 - DNA, 110 bp, synthetic construct
  source 1..110: mol_type = other DNA
ctcgggatctgagctgtacctgtgacctacaccaccgttcacagcaacgccgggtccttaagctactgagcaagggatcgaaccaccgtccccatgaatactagtcagat

SEQ ID NO: 61094 - DNA, 110 bp, synthetic construct
  source 1..110: mol_type = other DNA
acctctgctcaggggctggggatcccagagtcctgttcagcctctccattgagcacatccaccccaaggattccacacgagctcacccaattcccagtttatacggaact

SEQ ID NO: 61095 - DNA, 110 bp, synthetic construct
  source 1..110: mol_type = other DNA
ataggaaatgaaacttctcagccttcaaaataatcctgtaggacaaaactttggtagatctctttaccatcaaagagcatcagaaaacagtagtcccagctgggctttgt

SEQ ID NO: 61096 - DNA, 110 bp, synthetic construct
  source 1..110: mol_type = other DNA
agatctctttaccatcaaagagcatcagaaaacagtagtcccagctgggctttgttttttgttttgttttattttgttttttgtttgtttttgctttttatggccacacc

SEQ ID NO: 61097 - DNA, 110 bp, synthetic construct
  source 1..110: mol_type = other DNA
ggactccttcagaccagaggtaccatcacagcagaatttgtattctatttcaaactgaccctgtcatttaaatcataattcacaatgggctttataaaagaatatatgct

SEQ ID NO: 61098 - DNA, 110 bp, synthetic construct
  source 1..110: mol_type = other DNA
acaaatccactgccattgtcctccaccgaaaatggtccacaaattgctgatgcagtctatgacctctacagtgggattgaatctggatcaaaaagctggtggctcagcat

SEQ ID NO: 61099 - DNA, 110 bp, synthetic construct
  source 1..110: mol_type = other DNA
tctatgacctctacagtgggattgaatctggatcaaaaagctggtggctcagcatttcctgtcccctctcttttcaaaatcctatactacaaaagggcagagagtaacac

SEQ ID NO: 61100 - DNA, 110 bp, synthetic construct
  source 1..110: mol_type = other DNA
tttctaaaacagactgcacagcttattctgaaaactccgtgattttagctaccgttagaatctcaagagtttacagagccttctgacctgtcctgtggagattaacgata

SEQ ID NO: 61101 - DNA, 110 bp, synthetic construct
  source 1..110: mol_type = other DNA
ctctttggacagggaactgtagggtccgtaagtactggaagtgaggtctagaactttggtacccaaagtgtggcttggggactggcagcattctcatcatctaagagctt

SEQ ID NO: 61102 - DNA, 110 bp, synthetic construct
  source 1..110: mol_type = other DNA
ttggtacccaaagtgtggcttggggactggcagcattctcatcatctaagagcttattaggaatgcagaatctcaggtcctgtcctagacctattgaatctgaagtattg

SEQ ID NO: 61103 - DNA, 110 bp, synthetic construct
  source 1..110: mol_type = other DNA
aactaatgtttatcacctggcatcttatattttatcactgtccactgaatttgtataaaatgtgacgtatctgttaatgatctgcaatataaacttaagaagctgaaagg

SEQ ID NO: 61104 - DNA, 110 bp, synthetic construct; identical to SEQ ID NO: 61103
  source 1..110: mol_type = other DNA

SEQ ID NO: 61105 - DNA, 110 bp, synthetic construct
  source 1..110: mol_type = other DNA
cccgaccacctgtgggatctccccctccaccaccccctctgcacactgtctccacaccttcacttcattgtccgtccaccgcttcagcatgctcactcctttggcacctg

SEQ ID NO: 61106 - DNA, 110 bp, synthetic construct
  source 1..110: mol_type = other DNA
accttcacttcattgtccgtccaccgcttcagcatgctcactcctttggcacctgtgttgttgttttctctactaagagagcttttccttaaaaaagctgcatggcccac

SEQ ID NO: 61107 - DNA, 110 bp, synthetic construct
  source 1..110: mol_type = other DNA
aggttgcctgaaaatacttgcagggaagactggtaaacaggaccatctgcatcgaccccaaagctactaaaacattccccccgagttgcttactgaaacacttcttatag

SEQ ID NO: 61108 - DNA, 110 bp, synthetic construct
  source 1..110: mol_type = other DNA
cagatgtccccctctggtccagaaagctctgtagagggtagccaggtcatgtacgcaaacatggctgccaggcttctacttctgtgatcctgtggattgaggggctgagt

SEQ ID NO: 61109 - DNA, 110 bp, synthetic construct
  source 1..110: mol_type = other DNA
tgggggttaagcagtctggcccatttaatttaattagggacatctctgaagagtccatgcaactccagagctcctcttgatatctacggaagcctctaataaaattgcat

SEQ ID NO: 61110 - DNA, 110 bp, synthetic construct
  source 1..110: mol_type = other DNA
aaggaaagtgccagcacaaggaaaataagctctttcctcttacaatgtccctccagcatcccctcctgacaagtcctattgctaggacaactggctaggagaaatgatta

SEQ ID NO: 61111 - DNA, 110 bp, synthetic construct
  source 1..110: mol_type = other DNA
tcccctaatgctttacaccctgtatttgatacttaaccagctctcaccacctctaccaccaccctcatccactaagtcgctatgccctctctctcctgagttactgccat

SEQ ID NO: 61112 - DNA, 110 bp, synthetic construct
  source 1..110: mol_type = other DNA
gtaagtgtaataacacgtggaagacacttagcctaatgatacgtgtgtacgtcctagaagctcagagacccaccatcgtaatcactgttaaccatcattgttccttttgg

SEQ ID NO: 61113 - DNA, 110 bp, synthetic construct
  source 1..110: mol_type = other DNA
agaagctcagagacccaccatcgtaatcactgttaaccatcattgttccttttggttgagagtatgagtgattatattttctaggggtttttaaactacacggaaaagtc

SEQ ID NO: 61114 - DNA, 110 bp, synthetic construct
  source 1..110: mol_type = other DNA
gctcagaactgcaagcagaggggccagatggggtgggaattagatctggagattcagcttgcctgttgtctggtggagtgagcggtcctgaactgggctaagctccctgc

SEQ ID NO: 61115 - DNA, 110 bp, synthetic construct
  source 1..110: mol_type = other DNA
agcttgcctgttgtctggtggagtgagcggtcctgaactgggctaagctccctgcagttccgcggttcagtgttcatgctgttgccatggtcctgtccagaaatacacca

SEQ ID NO: 61116 - DNA, 110 bp, synthetic construct
  source 1..110: mol_type = other DNA
tgtatgcttgcctcccaccccagagaggcacctggtcacacttagaggcttccaaagggagattgtgaggacccagagtccactgagtgtggtgggggagctggggtgtc

SEQ ID NO: 61117 - DNA, 110 bp, synthetic construct
  source 1..110: mol_type = other DNA
agggagattgtgaggacccagagtccactgagtgtggtgggggagctggggtgtcaggatggtcagagcaccacctactgccctgctttgcccgagacgcccagtccgac

SEQ ID NO: 61118 - DNA, 110 bp, synthetic construct
  source 1..110: mol_type = other DNA
cttgaggaagggtaggcagctgacagtcacacttggaagaccctctgacttgacagcctttgacgggtccctggcattggaaagtaaaaccacctactccatgctgatcc

SEQ ID NO: 61119 - DNA, 110 bp, synthetic construct
  source 1..110: mol_type = other DNA
agggtccgggtgaaagtaagggtatccccaccctaaaatactcttactttgaaaacggatggagccaaaaagagaacaagcttttagaaacacaaagggagagcacaacc

SEQ ID NO: 61120 - DNA, 110 bp, synthetic construct
  source 1..110: mol_type = other DNA
cggatggagccaaaaagagaacaagcttttagaaacacaaagggagagcacaacctgggaatgaaaactgctcaagtttggtgccaaggccaggatgtaggctggtaaga

SEQ ID NO: 61121 - DNA, 110 bp, synthetic construct
  source 1..110: mol_type = other DNA
tctatctgaggttcatggattccagggtgtccctgaatgacctgaaatgatatacataatgcagtatgggtgtgcttactggaagaggctcatagcttccatcaggtgaa

SEQ ID NO: 61122 - DNA, 110 bp, synthetic construct
  source 1..110: mol_type = other DNA
ataatgcagtatgggtgtgcttactggaagaggctcatagcttccatcaggtgaaaaaccactgctctgaagtctaagagacagcatggcaccatgaaaacaaaacaagt

SEQ ID NO: 61123 - DNA, 110 bp, synthetic construct
  source 1..110: mol_type = other DNA
agctgtagcctatgctacagcacaacaacccagatctgagccacatctacaatttatgccacagcttgcagcaacgctgaatccctacacacttagcaaggctagggatc

SEQ ID NO: 61124 - DNA, 110 bp, synthetic construct
  source 1..110: mol_type = other DNA
ctgagccacatctacaatttatgccacagcttgcagcaacgctgaatccctacacacttagcaaggctagggatcaaaccctcatcttcacagagacaatgttgggtcct

SEQ ID NO: 61125 - DNA, 110 bp, synthetic construct; identical to SEQ ID NO: 61123
  source 1..110: mol_type = other DNA

SEQ ID NO: 61126 - DNA, 110 bp, synthetic construct
  source 1..110: mol_type = other DNA
tacagcacaacaacccagatctgagccacatctacaatttatgccacagcttgcagcaacgctgaatccctacacacttagcaaggctagggatcaaaccctcatcttca

SEQ ID NO: 61127 - DNA, 110 bp, synthetic construct
  source 1..110: mol_type = other DNA
taaaaagacaaaaaaaaaaaatgattacctgagctaatatacatacctgcaagtcagaagtgaatgtgggcaaacatcctaactatgcattgaggggccagccttgaata

SEQ ID NO: 61128 - DNA, 110 bp, synthetic construct
  source 1..110: mol_type = other DNA
aaatgaaagagatggaggaggaacttacagactgaaacaagacttaagagacatagcaatcaccatgtgtagacttatttaagctctgattcaggcaaactaagagaaaa

SEQ ID NO: 61129 - DNA, 110 bp, synthetic construct
  source 1..110: mol_type = other DNA
tctttctagacctctcagcaccacatcaaccctctccttcgaccctgtgacccacacactcaccagccgccactaccacccacggcatttagtccttagattctttctcc

SEQ ID NO: 61130 - DNA, 110 bp, synthetic construct
  source 1..110: mol_type = other DNA
acactcaccagccgccactaccacccacggcatttagtccttagattctttctcctgctttttcacattctctgccaaagtaatcacttccacccttgtgacttacaata

SEQ ID NO: 61131 - DNA, 110 bp, synthetic construct; identical to SEQ ID NO: 61129
  source 1..110: mol_type = other DNA

SEQ ID NO: 61132 - DNA, 110 bp, synthetic construct; identical to SEQ ID NO: 61130
  source 1..110: mol_type = other DNA

SEQ ID NO: 61133 - DNA, 110 bp, synthetic construct
  source 1..110: mol_type = other DNA
cctttggccaattatcatgttttttcacccctgactggacctaggaccctccccactatgtgtgtgcatcttttgggaaagacggattccggagcagagggtgccaggat

SEQ ID NO: 61134 - DNA, 110 bp, synthetic construct
  source 1..110: mol_type = other DNA
ctatgtgtgtgcatcttttgggaaagacggattccggagcagagggtgccaggatggtgtcaggacttactatggcctggtgtccccttcctttctgatccctagaaagt

SEQ ID NO: 61135 - DNA, 110 bp, synthetic construct
  source 1..110: mol_type = other DNA
ccacaggtccttggcctttttccttgaaaagattgttaacgaccaatgaatcaagtcaaggaccttcatccagagttggtgtagcctgtcaagtagcttcacatgaagat

SEQ ID NO: 61136 - DNA, 110 bp, synthetic construct
  source 1..110: mol_type = other DNA
tcaaggaccttcatccagagttggtgtagcctgtcaagtagcttcacatgaagatctcagggaggaagggcaggtgctcatccatttgccagcagctcttgaggccccag

SEQ ID NO: 61137 - DNA, 110 bp, synthetic construct
  source 1..110: mol_type = other DNA
tattacctaaagttaggagtaggtagggttctagtcctggatgtaaagaatcctttctctctttgtggtggtgtatttgggaatttaatgcttaagttcttgaaaacact

SEQ ID NO: 61138 - DNA, 110 bp, synthetic construct
  source 1..110: mol_type = other DNA
tatagattgcttttgaaatttaaaacaaaataaagaccctcaattggagttctcattgtggctcagtggtcacgaacccatattctcttctttatgtaaaattttaaagt

SEQ ID NO: 61139 - DNA, 110 bp, synthetic construct
  source 1..110: mol_type = other DNA
acctggaaatgatgctgttattagtcatctgctgttattagttgtagggtttgggtggtttccagcttgaattttgtattgagtacaaagactcaatcacgttctccaag

SEQ ID NO: 61140 - DNA, 110 bp, synthetic construct
  source 1..110: mol_type = other DNA
tggtttccagcttgaattttgtattgagtacaaagactcaatcacgttctccaagggtaattacttttagacttggaaatatttctaagtcacggtccctaaagtatcac

SEQ ID NO: 61141 - DNA, 110 bp, synthetic construct
  source 1..110: mol_type = other DNA
ttaaaaattggggggaggacgttctctatgtgattagaaaggggagctgcttgttcttcttgacttactaactttcgagcttaagaatatggagaaagtcggagttcccg

SEQ ID NO: 61142 - DNA, 110 bp, synthetic construct
  source 1..110: mol_type = other DNA
aggcctgctgggaagaggacttctaaaacaacagatatgctgggaagtttatggtccaagaccatttttgctggttataagcgggcctcccgaaccagagggagcacaca

SEQ ID NO: 61143 - DNA, 110 bp, synthetic construct
  source 1..110: mol_type = other DNA
aggacttctaaaacaacagatatgctgggaagtttatggtccaagaccatttttgctggttataagcgggcctcccgaaccagagggagcacacagctcttcttaaaatt

SEQ ID NO: 61144 - DNA, 110 bp, synthetic construct; identical to SEQ ID NO: 61142
  source 1..110: mol_type = other DNA

SEQ ID NO: 61145 - DNA, 110 bp, synthetic construct; identical to SEQ ID NO: 61142
  source 1..110: mol_type = other DNA

SEQ ID NO: 61146 - DNA, 110 bp, synthetic construct
  source 1..110: mol_type = other DNA
cttttactcgccactcatctgcactgttactgacagctcttagactatgtcattcattgacttttatgtccacctcacaaccaggtagcatctataccacttctcagaca

SEQ ID NO: 61147 - DNA, 110 bp, synthetic construct
  source 1..110: mol_type = other DNA
caaacactgttggctggggagagatgggtaataaaagtcccaagcttccctttagggtttcacattggagacaggtcctaaatcccaaaaatacagtaggcacattccat

SEQ ID NO: 61148 - DNA, 110 bp, synthetic construct
  source 1..110: mol_type = other DNA
aaagaatatccaagtgacaagttcatgaacaggatgaaacaagcttctgaaagagaaacagagagctttagcctcaacctggacaatggactggctatggtagagggagt

SEQ ID NO: 61149 - DNA, 110 bp, synthetic construct
  source 1..110: mol_type = other DNA
aaacagagagctttagcctcaacctggacaatggactggctatggtagagggagtccttggataatggcacctgtggtccagtatctccatccagccagaccagggactg

SEQ ID NO: 61150 - DNA, 110 bp, synthetic construct
  source 1..110: mol_type = other DNA
ggttagtttccctcatatatttaccttccacagttttccaccccttttcctgtcttgtcacttctcttcaaacttcctgttatttgccaggaagctttataagcccgagt

SEQ ID NO: 61151 - DNA, 110 bp, synthetic construct
  source 1..110: mol_type = other DNA
tgtcacttctcttcaaacttcctgttatttgccaggaagctttataagcccgagttctaagcaccctctgaggaacgcatcactgagtttttctttcacttgtatgtgcg

SEQ ID NO: 61152 - DNA, 110 bp, synthetic construct
  source 1..110: mol_type = other DNA
tcaacaacattaagatctacttgggctcatgccagccctttttcctgggccaccgaaatcctgctcctgttagtaaaggatgcttatttgtcaaatgcagggcaatagga

SEQ ID NO: 61153 - DNA, 110 bp, synthetic construct
  source 1..110: mol_type = other DNA
gcaagcttggtccccacacaggttacggggtgctggctctaggccccagccactctccttcccgagatggaaatctgcccccaggaccagcaattctaacgtcaccctca

SEQ ID NO: 61154 - DNA, 110 bp, synthetic construct
  source 1..110: mol_type = other DNA
tcctttcctggaaagctgttctcccatttcagtccttcgaagaagagaccacattaggaatgcctgtaagtttggtcaagaatcttgagagtggggggagcaggatggca

SEQ ID NO: 61155 - DNA, 110 bp, synthetic construct
  source 1..110: mol_type = other DNA
aggaatgcctgtaagtttggtcaagaatcttgagagtggggggagcaggatggcagtgcaattgtttggaagtgaggcctaaagggtataaagagaattatatatgaaaa

SEQ ID NO: 61156 - DNA, 110 bp, synthetic construct
  source 1..110: mol_type = other DNA
tccctcagagcaatgtccccaggataaggtactgaatattaaagctagggaaacttattctcagtatgtcaagaaaatgttgaggttattttgtctgataattgcattgg

SEQ ID NO: 61157 - DNA, 110 bp, synthetic construct
  source 1..110: mol_type = other DNA
atgctcattgaacatttattttatgagccgtgttgaagtgtgtgtgtctgtgtatgtgtgtatctaggatatggaaacccaagctttggcttctgctcaaacttccacgc

SEQ ID NO: 61158 - DNA, 110 bp, synthetic construct
  source 1..110: mol_type = other DNA
ctgaacagacagtgagtaaagggttaacttcaagctcaggctggtccagacccgccagagagaatgactttggcctctaccttctaactaccttgtttccttaggaggct

SEQ ID NO: 61159 - DNA, 110 bp, synthetic construct
  source 1..110: mol_type = other DNA
ctgttagcttcggtaccctgggctagatcaagcagaactccagcctttcgaggatgtgtggaggtggggcctcttctgggaagctgcagacccagagttccatggcacaa

SEQ ID NO: 61160 - DNA, 110 bp, synthetic construct
  source 1..110: mol_type = other DNA
cgttgggttcagtccatgaaccagcggggacgaagctcagcatctgggcttgcagtttttatccttcagttctatgtttttttacttgagctcatgtactcccagggcat

SEQ ID NO: 61161 - DNA, 110 bp, synthetic construct
  source 1..110: mol_type = other DNA
tttttatccttcagttctatgtttttttacttgagctcatgtactcccagggcattattcaccctggttcccatccgtttactcctggtccgcttgttgcttctcccgcc

SEQ ID NO: 61162 - DNA, 110 bp, synthetic construct
  source 1..110: mol_type = other DNA
gtggagtccaccatagaaagctatgtggtctgcaggtcttttctctaaagtcactgagagaaggttggatggcatccatttttgtctattcagtatggcactttctgttg

SEQ ID NO: 61163 - DNA, 110 bp, synthetic construct
  source 1..110: mol_type = other DNA
agaatcagcattctgcactgtaccagtctgtgaaggatggtttttggcattctctggcttctcaaatacagcttaaatggcaaatcatttacagagtttaacaggtgaga

SEQ ID NO: 61164 - DNA, 110 bp, synthetic construct
  source 1..110: mol_type = other DNA
ggcttctcaaatacagcttaaatggcaaatcatttacagagtttaacaggtgagattgagaaacaaaaaagtagagagcactggtgtgtacttaacatcttaattgtaga

SEQ ID NO: 61165 - DNA, 110 bp, synthetic construct; identical to SEQ ID NO: 61163
  source 1..110: mol_type = other DNA

SEQ ID NO: 61166 - DNA, 110 bp, synthetic construct; identical to SEQ ID NO: 61164
  source 1..110: mol_type = other DNA

SEQ ID NO: 61167 - DNA, 110 bp, synthetic construct
  source 1..110: mol_type = other DNA
tttaaggagatctgatcacaggtaagaacggacaatcctcactggtcaagaaggccagacacagaaggaaggccctgcaggacctctgcacagacttgaagctcccacat

SEQ ID NO: 61168 - DNA, 110 bp, synthetic construct
  source 1..110: mol_type = other DNA
cagacacagaaggaaggccctgcaggacctctgcacagacttgaagctcccacattagcgggcaatgggcaggcaggggagagcggtgttggccacaagagcatgcttat

SEQ ID NO: 61169 - DNA, 110 bp, synthetic construct
  source 1..110: mol_type = other DNA
gacgttccttctgttcggtgcaagacggagacatacctctgagtgggtaggaacagctcagtctctgagttctccccccaccccccatcttctcaagtcacttatagtct

SEQ ID NO: 61170 - DNA, 110 bp, synthetic construct
  source 1..110: mol_type = other DNA
tcttcccactgaataaagtctccaggtctggtttggacccatccattctagagtacacagagctcattgaagaagtcagtttctcataatttccatccttgtttttaaca

SEQ ID NO: 61171 - DNA, 110 bp, synthetic construct
  source 1..110: mol_type = other DNA
tagcaaaatttaacttttaagaaaagagctgccctgaggtggaaaagagttggcgtcagacccataggcctcctggcacctactgtctgtgggagaaaggcaaggggctt

SEQ ID NO: 61172 - DNA, 110 bp, synthetic construct
  source 1..110: mol_type = other DNA
aacttactcattcactcaacaaatattatcatgtatctactgggagaccaatacagagctaggcaccatagaaaccacaacaaaaaaagcattcataaatttctgcagct

SEQ ID NO: 61173 - DNA, 110 bp, synthetic construct
  source 1..110: mol_type = other DNA
gagctaggcaccatagaaaccacaacaaaaaaagcattcataaatttctgcagcttacattcttacattctagtagcgaaaagaaaacaggcaataaaatatgtatttat

SEQ ID NO: 61174 - DNA, 110 bp, synthetic construct
  source 1..110: mol_type = other DNA
catttgttttaagcatatttgcaattattcattgaagcatttttatcatagctcgtttaaactacttatcagagaattctcacatctctgtcatctcagtgttcacatct

SEQ ID NO: 61175 - DNA, 110 bp, synthetic construct; identical to SEQ ID NO: 61174
  source 1..110: mol_type = other DNA

SEQ ID NO: 61176 - DNA, 110 bp, synthetic construct
  source 1..110: mol_type = other DNA
actcaacctatcaatgctggcttgaggatggagagagctgcataagaagggtcacagatggccagaaggaaagtagccttggctgacatccagtggggaaacatggtcct

SEQ ID NO: 61177 - DNA, 110 bp, synthetic construct
  source 1..110: mol_type = other DNA
gtgtaggagggggtattagggggcgagcagggcacccctgtggggccacacttaggttaggatgcttctccagtgtatgagacgggagaagttaagccacacgaaatttg

SEQ ID NO: 61178 - DNA, 110 bp, synthetic construct
  source 1..110: mol_type = other DNA
gttaggatgcttctccagtgtatgagacgggagaagttaagccacacgaaatttgcctacaggctcgaagattgcaaggcaggcatgaggtagagtgaagatagaatagc

SEQ ID NO: 61179 - DNA, 110 bp, synthetic construct
  source 1..110: mol_type = other DNA
tctaggttctttccttaagatcttcaggagcacccagtgaataaattatattacagtctcttatcacattagttataattctttgtttctcacttctctcctacctagta

SEQ ID NO: 61180 - DNA, 110 bp, synthetic construct
  source 1..110: mol_type = other DNA
caatggagagggcatttacttaacaaaagaataaagtgttcttctatgttccacagctggtttttaaaaattaatcagagtgacttccccttgttttagataggtgacta

SEQ ID NO: 61181 - DNA, 110 bp, synthetic construct
  source 1..110: mol_type = other DNA
ttaggaaataactatatggtaaaagattgttcgtatagtgcttaaaatataccacacaatggatgtactgacataagatgttgtatttcatctgctctgtaagcctgttt

SEQ ID NO: 61182 - DNA, 110 bp, synthetic construct
  source 1..110: mol_type = other DNA
atggtaaaagattgttcgtatagtgcttaaaatataccacacaatggatgtactgacataagatgttgtatttcatctgctctgtaagcctgtttaaagattattatcac

SEQ ID NO: 61183 - DNA, 110 bp, synthetic construct
  source 1..110: mol_type = other DNA
cagggatgaaaagattctttaataactgcaaattaatccatgtgatgcaccgtatcaacaaactgaaatataaaaaccatgtaatcatttcaatagatgcagaaaaagct

SEQ ID NO: 61184 - DNA, 110 bp, synthetic construct; identical to SEQ ID NO: 61183
  source 1..110: mol_type = other DNA

SEQ ID NO: 61185 - DNA, 110 bp, synthetic construct
  source 1..110: mol_type = other DNA
taagcttttatagagataaacacagggataaccttgtctattgtgaggaatcagaatattaataatacttttttattgtccctcaatgaaggaatcacgattccccactc

SEQ ID NO: 61186 - DNA, 110 bp, synthetic construct
  source 1..110: mol_type = other DNA
cttcttcagtcttgagcctactgctttcagactagatcttatggccttggctcacctggtcctcagacctttggacttgcagcgaaactatactataggctctcctgggt

SEQ ID NO: 61187 - DNA, 110 bp, synthetic construct
  source 1..110: mol_type = other DNA
ctggtcctcagacctttggacttgcagcgaaactatactataggctctcctgggtctccagcttttgacctctcagcctctagaaattcataagcccattccttctaata

SEQ ID NO: 61188 - DNA, 110 bp, synthetic construct
  source 1..110: mol_type = other DNA
tattcttctgctagggaaaggactagctagatgcagaagtcctaagtaaatattccatgaatgtggaaatgaaccagacatcatgaactcccccaaatgtcttttactgt

SEQ ID NO: 61189 - DNA, 110 bp, synthetic construct
  source 1..110: mol_type = other DNA
gctagatgcagaagtcctaagtaaatattccatgaatgtggaaatgaaccagacatcatgaactcccccaaatgtcttttactgtaagttatttttaacatttatttcat

SEQ ID NO: 61190 - DNA, 110 bp, synthetic construct
  source 1..110: mol_type = other DNA
agaatatggacaaagccacaggatcaagttcatatcacacaagaagaagctagtgagtgatctagttctagcatcagtcaccttctgatcaaggaactatttgacttcta

SEQ ID NO: 61191 - DNA, 110 bp, synthetic construct
  source 1..110: mol_type = other DNA
agtgatctagttctagcatcagtcaccttctgatcaaggaactatttgacttctagcagcgtaaatctcatgtctgtcagacctctttttagactaatataatctaaata

SEQ ID NO: 61192 - DNA, 110 bp, synthetic construct; identical to SEQ ID NO: 61190
  source 1..110: mol_type = other DNA

SEQ ID NO: 61193 - DNA, 110 bp, synthetic construct; identical to SEQ ID NO: 61191
  source 1..110: mol_type = other DNA

SEQ ID NO: 61194 - DNA, 110 bp, synthetic construct
  source 1..110: mol_type = other DNA
ttgctgtcagtctctgattttactttctaacctcttgagagcctgagtaatgatgaagctagctcttacaggtggattactcagctcctttcccctctggcacctgggtg

SEQ ID NO: 61195 - DNA, 110 bp, synthetic construct
  source 1..110: mol_type = other DNA
tagctaggagttgctttaaaaattcatgaagtattcttgtacaattttggtgctaattgttggcattcacattagagtagttacaactagcaaaagatcttaatcacacc

SEQ ID NO: 61196 - DNA, 110 bp, synthetic construct; identical to SEQ ID NO: 61195
  source 1..110: mol_type = other DNA

SEQ ID NO: 61197 - DNA, 110 bp, synthetic construct
  source 1..110: mol_type = other DNA
aaggtaaatcatatataaatggccacatgcaatttttttccaggaagttattgggtgtacttgttgttatatacaagcaaaattgtctaatggatgtaggaaatccgcct

SEQ ID NO: 61198 - DNA, 110 bp, synthetic construct; identical to SEQ ID NO: 61197
  source 1..110: mol_type = other DNA

SEQ ID NO: 61199 - DNA, 110 bp, synthetic construct; identical to SEQ ID NO: 61197
  source 1..110: mol_type = other DNA

SEQ ID NO: 61200 - DNA, 110 bp, synthetic construct; identical to SEQ ID NO: 61197
  source 1..110: mol_type = other DNA

SEQ ID NO: 61201 - DNA, 110 bp, synthetic construct
  source 1..110: mol_type = other DNA
acattttttttttcttcttgtggttgcacctgtggcattggaagttcccaacccaggagtcaaattggagctgcagtggtgacctatgccacagccacagcaatgctgga

SEQ ID NO: 61202 - DNA, 110 bp, synthetic construct
  source 1..110: mol_type = other DNA
cattggaagttcccaacccaggagtcaaattggagctgcagtggtgacctatgccacagccacagcaatgctggatttgaacctcatctgtgaccaacaccacagcctgc

SEQ ID NO: 61203 - DNA, 110 bp, synthetic construct
  source 1..110: mol_type = other DNA
tgcatgtggtgagtctgggtcaggagtaaaaaccaaactagcccagggctaacctgcctgtgaagagagactgaacacagctgcttcctgacttagagatatggctaata

SEQ ID NO: 61204 - DNA, 110 bp, synthetic construct
  source 1..110: mol_type = other DNA
ataggtggcccatgactcttttgatgcacataaaaatgcccagtacacagtaaatatgaaataaactcttggcatacttctttgtttttgtggtctgtccaaagtaattc

SEQ ID NO: 61205 - DNA, 110 bp, synthetic construct
  source 1..110: mol_type = other DNA
tttaagtcattaaaaagataaaatgaagtgcttgtactcacatgtcaagtttgtggagcaggttttatctgtttcattatgaggtaagctgtgaaaatatgcttaatcgc

SEQ ID NO: 61206 - DNA, 110 bp, synthetic construct
  source 1..110: mol_type = other DNA
gagcaggttttatctgtttcattatgaggtaagctgtgaaaatatgcttaatcgcaatgttcaatgtttctataagcctatttaagtagggcaggagattttaacatttc

SEQ ID NO: 61207 - DNA, 110 bp, synthetic construct
  source 1..110: mol_type = other DNA
caattgagtctagttttcttctccaggatgactatatgttattatgggccatactgactctattgtcttttttataggcatgcagagaaacagattgcaagcacaatatt

SEQ ID NO: 61208 - DNA, 110 bp, synthetic construct
  source 1..110: mol_type = other DNA
atgtgcttagtcttggtgtttggcacatggctgatgatcaaaaagtgcttgttgaatgattttctgtaaaacagtgtctgtaagtaggtttaaagaataaggattgtgag

SEQ ID NO: 61209 - DNA, 110 bp, synthetic construct
  source 1..110: mol_type = other DNA
atgattttctgtaaaacagtgtctgtaagtaggtttaaagaataaggattgtgaggaattcccttgtggcatcgtgagttaaggggcagtggtttgggttgccgtgtgtt

SEQ ID NO: 61210 - DNA, 110 bp, synthetic construct; identical to SEQ ID NO: 61208
  source 1..110: mol_type = other DNA

SEQ ID NO: 61211 - DNA, 110 bp, synthetic construct; identical to SEQ ID NO: 61209
  source 1..110: mol_type = other DNA

SEQ ID NO: 61212 - DNA, 110 bp, synthetic construct
  source 1..110: mol_type = other DNA
aaatattcttccccacctttaaatgtccagatcctttatccaaatgccagcagccctttgagtctccaaaatcatctccaggtatcagttatcgctgcttacatttgctt

SEQ ID NO: 61213 - DNA, 110 bp, synthetic construct
  source 1..110: mol_type = other DNA
tgattctactgtttgtttaccattaaggagatttacatattttcaaattactccgtgttgttaatttaaagagatctcaatggaattcctgccatggtgcagtgggttaa

SEQ ID NO: 61214 - DNA, 110 bp, synthetic construct
  source 1..110: mol_type = other DNA
cccttctccttttcctgtcatatttctgtaaattttttcatctctccacgttaccaaccccttctatgaaccttttttctttctttttaaattgttattttctattggac

SEQ ID NO: 61215 - DNA, 110 bp, synthetic construct
  source 1..110: mol_type = other DNA
ccacgttaccaaccccttctatgaaccttttttctttctttttaaattgttattttctattggactacagctgattttcaatattgtattagtttcaggtgtaccacata

SEQ ID NO: 61216 - DNA, 110 bp, synthetic construct
  source 1..110: mol_type = other DNA
aaaacatcttttttgtttctggggatttttcgtattcaccctaacacctcctccccccatgctcccagctccccataggcatatccttcacatcctgggaattaagggca

SEQ ID NO: 61217 - DNA, 110 bp, synthetic construct
  source 1..110: mol_type = other DNA
cccatgctcccagctccccataggcatatccttcacatcctgggaattaagggcaagccagtcttcttatttctctgatgcctgttccatggccatgtcggtggttgcac

SEQ ID NO: 61218 - DNA, 110 bp, synthetic construct
  source 1..110: mol_type = other DNA
agaactttgctttcacatttttcagccactttgtgccacctgtcccctagccgttgcccatagctacatagccaccatgttgccccttctctttacaccaccactcagtg

SEQ ID NO: 61219 - DNA, 110 bp, synthetic construct
  source 1..110: mol_type = other DNA
tgggtggtggcaatattaatggcagaaaagatccctgaagatgagtcctctaaaatggggaaaatcagttagctcccctcatgatttctcagagttctacttcaattatc

SEQ ID NO: 61220 - DNA, 110 bp, synthetic construct
  source 1..110: mol_type = other DNA
gagctcaccaaaagggaagacatcctaaagccgtttactccatcagagatcaacttaagaaactgccccataatggtgggttggaaatatactatattttaaaaaaccct

SEQ ID NO: 61221 - DNA, 110 bp, synthetic construct
  source 1..110: mol_type = other DNA
gagatggcatgggtgtgggagaagtggataaaatatatgagggaagtttcttggaaagcatttctgcctgaattctttgatagattaagaaataagaccaatgacaaatc

SEQ ID NO: 61222 - DNA, 110 bp, synthetic construct
  source 1..110: mol_type = other DNA
atagatggcttttaggattgtggtgaccctcaggaatgatatttttgatgatcacacacatgctaggactttctcttcttccctcctttctctgcccatgagtaagcaca

SEQ ID NO: 61223 - DNA, 110 bp, synthetic construct
  source 1..110: mol_type = other DNA
acacatgctaggactttctcttcttccctcctttctctgcccatgagtaagcacagctgagattattaaaatattggggaaaaataatgctttaatactagccctgctaa

SEQ ID NO: 61224 - DNA, 110 bp, synthetic construct
  source 1..110: mol_type = other DNA
aaaaatccctaggggtgaggggtttaagtcttaggcatctcatagcatattctgttctctccaccatattttttcataaaagtgaaatcaagtgaaatgaatatttgaaa

SEQ ID NO: 61225 - DNA, 110 bp, synthetic construct
  source 1..110: mol_type = other DNA
ttgtttaaatttgagtaaatacaactactggtgtttattaccacctactagaggccagacaatagattcatgttttaatggagacaaatgtgatgatgacatagtccttt

SEQ ID NO: 61226 - DNA, 110 bp, synthetic construct
  source 1..110: mol_type = other DNA
agtagatctgtttgtttagaatatatatcccaatgaatttaaataaaaattgtgaagagatagaatagtggttgccagggttggctgaagtgggaaatggggagttggtg

SEQ ID NO: 61227 - DNA, 110 bp, synthetic construct; identical to SEQ ID NO: 61226
  source 1..110: mol_type = other DNA

SEQ ID NO: 61228 - DNA, 110 bp, synthetic construct
  source 1..110: mol_type = other DNA
tagctgactcaattaggaagagcaacacaggagttcccattttgtctcagagttaaaaactcgactagtatccaagaagatatggatttgatctctaggatcacttgttg

SEQ ID NO: 61229 - DNA, 110 bp, synthetic construct
  source 1..110: mol_type = other DNA
aatcaccttactttatatattagacatttcaatgtggagaaatcccaagaacttaaccaaagtggcaaaagttttactattagagtaagaaaaagaagcagagtgacatc

SEQ ID NO: 61230 - DNA, 110 bp, synthetic construct
  source 1..110: mol_type = other DNA
accaaagtggcaaaagttttactattagagtaagaaaaagaagcagagtgacatcaccatgatggtgacatagatggttcctgactttgcttcctttcaacataacagta

SEQ ID NO: 61231 - DNA, 110 bp, synthetic construct
  source 1..110: mol_type = other DNA
catgggttctatgactataaacttctatggttgtgaatctatcctaacaggcttcttaacaccaacagaatttcattaattgccgtgtgtgctgagggtactgtatttat

SEQ ID NO: 61232 - DNA, 110 bp, synthetic construct
  source 1..110: mol_type = other DNA
ttaacaccaacagaatttcattaattgccgtgtgtgctgagggtactgtatttatgattacacaaagataaatgaagtctagaattttatgttaggaccaaattgctaag

SEQ ID NO: 61233 - DNA, 110 bp, synthetic construct
  source 1..110: mol_type = other DNA
aactaaaactccaccactccttttaaaaaataagaccttttcctgaacccagaaaatgcaaactatagctgcaaatccacatagtactgattctgattcagtcctatgag

SEQ ID NO: 61234 - DNA, 110 bp, synthetic construct
  source 1..110: mol_type = other DNA
atgcaaactatagctgcaaatccacatagtactgattctgattcagtcctatgagttcccaggttctagtgggcaatgtctctattagaattcagtcttgtatggtcctt

SEQ ID NO: 61235 - DNA, 110 bp, synthetic construct
  source 1..110: mol_type = other DNA
aaagtatccaatctgtttggcaactatttttgaattttcttgaacaagcaatgatgttttcaggacttgtttgtgtcttttcaaaagatggtcaggaatatgtatggaat

SEQ ID NO: 61236 - DNA, 110 bp, synthetic construct
  source 1..110: mol_type = other DNA
tggattggcatttacacactattatatacaaaatcgatgagtaacacggacccataatatatcagagggaaatctattcgatcgtctgtgatggcctctataggaaaaga

SEQ ID NO: 61237 - DNA, 110 bp, synthetic construct
  source 1..110: mol_type = other DNA
atacaaaatcgatgagtaacacggacccataatatatcagagggaaatctattcgatcgtctgtgatggcctctataggaaaagaatctgaaaaagaatggatatatgta

SEQ ID NO: 61238 - DNA, 110 bp, synthetic construct
  source 1..110: mol_type = other DNA
aaaagaaatattctagtctccagggatctcaagttgaatttgagaaccaacattctgttttagtgaagcttcctttctgatgaggtgggattaaaacaaagacattaaaa

SEQ ID NO: 61239 - DNA, 110 bp, synthetic construct
  source 1..110: mol_type = other DNA
tgttttagtgaagcttcctttctgatgaggtgggattaaaacaaagacattaaaaaagcaagaatcataacacacagtgagaagattaggaacgaaattcacaaccaata

SEQ ID NO: 61240 - DNA, 110 bp, synthetic construct; identical to SEQ ID NO: 61238
  source 1..110: mol_type = other DNA

SEQ ID NO: 61241 - DNA, 110 bp, synthetic construct; identical to SEQ ID NO: 61239
  source 1..110: mol_type = other DNA

SEQ ID NO: 61242 - DNA, 110 bp, synthetic construct
  source 1..110: mol_type = other DNA
ggagatgtcatcctgttagaggtggtgtttgaaggtgagcttggaccaaggaacttggtagagttcaagcaaggaagatgtgctatttgaagtccttggagactttacca

SEQ ID NO: 61243 - DNA, 110 bp, synthetic construct
  source 1..110: mol_type = other DNA
tggtagagttcaagcaaggaagatgtgctatttgaagtccttggagactttaccatcaggtgtccctagattcacccagggttcgtggaggaggctgaggctctgaaggt

SEQ ID NO: 61244 - DNA, 110 bp, synthetic construct
  source 1..110: mol_type = other DNA
tttcactttctcaaacgcttccagtccctaccatggtactggccctacaataagccttaaataaaaacccaattcactaatttattgatgtaataagaagctgagttaat

SEQ ID NO: 61245 - DNA, 110 bp, synthetic construct
  source 1..110: mol_type = other DNA
tgagttctcccaagtcaatacaatagcttactgaccttcttgattatatgagaaaaagaatatgaatgaatgattgggtcactttgctgtatagcagaaatttacacaac

SEQ ID NO: 61246 - DNA, 110 bp, synthetic construct; identical to SEQ ID NO: 61245
  source 1..110: mol_type = other DNA

SEQ ID NO: 61247 - DNA, 110 bp, synthetic construct; identical to SEQ ID NO: 61245
  source 1..110: mol_type = other DNA

SEQ ID NO: 61248 - DNA, 110 bp, synthetic construct; identical to SEQ ID NO: 61245
  source 1..110: mol_type = other DNA

SEQ ID NO: 61249 - DNA, 110 bp, synthetic construct
  source 1..110: mol_type = other DNA
ttgcccaataactttctcttttggaaaaaataaatttccttgaacaagaggagtgcttattgttaagtgtaggaactggctttatcgttggtcaagagaagcactcaatc

SEQ ID NO: 61250 - DNA, 110 bp, synthetic construct
  source 1..110: mol_type = other DNA
gaatgattgtctgttggttacatatgtatgacaaatttaaaaaaagaaatgaaggctaagagagagagaaccttggagcctagaatttatcttcagaagagtatctcctt

SEQ ID NO: 61251 - DNA, 110 bp, synthetic construct
  source 1..110: mol_type = other DNA
gtgaaaaagtttaggataaacctggccctgaagtcacacatgccagtcttgggtttgttcttatattttgtttatttctctcacacaaccttatgttaataatctgtctc

SEQ ID NO: 61252 - DNA, 110 bp, synthetic construct
  source 1..110: mol_type = other DNA
ggattctaaaagggactcagaatagagctggagatcatgtggatgcacacacaccaggagttcactgaaaagtgccgcaggcaaaaatgccatctttggtaataaattgc

SEQ ID NO: 61253 - DNA, 110 bp, synthetic construct
  source 1..110: mol_type = other DNA
aacatatcgttgaatttgttttgaaatgataaacagttgtattcaccgcccagcaaagattaaaacttgtccctcatccccaaaatttcctttctgtccctcagcagctg

SEQ ID NO: 61254 - DNA, 110 bp, synthetic construct
  source 1..110: mol_type = other DNA
aagattaaaacttgtccctcatccccaaaatttcctttctgtccctcagcagctgatcccttcctccctacattctgactcccacagccttgtagaacggaattacacag

SEQ ID NO: 61255 - DNA, 110 bp, synthetic construct
  source 1..110: mol_type = other DNA
agggcctttccctggattaggctttgacttaagggaaggttgtagctgttttgatcttctgtcaagaccattaaaactttgtccaaatcaatagtaaggctattttgctt

SEQ ID NO: 61256 - DNA, 110 bp, synthetic construct
  source 1..110: mol_type = other DNA
tattaccccaaattttgtcccattataattgaaaactttttggtgttggccaatacatggagatacccactattattacccattattattggtcgtatacacagctgcag

SEQ ID NO: 61257 - DNA, 110 bp, synthetic construct
  source 1..110: mol_type = other DNA
catggagatacccactattattacccattattattggtcgtatacacagctgcagtttttttttttttcttcattttatgggacaagggaaggaggtgtgtgttatgtat

SEQ ID NO: 61258 - DNA, 110 bp, synthetic construct
  source 1..110: mol_type = other DNA
gattccccctgtgattcccaagcagcaggggaggaaatatcaaattcagtctccgtggaaactgtttaaaaacttatttgaacgttggccgttcattttccaccatgagt

SEQ ID NO: 61259 - DNA, 110 bp, synthetic construct
  source 1..110: mol_type = other DNA
tgatcaagctctcagaggacatgcaggtaggacaattagagaggagaatctgactgagactgaggagctgagccctgaggtgatccagcttcaggatttggagagaggag

SEQ ID NO: 61260 - DNA, 110 bp, synthetic construct
  source 1..110: mol_type = other DNA
gagactgaggagctgagccctgaggtgatccagcttcaggatttggagagaggaggaagagagagagagaacaaagggcagtgtgggtgaacaggaaaaccaagagagtg

SEQ ID NO: 61261 - DNA, 110 bp, synthetic construct; identical to SEQ ID NO: 61259
  source 1..110: mol_type = other DNA

SEQ ID NO: 61262 - DNA, 110 bp, synthetic construct; identical to SEQ ID NO: 61260
  source 1..110: mol_type = other DNA

SEQ ID NO: 61263 - DNA, 110 bp, synthetic construct
  source 1..110: mol_type = other DNA
caacaaaaggtaagtagcttgaagatcaaattgcatgtggacatgcttgtctctcttcacttgggtttgactccatggaaatagcattgtctggaattgttcagtatcag

SEQ ID NO: 61264 - DNA, 110 bp, synthetic construct
  source 1..110: mol_type = other DNA
ttcacttgggtttgactccatggaaatagcattgtctggaattgttcagtatcagtgatataaatgatatggtatctgatgattccttccaaactcaggtatgacactac

SEQ ID NO: 61265 - DNA, 110 bp, synthetic construct
  source 1..110: mol_type = other DNA
cagtgagggaagagagcctcaggggaatttcttaatttgtcagtacagctgcattgagtacaaactctgactcagaaacatacatccaggatataacttttctattacca

SEQ ID NO: 61266 - DNA, 110 bp, synthetic construct
  source 1..110: mol_type = other DNA
tcctgtgggtatctattaagtccatttggtctaagatgtcttttaaagccattgtttccttattgatttctgtctgcattatctatcaattgatgcaaatggggtagtaa

SEQ ID NO: 61267 - DNA, 110 bp, synthetic construct
  source 1..110: mol_type = other DNA
ttccttattgatttctgtctgcattatctatcaattgatgcaaatggggtagtaaagtccctgcttattctattactgtcaatttcaccctttatgtctgctaatatttg

SEQ ID NO: 61268 - DNA, 110 bp, synthetic construct
  source 1..110: mol_type = other DNA
ctaccgaagttcctcggtcttcgagggcaagcgcttttcagaagagctctccttccctcctgccttacctctttttcttacttaagcagggcacactcacgcagctttcc

SEQ ID NO: 61269 - DNA, 110 bp, synthetic construct
  source 1..110: mol_type = other DNA
cttcatctcacagaccctgcaggaggagagatacaggtatgagtggctaaaagtggcctatttggggggtgtccttcactctcttgagcctagataatgttttccattaa

SEQ ID NO: 61270 - DNA, 110 bp, synthetic construct
  source 1..110: mol_type = other DNA
tatttgacaaaatttaacattgattcatgataaaaactctcatcaaaattgatatagagtgggagttcccatctcagtgcagcagaaacgaatccaactaggaaacatga

SEQ ID NO: 61271 - DNA, 110 bp, synthetic construct; identical to SEQ ID NO: 61270
  source 1..110: mol_type = other DNA

SEQ ID NO: 61272 - DNA, 110 bp, synthetic construct
  source 1..110: mol_type = other DNA
aagaaaaatgcactgcgtataagtcatgagagatgttcttcttggggaccttatggagaactatagccaaggagagaatctctcagctctgaagaggtaagggaggagcc

SEQ ID NO: 61273 - DNA, 110 bp, synthetic construct
  source 1..110: mol_type = other DNA
ctaagtgctacttagtaggaaaatatcgaaggcgaagacagaaataaaattaagtcacaaaaaattataaactgcaaaatcaacctctgcttaggagagaacaaagtttt

SEQ ID NO: 61274 - DNA, 110 bp, synthetic construct
  source 1..110: mol_type = other DNA
tcgaaggcgaagacagaaataaaattaagtcacaaaaaattataaactgcaaaatcaacctctgcttaggagagaacaaagttttcattgttggtatattctattacact

SEQ ID NO: 61275 - DNA, 110 bp, synthetic construct
  source 1..110: mol_type = other DNA
tttcctgcttgaacacagactgctaccacaagctctgcgagaggctcaaagatactgctcagcactctggggtgacccaccctggagcctactcagattccagtgggggc

SEQ ID NO: 61276 - DNA, 110 bp, synthetic construct
  source 1..110: mol_type = other DNA
tggaggcttcatcatgtcggcatgattgattattaactgcatgtccagcccctatcccgtcctcagaggatgagggggtggtggtagggacgaaaatcctagctacaatc

SEQ ID NO: 61277 - DNA, 110 bp, synthetic construct
  source 1..110: mol_type = other DNA
cggggctaggaggaccaagcttgtaaagttaaatgattaggtaaggtcagactgcgcaggtcctgaaatgtaagaatttagaccccatccggcccgcaaccccgagcgtg

SEQ ID NO: 61278 - DNA, 110 bp, synthetic construct
  source 1..110: mol_type = other DNA
accaaaatccttgtagtagatgtcgaagtaatacccaatggctttcttttcatttaaagattcatatcctgacttgactgacgtttccacaacttgttgacctccaattt

SEQ ID NO: 61279 - DNA, 110 bp, synthetic construct
  source 1..110: mol_type = other DNA
aaagattcatatcctgacttgactgacgtttccacaacttgttgacctccaattttagctctgagctagttaactggttccatttagcattacattatcttttgtgttac

SEQ ID NO: 61280 - DNA, 110 bp, synthetic construct
  source 1..110: mol_type = other DNA
acaccattttaagagctagagaacaaaaaccataaaggaatcaaagattcctcttctctaggaactccaattctaactgcagagatggataagtaaggggtgtaagtaat

SEQ ID NO: 61281 - DNA, 110 bp, synthetic construct; identical to SEQ ID NO: 61280
  source 1..110: mol_type = other DNA

SEQ ID NO: 61282 - DNA, 110 bp, synthetic construct
  source 1..110: mol_type = other DNA
atgatgagtctgaagtccttgtgacatactgataaaagtagaagtctggagttcagaagagagatagagactgcagctacctgactgggaaccattagcagggaggggcc

SEQ ID NO: 61283 - DNA, 110 bp, synthetic construct
  source 1..110: mol_type = other DNA
cccaagcaggttattagggaacaacattttagcagtagcagcaagttgtttatatgatatctgatcccagacattttgcatgtgttcaacactatatgaatctatttttg

SEQ ID NO: 61284 - DNA, 110 bp, synthetic construct
  source 1..110: mol_type = other DNA
gtttctgaaataactttctccaccccctatgcaaattgtggctcactgctcagggggccacttgtggaatgctgcccatctgcactgtttctaaaattgccttctgtccc

SEQ ID NO: 61285 - DNA, 110 bp, synthetic construct
  source 1..110: mol_type = other DNA
cctatgcaaattgtggctcactgctcagggggccacttgtggaatgctgcccatctgcactgtttctaaaattgccttctgtcccctaaggaaaacagggctctccacct

SEQ ID NO: 61286 - DNA, 110 bp, synthetic construct
  source 1..110: mol_type = other DNA
tggaaatttccttgatccattctgtgcaatcagttgtgggagtgagggagaggaatcagtatcgcatcttagcctgtggtcatgtttcctctctctagctatgcacttag

SEQ ID NO: 61287 - DNA, 110 bp, synthetic construct
  source 1..110: mol_type = other DNA
tcagtatcgcatcttagcctgtggtcatgtttcctctctctagctatgcacttagtggcgtagttctggatttcctacaaaccttccttgaataagaaagcatagtatgg

SEQ ID NO: 61288 - DNA, 110 bp, synthetic construct
  source 1..110: mol_type = other DNA
tcattttgcccctagtgagacagcctttaaatggattctgttcgcagctctgacactgatggtgaggaattgttactttttctcattgaaaatgactgttggcggtcctg

SEQ ID NO: 61289 - DNA, 110 bp, synthetic construct
  source 1..110: mol_type = other DNA
tcctagttgcacatcatccagagacattgatgtcaaaatgaagcacaactctgaacccttatttcacagtcagtggctctgataaagtgcaagccaggcgagggagaaag

SEQ ID NO: 61290 - DNA, 110 bp, synthetic construct
  source 1..110: mol_type = other DNA
ccattttacagtacattatattaagtcccaattcctagccccagtttacaccttcagtgatccttatgaatgaaaaccatgagcaggggccaggcccaaggtagagacag

SEQ ID NO: 61291 - DNA, 110 bp, synthetic construct
  source 1..110: mol_type = other DNA
agtgatccttatgaatgaaaaccatgagcaggggccaggcccaaggtagagacagccttaggaaacccgaccgcccaaggggaccaaggagaaggaaggatcctcaaggc

SEQ ID NO: 61292 - DNA, 110 bp, synthetic construct
  source 1..110: mol_type = other DNA
attgactgtagatgatgaactagtcttttcacttgttcccacatcctttgtcaatggccttctcccagctgtgacaccctcattccacatacccatctcatgttccatcc

SEQ ID NO: 61293 - DNA, 110 bp, synthetic construct
  source 1..110: mol_type = other DNA
aactctcccactcacacaaactatctgggcaaaattatcctgagctggatagtgtacaaaactactggacactttataatatgctcattatctgacaatttttttgaata

SEQ ID NO: 61294 - DNA, 110 bp, synthetic construct
  source 1..110: mol_type = other DNA
agagaactgttccattagaggacaaagaagagttatttaagtttttggagacagggctgtacataaaatgccaccttattgacaatctgctaaaatctaactacaaagta

SEQ ID NO: 61295 - DNA, 110 bp, synthetic construct
  source 1..110: mol_type = other DNA
gtacagatggctgagtgctaagaatcacttcaattccagcgccatgactgtgaacacagggctctctcttcaggagggaaaacagtatctaggtctaggaagatgtgaaa

SEQ ID NO: 61296 - DNA, 110 bp, synthetic construct
  source 1..110: mol_type = other DNA
acagggctctctcttcaggagggaaaacagtatctaggtctaggaagatgtgaaaaaatggagaagacagaaaacatgtgtccataaactggagaaatggggtgtggggt

SEQ ID NO: 61297 - DNA, 110 bp, synthetic construct
  source 1..110: mol_type = other DNA
attttgttagtgttaccttttttgacaatgtttcccctgtaatttaatctacccaataattccagttcaatcatttttctgagaagcttcagtcaccctctgaagcatac

SEQ ID NO: 61298 - DNA, 110 bp, synthetic construct
  source 1..110: mol_type = other DNA
aaattctttgtggggttaatttcctctcactgccagtttaatgttaaaccttctactgcaaaaatttgagttgcttaaccatgttatgatgatttgtctccatctatcca

SEQ ID NO: 61299 - DNA, 110 bp, synthetic construct
  source 1..110: mol_type = other DNA
ccacatccagcctcacccccatcccccacacacaatgcactcatataccctcatctctactttcttcaaggctttcctggctacccagctctcagtcacccctactttct

SEQ ID NO: 61300 - DNA, 110 bp, synthetic construct
  source 1..110: mol_type = other DNA
atggattaaagacttgaatgtaagatctgaaaccacaaaactaaaagaaaacacaggaggtaacttgcatgacatccatctcagcaatgattttatatatatacatagtg

SEQ ID NO: 61301 - DNA, 110 bp, synthetic construct
  source 1..110: mol_type = other DNA
acttgatatgggcagttaatatggctctttgaccaactgtctgaataatgcgagcgtcacatctaaaagcagctggtgatgccacaaaaggtccactcgcccagtgtcct

SEQ ID NO: 61302 - DNA, 110 bp, synthetic construct
  source 1..110: mol_type = other DNA
gtcacatctaaaagcagctggtgatgccacaaaaggtccactcgcccagtgtcctcaaactccaaagtgcattagaatcacctgggaaacttgtaaaattgtgcagatgg

SEQ ID NO: 61303 - DNA, 110 bp, synthetic construct
  source 1..110: mol_type = other DNA
acagtgttgggattcaaaccaagatcatctgggtttgtctgttcatttaactgcaccaaactctcagtagctgattatagactgaatgtttgtgtccctctaaaattcat

SEQ ID NO: 61304 - DNA, 110 bp, synthetic construct
  source 1..110: mol_type = other DNA
gatccctgtctgccacttgacactttaagcaccaatgaatctgctgggccatacgacccaagtgataaagcagcttacacagaagcctggacctgttgcagagccttctc

SEQ ID NO: 61305 - DNA, 110 bp, synthetic construct
  source 1..110: mol_type = other DNA
gtcacggatttgaagcacaagaagacctcaacttgccattattggtttgaagatggagagggccacatgttaaggaatttggttacttaagattgctaagagtagcctgt

SEQ ID NO: 61306 - DNA, 110 bp, synthetic construct
  source 1..110: mol_type = other DNA
gagagggccacatgttaaggaatttggttacttaagattgctaagagtagcctgtgcctggaacctagcaaggaaatagggacctcagtcctaaaactacaaggaaatga

SEQ ID NO: 61307 - DNA, 110 bp, synthetic construct
  source 1..110: mol_type = other DNA
tggcggtaattctacaatgaagcaatatatcctgaggttagagctgggatggggagttgtaaattttagtcacagagaatagcattatcccctgatgtttttagttataa

SEQ ID NO: 61308 - DNA, 110 bp, synthetic construct
  source 1..110: mol_type = other DNA
tttctgactccactgataacattttcctggactcaagcctccctgattttgacctaaatttgttcatatttaaggtgaaaagctggatccaaacacaattcagcattcct

SEQ ID NO: 61309 - DNA, 110 bp, synthetic construct
  source 1..110: mol_type = other DNA
ttattgggaagaaaaagccattcaagaatattttctaattgcatcaatattcccatgggagaatgaggagaaggcataattactaactgaatgagctgttttagattgac

SEQ ID NO: 61310 - DNA, 110 bp, synthetic construct; identical to SEQ ID NO: 61309
  source 1..110: mol_type = other DNA

SEQ ID NO: 61311 - DNA, 110 bp, synthetic construct
  source 1..110: mol_type = other DNA
ctcagcataactttcaagaggtgagttgtacttggtttgcatgcattcacaatgtatttgtcaggagagcaatatgggctcatattgtgctaactaacacatacctgctt

SEQ ID NO: 61312 - DNA, 110 bp, synthetic construct
  source 1..110: mol_type = other DNA
aaactggaccactttgcttttatattcccttagttgtatttcttttatttattttattggctaaggatgatcacattaactaggtattaagaattggccaaattacatgg

SEQ ID NO: 61313 - DNA, 110 bp, synthetic construct
  source 1..110: mol_type = other DNA
cacccctggtggagggaatttctataactcaccccagcagcgattctcatatcctgggcgcttagctagaaaacaaaggaaatctaatgaaacatactgcgttgctaagc

SEQ ID NO: 61314 - DNA, 110 bp, synthetic construct
  source 1..110: mol_type = other DNA
ttatttttacttctattcacaaaccaaaataggaagaagtataaagaataacactttaacaagggttggctactctgcccatgaagataatagtattcagagcaacttcc

SEQ ID NO: 61315 - DNA, 110 bp, synthetic construct
  source 1..110: mol_type = other DNA
tgtaacttgttgtgatatttactttattgtgatggtctggagctaaacccacaataactctgagataggccatttctttggcttttgattgggtttggccaatgggaggc

SEQ ID NO: 61316 - DNA, 110 bp, synthetic construct
  source 1..110: mol_type = other DNA
tgctcagtgggttaagaatcctgcttggctgtgagctgtagtgtagattgcagacagggatcagctcttacgttgctctggcctggtggtaggctgccggccacagctcc

SEQ ID NO: 61317 - DNA, 110 bp, synthetic construct; identical to SEQ ID NO: 61316
  source 1..110: mol_type = other DNA

SEQ ID NO: 61318 - DNA, 110 bp, synthetic construct
  source 1..110: mol_type = other DNA
ccaagtaagacctttctgcttccttttccctattccttccctgtattccaatctagagagtcaataacagcagctactaagtggtggagaaagtaagcaggagacacaga

SEQ ID NO: 61319 - DNA, 110 bp, synthetic construct
  source 1..110: mol_type = other DNA
gctgagctacttaattaccttcttactctgtcctcttttaaaaccaatagtgtgtatttgtatttgtaaaattactgacagcatgggagagttaactctgattgcagaat

SEQ ID NO: 61320 - DNA, 110 bp, synthetic construct
  source 1..110: mol_type = other DNA
tcccacaccaccatagtagtaattgctcaggcttagaaggaagaataactttgtacctcttttattgttttgcccaagttggttggtccatgtgacttgattgattgatc

SEQ ID NO: 61321 - DNA, 110 bp, synthetic construct
  source 1..110: mol_type = other DNA
ctttattgcactagctaggattttcatacagtattaagattggtgacagtatacttccttgctttgtttttcatctcaggacaaaagcattaaatttttcactgttaagt

SEQ ID NO: 61322 - DNA, 110 bp, synthetic construct; identical to SEQ ID NO: 61321
  source 1..110: mol_type = other DNA

SEQ ID NO: 61323 - DNA, 110 bp, synthetic construct
  source 1..110: mol_type = other DNA
catctttttccaaggaggcaatagtagtcttcccgcttgcattttttcacatcccgtgaaccaccctacagtctgttttccacattatggctagacagctctttaaaaaa

SEQ ID NO: 61324 - DNA, 110 bp, synthetic construct
  source 1..110: mol_type = other DNA
gtaatttttgaaaagagtgatggtgttttacatctttgaaaatccctaatatatggcttaatgtaaggcaattaggagctcaaatctgctttgcattcactttgctgtat

SEQ ID NO: 61325 - DNA, 110 bp, synthetic construct
  source 1..110: mol_type = other DNA
tccaccaccacagtgaatatgcctatatcatctcaggaactgcaattgttctacatccctctgaactgcagacccaatctccatagctgctccatgtgtacctgtgcccc

SEQ ID NO: 61326 - DNA, 110 bp, synthetic construct
  source 1..110: mol_type = other DNA
tccctctgaactgcagacccaatctccatagctgctccatgtgtacctgtgccccattttttaactactggcacaagtgccctggatcatattgccactatacatatact

SEQ ID NO: 61327 - DNA, 110 bp, synthetic construct; identical to SEQ ID NO: 61325
  source 1..110: mol_type = other DNA

SEQ ID NO: 61328 - DNA, 110 bp, synthetic construct; identical to SEQ ID NO: 61326
  source 1..110: mol_type = other DNA

SEQ ID NO: 61329 - DNA, 110 bp, synthetic construct
  source 1..110: mol_type = other DNA
gtagtgagaaagaacagatagggctttgtaattgatcttggcagtaacagtcagataggaggacgcatctgtgaggactcccagatttctgctttgggggattaaataga

SEQ ID NO: 61330 - DNA, 110 bp, synthetic construct
  source 1..110: mol_type = other DNA
taggaggacgcatctgtgaggactcccagatttctgctttgggggattaaatagagagtggtgccattcgccacaatggggctagaatatgagaagtaaagaataacttt

SEQ ID NO: 61331 - DNA, 110 bp, synthetic construct
  source 1..110: mol_type = other DNA
agttccaaagtggataatttatcatttttatactcaaaggcctcatgagctaggatggggcacagataatgtaggtgcatacctgttctttttattcttcatattgtatc

SEQ ID NO: 61332 - DNA, 110 bp, synthetic construct
  source 1..110: mol_type = other DNA
cttgactggctagaataataatatttgattcctgagttcagtctaagccatttcttctttcatagcctttaagttgtatgaagtcatccctgaattctatttaatgccct

SEQ ID NO: 61333 - DNA, 110 bp, synthetic construct
  source 1..110: mol_type = other DNA
gggctgaggttgtttccagtataactgccttttccagctaagttcaggtgagtcgatagcactttatcatgctaaacattctctccactaacattttgccatcatatctc

SEQ ID NO: 61334 - DNA, 110 bp, synthetic construct
  source 1..110: mol_type = other DNA
acaactcacagcctttggtgtactctttctgtttatcttcagacctgaatccaaagcactggaaaggaaactttattggaagaagattatatagtatttattctaagtct

SEQ ID NO: 61335 - DNA, 110 bp, synthetic construct
  source 1..110: mol_type = other DNA
tgagcacagagggtaaatacctcaacataatcaagggcatgtatgacaaacccacagctaacagcatcaacaatagtgaaaagctgaaggcatttcctctaagatctgaa

SEQ ID NO: 61336 - DNA, 110 bp, synthetic construct
  source 1..110: mol_type = other DNA
ggcatgtatgacaaacccacagctaacagcatcaacaatagtgaaaagctgaaggcatttcctctaagatctgaagcaagacacggatgtctattcttgccacttttatt

SEQ ID NO: 61337 - DNA, 110 bp, synthetic construct
  source 1..110: mol_type = other DNA
tagcaagagcaggcagcttctgcgtcttaatgtgccactgcccctctgctccctacaccacccaccacccctcctgcagtcaaagttaaagacaagttcagtcactgaga

SEQ ID NO: 61338 - DNA, 110 bp, synthetic construct
  source 1..110: mol_type = other DNA
caccacccaccacccctcctgcagtcaaagttaaagacaagttcagtcactgagaccgaagcctatggacgcatggtttcctgcatgcatattcccggcatgtgaacccc

SEQ ID NO: 61339 - DNA, 110 bp, synthetic construct
  source 1..110: mol_type = other DNA
gagtttggagaagtcacatctcctctttgggctggagctctgtagttctgatgtggtgtgattctctttttccttcctgccttcctcctcttcctaaccaagataccttc

SEQ ID NO: 61340 - DNA, 110 bp, synthetic construct
  source 1..110: mol_type = other DNA
gaggttgctgcagaggtatgggtttgatccctagcctggcaaagtgggttaaagaatccagtgttgccatggctgcagtgtatattgcagctgtagttcagattcagttc

SEQ ID NO: 61341 - DNA, 110 bp, synthetic construct
  source 1..110: mol_type = other DNA
atccagtgttgccatggctgcagtgtatattgcagctgtagttcagattcagttcctggccctggaatttccatatgccgaggatttggccataaataaaatagttcata

SEQ ID NO: 61342 - DNA, 110 bp, synthetic construct
  source 1..110: mol_type = other DNA
tctcacttatttcaactttacatagtttgactgtcttggtcattgctccctccccaggactcttttctgtgactccccttcacgtccccacgtcttcagcctccctcccc

SEQ ID NO: 61343 - DNA, 110 bp, synthetic construct
  source 1..110: mol_type = other DNA
aggactcttttctgtgactccccttcacgtccccacgtcttcagcctccctcccctccccagccccccaactcttctcagaccctgcaagtgctcagcaccagaggctta

SEQ ID NO: 61344 - DNA, 110 bp, synthetic construct
  source 1..110: mol_type = other DNA
gccacagggttggagggtcacttgggggaatatccgatggtgtctggaggacttctgagctcagagagtgaggcgagggagagcgcctagccctgtgccggcccccgcct

SEQ ID NO: 61345 - DNA, 110 bp, synthetic construct
  source 1..110: mol_type = other DNA
acctgtctcagaagtgtttgtcatctcaggccccatctgcagcaccgagctccatttccgggcaggaaatgaaaccacagagggcaaggcaaacattgattttcaagtta

SEQ ID NO: 61346 - DNA, 110 bp, synthetic construct
  source 1..110: mol_type = other DNA
attataaaggtcactcctctggtgtgggtttctgaggcggcttatttaaaataggacctggaaatatggcttaaaaaaaaaaaagagcctctcttgtctgatattacaga

SEQ ID NO: 61347 - DNA, 110 bp, synthetic construct
  source 1..110: mol_type = other DNA
ctctggagactgccagagttttacctggcaccaccagtcactgatcaaattatcattccttttcgccagatgaaaggaagcaggctaactaattgttcccaaaccaggga

SEQ ID NO: 61348 - DNA, 110 bp, synthetic construct
  source 1..110: mol_type = other DNA
ggaaggtctggcacagggtctggggcttgggccctggcacatcagggagtgcaagcaaggtgaagtgaacatcaagtgcctcggtcagtgctgatttgccagctggactc

SEQ ID NO: 61349 - DNA, 110 bp, synthetic construct
  source 1..110: mol_type = other DNA
actgcaggcattcagacaccgccgctggctgcagtcctcaccagcgtagccctcctggcataggcaggtaccgttggcacatctccccttcccagagcagtccccggggc

SEQ ID NO: 61350 - DNA, 110 bp, synthetic construct
  source 1..110: mol_type = other DNA
tggcataggcaggtaccgttggcacatctccccttcccagagcagtccccggggcatctcagttcactgcagtcctcgcctgtgtaggcctcttcgcagacacactcccc

SEQ ID NO: 61351 - DNA, 110 bp, synthetic construct
  source 1..110: mol_type = other DNA
aaactgaaacccaaagagattagttcaaatacctctcaatgtcatccagtcagcaaaggggtgcagctaggagccaggcctccagcctgtgcttgtgtccatcatgcagc

SEQ ID NO: 61352 - DNA, 110 bp, synthetic construct
  source 1..110: mol_type = other DNA
tgtgccaggcaccatgccaagtagttgacacacaatgtcttcttttgtcctcacaacagctctgtgaggaacatgctatccttaccatccttctgaggaggtgtccggtt

SEQ ID NO: 61353 - DNA, 110 bp, synthetic construct
  source 1..110: mol_type = other DNA
acagctctgtgaggaacatgctatccttaccatccttctgaggaggtgtccggtttcacaaggtgattcaacctacccaaggtcacttccagacatgcccatgtgaagat

SEQ ID NO: 61354 - DNA, 110 bp, synthetic construct
  source 1..110: mol_type = other DNA
aacacagtgctccttgtcattgaactctgatgtaccacatgctaccacacatgttgtatcactctcctcaaaacatccctgtgatgcaggcattattgattaggggacat

SEQ ID NO: 61355 - DNA, 110 bp, synthetic construct
  source 1..110: mol_type = other DNA
tacaaaggagccatccagccaaagtcatagcagatatcaaatgagacaacataggtgggaagctgacacagtgcctggcccaaaggaggtatttcatgggtcccagcctc

SEQ ID NO: 61356 - DNA, 110 bp, synthetic construct
  source 1..110: mol_type = other DNA
tgggaagctgacacagtgcctggcccaaaggaggtatttcatgggtcccagcctcctttccctttgtccctccttttcctaccaatacacctagaaatgggaaaatacca

SEQ ID NO: 61357 - DNA, 110 bp, synthetic construct
  source 1..110: mol_type = other DNA
tctccaataacccacaactgcgaagaacagcagggtgatttttctgcccattccgtctgacaaacatcccttcccaagtgtcaggaaagcggagtatcatggatatgaga

SEQ ID NO: 61358 - DNA, 110 bp, synthetic construct
  source 1..110: mol_type = other DNA
tttggctactgtttattgagcacctactctgtgtagacacagtgctttccacgtgagtaaaagctcaaatacagcagtgtggtaagtgattagctgagcatggccatggt

SEQ ID NO: 61359 - DNA, 110 bp, synthetic construct
  source 1..110: mol_type = other DNA
ggccagaggcacatcttggcatagctcacaatcctggtctccagctccctccccgaggacctcaagttgtgtgtgtggctatatttggtttttgtttttgttttttcact

SEQ ID NO: 61360 - DNA, 110 bp, synthetic construct
  source 1..110: mol_type = other DNA
acgagtttgctttttgtagatcgtttcatttgtgccatatattagattccagatataagctggtcacctcttatcttcctgaattatctgagtcataggttcattatctg

SEQ ID NO: 61361 - DNA, 110 bp, synthetic construct; identical to SEQ ID NO: 61360
  source 1..110: mol_type = other DNA

SEQ ID NO: 61362 - DNA, 110 bp, synthetic construct
  source 1..110: mol_type = other DNA
tttatcgggaggcaggaaaactgctgaatttgacaccggagaaaggaaggtgtcagttggacatctgttccaacatctctgcaactaattatttctctgtgcactgcagt

SEQ ID NO: 61363 - DNA, 110 bp, synthetic construct
  source 1..110: mol_type = other DNA
acttaaaaaaaaaaaaatctccataaggaggtgccctgtggtgtagcagttaagaatctgggcttgtcactgcaatggctcgagtcactgctgtggcatgatgttcagtc

SEQ ID NO: 61364 - DNA, 110 bp, synthetic construct
  source 1..110: mol_type = other DNA
agagtgttcccgggctcctttgggtggttttgtctctaactgttctcaggcacattcctcacaaagctcttcagatctctggagctctctctttgtatagatttttcctc

SEQ ID NO: 61365 - DNA, 110 bp, synthetic construct
  source 1..110: mol_type = other DNA
agttctcatcattttccggttatttctctagaattgtctatgtgggggaaaacagatgcactcatctctgtttccagatgatgtgtttgtctacaagtataatcctagaa

SEQ ID NO: 61366 - DNA, 110 bp, synthetic construct
  source 1..110: mol_type = other DNA
tgatgtcagcttccagttcctgctggactagaactctgtgtgttaagggattctggtcgaagattcctgaaaagccttacatattaagtcctgtctgtgaatgtggtgcc

SEQ ID NO: 61367 - DNA, 110 bp, synthetic construct
  source 1..110: mol_type = other DNA
gtcgaagattcctgaaaagccttacatattaagtcctgtctgtgaatgtggtgccacctgagtgccctgcttctccttcctgagaaggagatccaggcaggtggcacctt

SEQ ID NO: 61368 - DNA, 110 bp, synthetic construct
  source 1..110: mol_type = other DNA
gacacactgtatctttttaatttgtcttaatgcctgtattttcccctagaatgtacatccactagagagggggtttttatatgtttaggttactatttcactgtggcact

SEQ ID NO: 61369 - DNA, 110 bp, synthetic construct
  source 1..110: mol_type = other DNA
taaaaagtggtagaggttaaaagtttcagaaaaggatatggagcccagtagctaaaagttttcttctttccagctaattttgacatttgacatgtccttgactatctttc

SEQ ID NO: 61370 - DNA, 110 bp, synthetic construct
  source 1..110: mol_type = other DNA
ttttaatcacagaggtttcttggctaccagtgtcatgatcttcaatgcagcaggccacataaatctgtcctcggatttgggccatttttttccccagctagtgaagttca

SEQ ID NO: 61371 - DNA, 110 bp, synthetic construct
  source 1..110: mol_type = other DNA
aggagcataatcctcaattttctccttccttcagaaggaagaaaatagaatggggatgtcctgaacactggtcttccaggaaagtttataatttcaggtcataagaggtg

SEQ ID NO: 61372 - DNA, 110 bp, synthetic construct
  source 1..110: mol_type = other DNA
tgcaacctcacggttcccagtgggattagtttccgctgctccatgatgggaactcgcagatcgagctcttttttttttttttttttttttaaggcagggttctcctctga

SEQ ID NO: 61373 - DNA, 110 bp, synthetic construct; identical to SEQ ID NO: 61372
  source 1..110: mol_type = other DNA

SEQ ID NO: 61374 - DNA, 110 bp, synthetic construct
  source 1..110: mol_type = other DNA
aacccaagtgatggaaagaaatgcctctgggagagttttggatggccaaagatcatgaatatcctggtttgattttgttcctttataatttggtttcttaagtctataaa

SEQ ID NO: 61375 - DNA, 110 bp, synthetic construct
  source 1..110: mol_type = other DNA
gggccaagtttgatgatgaccgagggcattccagaccgggaaacgcagagagcataagggtacagtttctttggaaaatgcaagggtttcaaagtggcaggtgtaccagg

SEQ ID NO: 61376 - DNA, 110 bp, synthetic construct
  source 1..110: mol_type = other DNA
tctccaaactctcacccatttgtctccatatttattgctttgagagtccagcattacactcagtattccaggctggggctcatcagactcacagagaggagcccgagctt

SEQ ID NO: 61377 - DNA, 110 bp, synthetic construct
  source 1..110: mol_type = other DNA
gtaagtgtcagcctttttattctgcctccattacaaccacacccacttcctgccgacattacagctgcctttctgtgcactttctcggggttcactgaatgcattctctg

SEQ ID NO: 61378 - DNA, 110 bp, synthetic construct
  source 1..110: mol_type = other DNA
gagtcatttggctcaagaaatgaagaaggggactcactgtggtgggtaagctttttctccatccgtctttccaaaccaaccgtgggcctaggaccctattttagaaaggg

SEQ ID NO: 61379 - DNA, 110 bp, synthetic construct
  source 1..110: mol_type = other DNA
tgatttcaacaaatattccgtgaatactaactctttacccctgattatacccccatcaatttttctgcttcccctccgttcctgtctcagtgaacatctctagacctgcc

SEQ ID NO: 61380 - DNA, 110 bp, synthetic construct
  source 1..110: mol_type = other DNA
tcaatttttctgcttcccctccgttcctgtctcagtgaacatctctagacctgcccagatacaaaaggcttcttccgatcccatgtggcttcccatgtctcattccctct

SEQ ID NO: 61381 - DNA, 110 bp, synthetic construct
  source 1..110: mol_type = other DNA
tgattagcatgacactgtccatataatgggccaagctgatgtcctgtgaaatgccagatatttcacctgtcctcttgcaatattgtaacaaaggggcaaagtttaagaca

SEQ ID NO: 61382 - DNA, 110 bp, synthetic construct
  source 1..110: mol_type = other DNA
tctagtcctctactaaattgtgagttgagccaagactatacctagagcccggatctccccaagtccaggcctcctgtcatctccctgcttctctgaatgcattctcatcc

SEQ ID NO: 61383 - DNA, 110 bp, synthetic construct
  source 1..110: mol_type = other DNA
tccccaagtccaggcctcctgtcatctccctgcttctctgaatgcattctcatcccctcagaatccgtttcagcctcttacgctgccccctggctgttagcagcatcatt

SEQ ID NO: 61384 - DNA, 110 bp, synthetic construct
  source 1..110: mol_type = other DNA
ctccacagagagtgaagcaccactcaggtgctgtgctgtgatagggcttggcactccagttcaaggagaggcaagaattcaaaggcagctcccttctcaaacaaaaactt

SEQ ID NO: 61385 - DNA, 110 bp, synthetic construct
  source 1..110: mol_type = other DNA
acctactatgtgtcaaagcactatgcttgactgagggaattcaaaaatgagtaagatgagctggctgtttttatgttgcctgttggtcaggagtaggctggggagcatgt

SEQ ID NO: 61386 - DNA, 110 bp, synthetic construct
  source 1..110: mol_type = other DNA
atgagctggctgtttttatgttgcctgttggtcaggagtaggctggggagcatgtcagcacactgaaaggtccagggtgaggagtgcttcctgcctgcatgtaccagctg

SEQ ID NO: 61387 - DNA, 110 bp, synthetic construct
  source 1..110: mol_type = other DNA
aatttctttcctccatcctgaataagaaaagaaaatgttgatgaattttgtggaccaggaatccattttgccaacatttaggaggcatcctccaggggccaggcaatgct

SEQ ID NO: 61388 - DNA, 110 bp, synthetic construct
  source 1..110: mol_type = other DNA
caggaatccattttgccaacatttaggaggcatcctccaggggccaggcaatgctagggatatgaagaggattaaagcacaagctaagtctttatagggttcaaaactac

SEQ ID NO: 61389 - DNA, 110 bp, synthetic construct
  source 1..110: mol_type = other DNA
cacaccaaaaagaaaccctgtgcttttttgtagcaaaccccatttcatccttaccctagctgtggcaaccactagtttcctcttatctatttatttgcctatttaggaca

SEQ ID NO: 61390 - DNA, 110 bp, synthetic construct
  source 1..110: mol_type = other DNA
gtgatgaattttccttgaaccacctccatgcgtttgagagggtctggcagggattgagctctattttaaaaattgagaccatatggggccgaggggacaaagtacacaat

SEQ ID NO: 61391 - DNA, 110 bp, synthetic construct
  source 1..110: mol_type = other DNA
gagctctattttaaaaattgagaccatatggggccgaggggacaaagtacacaatacttctgctattttgttttggaaaccggtgaaaaaatcccaaccacactgagcat

SEQ ID NO: 61392 - DNA, 110 bp, synthetic construct
  source 1..110: mol_type = other DNA
aacattagggctaccttgaaagctgaggggactcgactctggattctgtcttattcgttgtaggttctctataaaaatatgttcaatgagtaaggaataatgaacaatgg

SEQ ID NO: 61393 - DNA, 110 bp, synthetic construct
  source 1..110: mol_type = other DNA
tcctatctacctcattttgttataagaattagaagagttaatattcataaacatgcttaggacagcaactggcccgcagcacgctccattaagtgcgagctattgtcatt

SEQ ID NO: 61394 - DNA, 110 bp, synthetic construct
  source 1..110: mol_type = other DNA
cttaggacagcaactggcccgcagcacgctccattaagtgcgagctattgtcattatcacccttaatattatttatgggtccattgcactcgacagactaagtcctctga

SEQ ID NO: 61395 - DNA, 110 bp, synthetic construct
  source 1..110: mol_type = other DNA
cccattgcaggactaagcagtagacaactacctactctcagtcctcaggctctgtaagctacccttaagtgatcacctatcctctcactgatggaactctctagaacaga

SEQ ID NO: 61396 - DNA, 110 bp, synthetic construct
  source 1..110: mol_type = other DNA
tggattggcgactaagcccactcagctaattagtgtgtgaagccaaaattcaagtccagggctgcctggcccatgagccattccctttccactatatcccgtggaaatga

SEQ ID NO: 61397 - DNA, 110 bp, synthetic construct
  source 1..110: mol_type = other DNA
ctcctctcacttgcctgggaactcctccgtagcttcagtgaagcacatcccacgttgtgttgtgactatataggtctggctccccaggagattgtacaaaatttcagggt

SEQ ID NO: 61398 - DNA, 110 bp, synthetic construct
  source 1..110: mol_type = other DNA
aattttcatctcttttagtgagctaattaactgcaaagcccctttacaattgatatttccaagccagtgtcagtctagtatcatgcattgcatctgcttgttgtgtcctt

SEQ ID NO: 61399 - DNA, 110 bp, synthetic construct
  source 1..110: mol_type = other DNA
ggggaaaactacaattccatagatggaattctacttccatctctggcagtgctcatttttgaaatttaatttctgaatttctctttacccttttgttggatagtgatttc

SEQ ID NO: 61400 - DNA, 110 bp, synthetic construct
  source 1..110: mol_type = other DNA
tgttcttgttttcagttccccgtatatcagttttagtgaagaagcaggtgattgtggtgaaataaggttcaccagattcttacatttgcattgcataaactttctaaaat

SEQ ID NO: 61401 - DNA, 110 bp, synthetic construct
  source 1..110: mol_type = other DNA
ggtgaaataaggttcaccagattcttacatttgcattgcataaactttctaaaatacctaactctttagtgtggagagagaaaaaattatgtccttttatttcctagtga

SEQ ID NO: 61402 - DNA, 110 bp, synthetic construct
  source 1..110: mol_type = other DNA
aatatattattgttttactatacctttcagtacaagatgatgaggcttgccgtatgagagtggagtaggctttgtgtgtaaggaaagccaacatggattgagaagtagct

SEQ ID NO: 61403 - DNA, 110 bp, synthetic construct
  source 1..110: mol_type = other DNA
gagagtggagtaggctttgtgtgtaaggaaagccaacatggattgagaagtagcttttacacaaggtttgaaatatttgtaatgttcatatataagatttctactgaata

SEQ ID NO: 61404 - DNA, 110 bp, synthetic construct
  source 1..110: mol_type = other DNA
aaaaagatgttataaggagccttaatgaaacaagagagcttggaaattgaaatataaaagccagacttggagttcccactgtgactgtgggttaaaaatcctactgcagt

SEQ ID NO: 61405 - DNA, 110 bp, synthetic construct
  source 1..110: mol_type = other DNA
gcgatactacccgagtgacagagaggggctgacctggaatttggggccaatccggagaccactttcattgttcttctcctcctcccctgagcaagctgcagagcaagaac

SEQ ID NO: 61406 - DNA, 110 bp, synthetic construct
  source 1..110: mol_type = other DNA
agcagcccaaacaaatcaacagtagctagtacccatgaacagtattttcttatcatttatttaatggccacactggggagttccctttgtggctcagtggttaacgaatc

SEQ ID NO: 61407 - DNA, 110 bp, synthetic construct
  source 1..110: mol_type = other DNA
tggctgaataaccaaaaagaatgcaccgtggttgcaaagcttagttgaagacttacaaagaggagccttctcagggccaggccaaggcctgaccacaatccttaggacaa

SEQ ID NO: 61408 - DNA, 110 bp, synthetic construct
  source 1..110: mol_type = other DNA
ggaatatcaattattaacagcaaaggagtttgggaaaccagaagaataatggttattagaatacttaaaaaaagattctctttgggcttcaaagggctaaaaggacttgg

SEQ ID NO: 61409 - DNA, 110 bp, synthetic construct
  source 1..110: mol_type = other DNA
aaaacattaatcctcattcgtaaatacagccctgctgatccatacctggcctagagttgtccttgtgagcgagagctcagttgtaaaataaggccttatgccttttgaaa

SEQ ID NO: 61410 - DNA, 110 bp, synthetic construct
  source 1..110: mol_type = other DNA
gttgtccttgtgagcgagagctcagttgtaaaataaggccttatgccttttgaaagttgctgctcatatttgaatggactggtgattatctttgtccttcatgtcttaat

SEQ ID NO: 61411 - DNA, 110 bp, synthetic construct
  source 1..110: mol_type = other DNA
ttatcatatttggagtcatttttgcaaaagtctgttacccagtaggagaatgtacatttataaagtaacattatttctatggaagctgctaaagttacccatcccctcct

SEQ ID NO: 61412 - DNA, 110 bp, synthetic construct
  source 1..110: mol_type = other DNA
tttgtgaaagctcagaagtagttcataagctgaagaggactattctaaaaataatgtttgcccttttcaaactagccataaattagatcacatgccatttaaattcactg

SEQ ID NO: 61413 - DNA, 110 bp, synthetic construct
  source 1..110: mol_type = other DNA
actcagagttccctgaatttattctttcctgctatcatggatggaacaaaaacatatctctccttggtgaatatctatccttggtatataattaatagaagaaacaaaag

SEQ ID NO: 61414 - DNA, 110 bp, synthetic construct
  source 1..110: mol_type = other DNA
atctctccttggtgaatatctatccttggtatataattaatagaagaaacaaaagactgtttatatgagatgccccacttactcaagacaagtgaacgtatgctcttcta

SEQ ID NO: 61415 - DNA, 110 bp, synthetic construct
  source 1..110: mol_type = other DNA
cacaggtgtggccataaaaagaaagtacaaccttcagaacaatctagcagatagaaaggagctccaagtgtttaccaagtgagagttttataggcagaagggagcaggaa

SEQ ID NO: 61416 - DNA, 110 bp, synthetic construct
  source 1..110: mol_type = other DNA
aaggagctccaagtgtttaccaagtgagagttttataggcagaagggagcaggaaccaggaagttatactatgcaaaacagtaggttggttattgcagactttccttttg

SEQ ID NO: 61417 - DNA, 110 bp, synthetic construct
  source 1..110: mol_type = other DNA
ccactgattgcaactcctcgtccattgcctgcatcacctctaaacaaggactgttgtaaaaagctccccggctggctttctcttcagtccaaccactgtggccccaaaat

SEQ ID NO: 61418 - DNA, 110 bp, synthetic construct
  source 1..110: mol_type = other DNA
agaggctaaaagcaacactgtttttagtgtcaaatagctctgacacaaattaccccactagtgtggttgttggctgttgttttcacacctgaaggtgatgttggcaaatt

SEQ ID NO: 61419 - DNA, 110 bp, synthetic construct
  source 1..110: mol_type = other DNA
cactagtgtggttgttggctgttgttttcacacctgaaggtgatgttggcaaatttgattagcagttcgcaataacaggttatccattaatactttaatctgagtgggca

SEQ ID NO: 61420 - DNA, 110 bp, synthetic construct
  source 1..110: mol_type = other DNA
aaaagatactttccttcagcttttaaacaaggaaaaacattaccacacagaaaaatttgtcagtgtctcttgtctgtctcaatctaggttttttggaggaaaaacttgac

SEQ ID NO: 61421 - DNA, 110 bp, synthetic construct
  source 1..110: mol_type = other DNA
tgcagctgcagctctaattcaacccttagcccaaaaaactttgatatcctgccggcatagccataaaaaaaaaacaaaaacgaaaaacaaaaaccttctgattgttagaa

SEQ ID NO: 61422 - DNA, 110 bp, synthetic construct
  source 1..110: mol_type = other DNA
tcaggaataagtggtcttttctatataaatcagcagccccgatccctgaacccacagtcttgctccacagagcatgtcagctccattgggtaaatggctgtcttcgaggt

SEQ ID NO: 61423 - DNA, 110 bp, synthetic construct
  source 1..110: mol_type = other DNA
tcagatactgccatttactcaatttttaaaaatggttaactttgtactaggctctgttctaaatgcttttcttataatagttcattgttttcacaacagactgaggcaca

SEQ ID NO: 61424 - DNA, 110 bp, synthetic construct
  source 1..110: mol_type = other DNA
acatcgcaaagcagcagagacagctgccatcaaaagttaatgagtttgctgtgaaacatggaagaaaaggtaagaagcagaacggctgatgttatgtagccagtttgatt

SEQ ID NO: 61425 - DNA, 110 bp, synthetic construct
  source 1..110: mol_type = other DNA
agagacagctgccatcaaaagttaatgagtttgctgtgaaacatggaagaaaaggtaagaagcagaacggctgatgttatgtagccagtttgatttgctgcctgtatgat

SEQ ID NO: 61426 - DNA, 110 bp, synthetic construct
  source 1..110: mol_type = other DNA
cagttttggcagtttgaagcttgttggtgactttaccaagggcaatttcagagaagtaacgaggccaaacgctacttcaagttgagttgaaacgtaaggatcacattttc

SEQ ID NO: 61427 - DNA, 110 bp, synthetic construct
  source 1..110: mol_type = other DNA
ggggccttccagaacctcctgtcctctccaagaatgacctggccacagctacacttgtccctgtcctcaccttgggccagtgcctcctctttgagagccatggtggagaa

SEQ ID NO: 61428 - DNA, 110 bp, synthetic construct
  source 1..110: mol_type = other DNA
ccatctaccctcccccaactcttatcctctctcccaccatccccgagagctgctgtttcatcagctgccaggatggaaatggagaattcttactggttagagagcaagga

SEQ ID NO: 61429 - DNA, 110 bp, synthetic construct
  source 1..110: mol_type = other DNA
tttcatcagctgccaggatggaaatggagaattcttactggttagagagcaaggagaaacttcagactggctcttgcttttgtgaatgctttggggggctcttctggagt

SEQ ID NO: 61430 - DNA, 110 bp, synthetic construct
  source 1..110: mol_type = other DNA
tttaaataagtaataaaatacattagcgtctatgaggaaaaataagaaaaagaagggcccacacacaatgaacttatattacagaggcacacttcaaccagagcctcctg

SEQ ID NO: 61431 - DNA, 110 bp, synthetic construct; identical to SEQ ID NO: 61430
  source 1..110: mol_type = other DNA

SEQ ID NO: 61432 - DNA, 110 bp, synthetic construct
  source 1..110: mol_type = other DNA
gctatgtatgttaagttctaaatacctgacatgtgaaatgcaaacggctgatatatttcatagaagcctagagctggaagactggggaagtgaagtcctctacctaaagt

SEQ ID NO: 61433 - DNA, 110 bp, synthetic construct
  source 1..110: mol_type = other DNA
tttcatagaagcctagagctggaagactggggaagtgaagtcctctacctaaagtttctatcactgtaggtgttcctctgttaatagctgtttgtgcgttgctgataatc

SEQ ID NO: 61434 - DNA, 110 bp, synthetic construct; identical to SEQ ID NO: 61432
  source 1..110: mol_type = other DNA

SEQ ID NO: 61435 - DNA, 110 bp, synthetic construct; identical to SEQ ID NO: 61433
  source 1..110: mol_type = other DNA

SEQ ID NO: 61436 - DNA, 110 bp, synthetic construct
  source 1..110: mol_type = other DNA
gtgcaagaacaaaactcaagctgaactcgaggtagacaactgaaatcatttgggcaatagaaatgaaaacctagattagaaaagcagtggtgcatctggaaaaaaaagga

SEQ ID NO: 61437 - DNA, 110 bp, synthetic construct
  source 1..110: mol_type = other DNA
ctctacatgtaactttgtcttcgaaagtcagtgatacagtgagataccacctcacatccgtaaggacggctgtttcccaaaaaaaatgttgatgaagatttggagaaatt

SEQ ID NO: 61438 - DNA, 110 bp, synthetic construct
  source 1..110: mol_type = other DNA
ataactctgtgctgggtaccagtcacctcgtgctagggaccagtgccgcataggaaagtgtccgagctgcagctctctgggtgctccagggctggggggacagggatcag

SEQ ID NO: 61439 - DNA, 110 bp, synthetic construct
  source 1..110: mol_type = other DNA
gggcccacccgagggaaaaaaaccccactaactcctgcctgccccagagggccacagggggtaaaggagaatgccttataactaccgtgtgccttgaaatcttgttttta

SEQ ID NO: 61440 - DNA, 110 bp, synthetic construct
  source 1..110: mol_type = other DNA
gagaaacgagtgaagaaccctttcgaggtaagcttcttagataggatttgctctggtcttttttcggtgataaatatctgtggagttactcttgtgtgccaggccctgtg

SEQ ID NO: 61441 - DNA, 110 bp, synthetic construct
  source 1..110: mol_type = other DNA
ggtgatagataaaagaaatacatggagggaagtgtcaccctgaaaaaaatatatggccggctgtaaatcaccaccaagcaattaaagcataaaattaagttgtgtggtat

SEQ ID NO: 61442 - DNA, 110 bp, synthetic construct
  source 1..110: mol_type = other DNA
tgtgtgctgtgcgacagggcacgggcggcaccgtcacccccacgcgccccccttccgctcgccaccctgacaacttggttctaaccatggaaataatgaccatacctcct

SEQ ID NO: 61443 - DNA, 110 bp, synthetic construct
  source 1..110: mol_type = other DNA
cttgcactttattcattgtaagatttctggatttttttcatttattgacattctatttgcttctctttcaaatctgctttttgtgtgtgtgtgtccttgtttttaactcc

SEQ ID NO: 61444 - DNA, 110 bp, synthetic construct
  source 1..110: mol_type = other DNA
tttgcttctctttcaaatctgctttttgtgtgtgtgtgtccttgtttttaactccttgattttataaagattttattcctgataatttctatccagtagctttactcaca

SEQ ID NO: 61445 - DNA, 110 bp, synthetic construct
  source 1..110: mol_type = other DNA
attattttgtttagcatttactgagcactaactatgtgtcagacattatacaaggcactggtgatacaacaaaactctggtacctgtatttggtggtgttgaggatacag

SEQ ID NO: 61446 - DNA, 110 bp, synthetic construct; identical to SEQ ID NO: 61445
  source 1..110: mol_type = other DNA

SEQ ID NO: 61447 - DNA, 110 bp, synthetic construct
  source 1..110: mol_type = other DNA
ccaggaactgccccctaaccaagcaagtgaagagtgaacacactggttgaagtcctagcaggcaggcacaacattcctttgcaagaatgatacaggaacaatacataatt

SEQ ID NO: 61448 - DNA, 110 bp, synthetic construct
  source 1..110: mol_type = other DNA
tattgtttgatgcagtgcattcatccatccataagcacctccaatcagtctgatgtgctagcttcagaaccatggcaacagcgtagttgtgtgcatgaatcccagaggaa

SEQ ID NO: 61449 - DNA, 110 bp, synthetic construct
  source 1..110: mol_type = other DNA
tccctaaaactttccagaggttgcccttagctctggtggtaaagtttactttgataagcatggcacccaaggctcttcctcatctggcctgggtccacctctctcagccc

SEQ ID NO: 61450 - DNA, 110 bp, synthetic construct
  source 1..110: mol_type = other DNA
agcctggctaggcccctccgtgatgaattgtctgagaatgctcgagggctaaaggcacagctgtgattgttcttcggaatgaagagccactctgtacaagggtgccctgc

SEQ ID NO: 61451 - DNA, 110 bp, synthetic construct
  source 1..110: mol_type = other DNA
tgaacaaatgaaagttgtgggtttttttgtttttttgtttttgtttttaaaggctgttgtcagaaaccagctttcagcgatagagagagaacaagagtaggaaatgatga

SEQ ID NO: 61452 - DNA, 110 bp, synthetic construct
  source 1..110: mol_type = other DNA
ttatatgtgataaaaataaagtgttcagactcagcgcttatgaatttctagataagctgctgagtgtactgttaaattctcatgcctggtcctacaacatgtacgcaaaa

SEQ ID NO: 61453 - DNA, 110 bp, synthetic construct
  source 1..110: mol_type = other DNA
gctgctgagtgtactgttaaattctcatgcctggtcctacaacatgtacgcaaaatcaagacaatttagggatatacaaaacccaaatgctattcactgctcagccttct

SEQ ID NO: 61454 - DNA, 110 bp, synthetic construct
  source 1..110: mol_type = other DNA
tgaaatgtctgccctcaaacatgccaactcttgctttagaggctttctattttatgttctctttattctcacattgttgcaaggttagctgctttttgtcatttagatct

SEQ ID NO: 61455 - DNA, 110 bp, synthetic construct
  source 1..110: mol_type = other DNA
agtccacgacctacaccacagctcacagtactgctagatccttaagccactgggcaagcccaggaatcagatccaagcctctgtcataacctatgctgcagctatggcaa

SEQ ID NO: 61456 - DNA, 110 bp, synthetic construct
  source 1..110: mol_type = other DNA
aagcccaggaatcagatccaagcctctgtcataacctatgctgcagctatggcaacaccagatccttaaccctctgtgcctggccaggggattaaacctgtatcccagaa

SEQ ID NO: 61457 - DNA, 110 bp, synthetic construct
  source 1..110: mol_type = other DNA
ttcttgaaactgagctcaaaatcacctgagaaattgattaggaaacagattcctgggcctaaatagggagtcagaatccccatgagtgagacctcagaatcaaccttttc

SEQ ID NO: 61458 - DNA, 110 bp, synthetic construct
  source 1..110: mol_type = other DNA
ggcctaaatagggagtcagaatccccatgagtgagacctcagaatcaaccttttcagcagcatcccaggagagtctacacaggcgctggtctgacgggctgtgggaagct

SEQ ID NO: 61459 - DNA, 110 bp, synthetic construct
  source 1..110: mol_type = other DNA
tggcgcgtgtaaagaccatctggctgggcacaggcccagcccgacaaccccgggccttttctcccctcctcccgatgactcctgctgtctgcccagggcaggaacaatag

SEQ ID NO: 61460 - DNA, 110 bp, synthetic construct
  source 1..110: mol_type = other DNA
cttttctcccctcctcccgatgactcctgctgtctgcccagggcaggaacaatagaataatctggagactgccctacccttttctggatcctcctggggtctctgccccc

SEQ ID NO: 61461 - DNA, 110 bp, synthetic construct
  source 1..110: mol_type = other DNA
cgcactgtccagccaacaccatgtgtagttatggaagtcaaccagttcggaggccactctccccactggttggcacgtcttcgcagtaattgctaagcacggagggtttc

SEQ ID NO: 61462 - DNA, 110 bp, synthetic construct
  source 1..110: mol_type = other DNA
actctccccactggttggcacgtcttcgcagtaattgctaagcacggagggtttcttctaccgttatctgaactcccttcccttcgctcgcacaccgtatccgtctttcc

SEQ ID NO: 61463 - DNA, 110 bp, synthetic construct
  source 1..110: mol_type = other DNA
caaatggcttctgcacaagttggctagtaggcacttcccacacctgcctgcccagcatcgtctactcccaggttagtgctcaccacagtcagcccatgggagcgtgctgc

SEQ ID NO: 61464 - DNA, 110 bp, synthetic construct
  source 1..110: mol_type = other DNA
catcgtctactcccaggttagtgctcaccacagtcagcccatgggagcgtgctgcaccccaggaggagtgctgaagctgccaactccttaggccacagtgatccactttc

SEQ ID NO: 61465 - DNA, 110 bp, synthetic construct
  source 1..110: mol_type = other DNA
atgtgctctggggggtgaggaaaggaaggcccggggatgctgcttgactgtgatagaaactctcggtagggttgggttttgacctttcatgggtggagtgggtcagtttg

SEQ ID NO: 61466 - DNA, 110 bp, synthetic construct
  source 1..110: mol_type = other DNA
ggttatatatccagtaaatgctggagccatgtcttgaactcagtgaccccagagcttggtgacatctgctgtgccatctccctgtgctaagagggcagaagccgatccag

SEQ ID NO: 61467 - DNA, 110 bp, synthetic construct
  source 1..110: mol_type = other DNA
ttggtgacatctgctgtgccatctccctgtgctaagagggcagaagccgatccaggaggaagattcctttatctgtagtgtgaacagggttctttggaatgagggtgaaa

SEQ ID NO: 61468 - DNA, 110 bp, synthetic construct
  source 1..110: mol_type = other DNA
gggaattgtgcctggttcttgccagtggaccatgcagaagtgatgggagccatttctatggggaggcagttaagatgcatgtgcctttttcatctctctcatccctttcc

SEQ ID NO: 61469 - DNA, 110 bp, synthetic construct
  source 1..110: mol_type = other DNA
ctatggggaggcagttaagatgcatgtgcctttttcatctctctcatccctttccttgaaggccatgtgttcataagacgcagttgcagttatggagaagggtttcctca

SEQ ID NO: 61470 - DNA, 110 bp, synthetic construct; identical to SEQ ID NO: 61468
  source 1..110: mol_type = other DNA

SEQ ID NO: 61471 - DNA, 110 bp, synthetic construct; identical to SEQ ID NO: 61469
  source 1..110: mol_type = other DNA

SEQ ID NO: 61472 - DNA, 110 bp, synthetic construct
  source 1..110: mol_type = other DNA
ctcttgccactgtcacagctggaatagacatggcgtcttccagtctagctcacgtcctcagcctccaggcagtgagaagagactcggaggaatgtgagccaggaccattt

SEQ ID NO: 61473 - DNA, 110 bp, synthetic construct
  source 1..110: mol_type = other DNA
ctgtgtcttctttggagaaatgtctgtctaggtcttctgcccattttttgattgggttgtttgttttttgttgctgagttgtgtaagttgtttgtatattttagataata

SEQ ID NO: 61474 - DNA, 110 bp, synthetic construct
  source 1..110: mol_type = other DNA
tctgcccattttttgattgggttgtttgttttttgttgctgagttgtgtaagttgtttgtatattttagataataagccccttttggttgtatcatttgcaaatattttc

SEQ ID NO: 61475 - DNA, 110 bp, synthetic construct
  source 1..110: mol_type = other DNA
gtcccacaacacagcccagagcccctagtgggaaagctcttcctccccctactagttgaggtcagttgagagcttagtcagccaattggcctttgttggaattctccgta

SEQ ID NO: 61476 - DNA, 110 bp, synthetic construct
  source 1..110: mol_type = other DNA
tttctaaccctaggtagtttacagggtttctgagatggctcttgggtgactggttctgaaagactgacagctgccagggctttgggttcacagtgccaccttcccttttc

SEQ ID NO: 61477 - DNA, 110 bp, synthetic construct
  source 1..110: mol_type = other DNA
cacttttctgaaaagtgtgtgggtgcattgtaatttatcaaatatttattaaagacatttagaagcattgttgaaggaatagaggcttttcctccccatttagtcagtta

SEQ ID NO: 61478 - DNA, 110 bp, synthetic construct
  source 1..110: mol_type = other DNA
acccggctctcagggtccgtgttctgatgaggggacttcggctggggacggacgcggctagtgctggacagcggctgtcaccatggttactgcagtctgcttttcccact

SEQ ID NO: 61479 - DNA, 110 bp, synthetic construct
  source 1..110: mol_type = other DNA
atggtgttagggaagcgttgccaggctgggcacatctctgcccttaccccatccccttccgtgtcttgggagctggcccagacacaccgacacaagtgttcattagatgg

SEQ ID NO: 61480 - DNA, 110 bp, synthetic construct
  source 1..110: mol_type = other DNA
cttccgtgtcttgggagctggcccagacacaccgacacaagtgttcattagatggatggtcaagaaaggctgggaaaagccatctgtttggtgtgtagaaggcagatcct

SEQ ID NO: 61481 - DNA, 110 bp, synthetic construct
  source 1..110: mol_type = other DNA
aaggttcttgccttcatgttgcttaaatagaaacccaaatacctcccagtgtgctgagtaaaaagacaatctccatcatccgcatcttagagaaaagctgggaagcacat

SEQ ID NO: 61482 - DNA, 110 bp, synthetic construct
  source 1..110: mol_type = other DNA
gagtaaaaagacaatctccatcatccgcatcttagagaaaagctgggaagcacattccagactctgggcctggaagaggaggccttgtctccttgtatttcacaggctgt

SEQ ID NO: 61483 - DNA, 110 bp, synthetic construct
  source 1..110: mol_type = other DNA
ggctgtaaagattaaaggcacaaaattgatgaaggtgcttggaacttagaaaatactccacaaatgtcacttgctatggttattgttttaggtttggaagtgataatatc

SEQ ID NO: 61484 - DNA, 110 bp, synthetic construct
  source 1..110: mol_type = other DNA
ccagtcccttgaaggaggcagagatcaaggaggaggaggaggaggtggagaagaagcagcagaagaaggagaagcgtgagacgggcaaagccatggtgcctcacagctca

SEQ ID NO: 61485 - DNA, 110 bp, synthetic construct
  source 1..110: mol_type = other DNA
gcagcagaagaaggagaagcgtgagacgggcaaagccatggtgcctcacagctcaatgttcatctttagcaccaccaacccgtaagacaccctccttcgccaccccgctt

SEQ ID NO: 61486 - DNA, 110 bp, synthetic construct; identical to SEQ ID NO: 61484
  source 1..110: mol_type = other DNA

SEQ ID NO: 61487 - DNA, 110 bp, synthetic construct; identical to SEQ ID NO: 61485
  source 1..110: mol_type = other DNA

SEQ ID NO: 61488 - DNA, 110 bp, synthetic construct
  source 1..110: mol_type = other DNA
ggaacctttttggagcattttctgctctgttgaaagcccaggtatgaggcacgaagacctggaagggatggaaggtgtttgagaagctgttctgatctttacacggtgca

SEQ ID NO: 61489 - DNA, 110 bp, synthetic construct
  source 1..110: mol_type = other DNA
ctttcctctcccactcggcacacgtgtgctggggcgggggggagggaccaggcgtgtgactataacaccccgatcctaacagacgtgattgttacataagactcaggcgc

SEQ ID NO: 61490 - DNA, 110 bp, synthetic construct
  source 1..110: mol_type = other DNA
gtgactataacaccccgatcctaacagacgtgattgttacataagactcaggcgctgggcctcgtactgtctttaaaggtttcctctgctcggcgtcatttcatgccaaa

SEQ ID NO: 61491 - DNA, 110 bp, synthetic construct
  source 1..110: mol_type = other DNA
tttaaaaattgctgcacataaagagaaggaaaaaaaatgcaactcataatgaggagatgagtcaaataattgaaaataatgcagaactgacccagatactagaactacta

SEQ ID NO: 61492 - DNA, 110 bp, synthetic construct
  source 1..110: mol_type = other DNA
aaagtcagtgttatatcgataccaataactacatcggattggcgttccagttgaaagtcagtctccagttcagctcacacacacgaaagcaatgacaaccacatcataac

SEQ ID NO: 61493 - DNA, 110 bp, synthetic construct
  source 1..110: mol_type = other DNA
ggtacatttgaaatttgctaaaagaatagatcttaactcttctcagcacacaactacatagagctattggtatttagcttcaccgtggtgatcatttcacgatgtttatg

SEQ ID NO: 61494 - DNA, 110 bp, synthetic construct
  source 1..110: mol_type = other DNA
acatagagctattggtatttagcttcaccgtggtgatcatttcacgatgtttatgggtgtgttatagacatgtatataaccatcacaatcactttgttgtgcagcagaaa

SEQ ID NO: 61495 - DNA, 110 bp, synthetic construct
  source 1..110: mol_type = other DNA
tcaaatgctgttagtaccagaattcttcaaaacgttaaaaaaacaaggaatacctgagtagtataaggctacaaacttcttacagtatttcactcaatacttagaaactt

SEQ ID NO: 61496 - DNA, 110 bp, synthetic construct
  source 1..110: mol_type = other DNA
accagaattcttcaaaacgttaaaaaaacaaggaatacctgagtagtataaggctacaaacttcttacagtatttcactcaatacttagaaactttattgcccaaagaaa

SEQ ID NO: 61497 - DNA, 110 bp, synthetic construct
  source 1..110: mol_type = other DNA
ctgtgtctgtgggacagcaaaatctctgagcctggttctcttcacctactgaatggagatactgtgcctacggtgtcgcctgtgggacgcccctgcacgtagctgccatc

SEQ ID NO: 61498 - DNA, 110 bp, synthetic construct
  source 1..110: mol_type = other DNA
gagatactgtgcctacggtgtcgcctgtgggacgcccctgcacgtagctgccatccaacaactggtgcactgttaattgtgctcccagctcctctgcacagcagggggac

SEQ ID NO: 61499 - DNA, 110 bp, synthetic construct
  source 1..110: mol_type = other DNA
ggccacctgctcactccctctccagccacagcgtctttagcatgcttcttagatatgccgcattctttgcgaccccaggtccgttgcataggctggcatgctttcttttt

SEQ ID NO: 61500 - DNA, 110 bp, synthetic construct
  source 1..110: mol_type = other DNA
tgccgcattctttgcgaccccaggtccgttgcataggctggcatgctttctttttttgaaatcacacccctgcccccaccctaatcctctccatctcatgttgaatatta

SEQ ID NO: 61501 - DNA, 110 bp, synthetic construct
  source 1..110: mol_type = other DNA
tagtcctgacccaccccatgcctctgaactggctgggaagggagagagggaaatcccaaaacacttgtaaaagcagcttgtcagtttgtcgggacctcccctccccgggg

SEQ ID NO: 61502 - DNA, 110 bp, synthetic construct
  source 1..110: mol_type = other DNA
ccaaaacacttgtaaaagcagcttgtcagtttgtcgggacctcccctccccggggcaggttcgctccaggtgagacaggctgtggggaaagccgtgggtgatgagcaggt

SEQ ID NO: 61503 - DNA, 110 bp, synthetic construct
  source 1..110: mol_type = other DNA
ataaagagtgtttggagaaggaagcaagaatacggcatccattcattcactcattcactgaacataatttaaacattatgggacagttactaagccaagtcattgtgttg

SEQ ID NO: 61504 - DNA, 110 bp, synthetic construct
  source 1..110: mol_type = other DNA
cactgaacataatttaaacattatgggacagttactaagccaagtcattgtgttggtacccaggggacataagacagacatggatcttattctcaatgcctaaattttcc

SEQ ID NO: 61505 - DNA, 110 bp, synthetic construct
  source 1..110: mol_type = other DNA
ctccatctgtgactctgagccagttgcttctccagactgcagttctctttagaatataaaatgcatgctacccacgatgcaggatgtttgttaaatgagaaaatacatac

SEQ ID NO: 61506 - DNA, 110 bp, synthetic construct
  source 1..110: mol_type = other DNA
tgatttatttcagagctgtataccacccagaagtgtggacttcccagaggaagacccagcccatcaccagctgtagctaaagcaactgtgccctagttcctaacagcaaa

SEQ ID NO: 61507 - DNA, 110 bp, synthetic construct
  source 1..110: mol_type = other DNA
ccagcccatcaccagctgtagctaaagcaactgtgccctagttcctaacagcaaacaggcacagagggcacagaggccactatatcgaggctccttcaccctgcactgca

SEQ ID NO: 61508 - DNA, 110 bp, synthetic construct
  source 1..110: mol_type = other DNA
taagatacactttatattaatacagttattcatccatcccctcgaatgtgaccagaaaagtaagcaatcctaaaagtaggtagaaggtgacggaccacagtccctttgct

SEQ ID NO: 61509 - DNA, 110 bp, synthetic construct
  source 1..110: mol_type = other DNA
aaaagtaagcaatcctaaaagtaggtagaaggtgacggaccacagtccctttgctcataacagctcctgtgggataagcaatcagccagttggagaatttcccaaagagg

SEQ ID NO: 61510 - DNA, 110 bp, synthetic construct
  source 1..110: mol_type = other DNA
gattcatttacgaggtcacagtttagaaacagcatattaattgaagaaaaattgacatattgacaacagatgagaactagccagtcacctgagagaaaaaaagctgacca

SEQ ID NO: 61511 - DNA, 110 bp, synthetic construct
  source 1..110: mol_type = other DNA
catattgacaacagatgagaactagccagtcacctgagagaaaaaaagctgaccagcaaaacaaaacttaaatgattttaaagatttggggtcaagtgtaatcacagtgc

SEQ ID NO: 61512 - DNA, 110 bp, synthetic construct; identical to SEQ ID NO: 61510
  source 1..110: mol_type = other DNA

SEQ ID NO: 61513 - DNA, 110 bp, synthetic construct; identical to SEQ ID NO: 61511
  source 1..110: mol_type = other DNA

SEQ ID NO: 61514 - DNA, 110 bp, synthetic construct
  source 1..110: mol_type = other DNA
ttgcagcatacaaaccaggtctcctggatgtccctgtagcctcactgcttcccttgtccttcccaccttcttctctagaggcgctccctggaaacggtcctggaatggcc

SEQ ID NO: 61515 - DNA, 110 bp, synthetic construct
  source 1..110: mol_type = other DNA
tgttgttttaagccaccaagagtgtgacagttccaacagccacgggatgctcatgcacttggcgagctctgtctctttgggcgtacagtcttgttcttcgtgcctctctt

SEQ ID NO: 61516 - DNA, 110 bp, synthetic construct
  source 1..110: mol_type = other DNA
gtgtggaagttgatttctaccttcatctttactttttcttttccagcctccagcttcagcaaagattggtgaggctgagaagtcccctgggaagtgggcacatctctcac

SEQ ID NO: 61517 - DNA, 110 bp, synthetic construct
  source 1..110: mol_type = other DNA
tcagcaaagattggtgaggctgagaagtcccctgggaagtgggcacatctctcaccaggtggggggaagggggggacgctgaaaaacacttccctgccttcccagcacct

SEQ ID NO: 61518 - DNA, 110 bp, synthetic construct
  source 1..110: mol_type = other DNA
gatgagaggggttagccacagatttagaaaagggaagcaacattcactgatagtctccacattcagctgatgtttttattttaaaatatttctttttaattattcttaac

SEQ ID NO: 61519 - DNA, 110 bp, synthetic construct
  source 1..110: mol_type = other DNA
aaaaagacagcaagcgttgccaaggatgtgaagaaaaggaaactcccgtgcactgtcagtggggatattaactggtacagctgctatagaaaacattatggaggttcctc

SEQ ID NO: 61520 - DNA, 110 bp, synthetic construct
  source 1..110: mol_type = other DNA
ccgtgcactgtcagtggggatattaactggtacagctgctatagaaaacattatggaggttcctcccaaaattcaaaatagaacaaccataaaatccagcaattccactt

SEQ ID NO: 61521 - DNA, 110 bp, synthetic construct
  source 1..110: mol_type = other DNA
gggtttcccctttaaataccttcaagccagagcaaactggggaaaacttctctctgacccatctctccacctttgattttccctgcttttcttcaaaggacctcctcatt

SEQ ID NO: 61522 - DNA, 110 bp, synthetic construct
  source 1..110: mol_type = other DNA
atattaaaatttatgttgtgtgttaaaaaacgtgcataactcccaaacatctcctcctttacgtgagttccagaaataaggtatacattctgctaaacaggagctgttta

SEQ ID NO: 61523 - DNA, 110 bp, synthetic construct
  source 1..110: mol_type = other DNA
cctttacgtgagttccagaaataaggtatacattctgctaaacaggagctgtttataattcagaggagaatggactaatgcttccgatacttgtctctcagcccagagct

SEQ ID NO: 61524 - DNA, 110 bp, synthetic construct
  source 1..110: mol_type = other DNA
ctgagagcatgcacagaacttccttgtcagaaatgatgtggctgcaaataacagaaacccattcaaaccagctgatgtgaaaaaaggtaaggtattataaaatactgggt

SEQ ID NO: 61525 - DNA, 110 bp, synthetic construct
  source 1..110: mol_type = other DNA
aacccattcaaaccagctgatgtgaaaaaaggtaaggtattataaaatactgggtacacttcataaaacgtgagaggaggaagtgcagtgaggcctcagggaacatggga

SEQ ID NO: 61526 - DNA, 110 bp, synthetic construct
  source 1..110: mol_type = other DNA
aatccagacctgctgtggagggattatcctcttgctaccctgccatgttagaacaaacctggtaagtgacagagagctgagagggcccttgatgggacgtgaagtgaaag

SEQ ID NO: 61527 - DNA, 110 bp, synthetic construct
  source 1..110: mol_type = other DNA
aacctggtaagtgacagagagctgagagggcccttgatgggacgtgaagtgaaagtttaccaaagcaaagaactgagcctggcatctctgacacatctctccttgaggag

SEQ ID NO: 61528 - DNA, 110 bp, synthetic construct
  source 1..110: mol_type = other DNA
aacagtcctttcagtatatcagaggccatcacatttagttgggggaaaaaatatttttatggttttggatagatctttgttcccattctctgagcttctttctttttgat

SEQ ID NO: 61529 - DNA, 110 bp, synthetic construct; identical to SEQ ID NO: 61528
  source 1..110: mol_type = other DNA

SEQ ID NO: 61530 - DNA, 110 bp, synthetic construct
  source 1..110: mol_type = other DNA
ggctattgcaaatagtgctgcagtgaacgttgggggtatgtgtgtttctttttgaattagagttttctcaggatacacacccaggagtgggatcatcagtgaagaatctt

SEQ ID NO: 61531 - DNA, 110 bp, synthetic construct; identical to SEQ ID NO: 61530
  source 1..110: mol_type = other DNA

SEQ ID NO: 61532 - DNA, 110 bp, synthetic construct
  source 1..110: mol_type = other DNA
ttgcttttccgggcagatgacagtcttcgacttggggacaaagaagcttgcattcttctagtcatagttctctatatccaaagccatccctttgaccagcttcgtgaaaa

SEQ ID NO: 61533 - DNA, 110 bp, synthetic construct
  source 1..110: mol_type = other DNA
ttctagtcatagttctctatatccaaagccatccctttgaccagcttcgtgaaaactaagagatgagaaagctctgtttcccgtgttatgctgggtgccagcaagataaa

SEQ ID NO: 61534 - DNA, 110 bp, synthetic construct
  source 1..110: mol_type = other DNA
ggagggataacaaggagaaaatggcttgagagagttttgtacatttgggaagttccaagtaggtgagcctggagtaggaagcaagggcagagaaagaggcggcggtgagg

SEQ ID NO: 61535 - DNA, 110 bp, synthetic construct
  source 1..110: mol_type = other DNA
caagtaggtgagcctggagtaggaagcaagggcagagaaagaggcggcggtgaggtcatggatggccctgtgtgggtctaaggaggtggaatgggatattttttgatgtg

SEQ ID NO: 61536 - DNA, 110 bp, synthetic construct
  source 1..110: mol_type = other DNA
gacaggcagtcttcctctggaagcccaaacttgccttctcagcccaccagtcagctccttcaagtaacaacctgtaacagtgctcgtggaatgactggaaacttcacctg

SEQ ID NO: 61537 - DNA, 110 bp, synthetic construct
  source 1..110: mol_type = other DNA
tccttcaagtaacaacctgtaacagtgctcgtggaatgactggaaacttcacctggcacatggaagacacttaataaatacctccagactggattaataaatgtgctcct

SEQ ID NO: 61538 - DNA, 110 bp, synthetic construct
  source 1..110: mol_type = other DNA
acacatgatgagacggtgcctgctcgacacaaggccctgggaagcaacagagcagtggttgggaggttcgctgtgaccccacagcctccccaagtcttcatcccaagcca

SEQ ID NO: 61539 - DNA, 110 bp, synthetic construct
  source 1..110: mol_type = other DNA
tggttgggaggttcgctgtgaccccacagcctccccaagtcttcatcccaagccaccccactataaaaatgcagcgttgttcagtggtgacagagaatgaggtgtgagcc

SEQ ID NO: 61540 - DNA, 110 bp, synthetic construct
  source 1..110: mol_type = other DNA
tcagccaagcaccgacccagcacagatcatctgtccattagtgatcactcataagacagacatgtctcgtctgcctcctggcgactcagtgaacccagctgatgtgtaat

SEQ ID NO: 61541 - DNA, 110 bp, synthetic construct
  source 1..110: mol_type = other DNA
acagacatgtctcgtctgcctcctggcgactcagtgaacccagctgatgtgtaatctactctccttttccagaaagttaatggaggaaacaatatggtcaggacatcaat

SEQ ID NO: 61542 - DNA, 110 bp, synthetic construct
  source 1..110: mol_type = other DNA
ctgttgttactcctgtggcaaattgattgacacacatctgtttgtcctacttgaacgaaaacgccatgagctcagtgcctaacccagagcaggcagttaagacaattttg

SEQ ID NO: 61543 - DNA, 110 bp, synthetic construct
  source 1..110: mol_type = other DNA
cgaaaacgccatgagctcagtgcctaacccagagcaggcagttaagacaattttgctgaatgtgcatgacatggattggttgggagggacgtcagtgaggccaagatcag

SEQ ID NO: 61544 - DNA, 110 bp, synthetic construct
  source 1..110: mol_type = other DNA
caaatgtgtgtgtgtacatatgagttaataaaatgtacctacatttccttttctatcagcttaaagggcctagaaacgacagcaccccattagcaatgagcacccagatc

SEQ ID NO: 61545 - DNA, 110 bp, synthetic construct
  source 1..110: mol_type = other DNA
tcagcttaaagggcctagaaacgacagcaccccattagcaatgagcacccagatcttgctatctaacatcatcctctataaaagaaatcaagactccttgaagaaacggc

SEQ ID NO: 61546 - DNA, 110 bp, synthetic construct
  source 1..110: mol_type = other DNA
tgtatggataatgtaatttgatgtgatgttaccttttaggactgagtgtagctgtttatttggtattgttcatttgtattgagatctcatatggcttgtggctcttgtgg

SEQ ID NO: 61547 - DNA, 110 bp, synthetic construct
  source 1..110: mol_type = other DNA
gcaacctacacctcagctcacgacaacaccagatccttaattcattcagcagtgccaggggtcaaaccctcatcctcatagatattagtcaggttcattactgctgaacc

SEQ ID NO: 61548 - DNA, 110 bp, synthetic construct; identical to SEQ ID NO: 61547
  source 1..110: mol_type = other DNA

SEQ ID NO: 61549 - DNA, 110 bp, synthetic construct
  source 1..110: mol_type = other DNA
cacctgcggctgcagcggggcaaagcccgagaagctgtcttgatccaccacagacgccacgacctgaaacgcaggagagaacatacaagggcccggccagcactgttccc

SEQ ID NO: 61550 - DNA, 110 bp, synthetic construct
  source 1..110: mol_type = other DNA
gccacgacctgaaacgcaggagagaacatacaagggcccggccagcactgttccccatccttcggcgcttccccagatcccctccttgctcacaccctggatccgttctc

SEQ ID NO: 61551 - DNA, 110 bp, synthetic construct
  source 1..110: mol_type = other DNA
cgctctatttttgtccaaaccttggttatcacgtgctagcagtttccctcctctaacatattccctgggaaacccttgctattgatatgtgtatggttccttccaattta

SEQ ID NO: 61552 - DNA, 110 bp, synthetic construct
  source 1..110: mol_type = other DNA
acatattccctgggaaacccttgctattgatatgtgtatggttccttccaatttaagataagctttgccctggattggttgtgacccttcctctgtggctgatggaaggg

SEQ ID NO: 61553 - DNA, 110 bp, synthetic construct
  source 1..110: mol_type = other DNA
cttgccagtatttgttatctcttgtctttctgatgatgggcattctaacagacatgaggtaatacagcattgtggttttaatgtgcatttctctaatgactaatgatgtt

SEQ ID NO: 61554 - DNA, 110 bp, synthetic construct
  source 1..110: mol_type = other DNA
gaggtaatacagcattgtggttttaatgtgcatttctctaatgactaatgatgttgagcctcttttcatatacttgctgtcctttcatatatctaaaatgtctacttagg

SEQ ID NO: 61555 - DNA, 110 bp, synthetic construct
  source 1..110: mol_type = other DNA
cgcctgccattgtcaattcttccgggagggagaggtcagtgcctagaaggacaaccttgggttgtaagtggttcatttttagttcagctgcagtaactcctgctggtgat

SEQ ID NO: 61556 - DNA, 110 bp, synthetic construct
  source 1..110: mol_type = other DNA
cagctacaggcctataccacagccacggcaatgccagatatgagccacatctgagacctatggtgcagctttccacagtgccagatccttatcccactgagtgaggccag

SEQ ID NO: 61557 - DNA, 110 bp, synthetic construct
  source 1..110: mol_type = other DNA
cggcaatgccagatatgagccacatctgagacctatggtgcagctttccacagtgccagatccttatcccactgagtgaggccagggttcaaactcgtatcctcatggat

SEQ ID NO: 61558 - DNA, 110 bp, synthetic construct
  source 1..110: mol_type = other DNA
aagtgtaactgctgtctcgtggttggaatggaatagagttgctttctaagactattgactgtgttttttgtttgtgtgtttatctgcaaaggtatggaaacctggcaagc

SEQ ID NO: 61559 - DNA, 110 bp, synthetic construct
  source 1..110: mol_type = other DNA
accagggtggacagatagccacatgatgctccgacaggggacgtgatgtagggtcctaggaaactaagaaaagaccaccccaactggatccaagatgcctgaaagtcctc

SEQ ID NO: 61560 - DNA, 110 bp, synthetic construct
  source 1..110: mol_type = other DNA
ctaggaaactaagaaaagaccaccccaactggatccaagatgcctgaaagtcctcatttcccggaggcgtacaatgtaaacattccagaggactagtaacaccttccttt

SEQ ID NO: 61561 - DNA, 110 bp, synthetic construct
  source 1..110: mol_type = other DNA
cttacatgaacaggagccctcatctttggatcctgagtgtgtgttcaaatccatgtccctagtttgccaaggttggcacctctcactccccattcagagcagctgcagag

SEQ ID NO: 61562 - DNA, 110 bp, synthetic construct
  source 1..110: mol_type = other DNA
tccctagtttgccaaggttggcacctctcactccccattcagagcagctgcagagttagcttgcgtgcttctggttttcagttctcttttcgggtctggcctgcagggat

SEQ ID NO: 61563 - DNA, 110 bp, synthetic construct
  source 1..110: mol_type = other DNA
cttcaggtcacccaaggttagacactttgctctaaatcaggctctgaatgcagctctgaacacattccttccaacacactacagggctggaaaccaccacaaccattgca

SEQ ID NO: 61564 - DNA, 110 bp, synthetic construct
  source 1..110: mol_type = other DNA
ctgaacacattccttccaacacactacagggctggaaaccaccacaaccattgcaggaacccccagagaccatggaacactacatccagtacgagccttcagtggaataa

SEQ ID NO: 61565 - DNA, 110 bp, synthetic construct
  source 1..110: mol_type = other DNA
caaaggctactgggaggataaagtcaaggaacaggatgggatccagaacagaagttgagactttaggcaatttactttagggaagatgcaatctctcttctattaagata

SEQ ID NO: 61566 - DNA, 110 bp, synthetic construct
  source 1..110: mol_type = other DNA
gctcaaagtctgtagggagactggcagactggagcctcagagaagagctaatgctgcagttcaagtccaaaggcagcctgatggcacaatcccttgtccctggaggagat

SEQ ID NO: 61567 - DNA, 110 bp, synthetic construct
  source 1..110: mol_type = other DNA
tagtaagagtatttcaaaacagagccttttctttttagatactttttagattcagtagctaataggatgggtgaagagtgactataagaactttttacttagggaggaga

SEQ ID NO: 61568 - DNA, 110 bp, synthetic construct
  source 1..110: mol_type = other DNA
tagctaataggatgggtgaagagtgactataagaactttttacttagggaggagagtagaacttaagaggacaggttagacttatgctaaagagagtattgtgttgagta

SEQ ID NO: 61569 - DNA, 110 bp, synthetic construct; identical to SEQ ID NO: 61567
  source 1..110: mol_type = other DNA

SEQ ID NO: 61570 - DNA, 110 bp, synthetic construct; identical to SEQ ID NO: 61568
  source 1..110: mol_type = other DNA

SEQ ID NO: 61571 - DNA, 110 bp, synthetic construct
  source 1..110: mol_type = other DNA
aaatactcagccagaggtacctacaacactgggaggatggagatttttgcattcttaagatgctatgtcttcatcagtattatttaattctaattcttgcatccccctct

SEQ ID NO: 61572 - DNA, 110 bp, synthetic construct
  source 1..110: mol_type = other DNA
tggagcttcagggaaggcttttcctgagggaatgatccttgccctgagatcaggaggatgagtaggcgctgactcacccaagcgatgataaagatgctcttcatcgtggg

SEQ ID NO: 61573 - DNA, 110 bp, synthetic construct
  source 1..110: mol_type = other DNA
ggatgagtaggcgctgactcacccaagcgatgataaagatgctcttcatcgtgggggaacagcttgtgcaaaggccctgaggcaggcacggtcatggtcattttaggaac

SEQ ID NO: 61574 - DNA, 110 bp, synthetic construct
  source 1..110: mol_type = other DNA
ggctacaggagagtgtgtgctattttagggagggcttgctcaggaagccgcctctgcatggctcagctttcatctcatgcctttctatctgactgcatcaccttttcctt

SEQ ID NO: 61575 - DNA, 110 bp, synthetic construct
  source 1..110: mol_type = other DNA
ctggacgtgcaaacttgtgttcattttctttggatcgtgaacgtgtgctcatctgagccataaacaaagccagccgtgccccgatatcaactagaacaactcccagatat

SEQ ID NO: 61576 - DNA, 110 bp, synthetic construct
  source 1..110: mol_type = other DNA
agccataaacaaagccagccgtgccccgatatcaactagaacaactcccagatatcatcagctagaataactccattagcgggaatggcatcacagctttcctgcgtgtg

SEQ ID NO: 61577 - DNA, 110 bp, synthetic construct
  source 1..110: mol_type = other DNA
cttcactgttctcctgtcacaggggcctttattaagcacttattatgtaccaggctctgtgccaagttcttgagaggcattatctgatttaatattcacaacagccctag

SEQ ID NO: 61578 - DNA, 110 bp, synthetic construct
  source 1..110: mol_type = other DNA
tctgtgccaagttcttgagaggcattatctgatttaatattcacaacagccctagggaaaagatactactgccattttatagagaaacaaattaaaaaccagaaattata

SEQ ID NO: 61579 - DNA, 110 bp, synthetic construct
  source 1..110: mol_type = other DNA
ttttagaacgcttatgcataatttggcttcaggtcaaggtggcgtaatatgaaccagcagaatatacagcacagggtgtccttagcagctatcctaaagatcagcaaaac

SEQ ID NO: 61580 - DNA, 110 bp, synthetic construct
  source 1..110: mol_type = other DNA
agcagaatatacagcacagggtgtccttagcagctatcctaaagatcagcaaaactcattcctgtaagagaagctcatctgtgaagcaaggtcaagcccagtggtcatca

SEQ ID NO: 61581 - DNA, 110 bp, synthetic construct
  source 1..110: mol_type = other DNA
ataatattattatattcatgctgcatgcagagtttgatgggttttttttttctttttcttcttcttttttttttttccccctgtggagctgtattcgcttgtctacgcca

SEQ ID NO: 61582 - DNA, 110 bp, synthetic construct
  source 1..110: mol_type = other DNA
tgcagagtttgatgggttttttttttctttttcttcttcttttttttttttccccctgtggagctgtattcgcttgtctacgccacagccacagcaacacaggatctgag

SEQ ID NO: 61583 - DNA, 110 bp, synthetic construct
  source 1..110: mol_type = other DNA
ccttgcctgaccgcattgcctcttctcagccctagaagtgggtgactggcttgagctttttcctccttggcctaaagaaaagctgacccttccagaaacgttttcccatg

SEQ ID NO: 61584 - DNA, 110 bp, synthetic construct
  source 1..110: mol_type = other DNA
ctgtgccaggagttggggatacattttttttttttaagtgaataggagagtccatgcttttgtccttcctggtctagctcaggagacagacaggagcaggcagtgaggat

SEQ ID NO: 61585 - DNA, 110 bp, synthetic construct
  source 1..110: mol_type = other DNA
ggttcttgtcggaatcatttccgctgcgccacaacgggaactcccctatttccgggtatccttgtataaatgagaagactctatcagacgacacgtatcatggttaagtg

SEQ ID NO: 61586 - DNA, 110 bp, synthetic construct
  source 1..110: mol_type = other DNA
gtatccttgtataaatgagaagactctatcagacgacacgtatcatggttaagtgagcttttgatttcagtcttatccatagcactgaagactgagttgaaacactcttg

SEQ ID NO: 61587 - DNA, 110 bp, synthetic construct
  source 1..110: mol_type = other DNA
gtatccagaaacctgttcttgcctccagagcagagagtcgcggcgtgtctgctggtaaaggaggctttgttctaagaaggttggtgtctctcctggatccgggcagagga

SEQ ID NO: 61588 - DNA, 110 bp, synthetic construct
  source 1..110: mol_type = other DNA
tgggattgctggctcctctggtagctctatgtttagctttctgtggtatctccattctgttttccatagtggttgcaccaagttccattcccaccaagtgtaggagggtt

SEQ ID NO: 61589 - DNA, 110 bp, synthetic construct; identical to SEQ ID NO: 61588
  source 1..110: mol_type = other DNA

SEQ ID NO: 61590 - DNA, 110 bp, synthetic construct
  source 1..110: mol_type = other DNA
ccgtgcaggaagctctaaccaatcagctcatctgtgttcccattcggcataaaacgccctgtccacgtggctctccctccagactgctcagtccccccggggtctcactc

SEQ ID NO: 61591 - DNA, 110 bp, synthetic construct
  source 1..110: mol_type = other DNA
gccctgtccacgtggctctccctccagactgctcagtccccccggggtctcactcacggcccacaaccccttcccacggggtctcagaaaccagagtggaatctggaaaa

SEQ ID NO: 61592 - DNA, 110 bp, synthetic construct
  source 1..110: mol_type = other DNA
ccattataaaccctccttcacccagaagcccctcctagaatttctattttattgcagcttcataggacataaagccctcaagggcttgctgctcaccgctgtctcctcca

SEQ ID NO: 61593 - DNA, 110 bp, synthetic construct
  source 1..110: mol_type = other DNA
agaaagaaaaactggagctggagtaattagcctccctgacttgactactctacaaagctacagtcctcaagactgtatgttagtggcacagaaatcagaaatataagtca

SEQ ID NO: 61594 - DNA, 110 bp, synthetic construct; identical to SEQ ID NO: 61593
  source 1..110: mol_type = other DNA

SEQ ID NO: 61595 - DNA, 110 bp, synthetic construct
  source 1..110: mol_type = other DNA
agagagccaaaggggtaacagatgagcttctgtggtaaaaatataatcttctacgtcaaaaataatgtcttctttatccgcgaataacaggtaaagatacttaaacattt

SEQ ID NO: 61596 - DNA, 110 bp, synthetic construct
  source 1..110: mol_type = other DNA
agtacgcagacatcatttagagaacacaactttttcacagttactaaaaaaaaaataaaaaaggtaaaatgaaagttagaagttctactatccttacagtctagggaacc

SEQ ID NO: 61597 - DNA, 110 bp, synthetic construct; identical to SEQ ID NO: 61596
  source 1..110: mol_type = other DNA

SEQ ID NO: 61598 - DNA, 110 bp, synthetic construct
  source 1..110: mol_type = other DNA
taggacaaaaatacattctctctcaacatgatgactaaagaaaggggccctggctcagttccccgagctacctgggcacacctgtctcttttgctgcacttgtttctctg

SEQ ID NO: 61599 - DNA, 110 bp, synthetic construct
  source 1..110: mol_type = other DNA
gaccaagaaatggcaaaaagacaaaaaaaaaaaaaaaaaaagataggattgtacatttcatagactggaccctatatatttacttctgctgtcctgtataaagcttgcaa

SEQ ID NO: 61600 - DNA, 110 bp, synthetic construct
  source 1..110: mol_type = other DNA
tttcatagactggaccctatatatttacttctgctgtcctgtataaagcttgcaatatattccaaagccgcaagaagcctgaccaatggtacattttctatgtgctaatg

SEQ ID NO: 61601 - DNA, 110 bp, synthetic construct
  source 1..110: mol_type = other DNA
agggctagaaaaaaaaaatctatctatatatattcgttgttaggttttaaataaataacacctgccaaccaaagccagggaaatgaatggacaggaaatgaggcaaactt

SEQ ID NO: 61602 - DNA, 110 bp, synthetic construct
  source 1..110: mol_type = other DNA
taacacctgccaaccaaagccagggaaatgaatggacaggaaatgaggcaaactttaaagaggaagtggttttgagctgtcaactggtgtggattaaggagtaggaaacc

SEQ ID NO: 61603 - DNA, 110 bp, synthetic construct
  source 1..110: mol_type = other DNA
acccacaagtagagcaggcaatcagctgtcagggctctagcttcccttctctgagactacctcagcctggcactgctccaggcgttggccatgtctgtaagctagctccc

SEQ ID NO: 61604 - DNA, 110 bp, synthetic construct
  source 1..110: mol_type = other DNA
actacctcagcctggcactgctccaggcgttggccatgtctgtaagctagctcccctcctgcttatcaagagaaaaacagcagttccaggcatcacatttcagatgcaac

SEQ ID NO: 61605 - DNA, 110 bp, synthetic construct
  source 1..110: mol_type = other DNA
catacccgaatttgaaagagactagggtctttgaatttccacagtttagaactaaatacatagggtgcaaagaatgaaagaagcagaatatatggtcaatttggtgaaaa

SEQ ID NO: 61606 - DNA, 110 bp, synthetic construct
  source 1..110: mol_type = other DNA
ccaaagagcagaagcagttcttttggcatattttgtgtcattggcatctatttttcagatactgacttttgattcacagtagttaattttattaaatttcttgaaggata

SEQ ID NO: 61607 - DNA, 110 bp, synthetic construct
  source 1..110: mol_type = other DNA
gagacaaaacatttatactctgaaaactataagatgctgatgaaagaaagaaagcaaagatgacacaaagctataccacggtcttggattggaagaatcaaaattgtcaa

SEQ ID NO: 61608 - DNA, 110 bp, synthetic construct
  source 1..110: mol_type = other DNA
aaagatgacacaaagctataccacggtcttggattggaagaatcaaaattgtcaaaatgactatactacccaaggcaatccatcaatcatgatcaaattaccaatgacat

SEQ ID NO: 61609 - DNA, 110 bp, synthetic construct
  source 1..110: mol_type = other DNA
ctcatgattcctagctcagattcgttccgcttcaccacgatgggaactcctagaattcttaattatgtcaaaatcctttgtggaactgttataacatttcgcattttcac

SEQ ID NO: 61610 - DNA, 110 bp, synthetic construct
  source 1..110: mol_type = other DNA
aaacaaatttatctcggaacaaaatacatctttccatccccatgtatttattacgttcataatcaatgtaaacagaccattttcttcctgcctcgaaagatagaaaaggg

SEQ ID NO: 61611 - DNA, 110 bp, synthetic construct
  source 1..110: mol_type = other DNA
cagctgtgaacctagacggtgctgttagaacccaaatctcagctatcactatgactcagtatccctgcctttgcaactcttatcatagactaatggttatggctaactat

SEQ ID NO: 61612 - DNA, 110 bp, synthetic construct
  source 1..110: mol_type = other DNA
gaaaggaccagtgatctgtatgtggatcatagcattcaactgttcgaagacattcctcccggttatagccacctggccaaagaacacagagagttacgtctaaaacacta

SEQ ID NO: 61613 - DNA, 110 bp, synthetic construct
  source 1..110: mol_type = other DNA
ctcccggttatagccacctggccaaagaacacagagagttacgtctaaaacactaaaatggaccaggctttctggcccagaatgggttaagtaatgtgcacaggtgagaa

SEQ ID NO: 61614 - DNA, 110 bp, synthetic construct
  source 1..110: mol_type = other DNA
atccttaacccactgcgccatgagagaactcctaaaacacagatcatcaatttaaagagactctacatttccctagtcataaaatgtacttcaaaggacttactgggcag

SEQ ID NO: 61615 - DNA, 110 bp, synthetic construct
  source 1..110: mol_type = other DNA
agagactctacatttccctagtcataaaatgtacttcaaaggacttactgggcagtgtaggcataattcagtaagacttcaacagcttctggattgagatcatcaaactt

SEQ ID NO: 61616 - DNA, 110 bp, synthetic construct
  source 1..110: mol_type = other DNA
tagccattttggatcatgaggtgacagcccacggatgactagagcggtacgccgcaggaagagtctagcttctaatgggctttgagctgccatcctgctctggtctgcca

SEQ ID NO: 61617 - DNA, 110 bp, synthetic construct
  source 1..110: mol_type = other DNA
tgactcacttcagagcatacactttcggctttgttttgtctgtttttctcaaatcaaagctctccaaatcctctctcctgaccttgtcctttgggcacaaatgtcttttc

SEQ ID NO: 61618 - DNA, 110 bp, synthetic construct
  source 1..110: mol_type = other DNA
cctcatcttccaagtggattaaaacccctctgtttctgaggattatagaggcacaagataagacttggtttttgaatcaccacatgcaggagagctactgctcaactaga

SEQ ID NO: 61619 - DNA, 110 bp, synthetic construct
  source 1..110: mol_type = other DNA
tagaggcacaagataagacttggtttttgaatcaccacatgcaggagagctactgctcaactagaaacactttcattgattgatacagtaatgaaacataatattatatt

SEQ ID NO: 61620 - DNA, 110 bp, synthetic construct
  source 1..110: mol_type = other DNA
tgtcagagggtccagcaagaggactcagaaggaagcgaaatgaaattttaacaatgagttcaagctcttaacgaaatggaacgaatcagagggaaacagcggtgttctag

SEQ ID NO: 61621 - DNA, 110 bp, synthetic construct
  source 1..110: mol_type = other DNA
gagttcaagctcttaacgaaatggaacgaatcagagggaaacagcggtgttctagtgccatcttgcattctgtgggatttgacaataacataaaaagcaaaaagagataa

SEQ ID NO: 61622 - DNA, 110 bp, synthetic construct
  source 1..110: mol_type = other DNA
cagctgacgtggttcccagaacggccccagtttcctcaggggcatagtcactgagcttgctctgttggcagcaacgtttaaccctgggtctccaaagtgtggctagaaca

SEQ ID NO: 61623 - DNA, 110 bp, synthetic construct
  source 1..110: mol_type = other DNA
cttgctctgttggcagcaacgtttaaccctgggtctccaaagtgtggctagaacagcccctctctggaaactgaatgtaatggctattaggtgtcatcctttctcggcat

SEQ ID NO: 61624 - DNA, 110 bp, synthetic construct
  source 1..110: mol_type = other DNA
ctatttatattcaatcatcactcacctcaatgtttagataacttcttaagactctcatcccagtaagttgcagagctggaacttgaacctgtgacggctgtctccaaatt

SEQ ID NO: 61625 - DNA, 110 bp, synthetic construct
  source 1..110: mol_type = other DNA
catcccagtaagttgcagagctggaacttgaacctgtgacggctgtctccaaattcaggacttacctactctaatatgttataggtaccattttgcaaaaatcaaactcc

SEQ ID NO: 61626 - DNA, 110 bp, synthetic construct
  source 1..110: mol_type = other DNA
agtcagaagtaatgacttagataaacatccagccacatggacacagctaaactatcgatgcaaaatgaaaacaggaggaaacagaatttatgctgtggcaatttcccatt

SEQ ID NO: 61627 - DNA, 110 bp, synthetic construct
  source 1..110: mol_type = other DNA
gctcttcgtgtttgaactatggatttccttttgggcttagctctctcaggcagtctctaaactttccttttatcatgcttcctgactgatggatctaatagtaatatcaa

SEQ ID NO: 61628 - DNA, 110 bp, synthetic construct
  source 1..110: mol_type = other DNA
ctgttagttcaaagaattgtcgggacttctataggtacctctgtgtgttctttctgaaggatctcccattccctcaggaagtcgtctgttttcccttttgtttttcctcc

SEQ ID NO: 61629 - DNA, 110 bp, synthetic construct
  source 1..110: mol_type = other DNA
gaaggatctcccattccctcaggaagtcgtctgttttcccttttgtttttcctcctaccagatccctctttattgctagaaatttagtgggttggttttgacagttgtat

SEQ ID NO: 61630 - DNA, 110 bp, synthetic construct
  source 1..110: mol_type = other DNA
aggtcctgtttattctgtagttgtatgtgtaagtggttttgattatttttattgttagagttgaaacttcttagggcctgaacgaaacatccagtaaaactttagattgc

SEQ ID NO: 61631 - DNA, 110 bp, synthetic construct
  source 1..110: mol_type = other DNA
tagagttgaaacttcttagggcctgaacgaaacatccagtaaaactttagattgctgtgagagttttctactagagtagtaaattctctgagggataaacaatcctttat

SEQ ID NO: 61632 - DNA, 110 bp, synthetic construct
  source 1..110: mol_type = other DNA
tgtaatcaaatttacttttgtactatctcccatcctctctcctatcacattctcatggtccatgctttctctcaagctgttcattctttctagaatgctcttcttttctt

SEQ ID NO: 61633 - DNA, 110 bp, synthetic construct
  source 1..110: mol_type = other DNA
tggtccatgctttctctcaagctgttcattctttctagaatgctcttcttttcttactttatgtcttattcatcaccactcactaataatcagccttaaggggcaacact

SEQ ID NO: 61634 - DNA, 110 bp, synthetic construct
  source 1..110: mol_type = other DNA
agctagcttttatggctgtgttattgttagataattgcttgctaaggcagatcattttaaagcagttgggcagagtcagctttgcaggggcatttaactagagaatatgt

SEQ ID NO: 61635 - DNA, 110 bp, synthetic construct
  source 1..110: mol_type = other DNA
gagctagagtgtgggcacctgactctgacagactctgctgaggctcgaagtttgtcaatgatacacagaactgctctgaactgccacctgcagacagtttattccaggag

SEQ ID NO: 61636 - DNA, 110 bp, synthetic construct
  source 1..110: mol_type = other DNA
ccctaaggaaagtctcttatgggcagcacattgtaggctcttgcttttttaatccagtctgccactctgtggcttttgattaggcattcagtctactgacattgaaggta

SEQ ID NO: 61637 - DNA, 110 bp, synthetic construct
  source 1..110: mol_type = other DNA
agtctgccactctgtggcttttgattaggcattcagtctactgacattgaaggtaattgttgagagacatatatttttttgagttcccactgtggcacagcaagatcagt

SEQ ID NO: 61638 - DNA, 110 bp, synthetic construct
  source 1..110: mol_type = other DNA
aataccatatttcagatacagctgatgtttcattgtttcgctccccccatcataagcccctttctcccttcccaggggcaagcgctgccgtggacttcatgagcttcctt

SEQ ID NO: 61639 - DNA, 110 bp, synthetic construct
  source 1..110: mol_type = other DNA
gcccctttctcccttcccaggggcaagcgctgccgtggacttcatgagcttccttcacatacatccttaaatagtacagaatattgtttcctctattttaaattttgttt

SEQ ID NO: 61640 - DNA, 110 bp, synthetic construct
  source 1..110: mol_type = other DNA
ctgtgctctgtataaccttgaggaaaccatttaatctttctgactgtctgactcgcagaggacttttgaggtttagaggtattggatgtaaaatagctcccacgttgatt

SEQ ID NO: 61641 - DNA, 110 bp, synthetic construct
  source 1..110: mol_type = other DNA
cagaggacttttgaggtttagaggtattggatgtaaaatagctcccacgttgattctttcaggaggtaccaaaaagaaagattttccattctctagactggtttaaatga

SEQ ID NO: 61642 - DNA, 110 bp, synthetic construct
  source 1..110: mol_type = other DNA
catgaaatctaagttagatagtaaagttagtaaataaaagagaaggcagctagattgggagggctctgagaagcatttggacttggcattcaattaggtcaagaattggg

SEQ ID NO: 61643 - DNA, 110 bp, synthetic construct
  source 1..110: mol_type = other DNA
aaaaatattcacctctcaaagtgtgttatgttttcaggggtttactctcagtgtccaatcaattttgtcaaataaattgcatttgaggcctctatattttgtgatggatg

SEQ ID NO: 61644 - DNA, 110 bp, synthetic construct
  source 1..110: mol_type = other DNA
aaaaaaaaaaaaaaagaagaaacctgtgcttccctcctgcctgtagcccttctacagaccaagacatccccaaagggaattttaaaacctcacctatttgaaatgaccta

SEQ ID NO: 61645 - DNA, 110 bp, synthetic construct
  source 1..110: mol_type = other DNA
agaccaagacatccccaaagggaattttaaaacctcacctatttgaaatgacctatgggaggccatttttgacctcagatctcttgtttgatgtgggaacccacaaattg

SEQ ID NO: 61646 - DNA, 110 bp, synthetic construct
  source 1..110: mol_type = other DNA
ccacggtgcgaatctgaccctagtgacagatagaaggagggaaggaagtgacaggaagtctaaggagagctcggcaaggctgtcagacttcctcaagctgaagctggctg

SEQ ID NO: 61647 - DNA, 110 bp, synthetic construct
  source 1..110: mol_type = other DNA
aaattctacaaggacagaaatcacggcgtattactatttgtttgattttttaaaaaatcattttgcctccatgtctaacacccttccttacctcaataggacttgtacat

SEQ ID NO: 61648 - DNA, 110 bp, synthetic construct
  source 1..110: mol_type = other DNA
aatcattttgcctccatgtctaacacccttccttacctcaataggacttgtacatgggcaaacagcaaaagaaaagaagggctgcccatgggaaccaagcagctattgct

SEQ ID NO: 61649 - DNA, 110 bp, synthetic construct
  source 1..110: mol_type = other DNA
gaaacctggaattaattggctccatatttctgacttatccagggatgtttttgtgacacctgttggcatagttttcccttgccagttctggtcgtaggctatcacttgga

SEQ ID NO: 61650 - DNA, 110 bp, synthetic construct
  source 1..110: mol_type = other DNA
acacctgttggcatagttttcccttgccagttctggtcgtaggctatcacttggatttttttttcttttttggctgcgtcagtggcataaagaagttcctgcagctgtga

SEQ ID NO: 61651 - DNA, 110 bp, synthetic construct
  source 1..110: mol_type = other DNA
gctgtttcatttgttgtggataaagtgccagtggatgttgtcaccattggaacagactgagaagcatgctctgaagcatcagaggtggtactctcagtaaatacagtcac

SEQ ID NO: 61652 - DNA, 110 bp, synthetic construct
  source 1..110: mol_type = other DNA
actgagaagcatgctctgaagcatcagaggtggtactctcagtaaatacagtcacttgaaaaattaaggcacagaaaagcaatgaaaaccatgattttggggtttaccta

SEQ ID NO: 61653 - DNA, 110 bp, synthetic construct
  source 1..110: mol_type = other DNA
cagtgagtacagtttctgcttgggataatgagaattttttggaaatgatagaggggaggctgtacaatattacaaatatacttaataccactaaagtgcacaattaacaa

SEQ ID NO: 61654 - DNA, 110 bp, synthetic construct
  source 1..110: mol_type = other DNA
actcttttcttgacaaggaaatgtatgttactgttaaagtgagccctagttttctgctaggtctttggtagctttttaaatcgtatccattgctgaaagaaataattctt

SEQ ID NO: 61655 - DNA, 110 bp, synthetic construct
  source 1..110: mol_type = other DNA
gctaggtctttggtagctttttaaatcgtatccattgctgaaagaaataattctttacacaaaatctgtctttgttggtatttcatcaagtcatggtgatgagccaagcg

SEQ ID NO: 61656 - DNA, 110 bp, synthetic construct
  source 1..110: mol_type = other DNA
tgcattacggggatttattcatttggttatggtgtatgatccttataatgtatttagatttggtttgctaatattttgttcaagatttttgcatctatgttccacagtga

SEQ ID NO: 61657 - DNA, 110 bp, synthetic construct; identical to SEQ ID NO: 61656
  source 1..110: mol_type = other DNA

SEQ ID NO: 61658 - DNA, 110 bp, synthetic construct
  source 1..110: mol_type = other DNA
tgaaagaaatgccagagatcattcagtcagaaatttatattctttatgcatactaagcccattctcctgaggtggccttctccttcacctcatttattccaatgtcacct

SEQ ID NO: 61659 - DNA, 110 bp, synthetic construct
  source 1..110: mol_type = other DNA
gagaccaaggatgttgctaaatattatacattgcgcaggatagcccttttagctccaaagaccaataatgctgaggttgataatcttatactaagtaagagtgttttggg

SEQ ID NO: 61660 - DNA, 110 bp, synthetic construct
  source 1..110: mol_type = other DNA
acacaatgccagatccttaacccactgtaccatggcaggaactctatggttgtctattatcttcatagtcttttagttatcatcagctatcatgctgattttaccaaaaa

SEQ ID NO: 61661 - DNA, 110 bp, synthetic construct
  source 1..110: mol_type = other DNA
catttccttctctcctgtgaagatgacagagatacaatcagtgtaaaactctacaagataaaaaaaaaatagttttacccctccgctcaatttgctttcctctcctgttt

SEQ ID NO: 61662 - DNA, 110 bp, synthetic construct
  source 1..110: mol_type = other DNA
agataaaaaaaaaatagttttacccctccgctcaatttgctttcctctcctgtttccacttgacccttgattatttgaagacgttgagaaactgtttctcacctgtaagt

SEQ ID NO: 61663 - DNA, 110 bp, synthetic construct
  source 1..110: mol_type = other DNA
tctcacaagggttgtttcttcataaaagcaacaatttttttctttatgaaaatatgacctcttgttcactcctctgtgctctgtgcccagaataatgattaatatacact

SEQ ID NO: 61664 - DNA, 110 bp, synthetic construct
  source 1..110: mol_type = other DNA
ctccttctctcagactccactctagtcgcactggcctccttcttgttccctaaacacaccagacatgcccattttgttgtctatttggcaaactccctcacttcttttaa

SEQ ID NO: 61665 - DNA, 110 bp, synthetic construct
  source 1..110: mol_type = other DNA
tcatttccagggagtggagagggaccagaggttgactcagtcactaatggccaatgagttaatcaatcaagcccgtgtactgaagcctccataaaccccaaaaggaggat

SEQ ID NO: 61666 - DNA, 110 bp, synthetic construct
  source 1..110: mol_type = other DNA
tctaaattcaactaaaggctgtgatagtgactggccaaccatgcaagttactgatctaatttgactttaaaaaaagtatagttctctcttatacaaagtagcagcaatat

SEQ ID NO: 61667 - DNA, 110 bp, synthetic construct
  source 1..110: mol_type = other DNA
agtctataatgttactactgattctattcatataaaggttacgagaaaagaaaggtaaaaatgttctttggtgatagaaggcggagggagtggtcacccttctggaggga

SEQ ID NO: 61668 - DNA, 110 bp, synthetic construct
  source 1..110: mol_type = other DNA
taaaaatgttctttggtgatagaaggcggagggagtggtcacccttctggagggaagtgaggaatgtttctggagcactggcaatgttcataccgcgatctgggtggtgg

SEQ ID NO: 61669 - DNA, 110 bp, synthetic construct
  source 1..110: mol_type = other DNA
tacttgtcacaaatagaaaaatgtgaattctcacccaggctttctttaacttttccttctgattttgaggccaggggacagctcttaaattatgataacacatcttcatt

SEQ ID NO: 61670 - DNA, 110 bp, synthetic construct
  source 1..110: mol_type = other DNA
ggttaagtaaccttttgaggccacctcctgagaacccactcactttcaggtttgtcgcttagccaaactccaaagaacactcgctttgaagcttcagttccatgcatgtt

SEQ ID NO: 61671 - DNA, 110 bp, synthetic construct
  source 1..110: mol_type = other DNA
cgcttagccaaactccaaagaacactcgctttgaagcttcagttccatgcatgttccagattaaaagttaaatttgtcttggtgactcatccctatgtaataatctttct

SEQ ID NO: 61672 - DNA, 110 bp, synthetic construct
  source 1..110: mol_type = other DNA
tcttgagaatctgatgaaaagaatggactcttgcccccaaacacgtgaacatacaacacaaaactttacattcaagcagtacatttgaatccgtatagccacttattaaa

SEQ ID NO: 61673 - DNA, 110 bp, synthetic construct
  source 1..110: mol_type = other DNA
acacaaaactttacattcaagcagtacatttgaatccgtatagccacttattaaacacgtctttattgcatacctactgtgtatgtgttaggtagtgtcttagaccttgg

SEQ ID NO: 61674 - DNA, 110 bp, synthetic construct
  source 1..110: mol_type = other DNA
agttgccagccacagccacagccacagccaccgcaatgtgggatccaagctgtatctgggacctacaccacagttcgcaccaccactggatctgtaacccattaagtgag

SEQ ID NO: 61675 - DNA, 110 bp, synthetic construct
  source 1..110: mol_type = other DNA
ctgggacctacaccacagttcgcaccaccactggatctgtaacccattaagtgaggcccgggatcgaacccacgtcctcatgcacactagtcagtttccttacctctgag

SEQ ID NO: 61676 - DNA, 110 bp, synthetic construct
  source 1..110: mol_type = other DNA
tttaggtactctttattaagtgcatatatgtttcctgatattatttctttgtattgtattgaacgtattggggagctgcaccagagttagagcaggctgtgctgtgttag

SEQ ID NO: 61677 - DNA, 110 bp, synthetic construct
  source 1..110: mol_type = other DNA
gtattgaacgtattggggagctgcaccagagttagagcaggctgtgctgtgttaggatggtcacaggaaactggcgaggctccaggcagtttcagtctacttcaccgtgt

SEQ ID NO: 61678 - DNA, 110 bp, synthetic construct
  source 1..110: mol_type = other DNA
tctggtgttatctggagatctttagctcatttctagccgtacaccatacagatgaaaggtcttaattattgccctgacatctttcatttagcgtgtaaatcctactgctt

SEQ ID NO: 61679 - DNA, 110 bp, synthetic construct; identical to SEQ ID NO: 61678
  source 1..110: mol_type = other DNA

SEQ ID NO: 61680 - DNA, 110 bp, synthetic construct
  source 1..110: mol_type = other DNA
agttgggttgctttttttgttgttgttgagttatatgtgttgtttgtatattttagagattaagtgcttgtctgtgggattgctggcaactattttctaccattccatag

SEQ ID NO: 61681 - DNA, 110 bp, synthetic construct
  source 1..110: mol_type = other DNA
tgtgttgtttgtatattttagagattaagtgcttgtctgtgggattgctggcaactattttctaccattccataggttgtcttgttttttatggtttcctttgctatgca

SEQ ID NO: 61682 - DNA, 110 bp, synthetic construct
  source 1..110: mol_type = other DNA
tctgccaaccacattggctttgccagcggctccttattaaactctgtcaaggagggggcgctagagggagaccgcaacactcattcttcttcctgggagcagtagctctg

SEQ ID NO: 61683 - DNA, 110 bp, synthetic construct
  source 1..110: mol_type = other DNA
gggcgctagagggagaccgcaacactcattcttcttcctgggagcagtagctctgaacatcacttcagaattgtttcttcactccatagcaacagttcctttctttccta

SEQ ID NO: 61684 - DNA, 110 bp, synthetic construct
  source 1..110: mol_type = other DNA
tccttctccaggcatcatcactttagtcattttacatattgtttccagcatggcatggtattcaaatgggagctctggggtaaaggactgtggagttgagcctaggggtg

SEQ ID NO: 61685 - DNA, 110 bp, synthetic construct
  source 1..110: mol_type = other DNA
gcttccctctcaaattatgaaaccggagagactttattgtacatatactcactcacgcagcacaaacacagaatattcaatttagcatttaactgccagagatggtactg

SEQ ID NO: 61686 - DNA, 110 bp, synthetic construct
  source 1..110: mol_type = other DNA
cgcagcacaaacacagaatattcaatttagcatttaactgccagagatggtactggtgttctgagtatcttcagtgtgtaaactggttgcagggaggagaagcaacacta

SEQ ID NO: 61687 - DNA, 110 bp, synthetic construct
  source 1..110: mol_type = other DNA
gtcactccctgctctggctccactctccactctgtcaggcacatggactttctcgtgggacatttattgctatcgatgacggtcttgttttatgtgcactgcctgactgc

SEQ ID NO: 61688 - DNA, 110 bp, synthetic construct
  source 1..110: mol_type = other DNA
ggtatacaattgaggttaagttgttatcagcatgaagcagactgttataactataaggtgttttatacgagtaccaaggaaagtacaaaggaaatacctatagaagacat

SEQ ID NO: 61689 - DNA, 110 bp, synthetic construct
  source 1..110: mol_type = other DNA
acaaaaaaaaaaaatgcttaataacctgatagataccactgattttttttctcagtgtcacccccacatgatgttacttttctgactttatactctgctcaatggactgc

SEQ ID NO: 61690 - DNA, 110 bp, synthetic construct
  source 1..110: mol_type = other DNA
tgtcacccccacatgatgttacttttctgactttatactctgctcaatggactgcatgcataagatctccgtagatacatcctatagagctcttgccactctgattactt

SEQ ID NO: 61691 - DNA, 110 bp, synthetic construct
  source 1..110: mol_type = other DNA
tgattacaagattaaccataacatgagaccaaagcaaacatcgtttaaatgactagaatccaaatgtaatggaatttgtacttaatgctgatcaattttgcattgccaga

SEQ ID NO: 61692 - DNA, 110 bp, synthetic construct
  source 1..110: mol_type = other DNA
ttgaatcaaggtcagtgtgatgttacacggtcctgagcatgccccctggcatgtgctggatacatagctgtactgcctctctcttctcagacccaccatatgcaattccc

SEQ ID NO: 61693 - DNA, 110 bp, synthetic construct
  source 1..110: mol_type = other DNA
cccaaccatgaccagttccatgttttgctgtcaacaaggctactggtaagatattgaccacgttgcaaccaagcataaaaaacagacctcctcagactgcaaagcaacct

SEQ ID NO: 61694 - DNA, 110 bp, synthetic construct
  source 1..110: mol_type = other DNA
gaatggtggtcaacagggatctgctgaatgtcacagggaatgctactcaaaattctgtaataacctagatgggaaaagactctggatgaaaaatagatatgtgtatatgt

SEQ ID NO: 61695 - DNA, 110 bp, synthetic construct
  source 1..110: mol_type = other DNA
gaggaaaatgaggtcctgactgtcgcagagctagtaggaatcacagctaagatctgatctgactccggagtgccacgcactcttaaacacagaatacagctccatggtct

SEQ ID NO: 61696 - DNA, 110 bp, synthetic construct
  source 1..110: mol_type = other DNA
ttcagcagctctgctttggtaatagatgaatcaatgaggtgctcatcatcccaggaacagagcctccaccaagcttccttctcaagtctgatacttttatagcattttag

SEQ ID NO: 61697 - DNA, 110 bp, synthetic construct
  source 1..110: mol_type = other DNA
aacagagcctccaccaagcttccttctcaagtctgatacttttatagcattttagatattcattggattgcttgtgcatcctcagcactgggtgcatcctgtgaggaata

SEQ ID NO: 61698 - DNA, 110 bp, synthetic construct
  source 1..110: mol_type = other DNA
ttaaggctgccatccaagagcccccaaatcatccatcttgtgagccaatggagcttgcacaagtcccacagcacaaaagcaacaaagagcagtttttaaatgggcgtggg

SEQ ID NO: 61699 - DNA, 110 bp, synthetic construct
  source 1..110: mol_type = other DNA
tgcacaagtcccacagcacaaaagcaacaaagagcagtttttaaatgggcgtgggagcccttccgtggctaaccccccagctcagcacagagcaagcacaagaacaccca

SEQ ID NO: 61700 - DNA, 110 bp, synthetic construct
  source 1..110: mol_type = other DNA
ccttggaaaaggtaccatttgtcaccacacatttcttttctgtcatgtgtgaagcacagggacaatgagcatataactctcttgttttgaaaatcattctcagggtagat

SEQ ID NO: 61701 - DNA, 110 bp, synthetic construct
  source 1..110: mol_type = other DNA
ggattttcctagtgatctcccatggtctttaaggtcaggacagaatgaaggaatgttcgccccacaaagaactcaagatccggttttcttgcaatggttcaaacttgccg

SEQ ID NO: 61702 - DNA, 110 bp, synthetic construct
  source 1..110: mol_type = other DNA
gggcaaggtacgggtatttatcatgaagacaatgacccttcagttcagttatttgattgtctaaattgtaatgatgtagctatatgtcaatgtttttttcttgctaggga

SEQ ID NO: 61703 - DNA, 110 bp, synthetic construct
  source 1..110: mol_type = other DNA
cccttcagttcagttatttgattgtctaaattgtaatgatgtagctatatgtcaatgtttttttcttgctagggatattctaagtagcctatgaaattttctttgctgtt

SEQ ID NO: 61704 - DNA, 110 bp, synthetic construct
  source 1..110: mol_type = other DNA
tagtcccacgatctggttcaagtttaacattgcgttgtgacatttttttaatttcaccaaaggctgggtttaaaactatcagtcaagtaccaaaaccactacaattattt

SEQ ID NO: 61705 - DNA, 110 bp, synthetic construct
  source 1..110: mol_type = other DNA
accaaaggctgggtttaaaactatcagtcaagtaccaaaaccactacaattattttagcacacataaaatttatatttgggaaacattagcaaggatataaagccttaga

SEQ ID NO: 61706 - DNA, 110 bp, synthetic construct
  source 1..110: mol_type = other DNA
gtttaagatttagtatgtcagaaagcacctccatcgccttgttgcagcagaggacatctcaaaattgagcttcctgagcaatttgcctttcccttgctggccacaagaag

SEQ ID NO: 61707 - DNA, 110 bp, synthetic construct
  source 1..110: mol_type = other DNA
atctcaaaattgagcttcctgagcaatttgcctttcccttgctggccacaagaagtatcttccgatcctccgtggtcttcccaaaccagccctctaattgcccttgtcta

SEQ ID NO: 61708 - DNA, 110 bp, synthetic construct
  source 1..110: mol_type = other DNA
gtcacttcctatcgaggtcaacacactaggggcttgaatcaacctgaactcccatcttccctcaccacctacgtgtgtaaacaccaaacccccttccttaccctaagaga

SEQ ID NO: 61709 - DNA, 110 bp, synthetic construct
  source 1..110: mol_type = other DNA
cttccctcaccacctacgtgtgtaaacaccaaacccccttccttaccctaagagagctattttctcctaaaccaagctgattctagattctcctatcctttagggtcagt

SEQ ID NO: 61710 - DNA, 110 bp, synthetic construct
  source 1..110: mol_type = other DNA
tgcagatgaccccatagcatcctctgcctcctcttttcaggatgtccgaaagcaaactctccctgaagctggctcctctttaagtcactgtttagcatgggacctcccca

SEQ ID NO: 61711 - DNA, 110 bp, synthetic construct
  source 1..110: mol_type = other DNA
ggtgtggaaacttggctgagggcggtctcctgcagcagcagcctgtcacagagagcccctctcttcaccagctttgtccctttagggcgcacatcccagaggagggtgaa

SEQ ID NO: 61712 - DNA, 110 bp, synthetic construct
  source 1..110: mol_type = other DNA
cccctctcttcaccagctttgtccctttagggcgcacatcccagaggagggtgaagcaggttaaaggtgtgtttaccgtcagccagtttcttttgttttgacaagtgagt

SEQ ID NO: 61713 - DNA, 110 bp, synthetic construct
  source 1..110: mol_type = other DNA
gatgagtctgcttttgaagggtttgcattgactgcctaaggagctttcactagattctgtatgacattgtttctaaaatgtaccataaaaatattgaaaataattgccac

SEQ ID NO: 61714 - DNA, 110 bp, synthetic construct
  source 1..110: mol_type = other DNA
tctgtatgacattgtttctaaaatgtaccataaaaatattgaaaataattgccacttttcaaggtaccacctgttgtgctgagttacctttcctatctcaagtcattgaa

SEQ ID NO: 61715 - DNA, 110 bp, synthetic construct
  source 1..110: mol_type = other DNA
attagcgatgttgaacatcttttcaggtgttctttggcccatctgcattgtgtgcaccgcgtgtcttaagtgatgatgatcttttgcagtcctcactagaaccctaggaa

SEQ ID NO: 61716 - DNA, 110 bp, synthetic construct
  source 1..110: mol_type = other DNA
agtcttcagacatttttaagctgtgaatacaaggaaacatgcattaagtgaccaagagagcatgggataagtgggtgtctacagctggaatcattaaagcctaaagccca

SEQ ID NO: 61717 - DNA, 110 bp, synthetic construct
  source 1..110: mol_type = other DNA
atccctccttctccatccccggatcagacacacagagctggagcgcccagccatgtgggaactttgtgaatccacagcctgaacctgaaaatggccagttcgctcctctc

SEQ ID NO: 61718 - DNA, 110 bp, synthetic construct
  source 1..110: mol_type = other DNA
ctatatgttgggtgccagggaggcgaatgtttaaaatcacaattccacagataagccaaactcctagccagccaacaaatatgtgaatgttatctcccaccagtacttgg

SEQ ID NO: 61719 - DNA, 110 bp, synthetic construct
  source 1..110: mol_type = other DNA
ccaaactcctagccagccaacaaatatgtgaatgttatctcccaccagtacttggaaaatgggtttcgcttgccagctttgacctaaacatgtcttgtgtaatgagacaa

SEQ ID NO: 61720 - DNA, 110 bp, synthetic construct
  source 1..110: mol_type = other DNA
atcagagaagtgacaaaatgcggaaaggagaaaacaggcaagcaagagaaaatcacagcttagccattaaaccaaagccaaggctcttcggttcctcctcaagggctata

SEQ ID NO: 61721 - DNA, 110 bp, synthetic construct
  source 1..110: mol_type = other DNA
agatctccaaatgcatggcgcttagcttctggtgagacagagagacaataaatatgataactaaatatagtacagagaaggctgggaaatgatcgttgccaaggaaaagt

SEQ ID NO: 61722 - DNA, 110 bp, synthetic construct
  source 1..110: mol_type = other DNA
aacaacgcatttagtttctcatgtaaaaaaaaaaattagatgtttaggctggacaggtccaccttggctggatatcggagcaacgctggggctcgttataggaacacatt

SEQ ID NO: 61723 - DNA, 110 bp, synthetic construct; identical to SEQ ID NO: 61722
  source 1..110: mol_type = other DNA

SEQ ID NO: 61724 - DNA, 110 bp, synthetic construct
  source 1..110: mol_type = other DNA
ctccttcatgggcaaagtcgtgaaggggtccgtaatcccgcacctacccacttacccatcctggcattcggattttacagctgcgctgtctagctctcctcacctgtcaa

SEQ ID NO: 61725 - DNA, 110 bp, synthetic construct
  source 1..110: mol_type = other DNA
ccatcctggcattcggattttacagctgcgctgtctagctctcctcacctgtcaacagagtcacccaatccaagtgcatacaaatgactgcttccagatgcaaaccctcc

SEQ ID NO: 61726 - DNA, 110 bp, synthetic construct
  source 1..110: mol_type = other DNA
cctcagaccacaccgatgcgacagagagcaaacacgctgtgctcgggtgtctgtgacccgatgggcgaccgcggagcgcggcaaccggctccacattcctattaggcagt

SEQ ID NO: 61727 - DNA, 110 bp, synthetic construct
  source 1..110: mol_type = other DNA
acccgatgggcgaccgcggagcgcggcaaccggctccacattcctattaggcagttagctgattgctcgcagcccgagagcggtgcacggggaccgcgctgcctgcccgc

SEQ ID NO: 61728 - DNA, 110 bp, synthetic construct
  source 1..110: mol_type = other DNA
tttcccctagtcaggtatttttttttttaaactcaggatcacgtatttcacctaggacagagcacacattcaagccaaagaccgtgagtctccagaggccatgccccttt

SEQ ID NO: 61729 - DNA, 110 bp, synthetic construct
  source 1..110: mol_type = other DNA
gacagagcacacattcaagccaaagaccgtgagtctccagaggccatgccccttttgctaaccatgtcaccgggcaactcatgttggtcttgtagactaaggacttagag

SEQ ID NO: 61730 - DNA, 110 bp, synthetic construct
  source 1..110: mol_type = other DNA
aggaacagacaacgaggtaggaggtgcagccccacatcagctgaattcattatcatccctggataaagggcccgaacgtcactcccctgctcaatggtaggtcaggaaat

SEQ ID NO: 61731 - DNA, 110 bp, synthetic construct
  source 1..110: mol_type = other DNA
agcctgagcgttgtgggacactccgtgaagggtggggggagagcagacggccccagaaatcctcaacactcccctcttccgcgacatgttcagccagagtcagaccagct

SEQ ID NO: 61732 - DNA, 110 bp, synthetic construct
  source 1..110: mol_type = other DNA
gaaatcctcaacactcccctcttccgcgacatgttcagccagagtcagaccagcttctttcaaggtaactttctgatcacacctctctcctcccgtacttctctctctct

SEQ ID NO: 61733 - DNA, 110 bp, synthetic construct
  source 1..110: mol_type = other DNA
accttcgcgagctttttccacctcccagcactgcttgctcccccccactccccacccacctctgtccccacacacagaggcccgtgtcccttttctcccaactaaaggga

SEQ ID NO: 61734 - DNA, 110 bp, synthetic construct
  source 1..110: mol_type = other DNA
ccacctctgtccccacacacagaggcccgtgtcccttttctcccaactaaagggaacccaagagaaagaaatacgtttattttgcctgggggggctcaagtggtgtattt

SEQ ID NO: 61735 - DNA, 110 bp, synthetic construct
  source 1..110: mol_type = other DNA
tacagcatcccccataaaatgcctacagcttgcagatgttgataacagctgcggtaaaaatacactaggatggagtattttgtatacttacgacttttgctgataaaaaa

SEQ ID NO: 61736 - DNA, 110 bp, synthetic construct
  source 1..110: mol_type = other DNA
ctccagttttccttgtaggaatagccacatcgtgagcactcacatgaaataagttaatagcggcagaagacttagaagagggtccaggagataatatacagtcaataaac

SEQ ID NO: 61737 - DNA, 110 bp, synthetic construct
  source 1..110: mol_type = other DNA
aatagcggcagaagacttagaagagggtccaggagataatatacagtcaataaacatgagctctttcatcattgccgcaaaccacggaccgaagtgaaaagtgcaatcaa

SEQ ID NO: 61738 - DNA, 110 bp, synthetic construct
  source 1..110: mol_type = other DNA
cttttccgactgccattcacctctgcgtcaattgtacttcctcccatctagcccaggtatcaacagctgcattcccacctcgtgcctgagccaagaggagggctgtgctc

SEQ ID NO: 61739 - DNA, 110 bp, synthetic construct
  source 1..110: mol_type = other DNA
aatacaggcatcatcccccaaggcgggtaaggcagagcccagccagacagctgtgagaagggggccgaagatgggtggaaagagttggttgtgactctacagccatgcag

SEQ ID NO: 61740 - DNA, 110 bp, synthetic construct
  source 1..110: mol_type = other DNA
agaagggggccgaagatgggtggaaagagttggttgtgactctacagccatgcaggggagcaaagcaagaggagggggatgggctgaacaggcagcaagcagaccaagaa

SEQ ID NO: 61741 - DNA, 110 bp, synthetic construct
  source 1..110: mol_type = other DNA
ggcagccagaagctctacttcagggcacctaaacagttagaccagcccagctaacctacctggcaatggtgccatgatgccaaggccttaacacaaacgcaggcttctgg

SEQ ID NO: 61742 - DNA, 110 bp, synthetic construct
  source 1..110: mol_type = other DNA
gacatgggaagggccgttaattaaatgcagcacttagcgcaacaattgtttgcgtggagaggctacagcaatggagacagctggaatggatagtctctaaattgtaggct

SEQ ID NO: 61743 - DNA, 110 bp, synthetic construct
  source 1..110: mol_type = other DNA
gtcctggtgccccacaaggagatgacggggtttagaacctctactgaaaaggtcaggggtcaggcagtgtgctgaggtgggggaatctttttttattattattattactc

SEQ ID NO: 61744 - DNA, 110 bp, synthetic construct
  source 1..110: mol_type = other DNA
aacctctactgaaaaggtcaggggtcaggcagtgtgctgaggtgggggaatctttttttattattattattactcaaatgaattgatcacatctatagttgtataatgat

SEQ ID NO: 61745 - DNA, 110 bp, synthetic construct
  source 1..110: mol_type = other DNA
gcgttacctcggaggctttttaaaagcacagattcctgggtctcatcccgtatctcctgaaatcagaatctctgaggttggaatcgagggaaggcgatgacaaaatgagc

SEQ ID NO: 61746 - DNA, 110 bp, synthetic construct
  source 1..110: mol_type = other DNA
cctgaaatcagaatctctgaggttggaatcgagggaaggcgatgacaaaatgagctccccaagtgatgtttcatctccttacattttgaaaaccacctttcaagcctctc

SEQ ID NO: 61747 - DNA, 110 bp, synthetic construct
  source 1..110: mol_type = other DNA
atgacaacagaggatttaggatattacataaatttagttgataaagaagctgcagggtttgagacgattgactccactgttgcaagcagttctatagtaacatgctctca

SEQ ID NO: 61748 - DNA, 110 bp, synthetic construct
  source 1..110: mol_type = other DNA
ggtttgagacgattgactccactgttgcaagcagttctatagtaacatgctctcaaacagcactgcatgctacagagaaatcactgatgaaaggaagagtccatcgatgt

SEQ ID NO: 61749 - DNA, 110 bp, synthetic construct
  source 1..110: mol_type = other DNA
cccagagggcttccccagcagctggcactcgttcctgaggcccccaagtttagcagccaaactgctacattcttcgtcctgcctgagctggcatttgggtttctggcatg

SEQ ID NO: 61750 - DNA, 110 bp, synthetic construct
  source 1..110: mol_type = other DNA
acgccttgccttccaatgtaagccttgcttacatggctttccaaccccgtcctgaccaaatgccagcccattgcagtggggagtggagggagctcataagctgaaaggat

SEQ ID NO: 61751 - DNA, 110 bp, synthetic construct
  source 1..110: mol_type = other DNA
ccaaatgccagcccattgcagtggggagtggagggagctcataagctgaaaggattcttcagagcatttgacccacgaggcactttgctcactttgggtgtggaactaga

SEQ ID NO: 61752 - DNA, 110 bp, synthetic construct
  source 1..110: mol_type = other DNA
attttccacctgtttctgaaaaccctgcatctggccccgtgccatacaagggatcaggaggctacagtctgctcctgctgctgctttgtgcttgcctcgtaatttccttc

SEQ ID NO: 61753 - DNA, 110 bp, synthetic construct
  source 1..110: mol_type = other DNA
aggaggctacagtctgctcctgctgctgctttgtgcttgcctcgtaatttccttctatcttgaaacgcactgcttcacctggagagtttcacaggccaggcacactgtct

SEQ ID NO: 61754 - DNA, 110 bp, synthetic construct
  source 1..110: mol_type = other DNA
ggaaaagaaaaagggaggtgggtcctggcagagagcacccccatgctctcctgcccacttccccgagcctcttaggcctgctggtgccactggagcaggggccactgtct

SEQ ID NO: 61755 - DNA, 110 bp, synthetic construct
  source 1..110: mol_type = other DNA
atgtaaggacctttgtgattagtctgggcccatccggataacacaggctgggtccgggcatctcaaagtccttaatcacatctgcaaatccccttctgccatgtaaagta

SEQ ID NO: 61756 - DNA, 110 bp, synthetic construct
  source 1..110: mol_type = other DNA
gggcatctcaaagtccttaatcacatctgcaaatccccttctgccatgtaaagtaacatatccccagcttctaggaactcagacatggtcatcttagccgggggcaggaa

SEQ ID NO: 61757 - DNA, 110 bp, synthetic construct
  source 1..110: mol_type = other DNA
aacagtaaatacataaaggaaatatttattatgtgtgtatatatactgtacctgcctttcaaagatcaagagaagattatctttgcctaaaggactttaaaccatcgtgg

SEQ ID NO: 61758 - DNA, 110 bp, synthetic construct; identical to SEQ ID NO: 61757
  source 1..110: mol_type = other DNA

SEQ ID NO: 61759 - DNA, 110 bp, synthetic construct
  source 1..110: mol_type = other DNA
cctcctcatcgcctctagggggccccagtgagaggagacatttggggtgatgaagcttagaagccggggctgtttcccagagcccaggaagaaacttcctcaggtaccca

SEQ ID NO: 61760 - DNA, 110 bp, synthetic construct
  source 1..110: mol_type = other DNA
agaaggtatccccagtttatagaagaggaatttaaatccagaaaggtgatatgaattgccaatgtctcaacactaagaaaaggccaaagtcaggggctatgaccacaagc

SEQ ID NO: 61761 - DNA, 110 bp, synthetic construct
  source 1..110: mol_type = other DNA
ttgccaatgtctcaacactaagaaaaggccaaagtcaggggctatgaccacaagcccaaggtgtttgctagtgtttattagtccagtgaggagacaaaatctacaaagta

SEQ ID NO: 61762 - DNA, 110 bp, synthetic construct
  source 1..110: mol_type = other DNA
gattcactcaaagcacaaatgcaaaggctcccatcttccagaagcaatgccaaaggtctcttcaactctgctcctgccctgccagcacactctccaagtcacttcctcca

SEQ ID NO: 61763 - DNA, 110 bp, synthetic construct
  source 1..110: mol_type = other DNA
attgagtagagttctctgtgctatacatggaatgactagtcaacagggttagcacatttctgcatccccacctctgagtatttaaaattcattaatggagttcccactgc

SEQ ID NO: 61764 - DNA, 110 bp, synthetic construct
  source 1..110: mol_type = other DNA
attttcagtgagacataagtgtctttttacaagtataaatgagtgagacttattggagaagcctaccaaagtgttcaaaagacattcagcaggcgttcccattgtggctt

SEQ ID NO: 61765 - DNA, 110 bp, synthetic construct
  source 1..110: mol_type = other DNA
gagaagcctaccaaagtgttcaaaagacattcagcaggcgttcccattgtggcttggagagttaaaaacccaacatagggtccgtgagaatgcaggtttgatccctggcc

SEQ ID NO: 61766 - DNA, 110 bp, synthetic construct
  source 1..110: mol_type = other DNA
aagatgaggcatccagcaaagctgcttggaaccacccagcaaggaagcttttcaagatggccaagggggggaagacactcccagagctcatcagctggggatccctgagc

SEQ ID NO: 61767 - DNA, 110 bp, synthetic construct
  source 1..110: mol_type = other DNA
ctttcatcaaatagcaaatagtatatattccttagttatataaaaggtattaaatgttcacagctcaagaccccaaattactgatcagccatctgttttgactgtgccac

SEQ ID NO: 61768 - DNA, 110 bp, synthetic construct; identical to SEQ ID NO: 61767
  source 1..110: mol_type = other DNA

SEQ ID NO: 61769 - DNA, 110 bp, synthetic construct
  source 1..110: mol_type = other DNA
ttcccattctcttccagccacactgacctcactgtttcttatacagcaaatgcgctgttgcctctcaggctatgtacttgttctctcttgccaagacactcttcctccca

SEQ ID NO: 61770 - DNA, 110 bp, synthetic construct
  source 1..110: mol_type = other DNA
actggttttaagtaagccaccagggtgaaaagttctctataccacctactcctgcccctcctgcccccttcagaaggaaagatgtccgagagttactgagcatctatgta

SEQ ID NO: 61771 - DNA, 110 bp, synthetic construct
  source 1..110: mol_type = other DNA
ccctcctgcccccttcagaaggaaagatgtccgagagttactgagcatctatgtatgttctagacacacagtcatctcaggtttatagtcatttcagtgttaccagagaa

SEQ ID NO: 61772 - DNA, 110 bp, synthetic construct
  source 1..110: mol_type = other DNA
ctctggaagacttagatttaaatcctagctgaaacttttactggtttgtgtagctaggcaaattgctcactttatgtctttgttttctccacctgtaaaatggggattcc

SEQ ID NO: 61773 - DNA, 110 bp, synthetic construct
  source 1..110: mol_type = other DNA
aggcaaattgctcactttatgtctttgttttctccacctgtaaaatggggattccaatacccaccttaccaacacaataaaccagcaatgctggcacctagaacaaactg

SEQ ID NO: 61774 - DNA, 110 bp, synthetic construct
  source 1..110: mol_type = other DNA
gcatacaaacagtagatagtgtcagggcaaaaattagaacccgcaggtgagaatctgtgtttcttcaccatgctctagcttatgcacatattccttatcctcaatacgag

SEQ ID NO: 61775 - DNA, 110 bp, synthetic construct
  source 1..110: mol_type = other DNA
tgtgtttcttcaccatgctctagcttatgcacatattccttatcctcaatacgaggtctacagaagtgcaacacccatgagaaaatatacaccctcaaaaagcaaaggaa

SEQ ID NO: 61776 - DNA, 110 bp, synthetic construct
  source 1..110: mol_type = other DNA
agttggattcgttaaccactgcgccacgacgggaacttcccataaagtatttctgacctcccttacaacacgcttttcctcgctccatccgtagctctggtatttccttt

SEQ ID NO: 61777 - DNA, 110 bp, synthetic construct
  source 1..110: mol_type = other DNA
cattaacccagttccaagggagcaagcgaaaaaggccacatgaaacccatttcccagtcctccccacccccgagttagtctccgcccctgagctaggctgtcagagtggc

SEQ ID NO: 61778 - DNA, 110 bp, synthetic construct
  source 1..110: mol_type = other DNA
agtcctccccacccccgagttagtctccgcccctgagctaggctgtcagagtggcccagacctcagccccacctccaaactggctctggggaacccccccccatccccac

SEQ ID NO: 61779 - DNA, 110 bp, synthetic construct
  source 1..110: mol_type = other DNA
agtaagaccaccaggatgaatgtggagaatagagggaggagagcaagagccacagacaggaaaatggctagcaagctctaggcgagagctgcggatggccaaggctaaga

SEQ ID NO: 61780 - DNA, 110 bp, synthetic construct
  source 1..110: mol_type = other DNA
acaggaaaatggctagcaagctctaggcgagagctgcggatggccaaggctaagatggtggcaggagaaatgaagagcaatgacctcttcatgacccgtgggctcataat

SEQ ID NO: 61781 - DNA, 110 bp, synthetic construct
  source 1..110: mol_type = other DNA
taaaaaatgaaagagattcttatccttaggaactgccctgcattggtcttgatggattttgcacccccatcgaattagagttaggtgatttagttgcttttgctgacctt

SEQ ID NO: 61782 - DNA, 110 bp, synthetic construct
  source 1..110: mol_type = other DNA
attttgcacccccatcgaattagagttaggtgatttagttgcttttgctgacctttcatattggtctttagggaagtaatttttctggcattgctttcttcaatatccat

SEQ ID NO: 61783 - DNA, 110 bp, synthetic construct
  source 1..110: mol_type = other DNA
catggacaccatattgggttcttaacctactgggccacaacgaaaactcttggatcttgttcttataatcagctactacagacctatatgtaggtagacactggtgtgct

SEQ ID NO: 61784 - DNA, 110 bp, synthetic construct
  source 1..110: mol_type = other DNA
tatttattttaaacctgatgatggtgcttgaagatgttaaacctggtggtggatactataaagaacaaacattagattctctcacaggactacacagtgctaagactaat

SEQ ID NO: 61785 - DNA, 110 bp, synthetic construct
  source 1..110: mol_type = other DNA
ctataaagaacaaacattagattctctcacaggactacacagtgctaagactaatagtacaactcttgtcttatgttatacttataactattagtttttctctgctggtc

SEQ ID NO: 61786 - DNA, 110 bp, synthetic construct
  source 1..110: mol_type = other DNA
aaaggcattcggaggtctctccatgccgagtggaggactgtggaaggagccgaggaaggtggctggtagcctatcattggataccagggagtgaccaagtcagccgacct

SEQ ID NO: 61787 - DNA, 110 bp, synthetic construct
  source 1..110: mol_type = other DNA
caaggcttttatttccgtccagacactgcacttcttcccttggcgatctgttttcctggcttagaggccagctctggtgtttattcagcctgatgtccctggactgcaga

SEQ ID NO: 61788 - DNA, 110 bp, synthetic construct
  source 1..110: mol_type = other DNA
cctgtttgaagacagtaatgaaaggcttttcacagtgagccaaatgagagcaggcagcttccctttctcaggaaaatgggcaagtgaaacctatttaactggactgatat

SEQ ID NO: 61789 - DNA, 110 bp, synthetic construct
  source 1..110: mol_type = other DNA
agcttccctttctcaggaaaatgggcaagtgaaacctatttaactggactgatatatcctgcagcctggaagcttccagacatagatggatcaagtctgctgggagtatg

SEQ ID NO: 61790 - DNA, 110 bp, synthetic construct
  source 1..110: mol_type = other DNA
gtgcttgaatatcggtaaccaactcagaatccctttctcagtagcacatacaatacagctatttccttccttaggataactccccagcctcctaattacattccaagttt

SEQ ID NO: 61791 - DNA, 110 bp, synthetic construct
  source 1..110: mol_type = other DNA
cccatctagtcatccacattttgcaaacagctaaaggccaggatgcaaaagcagatggctgggcagcaaaaaatggtgtccacagtgtcattcattgactttcacctcct

SEQ ID NO: 61792 - DNA, 110 bp, synthetic construct
  source 1..110: mol_type = other DNA
ggttgttttcacccagacctgctcagcccacctgtcccagtgtttccacgttatcaaatgttttctagttcccatggcaaccgaatcacagagccaggatttgttattgt

SEQ ID NO: 61793 - DNA, 110 bp, synthetic construct
  source 1..110: mol_type = other DNA
aaatgttttctagttcccatggcaaccgaatcacagagccaggatttgttattgttccaggggaaaaagggaagggccgcagtgcaagggctgacgtccgagcaccgtcc

SEQ ID NO: 61794 - DNA, 110 bp, synthetic construct
  source 1..110: mol_type = other DNA
ctttgtttagcaggttctccctggctgcggggttgggacttgaccatagctgtggccacgggaagtaggattacccgctcggaggccactgaaaataattcatgagaaat

SEQ ID NO: 61795 - DNA, 110 bp, synthetic construct
  source 1..110: mol_type = other DNA
cgaacataaatgtacaagcacacgttaggaactctctgtgagctttttgccgctaatcagttacttcttagctatcttatgaaagaatgtctatttcctattaaatcaca

SEQ ID NO: 61796 - DNA, 110 bp, synthetic construct
  source 1..110: mol_type = other DNA
cacgaactcgaccccgagggacgcccgagggaggagagttccaatcgccagggcaggtgagcgagcgcgcaggtgaggagggatgtcgacctcctccaagaagctgaggc

SEQ ID NO: 61797 - DNA, 110 bp, synthetic construct
  source 1..110: mol_type = other DNA
ggtgagcgagcgcgcaggtgaggagggatgtcgacctcctccaagaagctgaggcttaggtgaagccaggagggatgagaaaagcagctcgcaaacctgtttgaatcaaa

SEQ ID NO: 61798 - DNA, 110 bp, synthetic construct
  source 1..110: mol_type = other DNA
tgacttcatgaaggagatgaggccccaggcaaggacagaatcttgttcacagtgtctagtgcagtgtctggcatgcatagtcattttgaataaacccgccccaaatccca

SEQ ID NO: 61799 - DNA, 110 bp, synthetic construct
  source 1..110: mol_type = other DNA
ttcctgagcagcaggcccttaattttccaggtcttcaacaatctctcaattctttcaaggtgcatcaaaaatgccacttctccgatgaagcttttcctaaccctcccacc

SEQ ID NO: 61800 - DNA, 110 bp, synthetic construct
  source 1..110: mol_type = other DNA
caaggtgcatcaaaaatgccacttctccgatgaagcttttcctaaccctcccacccacggagcttcattacctagaatgctcacctgccacttaactatggccttgagct

SEQ ID NO: 61801 - DNA, 110 bp, synthetic construct
  source 1..110: mol_type = other DNA
tcagtccctgttacagaccccgcctgagagcaaggcgggaaggactgttccttggcttggtggctggtcaagtggccttagacctgctgatttccatgggtttttatcac

SEQ ID NO: 61802 - DNA, 110 bp, synthetic construct
  source 1..110: mol_type = other DNA
cttggtggctggtcaagtggccttagacctgctgatttccatgggtttttatcaccctggaaatcgaccctcagggaaaaggagggaccaaagcaaccagttcaagagat

SEQ ID NO: 61803 - DNA, 110 bp, synthetic construct
  source 1..110: mol_type = other DNA
gaaaaatatgtattatgggcattgtttgagctttgaccaaaagatgctaacgagtaactatattccacccaaatgttcctcagtatatttaataatcttttgccaaatat

SEQ ID NO: 61804 - DNA, 110 bp, synthetic construct; identical to SEQ ID NO: 61803
  source 1..110: mol_type = other DNA

SEQ ID NO: 61805 - DNA, 110 bp, synthetic construct; identical to SEQ ID NO: 61803
  source 1..110: mol_type = other DNA

SEQ ID NO: 61806 - DNA, 110 bp, synthetic construct; identical to SEQ ID NO: 61803
  source 1..110: mol_type = other DNA

SEQ ID NO: 61807 - DNA, 110 bp, synthetic construct
  source 1..110: mol_type = other DNA
tgcaaattgtgtccatttcgttgtcgcttttactggtgtgttggtaggtattttaatttctacctgtagccacatactccaggtttaaaggaaatactgtcattctgaat

SEQ ID NO: 61808 - DNA, 110 bp, synthetic construct
  source 1..110: mol_type = other DNA
atttctacctgtagccacatactccaggtttaaaggaaatactgtcattctgaatgttttaggaaggaagggcctaaatcaaggcccaggtatagtgtgtccaagttaag

SEQ ID NO: 61809 - DNA, 110 bp, synthetic construct
  source 1..110: mol_type = other DNA
tgaccagggtcgctcagccgacatcccgggcactgcagctcagccagcaacatctgtccacatgtctgagctggagtgtatcgtctgggacagcattcccagatctctgc

SEQ ID NO: 61810 - DNA, 110 bp, synthetic construct
  source 1..110: mol_type = other DNA
gtccacatgtctgagctggagtgtatcgtctgggacagcattcccagatctctgcaaaaggcacagccaaaacggacaccaaccattttgaaaacagatgcccgtttaaa

SEQ ID NO: 61811 - DNA, 110 bp, synthetic construct; identical to SEQ ID NO: 61809
  source 1..110: mol_type = other DNA

SEQ ID NO: 61812 - DNA, 110 bp, synthetic construct; identical to SEQ ID NO: 61810
  source 1..110: mol_type = other DNA

SEQ ID NO: 61813 - DNA, 110 bp, synthetic construct
  source 1..110: mol_type = other DNA
taatatcgaagaaaaatatgtactatatttagatatatatgtatgtccctttgtgtttgaagttaaagctgacaacagtcaggatgcgtggcccccttcgggtactcata

SEQ ID NO: 61814 - DNA, 110 bp, synthetic construct
  source 1..110: mol_type = other DNA
tttgaagttaaagctgacaacagtcaggatgcgtggcccccttcgggtactcatatctaggttgcaactgtttctagtggcgtggggggtcctgtgtcaagtccctgtac

SEQ ID NO: 61815 - DNA, 110 bp, synthetic construct
  source 1..110: mol_type = other DNA
tctttggatcatctagaattagctcctcctctcaagatccttaagcaaatcacatctttaccatgtaatgtcacagtccctagttcagggatttgacttggatattctgt

SEQ ID NO: 61816 - DNA, 110 bp, synthetic construct
  source 1..110: mol_type = other DNA
gcccatcttagtggcaagaggtggggttcatgtattcatttgtcttttcatcatcagcaaacatttacctggtatctatagtgtattgaacaccagtggtgcagctgggt

SEQ ID NO: 61817 - DNA, 110 bp, synthetic construct
  source 1..110: mol_type = other DNA
agcaaacatttacctggtatctatagtgtattgaacaccagtggtgcagctgggtcagaaatgaaaaacagggagttcccgtcatggctcagcgggttaaggacccaaca

SEQ ID NO: 61818 - DNA, 110 bp, synthetic construct
  source 1..110: mol_type = other DNA
cttacacagaaacaaacagtgaagaggaaactggctctgatggagggatttttaccaagttctctttccctggaagagcttgacctgctggaatggtgaagggctttgtc

SEQ ID NO: 61819 - DNA, 110 bp, synthetic construct
  source 1..110: mol_type = other DNA
caagttctctttccctggaagagcttgacctgctggaatggtgaagggctttgtctgcctctgccctggcagagtacagccttctactaagcaactgagggtagggtggg

SEQ ID NO: 61820 - DNA, 110 bp, synthetic construct
  source 1..110: mol_type = other DNA
aatatgtgtcaaaattttctactgctattgaaattgagcagggccctgtggggctcctaggcacaacaagcctttctatgtctcctatttcttgtttttaggaaatgggc

SEQ ID NO: 61821 - DNA, 110 bp, synthetic construct
  source 1..110: mol_type = other DNA
gagcagggccctgtggggctcctaggcacaacaagcctttctatgtctcctatttcttgtttttaggaaatgggctcattcagtctgcatggccttccctgagttccaag

SEQ ID NO: 61822 - DNA, 110 bp, synthetic construct
  source 1..110: mol_type = other DNA
tagcctgaccccaatttccttgcttctccgaaccccgagattccatggagtttaacctctgcccctggacctgcctccacaccgggctgctgcctccttaggtaggtact

SEQ ID NO: 61823 - DNA, 110 bp, synthetic construct
  source 1..110: mol_type = other DNA
cctctgcccctggacctgcctccacaccgggctgctgcctccttaggtaggtactcgatggatgcacattggatgaatgaatgagggaatgcgggaatgaatgagtggag

SEQ ID NO: 61824 - DNA, 110 bp, synthetic construct
  source 1..110: mol_type = other DNA
aatccaaccacagcagtttaagttgctgccgaggtgcgggttggatcccctgccctgaacagtgggttaaaggatccagcattgtctcagctgtggtggagttcacagct

SEQ ID NO: 61825 - DNA, 110 bp, synthetic construct
  source 1..110: mol_type = other DNA
gtttaagttgctgccgaggtgcgggttggatcccctgccctgaacagtgggttaaaggatccagcattgtctcagctgtggtggagttcacagctgcggctcagaatcaa

SEQ ID NO: 61826 - DNA, 110 bp, synthetic construct
  source 1..110: mol_type = other DNA
ggtcggctggacccgcacttccctccctaggtgcaccctgcctcattcattcattcattcattcattcaagaagcacccatctgtgtcggccgcatgccagctgattcat

SEQ ID NO: 61827 - DNA, 110 bp, synthetic construct
  source 1..110: mol_type = other DNA
cattcattcattcaagaagcacccatctgtgtcggccgcatgccagctgattcatcaaatacagctcttgccctcacggagctcatagccaccctggggagggagagaaa

SEQ ID NO: 61828 - DNA, 110 bp, synthetic construct
  source 1..110: mol_type = other DNA
tccgtctccacttcccagtgccttctgggcctatcagccttgctttttcttgctgagaagggccttctgcccgctgtcccccacctggactgcacttcagggagcgctgc

SEQ ID NO: 61829 - DNA, 110 bp, synthetic construct
  source 1..110: mol_type = other DNA
agaagggccttctgcccgctgtcccccacctggactgcacttcagggagcgctgctcaaatgtcaccttgcaagtgaggtcttcactggcccacgatgtgaaatcgcaac

SEQ ID NO: 61830 - DNA, 110 bp, synthetic construct
  source 1..110: mol_type = other DNA
cttcctttgaactgctgcctcacacaccattgtgtagatatactacattttgtctagctattcaccagccgataggtgtttggaatatttctaactttgagctagataaa

SEQ ID NO: 61831 - DNA, 110 bp, synthetic construct
  source 1..110: mol_type = other DNA
agtatcattccctgcctagtgtccctaccacgtgtgaaagatggaatgatcccactgacataaggtgccagtccaggaccacaaccttgcagtgtgtttttaacactttg

SEQ ID NO: 61832 - DNA, 110 bp, synthetic construct
  source 1..110: mol_type = other DNA
tctctgttggataatttgtgtggtttctctctttcgagctggactctgactgaagcagacatgccaccttacgtcttccatgagaaggaccgtaggtttctggcacagtc

SEQ ID NO: 61833 - DNA, 110 bp, synthetic construct
  source 1..110: mol_type = other DNA
ctctctattaggaggtgacagacactttcctgttgtggaaactgcttataccttcccccagcctgggtccccctagaccctccttaatggcagactgtcagtacccaggg

SEQ ID NO: 61834 - DNA, 110 bp, synthetic construct
  source 1..110: mol_type = other DNA
ccccagcctgggtccccctagaccctccttaatggcagactgtcagtacccagggtggcctgaccccaccttttcatccggatcctaggaccctactggctgagctgcga

SEQ ID NO: 61835 - DNA, 110 bp, synthetic construct
  source 1..110: mol_type = other DNA
gctgacataattacaaacagtacctggagatgagaaggcagaataccttcctgttcagtgatcttagagccacttgccctctataagcatatgtagagtgtcaacagaat

SEQ ID NO: 61836 - DNA, 110 bp, synthetic construct
  source 1..110: mol_type = other DNA
cagtgatcttagagccacttgccctctataagcatatgtagagtgtcaacagaataagtagctggcaacgtttttaacatgagcactttaatttcagcaccaattccaac

SEQ ID NO: 61837 - DNA, 110 bp, synthetic construct
  source 1..110: mol_type = other DNA
gaacttagagtcagcgagatgcggcaacacctagaagaactcaaaaaaatcatgctatcaataaaacacgaactcagaagtttatgaggttttagatgcaagttatgtga

SEQ ID NO: 61838 - DNA, 110 bp, synthetic construct
  source 1..110: mol_type = other DNA
gagatgcggcaacacctagaagaactcaaaaaaatcatgctatcaataaaacacgaactcagaagtttatgaggttttagatgcaagttatgtgaaagctagaagattta

SEQ ID NO: 61839 - DNA, 110 bp, synthetic construct
  source 1..110: mol_type = other DNA
cacccacgtggtagtctattgctttgcacaggaaagtaactttggcaacaggaatttctgccacaagttcctgggttttgagctcattttgcctctcataaagtggtttt

SEQ ID NO: 61840 - DNA, 110 bp, synthetic construct
  source 1..110: mol_type = other DNA
tcaatcctcttaactcacaaagagggaaacagacccggggactgtgacccacttctgatggcccagcaaatcatatggtcgcagaaataatgaggcccctactgtttttt

SEQ ID NO: 61841 - DNA, 110 bp, synthetic construct
  source 1..110: mol_type = other DNA
tgggctggcagagcttaggagagtgtgccagcagtggggcttggccccaagctgaggcctacacatggcttggggtatgccttagacgcctcagggggcctttcttcctc

SEQ ID NO: 61842 - DNA, 110 bp, synthetic construct
  source 1..110: mol_type = other DNA
ggcctacacatggcttggggtatgccttagacgcctcagggggcctttcttcctcaggagaagacagtttcttttctcgctggctcctctcattccccacagttgtagct

SEQ ID NO: 61843 - DNA, 110 bp, synthetic construct
  source 1..110: mol_type = other DNA
gggagtcctggccccgctcttaggggtggaggcaggagacacgagcgtttgcggcgggtccacttctctgtctgcccccaagaagcagttctgctttttcgtgcccccgt

SEQ ID NO: 61844 - DNA, 110 bp, synthetic construct
  source 1..110: mol_type = other DNA
gggtccacttctctgtctgcccccaagaagcagttctgctttttcgtgcccccgtgattcaccacttgaagacagcaaagtaacccccatctcttccttcctaatttacc

SEQ ID NO: 61845 - DNA, 110 bp, synthetic construct
  source 1..110: mol_type = other DNA
gtcccatctcatgttcagctcatagaggttcttcgcctcccagatgagaggattttcgcttctcttttcctctgaaggaagcacaactcactggctactttctctgactg

SEQ ID NO: 61846 - DNA, 110 bp, synthetic construct
  source 1..110: mol_type = other DNA
tcgcttctcttttcctctgaaggaagcacaactcactggctactttctctgactggcccttcgctggtttgaagacccagcctttctctgctctctccatcaccgtggtc

SEQ ID NO: 61847 - DNA, 110 bp, synthetic construct
  source 1..110: mol_type = other DNA
gctgtgtgaccttggccacgttacgtaacccttccgtggcccttctgcacacagagctaatgatagtcccaacctcatggggctttaggagatgcgattagttagtatat

SEQ ID NO: 61848 - DNA, 110 bp, synthetic construct
  source 1..110: mol_type = other DNA
gcatggctgacatttcatcaggtctaaatatagtcaccattgttagaaggtaaaagtccatttttagaaaaagataggaaggaatgaaaagagctttatcagagagttga

SEQ ID NO: 61849 - DNA, 110 bp, synthetic construct
  source 1..110: mol_type = other DNA
catcaggtctaaatatagtcaccattgttagaaggtaaaagtccatttttagaaaaagataggaaggaatgaaaagagctttatcagagagttgattttaagaatctctt

SEQ ID NO: 61850 - DNA, 110 bp, synthetic construct
  source 1..110: mol_type = other DNA
tgggcccctatgtttcgtcaagttctgctggacaatgaagtgactcaatcacacacagttctctgtgctatacagtgacttttatcttcacaaagctacaggccaggagc

SEQ ID NO: 61851 - DNA, 110 bp, synthetic construct
  source 1..110: mol_type = other DNA
cagttctctgtgctatacagtgacttttatcttcacaaagctacaggccaggagcatctctcttctcatccaagggccaccttatcaaaggacacaaagcaagacgaatg

SEQ ID NO: 61852 - DNA, 110 bp, synthetic construct; identical to SEQ ID NO: 61850
  source 1..110: mol_type = other DNA

SEQ ID NO: 61853 - DNA, 110 bp, synthetic construct; identical to SEQ ID NO: 61851
  source 1..110: mol_type = other DNA

SEQ ID NO: 61854 - DNA, 110 bp, synthetic construct
  source 1..110: mol_type = other DNA
accattctatgctttcataagctcaataagtaggagtcccagatgtcaaccattcagattagaaaaatacacgttactccctacaccctctctaagcagcatttatatga

SEQ ID NO: 61855 - DNA, 110 bp, synthetic construct
  source 1..110: mol_type = other DNA
tgacccagtcttccttgaaaaacaccctggaacttccttgcctagctaaagatatttgataaggttgcttgacaggaacccatacagtccaaagtcacgaacactgtgca

SEQ ID NO: 61856 - DNA, 110 bp, synthetic construct
  source 1..110: mol_type = other DNA
ttgataaggttgcttgacaggaacccatacagtccaaagtcacgaacactgtgcattgacagccatattcttttccaccagatgcctagaactcgagaggatcctgcccc

SEQ ID NO: 61857 - DNA, 110 bp, synthetic construct
  source 1..110: mol_type = other DNA
ggtgatgtaatcttagtaaaatactttgttcaacatgctgacacggagtaaactgtcaacaaacgtgagctcctcatcttacaagaaaagtaaatattacattaagatgt

SEQ ID NO: 61858 - DNA, 110 bp, synthetic construct
  source 1..110: mol_type = other DNA
tcaacaaacgtgagctcctcatcttacaagaaaagtaaatattacattaagatgtatacgtgagcataacagagagatacatagagagaggtgtgtgagagagagagcga

SEQ ID NO: 61859 - DNA, 110 bp, synthetic construct
  source 1..110: mol_type = other DNA
ggggggctgagggagcttttggaacaaagacttcaggtcaaccaaacatttatggatgtttatgggcaaaattgggaagactaagaaaacttagaaaaagcacctttcat

SEQ ID NO: 61860 - DNA, 110 bp, synthetic construct
  source 1..110: mol_type = other DNA
atgtttatgggcaaaattgggaagactaagaaaacttagaaaaagcacctttcatgtgcatgagtataggagtactatgagggtaaaagctaacatctgtaaacatctcc

SEQ ID NO: 61861 - DNA, 110 bp, synthetic construct
  source 1..110: mol_type = other DNA
gcaccacagagcagatgttctcaggacacggaaaagatccagaacctagggaacacgtcctcagcttctcaaaggtctgctcgtaacaggtaaccagggcaagcacacca

SEQ ID NO: 61862 - DNA, 110 bp, synthetic construct
  source 1..110: mol_type = other DNA
cgggctcaagtcaccccaaacccatgatgccatcttcccgaatctgccaccgcgagcatccccctcccacctttctttcttgatacaagttcagaaacgctgggggtctt

SEQ ID NO: 61863 - DNA, 110 bp, synthetic construct
  source 1..110: mol_type = other DNA
ggaaacggaaagcgtcttggacgtttctttttttcaaccgagtacatcgaagccagaagtctacacccaacttcccggggacccgctacagccaccagctaccaacctcc

SEQ ID NO: 61864 - DNA, 110 bp, synthetic construct
  source 1..110: mol_type = other DNA
tccctggccgcgctcagtgggttgaggatctggcattgctgcaatctgcggtgtaagctgcaaatatggctcggatccctcactgatgtggctgtggtgtaggctggcgg

SEQ ID NO: 61865 - DNA, 110 bp, synthetic construct; identical to SEQ ID NO: 61864
  source 1..110: mol_type = other DNA

SEQ ID NO: 61866 - DNA, 110 bp, synthetic construct
  source 1..110: mol_type = other DNA
caagagtcagtcatacatccatactgatctgcaaaagaggccggaaatgtgatctttagctgagtaataatgtgcccagctaactcgtggtgattctatactaaagaaaa

SEQ ID NO: 61867 - DNA, 110 bp, synthetic construct
  source 1..110: mol_type = other DNA
ggctgggcaagaacctgtctcctaactcctcacctcgtgctctcaattaacttcgttataattttatggttaagaaacagccgccgtgtgatcagaaactaatgcaatag

SEQ ID NO: 61868 - DNA, 110 bp, synthetic construct
  source 1..110: mol_type = other DNA
attaatttgtccttggtttctgacttcccgaattgaagaatacttagctcatcgccttgcactctttcttaccttcttacaaacatatttaaggctatacatcgtataaa

SEQ ID NO: 61869 - DNA, 110 bp, synthetic construct
  source 1..110: mol_type = other DNA
caatgggcagttttcagcactcagatgattggttccaccagcagcatttgacaaagctgagtactccctcctccaaagcctcgttcttagcttctgtggtattttactat

SEQ ID NO: 61870 - DNA, 110 bp, synthetic construct
  source 1..110: mol_type = other DNA
gctgagtactccctcctccaaagcctcgttcttagcttctgtggtattttactatctctttcttcttactccgcccctccattctccaacctttacgtccaaggagttac

SEQ ID NO: 61871 - DNA, 110 bp, synthetic construct
  source 1..110: mol_type = other DNA
acccactgaactgtacactgcacatgaataaattttatggtatatgaattacatctcaataaagctcctaaaaatatactttcctcctacttgtctctcaaattctgagt

SEQ ID NO: 61872 - DNA, 110 bp, synthetic construct
  source 1..110: mol_type = other DNA
tcaataaagctcctaaaaatatactttcctcctacttgtctctcaaattctgagtagaggacatcactctttaacatttccaaactctacagtataaggtcacaaggata

SEQ ID NO: 61873 - DNA, 110 bp, synthetic construct
  source 1..110: mol_type = other DNA
aaaagaaccaccccaaggagtataatcaagagctaaggaaattctgagaagaaaaagatggatgtgtgggagttagaaaggaagcttcagcacaggagctggtcttaaca

SEQ ID NO: 61874 - DNA, 110 bp, synthetic construct
  source 1..110: mol_type = other DNA
aacaatgttgtggaaagagcatggtttgcaaagcagagtaaatacagtctctcttttgagccacacaagttcctatgaatttgttcaataatttttctaagaggtataat

SEQ ID NO: 61875 - DNA, 110 bp, synthetic construct
  source 1..110: mol_type = other DNA
agagcatggtttgcaaagcagagtaaatacagtctctcttttgagccacacaagttcctatgaatttgttcaataatttttctaagaggtataataagttttattgtata

SEQ ID NO: 61876 - DNA, 110 bp, synthetic construct
  source 1..110: mol_type = other DNA
gtataacatgttattagatcagtattataagtaagaaaacaaaagttcagagccatttagtgacttgccaaggtcacagctcacacccaggccactgattctgaagccca

SEQ ID NO: 61877 - DNA, 110 bp, synthetic construct
  source 1..110: mol_type = other DNA
tagcaggaagagtatctcaaaagtgacttcacttttttttttgggggggggtctttttagggccatacctgcagcatttggaagttcccacgctaggggtcacatcaggg

SEQ ID NO: 61878 - DNA, 110 bp, synthetic construct
  source 1..110: mol_type = other DNA
ctcaaaagtgacttcacttttttttttgggggggggtctttttagggccatacctgcagcatttggaagttcccacgctaggggtcacatcagggccatagctgccagcc

SEQ ID NO: 61879 - DNA, 110 bp, synthetic construct
  source 1..110: mol_type = other DNA
aagggagtttatgagaaagagtgaaataagggcccaggcctcagggagctcagagtccagagggaaggagcagtcctagaagtcgatgattctccatgacatcacgaggt

SEQ ID NO: 61880 - DNA, 110 bp, synthetic construct
  source 1..110: mol_type = other DNA
tccagagggaaggagcagtcctagaagtcgatgattctccatgacatcacgaggtgatgtattgttgaatgaaagtatgagccatacaccgagaggacagagaggagggg

SEQ ID NO: 61881 - DNA, 110 bp, synthetic construct
  source 1..110: mol_type = other DNA
tactacttatgcggcagccatgccctgctctgctaataatgtttgtaaatggtaaactagagcagaaaacgctttgaagctacctggtatccctagggatttaatcagct

SEQ ID NO: 61882 - DNA, 110 bp, synthetic construct
  source 1..110: mol_type = other DNA
tcccgacccgggggcttcacattcttgagattggagaagacagcctgattgtctgtcctgagcgtgtgtgtcagcacttggagcaggtgctgcttggttccgtagccttt

SEQ ID NO: 61883 - DNA, 110 bp, synthetic construct
  source 1..110: mol_type = other DNA
tcctgagcgtgtgtgtcagcacttggagcaggtgctgcttggttccgtagcctttgtggatgtttccagcgctcagcctcacccttccgtctgctccctggaccagcttc

SEQ ID NO: 61884 - DNA, 110 bp, synthetic construct
  source 1..110: mol_type = other DNA
tctgttcctgctcaggttctccccagtgcagacttgcagactggcctctttagtagctggtagctggtagctgtttaatcagatgtccgtacacacctcctaaggacaaa

SEQ ID NO: 61885 - DNA, 110 bp, synthetic construct
  source 1..110: mol_type = other DNA
gctggtagctggtagctgtttaatcagatgtccgtacacacctcctaaggacaaatacttacgctcagaggtgatacagtctaaccttatcaggaggaagataaatattt

SEQ ID NO: 61886 - DNA, 110 bp, synthetic construct
  source 1..110: mol_type = other DNA
ggaactgtgtgtgtttaggtaaagagtctagaaatagctttgagatgtcagagtgacctcaagtagattgaaatggctggagcagggtccatgtgggggagtggcctgag

SEQ ID NO: 61887 - DNA, 110 bp, synthetic construct
  source 1..110: mol_type = other DNA
ttcactttccctttcctaactcttgcctgtctccattgcgggactgtaagctctgtttgggcaggaactctctcttctttagtgcagtgttcccagagctggcacaaccc

SEQ ID NO: 61888 - DNA, 110 bp, synthetic construct
  source 1..110: mol_type = other DNA
cagtggcttctccttctcctttccctcctaagacagactgtttcctcttttgtccctttcttaataattctatatacttagggaaactgactctccatagcttctacaag

SEQ ID NO: 61889 - DNA, 110 bp, synthetic construct
  source 1..110: mol_type = other DNA
aggaagagcaggctggcccattggccctcagtgatgggggcagaggcctcttagccacaggatttattatctccttctttgggagaggttgattaacttatccatggtcc

SEQ ID NO: 61890 - DNA, 110 bp, synthetic construct
  source 1..110: mol_type = other DNA
ctgctagtgcggccctaaaaaaggacaaaagacaaaaataaaaagaaatttacagcccaaggacatggtgggaggagtattctgggtataaggggggaagtccaagctgg

SEQ ID NO: 61891 - DNA, 110 bp, synthetic construct
  source 1..110: mol_type = other DNA
cccaaggacatggtgggaggagtattctgggtataaggggggaagtccaagctgggtggttacatggcgagttgttaaagaagcgaataagcatttggtgttaatgctgg

SEQ ID NO: 61892 - DNA, 110 bp, synthetic construct
  source 1..110: mol_type = other DNA
atattccccagatcaataaaatggcagtgaatgggggctaatttataggtctgattttgatgcaatccggtttcttgagttcccttaaggcagcttttatagtagctgca

SEQ ID NO: 61893 - DNA, 110 bp, synthetic construct
  source 1..110: mol_type = other DNA
tttgatgcaatccggtttcttgagttcccttaaggcagcttttatagtagctgcacagctaacacggagaccttttccattgtatgatggcagagctagtcaaaatctga

SEQ ID NO: 61894 - DNA, 110 bp, synthetic construct
  source 1..110: mol_type = other DNA
ggaaaccatgggtttaaattttacgttcttagagatcctgtcatggctcagcagaaacggacctgactaggacccatgaggacgctggttcgatccctggcctggctcag

SEQ ID NO: 61895 - DNA, 110 bp, synthetic construct; identical to SEQ ID NO: 61894
  source 1..110: mol_type = other DNA

SEQ ID NO: 61896 - DNA, 110 bp, synthetic construct
  source 1..110: mol_type = other DNA
gctgctcttcacattcaacatcttcccagacgtctcaccactgctgcaggtgcggaggcagtcgcaacacagctgttagtgcctctgcacacgtgaacttgggttgatgg

SEQ ID NO: 61897 - DNA, 110 bp, synthetic construct
  source 1..110: mol_type = other DNA
tgttaaagtttatggattaatcccaaacctctctggggatggattgggagatagtggactcagggatctagctccatggcgatgatggtgcttagaagtcacaggtttgt

SEQ ID NO: 61898 - DNA, 110 bp, synthetic construct
  source 1..110: mol_type = other DNA
ggactcagggatctagctccatggcgatgatggtgcttagaagtcacaggtttgtggcgcttaaccctgcagtaactagtgctttaggatgcgttgtcactcgagagaag

SEQ ID NO: 61899 - DNA, 110 bp, synthetic construct
  source 1..110: mol_type = other DNA
tgggttagagaattcagtgttgccatgtgctgcagtataggttgcagatgtagctcagatcctgcgttttctgtggctgtggcgtagaggggcagctgcagctcccatct

SEQ ID NO: 61900 - DNA, 110 bp, synthetic construct
  source 1..110: mol_type = other DNA
cagatcctgcgttttctgtggctgtggcgtagaggggcagctgcagctcccatctgaccccttgccatgtgccacactgtggccttaaattaaaaaaaaaaaaagagaga

SEQ ID NO: 61901 - DNA, 110 bp, synthetic construct
  source 1..110: mol_type = other DNA
acagcaaaaaaaaaaaaaaaaaagaaaacccccaaaaaattcaccctagagaagctgagctccttggggaactcatcaatgctatcttgtccccggtcaaagatggaggg

SEQ ID NO: 61902 - DNA, 110 bp, synthetic construct
  source 1..110: mol_type = other DNA
tgagctccttggggaactcatcaatgctatcttgtccccggtcaaagatggagggattaagagatgaggagatgcgtgtggtccacgcatctcccttggtccaggaggaa

SEQ ID NO: 61903 - DNA, 110 bp, synthetic construct
  source 1..110: mol_type = other DNA
aatcacctagggatttgcccttcacctctaaagactcattccaacaggtgcatcgccctgtttaagcataataacagctgttacataggcatacaatgactaattgccct

SEQ ID NO: 61904 - DNA, 110 bp, synthetic construct
  source 1..110: mol_type = other DNA
gggctctgcattcagagatgcgtgacaagcatccctcattacctgccctcttattttgtatggatctgagaccccgcaattccacagctggtgatgaacacctgacaggt

SEQ ID NO: 61905 - DNA, 110 bp, synthetic construct
  source 1..110: mol_type = other DNA
ttgtatggatctgagaccccgcaattccacagctggtgatgaacacctgacaggtaatgtatagattattttgaaagcagactcatttgacctctatccgtccagcccca

SEQ ID NO: 61906 - DNA, 110 bp, synthetic construct
  source 1..110: mol_type = other DNA
gggctaatgggccaagggactactcccttgcatgtactgtggaaggagaaagccagctaataccaggacttcattcaccaataacctgataggttcggaaagcttctaca

SEQ ID NO: 61907 - DNA, 110 bp, synthetic construct
  source 1..110: mol_type = other DNA
gctaataccaggacttcattcaccaataacctgataggttcggaaagcttctacaggagtgatttattttctgctttcggaatgactgccccaccaactctgaaaacata

SEQ ID NO: 61908 - DNA, 110 bp, synthetic construct
  source 1..110: mol_type = other DNA
ggggaataaaagaaaagaaggaattttcccctggggaagggtaggtggcaaatgagaattaaaggggaagaatgcttgctctgctcaagctcaagtgcgatgaggtgctg

SEQ ID NO: 61909 - DNA, 110 bp, synthetic construct
  source 1..110: mol_type = other DNA
gaattaaaggggaagaatgcttgctctgctcaagctcaagtgcgatgaggtgctgaaactgatcttgcaacagacagggctgcagggccagttttcttgggcaactttgt

SEQ ID NO: 61910 - DNA, 110 bp, synthetic construct
  source 1..110: mol_type = other DNA
gcagcctcatagatgtagtaggttcagtctcccaggctgcaagtgatctcaattgaatgaccagtaaattggatttatcttgcttacaaaaaacagctaccttttgtctt

SEQ ID NO: 61911 - DNA, 110 bp, synthetic construct
  source 1..110: mol_type = other DNA
aatgaccagtaaattggatttatcttgcttacaaaaaacagctaccttttgtcttcagattaaaaaaaaggtgctaatgaacagtatatgtcaacattcagggagaggga

SEQ ID NO: 61912 - DNA, 110 bp, synthetic construct
  source 1..110: mol_type = other DNA
gggtgaggtacttttgcttgggaggccctgtcctggccaacttacaatctctaagctcccagtcccacgcctcaacctgtgcggggttcggatagtgaattagaaggggt

SEQ ID NO: 61913 - DNA, 110 bp, synthetic construct
  source 1..110: mol_type = other DNA
ctcccagtcccacgcctcaacctgtgcggggttcggatagtgaattagaaggggtggtgaaaaagggaaaacgcaaaaaccgaaaaaacaaagacaacccacgggaacgg

SEQ ID NO: 61914 - DNA, 110 bp, synthetic construct
  source 1..110: mol_type = other DNA
ggaaaacatggggtgtctcaaaggggagctgttagggaaggattcttacagatcgtggggaaatggtgggatacagaagcatcacagtcttgacaggacaatttagaatt

SEQ ID NO: 61915 - DNA, 110 bp, synthetic construct
  source 1..110: mol_type = other DNA
tttttcaaccttatttcttgggtcaccagccattgaaataatagtgaactcagcgtcttgaaatagaaagaatccctgtttcctcctacaatgatatctcatttgccatt

SEQ ID NO: 61916 - DNA, 110 bp, synthetic construct
  source 1..110: mol_type = other DNA
gagagaagaatacagctcccaacactcacatatgcttctgtcttctcctcatccaactttctttccaggaaacaagggtccaaggaagcccagctcagatctagcataga

SEQ ID NO: 61917 - DNA, 110 bp, synthetic construct
  source 1..110: mol_type = other DNA
actttctttccaggaaacaagggtccaaggaagcccagctcagatctagcatagaagctgaagatggcgacagtgacctagctcttatcattttcttttttcaaaaatat

SEQ ID NO: 61918 - DNA, 110 bp, synthetic construct
  source 1..110: mol_type = other DNA
gtgggcagcatacagttgacttcttccccctggtaggggcttcagcacctgcaacacagctccaaggtcatggttcagaatatcatctatgggaggagttcccgtcatgg

SEQ ID NO: 61919 - DNA, 110 bp, synthetic construct
  source 1..110: mol_type = other DNA
ttgacttcttccccctggtaggggcttcagcacctgcaacacagctccaaggtcatggttcagaatatcatctatgggaggagttcccgtcatggcgcagtggttaacga

SEQ ID NO: 61920 - DNA, 110 bp, synthetic construct
  source 1..110: mol_type = other DNA
tacagtgattcatggagagtcctctcttccctgatggactgcagactcccaaggggaaggcaacggtcaactttagcttcctgttcccgcaagggagagacggtgacatg

SEQ ID NO: 61921 - DNA, 110 bp, synthetic construct
  source 1..110: mol_type = other DNA
gaaggcaacggtcaactttagcttcctgttcccgcaagggagagacggtgacatgccgaatggtcaaggtcagccactgtcctatatgatggtaacaatgataaggacaa

SEQ ID NO: 61922 - DNA, 110 bp, synthetic construct
  source 1..110: mol_type = other DNA
ataagcttttgtgctgacacatgtttttggttctcttgggtaaatttctaaaaaaggaatcgttaagctttttggtatatgtatgtgtaaaatttccagaaaccaacaaa

SEQ ID NO: 61923 - DNA, 110 bp, synthetic construct
  source 1..110: mol_type = other DNA
ccacccacgatgtctcctggcacttggagactcaaggacagcagctccctcccgcttgtgccatcgcagggcaggctctgaaggagaagcaatcttgggccgtttggttg

SEQ ID NO: 61924 - DNA, 110 bp, synthetic construct
  source 1..110: mol_type = other DNA
gatttccaaagccacttgagcatcaacaaggagatgccccgctaaggtccaggcagttgttttcaggtggcgtcatagcttccaaacttcagtaacagagacaggaaagc

SEQ ID NO: 61925 - DNA, 110 bp, synthetic construct
  source 1..110: mol_type = other DNA
ccccgtgtgcttatgtcagtcccaaaatggttattttataatgtggagtaagtcaggaagtgaaaaaaaagcaatacactcgtgctatcagaaaggaaaaggactctatt

SEQ ID NO: 61926 - DNA, 110 bp, synthetic construct
  source 1..110: mol_type = other DNA
aatggttattttataatgtggagtaagtcaggaagtgaaaaaaaagcaatacactcgtgctatcagaaaggaaaaggactctatttaaagattcatttattcgtttgaca

SEQ ID NO: 61927 - DNA, 110 bp, synthetic construct
  source 1..110: mol_type = other DNA
agtgttagcttcacagacccttgtgttgtaggagaccaaaggtctctatttcaggatgcaaaacagacgcatatggaagatgagctgacttgggctactatttgaagggt

SEQ ID NO: 61928 - DNA, 110 bp, synthetic construct
  source 1..110: mol_type = other DNA
atgcaaaacagacgcatatggaagatgagctgacttgggctactatttgaagggttgaactgaagccagcatggattctttgaaaagcccagatatatttttaaagtcaa

SEQ ID NO: 61929 - DNA, 110 bp, synthetic construct
  source 1..110: mol_type = other DNA
aatgtctcaaaaagcaaaatgagttaccggaggtcgcacagctaattagcaactgagcaggacaaacacccagaaagcctaaatctgaatcgagcactatttccgcccta

SEQ ID NO: 61930 - DNA, 110 bp, synthetic construct
  source 1..110: mol_type = other DNA
acccctttgtttcccccacaggatcaaaactattgttattattcgtattatcactgtcattgttattatgtactttttagggccgcacccaccacatatgggggttccca

SEQ ID NO: 61931 - DNA, 110 bp, synthetic construct
  source 1..110: mol_type = other DNA
cacgcatgtgcacaggtacacacgcacacacactcacacccaaacccatggctgtccaaaagcccaagagcagggaaaagtctatcttgggtttccaggatccccagggg

SEQ ID NO: 61932 - DNA, 110 bp, synthetic construct
  source 1..110: mol_type = other DNA
gcagaatgtctatggtgccctttgggcagaatgacagccagacttcctgactgtgaacacactgagatcttggaaggcaagctgcctccctgcagccctaaaggacaaac

SEQ ID NO: 61933 - DNA, 110 bp, synthetic construct
  source 1..110: mol_type = other DNA
cgctgccccttcgcgccctagtcagagccaatgggccacaaagggaaagacgtgggtctttaaaaagctttcctttaaaacaaaatataaacgcagagctgggcctcagt

SEQ ID NO: 61934 - DNA, 110 bp, synthetic construct
  source 1..110: mol_type = other DNA
gagttgtaagtaggattctaccacacccccaccacatgcgcctacagtttcctccgccccgctgggcctcagtttccccaaggagcatgttgggtcatgtccaaggccac

SEQ ID NO: 61935 - DNA, 110 bp, synthetic construct
  source 1..110: mol_type = other DNA
tgaaccctccccacggcctataggcttgattggcccgatcaaaagtctctgctgagcccagagctgctgcttgaaggaaatcgtgggtcccaattctcagccgacggtgg

SEQ ID NO: 61936 - DNA, 110 bp, synthetic construct
  source 1..110: mol_type = other DNA
gcccagagctgctgcttgaaggaaatcgtgggtcccaattctcagccgacggtggtgcagctctgatggtatagggtgcctgggcccgaggccattctcctgtctgtctt

SEQ ID NO: 61937 - DNA, 110 bp, synthetic construct
  source 1..110: mol_type = other DNA
ggatttgctcgggcaggagagggacggcgtcctgattagcaggactgtgtgagcaaaggaagttaagaaggcggcaagcaccgtgcagagctggagaggaggccagcctg

SEQ ID NO: 61938 - DNA, 110 bp, synthetic construct
  source 1..110: mol_type = other DNA
aaggaagttaagaaggcggcaagcaccgtgcagagctggagaggaggccagcctgccaggggcggggttcgtgtttgctgacccaggagcctgtttgctgacccaggagc

SEQ ID NO: 61939 - DNA, 110 bp, synthetic construct
  source 1..110: mol_type = other DNA
ctgtaaccctctcccatttttctttcctccctcttccagactggttcggtctagagctgcagctgagatccaaggagacaggaaagatatttgtcagcaccgagttcaag

SEQ ID NO: 61940 - DNA, 110 bp, synthetic construct
  source 1..110: mol_type = other DNA
gctgcagctgagatccaaggagacaggaaagatatttgtcagcaccgagttcaagttctacaactgcagtgcccaccaactgtaagcaccccctcgcagcacgcaggcct

SEQ ID NO: 61941 - DNA, 110 bp, synthetic construct
  source 1..110: mol_type = other DNA
cgtgcacacacctgcacacccacgtgcgcacgcgcacgcgcacagacacacacacagaaagttggaaagaatgtgataatttgccatcttcacccggcatccaggtgtct

SEQ ID NO: 61942 - DNA, 110 bp, synthetic construct
  source 1..110: mol_type = other DNA
agaaagttggaaagaatgtgataatttgccatcttcacccggcatccaggtgtctttgggagccaggttgggatcaaaatttgcaggcctaaagttggcaccactgccct

SEQ ID NO: 61943 - DNA, 110 bp, synthetic construct
  source 1..110: mol_type = other DNA
cacagggggctgcagaagagggagctgaaagggggtcgggggcaggggtactgagctccaacgctgcgcgaagcctccctgaactctttagtggaaactcttaaactccc

SEQ ID NO: 61944 - DNA, 110 bp, synthetic construct
  source 1..110: mol_type = other DNA
ctccaacgctgcgcgaagcctccctgaactctttagtggaaactcttaaactccctctggaaaggaggggttaagagttggagggtctgccataatccctgtgcaagtgt

SEQ ID NO: 61945 - DNA, 110 bp, synthetic construct
  source 1..110: mol_type = other DNA
aggacgggagttctgtagaaaagggaaccagaggaaggaagaaagccagccaatgccgctgccttacctcatgccggggacagtcgtcacgctgtgagagcctctctccg

SEQ ID NO: 61946 - DNA, 110 bp, synthetic construct
  source 1..110: mol_type = other DNA
ggtctcaacaaagtgcttgaaggtcagattcagaataacctcccagtttaacatacagctgctgaacttgaggctgctaacttcttcctctcccggaagctcttgcctcc

SEQ ID NO: 61947 - DNA, 110 bp, synthetic construct
  source 1..110: mol_type = other DNA
ctggaggctgtttatctcaaggaagatgcctggagccttccccccagacataaatggaggatcccagaacgtgtgaacatgcatcctctgactgggtaccggtcagctgt

SEQ ID NO: 61948 - DNA, 110 bp, synthetic construct
  source 1..110: mol_type = other DNA
accccctccctgttgagagtttccaggtatgtgaaggctatccagtaccaggtaacaccaggtatgactgtggcgggggcagcgggagctgggctggtgggtgctcgtct

SEQ ID NO: 61949 - DNA, 110 bp, synthetic construct
  source 1..110: mol_type = other DNA
caccaggtatgactgtggcgggggcagcgggagctgggctggtgggtgctcgtctcccttggccacctgccccggagagaggaagccagtcgttggccactccaggtccc

SEQ ID NO: 61950 - DNA, 110 bp, synthetic construct
  source 1..110: mol_type = other DNA
gatgcgtgtgtctttatgacgatcttcatgaagattctgagggcaagaccattaccctcggggtcaagctcagtgtcaccaccgacaacgttgaagccaaaataaaaaaa

SEQ ID NO: 61951 - DNA, 110 bp, synthetic construct
  source 1..110: mol_type = other DNA
cctcggggtcaagctcagtgtcaccaccgacaacgttgaagccaaaataaaaaaacatgcctggcctcctgcctcaccagcagagtctgattttgcagacaaacaactga

SEQ ID NO: 61952 - DNA, 110 bp, synthetic construct
  source 1..110: mol_type = other DNA
agccacgttgggaactctcattctttgtttttgcagcactgccctcactccatcttctaattgatcaataaaactaaagtgtaaagctcttttttttttctgattttttt

SEQ ID NO: 61953 - DNA, 110 bp, synthetic construct
  source 1..110: mol_type = other DNA
tctaattgatcaataaaactaaagtgtaaagctcttttttttttctgatttttttttccttccttatttttgagatggatcttaataagactgaggaggtgctggcgaag

SEQ ID NO: 61954 - DNA, 110 bp, synthetic construct
  source 1..110: mol_type = other DNA
acacgtgtaagtctgcacgcacttccctggacacggcagtgctgccggatatcatgtatttcacatcctcagaacttacttcgtcagactgggcttccatcacccagtcc

SEQ ID NO: 61955 - DNA, 110 bp, synthetic construct
  source 1..110: mol_type = other DNA
gtatttcacatcctcagaacttacttcgtcagactgggcttccatcacccagtccttcccagtccttcccagtccttcccagtcccagggtatggtgattgtgggacagc

SEQ ID NO: 61956 - DNA, 110 bp, synthetic construct
  source 1..110: mol_type = other DNA
gtggacctcataatgaaaattgtcacagcagtaattttcatatctgggggttctgaatcattagtattttcattttaaatgttctcttcaggagtaaaagaaccagttat

SEQ ID NO: 61957 - DNA, 110 bp, synthetic construct
  source 1..110: mol_type = other DNA
aatcattagtattttcattttaaatgttctcttcaggagtaaaagaaccagttatactgcagtatttgtcaccagcttatattttattgctaatcattgtggcagtgaag

SEQ ID NO: 61958 - DNA, 110 bp, synthetic construct
  source 1..110: mol_type = other DNA
aaaggcatctagtcaagacccgcctgcccactcagccaggcaggtgcatgggtacaattatccacttgtttatgaagaagaaggcagagggcagagagtacaatgtgcgt

SEQ ID NO: 61959 - DNA, 110 bp, synthetic construct
  source 1..110: mol_type = other DNA
cctcggcccccagttggatcctcggtgataattgggtgtttcccaggcaagtaggagagagtctttctccacttggagaaacaagctgagtcactgtaaatccagcaagt

SEQ ID NO: 61960 - DNA, 110 bp, synthetic construct
  source 1..110: mol_type = other DNA
agagagtctttctccacttggagaaacaagctgagtcactgtaaatccagcaagtctttatgttttcgagctgagtcactataaatccagcaagtctttaagtgctgtga

SEQ ID NO: 61961 - DNA, 110 bp, synthetic construct
  source 1..110: mol_type = other DNA
gagaagcttgtcgggctactggctcgtgcatgatggaggcttgctcagtggcataaaggctctttaccggtttctccgcagtataatcccttaggaaaatgttaaattca

SEQ ID NO: 61962 - DNA, 110 bp, synthetic construct
  source 1..110: mol_type = other DNA
aaggctctttaccggtttctccgcagtataatcccttaggaaaatgttaaattcatacttcgcgaggccgtccccgaggaaagttccagcagtcgtatttcacaatctaa

SEQ ID NO: 61963 - DNA, 110 bp, synthetic construct
  source 1..110: mol_type = other DNA
cgggttcttcacctgctgagccacgatgggaacccctctctgtggttctgagagcatcgtctgcagtgataaccagattacaggatcaagatgaaaagctcactcagcag

SEQ ID NO: 61964 - DNA, 110 bp, synthetic construct
  source 1..110: mol_type = other DNA
atcgtctgcagtgataaccagattacaggatcaagatgaaaagctcactcagcagtctcgtgtgtggatccttccccatcgagctccccgcctcctccccagcctgttcc

SEQ ID NO: 61965 - DNA, 110 bp, synthetic construct
  source 1..110: mol_type = other DNA
agttatccaagttcttagtcagtttgggctgcagccacaagcaagatgctgtagactgggtggcttaaatgacatttatttctcatggttctggaggcggaagctctagg

SEQ ID NO: 61966 - DNA, 110 bp, synthetic construct
  source 1..110: mol_type = other DNA
ctgggtggcttaaatgacatttatttctcatggttctggaggcggaagctctaggatccagggctgagaggtggggcgtggtgaggtctctcgtcctggcttgcaccttc

SEQ ID NO: 61967 - DNA, 110 bp, synthetic construct
  source 1..110: mol_type = other DNA
ggtaaatgccgagtctgcgtccagagacagacagggcagagtcctgactgtgaatatgttagatgatcacccaggtcatttcacataaatagtaaacatttggtggcgtc

SEQ ID NO: 61968 - DNA, 110 bp, synthetic construct
  source 1..110: mol_type = other DNA
atgttagatgatcacccaggtcatttcacataaatagtaaacatttggtggcgtctgcaacgacactgtatattgtggtttccctggggaaagatgatgctttttagctt

SEQ ID NO: 61969 - DNA, 110 bp, synthetic construct
  source 1..110: mol_type = other DNA
atgctaggaggtaggtgtcaagactgatggatctggggttctaccttacctgcaagcttacaaattgggcgggttggtttcacggatgcttctagaacaggagactcgtg

SEQ ID NO: 61970 - DNA, 110 bp, synthetic construct
  source 1..110: mol_type = other DNA
gcttacaaattgggcgggttggtttcacggatgcttctagaacaggagactcgtgggtcagagaggagaggaaaggctttattattcacagccagagcagtagccattca

SEQ ID NO: 61971 - DNA, 110 bp, synthetic construct
  source 1..110: mol_type = other DNA
gtctgatgcaggataggtagtatgttttcctgaacagaagttaactgtagattttacagcaaacttgaaaatcaagttccctataagctagtgggctatcacagctaaac

SEQ ID NO: 61972 - DNA, 110 bp, synthetic construct
  source 1..110: mol_type = other DNA
acagcaaacttgaaaatcaagttccctataagctagtgggctatcacagctaaacaatttagcctagatttttttgtgtctctagagtgatttttaacctcaggagcagt

SEQ ID NO: 61973 - DNA, 110 bp, synthetic construct
  source 1..110: mol_type = other DNA
tatgcaggcctgagtcactttgctgcacagccgaaacgggccccatactgtacctcaactatactttaatagaaaagggggaaaaacaaagaggaataacagcttgaaag

SEQ ID NO: 61974 - DNA, 110 bp, synthetic construct
  source 1..110: mol_type = other DNA
gcagatgacactggtccaagaggggtgactcttatggggggtcctctcaggtgaaccttccacggctcctcacactgagggcgtgtctcctcgtgtctggaacacactgc

SEQ ID NO: 61975 - DNA, 110 bp, synthetic construct
  source 1..110: mol_type = other DNA
ccttccacggctcctcacactgagggcgtgtctcctcgtgtctggaacacactgctccaagccttcgtaggtgaaaaaaatggaacccaaacgcatttttccagctttac

SEQ ID NO: 61976 - DNA, 110 bp, synthetic construct
  source 1..110: mol_type = other DNA
agtgtacagccggagcgcgtgagctcctgtggggccggagctattgccgtgactgtaatgaaagggccccagccccggatgcttagtctgactctaaatgcagggtccgc

SEQ ID NO: 61977 - DNA, 110 bp, synthetic construct
  source 1..110: mol_type = other DNA
ggtcatttgagtgtggtcatcattgcaaaatccaggtcaatgtcatcctagttcaagtcagctcaaagtaaagctaattcaagctatgtgacatccctcataactggctt

SEQ ID NO: 61978 - DNA, 110 bp, synthetic construct
  source 1..110: mol_type = other DNA
gatgataggtccccatgctgttataacagagtttgaagaggaaaactgggcttcaaagccagatgtccaacttttctccagcgagctgtcttacccgaagcccaaggcca

SEQ ID NO: 61979 - DNA, 110 bp, synthetic construct
  source 1..110: mol_type = other DNA
aagccagatgtccaacttttctccagcgagctgtcttacccgaagcccaaggccacttgggacactgcagtctctgtattttatttaggattttctttctgccccaaggc

SEQ ID NO: 61980 - DNA, 110 bp, synthetic construct
  source 1..110: mol_type = other DNA
tccctccttgcggccccaattcaacctgccctgctcatggcctctgagctccctgggataactcctgaaggtagcaaagagctgcgatgggacagaccttgtaccacaca

SEQ ID NO: 61981 - DNA, 110 bp, synthetic construct
  source 1..110: mol_type = other DNA
cttcttcttcttcttttttttttttttcctttttacaaccacacctgtggcatatggaacttcctaggctaggggttgaactggacacgcagctaggacttacaccatag

SEQ ID NO: 61982 - DNA, 110 bp, synthetic construct
  source 1..110: mol_type = other DNA
ggaacttcctaggctaggggttgaactggacacgcagctaggacttacaccatagccacagcaatactaggtccaagctgaatctgcaaactctgctgcagcttgtggca

SEQ ID NO: 61983 - DNA, 110 bp, synthetic construct
  source 1..110: mol_type = other DNA
ttaggtgagagtcatggcatagctgaacatcagtggaaatatcactgagattttggtggaaataatctcctaataggaaaaaacatctcttatgcagcagaccttaggat

SEQ ID NO: 61984 - DNA, 110 bp, synthetic construct
  source 1..110: mol_type = other DNA
ggacgagacgtgaggaggagctggcaggagggtgcagagcaggtgcgagaggacggaacgagcagagttactcggagagggccttatgctgtgactatggcaataagaaa

SEQ ID NO: 61985 - DNA, 110 bp, synthetic construct
  source 1..110: mol_type = other DNA
gtctggcttatttcacttagtgaaatttctaggtccatccctgtggctgcaaatggcgttatttcattctctttgatggtgagtaatattctattgcatatacatatgac

SEQ ID NO: 61986 - DNA, 110 bp, synthetic construct; identical to SEQ ID NO: 61985
  source 1..110: mol_type = other DNA

SEQ ID NO: 61987 - DNA, 110 bp, synthetic construct
  source 1..110: mol_type = other DNA
acttgggagtattcgcctgagcgttgacacctgtgggtataagaaaaatatccccgctgggccaacaggcccctggaatgacaagaggggacagcgtgagatgctaatgc

SEQ ID NO: 61988 - DNA, 110 bp, synthetic construct
  source 1..110: mol_type = other DNA
gctgggccaacaggcccctggaatgacaagaggggacagcgtgagatgctaatgcaggttcagaaacagtgtccgctccctcgagccggccacaggggacatcgggcaga

SEQ ID NO: 61989 - DNA, 110 bp, synthetic construct
  source 1..110: mol_type = other DNA
ggtcactgtgtctcactgtatcccctgctgctctgactgaagccaaaagtcacataggagcagctggaagaacaggtgatggaatattctccagaccatcattcatgaat

SEQ ID NO: 61990 - DNA, 110 bp, synthetic construct
  source 1..110: mol_type = other DNA
tgatggcaggcatttggtacttctaaagcaattaaaagcaggcttgctaaaaaggccaaattcgtatccactttaaataaacgctacccctatggaacactacaatttag

SEQ ID NO: 61991 - DNA, 110 bp, synthetic construct
  source 1..110: mol_type = other DNA
ccaaattcgtatccactttaaataaacgctacccctatggaacactacaatttagaaagatctaaaccaatgacagaccatgaaccatttcacaccagactgcttgctct

SEQ ID NO: 61992 - DNA, 110 bp, synthetic construct
  source 1..110: mol_type = other DNA
gaggctgaggattacgtacaaagactgactccatgaggacgtgatgaagaaccacttccgctgtcaagctccaggaacaccggagagagaattaaacaaggatatgtgca

SEQ ID NO: 61993 - DNA, 110 bp, synthetic construct
  source 1..110: mol_type = other DNA
ccttctgggacgggagcctggagcttccctctaaccgcgacaagataaaggtgcgatcaaatctctactccggctcaacccaatgccaggagtctcacccggaaaaagag

SEQ ID NO: 61994 - DNA, 110 bp, synthetic construct
  source 1..110: mol_type = other DNA
agtttctctctcagcctcagcactggggttcactgatttacagagcagcgctgtgcaggtagacagagctctgagaaaacacatgccatccttctggccaacggactcag

SEQ ID NO: 61995 - DNA, 110 bp, synthetic construct
  source 1..110: mol_type = other DNA
caggtagacagagctctgagaaaacacatgccatccttctggccaacggactcagggggtaaagccgagggagcccacagtgggagggcaactcatgaggcaactgatgc

SEQ ID NO: 61996 - DNA, 110 bp, synthetic construct
  source 1..110: mol_type = other DNA
tgggtttctactcagcatcatcaggcaaggcacaccgatctattaaaacggtccctctagtctaaactgttaacctgtcttatcatataataacatattatcacagcaat

SEQ ID NO: 61997 - DNA, 110 bp, synthetic construct
  source 1..110: mol_type = other DNA
ggggcgcccagctccagcatcactcaggcgtgtgtgggtccctccagcctcccacgtggggttgtcttcgtacatggagctgtggatcggagctttcattaacctcggct

SEQ ID NO: 61998 - DNA, 110 bp, synthetic construct
  source 1..110: mol_type = other DNA
cacacacacacacagtagtgtgtgattccatcacctgagctgtgtggagaagtagattcctagagtggcaaagtcgaatgacggttgtcaggagctggggtgtcgcaggg

SEQ ID NO: 61999 - DNA, 110 bp, synthetic construct
  source 1..110: mol_type = other DNA
ggcctgctttgattgagcagacaggccggtgtgcgggttgaaggtggctcttctgaaaggtgtccagcataaatgagcaggcttggtcgaggtcgccttcagctgggccc

SEQ ID NO: 62000 - DNA, 110 bp, synthetic construct
  source 1..110: mol_type = other DNA
tgctgatgggctgctcacgtgccccctcaccagaactgtcaagtcacctggaatggcactggggaatagggaaccctcgagacacaacatcgtgcctgcagggcaggcgt

SEQ ID NO: 62001 - DNA, 110 bp, synthetic construct
  source 1..110: mol_type = other DNA
acggacgcctggagagaccaggcgttttcacaactaggaccctcctacggcagagatgggaggacacgcagggcattttgcacgtttccatctccctgtttcatctggga

SEQ ID NO: 62002 - DNA, 110 bp, synthetic construct
  source 1..110: mol_type = other DNA
atgggaggacacgcagggcattttgcacgtttccatctccctgtttcatctgggaccctgggcggaagccccaggtcaccccaccttggtcgccccccaacccgttctct

SEQ ID NO: 62003 - DNA, 110 bp, synthetic construct
  source 1..110: mol_type = other DNA
tggtttgtgaaataaacccgacagagaaagacaaatactgtattctacttacacgcagaatctaagaaattacacaaatgaatgtatatgcaaaacggaaacagatacag

SEQ ID NO: 62004 - DNA, 110 bp, synthetic construct
  source 1..110: mol_type = other DNA
cacagagagaacaagtgttccccgtcttcgccaacagagggcagtctcggcgcgctgccgacgcctctcccctctgagagtccacggattacagcatctcctaaactaag

SEQ ID NO: 62005 - DNA, 110 bp, synthetic construct
  source 1..110: mol_type = other DNA
tgccgacgcctctcccctctgagagtccacggattacagcatctcctaaactaagtgcgaagtgaaaaccacattcctccagcccccgccaaacccccccgccccttccc

SEQ ID NO: 62006 - DNA, 110 bp, synthetic construct
  source 1..110: mol_type = other DNA
agtgtcttgctggtgcctcttcagaccctccttccacccggcaccccaatgtcgtcgtctgcaaggctccctctagcttctaggacctggtattacaggtgggctgttgg

SEQ ID NO: 62007 - DNA, 110 bp, synthetic construct
  source 1..110: mol_type = other DNA
tttaatatgagctcctattagccgtgttcacacaagcgacaccgtaacccggcagagttacttcctagagccgcagccccaaggtcagagggctaccgagcctcactgga

SEQ ID NO: 62008 - DNA, 110 bp, synthetic construct
  source 1..110: mol_type = other DNA
gaggcttggccacgagtactagctcttgcgacacccagtcaccttcgagaagcacagagctgctcagcatcacagcagacttaacaaaagacgccaaaggaagggcgaag

SEQ ID NO: 62009 - DNA, 110 bp, synthetic construct
  source 1..110: mol_type = other DNA
agagctgctcagcatcacagcagacttaacaaaagacgccaaaggaagggcgaagccccacagggtccgtcaatgcctgtgctgaccgctacagtggcagaacgcaatcc

SEQ ID NO: 62010 - DNA, 110 bp, synthetic construct
  source 1..110: mol_type = other DNA
cgctgtctcctatcgtttgtactttgatcatttccaggcccggcgcagacttttactgttagaaagggctctgggcattcttgctgtggctcagtggcttaagaaccaga

SEQ ID NO: 62011 - DNA, 110 bp, synthetic construct
  source 1..110: mol_type = other DNA
cggtgacaacagggacaggacagattccatcggggcaggaatcacacccaacacttgaggtgctgacaccctacagcccctgaaggtagggagagtggtacgcaggttcc

SEQ ID NO: 62012 - DNA, 110 bp, synthetic construct
  source 1..110: mol_type = other DNA
tgaggtgctgacaccctacagcccctgaaggtagggagagtggtacgcaggttcccacacaatgtcaataaaagtaaaacaaatgaccacaacttttaaaactttttaaa

SEQ ID NO: 62013 - DNA, 110 bp, synthetic construct
  source 1..110: mol_type = other DNA
ggggtttttgttagtttaaagtgtttaaacgagagcgttctagtaggagttcccactatggctctgcaggttaaggacctgacattgtctctgcgtggatttggggatcc

SEQ ID NO: 62014 - DNA, 110 bp, synthetic construct
  source 1..110: mol_type = other DNA
ttaaagtgtttaaacgagagcgttctagtaggagttcccactatggctctgcaggttaaggacctgacattgtctctgcgtggatttggggatccatccctggccttgct

SEQ ID NO: 62015 - DNA, 110 bp, synthetic construct
  source 1..110: mol_type = other DNA
cacagcccgcggccccacggctgcagcacctgcacaaacagccctgctcgttgccaccgcctcggctggggaactggaccacagttccgaatggacccaacgtcacaatt

SEQ ID NO: 62016 - DNA, 110 bp, synthetic construct
  source 1..110: mol_type = other DNA
accgcctcggctggggaactggaccacagttccgaatggacccaacgtcacaattttgaaattcacgagtcacgagttcgcttcttggcttttcccccaagcctctctct

SEQ ID NO: 62017 - DNA, 110 bp, synthetic construct
  source 1..110: mol_type = other DNA
tgtgacctggcacccggtcttctgaacctgctcgggctgcttttacaaaataccagagaccgggtagttgataagcaacagaccagccctgcacacaattctgggctggg

SEQ ID NO: 62018 - DNA, 110 bp, synthetic construct
  source 1..110: mol_type = other DNA
gagaccgggtagttgataagcaacagaccagccctgcacacaattctgggctgggacgccaaggtcagtgcctgtgtgaaccaggggagaaagggaccacagacggctcg

SEQ ID NO: 62019 - DNA, 110 bp, synthetic construct
  source 1..110: mol_type = other DNA
atctgagtacaagcgacaggtgacctccacacaccaggtccctctgtatccacatgtccccatccatgcattcggccagctgtggatgctgtcctatccaaagagtccag

SEQ ID NO: 62020 - DNA, 110 bp, synthetic construct
  source 1..110: mol_type = other DNA
agggcatagatttggggctagaactgttggttagtacataaagtcccctggagatgggatctccagtcctgtgacacaggtactgggtcccctggtcagcttttgttggg

SEQ ID NO: 62021 - DNA, 110 bp, synthetic construct
  source 1..110: mol_type = other DNA
gggatctccagtcctgtgacacaggtactgggtcccctggtcagcttttgttgggagcaagactatgtatgattaaagaaatgagaacagcaggtgtctcttggaggtgg

SEQ ID NO: 62022 - DNA, 110 bp, synthetic construct
  source 1..110: mol_type = other DNA
tgcctggaattctgccttctctgctcgctcaggccttccgcccacaccagacctttgaaagtggcctttcaaagacatcacagcaggtatgtctttccgccgctccaagt

SEQ ID NO: 62023 - DNA, 110 bp, synthetic construct
  source 1..110: mol_type = other DNA
tgaaagtggcctttcaaagacatcacagcaggtatgtctttccgccgctccaagtaccagctcccagaagtagcccctccatcctggtccctctctccgaccctgcctgg

SEQ ID NO: 62024 - DNA, 110 bp, synthetic construct
  source 1..110: mol_type = other DNA
catctgaagatgcatcactctgactgctctctgtggacatgtttgcaggtggcatagctccggacgggcagatggcagagctgccccgaccaggttagcactgagggagt

SEQ ID NO: 62025 - DNA, 110 bp, synthetic construct
  source 1..110: mol_type = other DNA
gggatctgtaacaaatcatctttccgagggggggtcctttcctgatttgctggccccaggagccctaaagaatcataaaaccagtattaaaacagcgagcgtgcccagct

SEQ ID NO: 62026 - DNA, 110 bp, synthetic construct
  source 1..110: mol_type = other DNA
ccaggagccctaaagaatcataaaaccagtattaaaacagcgagcgtgcccagctgggtacacataagctgctgagctcaggtatctcagactcagagatgcacaaggct

SEQ ID NO: 62027 - DNA, 110 bp, synthetic construct
  source 1..110: mol_type = other DNA
cagcccttgaaagcggacaacgtctgggctccggcctgactcggaagatgcttaaaaggcatcattctcatccccacaacaaaaagaaaagctgaacaggcattcctgtt

SEQ ID NO: 62028 - DNA, 110 bp, synthetic construct
  source 1..110: mol_type = other DNA
aaaggccatttacattagaaaggggccctttcaggaagagctgtcaccagagcagtgagagaagtacctttgctcactaagtggtctgctcttctccccttggaagccca

SEQ ID NO: 62029 - DNA, 110 bp, synthetic construct
  source 1..110: mol_type = other DNA
ctgagagtcctctgttctttcggtgtgtgtaaatctgtacgtaacgctcatcctttttaagacctatatttcgtattgataactggacttccagaaagatagctaccctg

SEQ ID NO: 62030 - DNA, 110 bp, synthetic construct
  source 1..110: mol_type = other DNA
tttaagacctatatttcgtattgataactggacttccagaaagatagctaccctgaagagtattcgccaacagcggcgctggggatcatcctgctgctgtcgaagaagtg

SEQ ID NO: 62031 - DNA, 110 bp, synthetic construct
  source 1..110: mol_type = other DNA
cttcggctctaatgaaagaagaaaatcattaggcgctgggacgtgggcacacttggcaatgacgctgttgaccgcgagctccggcctccttctgtgaccttccctcagca

SEQ ID NO: 62032 - DNA, 110 bp, synthetic construct
  source 1..110: mol_type = other DNA
gcaatgacgctgttgaccgcgagctccggcctccttctgtgaccttccctcagcatcacaaccatgtgctgttctgacacaaggtcttcgtctctccaagaaggggattt

SEQ ID NO: 62033 - DNA, 110 bp, synthetic construct
  source 1..110: mol_type = other DNA
catttaaaatcaccacctcccctctcctggctgtggtttcaaggttcttttctcttcccaattaatggcaccgtcactaatacctgccatcacaaataactgccatgatc

SEQ ID NO: 62034 - DNA, 110 bp, synthetic construct
  source 1..110: mol_type = other DNA
tcccaattaatggcaccgtcactaatacctgccatcacaaataactgccatgatctcactcaagcttgctttctctcctctttctttctttttttcatttaatcaacaat

SEQ ID NO: 62035 - DNA, 110 bp, synthetic construct
  source 1..110: mol_type = other DNA
atagaccatagactcacttgatcatgacacattctcttttatgcattcctggattcaagctaaacatattttgttgaggattttgtgcctaaattcatgaaaaatactgg

SEQ ID NO: 62036 - DNA, 110 bp, synthetic construct
  source 1..110: mol_type = other DNA
agaaattcaggaaggaagtgcttaaaggagggaaacgatcctgcaaaggtgagacgggaggtaagtgctctgggagaccgggcgagctggtttggtgcagccctcacgga

SEQ ID NO: 62037 - DNA, 110 bp, synthetic construct
  source 1..110: mol_type = other DNA
gggaggtaagtgctctgggagaccgggcgagctggtttggtgcagccctcacggaggcagagctgcacagcttgcatagagttaccccaaagccctcagctgcacactca

SEQ ID NO: 62038 - DNA, 110 bp, synthetic construct
  source 1..110: mol_type = other DNA
tgttctttatttcttgcttgtgaagaaatgtctacgcaccgtctcagactcgcacgagattacccataggtagagagctgtaaacagtgttacagagaacttgctctact

SEQ ID NO: 62039 - DNA, 110 bp, synthetic construct
  source 1..110: mol_type = other DNA
gagattacccataggtagagagctgtaaacagtgttacagagaacttgctctacttggccagcgcagcatgaagatagaagctgccctgtagcccaggaaaacccctgtg

SEQ ID NO: 62040 - DNA, 110 bp, synthetic construct; identical to SEQ ID NO: 62038
  source 1..110: mol_type = other DNA

SEQ ID NO: 62041 - DNA, 110 bp, synthetic construct; identical to SEQ ID NO: 62039
  source 1..110: mol_type = other DNA

SEQ ID NO: 62042 - DNA, 110 bp, synthetic construct
  source 1..110: mol_type = other DNA
tttggcgatagagttaataacagctcggctttgcaaaagttctccttaagagaataatatgccaaaccacagactgggagaaaatctttgcaaaacatacatctgtcaat

SEQ ID NO: 62043 - DNA, 110 bp, synthetic construct
  source 1..110: mol_type = other DNA
ctgagccacagcaggaactccctcatttcattttcttggtataagtcagcttaggcatccttatcttgcagagaccctggtgttgccaaggcccctttgggctttggttt

SEQ ID NO: 62044 - DNA, 110 bp, synthetic construct
  source 1..110: mol_type = other DNA
catccttatcttgcagagaccctggtgttgccaaggcccctttgggctttggtttggagaaccctgggttaattccccctcgtctgctcactttcccctaagttggctgc

SEQ ID NO: 62045 - DNA, 110 bp, synthetic construct
  source 1..110: mol_type = other DNA
aggtagattaatatggataatgatacataacagggcagtaaatcattatgtgcttcactcttttcatggtgtagatgataatgatatgaaagaactggaagaatgagcta

SEQ ID NO: 62046 - DNA, 110 bp, synthetic construct
  source 1..110: mol_type = other DNA
cactcttttcatggtgtagatgataatgatatgaaagaactggaagaatgagctaaatattgaaaaagattactggtagcttgactgtcgtgaagtagagaactggagag

SEQ ID NO: 62047 - DNA, 110 bp, synthetic construct
  source 1..110: mol_type = other DNA
gtgtgtccggttttcataaattctgctacatccaaggtgccatctccttactcccaaccactcccatctccaccagctactccgccgaacccccttctagagttaaaggg

SEQ ID NO: 62048 - DNA, 110 bp, synthetic construct
  source 1..110: mol_type = other DNA
aaccactcccatctccaccagctactccgccgaacccccttctagagttaaagggacagtccaggtctacacatagggccttgtgtgataatcacatctgagagaatcac

SEQ ID NO: 62049 - DNA, 110 bp, synthetic construct
  source 1..110: mol_type = other DNA
tccatgctttgcctcataaaaataacagcaagttgatttttcttcattgcgtttttctctgcagagctttatgtttctttgtgaggctgctgaagttttaccacgctctt

SEQ ID NO: 62050 - DNA, 110 bp, synthetic construct
  source 1..110: mol_type = other DNA
gtctagacttttttggttgtatcactagatcttattaatatgaagggaattagaattctgggttaattgaaacagcattctgaggagtaggagatattgttgttatagag

SEQ ID NO: 62051 - DNA, 110 bp, synthetic construct; identical to SEQ ID NO: 62050
  source 1..110: mol_type = other DNA

SEQ ID NO: 62052 - DNA, 110 bp, synthetic construct
  source 1..110: mol_type = other DNA
agaaattaacacccctattgtaaaaaggcaaaaattgtatcttccttatgacaatttagtgataccaccctcaatgccaccatcatcatcagtttcagatacaacttctg

SEQ ID NO: 62053 - DNA, 110 bp, synthetic construct
  source 1..110: mol_type = other DNA
ttgggaggcatctgttcttctagagagactcttaaatgtagggtctaaagcccacactccttagggagaagctgggagctgcatctttggtcccagttggatggcattgt

SEQ ID NO: 62054 - DNA, 110 bp, synthetic construct
  source 1..110: mol_type = other DNA
actccttagggagaagctgggagctgcatctttggtcccagttggatggcattgtattaggagagagttttatgatgagagggtgtctcagcctttcctgtccattctta

SEQ ID NO: 62055 - DNA, 110 bp, synthetic construct
  source 1..110: mol_type = other DNA
ttgataattctttgtggaaatctgtagcaagacctaaacactggggtgctgtgtcctctgaggagcatcggcccgtctgtagggacacggggatggaccaagagttgata

SEQ ID NO: 62056 - DNA, 110 bp, synthetic construct
  source 1..110: mol_type = other DNA
acgtgtgtttgctatgggacaggcattttccaccttctggggtgcacagttggtgccaaaaggcactgggtacgttgagtatcagggagattataagtctggcatcgtaa

SEQ ID NO: 62057 - DNA, 110 bp, synthetic construct
  source 1..110: mol_type = other DNA
ccaaaaggcactgggtacgttgagtatcagggagattataagtctggcatcgtaaaagcttggaagcacattcttgctccctcgttcttggtcaagaaggggcgattttt

SEQ ID NO: 62058 - DNA, 110 bp, synthetic construct
  source 1..110: mol_type = other DNA
gcctttaaaaatgaaggtgatcaggattcagcagaacgatggagaaagaccacggagtaactttctctatcattttataaggggatttcatcagtatagagcccctgcgt

SEQ ID NO: 62059 - DNA, 110 bp, synthetic construct
  source 1..110: mol_type = other DNA
gtaactgtgtggacatgagcctcttggccaacctaaatagctgtcattcatcatataattagcagcattattttaagcttacgtgcctctgcatctagttacccatctct

SEQ ID NO: 62060 - DNA, 110 bp, synthetic construct
  source 1..110: mol_type = other DNA
taattagcagcattattttaagcttacgtgcctctgcatctagttacccatctctaacaaaattgaaagattctttgccaaaagtcaaatggaaggatggacttgaggtt

SEQ ID NO: 62061 - DNA, 110 bp, synthetic construct
  source 1..110: mol_type = other DNA
ttactgggtaaaactctgtcctccagttctatgaactttttgttcagctctggcggaatgaattgactaaatgcctctaggtagctttcgtctcttcaaattgttgccct

SEQ ID NO: 62062 - DNA, 110 bp, synthetic construct
  source 1..110: mol_type = other DNA
ttcgggcgcttctgggatagtcaaagataaaagcaagtgtatttaaacacagcaggtgcaggcaaaagtggatggccagggacgcacctagtacttttgagagtgaagta

SEQ ID NO: 62063 - DNA, 110 bp, synthetic construct
  source 1..110: mol_type = other DNA
gtgcaggcaaaagtggatggccagggacgcacctagtacttttgagagtgaagtacggttctctgaggttggacagaagaatctaagctgagatctggtggacggacggg

SEQ ID NO: 62064 - DNA, 110 bp, synthetic construct
  source 1..110: mol_type = other DNA
tgatttattaaagagtggttgatagacgtttattaatgcatagttgtctgcatctctgctccgggacccaggcacacgcgtgcacacacgtgtgcgcgcgtgttcttcct

SEQ ID NO: 62065 - DNA, 110 bp, synthetic construct
  source 1..110: mol_type = other DNA
ctgctccgggacccaggcacacgcgtgcacacacgtgtgcgcgcgtgttcttcctcacaccaccttccatcacgttctgccccaggaagatggctgtggtcccgggctgc

SEQ ID NO: 62066 - DNA, 110 bp, synthetic construct
  source 1..110: mol_type = other DNA
ggacatgcaaatcagaaccaccattggcgaccacttcacaccactcaggatggctctttacaaaaagacaagcgagagcaaggctgggcaaggatgggaggaaaggaaca

SEQ ID NO: 62067 - DNA, 110 bp, synthetic construct
  source 1..110: mol_type = other DNA
ctttacaaaaagacaagcgagagcaaggctgggcaaggatgggaggaaaggaacacttgggcagggctggtgggaatgcgcatttgtgcagccgcttggaaaacagtgtg

SEQ ID NO: 62068 - DNA, 110 bp, synthetic construct
  source 1..110: mol_type = other DNA
tcaatccaatgcatcacttaataacgagaataaacccaggccaaatattgtcctcttaactttgtccttataatttgtggcactcttgtatagaacccttgaaaagttta

SEQ ID NO: 62069 - DNA, 110 bp, synthetic construct
  source 1..110: mol_type = other DNA
ttaactttgtccttataatttgtggcactcttgtatagaacccttgaaaagtttagctaatctcattcttatggacatgaatgagcattaggctttttgtttcatgacaa

SEQ ID NO: 62070 - DNA, 110 bp, synthetic construct
  source 1..110: mol_type = other DNA
cctaccttgaactcagggaaacaggttacttagcagaactctccacttgctaaatacactgtaattgcgagaatcgttagcttaagtagtagcaatgcaaaaacaaatca

SEQ ID NO: 62071 - DNA, 110 bp, synthetic construct
  source 1..110: mol_type = other DNA
catttgctctagtgtatcaagaagcaacaagccaacttcattacattattttaacgaacatattttaaagtatgaaatatacagtcacccaaaatctcaccttcgaccaa

SEQ ID NO: 62072 - DNA, 110 bp, synthetic construct
  source 1..110: mol_type = other DNA
gaacatattttaaagtatgaaatatacagtcacccaaaatctcaccttcgaccaaggactgggttaggattgcctaaaagtagcattttgttcatctctattgccacatc

SEQ ID NO: 62073 - DNA, 110 bp, synthetic construct
  source 1..110: mol_type = other DNA
tgaagcgctgagtgaaaagcgggagatcatcacagacacagaagcagcaaccacagggtcatggcatcaagagcggatgccaatcgactggaaccctagataaaaggagt

SEQ ID NO: 62074 - DNA, 110 bp, synthetic construct
  source 1..110: mol_type = other DNA
gggtcatggcatcaagagcggatgccaatcgactggaaccctagataaaaggagtagtttgagaaatgcgtgtgatttcaacattggcacaacactacctgtggaacttg

SEQ ID NO: 62075 - DNA, 110 bp, synthetic construct
  source 1..110: mol_type = other DNA
ggtgacagctgaggcttaaggcagcgatacagcacgtgtccgagcagggccgagaacataatccctcaagtgggcaattatatggctcgttccagaaagaggggtccctg

SEQ ID NO: 62076 - DNA, 110 bp, synthetic construct
  source 1..110: mol_type = other DNA
acataatccctcaagtgggcaattatatggctcgttccagaaagaggggtccctgcgccgccagaggagaggaaaggcccgcagccggagggcgggcggagggcacgcgg

SEQ ID NO: 62077 - DNA, 110 bp, synthetic construct
  source 1..110: mol_type = other DNA
ttgaagggacagagaggttgatgtcattatctataagcctctgtaagagttgattttaaaatcctgccccaatcagtctgagaaaatggacatgcacaaaagcttatgct

SEQ ID NO: 62078 - DNA, 110 bp, synthetic construct
  source 1..110: mol_type = other DNA
tcgtggggagaaaagattactgcccaaagcagaaaaccagagatctcaagggaaggaatgtagtcttttctatgggaaggcgtaggggtctgggctccctgagatcaccc

SEQ ID NO: 62079 - DNA, 110 bp, synthetic construct
  source 1..110: mol_type = other DNA
gaatgtagtcttttctatgggaaggcgtaggggtctgggctccctgagatcacccccagttatccggggccggggctgggggctggcggctggcggctgctggttggcag

SEQ ID NO: 62080 - DNA, 110 bp, synthetic construct
  source 1..110: mol_type = other DNA
gtgcaatcatttatgtgggaagagaaactgagagagaatggatgtgtgtacctggatcattcaaccactttgttgtacaagataagttatcacagccttgtaaattaact

SEQ ID NO: 62081 - DNA, 110 bp, synthetic construct; identical to SEQ ID NO: 62080
  source 1..110: mol_type = other DNA

SEQ ID NO: 62082 - DNA, 110 bp, synthetic construct
  source 1..110: mol_type = other DNA
aatggcactctctgtaacacgtcagctacatgacatcacccaaggagccctgttaactatccaggaaaaccttcccttgtaggacatgtatgtcatcccacacaaatcaa

SEQ ID NO: 62083 - DNA, 110 bp, synthetic construct
  source 1..110: mol_type = other DNA
agctgcagggagaccaaactgcacacaggacaggatttaactcccccttcagcatgggtacaaacaggaatcctcaagttcaatggcaccctatatgctttgcatccttg

SEQ ID NO: 62084 - DNA, 110 bp, synthetic construct
  source 1..110: mol_type = other DNA
ttatgaggtcacaaaagcaagagactaaattggacagagtgccaacaccctccattccatttttttccccgtgtcatggtgctggctgagggtcaacgcagagacgtggg

SEQ ID NO: 62085 - DNA, 110 bp, synthetic construct
  source 1..110: mol_type = other DNA
gtggtaatatatggggttaacagattgatgaaggaaagtaagatctgtgtttatgcaacatggatcttagaggaactcagtatcttcaattttttaaaaattcagattcc

SEQ ID NO: 62086 - DNA, 110 bp, synthetic construct
  source 1..110: mol_type = other DNA
caacatggatcttagaggaactcagtatcttcaattttttaaaaattcagattccactgacgaagctgagctagagttattattatccgatctgaagaggaggatacatg

SEQ ID NO: 62087 - DNA, 110 bp, synthetic construct
  source 1..110: mol_type = other DNA
aaaattcttatagttaaaaatcagttggcaaaggcaccatgtgacacccggaaacaagcctgccttcatcttcctgctgctttcaggcactggcaggctgaaatttggtt

SEQ ID NO: 62088 - DNA, 110 bp, synthetic construct
  source 1..110: mol_type = other DNA
aagcctgccttcatcttcctgctgctttcaggcactggcaggctgaaatttggttcagatgcagtggcaaattccagagttcagctactgggacccttaatcagtaatgt

SEQ ID NO: 62089 - DNA, 110 bp, synthetic construct
  source 1..110: mol_type = other DNA
cattaaaatgtatccatatatatttctgattatactcttaagacacgtgagttcgaaaagcagccaaacctagagatgtgtacaattattcctataccttatatgacgtt

SEQ ID NO: 62090 - DNA, 110 bp, synthetic construct
  source 1..110: mol_type = other DNA
aaaagcagccaaacctagagatgtgtacaattattcctataccttatatgacgttatgtatgtgaccatcctaaaatcagaggaaggaaggcacggagaaaatacgtcag

SEQ ID NO: 62091 - DNA, 110 bp, synthetic construct
  source 1..110: mol_type = other DNA
catgaacccaccacacccccaacggtaactccaaatcaaggatttttaacctcaggcccacagctaatactggtgggaaaaaaagagatgctccaaggtagtatgtataa

SEQ ID NO: 62092 - DNA, 110 bp, synthetic construct
  source 1..110: mol_type = other DNA
gcccacagctaatactggtgggaaaaaaagagatgctccaaggtagtatgtataactaattaagtagagaagtgaaacgcagaacttttaaatctgatatttagaatggc

SEQ ID NO: 62093 - DNA, 110 bp, synthetic construct
  source 1..110: mol_type = other DNA
ggacagagtacgtcattgcaggaagaactgaaggtcacagatggtcatgtactgagagcctctggctgcttgatattaacatcacgtggacagaagcaagctcctaagac

SEQ ID NO: 62094 - DNA, 110 bp, synthetic construct
  source 1..110: mol_type = other DNA
gagcctctggctgcttgatattaacatcacgtggacagaagcaagctcctaagaccgtgagggtgtcctcggaccaaacagaaaacgtttcagaaactttgggctgaaac

SEQ ID NO: 62095 - DNA, 110 bp, synthetic construct
  source 1..110: mol_type = other DNA
gcgtgagttcagattccagctcttcctccccatcttggaggctgaaaacccagctctgggtatctggtagtcaagatacatgattaccgcaaagggggggaccccaaggt

SEQ ID NO: 62096 - DNA, 110 bp, synthetic construct
  source 1..110: mol_type = other DNA
ctgggtatctggtagtcaagatacatgattaccgcaaagggggggaccccaaggtgaaaataaaaggggatcagcaccgttttggacagcctgggactcaggaggcaggg

SEQ ID NO: 62097 - DNA, 110 bp, synthetic construct
  source 1..110: mol_type = other DNA
gcatgtcactgtgcaattaaatgaccatagtggctgcactttagatgcttggctgagcaaagacttcaaattcactcgctcaatctcttaaaggatgctcagctaagaga

SEQ ID NO: 62098 - DNA, 110 bp, synthetic construct
  source 1..110: mol_type = other DNA
agcaaagacttcaaattcactcgctcaatctcttaaaggatgctcagctaagagaatcaatattcatgtcagcctctgggctctgtccttgaacatgcagttcatgctcc

SEQ ID NO: 62099 - DNA, 110 bp, synthetic construct
  source 1..110: mol_type = other DNA
agggagaaactgaggcatgggattttattgagagattgaagagacaggtattaaagttggtttccttgatacttccgtgtgttacataaaatcttcctcgtaaagatttt

SEQ ID NO: 62100 - DNA, 110 bp, synthetic construct
  source 1..110: mol_type = other DNA
gttggtttccttgatacttccgtgtgttacataaaatcttcctcgtaaagattttatttgttctttttttcaaccaatcacatgtgatgattttagaaaagccagcttca

SEQ ID NO: 62101 - DNA, 110 bp, synthetic construct
  source 1..110: mol_type = other DNA
caggaatctacacttctgagagttccattttttttctctcgtttttggccgacccacggcatatggagctcctgggccagggctcagatctcagccacggtagcgaccta

SEQ ID NO: 62102 - DNA, 110 bp, synthetic construct
  source 1..110: mol_type = other DNA
ctctcgtttttggccgacccacggcatatggagctcctgggccagggctcagatctcagccacggtagcgacctaagccgcagctggggcaataccggatccttaaccca

SEQ ID NO: 62103 - DNA, 110 bp, synthetic construct
  source 1..110: mol_type = other DNA
atgctggtggagtctttcccgaataacctccctctgctgcttcttccttcctcttcttcgtttataaggacttttgagatgctactggactcacctggagaatccaagac

SEQ ID NO: 62104 - DNA, 110 bp, synthetic construct
  source 1..110: mol_type = other DNA
attgtaaatcaactgtaccggaatacaagaaaaaagaagggatatatgtataatggaatcactctgttgtacagcagaaattatcatcaactatactgcaataacacttt

SEQ ID NO: 62105 - DNA, 110 bp, synthetic construct
  source 1..110: mol_type = other DNA
agaaaaaaagaaaaaaattaaacttcttgggggagatttagtgcttgatttgtcatcaatatgatagaatttacacggttgctgaaatggtaatcctgcacctgatttga

SEQ ID NO: 62106 - DNA, 110 bp, synthetic construct
  source 1..110: mol_type = other DNA
tcaatatgatagaatttacacggttgctgaaatggtaatcctgcacctgatttgaaaagaaaaggccgcctgttttaaactttgaaggaattctgtcaggagtatcatcc

SEQ ID NO: 62107 - DNA, 110 bp, synthetic construct
  source 1..110: mol_type = other DNA
ttatggtgcaggggatagagggcaggtgccgaagtactgctgtcttgggtagaactttgatactgtgtatccatatatatgatgtaaccttcatgtatagtacgtattac

SEQ ID NO: 62108 - DNA, 110 bp, synthetic construct
  source 1..110: mol_type = other DNA
tttgatactgtgtatccatatatatgatgtaaccttcatgtatagtacgtattacttgtatgccttacatacagatggttatacatacacataaagcatatatgtgtcca

SEQ ID NO: 62109 - DNA, 110 bp, synthetic construct
  source 1..110: mol_type = other DNA
ccgtggacttgtaggaatgcccttcagagtggaggtccagtggcccgaagccatatctggacaggaccagccattggggacctctttgccctttggctggatttttgcct

SEQ ID NO: 62110 - DNA, 110 bp, synthetic construct
  source 1..110: mol_type = other DNA
cagcatttgttatttgtagaatgtttgatgatggccactcttccccctgggaggtggtacctcattgtggtcttgatttacatgtctctaatcaaccagcttatcttgat

SEQ ID NO: 62111 - DNA, 110 bp, synthetic construct
  source 1..110: mol_type = other DNA
ctaggccagggcagagaccctgaagaagaatacatgtatatgtataactgaatcactgtgctatacacctgaaactaacacggcattgtaagtcagctgtactttcattg

SEQ ID NO: 62112 - DNA, 110 bp, synthetic construct
  source 1..110: mol_type = other DNA
ctgtgctatacacctgaaactaacacggcattgtaagtcagctgtactttcattgttaaaaacagcaggcgtttcatgagctaagcccttccctccacttgggaagatgg

SEQ ID NO: 62113 - DNA, 110 bp, synthetic construct
  source 1..110: mol_type = other DNA
acagctgttccggacaagagtcttgggggtgaacgatagaagaatgttctctgtgcctgcctggagagattaactcagccaccctccctcagtgacgtcctgtcacagcc

SEQ ID NO: 62114 - DNA, 110 bp, synthetic construct
  source 1..110: mol_type = other DNA
tattaagttgggggttattattcattatcattataagcggaattcggattatattcttgttggtcttctgggagtcttcacatcttttcaggagttaggttgaaactgtg

SEQ ID NO: 62115 - DNA, 110 bp, synthetic construct
  source 1..110: mol_type = other DNA
cttgttggtcttctgggagtcttcacatcttttcaggagttaggttgaaactgtgttgctaatgatactaaagtaacagttgcttttttgcactgagttgatgttgtctt

SEQ ID NO: 62116 - DNA, 110 bp, synthetic construct
  source 1..110: mol_type = other DNA
agaatggagatggcatggatgaccctcaccagaggagctgttgactcggatgtcttccgcaagtgagaatggggccatctcccccacccacctttggaacttcatttttt

SEQ ID NO: 62117 - DNA, 110 bp, synthetic construct
  source 1..110: mol_type = other DNA
cctgggctaaataccagctttctgtagggactgtgttcataattacagcaggaaccgcttcagtcctcatcttatcagcaattcctctgtgattaatacctcaggaggca

SEQ ID NO: 62118 - DNA, 110 bp, synthetic construct
  source 1..110: mol_type = other DNA
aaaatgcagcacaataattcttggtaccatctatcatagtacaaagatatgctataattgactatatttccagagtttctgtcatggttagaggaaacgaatctgactag

SEQ ID NO: 62119 - DNA, 110 bp, synthetic construct
  source 1..110: mol_type = other DNA
ctgggagaggagctgcaggagagggcagaggcggccccaggtccgtgctttcacggtgggcagagtcacgtccatgggctcgtcaggtcaggctgaatctcggacccttg

SEQ ID NO: 62120 - DNA, 110 bp, synthetic construct
  source 1..110: mol_type = other DNA
catctgaatttttcttaaatgttcttgtacattggagagtccccgtcatggtgcagcggaaactaagaaccatgaggttgtgtgttcgatccctgaccttgttcagcagg

SEQ ID NO: 62121 - DNA, 110 bp, synthetic construct
  source 1..110: mol_type = other DNA
taaatgttcttgtacattggagagtccccgtcatggtgcagcggaaactaagaaccatgaggttgtgtgttcgatccctgaccttgttcagcaggttaaggatccggcgt

SEQ ID NO: 62122 - DNA, 110 bp, synthetic construct
  source 1..110: mol_type = other DNA
gtgcctaactagggactagaattatcctttctttctctgtcctctgtatcccaatcactcattctggatgtgcagctgcctctgtccctttgggcactgctttagttcaa

SEQ ID NO: 62123 - DNA, 110 bp, synthetic construct
  source 1..110: mol_type = other DNA
tggtagaaccccccaccaagcgttcatgctcgagcttggggggcatatgcagaatgctggttaggaccagaggctccgcaggctgctgcctggctgggcgcttgaggccg

SEQ ID NO: 62124 - DNA, 110 bp, synthetic construct
  source 1..110: mol_type = other DNA
aggtggctgtgatcaaaagtggtactctggtggtactgtgtcctgtgatgaccagttccagtagagcaagccccccagagaacggccacttccactctgatcatgtggct

SEQ ID NO: 62125 - DNA, 110 bp, synthetic construct
  source 1..110: mol_type = other DNA
tgaggatcccacctgcacgacttcacgtaacatgtaacacgcgctcaggccccgtcttcaaacaccatcacactagagactccagcttccatggggatattctgggagcc

SEQ ID NO: 62126 - DNA, 110 bp, synthetic construct
  source 1..110: mol_type = other DNA
cttcaaacaccatcacactagagactccagcttccatggggatattctgggagccccagctcaggccttagcagtatttgtatctgtgtagatgggtcaagacaggaata

SEQ ID NO: 62127 - DNA, 110 bp, synthetic construct
  source 1..110: mol_type = other DNA
gctcaggctcttagaattctttgaaactcctcaagtctcctcaacacagtttcatataattctacaatccccagagccacataaaaatccaatgaaaagtgaaaacaaaa

SEQ ID NO: 62128 - DNA, 110 bp, synthetic construct
  source 1..110: mol_type = other DNA
gaatatgctctgtgaatgtgcaaaaataatatatagtctttgctgggtgtagcgttctaaccatcatagctgaagcttattagtgatactattcagatctttagagtggt

SEQ ID NO: 62129 - DNA, 110 bp, synthetic construct
  source 1..110: mol_type = other DNA
cctgggcttcctaagagcccggtagcctcagaacaatcacacttcacatgtgagtgccttacagaggagacgctctatgtggaagggggaaataatcttctgactgagtc

SEQ ID NO: 62130 - DNA, 110 bp, synthetic construct
  source 1..110: mol_type = other DNA
gccttacagaggagacgctctatgtggaagggggaaataatcttctgactgagtctcagcagtcctagaatgtcccttctgctgtatcctattcatcacagcagccccag

SEQ ID NO: 62131 - DNA, 110 bp, synthetic construct
  source 1..110: mol_type = other DNA
ctttctaatgaatacctgaccacccctcctcaaaactatcatgacagacaaggaaagaacctggaagtgtcacagctcagaggcgagaaggagacagatgactaaacgcg

SEQ ID NO: 62132 - DNA, 110 bp, synthetic construct
  source 1..110: mol_type = other DNA
agaacctggaagtgtcacagctcagaggcgagaaggagacagatgactaaacgcgacacaggatccggatagggtcctaggacagagaaaggtcattcgggggaaaacct

SEQ ID NO: 62133 - DNA, 110 bp, synthetic construct
  source 1..110: mol_type = other DNA
gtggacgtcatgcaaaggaagcaggggctgtgcaaaatgtccttactgagggcggcctgcacagcgagctaggacttcacctccctggatggaggggagcagcctcccgc

SEQ ID NO: 62134 - DNA, 110 bp, synthetic construct
  source 1..110: mol_type = other DNA
gagctttgtggtgatggctcgggtctgtgttttgactgcggtgatggtaaaaatcatctacatatgtgataaaatacacacacatgcatgcacatacacacacacacaga

SEQ ID NO: 62135 - DNA, 110 bp, synthetic construct
  source 1..110: mol_type = other DNA
tgcatcttccactttcctacaactatctgatacataacctagatgagtcagaaatccccaaatgccctctgccgcccaggtcgcaattacaagccaacggccagagacct

SEQ ID NO: 62136 - DNA, 110 bp, synthetic construct
  source 1..110: mol_type = other DNA
ccccaaatgccctctgccgcccaggtcgcaattacaagccaacggccagagacctctgcgctttctgattctcagtggccagaggacactgtctgaagaatcattctgtc

SEQ ID NO: 62137 - DNA, 110 bp, synthetic construct
  source 1..110: mol_type = other DNA
ggtaatttgagtctttcagtctgatgatgcgatgaaatgaaaaccttcagagagagagagactctacaggtattctatctcctgatcacaagtcaacctctgtgatctct

SEQ ID NO: 62138 - DNA, 110 bp, synthetic construct
  source 1..110: mol_type = other DNA
gagagactctacaggtattctatctcctgatcacaagtcaacctctgtgatctctcaggactccaccgaagggactatttgtgtccagtgccctctgatcatactttcaa

SEQ ID NO: 62139 - DNA, 110 bp, synthetic construct
  source 1..110: mol_type = other DNA
acagtgaaagcgtgcaggatacatttaaaaaaaaaaaacagcttcctttttttgtagttcctgccatgtatttcttgattgatttgtaaagcagccaaaaaagaaggagg

SEQ ID NO: 62140 - DNA, 110 bp, synthetic construct
  source 1..110: mol_type = other DNA
agtgaacgcccccccttccagcgcgttcctggacacgtgcatttcatacttcagcacatttgggccagcgtgccttccttggtctgactttgcactgtgggtattatcaa

SEQ ID NO: 62141 - DNA, 110 bp, synthetic construct
  source 1..110: mol_type = other DNA
acatttgggccagcgtgccttccttggtctgactttgcactgtgggtattatcaaaagcaggaaaagccaagctcacagcttcttaatacttgtcagaagtcctcgtgaa

SEQ ID NO: 62142 - DNA, 110 bp, synthetic construct
  source 1..110: mol_type = other DNA
gggtggactgggggttatgggccgatttcagcaaatgagcacattcgcagaggctgaatcctcaaatcatgcggatgatgtgcgcacacgtggtgtgtgtccctgggcac

SEQ ID NO: 62143 - DNA, 110 bp, synthetic construct
  source 1..110: mol_type = other DNA
gaatcctcaaatcatgcggatgatgtgcgcacacgtggtgtgtgtccctgggcacgagacccacgtccgaacggcctgaaagccgccggcactagagtagttgtgtccac

SEQ ID NO: 62144 - DNA, 110 bp, synthetic construct
  source 1..110: mol_type = other DNA
gatgcacaatttttaaaggttatactcttgtagttattctaaaagatttgctctgttccctgtgttggacggtccaccgctgttgcttattggttttctgaacggtagct

SEQ ID NO: 62145 - DNA, 110 bp, synthetic construct
  source 1..110: mol_type = other DNA
ttccctgtgttggacggtccaccgctgttgcttattggttttctgaacggtagcttgtatgtcttccttcctcccaacttgcccctccccctccctgtcccactggccac

SEQ ID NO: 62146 - DNA, 110 bp, synthetic construct
  source 1..110: mol_type = other DNA
ggagatgagcctgcgggcggatactgtctgcctatttccctgagaaggaggggggaagacaggctcaaaaggagacgcggcgagcctcacgggtgacaaggtattctctg

SEQ ID NO: 62147 - DNA, 110 bp, synthetic construct
  source 1..110: mol_type = other DNA
aagacaggctcaaaaggagacgcggcgagcctcacgggtgacaaggtattctctgcgcttggctgtccttttcgtttggcaggcctttgttccagtacatgctgcgtatt

SEQ ID NO: 62148 - DNA, 110 bp, synthetic construct
  source 1..110: mol_type = other DNA
cagacacttgttagcacaactgctggctcgcaggcgatggggaaaaaaccctcagtttcaccccagttatgacaacctaaaatgtctccagacaaggccagatgtctctt

SEQ ID NO: 62149 - DNA, 110 bp, synthetic construct
  source 1..110: mol_type = other DNA
tttcaccccagttatgacaacctaaaatgtctccagacaaggccagatgtctcttggggacacagtcacccctacttggggaccactggtccagaggcctggaggcagag

SEQ ID NO: 62150 - DNA, 110 bp, synthetic construct
  source 1..110: mol_type = other DNA
aatacttagatgacacctgccgtgcaacagagctcgccacagtttgctaacagctttctggagctgtacgtcgcccgcagatcacccgtttgaagtgtacagttcggggg

SEQ ID NO: 62151 - DNA, 110 bp, synthetic construct
  source 1..110: mol_type = other DNA
ttctggagctgtacgtcgcccgcagatcacccgtttgaagtgtacagttcgggggtcttcagtgcattcacagagtgccgctgccgctgccgttgttacagccaatttga

SEQ ID NO: 62152 - DNA, 110 bp, synthetic construct
  source 1..110: mol_type = other DNA
tcggagctgtagctgccggctgctaactactgcgacacaatgggaactccacctcctggagattttaagtaaaacttttggggggggggttctttttcgggccacacctg

SEQ ID NO: 62153 - DNA, 110 bp, synthetic construct; identical to SEQ ID NO: 62152
  source 1..110: mol_type = other DNA

SEQ ID NO: 62154 - DNA, 110 bp, synthetic construct
  source 1..110: mol_type = other DNA
gaggcctagagcatcagatactcgtgtgctggccgaatatctgtcttgcagaaagctttgccttctgtttttcaggggatacacccaagataattgattgtcagcaaagt

SEQ ID NO: 62155 - DNA, 110 bp, synthetic construct
  source 1..110: mol_type = other DNA
ctttgccttctgtttttcaggggatacacccaagataattgattgtcagcaaagttcctctaatgggtttatcctaagaattcatttagaaagtctttcaggatttcccg

SEQ ID NO: 62156 - DNA, 110 bp, synthetic construct
  source 1..110: mol_type = other DNA
ctcattaccccatgactccggcgtagagaccaggttcattgtgtgacagttcttgcttcaagaaacgtgtttgtacagatgcattcatgatagcttgagattttgacttt

SEQ ID NO: 62157 - DNA, 110 bp, synthetic construct
  source 1..110: mol_type = other DNA
cttcaagaaacgtgtttgtacagatgcattcatgatagcttgagattttgactttcgaaggtttttgggttctccctaaatggggaggggaatcttgtgttctcttccca

SEQ ID NO: 62158 - DNA, 110 bp, synthetic construct
  source 1..110: mol_type = other DNA
tcctgtttctgggttgcctgtcggtctttcacttgccgtttcactttgaaaactgcagcatcaaatacttccagtcatccccatggacacggcgcttagatggtcccacc

SEQ ID NO: 62159 - DNA, 110 bp, synthetic construct
  source 1..110: mol_type = other DNA
cagcatcaaatacttccagtcatccccatggacacggcgcttagatggtcccaccgctcattttccaaagatgcaggagcagagggttggcctctgggcagaactgggcg

SEQ ID NO: 62160 - DNA, 110 bp, synthetic construct
  source 1..110: mol_type = other DNA
cgcaaaaacatcagacacatcccagctgagagatgttctgcagaatgcccgcacggtgcccctctgaaccatccagggcatcaaaaacaaggcgagtcgagaagctgtcg

SEQ ID NO: 62161 - DNA, 110 bp, synthetic construct
  source 1..110: mol_type = other DNA
gtgcccctctgaaccatccagggcatcaaaaacaaggcgagtcgagaagctgtcgctcaggcaggaggagcctaaggaggtatgatgattcaatacaaggtgggatcctg

SEQ ID NO: 62162 - DNA, 110 bp, synthetic construct
  source 1..110: mol_type = other DNA
cgccgtaccctcgtgcctcccccgaggggccctgagggttgtgtggcgtggcgtttgagttgtaagcttcctcccttttgccatctccctcctgggccagtgtcctgttg

SEQ ID NO: 62163 - DNA, 110 bp, synthetic construct
  source 1..110: mol_type = other DNA
tgagttgtaagcttcctcccttttgccatctccctcctgggccagtgtcctgttgttagcacccctgcttgctggtcgcaatccaggttgtggcacttaggggcacgtct

SEQ ID NO: 62164 - DNA, 110 bp, synthetic construct
  source 1..110: mol_type = other DNA
tctgccatttatgctcatttttatacatgggatggttgtgttacatcctccgtttggttttccctctccagtttctatatacagaatcacactcaggagcgaggagggaa

SEQ ID NO: 62165 - DNA, 110 bp, synthetic construct
  source 1..110: mol_type = other DNA
ttgtgttacatcctccgtttggttttccctctccagtttctatatacagaatcacactcaggagcgaggagggaagaccccagcagcctcatgacagccgcctcctaact

SEQ ID NO: 62166 - DNA, 110 bp, synthetic construct
  source 1..110: mol_type = other DNA
tctggagatgggttagtagaggctctgccttctttgttctctatgtgtttttttgaggtggttacatagagatcgttcattattttcctattttaaacacactgctcagt

SEQ ID NO: 62167 - DNA, 110 bp, synthetic construct; identical to SEQ ID NO: 62166
  source 1..110: mol_type = other DNA

SEQ ID NO: 62168 - DNA, 110 bp, synthetic construct
  source 1..110: mol_type = other DNA
ggtgtgtaactgaatacattgctgtacacctgaaacttacagagtactgtaaatcagctacacttcaggaaaaaaaatacatgttctaaaactgactgtggaagctcctg

SEQ ID NO: 62169 - DNA, 110 bp, synthetic construct
  source 1..110: mol_type = other DNA
agctacacttcaggaaaaaaaatacatgttctaaaactgactgtggaagctcctgctgtggtacaatgggatttggggcatcttgtgcgctcgagaacttgggttcagtc

SEQ ID NO: 62170 - DNA, 110 bp, synthetic construct
  source 1..110: mol_type = other DNA
ccctagtatggtggcgagcggaaggagtatttgagcaacacggatatctagtgggacgtaagtatcgaggtagctgtaatcgggacactccatgaggctactgacaccat

SEQ ID NO: 62171 - DNA, 110 bp, synthetic construct
  source 1..110: mol_type = other DNA
acgtaagtatcgaggtagctgtaatcgggacactccatgaggctactgacaccattgccatgatggaagctgcaggctctccacactcgcacacaagctaggcaggagag

SEQ ID NO: 62172 - DNA, 110 bp, synthetic construct
  source 1..110: mol_type = other DNA
cagatctcaatattaaattcatgggtacaaaggggatgcgtgggggcagggataacgtaggagtctgggattaacataaacatgctactctatataaaatagataacaag

SEQ ID NO: 62173 - DNA, 110 bp, synthetic construct
  source 1..110: mol_type = other DNA
aattcatgggtacaaaggggatgcgtgggggcagggataacgtaggagtctgggattaacataaacatgctactctatataaaatagataacaaggacctactgtatagc

SEQ ID NO: 62174 - DNA, 110 bp, synthetic construct
  source 1..110: mol_type = other DNA
gaactgagaagccaaccttgatatgttactatgaatccacctccagacattatttggatttcactggttttcccactaaggtcgctctcttttctattatcacggtcttt

SEQ ID NO: 62175 - DNA, 110 bp, synthetic construct
  source 1..110: mol_type = other DNA
ggatttcactggttttcccactaaggtcgctctcttttctattatcacggtctttggaaggattacattgttgctatttgtatggtcgaaacctaatattttgtatgttt

SEQ ID NO: 62176 - DNA, 110 bp, synthetic construct
  source 1..110: mol_type = other DNA
gggaaccagcatcgtggaaggattgctttttctcaagcctgccggatactgacacatttctggaaagttgtctttttcattttaggactctttagtggttttttcgttct

SEQ ID NO: 62177 - DNA, 110 bp, synthetic construct
  source 1..110: mol_type = other DNA
tgattccaggatttgtcagagtgagtttctagaatcggggcgatggcgtgcagcgtgtgaagacgctgttttaacccagtcttgtggatgcttttgcctccctgtctcgc

SEQ ID NO: 62178 - DNA, 110 bp, synthetic construct
  source 1..110: mol_type = other DNA
cagtgcttgttccctcacagaaacaccagtaaccatgatatgcagacctttatgacaagtctaggttctagttaagaggttgtagtgccccaggtcagcacaaagccaag

SEQ ID NO: 62179 - DNA, 110 bp, synthetic construct
  source 1..110: mol_type = other DNA
caagtctaggttctagttaagaggttgtagtgccccaggtcagcacaaagccaagaacagctgtgttgaggaaggtaagaggaatgatttcactgtacctgtgtcagtcc

SEQ ID NO: 62180 - DNA, 110 bp, synthetic construct
  source 1..110: mol_type = other DNA
tcaaggtggagcgccggtcagctctgcctgtaatcaggagtgcttctcaggacgagagggccggagtcagtgcgagggcagaggccgtcacggactcaaatgtcgagaat

SEQ ID NO: 62181 - DNA, 110 bp, synthetic construct
  source 1..110: mol_type = other DNA
gagggccggagtcagtgcgagggcagaggccgtcacggactcaaatgtcgagaatcttcattctccaatattgtatcaagaatattttcaaatgtagagaaaacttgaag

SEQ ID NO: 62182 - DNA, 110 bp, synthetic construct
  source 1..110: mol_type = other DNA
tgtgagcctgggatggtcctgtggcttgcttgttcctctcaggatgcagaatgtcatttgtgggccagttgtaagttagcttgtgaaacaaaccaaaaaaagcagcaatg

SEQ ID NO: 62183 - DNA, 110 bp, synthetic construct
  source 1..110: mol_type = other DNA
ggggtcgaatgggagctgcagctgccagcccacaccacagcaactccagatccgagctgtatcttcaacttatgttgcagcttatggcaatgccggatccttaacccact

SEQ ID NO: 62184 - DNA, 110 bp, synthetic construct; identical to SEQ ID NO: 62183
  source 1..110: mol_type = other DNA

SEQ ID NO: 62185 - DNA, 110 bp, synthetic construct
  source 1..110: mol_type = other DNA
ttctctccatttgcacccccagccatcgtactggagtacatattcccgcacaacagcaggtgttagggaatccgattctgtttagtcttgtagcttcatttgggcaacta

SEQ ID NO: 62186 - DNA, 110 bp, synthetic construct
  source 1..110: mol_type = other DNA
gcaggtgttagggaatccgattctgtttagtcttgtagcttcatttgggcaactaatgctttcggaatggtgatcagggactttatcttgctttttactggatagtcctc

SEQ ID NO: 62187 - DNA, 110 bp, synthetic construct
  source 1..110: mol_type = other DNA
gtaattttctttccttcccttttccttctcctcttttcctcgccaagtgggggtgaggtagctgtgctaagacctttacatctggggaaaggactggccccacccacctc

SEQ ID NO: 62188 - DNA, 110 bp, synthetic construct
  source 1..110: mol_type = other DNA
aggtagctgtgctaagacctttacatctggggaaaggactggccccacccacctcccacccatggctcttggctcatggacaagccccttagacctctactaaccccact

SEQ ID NO: 62189 - DNA, 110 bp, synthetic construct
  source 1..110: mol_type = other DNA
cttgcctgaacctttcctttccttttgtgtgtgtgtgtgtgtgtgtgaaaatgaatttctctaaaatcaattctctaaaaccaagaggcaccagaacatctagcttctgc

SEQ ID NO: 62190 - DNA, 110 bp, synthetic construct
  source 1..110: mol_type = other DNA
tttctctaaaatcaattctctaaaaccaagaggcaccagaacatctagcttctgcagaaaggcccacgtggaaatgacttctctggtgttctcaaggtttctgcttggca

SEQ ID NO: 62191 - DNA, 110 bp, synthetic construct
  source 1..110: mol_type = other DNA
gtgtgattttcctgtgcgtttgtgggtcatgatcttacaaacataagagtgcagaagatccagcctagcgatttgtggctgccctagttagtaatttactttctcttgtg

SEQ ID NO: 62192 - DNA, 110 bp, synthetic construct
  source 1..110: mol_type = other DNA
gggtctgacccctctcctaccattgcctccaagagacaaaagaatgctgctaatacaatgacctcacagtgcatttacagcctgaagtctcttatcacaggtgtttccac

SEQ ID NO: 62193 - DNA, 110 bp, synthetic construct
  source 1..110: mol_type = other DNA
caatgacctcacagtgcatttacagcctgaagtctcttatcacaggtgtttccacagggacaaggttttaggtttaaaggcaactttgtcttcagatttaccctctgggt

SEQ ID NO: 62194 - DNA, 110 bp, synthetic construct
  source 1..110: mol_type = other DNA
aatggctggcctggaagcaggtttacaaaacaaaaagagaaagatgaaaagaactgttggttgtaatatgactgataacattgtcagatgcagctttaaaaagtacaata

SEQ ID NO: 62195 - DNA, 110 bp, synthetic construct
  source 1..110: mol_type = other DNA
gttggttgtaatatgactgataacattgtcagatgcagctttaaaaagtacaataaaatagtaaagacgcatatgttcctgccctcatgagctcacacagtcctttgtaa

SEQ ID NO: 62196 - DNA, 110 bp, synthetic construct
  source 1..110: mol_type = other DNA
ggaactcgtcaacacgcctcatggtagtctcacagttggcaagaactgaagttggttaaattgtgaaaattcccccttgggggtgcggtcatttcaggcagacttcagtg

SEQ ID NO: 62197 - DNA, 110 bp, synthetic construct; identical to SEQ ID NO: 62196
  source 1..110: mol_type = other DNA

SEQ ID NO: 62198 - DNA, 110 bp, synthetic construct
  source 1..110: mol_type = other DNA
cccacaaacaggtgcacacacacaccgagtaagaccagggctgcgctaagttagggacgtggtctcgtgaaggtggcaacgttggaaggtctgggcacagctggctttat

SEQ ID NO: 62199 - DNA, 110 bp, synthetic construct
  source 1..110: mol_type = other DNA
gacgtggtctcgtgaaggtggcaacgttggaaggtctgggcacagctggctttatggtacacatggagctgttctgaactcacaggcaccagtggctttggctcacacaa

SEQ ID NO: 62200 - DNA, 110 bp, synthetic construct
  source 1..110: mol_type = other DNA
tctttactgatggagaaaggtgctcagataggcttactttcccaagttgccagagcgagtgaacgctggagctggacctccaagtccaggtccacctgatttcaaagcct

SEQ ID NO: 62201 - DNA, 110 bp, synthetic construct
  source 1..110: mol_type = other DNA
caaaaataaataaataaataaataacttggagatactgaacacacctacatgagattatacagcacttcttcaccttataaaaaccacaacaaatgacatctcacgctac

SEQ ID NO: 62202 - DNA, 110 bp, synthetic construct; identical to SEQ ID NO: 62201
  source 1..110: mol_type = other DNA

SEQ ID NO: 62203 - DNA, 110 bp, synthetic construct
  source 1..110: mol_type = other DNA
tccagctacacaaggctgctaccctaccacctcctcaagtatctcacggcgcgccttcgagataagctacgcgtctaccgcttcatatggagacaaactgaagcacttta

SEQ ID NO: 62204 - DNA, 110 bp, synthetic construct
  source 1..110: mol_type = other DNA
ttcgagataagctacgcgtctaccgcttcatatggagacaaactgaagcactttaaccatctgtatataccttgaaggggtctctaaatttaggcggtgtttgtttgatc

SEQ ID NO: 62205 - DNA, 110 bp, synthetic construct
  source 1..110: mol_type = other DNA
tggaagccaatattgcgttggtggctttgtcaagaattctgagatcttttgagcaggaaagggagggtagggaatcagatctatctatgtgacagagaacgtattagaac

SEQ ID NO: 62206 - DNA, 110 bp, synthetic construct
  source 1..110: mol_type = other DNA
ggaaagggagggtagggaatcagatctatctatgtgacagagaacgtattagaaccatttcaaaattagccttggctcagcttaacgaaatgcccccattgctcagcagc

SEQ ID NO: 62207 - DNA, 110 bp, synthetic construct
  source 1..110: mol_type = other DNA
cccatcccagctcccgctgaggtcttcatgcccctggtttgtatgaggtttgtatcatcatttaccggaaatgcccaaatcgtgtttcccaacaacttggaacctcagct

SEQ ID NO: 62208 - DNA, 110 bp, synthetic construct
  source 1..110: mol_type = other DNA
catcatttaccggaaatgcccaaatcgtgtttcccaacaacttggaacctcagctggggggtcaccagggctttatagcttcaccaactgaaatcgaaactcaaaatgcc

SEQ ID NO: 62209 - DNA, 110 bp, synthetic construct
  source 1..110: mol_type = other DNA
ttgcaccataggattatcctatagggaggggcgaccccagatgggggatgggacgcgcgtgggcaggttttgttcaagtcagcggctcaaaagtgatgctaatccagttt

SEQ ID NO: 62210 - DNA, 110 bp, synthetic construct
  source 1..110: mol_type = other DNA
cgcgtgggcaggttttgttcaagtcagcggctcaaaagtgatgctaatccagtttgggaaaagtcagagggtgctaggagcccctttgtgcaggacacgctgcctttctc

SEQ ID NO: 62211 - DNA, 110 bp, synthetic construct
  source 1..110: mol_type = other DNA
tacatcctttctctcatattatcttccgtcatggtctatcccaagagattggatagagttccctgtgcatttccaggtctctcagggtggtttcaggttgctggtgctat

SEQ ID NO: 62212 - DNA, 110 bp, synthetic construct; identical to SEQ ID NO: 62211
  source 1..110: mol_type = other DNA

SEQ ID NO: 62213 - DNA, 110 bp, synthetic construct
  source 1..110: mol_type = other DNA
tctacctgggaacttccatatgctgcaggtgtgccccctccccccaaaaaaagaacaccacagtcatggcataaatggtcctattgctctgtgactatgttgggtggaca

SEQ ID NO: 62214 - DNA, 110 bp, synthetic construct
  source 1..110: mol_type = other DNA
caccacagtcatggcataaatggtcctattgctctgtgactatgttgggtggacagtttgctgccctgactatgtgtgtgtgtggcagggggagatggttttgctcacca

SEQ ID NO: 62215 - DNA, 110 bp, synthetic construct
  source 1..110: mol_type = other DNA
tcacaataaaaaagcactcattactgaattaatcaatatatggtatgggtgcgacataacaaaaatcatgacaattcaatgggcttccagaatttccaggaagtttaggg

SEQ ID NO: 62216 - DNA, 110 bp, synthetic construct
  source 1..110: mol_type = other DNA
ataacaaaaatcatgacaattcaatgggcttccagaatttccaggaagtttagggtagggtagggttgagataacaaacagactgattaaagtctcatttagaaccagga

SEQ ID NO: 62217 - DNA, 110 bp, synthetic construct
  source 1..110: mol_type = other DNA
aaatctgctgttaagctcctctagtgaattttgcatttcagctatcatacttttcaactccagattttctgctcaccaaaataactgccagctcttcattaatattctat

SEQ ID NO: 62218 - DNA, 110 bp, synthetic construct
  source 1..110: mol_type = other DNA
ctcctcattgtggctcattaacagcatcttccaaagctcattatgtttggagtaacatgtccaagtcaaaacttaatattttctcccacttgccagtcctgttcctaggc

SEQ ID NO: 62219 - DNA, 110 bp, synthetic construct
  source 1..110: mol_type = other DNA
catgtccaagtcaaaacttaatattttctcccacttgccagtcctgttcctaggctttccatttcagttaacaacaactccatccatctttatgctttggccaaagagct

SEQ ID NO: 62220 - DNA, 110 bp, synthetic construct
  source 1..110: mol_type = other DNA
ccaagccttcaaacgagtaagttgctacaccagtagagtcaatgccatattcttggtcatcaagatggccccacattcactacctgcctactaatgccatttctttgagc

SEQ ID NO: 62221 - DNA, 110 bp, synthetic construct
  source 1..110: mol_type = other DNA
gtcatcaagatggccccacattcactacctgcctactaatgccatttctttgagctacctccaaactcctccctaagtagcaccagttcttcaggctcagccagccagag

SEQ ID NO: 62222 - DNA, 110 bp, synthetic construct
  source 1..110: mol_type = other DNA
tcttttcttctaaaatgattaatctattaatgcatgtggctttggcaaaagcaggatcctgtttttcactatggtctcagccgtctacacagttatgacttcttttttcc

SEQ ID NO: 62223 - DNA, 110 bp, synthetic construct
  source 1..110: mol_type = other DNA
atcctgtttttcactatggtctcagccgtctacacagttatgacttcttttttcctataatacttcactactacatttctcttcctcaccgtttcatccatcattccgtc

SEQ ID NO: 62224 - DNA, 110 bp, synthetic construct
  source 1..110: mol_type = other DNA
ataattgtgtgtgttttttttttttacatagactagtttttttttttttaattggttttttgggaattcctgctgtggtgcaacaggatcggtggtatctctggagcact

SEQ ID NO: 62225 - DNA, 110 bp, synthetic construct
  source 1..110: mol_type = other DNA
acatagactagtttttttttttttaattggttttttgggaattcctgctgtggtgcaacaggatcggtggtatctctggagcactggggtacaggttcaatccctggccc

SEQ ID NO: 62226 - DNA, 110 bp, synthetic construct
  source 1..110: mol_type = other DNA
cacttttcacgattaaaaacaatgctgtaaaggaccgtcttgttcaggtttccagaggctgtagcaaaagagtttttcttaacgacaacatcaaggacggaagtgcaggg

SEQ ID NO: 62227 - DNA, 110 bp, synthetic construct
  source 1..110: mol_type = other DNA
aggctgtagcaaaagagtttttcttaacgacaacatcaaggacggaagtgcagggtcgaaatgtctgcacactttcagccatgctagagatcgccaaaaggctctgccaa

SEQ ID NO: 62228 - DNA, 110 bp, synthetic construct
  source 1..110: mol_type = other DNA
tggttctcagtcactccctgagaagccagtgtgagtctcctgcctgcccaacatcagctgcaaccacccctgaatgtaatagtttctactcctttcacctgaaaaaaaaa

SEQ ID NO: 62229 - DNA, 110 bp, synthetic construct
  source 1..110: mol_type = other DNA
agctgcaaccacccctgaatgtaatagtttctactcctttcacctgaaaaaaaaaatcttatgctactctctttggccaactaactcaggaccatatagggaagggactg

SEQ ID NO: 62230 - DNA, 110 bp, synthetic construct
  source 1..110: mol_type = other DNA
ggctggtctttccaatgctgttctcgcaggggcagacctttcctcttaagtgatatccggatcctccatggattgggggatgttttctttaatgcatgcctttgcttcaa

SEQ ID NO: 62231 - DNA, 110 bp, synthetic construct
  source 1..110: mol_type = other DNA
ttctatgtgaagaagaaggcaaatgccttcctggtggctcctcccctgagctgcagaggcgttctgggttatttctgctacccgaactttcttaaccatatttgtttgca

SEQ ID NO: 62232 - DNA, 110 bp, synthetic construct
  source 1..110: mol_type = other DNA
gaggcgttctgggttatttctgctacccgaactttcttaaccatatttgtttgcaagggcccaaccaagtgccacaaactgagcggtttaaggaatagaaaggcattctc

SEQ ID NO: 62233 - DNA, 110 bp, synthetic construct
  source 1..110: mol_type = other DNA
aacaaataacgccccctccttccactcccctgatcctgctggtgcctaaagaaggggaagcaaactccaaacactccatccctcaatatcactaaaagtttgctctttcc

SEQ ID NO: 62234 - DNA, 110 bp, synthetic construct
  source 1..110: mol_type = other DNA
ggaagcaaactccaaacactccatccctcaatatcactaaaagtttgctctttccaaacagaaattgcgataaacccgttcttgttcttagttttacactcttgtgaaaa

SEQ ID NO: 62235 - DNA, 110 bp, synthetic construct
  source 1..110: mol_type = other DNA
atttccctggggcttcgtatcttacatcgaagttcatggctcagtggtcatctcaacagcctactgactacaattttataactctttcatcgtaaaactggtacttataa

SEQ ID NO: 62236 - DNA, 110 bp, synthetic construct
  source 1..110: mol_type = other DNA
acagcctactgactacaattttataactctttcatcgtaaaactggtacttataaaatttctatcctgtccgctcttaaaaaacattaatgtctatccatccattcatcc

SEQ ID NO: 62237 - DNA, 110 bp, synthetic construct
  source 1..110: mol_type = other DNA
ccaaaaggttggggaaaacctaggcaaggctgagagctactcggaatatataaaaactgctgggggacaataatagaagaaaggacattgacaaatgcatcaagtggcat

SEQ ID NO: 62238 - DNA, 110 bp, synthetic construct
  source 1..110: mol_type = other DNA
actgctgggggacaataatagaagaaaggacattgacaaatgcatcaagtggcatgtgtctgcaggcatacacacagcagggactcagtatgacatgaggactattgatt

SEQ ID NO: 62239 - DNA, 110 bp, synthetic construct
  source 1..110: mol_type = other DNA
cttgagcacgtgtgcactttcattatacctactgtcgcattaggcctgctatcatttcttgaggttctaggccctggtgattagatttatttttctgactaaattattca

SEQ ID NO: 62240 - DNA, 110 bp, synthetic construct
  source 1..110: mol_type = other DNA
ttcttgaggttctaggccctggtgattagatttatttttctgactaaattattcagacagttactctgaccctgtttagaacttccacttggaggtttgcagggaaccaa

SEQ ID NO: 62241 - DNA, 110 bp, synthetic construct
  source 1..110: mol_type = other DNA
cttcaaccttgactagctctgtgatctgctttaaccaatcaaatgcagcagaaatgatgctgagataactctagacctaagatgtaagaaggcctggctatttctgcttt

SEQ ID NO: 62242 - DNA, 110 bp, synthetic construct
  source 1..110: mol_type = other DNA
gatgctgagataactctagacctaagatgtaagaaggcctggctatttctgcttttccttcttgggacctttgaaccatggtgttataactgtggctactctcctggaga

SEQ ID NO: 62243 - DNA, 110 bp, synthetic construct
  source 1..110: mol_type = other DNA
tttgagggctatgttcggagcttatgaccccgggagcagctccctttaccgcacagctgctgcatttcccactgctttattcgtaagcttccttttctcttttcaggctc

SEQ ID NO: 62244 - DNA, 110 bp, synthetic construct
  source 1..110: mol_type = other DNA
gctgctgcatttcccactgctttattcgtaagcttccttttctcttttcaggctcttggggcttgctgagcctgctaccaccttttatcaccccccagaatacaagtacc

SEQ ID NO: 62245 - DNA, 110 bp, synthetic construct
  source 1..110: mol_type = other DNA
accatttcgttgctctggccctctttaagataagagggctcctctcctacccagcatacatgttccaactaaaagtagaccttcaagatattctgcactatatagatttt

SEQ ID NO: 62246 - DNA, 110 bp, synthetic construct
  source 1..110: mol_type = other DNA
atacatgttccaactaaaagtagaccttcaagatattctgcactatatagattttgtaaaagtagcttcggtctctcttaatgtgaaaattgcatattgacttaatctct

SEQ ID NO: 62247 - DNA, 110 bp, synthetic construct
  source 1..110: mol_type = other DNA
aaaacagatgaaccactaaattaatttttctgcttataagagaacctattttagttccaaagaaatgggcgttcattttcagatgtctaccagccacattcatactgggg

SEQ ID NO: 62248 - DNA, 110 bp, synthetic construct; identical to SEQ ID NO: 62247
  source 1..110: mol_type = other DNA

SEQ ID NO: 62249 - DNA, 110 bp, synthetic construct
  source 1..110: mol_type = other DNA
gccacccaggttctctcaataccggtttagaggtgcttacaagaaaataaagtcaagagagttgcaggaaagagatccagagacactggatgaaacccaccatatccatg

SEQ ID NO: 62250 - DNA, 110 bp, synthetic construct
  source 1..110: mol_type = other DNA
agagagttgcaggaaagagatccagagacactggatgaaacccaccatatccatgggtttgggtgactcgagcctcaacaattcctaattatttcagctctttaagtggg

SEQ ID NO: 62251 - DNA, 110 bp, synthetic construct
  source 1..110: mol_type = other DNA
tcattcggtgggccagctttagtggactggattgggtggggaagaagtacaaaatccttttagtactactcatctccaagtctaaagttattttggtgccctgaaactgc

SEQ ID NO: 62252 - DNA, 110 bp, synthetic construct
  source 1..110: mol_type = other DNA
ccttttagtactactcatctccaagtctaaagttattttggtgccctgaaactgctcaaaggaacctgaggctttcgtgtacaaaaattctgatgtcaatttaattttca

SEQ ID NO: 62253 - DNA, 110 bp, synthetic construct
  source 1..110: mol_type = other DNA
ggggacggttctgtcttccctctgcttgatccttcggcatccttagctaatctctctctcagctatcttgaagccatctcctctcccagcttttgctattagctattttc

SEQ ID NO: 62254 - DNA, 110 bp, synthetic construct
  source 1..110: mol_type = other DNA
ttgctccaggggattcaagttaaagaatgaggaataattagtcaacagtggaaactctagtttggcaaagtcgctatttgcttgactgttttcactagagtatatgaccc

SEQ ID NO: 62255 - DNA, 110 bp, synthetic construct
  source 1..110: mol_type = other DNA
tctagtttggcaaagtcgctatttgcttgactgttttcactagagtatatgaccccaatctcattggaagtattctgacgtcagagtgataaaaaagtggttttggttgt

SEQ ID NO: 62256 - DNA, 110 bp, synthetic construct
  source 1..110: mol_type = other DNA
ggaataaaagtgtcattctctttccttatattcctcaggtaatcaatatcttttccccaaatgcaagcaatttccttatgcacttgctctgccatggctgacgttgacat

SEQ ID NO: 62257 - DNA, 110 bp, synthetic construct
  source 1..110: mol_type = other DNA
cccaaatgcaagcaatttccttatgcacttgctctgccatggctgacgttgacatgttcatattaggtagttaagaactcagacgagggagctgccatcgtagctcggcg

SEQ ID NO: 62258 - DNA, 110 bp, synthetic construct; identical to SEQ ID NO: 62256
  source 1..110: mol_type = other DNA

SEQ ID NO: 62259 - DNA, 110 bp, synthetic construct; identical to SEQ ID NO: 62257
  source 1..110: mol_type = other DNA

SEQ ID NO: 62260 - DNA, 110 bp, synthetic construct
  source 1..110: mol_type = other DNA
aaacagagaggaaagcatagcctaagtttcacctgcaatacctgttatccttgccacaactctgcaagatttttttttttacttgttgctcttggcagaggtatgcttat

SEQ ID NO: 62261 - DNA, 110 bp, synthetic construct
  source 1..110: mol_type = other DNA
acaactctgcaagatttttttttttacttgttgctcttggcagaggtatgcttatttgttactgagaggggcaacaaaaatccttctgtatttgcctcttgctgaggtta

SEQ ID NO: 62262 - DNA, 110 bp, synthetic construct
  source 1..110: mol_type = other DNA
aacagtcgaccaccatgcagtggttcaagcaccaagacctgctgaaagacaagagtttgcgtgccagtcccaccacttactaatgcgtgagcttttttttttgtttttgg

SEQ ID NO: 62263 - DNA, 110 bp, synthetic construct
  source 1..110: mol_type = other DNA
gacctgctgaaagacaagagtttgcgtgccagtcccaccacttactaatgcgtgagcttttttttttgtttttggtctttttagggccacacttgcgacatatggaggtt

SEQ ID NO: 62264 - DNA, 110 bp, synthetic construct
  source 1..110: mol_type = other DNA
cagacattgccaaatgccccctcttgggcaaaatcacccccagttaagaaccactgtcttaaatgcataatttaatattctagggctcttttaagtccttgtatctaaac

SEQ ID NO: 62265 - DNA, 110 bp, synthetic construct
  source 1..110: mol_type = other DNA
tgttgaagtacagttgatttacagatcttgttattttcttcccccctatttttctccttcatatccctcaatcttattgcttcgtatttttaatcactactggagatgtt

SEQ ID NO: 62266 - DNA, 110 bp, synthetic construct
  source 1..110: mol_type = other DNA
ccttcatatccctcaatcttattgcttcgtatttttaatcactactggagatgttcctgtaaggatcaagtggttccttccttgtcacaatgaagcgtgatagaaatcaa

SEQ ID NO: 62267 - DNA, 110 bp, synthetic construct
  source 1..110: mol_type = other DNA
gttagcaggatgggagacagtatgagccgaagaatgtatgtatatgtacgaccgggtcactagactgtacagcgggaattgaggcaacactgtaacttgactatacttta

SEQ ID NO: 62268 - DNA, 110 bp, synthetic construct
  source 1..110: mol_type = other DNA
gtcactagactgtacagcgggaattgaggcaacactgtaacttgactatactttaataaaaataaaaaagtattagcacccattggatactttggactgtatttagggca

SEQ ID NO: 62269 - DNA, 110 bp, synthetic construct
  source 1..110: mol_type = other DNA
caggtttgacatctggcccggctcagtgggttaaatgatccagcattgctgcagctgcagcacaggtctcagctgtgtctccaattccattccctggcccaggaacttcc

SEQ ID NO: 62270 - DNA, 110 bp, synthetic construct
  source 1..110: mol_type = other DNA
tgcagcacaggtctcagctgtgtctccaattccattccctggcccaggaacttcctttgctgcaggtgtggccacgaaatgaaaaacaaaaacaaaatacccttagaaaa

SEQ ID NO: 62271 - DNA, 110 bp, synthetic construct
  source 1..110: mol_type = other DNA
tgaatgtccacaatatggatgttgcagtttcacatttcattttcacattcaaggcagtaagaaaaaggcttacgccaagctgttttctttagtcatgagagcagattttc

SEQ ID NO: 62272 - DNA, 110 bp, synthetic construct
  source 1..110: mol_type = other DNA
agtaagaaaaaggcttacgccaagctgttttctttagtcatgagagcagattttctttccccagaactctccaaaagcttcggcttatgttccaaatatcatcttgaagt

SEQ ID NO: 62273 - DNA, 110 bp, synthetic construct
  source 1..110: mol_type = other DNA
agctagtgacccaggaaagctaggggtatagttcccgtctgaacagaaggcctgggaagcaagagctcctatggtgtgagtcttcctccaaagacaggagaagactgatg

SEQ ID NO: 62274 - DNA, 110 bp, synthetic construct
  source 1..110: mol_type = other DNA
gaagcaagagctcctatggtgtgagtcttcctccaaagacaggagaagactgatgtctcatcttgagcactcgggccgagagagggcattcaaccttcctccacctttgt

SEQ ID NO: 62275 - DNA, 110 bp, synthetic construct
  source 1..110: mol_type = other DNA
gttgagaacctcggaggaatgaaattcgtattttaagttctgtgctgagtcgggtcttcaacttctctgacagttgtgttctaattaaagtgtgcacagttttctccagc

SEQ ID NO: 62276 - DNA, 110 bp, synthetic construct
  source 1..110: mol_type = other DNA
cttcaacttctctgacagttgtgttctaattaaagtgtgcacagttttctccagctctggctgcccattgcagttttctaggcagctttgcaaggtcctgatttctgggc

SEQ ID NO: 62277 - DNA, 110 bp, synthetic construct
  source 1..110: mol_type = other DNA
ctttttgaaattaaaatagggaagctgggagttccctggtggctcatcaggttaaggatcccatgtttcactgctgtggctcgggtggctactgaggcatgggttcgatc

SEQ ID NO: 62278 - DNA, 110 bp, synthetic construct
  source 1..110: mol_type = other DNA
ctggtggctcatcaggttaaggatcccatgtttcactgctgtggctcgggtggctactgaggcatgggttcgatccccagcctggtgcagtgggttaaggatccggtgtt

SEQ ID NO: 62279 - DNA, 110 bp, synthetic construct
  source 1..110: mol_type = other DNA
ccattaattcatttggggttgcaaaatggtgttcatggtagccagcctctaagctggcccacatcactccctgcctcctcatctgcaggccctcatatgatggccttctg

SEQ ID NO: 62280 - DNA, 110 bp, synthetic construct
  source 1..110: mol_type = other DNA
ataccacgttgcatttagttgtcatctctccccagtcttttctggtctgtgacagtttctctgtctttccttgttttccacgaccttaagagtcttgaggaatcctggcc

SEQ ID NO: 62281 - DNA, 110 bp, synthetic construct
  source 1..110: mol_type = other DNA
tcactgtaactcatttcagtgtccaaaaagataccctatctgctaatttaaatcaactcacatgctaccaaagctgttgtcacttctctggggccacacattcgtctcat

SEQ ID NO: 62282 - DNA, 110 bp, synthetic construct
  source 1..110: mol_type = other DNA
actcacatgctaccaaagctgttgtcacttctctggggccacacattcgtctcattgtttcctgctgtaaaggtttaactccttccagagtccctgcagtgtttggtagg

SEQ ID NO: 62283 - DNA, 110 bp, synthetic construct
  source 1..110: mol_type = other DNA
ccggctttccatctgcctcggaacctaaggcgagcagggctgtggcttttcctgttatttcgtactgagttcactacttttactgagaaccctgctgggaatgggttttc

SEQ ID NO: 62284 - DNA, 110 bp, synthetic construct
  source 1..110: mol_type = other DNA
tatttcgtactgagttcactacttttactgagaaccctgctgggaatgggttttcagctctgctccaaatcaagtcaaccctctcggacagtggcctgctggttttcagt

SEQ ID NO: 62285 - DNA, 110 bp, synthetic construct
  source 1..110: mol_type = other DNA
atcagggtacatgtatcttttaaaattaatgttttcagtttctttgactatatacccagcactggaattgcttcatcatatggtggctctatttttaatgttttgagaaa

SEQ ID NO: 62286 - DNA, 110 bp, synthetic construct; identical to SEQ ID NO: 62285
  source 1..110: mol_type = other DNA

SEQ ID NO: 62287 - DNA, 110 bp, synthetic construct
  source 1..110: mol_type = other DNA
tatcagacatctggacctaggaggataccccttaggttttacaacactggaaggaaactatatctggaaggctttccagggtattaccagaaagaaagcaatctcattgt

SEQ ID NO: 62288 - DNA, 110 bp, synthetic construct
  source 1..110: mol_type = other DNA
aactatatctggaaggctttccagggtattaccagaaagaaagcaatctcattgttggctaatctcaaatatacaggaagcccaaaggatggtgcccaagatgacttttc

SEQ ID NO: 62289 - DNA, 110 bp, synthetic construct
  source 1..110: mol_type = other DNA
agattgtcttatagtcgcatgggttatcttgtatatagcagtgactaataatcaagtgtgctgattttgttacaagtctcctacatttgaaggagaacaaaaaatacgta

SEQ ID NO: 62290 - DNA, 110 bp, synthetic construct
  source 1..110: mol_type = other DNA
gtgtgctgattttgttacaagtctcctacatttgaaggagaacaaaaaatacgtatttatagtttccttagattttgtgtaaaacctttttggagacctctcaacttcta

SEQ ID NO: 62291 - DNA, 110 bp, synthetic construct
  source 1..110: mol_type = other DNA
ataaagaaatgtagggatttgaaaaatttagtactagggaaaaaggtaagccataagctaatctccttttatgtggcttgccatagtaatgtttgaaaaaatgcagtttc

SEQ ID NO: 62292 - DNA, 110 bp, synthetic construct; identical to SEQ ID NO: 62291
  source 1..110: mol_type = other DNA

SEQ ID NO: 62293 - DNA, 110 bp, synthetic construct
  source 1..110: mol_type = other DNA
ccagaagggaaattgaacaatataataaaattgttgagattcaacctttttttgaactgaaaaagtgtccgtgttgtttggttcaggaaaatagtgttggttatttctga

SEQ ID NO: 62294 - DNA, 110 bp, synthetic construct; identical to SEQ ID NO: 62293
  source 1..110: mol_type = other DNA

SEQ ID NO: 62295 - DNA, 110 bp, synthetic construct
  source 1..110: mol_type = other DNA
agagcctaaaccatcttctctctggctctttaccagtccagtttgccaggcccgcatctagagcatgagagcttcctcttgccgtctgtggcctgggatgagtcatttaa

SEQ ID NO: 62296 - DNA, 110 bp, synthetic construct
  source 1..110: mol_type = other DNA
ggcgtggtggtctgtccagtacctcgtaggatgtttagcagcattcctcccaccagatggccagtgttctcctccagcggcccccgccccccgccactacgttgtaacaa

SEQ ID NO: 62297 - DNA, 110 bp, synthetic construct
  source 1..110: mol_type = other DNA
aagccgtggtatttgtggaactctataccttgacaaataagccaatttttgtatagggagattgccagaagagatgttttggtccttgaggtggttaactgacaattcta

SEQ ID NO: 62298 - DNA, 110 bp, synthetic construct
  source 1..110: mol_type = other DNA
gggagattgccagaagagatgttttggtccttgaggtggttaactgacaattctaattctttgacttcaattcagcaagcatttatggtgcacctgtatgtgccagctgt

SEQ ID NO: 62299 - DNA, 110 bp, synthetic construct
  source 1..110: mol_type = other DNA
agctgcccagggattccagagtgtctgcagaggtggaatgaagagcaggaaccaagtggttctcctcgctttctggactgaggacaggagcccctttgctgggcctccct

SEQ ID NO: 62300 - DNA, 110 bp, synthetic construct
  source 1..110: mol_type = other DNA
gtggttctcctcgctttctggactgaggacaggagcccctttgctgggcctcccttctctggtaggtacacgctagaggaaattcctctagaggcaagtatgagtatctc

SEQ ID NO: 62301 - DNA, 110 bp, synthetic construct
  source 1..110: mol_type = other DNA
tgcagtgttctaatgtattttaaatacacctgcaagcactttcatatatgttcaaagcctattttacagctttcaaattggccgcaaagttttcataaatgtgtcgaaaa

SEQ ID NO: 62302 - DNA, 110 bp, synthetic construct
  source 1..110: mol_type = other DNA
agcctattttacagctttcaaattggccgcaaagttttcataaatgtgtcgaaaaggcaaaccttattatgttaggaacatggggaaagtggaagaaatgagtgaatttt

SEQ ID NO: 62303 - DNA, 110 bp, synthetic construct
  source 1..110: mol_type = other DNA
tgaaattgctgggtcctgtggtacttctttttttagtgttttgaaaatactcttttctatactggctgcacctgtgcacaagggttctcttttctccacatccttgccaa

SEQ ID NO: 62304 - DNA, 110 bp, synthetic construct
  source 1..110: mol_type = other DNA
gtgttttgaaaatactcttttctatactggctgcacctgtgcacaagggttctcttttctccacatccttgccaatatttgttgtgttctttttgatggtaatcattctg

SEQ ID NO: 62305 - DNA, 110 bp, synthetic construct
  source 1..110: mol_type = other DNA
gtcaggcctccccttgtaactgcttgagtgacgtcaccttcaggaggacagcccgtcgtcttttttctctcacaggaatccgcgtagcatctgctagctccttcactcac

SEQ ID NO: 62306 - DNA, 110 bp, synthetic construct
  source 1..110: mol_type = other DNA
tcgtcttttttctctcacaggaatccgcgtagcatctgctagctccttcactcaccataatctctccagaactccgttgaacgaggatgtttgcatttttgcatgcatct

SEQ ID NO: 62307 - DNA, 110 bp, synthetic construct
  source 1..110: mol_type = other DNA
actaaccgtgtgacttcaggcaagttatgtaactaatctctctgagaatgggtataatatcagtccttatattgcagatgggaagctgaggattagctaaattaatacat

SEQ ID NO: 62308 - DNA, 110 bp, synthetic construct
  source 1..110: mol_type = other DNA
gaatgggtataatatcagtccttatattgcagatgggaagctgaggattagctaaattaatacatgtaaaatggttaaaacgatgtctggcacattataagtaaaatata

SEQ ID NO: 62309 - DNA, 110 bp, synthetic construct
  source 1..110: mol_type = other DNA
agtggaggttgttggcacacttcttctgtaaagatccagctagtaaatatttcagattttgtaggccatatggtctccgtcacggtactcagctctgccacttttgtacc

SEQ ID NO: 62310 - DNA, 110 bp, synthetic construct
  source 1..110: mol_type = other DNA
attttgtaggccatatggtctccgtcacggtactcagctctgccacttttgtaccatggcagccagagacaatacttaaatcaataggtgtggccatacgccaataaaat

SEQ ID NO: 62311 - DNA, 110 bp, synthetic construct
  source 1..110: mol_type = other DNA
tcctgaaatgtagagcagccagggtgaatgacaggaacctataatgagctcctttcctggtatattattcttcatacaggcctgggtttgcctcttggttcacaaagagc

SEQ ID NO: 62312 - DNA, 110 bp, synthetic construct
  source 1..110: mol_type = other DNA
cctggtatattattcttcatacaggcctgggtttgcctcttggttcacaaagagccccttggggcaagcggctttgttagcgggtgagctgaagagggcagaaactgctg

SEQ ID NO: 62313 - DNA, 110 bp, synthetic construct
  source 1..110: mol_type = other DNA
cacattctgctcgcttgaagtttgaaggagggtccccgcataatcattttgcactgtccttgcaaatgaagtagctggtcaggcacatgacacttaaaatcagaagacct

SEQ ID NO: 62314 - DNA, 110 bp, synthetic construct
  source 1..110: mol_type = other DNA
gtccttgcaaatgaagtagctggtcaggcacatgacacttaaaatcagaagacctggtgtgaatggtacctggcttatgcctgagaagagtgtgaccttgacccagttat

SEQ ID NO: 62315 - DNA, 110 bp, synthetic construct
  source 1..110: mol_type = other DNA
ccctacagggcagaatcattccccattgagaatcactgctgtatcccaaatgcctctcacctgctaggcactcagtcaatatttagggaaagaatgaacgaggcaagagc

SEQ ID NO: 62316 - DNA, 110 bp, synthetic construct
  source 1..110: mol_type = other DNA
ctcacctgctaggcactcagtcaatatttagggaaagaatgaacgaggcaagagctattcagtattctacaggtatataaaataatttaatttttatctcaagagatcct

SEQ ID NO: 62317 - DNA, 110 bp, synthetic construct
  source 1..110: mol_type = other DNA
ttggcaaaaaatcagtgaagtgcagaaggaaatacagaagcagaacaatgcaggttggcagtgcttttcccagaagacaactagggttagcattttggccgatctccttc

SEQ ID NO: 62318 - DNA, 110 bp, synthetic construct
  source 1..110: mol_type = other DNA
tggcagtgcttttcccagaagacaactagggttagcattttggccgatctccttccagtctttttgttctaatgccttgtcagtaattgagaccataaaatggacacttt

SEQ ID NO: 62319 - DNA, 110 bp, synthetic construct
  source 1..110: mol_type = other DNA
tctgcccctcagccttcataagcagcttcctttctagcctccttttgctcttctgagtcattatgtggccttccttctggacttggagccacactaactcagtgaattgg

SEQ ID NO: 62320 - DNA, 110 bp, synthetic construct
  source 1..110: mol_type = other DNA
agtcattatgtggccttccttctggacttggagccacactaactcagtgaattgggtagcaggaaagttctggatgaagcccacaggagtagagaggagaggaggcgagt

SEQ ID NO: 62321 - DNA, 110 bp, synthetic construct
  source 1..110: mol_type = other DNA
caaccgtgaccaccaagcaaacacagaaaatctccctcaagtacatcgagtaagtgttggctctcggggctatttcggagatgctgtctccttaacgccccagtgtattt

SEQ ID NO: 62322 - DNA, 110 bp, synthetic construct
  source 1..110: mol_type = other DNA
gttggctctcggggctatttcggagatgctgtctccttaacgccccagtgtatttttgatgtgtctctttttccaaaatgatcctgtttgtggcagagcatttgttaacc

SEQ ID NO: 62323 - DNA, 110 bp, synthetic construct
  source 1..110: mol_type = other DNA
ctagtgaccatcagcattccttgtagctgcataactctcgtctttgccccctcttcacacggcctccccctcttctctctgcgacccaaatttccttctgctggacactt

SEQ ID NO: 62324 - DNA, 110 bp, synthetic construct
  source 1..110: mol_type = other DNA
cacacggcctccccctcttctctctgcgacccaaatttccttctgctggacacttccattggaaagggccccgtgtagatagcttgaggtgatttcatctcaggattctt

SEQ ID NO: 62325 - DNA, 110 bp, synthetic construct
  source 1..110: mol_type = other DNA
cctgaaaagatgctgtttccttcatgtgggtgtcagcagagaggtatatggagcagggctcatttctttccagattctgtgcctctttatactctccttttattttccaa

SEQ ID NO: 62326 - DNA, 110 bp, synthetic construct
  source 1..110: mol_type = other DNA
gggctcatttctttccagattctgtgcctctttatactctccttttattttccaaagctatgtaaagctgaattgctgagtcgcacttgacttaagtacccctttcatac

SEQ ID NO: 62327 - DNA, 110 bp, synthetic construct
  source 1..110: mol_type = other DNA
tcccagctagaaaaagtggctgcaaaatgtttttattaatttgctattggttcatcagaagcggaaaggccattaagccctgggaataacatggttgctattgacatata

SEQ ID NO: 62328 - DNA, 110 bp, synthetic construct
  source 1..110: mol_type = other DNA
cagaagcggaaaggccattaagccctgggaataacatggttgctattgacatatattctctgctgattagataagaaatcaccagacagtatggctcactaagctttgaa

SEQ ID NO: 62329 - DNA, 110 bp, synthetic construct; identical to SEQ ID NO: 62327
  source 1..110: mol_type = other DNA

SEQ ID NO: 62330 - DNA, 110 bp, synthetic construct; identical to SEQ ID NO: 62328
  source 1..110: mol_type = other DNA

SEQ ID NO: 62331 - DNA, 110 bp, synthetic construct
  source 1..110: mol_type = other DNA
ccattccttgttgacacagataaacccatcagccgccttctctcgggaacagtaaagagcctccatctgcccagccggtggatgctgccttctggccacggtttttaaaa

SEQ ID NO: 62332 - DNA, 110 bp, synthetic construct
  source 1..110: mol_type = other DNA
agagcctccatctgcccagccggtggatgctgccttctggccacggtttttaaaagacctcaaataaagatcagtcgtgaccatcctgaagagtagaagcaggaatagct

SEQ ID NO: 62333 - DNA, 110 bp, synthetic construct
  source 1..110: mol_type = other DNA
acagttgaggatcggggtgaaaatgatgcaactctgattggatccagggtactttattgcacctggagactcagtgactcagcgttacctcgtcgagcggcacagctgct

SEQ ID NO: 62334 - DNA, 110 bp, synthetic construct
  source 1..110: mol_type = other DNA
attgcacctggagactcagtgactcagcgttacctcgtcgagcggcacagctgctgtctgggtgggaaagagtggaaggggcttttaaggcccaggcagggccctcggtc

SEQ ID NO: 62335 - DNA, 110 bp, synthetic construct
  source 1..110: mol_type = other DNA
gagcaggaagcttttctggttttgttttttggccacatccagagcacagatccctgggccagggatcgaatctgagccatggttgggacaacaccagatccttaatgtat

SEQ ID NO: 62336 - DNA, 110 bp, synthetic construct
  source 1..110: mol_type = other DNA
gggccagggatcgaatctgagccatggttgggacaacaccagatccttaatgtattgtactgggccagggatcaaaattgcacctcagcagcaatttgagctgctgcaga

SEQ ID NO: 62337 - DNA, 110 bp, synthetic construct
  source 1..110: mol_type = other DNA
cagatatcaatttccccacttgttacagtgcttcttgaccttgcctgctctttgaaattacccgaggttcttcaaaaatccccgtggctgagccccaccaatgcagattc

SEQ ID NO: 62338 - DNA, 110 bp, synthetic construct
  source 1..110: mol_type = other DNA
aattacccgaggttcttcaaaaatccccgtggctgagccccaccaatgcagattctggtttaactgatctggggtccagcctgggcttttggctttgaaggtgattagaa

SEQ ID NO: 62339 - DNA, 110 bp, synthetic construct
  source 1..110: mol_type = other DNA
tctctttgatgctgggtgaattccaggtgactggtgctgttatgtcatacttaagagtggggcagcaaacagctgatgagaagctccagctacaacgaccagagcttgcc

SEQ ID NO: 62340 - DNA, 110 bp, synthetic construct
  source 1..110: mol_type = other DNA
tttacacatgttcaggttcatgcacatatcgcatgatgggctgcctcagttgtccttggagaatttttgtgataaagatgttttaaaacgaaagtacgggactcctatcc

SEQ ID NO: 62341 - DNA, 110 bp, synthetic construct
  source 1..110: mol_type = other DNA
gttcatgcacatatcgcatgatgggctgcctcagttgtccttggagaatttttgtgataaagatgttttaaaacgaaagtacgggactcctatcctaggctatactgaat

SEQ ID NO: 62342 - DNA, 110 bp, synthetic construct
  source 1..110: mol_type = other DNA
taaccatttctttccctggatgccgaccttcttcccgcctcacgtctctatttccacccatgaattctactgagagttcttctctttccctctgaaatctccctcctctg

SEQ ID NO: 62343 - DNA, 110 bp, synthetic construct
  source 1..110: mol_type = other DNA
acccatgaattctactgagagttcttctctttccctctgaaatctccctcctctgaacggacacaactaagagacatgaggctttttttcaaaaaaaaaaaaaaaaaaaa

SEQ ID NO: 62344 - DNA, 110 bp, synthetic construct
  source 1..110: mol_type = other DNA
gtcagtaatgatccaggggctaggattaggtcccaaacagatctccaaatttatggattttgtttcattactgaaaaaaagaaaaagaaaaaaaagcctaaaaacctgcg

SEQ ID NO: 62345 - DNA, 110 bp, synthetic construct
  source 1..110: mol_type = other DNA
cagcaacacagaatgggagagcttacctggtagatctggggtcacccagctaccccaagagttagtcaagactcaaacccagatctgatttcatgctcagccctccttcc

SEQ ID NO: 62346 - DNA, 110 bp, synthetic construct
  source 1..110: mol_type = other DNA
caagagttagtcaagactcaaacccagatctgatttcatgctcagccctccttcccctgctcccagctgcctccgtttatgaggcacagaatggctctaatctatggctg

SEQ ID NO: 62347 - DNA, 110 bp, synthetic construct
  source 1..110: mol_type = other DNA
aactggcatgtagacatggggagagtcgcacgggctggctggacgtgtgcaggaaatggtagagacatgggacggagttctgtgaggccaggcttgctctagaagcatta

SEQ ID NO: 62348 - DNA, 110 bp, synthetic construct
  source 1..110: mol_type = other DNA
atggtagagacatgggacggagttctgtgaggccaggcttgctctagaagcattagttcggacatgcaggacgtcttgtgctgggaagacggacagatgctggaagcact

SEQ ID NO: 62349 - DNA, 110 bp, synthetic construct
  source 1..110: mol_type = other DNA
caaagacaaagttatgaaacaaatcatataatagaacagagaataaacaaggcatcagtcttctcaagagcaacctcaacgatgcagagacacagctttaagcttcggca

SEQ ID NO: 62350 - DNA, 110 bp, synthetic construct
  source 1..110: mol_type = other DNA
cagtcttctcaagagcaacctcaacgatgcagagacacagctttaagcttcggcatggaaatcagtggttctgttctaccctatcatcaggcaaacacatgtgaggacaa

SEQ ID NO: 62351 - DNA, 110 bp, synthetic construct
  source 1..110: mol_type = other DNA
gggtcgggcttacttcctctgggttttgtgctgcttctgacactcaaaattacttgttctctcgtgggaagagctgcacttgtggcttctagttggatctgtcagtggtg

SEQ ID NO: 62352 - DNA, 110 bp, synthetic construct
  source 1..110: mol_type = other DNA
gttctctcgtgggaagagctgcacttgtggcttctagttggatctgtcagtggtggatgtgtcgacaaggaggaacttgtctgccttctccttcagccctagcatgaggc

SEQ ID NO: 62353 - DNA, 110 bp, synthetic construct
  source 1..110: mol_type = other DNA
tgctttccattctgactcttaggagagagttggcccctctgcagagggcaccacattagctgatcagagagcttctaaacaaaccctcagattcctcattttagcccccc

SEQ ID NO: 62354 - DNA, 110 bp, synthetic construct
  source 1..110: mol_type = other DNA
aacccacatcctcatggatgctagtcaggttccttactgctaagccacagcaggaactcctagtatccattcttttctttctttttttttttttttttgcgcatccttta

SEQ ID NO: 62355 - DNA, 110 bp, synthetic construct; identical to SEQ ID NO: 62354
  source 1..110: mol_type = other DNA

SEQ ID NO: 62356 - DNA, 110 bp, synthetic construct
  source 1..110: mol_type = other DNA
gaatggtgtcgatttcataatgatggaaagaccaagattgtttgctggtacagcaagctgtgtcttgtacacatgtatcttaatgtgcttttccagttcctttcaaaaga

SEQ ID NO: 62357 - DNA, 110 bp, synthetic construct
  source 1..110: mol_type = other DNA
taggtccaccagattcttccttggtttttgcccatgagttgaaccattattcttctgtatcattggctttgtgaactctttcgcgttagcaggctgtgtgatttcactta

SEQ ID NO: 62358 - DNA, 110 bp, synthetic construct
  source 1..110: mol_type = other DNA
tttgcctgggcaagaacacacccctgcaacaaatgaccggtgcccaacagtaatgtgactcagattaacaagaaggttggccctccagccagaacacctcaagaacatta

SEQ ID NO: 62359 - DNA, 110 bp, synthetic construct
  source 1..110: mol_type = other DNA
tgactcagattaacaagaaggttggccctccagccagaacacctcaagaacattaacccatttgggacggcaagatggctccgctgaatacatggcagcaggagacaggt

SEQ ID NO: 62360 - DNA, 110 bp, synthetic construct
  source 1..110: mol_type = other DNA
tcttctttctcgccatggcacaagctccatcctaaggacaaatgactgagggcaagcaacagcagaaggagaggcaaaatacaggaaacacttggaaggaagaaaaatag

SEQ ID NO: 62361 - DNA, 110 bp, synthetic construct
  source 1..110: mol_type = other DNA
ttccagtcacaccacactctctttgctgttcccattgtctgggacctttctgcggctgggtcctttttatcattcaggtctcagctaaaatgtcccctccttagagccat

SEQ ID NO: 62362 - DNA, 110 bp, synthetic construct
  source 1..110: mol_type = other DNA
agtcggaagagttgttatagtcatgattattgttggtcacaataaaagaatagagatgaaaatcagcagtgggaaaaggtgccgaggggagactgggcaccagctggcag

SEQ ID NO: 62363 - DNA, 110 bp, synthetic construct
  source 1..110: mol_type = other DNA
atgaaaatcagcagtgggaaaaggtgccgaggggagactgggcaccagctggcagttttcctctcccagcaagtcacagggacagctcttgattctctcagcactgatgt

SEQ ID NO: 62364 - DNA, 110 bp, synthetic construct
  source 1..110: mol_type = other DNA
taatagttgccaaggaaataacttctttgaggcctttgtaaagcgtgtttaaccaatctgtatcatgtttaaacgcagcgagccttctctgtgattacagctgagttttc

SEQ ID NO: 62365 - DNA, 110 bp, synthetic construct
  source 1..110: mol_type = other DNA
atttgtacacctggaaaaaataaagttgcttcaaaatgttaactgaggtattgatgggtggggagtgaagggaaatggaaggagggtggtaatttttcttccatattttc

SEQ ID NO: 62366 - DNA, 110 bp, synthetic construct
  source 1..110: mol_type = other DNA
gtaagtaacatcccatcaagtctgctacatccaacttgttagaagcaagttactatgttcagcccacactcaaggggaggggggagtgtgaataccagcaggtggggatc

SEQ ID NO: 62367 - DNA, 110 bp, synthetic construct
  source 1..110: mol_type = other DNA
tgttcagcccacactcaaggggaggggggagtgtgaataccagcaggtggggatcattggggccatcttagagtgtgcctgccacccttgcacaagtctatacgtctggt

SEQ ID NO: 62368 - DNA, 110 bp, synthetic construct
  source 1..110: mol_type = other DNA
gaagagaggccttgctaagctgtgattcatttaaaaataatcctttctgcatccaataacatcagatttagggctttaatttgatgtgctgattcgtaacttcagaattg

SEQ ID NO: 62369 - DNA, 110 bp, synthetic construct
  source 1..110: mol_type = other DNA
ataacatcagatttagggctttaatttgatgtgctgattcgtaacttcagaattggtaaaaatggagagtaactattttgacttgggcaaaatcccaagtcaaattctta

SEQ ID NO: 62370 - DNA, 110 bp, synthetic construct
  source 1..110: mol_type = other DNA
caataatccccttgcttgactaaaagtaatgtttgttttcaacaatgattcttataattgaaggtttcttattgcccagaaagacagtgaaaaaattgttgaatggcagg

SEQ ID NO: 62371 - DNA, 110 bp, synthetic construct
  source 1..110: mol_type = other DNA
atttataaaggcctgtggtcagcattaaagtaagctaatcagaagccaacaacgaggggagctgttaccctcctaagcctgaaggcacaagagtggagccattactaata

SEQ ID NO: 62372 - DNA, 110 bp, synthetic construct
  source 1..110: mol_type = other DNA
tccactatttttctgttctatcttggcttgtatagacaggataatatgaagctgagaaaggaaagggggggaaccaggtggcgagagcatgacagtaaaggcatgtttag

SEQ ID NO: 62373 - DNA, 110 bp, synthetic construct
  source 1..110: mol_type = other DNA
acattcaaatagaggctctataactgaccagttctgtgaccttggtatgttacgtaaaaaaaaaaataccctgtgcctcagtttcctcatctgtaaaacagagttaataa

SEQ ID NO: 62374 - DNA, 110 bp, synthetic construct
  source 1..110: mol_type = other DNA
ctctgtctgacatttcattaagcataacatcctctatatccatggatgttgctgcaaatggtagaatttcattcttttagatagctgattatacacatattccactatac

SEQ ID NO: 62375 - DNA, 110 bp, synthetic construct
  source 1..110: mol_type = other DNA
tcccaccagctataagtgacaatgctcatggagtattgctaaccagggaagcttacccaagccttggcattcagagtttttatcagggctccattacataggtctgactg

SEQ ID NO: 62376 - DNA, 110 bp, synthetic construct
  source 1..110: mol_type = other DNA
tgagccacaatgggaactccatgatgctgttcttaaatagagtctaataatgaatgtaattaagttcttgctttgtgctaatcactttagaatactcttttagttatatt

SEQ ID NO: 62377 - DNA, 110 bp, synthetic construct
  source 1..110: mol_type = other DNA
ttctaagaatgatggttttgaatattccaaggacaccatgtattttgtctgagttgtcatttttttctggaaaagagagaatgtcctagtatgaggagctgatctaaagt

SEQ ID NO: 62378 - DNA, 110 bp, synthetic construct
  source 1..110: mol_type = other DNA
gtcatttttttctggaaaagagagaatgtcctagtatgaggagctgatctaaagttctaatagcacttttttcacctccataagtagcactcaaataaagtctgagcttt

SEQ ID NO: 62379 - DNA, 110 bp, synthetic construct
  source 1..110: mol_type = other DNA
ggattagagtgttctgtcttattcactgtaattttcaggctatatatttggccatgattgatatattctgacaagagaaatttgtgtctgaattgggggaattaagtaat

SEQ ID NO: 62380 - DNA, 110 bp, synthetic construct
  source 1..110: mol_type = other DNA
gaattaatgtcgaggcagtgaggatgaagaagatgagatagagaattgttttggaaagcttgacatgtctttgataactgatcatatgcagaatgggttgatggagaggg

SEQ ID NO: 62381 - DNA, 110 bp, synthetic construct
  source 1..110: mol_type = other DNA
aagcttgacatgtctttgataactgatcatatgcagaatgggttgatggagagggctggagcatttaccaaatgtttgagttgtatgatggtatgtatgtaagtgccata

SEQ ID NO: 62382 - DNA, 110 bp, synthetic construct
  source 1..110: mol_type = other DNA
accgagttataattggtatcatatgacatctattttaaacctttgagctctccgtgctcctgttacagagaactcagtttctagattctcagctaactgtgatctgcttg

SEQ ID NO: 62383 - DNA, 110 bp, synthetic construct
  source 1..110: mol_type = other DNA
gctgacacctttggatgggtgatttattattcctgattcaattcatggtaaggatttaatttctaaaactttcagtgaatgtattcattgcacttgatgatcctgggcca

SEQ ID NO: 62384 - DNA, 110 bp, synthetic construct; identical to SEQ ID NO: 62383
  source 1..110: mol_type = other DNA

SEQ ID NO: 62385 - DNA, 110 bp, synthetic construct
  source 1..110: mol_type = other DNA
cgtgtgcgtgtgcagagcagaccagtgtgcacacgcttccagctgagagtgaacaagacgatgctctgccttcttgtttccgctctcatactgcaaacacgtgtccttct

SEQ ID NO: 62386 - DNA, 110 bp, synthetic construct
  source 1..110: mol_type = other DNA
caacagaaagagtagaaatagccatcaagatctatgtagttgtactatgtcacctgaagtcatttaaaacaacccaacatcacctgacatgtaaatatgtgacggagaca

SEQ ID NO: 62387 - DNA, 110 bp, synthetic construct
  source 1..110: mol_type = other DNA
gaagtcatttaaaacaacccaacatcacctgacatgtaaatatgtgacggagacaacccaaatcagcagaactgcctacctaagccacaggagaacctcccttctgaccc

SEQ ID NO: 62388 - DNA, 110 bp, synthetic construct
  source 1..110: mol_type = other DNA
cgtccttgaataaagtgctcggcgtggccccaaacacttcctccctcccttccgcctgccatcttctatcgaaacactttcgtcgttcacttcccggctgcatgggccag

SEQ ID NO: 62389 - DNA, 110 bp, synthetic construct
  source 1..110: mol_type = other DNA
tattttcttgcaaaggaaatggttttggtctgccataaggtctgggagctgtatgaaatcaaagtaaatgatacagaacagtatggtccaatgtaattttctgtaacgat

SEQ ID NO: 62390 - DNA, 110 bp, synthetic construct
  source 1..110: mol_type = other DNA
aaagtgcaagaaggaattggcagacaaggaagtgctgaggtaggcaagagccaatttgcagaggctatagaccatgctgagacactgggaatctgggtgcagcttagctg

SEQ ID NO: 62391 - DNA, 110 bp, synthetic construct
  source 1..110: mol_type = other DNA
ttgcagaggctatagaccatgctgagacactgggaatctgggtgcagcttagctgacttcttgtgctctgggtctcccatggggctgtgatcaaggagtagctgtggtta

SEQ ID NO: 62392 - DNA, 110 bp, synthetic construct
  source 1..110: mol_type = other DNA
aacactgagtaggaaggtggacagtacctttttgtttgcctgacagttacatatggaatttttcaagatgatttctcacaaagaccttcaataaataatcacagcctgac

SEQ ID NO: 62393 - DNA, 110 bp, synthetic construct
  source 1..110: mol_type = other DNA
gaatttttcaagatgatttctcacaaagaccttcaataaataatcacagcctgacgtttgcatgtaacttgattcagtgacaaacaagggtagtaggtgcctggaatatg

SEQ ID NO: 62394 - DNA, 110 bp, synthetic construct
  source 1..110: mol_type = other DNA
ccactaccagcatcatcattcctactaccagttgtacctttaagtgaaagaaaaataactctgtattaagctagcaatttttcctttttctgggttcatctcttataact

SEQ ID NO: 62395 - DNA, 110 bp, synthetic construct
  source 1..110: mol_type = other DNA
taactctgtattaagctagcaatttttcctttttctgggttcatctcttataactgttagcataactggccattcttgcaagctgttacacacttcattacaaagagaag

SEQ ID NO: 62396 - DNA, 110 bp, synthetic construct
  source 1..110: mol_type = other DNA
ggaatgctttctatgtctctttaaatcctactcatcctcaaagcacagattaacctcccttcctttcaggatgctgaacaattaccttttcaacagcttctgtccttctt

SEQ ID NO: 62397 - DNA, 110 bp, synthetic construct
  source 1..110: mol_type = other DNA
tataatagatggcaagaaatcctgccttgttttacttgtttatcagttacaaatacaattagctgcaaaaacaaaaaccaaaaaaccccagaaaacctagcaaatattcg

SEQ ID NO: 62398 - DNA, 110 bp, synthetic construct
  source 1..110: mol_type = other DNA
atatctagtcacctgtgatgggacacgatggaggataaggtgagaaaaagaatgtatatgtgtgtgtgtgtgtgtgtgtgtgactggatcactttgcggtacagtagaaa

SEQ ID NO: 62399 - DNA, 110 bp, synthetic construct; identical to SEQ ID NO: 62398
  source 1..110: mol_type = other DNA

SEQ ID NO: 62400 - DNA, 110 bp, synthetic construct
  source 1..110: mol_type = other DNA
gtggcagctgccaagtgaaaatggcaaagaatatctgagatagtttgcagagcgttaggcaagatattattctgaaggttttatttcgtggcagttgttctgaagcctaa

SEQ ID NO: 62401 - DNA, 110 bp, synthetic construct
  source 1..110: mol_type = other DNA
tctactatccatgttgctgcaaatgacaaaatttcattcttattcatggctgagtagtattacacacacacacacacgaacacatattacatcttctttatccatctatc

SEQ ID NO: 62402 - DNA, 110 bp, synthetic construct
  source 1..110: mol_type = other DNA
gctcaggttctgctccttgtagaggctgatggcaagggccaaccttcagttcataccagcaaggacgttctgttttgatttaacctatgtcgtcgataactttggttgtt

SEQ ID NO: 62403 - DNA, 110 bp, synthetic construct
  source 1..110: mol_type = other DNA
ccatctccatctgaaggtccatagcgtcggatcggcatgtaatgaagcgagacatacaattaattacacagggtctgaataaaaggctcaagagcacaacgatggctatg

SEQ ID NO: 62404 - DNA, 110 bp, synthetic construct
  source 1..110: mol_type = other DNA
acaccagaagcaagaaaactacaatcccacagcctgtggaactgagtccacaaacacaggtcagaagttaccctggaaccagttggtccctggcccttgggtggtgtgaa

SEQ ID NO: 62405 - DNA, 110 bp, synthetic construct
  source 1..110: mol_type = other DNA
acaggtcagaagttaccctggaaccagttggtccctggcccttgggtggtgtgaaaggagggtactgctaggacactgccacttctccaaggtcaagaaatgtcactaac

SEQ ID NO: 62406 - DNA, 110 bp, synthetic construct
  source 1..110: mol_type = other DNA
cctagcctaggaacttccacctgccacaggtgcgaccctaaaaagacaaaaacagaaaataaaataaatgcactaccccgggagttccctgttgacacagtggtttaagg

SEQ ID NO: 62407 - DNA, 110 bp, synthetic construct
  source 1..110: mol_type = other DNA
acaaaaacagaaaataaaataaatgcactaccccgggagttccctgttgacacagtggtttaagggtctgatgttgtcactgctgtggcatgggttcgacccctggcctg

SEQ ID NO: 62408 - DNA, 110 bp, synthetic construct
  source 1..110: mol_type = other DNA
tcaacatacctcgggaaaaatcaccacatggagctaattaacatatccatcgtctctgcatagtgaccatgtgtgtgtatgtgtatgtgagttgagaatatttaagatct

SEQ ID NO: 62409 - DNA, 110 bp, synthetic construct
  source 1..110: mol_type = other DNA
ctgcatagtgaccatgtgtgtgtatgtgtatgtgagttgagaatatttaagatctatgcttttagcgaatttcaagtatacaaaaaggtattgttaactatcctcaccat

SEQ ID NO: 62410 - DNA, 110 bp, synthetic construct
  source 1..110: mol_type = other DNA
tcagtaaaagcctgcaaaagatgcttctcctgtgtccatggaccagcttgtcagccacagtcagcacctgtgggttttcactgccctctcctatagttcccctcatggat

SEQ ID NO: 62411 - DNA, 110 bp, synthetic construct
  source 1..110: mol_type = other DNA
ggtgcagccactatggagaactgtatagaggttccttaaaaaaataaatttagaattaccatgtgatccagcaataccactcctgggcatttacccagagaaaacaataa

SEQ ID NO: 62412 - DNA, 110 bp, synthetic construct; identical to SEQ ID NO: 62411
  source 1..110: mol_type = other DNA

SEQ ID NO: 62413 - DNA, 110 bp, synthetic construct
  source 1..110: mol_type = other DNA
ttttcccgggaaacgagctggcaacttgatcaggactgtgtttccgtggacaaagacgccaagcgggcatttctctaaagaacgaagctggttttctttccgtggcttcg

SEQ ID NO: 62414 - DNA, 110 bp, synthetic construct
  source 1..110: mol_type = other DNA
aagatcactgatcacagattaccctaacaaatacaataataaagtgtgaatattgtgaaaattaacaaaatgtgatgcagatgcaggaagtgagtaaatgctatgggaaa

SEQ ID NO: 62415 - DNA, 110 bp, synthetic construct
  source 1..110: mol_type = other DNA
tgaaaattaacaaaatgtgatgcagatgcaggaagtgagtaaatgctatgggaaaaaaactcaacaagggtgccaggaaacttcaatttgtaaaaaatgcattatttgca

SEQ ID NO: 62416 - DNA, 110 bp, synthetic construct
  source 1..110: mol_type = other DNA
tctagagaaaactcccactgcccctagaagctgcctcaatgacaccataatcctgttctcactcctatgttacatctcaacccttttgccagccctgatttccacgcttg

SEQ ID NO: 62417 - DNA, 110 bp, synthetic construct
  source 1..110: mol_type = other DNA
ttcagaagaggaagcagagggtcagaatccgaggtggagatgtgacaacgcagcagaggtcagagcgagcaggagtgagaacagaagaggcttggaagctgaaggaaagg

SEQ ID NO: 62418 - DNA, 110 bp, synthetic construct
  source 1..110: mol_type = other DNA
gaggtcagagcgagcaggagtgagaacagaagaggcttggaagctgaaggaaagggcggacagtctctagaagctacaccaggcaaagacacagattctgctctggcacg

SEQ ID NO: 62419 - DNA, 110 bp, synthetic construct
  source 1..110: mol_type = other DNA
cattgggcagatgaatacacggaggcacagtgaagttaagcagacttgtccaatgtcacccagctggtaagtgacccagctgggttgtgatataagtagtctggttccag

SEQ ID NO: 62420 - DNA, 110 bp, synthetic construct
  source 1..110: mol_type = other DNA
ggagcctcattcagatttgaaaattgtccctgaaagtcatcttttccggtctcgctgcgacagataaccctgcacacattttctgcatgcattctcaaatgcgttgtcgt

SEQ ID NO: 62421 - DNA, 110 bp, synthetic construct
  source 1..110: mol_type = other DNA
ataatttcttagaggtaccaaaataaaaaatataaaagagtcaaatcaattttctggattatcacctaactgaactgaaggacaacagctccacgagggcaagtaatcat

SEQ ID NO: 62422 - DNA, 110 bp, synthetic construct
  source 1..110: mol_type = other DNA
aatttttaattataagttaatttaatgtatttattttggccatgaccaaggcatgcagaagttcccaggccagcgatggaacttgagccactgcagtgacaatactggat

SEQ ID NO: 62423 - DNA, 110 bp, synthetic construct
  source 1..110: mol_type = other DNA
gttaatttaatgtatttattttggccatgaccaaggcatgcagaagttcccaggccagcgatggaacttgagccactgcagtgacaatactggatccttaacccactaca

SEQ ID NO: 62424 - DNA, 110 bp, synthetic construct
  source 1..110: mol_type = other DNA
aaatgtgcagtgaagcttttcttaaaagctggagtcagaaggaaagttaacatcagttgtatatttggagtggggggtagtattttatttaattgtatacatatatattt

SEQ ID NO: 62425 - DNA, 110 bp, synthetic construct
  source 1..110: mol_type = other DNA
aatccaagttaaagccaaatgggctatcgctacatacctatcagaatagctagaataaaaaatagtggtatcatggagatcctgttgtaattcagcagaaacgaatatga

SEQ ID NO: 62426 - DNA, 110 bp, synthetic construct
  source 1..110: mol_type = other DNA
taaaaaatagtggtatcatggagatcctgttgtaattcagcagaaacgaatatgactagtgaccatgaggatgcaggtttggtccctggcctcgtctgtggcttaaggat

SEQ ID NO: 62427 - DNA, 110 bp, synthetic construct
  source 1..110: mol_type = other DNA
agccattgagccacaacgggaactcccagagtggtctcttcttgattatcatttctgttcggtaagatgctgactctaatctataatcatgaaatgttttctgaatggga

SEQ ID NO: 62428 - DNA, 110 bp, synthetic construct
  source 1..110: mol_type = other DNA
tgttcggtaagatgctgactctaatctataatcatgaaatgttttctgaatgggaaaaaaaatgcttccccagaagcatctcttggttttacataatttggttccttgaa

SEQ ID NO: 62429 - DNA, 110 bp, synthetic construct
  source 1..110: mol_type = other DNA
gtttttctcattggtacaaagcgatttgttgttgtttgcccatttgtctgtgatgctcagccggagggatgggtgttcggtctgtgttggttttccatcctgcggatggc

SEQ ID NO: 62430 - DNA, 110 bp, synthetic construct
  source 1..110: mol_type = other DNA
tcttcccttggggggggggggtatgtgtgtttattgagtgatgagccgagaagatctgtcctgggttttctacagctgaagacagctttctgtgacttgagaaaaggtaa

SEQ ID NO: 62431 - DNA, 110 bp, synthetic construct
  source 1..110: mol_type = other DNA
ctgtcctgggttttctacagctgaagacagctttctgtgacttgagaaaaggtaaagccccttgggaacaagagagattctcaacaccaaactgagcttttgagctttct

SEQ ID NO: 62432 - DNA, 110 bp, synthetic construct
  source 1..110: mol_type = other DNA
tttttttattggagaatagttgacttagaaggttgtgttagtttcaggtgtacagcacagtaaattggttatacaaatacatgtctgttcctctccagattctgttccca

SEQ ID NO: 62433 - DNA, 110 bp, synthetic construct
  source 1..110: mol_type = other DNA
cacagtaaattggttatacaaatacatgtctgttcctctccagattctgttcccaaatagatcaccacacagtattaagtagattaccctgtgctatacagctaggtcct

SEQ ID NO: 62434 - DNA, 110 bp, synthetic construct
  source 1..110: mol_type = other DNA
actgctcattcagctgtgaatcactcatctttttttttccatttccaaatttaaagatttaaccaagaaaatttaagcagtttttgtcactgttctactgatgaggtgag

SEQ ID NO: 62435 - DNA, 110 bp, synthetic construct
  source 1..110: mol_type = other DNA
gatttaaccaagaaaatttaagcagtttttgtcactgttctactgatgaggtgagagaaagattagttgcaaatattcaaacgactgtctttactcaaaagtcatacttg

SEQ ID NO: 62436 - DNA, 110 bp, synthetic construct
  source 1..110: mol_type = other DNA
ataacaaatgatgacaaggatatggagaaaagggaacgctcgtggcgctgtcagtgggaatgtacattggtgcaaccactatgttaaacagtatggaggttcctcaaaaa

SEQ ID NO: 62437 - DNA, 110 bp, synthetic construct
  source 1..110: mol_type = other DNA
gggaatgtacattggtgcaaccactatgttaaacagtatggaggttcctcaaaaaacacaaaatagaagtgccgcaggaatcggtaattccactcttggatgtatgtctg

SEQ ID NO: 62438 - DNA, 110 bp, synthetic construct
  source 1..110: mol_type = other DNA
ccgagagggcccacgttgtcccatcaaagccccgcaccagttctctgtatcctgagtggcagcaccttccaaggccatgtgacctgtccaggtttttcattgcacaatta

SEQ ID NO: 62439 - DNA, 110 bp, synthetic construct
  source 1..110: mol_type = other DNA
gtggcagcaccttccaaggccatgtgacctgtccaggtttttcattgcacaattaggatgaaaatagattcctcgtttgtggctaagagcatatgaagattaaaatataa

SEQ ID NO: 62440 - DNA, 110 bp, synthetic construct
  source 1..110: mol_type = other DNA
agaggtcagtggcttgctacaaggaaagttccattctattcactgtaaggtccggactggatgtttatagctgtgccattttctttgtggttatgtacggacccagaccc

SEQ ID NO: 62441 - DNA, 110 bp, synthetic construct
  source 1..110: mol_type = other DNA
acctaatgacgtaaatcatcacttatttaaatggctcctgagtttccagctgcccatctggtctaagctcagctggatccttcttccgctgggccagaccctcccgcttc

SEQ ID NO: 62442 - DNA, 110 bp, synthetic construct
  source 1..110: mol_type = other DNA
cccccctcagcacttagcattccggcacatgccgaaggcttcccacttcaagcgcccataactctttctcttggggtcctctatcaacctgtaggagggaggccaacgat

SEQ ID NO: 62443 - DNA, 110 bp, synthetic construct
  source 1..110: mol_type = other DNA
ctgaatggtggagcatggcctcactcacagctggtaattggcaggctgttggccacagcacctcagttttcctccgcatgacctattcatgtgacgttcacctgctggag

SEQ ID NO: 62444 - DNA, 110 bp, synthetic construct
  source 1..110: mol_type = other DNA
cagcacctcagttttcctccgcatgacctattcatgtgacgttcacctgctggagaataattagcctgctcaccttttcacatggtagtgtcggaagttcaaatacaaca

SEQ ID NO: 62445 - DNA, 110 bp, synthetic construct
  source 1..110: mol_type = other DNA
cctctgccaagacgtactccaaaggaaaccgtcttaccgtgtgtcttgctgcagattctcacacgtgtctgatgcgttttgccaagccacttctgagtgttgaggaggca

SEQ ID NO: 62446 - DNA, 110 bp, synthetic construct
  source 1..110: mol_type = other DNA
ttctcacacgtgtctgatgcgttttgccaagccacttctgagtgttgaggaggcaggcacttctcctagagccttgttgattaatcttattttgcagtattgggaacatt

SEQ ID NO: 62447 - DNA, 110 bp, synthetic construct
  source 1..110: mol_type = other DNA
tacccgtgggtctcatctactgccctcagccttaagtgcacatcggattcatctggagggtttttgaaatgccagcacctgcatcccacctcacagagactcaaaggtaa

SEQ ID NO: 62448 - DNA, 110 bp, synthetic construct
  source 1..110: mol_type = other DNA
gagggtttttgaaatgccagcacctgcatcccacctcacagagactcaaaggtaattggtctggagtgggtcctgggcatcaggattcttaaaagctccctgggtgattc

SEQ ID NO: 62449 - DNA, 110 bp, synthetic construct
  source 1..110: mol_type = other DNA
ttggctcagaatgttgtggatcctcttggcagctctttttttctgggctgactcagctaacctgtcttgggctcatgtatgcctctgtggccagcaggcaggtggctcat

SEQ ID NO: 62450 - DNA, 110 bp, synthetic construct
  source 1..110: mol_type = other DNA
gctaacctgtcttgggctcatgtatgcctctgtggccagcaggcaggtggctcatggctgggccataagtcgggtggttggctggctgttactcagggtatggctgttgg

SEQ ID NO: 62451 - DNA, 110 bp, synthetic construct
  source 1..110: mol_type = other DNA
ctgcgttttcattgtccgttcatccatccattcattttgccaaaccccgtgttctccgattggctggtacttccttttaaatgtcgggccggctagggccaggtcgccct

SEQ ID NO: 62452 - DNA, 110 bp, synthetic construct
  source 1..110: mol_type = other DNA
ctcaggagcaagtgtgtttgaattgggcccgaggagagggctcggctgaggccccgggcgttgggaagggtcgtgcggtagataccacggaggttttggaagaaagatgg

SEQ ID NO: 62453 - DNA, 110 bp, synthetic construct
  source 1..110: mol_type = other DNA
gggcgttgggaagggtcgtgcggtagataccacggaggttttggaagaaagatggaattccttagtactaatgaactcaagttcccatgctgggcctttgggctgctcac

SEQ ID NO: 62454 - DNA, 110 bp, synthetic construct; identical to SEQ ID NO: 62452
  source 1..110: mol_type = other DNA

SEQ ID NO: 62455 - DNA, 110 bp, synthetic construct; identical to SEQ ID NO: 62453
  source 1..110: mol_type = other DNA

SEQ ID NO: 62456 - DNA, 110 bp, synthetic construct
  source 1..110: mol_type = other DNA
tgtaggtattggccagtggaaatcaattattattgggtgtagcgcttttaccaaagttgaacatagttggtggattcaattcggggaatgtttgttgagtccccataggg

SEQ ID NO: 62457 - DNA, 110 bp, synthetic construct
  source 1..110: mol_type = other DNA
gttgaacatagttggtggattcaattcggggaatgtttgttgagtccccatagggttctgtgataggcctgaggaagagggatataaagatgtatagatgggagttccct

SEQ ID NO: 62458 - DNA, 110 bp, synthetic construct
  source 1..110: mol_type = other DNA
gatgcatttactccccggtcttgttgatgaaggacatggtgcgccagtattcatttcctaggagagcgttgtaaatgtcttcgggaatcataaaaggtgatggatgaaga

SEQ ID NO: 62459 - DNA, 110 bp, synthetic construct
  source 1..110: mol_type = other DNA
tcctaggagagcgttgtaaatgtcttcgggaatcataaaaggtgatggatgaagaaggactggaggttgtggcaggtccagaagttacagtgcaggatttcaccccgtgg

SEQ ID NO: 62460 - DNA, 110 bp, synthetic construct
  source 1..110: mol_type = other DNA
cgttctgcgagagccagagctcccccatggggtctgtgatccattgtggtgactgcatcacggcccagctttcctctcggcccggtcctgtgtaattccctccagagacc

SEQ ID NO: 62461 - DNA, 110 bp, synthetic construct
  source 1..110: mol_type = other DNA
catcacggcccagctttcctctcggcccggtcctgtgtaattccctccagagacctcagcccaaagagcatttcctaccaagcttcccccagaccaatacacagacgtca

SEQ ID NO: 62462 - DNA, 110 bp, synthetic construct
  source 1..110: mol_type = other DNA
agcccgaagcgagttcctcaggggaagcagcagtttggactttcccccccacccagacgccgcccctggccccctgcccaccaccaggctctgccacaggcactttacag

SEQ ID NO: 62463 - DNA, 110 bp, synthetic construct
  source 1..110: mol_type = other DNA
gacgccgcccctggccccctgcccaccaccaggctctgccacaggcactttacagcttctgccacataatgctcggcttccctcttggtcccacagccgtctccaacctg

SEQ ID NO: 62464 - DNA, 110 bp, synthetic construct
  source 1..110: mol_type = other DNA
gccaagatgccaagtatgcttctgtattattgctttttctgcccccagaacaccggagccggagtgatcgacgggagcagagggctgctgctcccctttccgtagctgct

SEQ ID NO: 62465 - DNA, 110 bp, synthetic construct
  source 1..110: mol_type = other DNA
gagccggagtgatcgacgggagcagagggctgctgctcccctttccgtagctgctcccccactgcctgcctaccccccagcccacagccagaggaggcgcgaagttaagg

SEQ ID NO: 62466 - DNA, 110 bp, synthetic construct
  source 1..110: mol_type = other DNA
gtacagcaggatctcactgctcatccaccccgagtactttcaaaaggacacaactacagtggtgaaggagagatgcgtggctacccggggccaggagtcgggcgagaccg

SEQ ID NO: 62467 - DNA, 110 bp, synthetic construct
  source 1..110: mol_type = other DNA
acagtggtgaaggagagatgcgtggctacccggggccaggagtcgggcgagaccgcggccagaaagggagagcacgaggcactgccttgggataagggaagtgtcccgaa

SEQ ID NO: 62468 - DNA, 110 bp, synthetic construct
  source 1..110: mol_type = other DNA
ccatgggccacgggtgcggtaggaaaaagaaaaatgccatttcgttggcattcacagagctagcggggttgggagaagccgctgggagtggagctgccggcagagagcag

SEQ ID NO: 62469 - DNA, 110 bp, synthetic construct
  source 1..110: mol_type = other DNA
gcagcacggaggagggttagggcagcagacctaaacccgtctgcttccttatcacccgcagccccgcagccatttggaaggcgccagagttggctgtcaattacttttct

SEQ ID NO: 62470 - DNA, 110 bp, synthetic construct
  source 1..110: mol_type = other DNA
ccgcagccccgcagccatttggaaggcgccagagttggctgtcaattacttttctgagcagctctagaactccgtgggcatgctaaggagaacaaaatcagcagtggatg

SEQ ID NO: 62471 - DNA, 110 bp, synthetic construct
  source 1..110: mol_type = other DNA
gatcaagtggagtttatccctgggatgcaaggtagctgaacacacacaaatcagtaagtgtgatatacactacattaacagaatggaagatgaaaaacacatcatctcaa

SEQ ID NO: 62472 - DNA, 110 bp, synthetic construct
  source 1..110: mol_type = other DNA
actaagaccaatgctgtcctcatcaggaaccccaagcttcccaggtggagaacccccagtcaaaaggtggggtttagggtgccgtcttcactttcctctaagatgatcta

SEQ ID NO: 62473 - DNA, 110 bp, synthetic construct
  source 1..110: mol_type = other DNA
ccagtcaaaaggtggggtttagggtgccgtcttcactttcctctaagatgatctaacccatccctttctcaagatcttgggtcccactgaggtaaagatccacctgttct

SEQ ID NO: 62474 - DNA, 110 bp, synthetic construct
  source 1..110: mol_type = other DNA
tggacattttaaccaagacttctgatattcacattttaatattcccattatttaaaatatagtcagatacaataatatgcagtcacagcctgcttgaagccctcaatgga

SEQ ID NO: 62475 - DNA, 110 bp, synthetic construct; identical to SEQ ID NO: 62474
  source 1..110: mol_type = other DNA

SEQ ID NO: 62476 - DNA, 110 bp, synthetic construct
  source 1..110: mol_type = other DNA
cctggatgtgttcactttattaaaattactgagctatacacctgaaatttttaagctttacatgatgcattccacaacttaaaagaaagaggagttcctgttgtggctca

SEQ ID NO: 62477 - DNA, 110 bp, synthetic construct
  source 1..110: mol_type = other DNA
ccaaatccatgggagccctgtacaagccaagtgagaagccaagtagcatgagacagacagagcagcatattcatcgccaagcaaggaccagagacaaaaattatagccgg

SEQ ID NO: 62478 - DNA, 110 bp, synthetic construct
  source 1..110: mol_type = other DNA
tgaaaaaaggctttttaaaagagttacaaccagacagaaatgttatactttactactgaatgttgctgaagtctaatttgcttgtttgcttgcttcccaaaagaattact

SEQ ID NO: 62479 - DNA, 110 bp, synthetic construct; identical to SEQ ID NO: 62478
  source 1..110: mol_type = other DNA

SEQ ID NO: 62480 - DNA, 110 bp, synthetic construct
  source 1..110: mol_type = other DNA
ttcgcaaatgggaaaacggagactcagaaggatcagccacttgctgaggtcctagattcagtaagattccaggtttcctgaaccccctgaaacacagttcttcctctact

SEQ ID NO: 62481 - DNA, 110 bp, synthetic construct
  source 1..110: mol_type = other DNA
gtatctgagccacagcagtgacaatcccgagtccttaaccactatgccaccagataactcccaagagaacctattttacaacttacccagtgtttcataagagactgttg

SEQ ID NO: 62482 - DNA, 110 bp, synthetic construct
  source 1..110: mol_type = other DNA
gaactcaggtgagatgaggtatctaggggcactggcattttctagcatgctcacgtcatcaataacactgtcaagtaacaaaagctttgagtacacataaagctcactga

SEQ ID NO: 62483 - DNA, 110 bp, synthetic construct
  source 1..110: mol_type = other DNA
ttcagtctttatgatatattacaatactagaagagaagcacagaaagcagtgcgcctggcttgaacatttcaattcactgtgccagtcacactgccaagacactgagagg

SEQ ID NO: 62484 - DNA, 110 bp, synthetic construct
  source 1..110: mol_type = other DNA
gtcaaagcagttagacttcgatggtcactgggagggggttgaggaccagagcatacaagggagctggctggatcgaccacttcacaaggccacctgaacaagtgtagtct

SEQ ID NO: 62485 - DNA, 110 bp, synthetic construct
  source 1..110: mol_type = other DNA
ggggcaaggaagaagggtggggggaggctaaacgtaattgttatctcggaggacccttaaaatagctaactttgaggcttcctccctccttgaagggttaaatttctcca

SEQ ID NO: 62486 - DNA, 110 bp, synthetic construct
  source 1..110: mol_type = other DNA
cgagttccagtgacccccctctttgtgttcgattaatttcctagaactgctcacagaactcagaaacacgttttacttactaggttactccccagaggtagggtagcagc

SEQ ID NO: 62487 - DNA, 110 bp, synthetic construct
  source 1..110: mol_type = other DNA
gaactcagaaacacgttttacttactaggttactccccagaggtagggtagcagcacgactgaaagtgccaactctgagatcacgtggttggctacactggcaagccacc

SEQ ID NO: 62488 - DNA, 110 bp, synthetic construct
  source 1..110: mol_type = other DNA
attttaagatgcttcaaacaattcgaactctcttattataaaaggcgtttagtcacgtgccgaattcattcctgtccagtttcagtgacaaagtggttctctcatttgta

SEQ ID NO: 62489 - DNA, 110 bp, synthetic construct
  source 1..110: mol_type = other DNA
cgtgccgaattcattcctgtccagtttcagtgacaaagtggttctctcatttgtatgtataaaaacaatgccagaaatgaaaacaaaactgattcaactgattttgtact

SEQ ID NO: 62490 - DNA, 110 bp, synthetic construct
  source 1..110: mol_type = other DNA
agggatctcagtaatagaaagtacggtagactgatgataaatttttgatttgtgctgtagggattagtggcataaccataccataaaaaggtgcctgtgtattcatcttc

SEQ ID NO: 62491 - DNA, 110 bp, synthetic construct
  source 1..110: mol_type = other DNA
tgtagggattagtggcataaccataccataaaaaggtgcctgtgtattcatcttctagtgactcgcttgagagagatcccccatggggatccaaggctctcctgggagcc

SEQ ID NO: 62492 - DNA, 110 bp, synthetic construct
  source 1..110: mol_type = other DNA
cagctcacaacaatgccggaaccttaacccactgagaaaggccggggattgaacccgcgtcctcatggttactagctgggtttgtaacccgccgagccacaatgggaact

SEQ ID NO: 62493 - DNA, 110 bp, synthetic construct; identical to SEQ ID NO: 62492
  source 1..110: mol_type = other DNA

SEQ ID NO: 62494 - DNA, 110 bp, synthetic construct
  source 1..110: mol_type = other DNA
caccatctccgttttccagctgaagacgtcgaggctgaagagttcgaatgccctgccgagtgagacgagtccgctggtgagtggcagagctgggctcccacccagttttc

SEQ ID NO: 62495 - DNA, 110 bp, synthetic construct
  source 1..110: mol_type = other DNA
agttttaaatgtatcatttcacgtagtttccatgacaaaccagtagaattagtattattatcattccccttttgtggatgcgaatactgaggcttgtaaggtaatctccc

SEQ ID NO: 62496 - DNA, 110 bp, synthetic construct
  source 1..110: mol_type = other DNA
tattatcattccccttttgtggatgcgaatactgaggcttgtaaggtaatctcccaaggttactggtcttatcagtggtgaagctgtgattccaactagtggattagcct

SEQ ID NO: 62497 - DNA, 110 bp, synthetic construct
  source 1..110: mol_type = other DNA
aagtcccaaatggtattgaagtgctgtctagtgttcctaagtgcaagaatgctgtgaggcaccttgagaagaatatacatggtgttccagttgtggcgcaatggcaatga

SEQ ID NO: 62498 - DNA, 110 bp, synthetic construct
  source 1..110: mol_type = other DNA
cctaagtgcaagaatgctgtgaggcaccttgagaagaatatacatggtgttccagttgtggcgcaatggcaatgagaccgactaggaaccatgaagttgagggttcgatc

SEQ ID NO: 62499 - DNA, 110 bp, synthetic construct
  source 1..110: mol_type = other DNA
ggtagatagatcatttgtgcagggtcactggctttctccttatcaaggtgttctggcttcctgtccactatgtattttactttgccactgctgggtgttagtgcttctgt

SEQ ID NO: 62500 - DNA, 110 bp, synthetic construct
  source 1..110: mol_type = other DNA
ttcttttatgactcagaaaaggagactggacatcacacatccaacttcttagagaacaacaaaagcttagacccatgggtgagaacgatggataatgaggagcaagtgca

SEQ ID NO: 62501 - DNA, 110 bp, synthetic construct
  source 1..110: mol_type = other DNA
acaacaaaagcttagacccatgggtgagaacgatggataatgaggagcaagtgcactgcttttcgggcacgtgctgatttcagtgtaggaaaactacctttttcacctac

SEQ ID NO: 62502 - DNA, 110 bp, synthetic construct
  source 1..110: mol_type = other DNA
tccctgcctttagtacgggttccttccaatccatcctccaccaagggagacacccaaagacctagcctctcaagactttgcttccctgctcacattctccagtcctacca

SEQ ID NO: 62503 - DNA, 110 bp, synthetic construct
  source 1..110: mol_type = other DNA
gaatacttgaatgacatatttaaccaacctgacttaaagaccatatgtgaaccttccagggtctctaaccttttcaaatgcatatggaatatttatgaaagccaaccagg

SEQ ID NO: 62504 - DNA, 110 bp, synthetic construct
  source 1..110: mol_type = other DNA
cgctgagccacaatgggaactcctccgtgcacttttttaaagctaatgtatggccagggttgaagacctctagatgacaccattgagagcaggagaattcaaaggagttc

SEQ ID NO: 62505 - DNA, 110 bp, synthetic construct
  source 1..110: mol_type = other DNA
tcctctttctctatttctctctgtcctcgtgtgcgtgcctctctcccacctccccccaaccccagcctctctctctctgtctctcctaattggcccatgtcctaaatact

SEQ ID NO: 62506 - DNA, 110 bp, synthetic construct
  source 1..110: mol_type = other DNA
ggacatgtcacagtctctcttgcccttagtgtcttcatctagagaacgtccagaacgaatccaagcctgaagtcattgtaataaaaattgtatgattctattccctggac

SEQ ID NO: 62507 - DNA, 110 bp, synthetic construct
  source 1..110: mol_type = other DNA
cgaatccaagcctgaagtcattgtaataaaaattgtatgattctattccctggacaatctggcttacccattccagagagctactttttctctgtggtatattagaacaa

SEQ ID NO: 62508 - DNA, 110 bp, synthetic construct
  source 1..110: mol_type = other DNA
tctgtctgccatgagtccctctagcctgtggggaatgtggggaggcaggtatataggacttgtttccctacccacaaaaccatgtacggtctagctaaggaatgaaaact

SEQ ID NO: 62509 - DNA, 110 bp, synthetic construct
  source 1..110: mol_type = other DNA
ggacttgtttccctacccacaaaaccatgtacggtctagctaaggaatgaaaactaagtgacaatgacattcttgcttttgcctcttttccctccgaattttatagcttg

SEQ ID NO: 62510 - DNA, 110 bp, synthetic construct
  source 1..110: mol_type = other DNA
tgcaacctcatgtttcctagttggatttgtttccactgcgccacgacgggaatacccatttagtatttttgaaaatctccccaggtgattctaaacagcagccaggtttg

SEQ ID NO: 62511 - DNA, 110 bp, synthetic construct; identical to SEQ ID NO: 62510
  source 1..110: mol_type = other DNA

SEQ ID NO: 62512 - DNA, 110 bp, synthetic construct
  source 1..110: mol_type = other DNA
catctgatttaggacatttttcaaattatcacgcagacttaaaacagcgtatctgtacatatggctctggcttgggctttatcctctactctatttctgatgaaaaatag

SEQ ID NO: 62513 - DNA, 110 bp, synthetic construct
  source 1..110: mol_type = other DNA
ccaccacgttaccacaaatagctggctaagcacatctttatgtcagagtgcaaacactttctttttttctcttttagggccgtacctgtagcatatgaaggttcccaggc

SEQ ID NO: 62514 - DNA, 110 bp, synthetic construct
  source 1..110: mol_type = other DNA
aaatagctggctaagcacatctttatgtcagagtgcaaacactttctttttttctcttttagggccgtacctgtagcatatgaaggttcccaggctaggggtctaatcag

SEQ ID NO: 62515 - DNA, 110 bp, synthetic construct
  source 1..110: mol_type = other DNA
caaacactgtacaattccacatgcataatgtacctaaagtagtcaaactcaaataaagtagaatgctggggacagggcagagtttcagttttgtgagactggttacacaa

SEQ ID NO: 62516 - DNA, 110 bp, synthetic construct
  source 1..110: mol_type = other DNA
actcaagcattcggtcatttctggcaacacaaataatacatacatttgattattagcttgaggaattatagtcttctgggatggatgtcttcttggcaaaatgagagtga

SEQ ID NO: 62517 - DNA, 110 bp, synthetic construct
  source 1..110: mol_type = other DNA
tgtcagagagaaataaaaagcccatgatctttcaagagataacatgattggggagcgagagatgcctaaaatatggtttgtacgtgaaaggcccatcgtggaagggcctg

SEQ ID NO: 62518 - DNA, 110 bp, synthetic construct
  source 1..110: mol_type = other DNA
cgagagatgcctaaaatatggtttgtacgtgaaaggcccatcgtggaagggcctgtatttctttctttaaattagttgtaccacacaaaaattactcactaaaaaaagaa

SEQ ID NO: 62519 - DNA, 110 bp, synthetic construct
  source 1..110: mol_type = other DNA
aggctggttcgtaagtttcagatttcattgccaccccccccggccccacgactgttctcatgtgccaggtagataagcctagggatgatctacttttttaacttgcttct

SEQ ID NO: 62520 - DNA, 110 bp, synthetic construct
  source 1..110: mol_type = other DNA
cactgacatgtgagaagtcagtttcctcagtcctgctttcctccctgtatctcggcctcgaggtagctcactccaggccgactgcaagcattctggccaagactgcaggg

SEQ ID NO: 62521 - DNA, 110 bp, synthetic construct
  source 1..110: mol_type = other DNA
agtgagggtgccaaccacagggcaaggcgggcgctggccttgacacgagctcaagaggctgcgtgatctgcaagcacggggaaggaccggaggtttgggaggagaggaga

SEQ ID NO: 62522 - DNA, 110 bp, synthetic construct
  source 1..110: mol_type = other DNA
aggctgcgtgatctgcaagcacggggaaggaccggaggtttgggaggagaggagaggcaaccatacaagacacctgcggcagaggctgcacccgcgggcagagaccgcag

SEQ ID NO: 62523 - DNA, 110 bp, synthetic construct
  source 1..110: mol_type = other DNA
tgggcacagctgaaaaagaaaagaaacaaaagagcccatatagccaagtgctgccctgaagattgggaggtatgaccagagcttcagaaaagagagatgatgggaggaca

SEQ ID NO: 62524 - DNA, 110 bp, synthetic construct
  source 1..110: mol_type = other DNA
tctcgcctctaccttaagtgttcaattaataaggatttgttctgtgtaagaagctacaaagagaagcctaggacccctggacagatgctggcatcagcacccatatcaac

SEQ ID NO: 62525 - DNA, 110 bp, synthetic construct
  source 1..110: mol_type = other DNA
agagaagaaggactccaggtctggccacaagacatcacgcatgtaatgaatgaggaagcaggaagcaaggcagaaccaggaaaatgtcaacatctgggatggcagaagga

SEQ ID NO: 62526 - DNA, 110 bp, synthetic construct
  source 1..110: mol_type = other DNA
ccaatatttttaatcaggggtttacaaactataaaggcatttgctgaagctcccgattctgtgggggcctgatagtttcatgtttcccctaatcatgctctacgtcagtg

SEQ ID NO: 62527 - DNA, 110 bp, synthetic construct
  source 1..110: mol_type = other DNA
ttccatagtgtaaatactcccaccatggcccattgcaaactaccacagtttaatagccagatcacaacatttccgaataattaaaaagtggctgctagctggcccaagca

SEQ ID NO: 62528 - DNA, 110 bp, synthetic construct
  source 1..110: mol_type = other DNA
ttctaagttggttctatcatattttgggggcatgattgacaatgattatatggttaaagggcaagccaaaagactactatgaactactgaaaatcaccaagaacaaaata

SEQ ID NO: 62529 - DNA, 110 bp, synthetic construct
  source 1..110: mol_type = other DNA
ttgaaatatttagcatcaaaattctgaattatagacagaccctttgctgtttacgtgctggatatgttttgggttctaaatgctgtagggtgttgtcttgacctgtttta

SEQ ID NO: 62530 - DNA, 110 bp, synthetic construct
  source 1..110: mol_type = other DNA
actggcacagacaacacagcctgagatgctccagtgggcgctgggcaccaaaacttaggctctggaggtcagtccctgggagaaggttggggttggcagtgtggagacag

SEQ ID NO: 62531 - DNA, 110 bp, synthetic construct
  source 1..110: mol_type = other DNA
taggctctggaggtcagtccctgggagaaggttggggttggcagtgtggagacagcctaagggattagggagctgtgccccatgggtggggggagtgatacactaagggc

SEQ ID NO: 62532 - DNA, 110 bp, synthetic construct
  source 1..110: mol_type = other DNA
tcaatttgttcacctcacagtcagatgcacatctttgtcctatatagtgaaatgccaaaatatagtagaagcatattcttaaacacataaatttggttttggactagaaa

SEQ ID NO: 62533 - DNA, 110 bp, synthetic construct
  source 1..110: mol_type = other DNA
tgtcctatatagtgaaatgccaaaatatagtagaagcatattcttaaacacataaatttggttttggactagaaagcaccttgtagaaatataatcactggagacaaatg

SEQ ID NO: 62534 - DNA, 110 bp, synthetic construct
  source 1..110: mol_type = other DNA
gtggtttctagaaaaagggcatttcgctttctatttaatctcggaagcaggaggataaattaaccaagtttatataaaagaagatctgctaccaagagattccctactgg

SEQ ID NO: 62535 - DNA, 110 bp, synthetic construct
  source 1..110: mol_type = other DNA
taaattaaccaagtttatataaaagaagatctgctaccaagagattccctactggtctttttgtctctcttgagtctttcccacacctggcttattctccataaaggtac

SEQ ID NO: 62536 - DNA, 110 bp, synthetic construct
  source 1..110: mol_type = other DNA
caaatagccaagataatcttgagaaagaagaccaaagctggagacatcacatactctggtatcaaaacatagtacaggagttcccattgtggctcagtggttaatgaatc

SEQ ID NO: 62537 - DNA, 110 bp, synthetic construct
  source 1..110: mol_type = other DNA
cccaagtttatcacctgagaatattggcagtaaagagctgtaaacagtaaaatcaaatagttgtattctgacatgtgttagcaccataccatccagactgcccctatttg

SEQ ID NO: 62538 - DNA, 110 bp, synthetic construct
  source 1..110: mol_type = other DNA
gcaatcagaaaataaaaagaaataaaatgaatccaaaatggaaaaggagtaaaactgtcattgtttgcagatgacatgatgctctaagtagaaaatcttaatgctaccag

SEQ ID NO: 62539 - DNA, 110 bp, synthetic construct; identical to SEQ ID NO: 62538
  source 1..110: mol_type = other DNA

SEQ ID NO: 62540 - DNA, 110 bp, synthetic construct
  source 1..110: mol_type = other DNA
cagcaaaaacaatgagatgtcacttttgagattcgatttcataaagattctggcttctaccttgctctccctttctaattctctcactcattttgagagaagactgctgc

SEQ ID NO: 62541 - DNA, 110 bp, synthetic construct
  source 1..110: mol_type = other DNA
cagttgaaaccatgaaagtagacctgaggggagaacagaaatggctaaaaggaatagtatcatggtcaacaagaagaaaggaatttcaagcagggaattatccacatgtc

SEQ ID NO: 62542 - DNA, 110 bp, synthetic construct
  source 1..110: mol_type = other DNA
tccatagtggctgcaccattttacatttccactaatgatgtacaagggttacagtttatccacatctttgccagcacttattttgttttttctttgttttgtatttttgg

SEQ ID NO: 62543 - DNA, 110 bp, synthetic construct
  source 1..110: mol_type = other DNA
ttccctctttgcccgtaagctatacatgtagtgcctggattttctagaagctcatccatttataaagaacggcttcactcctgctcttttaatctgaaatcatcttccta

SEQ ID NO: 62544 - DNA, 110 bp, synthetic construct
  source 1..110: mol_type = other DNA
tcaaatgaatgatcccttcttccataaattatctaatttgattatgttcttcaattcttttactgtgttagctctatgatcttgccttggtattgacctcacatttatga

SEQ ID NO: 62545 - DNA, 110 bp, synthetic construct
  source 1..110: mol_type = other DNA
atcccagaatgggcctgtctccagccattgataaagaggatttcgagctggccgttgccaagtagagataacagaacccccacctgcctcacaggacccttttatgcaca

SEQ ID NO: 62546 - DNA, 110 bp, synthetic construct
  source 1..110: mol_type = other DNA
ctacaatcccctcatcccgccacaaaaaaccctctttatattattgttggcaggttttaaagactgaaaatgaaaaattctgaattttctagattcctgtactttttttt

SEQ ID NO: 62547 - DNA, 110 bp, synthetic construct
  source 1..110: mol_type = other DNA
ggtgcagccctaaaaagaaaaagaaaaaaaagactgtctagtgaagttccttcatttattaaaagtagttaaattgaggggttcccgttgtggtgcagcagaaatgaatc

SEQ ID NO: 62548 - DNA, 110 bp, synthetic construct
  source 1..110: mol_type = other DNA
ttattaaaagtagttaaattgaggggttcccgttgtggtgcagcagaaatgaatccaaccaggaaccttggcggtccctggttgctgtgagctgtggtgtgggttacaga

SEQ ID NO: 62549 - DNA, 110 bp, synthetic construct
  source 1..110: mol_type = other DNA
ggtccctttaccctgctgtcacagcctcaaatcagtactggcagatgagttaccttggccagaaccatttaaaatctcaattacctagtgcggtcattccactgatttct

SEQ ID NO: 62550 - DNA, 110 bp, synthetic construct
  source 1..110: mol_type = other DNA
tgagtcggtagctcgagaggggagcctgggaatgtatttatctgacaagttctcggcgatgctcttggtctgaggccaagacttggagagctccgggtgattacaggtga

SEQ ID NO: 62551 - DNA, 110 bp, synthetic construct
  source 1..110: mol_type = other DNA
agatgactaaattgctttccaaaatgctcgcgacaatgtacactcccaccaatatgcttcctacacttgttactcaagttattagctattcaagttattaatattaccta

SEQ ID NO: 62552 - DNA, 110 bp, synthetic construct
  source 1..110: mol_type = other DNA
tggatatagaaataaggccctaaacactatcttctttttatataaactttctccagaatggacatgcatataaggagagatgccacgacttaaagtggtctgaaaaaaga

SEQ ID NO: 62553 - DNA, 110 bp, synthetic construct
  source 1..110: mol_type = other DNA
gaatggacatgcatataaggagagatgccacgacttaaagtggtctgaaaaaagatggacctctgacctacgtctatgtctgtgaaggtggttttacttcattagcaact

SEQ ID NO: 62554 - DNA, 110 bp, synthetic construct
  source 1..110: mol_type = other DNA
cagtatggcttataaagccaacatgagaggcccttttcacaaagtgtttgccagtcctgtcttagtccacttcatcttcatgatatgaagtagattttggtaataccaac

SEQ ID NO: 62555 - DNA, 110 bp, synthetic construct
  source 1..110: mol_type = other DNA
acccacgtcctcccagatattagtcagattcgtttccactgtgccacagtgggaactccttaactgacaaaattcttgttgaactttcattcttttgtatgtaaagaggt

SEQ ID NO: 62556 - DNA, 110 bp, synthetic construct
  source 1..110: mol_type = other DNA
ctccttaactgacaaaattcttgttgaactttcattcttttgtatgtaaagaggttcttttgttgaactgtttgccaataaaaggcagtatcacccctttgaacttcaaa

SEQ ID NO: 62557 - DNA, 110 bp, synthetic construct
  source 1..110: mol_type = other DNA
tgggcacttgagacagttttcagataaccctccagcctgtctgtaagctgtggttgtagaaacagagggacttatctggcctgatttaagagttcttgaaatcacttgtg

SEQ ID NO: 62558 - DNA, 110 bp, synthetic construct
  source 1..110: mol_type = other DNA
aatgtatgtcagttggaaagtaggacaagagaaaaaggactttggttagtcacaggaggtggtctggctggaaagatttggtgcaaagagtgagcaataaatagaagagg

SEQ ID NO: 62559 - DNA, 110 bp, synthetic construct
  source 1..110: mol_type = other DNA
gaggtggtctggctggaaagatttggtgcaaagagtgagcaataaatagaagaggaagacttaaaaaacatattattaaacttgcatattgtttttgtcaaattgagggg

SEQ ID NO: 62560 - DNA, 110 bp, synthetic construct
  source 1..110: mol_type = other DNA
gcagaataacataaaacttctccatttgtgtctaagggttttttcagccatgcattacatttaaatagaaaataaatgtgaagccaagaaaggagttcattattgaaaac

SEQ ID NO: 62561 - DNA, 110 bp, synthetic construct; identical to SEQ ID NO: 62560
  source 1..110: mol_type = other DNA

SEQ ID NO: 62562 - DNA, 110 bp, synthetic construct
  source 1..110: mol_type = other DNA
catgacctatctttgggttattctagtttacagaggagttagaggattggccaagacaaaaatgggaatatctgaatatccctttatactccctagtatttatataaaga

SEQ ID NO: 62563 - DNA, 110 bp, synthetic construct
  source 1..110: mol_type = other DNA
acaaaaatgggaatatctgaatatccctttatactccctagtatttatataaagaaatagagatcacaaaaaatgcttacttcaagcatgaagccatggtcactgagtca

SEQ ID NO: 62564 - DNA, 110 bp, synthetic construct
  source 1..110: mol_type = other DNA
caactaagcacagtttttagtcaatgagtcaatgaaatttgaaaggcaaggcatgctgcctctccataaaacaaataagtgacacttaacctcatcctacctgggctata

SEQ ID NO: 62565 - DNA, 110 bp, synthetic construct
  source 1..110: mol_type = other DNA
ctgcctctccataaaacaaataagtgacacttaacctcatcctacctgggctataccatgtagctaaaaatgggaaatgtccatcattttacctgtgtctctccataaag

SEQ ID NO: 62566 - DNA, 110 bp, synthetic construct
  source 1..110: mol_type = other DNA
tcctgccccgttttaaattaccattgcactgtccattgttgctgcaactttacacccagagctctcccaagacatgtgagaaaatgatggaaaccacttctttatttcct

SEQ ID NO: 62567 - DNA, 110 bp, synthetic construct
  source 1..110: mol_type = other DNA
tacaattagtatatagaattctatcttgggccacatccagtggcctttatttattaagctatttaaattcattttaagaaagaatttctgagtagctgacactctctagt

SEQ ID NO: 62568 - DNA, 110 bp, synthetic construct
  source 1..110: mol_type = other DNA
aagctatttaaattcattttaagaaagaatttctgagtagctgacactctctagtcagtgttaactatgtggggaaaggcaaacaatgtctcaatgtacatctctaattc

SEQ ID NO: 62569 - DNA, 110 bp, synthetic construct
  source 1..110: mol_type = other DNA
gggtagggatggaccaggggggtttgggattggcatatgtacactgttatatagactcactggctaacagggaccagctttatagcacagggagctctacccaatattct

SEQ ID NO: 62570 - DNA, 110 bp, synthetic construct
  source 1..110: mol_type = other DNA
tatgtacactgttatatagactcactggctaacagggaccagctttatagcacagggagctctacccaatattctgttataatccatatggtaaaataatctgaaaaaat

SEQ ID NO: 62571 - DNA, 110 bp, synthetic construct
  source 1..110: mol_type = other DNA
caaagcccacagacctaattgacacaggtttaaaaggaaaagaatgtattttactttctttgatctaagttatatatgtagatggcaatagaaacttacagccaagctgc

SEQ ID NO: 62572 - DNA, 110 bp, synthetic construct
  source 1..110: mol_type = other DNA
ttctttgatctaagttatatatgtagatggcaatagaaacttacagccaagctgcacaatcttaccacaaaataatcatttatataatgggaaaaaaagccagtgtggag

SEQ ID NO: 62573 - DNA, 110 bp, synthetic construct
  source 1..110: mol_type = other DNA
tcccaagttcagtttgagaagtggagggcttggcattagggaatctgtgacggaaacattagggaactacctcccttagccgcgttctcccacccatttccctctccctc

SEQ ID NO: 62574 - DNA, 110 bp, synthetic construct
  source 1..110: mol_type = other DNA
acacttgttcagtctctcctgcaaacacactaagtgatcataccaacgtgttatgcactcaactagaagataatgagctttaatctaaggacaaatgcaatcctcgaaaa

SEQ ID NO: 62575 - DNA, 110 bp, synthetic construct
  source 1..110: mol_type = other DNA
tattacacattgcaccagaggactgaaagctaattcaagagggatctgtcccgtgaaagtgcagcatgctgtgtatttatgcagtcctactctgacttacttatcatgtc

SEQ ID NO: 62576 - DNA, 110 bp, synthetic construct
  source 1..110: mol_type = other DNA
aaagtgcagcatgctgtgtatttatgcagtcctactctgacttacttatcatgtctggtttgtaaggaaacatatttacattaagaattataattctaggagttcccatc

SEQ ID NO: 62577 - DNA, 110 bp, synthetic construct
  source 1..110: mol_type = other DNA
gcaatctggactgatgtgcccctgaaattttaaagcaattaaatatttgtcaaaatcaagccttttctatttggctcaagttatattgttttgtcttcctgcagctcaat

SEQ ID NO: 62578 - DNA, 110 bp, synthetic construct
  source 1..110: mol_type = other DNA
tcaagccttttctatttggctcaagttatattgttttgtcttcctgcagctcaatcaaatcttacctatttatatttccaaaatcaatgacaagcaagtgtttcagtcag

SEQ ID NO: 62579 - DNA, 110 bp, synthetic construct
  source 1..110: mol_type = other DNA
aatatagaatgctagcatgtccgtgtgtgaagggcagcaaattgttttgaccaaacatgggattttgtgtgtgaatccatttgaataatttcaagtattgtatctgacaa

SEQ ID NO: 62580 - DNA, 110 bp, synthetic construct
  source 1..110: mol_type = other DNA
catgggattttgtgtgtgaatccatttgaataatttcaagtattgtatctgacaagtacacactcaaatttgttgggaattgtaaatctcccttccagtggcattcaagg

SEQ ID NO: 62581 - DNA, 110 bp, synthetic construct
  source 1..110: mol_type = other DNA
ctcaccactgagctttaatttagttgataagtccataaactagatccaaacatccacaagaaacttggtgtaccaaagccatcaagtggcccgagttgatgaaccagtcc

SEQ ID NO: 62582 - DNA, 110 bp, synthetic construct
  source 1..110: mol_type = other DNA
acaagaaacttggtgtaccaaagccatcaagtggcccgagttgatgaaccagtccctacatctaagagcaccatacctggagagtgactagaaacattttcctgtagcta

SEQ ID NO: 62583 - DNA, 110 bp, synthetic construct
  source 1..110: mol_type = other DNA
atcaaatccaagctgcatctgcgacatacgccacagcaggagcaataccagatccttaacacacttggccaggctggggattgaaacagtaatgccacagagacaagcca

SEQ ID NO: 62584 - DNA, 110 bp, synthetic construct; identical to SEQ ID NO: 62583
  source 1..110: mol_type = other DNA

SEQ ID NO: 62585 - DNA, 110 bp, synthetic construct
  source 1..110: mol_type = other DNA
gaagggaagccatgtgaatgaagatgagctatggaagatctatctggtagaaacgtgtaaaattaacagagagaacagactagaggcaggcagagtaattaaaagacagc

SEQ ID NO: 62586 - DNA, 110 bp, synthetic construct
  source 1..110: mol_type = other DNA
cttggtttcagtgtctttatggcttcctaaattagaaggcagccatataaacaagcaagatcctgtactgtgttgaaccggagagctttgggatttattggcagctcaga

SEQ ID NO: 62587 - DNA, 110 bp, synthetic construct
  source 1..110: mol_type = other DNA
tgtttgaactaggtttgtagacaaatctcaactttgagctctagcttgtctaaaaaatccaggtacttctcaggaacacacaattaataagttatggcacttaagcccac

SEQ ID NO: 62588 - DNA, 110 bp, synthetic construct
  source 1..110: mol_type = other DNA
aatccaggtacttctcaggaacacacaattaataagttatggcacttaagcccacaaattaaagatggaatgaaatatcatcttgacccttatgtttccacatgaagttg

SEQ ID NO: 62589 - DNA, 110 bp, synthetic construct
  source 1..110: mol_type = other DNA
atctgcaccttcatggataccagttggattcattattgctgagccacaataggaacttctcacatatcttctgttctctggtcaatgtctcttccaaatcctaccaagct

SEQ ID NO: 62590 - DNA, 110 bp, synthetic construct; identical to SEQ ID NO: 62589
  source 1..110: mol_type = other DNA

SEQ ID NO: 62591 - DNA, 110 bp, synthetic construct
  source 1..110: mol_type = other DNA
gaagatcatttaatatgtaatcagtatcataaaataatacagtggaaagagcatgggctaagaggcaacagaggaggggagaagccctgactgccagccttcctgatttt

SEQ ID NO: 62592 - DNA, 110 bp, synthetic construct; identical to SEQ ID NO: 62591
  source 1..110: mol_type = other DNA

SEQ ID NO: 62593 - DNA, 110 bp, synthetic construct
  source 1..110: mol_type = other DNA
tttgtttggtaaatggctgcaccagcagcctatggaagttctgggccagggatcgaatccaagccttagctgcagcctatactacagctgcagcagtgccagatccttta

SEQ ID NO: 62594 - DNA, 110 bp, synthetic construct
  source 1..110: mol_type = other DNA
aatccaagccttagctgcagcctatactacagctgcagcagtgccagatcctttacctgctacaccatagcggggactcccaagggtcttcattcttaattactcttctg

SEQ ID NO: 62595 - DNA, 110 bp, synthetic construct
  source 1..110: mol_type = other DNA
agaaattattaagctgccatatttcaagggaaacatcagtgactttttatgtgcgcttagaacgttgctttgaaagcagattatggtgaaagccaagaatatgagtcatt

SEQ ID NO: 62596 - DNA, 110 bp, synthetic construct
  source 1..110: mol_type = other DNA
aataaatcctataaattaggattacaggcccttggggagttccctggtgatctaagggttaggactcagtgctttgactgctaccacccaggtttgatttctggtctggg

SEQ ID NO: 62597 - DNA, 110 bp, synthetic construct
  source 1..110: mol_type = other DNA
ttaggattacaggcccttggggagttccctggtgatctaagggttaggactcagtgctttgactgctaccacccaggtttgatttctggtctgggaaccaagatcccaca

SEQ ID NO: 62598 - DNA, 110 bp, synthetic construct
  source 1..110: mol_type = other DNA
ccttttcttcataaggcagtcgaatgctctctgaataggatccattttttcccttgagcatcagcgagtagccctcctttcctgggtacaggttgaccaccaaacatggc

SEQ ID NO: 62599 - DNA, 110 bp, synthetic construct
  source 1..110: mol_type = other DNA
ttgtaggtagtgttaaatatcatgcctcggtaaataaataattgtgctccataattgtgctctaagtgattcagagattttttttcttttctcttggtttaagagcttga

SEQ ID NO: 62600 - DNA, 110 bp, synthetic construct; identical to SEQ ID NO: 62599
  source 1..110: mol_type = other DNA

SEQ ID NO: 62601 - DNA, 110 bp, synthetic construct
  source 1..110: mol_type = other DNA
ctttactactcatttcaaagacacaaggaatcatgaacacaggcaaagcggggagaagtcagggactaccagtgcaactctctcagccctttcttgccacgttaagacac

SEQ ID NO: 62602 - DNA, 110 bp, synthetic construct
  source 1..110: mol_type = other DNA
aagtcagggactaccagtgcaactctctcagccctttcttgccacgttaagacacataccagctcagatttgacatatgaggtctctaagcaatatatgcagtcatcact

SEQ ID NO: 62603 - DNA, 110 bp, synthetic construct
  source 1..110: mol_type = other DNA
gatggaaggaatctcctcactctgtagtgtgggtcctcatacttgagcctgcatcagaatctcctggaggctttgttcaagcgcaaattactgagccctggcaaagtaga

SEQ ID NO: 62604 - DNA, 110 bp, synthetic construct
  source 1..110: mol_type = other DNA
agaatctcctggaggctttgttcaagcgcaaattactgagccctggcaaagtagatctgggctggggcccaagaatttgtgtttctcacaaatgtccaggtcaaaaatgc

SEQ ID NO: 62605 - DNA, 110 bp, synthetic construct
  source 1..110: mol_type = other DNA
tagggtctaagggcttctatttgtgacttatccaggggaatataatgcgcgtccagagtgaagaactgtgttccatctggtcgaaattttgcccaagagctgtcaaccgc

SEQ ID NO: 62606 - DNA, 110 bp, synthetic construct
  source 1..110: mol_type = other DNA
gagtgaagaactgtgttccatctggtcgaaattttgcccaagagctgtcaaccgctttagggcataaagtctgtgagatgctgaaggttgacagttaaggagtccgtcag

SEQ ID NO: 62607 - DNA, 110 bp, synthetic construct
  source 1..110: mol_type = other DNA
cagcattatagctctgcagcggcattattagtggtttcataatggtccatctgaagatgtcatgtgatttgacctcccattactgggttttagaatagtttgcagttttc

SEQ ID NO: 62608 - DNA, 110 bp, synthetic construct
  source 1..110: mol_type = other DNA
gatgtcatgtgatttgacctcccattactgggttttagaatagtttgcagttttcttgctactacaggcagtgttctgaatagcacctctaaaatacagctgttggcctt

SEQ ID NO: 62609 - DNA, 110 bp, synthetic construct
  source 1..110: mol_type = other DNA
actgatgctgtcatttatttgaaggtactgcattttatttctggtataggaaggcatctttactttttaaagctgtaagtctaatacctaatggagaatagcactgtacc

SEQ ID NO: 62610 - DNA, 110 bp, synthetic construct
  source 1..110: mol_type = other DNA
cacctagttacaagaatcaagcaaataggtaagtggtaggtgataagtttgaaaattaacacgttaggccctgacaatccaccagtcggaatgaataaatggaaacagat

SEQ ID NO: 62611 - DNA, 110 bp, synthetic construct
  source 1..110: mol_type = other DNA
ttaacacgttaggccctgacaatccaccagtcggaatgaataaatggaaacagataatctattacagcaattgaaaagtagattgcttgcttcatattctcaaaggcaac

SEQ ID NO: 62612 - DNA, 110 bp, synthetic construct
  source 1..110: mol_type = other DNA
ctgcctgtgtgccttggtcctctcatgtgactcctctggacactggtttctccatctataaaatggggctaatactatgtcattgggctcttcatgtagactgaatgagg

SEQ ID NO: 62613 - DNA, 110 bp, synthetic construct
  source 1..110: mol_type = other DNA
atggttcctagtcggattcattactataacaagtatttttaaatgagcatctattaccctgatagggaaaacatgaacatcacccctcctccccaaaggaatcaagggct

SEQ ID NO: 62614 - DNA, 110 bp, synthetic construct
  source 1..110: mol_type = other DNA
accctgatagggaaaacatgaacatcacccctcctccccaaaggaatcaagggctggataaggacggggcagggtggggtggcgagggggtgggtgggttggtgaggcag

SEQ ID NO: 62615 - DNA, 110 bp, synthetic construct
  source 1..110: mol_type = other DNA
aatatgcctaagagacttcagtcagcaaaaataaccttgccacttccctctcccctcgaaaagaaaattggtcagtacagtaatattaattggacttgtttgtgtatggg

SEQ ID NO: 62616 - DNA, 110 bp, synthetic construct
  source 1..110: mol_type = other DNA
ccctctcccctcgaaaagaaaattggtcagtacagtaatattaattggacttgtttgtgtatgggttctcaaaaaacttaatttgataggacctgtaatttctgttaaca

SEQ ID NO: 62617 - DNA, 110 bp, synthetic construct
  source 1..110: mol_type = other DNA
agatgtcttaagtagcctgtgaggtagaaagggtgtgataggaggtagtagttgagccctggtatgagatacttacttttacgtgaaataagatgggagatgaattatgt

SEQ ID NO: 62618 - DNA, 110 bp, synthetic construct
  source 1..110: mol_type = other DNA
gaataaggtatattaaaaagagaagtggacattgcccgggggttagagcattataagcatgtccgtagaataattaatattcccagttctgttgattccttggttcttgg

SEQ ID NO: 62619 - DNA, 110 bp, synthetic construct
  source 1..110: mol_type = other DNA
cttctgtgtttttgtgaacaactgatcaaattagattcgtcattcttggcttgtggtgatttgaaattgaaatggaatatattaaagcagccaaccacactgattacatt

SEQ ID NO: 62620 - DNA, 110 bp, synthetic construct
  source 1..110: mol_type = other DNA
aaattaaaaccaacgtattttgctcagagaatcctgtaacagctggaaagaaaggagactgaaacccacagttcaagtaaaatttagacctaggagtgatttttacttat

SEQ ID NO: 62621 - DNA, 110 bp, synthetic construct
  source 1..110: mol_type = other DNA
ggaaaaatgtgttgtattttcccatccaaattatgtttccagttgcattctaatggctcagtgctgtctatgcaaagaatgaggcaagcagaactgaaattgtggcttgc

SEQ ID NO: 62622 - DNA, 110 bp, synthetic construct
  source 1..110: mol_type = other DNA
cattttgtcctttaggaagacagacattggaacgagttgctgcagggaggctgtgaggttttttctcctgaaaatatttgataagagacttaacaattaattgtcctgga

SEQ ID NO: 62623 - DNA, 110 bp, synthetic construct
  source 1..110: mol_type = other DNA
gagactcaataaatttgagctaatctgatttttcaaaaaatagcacaatttctcctttatacataattatatcagttagagattgcgtttggcagaatatcccagaaaag

SEQ ID NO: 62624 - DNA, 110 bp, synthetic construct
  source 1..110: mol_type = other DNA
catggttttgatcctcaatttgtttcttgtatccacaaatctcccttttcatctctttttatcatcttgccttttagcttctgtggtttttttcttttttggttaagtag

SEQ ID NO: 62625 - DNA, 110 bp, synthetic construct
  source 1..110: mol_type = other DNA
atccccatttcatccaaggctgtgaattaccacatagttgcaagagatcatctgaattttggggaccaagctccttggctgtagttgatatggctaattcttgaaccctg

SEQ ID NO: 62626 - DNA, 110 bp, synthetic construct
  source 1..110: mol_type = other DNA
aagcatgggtcagagaactgagtatgaaacatcagactgtgagatctttgattgctaccagcttttgtagttgtatagtcaaaccctcaattgtccaccttgtggtttca

SEQ ID NO: 62627 - DNA, 110 bp, synthetic construct
  source 1..110: mol_type = other DNA
taacatggctcggtcctcaagtagctttcagcaaaagtgaggagacagatgtatagcagaatttaacatgagaggcaaatgactatagaattatacattggatactctaa

SEQ ID NO: 62628 - DNA, 110 bp, synthetic construct
  source 1..110: mol_type = other DNA
ctcaagtagctttcagcaaaagtgaggagacagatgtatagcagaatttaacatgagaggcaaatgactatagaattatacattggatactctaatgtcataaagaaaaa

SEQ ID NO: 62629 - DNA, 110 bp, synthetic construct
  source 1..110: mol_type = other DNA
cttaggctttatttttattttcagaggcaatgttccttaacaaaagacatattgcatacattgttgtaagcttccttacactcgaccctggatgctctttttaatttgga

SEQ ID NO: 62630 - DNA, 110 bp, synthetic construct
  source 1..110: mol_type = other DNA
atacattgttgtaagcttccttacactcgaccctggatgctctttttaatttggatccacatttattgaccaacatgatccaattgactcatttggattcagtcaatacg

SEQ ID NO: 62631 - DNA, 110 bp, synthetic construct
  source 1..110: mol_type = other DNA
atattttctcagtctgtctactttctcattttcaagaaatgagaaaggtcaaagattgctgcattctatgatttaaaattcaaatggggaactttctcttgttctgtgac

SEQ ID NO: 62632 - DNA, 110 bp, synthetic construct
  source 1..110: mol_type = other DNA
ctgataaaatatgaaaaatttacctagccatgtgtccccaaatatccagttgtttggtataatgaagatatcatatctcactgccattgctgttttaatccagatgttct

SEQ ID NO: 62633 - DNA, 110 bp, synthetic construct
  source 1..110: mol_type = other DNA
gtccctatctccccgaaagcatgtgtaggccatatacctgtacacctcctgtcgaagggataacagcctgtgcacactgagggaagaggcagcaagcatgcaaactaaaa

SEQ ID NO: 62634 - DNA, 110 bp, synthetic construct
  source 1..110: mol_type = other DNA
agggataacagcctgtgcacactgagggaagaggcagcaagcatgcaaactaaaagcagctctcatgccaaaaaaaaaaaatagccctcacaaactatgcagggtctatc

SEQ ID NO: 62635 - DNA, 110 bp, synthetic construct
  source 1..110: mol_type = other DNA
gtgtcctcatctgactttggtatcagagtaatgctggccttgtaaatgtccccttcacatttttggaagagtttgagaaagataggtggtgctaataatttagcaatata

SEQ ID NO: 62636 - DNA, 110 bp, synthetic construct
  source 1..110: mol_type = other DNA
atgtccccttcacatttttggaagagtttgagaaagataggtggtgctaataatttagcaatatatacatctatcaattcattatgttgtgtagcttcaatttatatggt

SEQ ID NO: 62637 - DNA, 110 bp, synthetic construct
  source 1..110: mol_type = other DNA
aatttccaccaaatacagcaggtataaaatggtatctggtatctttatcagagatttttaggaatcattttagattctctcagcttcaccatctcttgttccatttgcag

SEQ ID NO: 62638 - DNA, 110 bp, synthetic construct
  source 1..110: mol_type = other DNA
aaagtgcagaataagaggacagttagatttgcatagcagcatgacaggagggacagtgaggatcagggttgtggggaaaagtagacagacaaaacactgtacttactctg

SEQ ID NO: 62639 - DNA, 110 bp, synthetic construct
  source 1..110: mol_type = other DNA
tttcgtgctctctcttctctaccagtatggcctttcaaagatcctttaaaaatgtggtactagaaatgaacacaaaaatcagtccagtcagaccaatataaaccagtgag

SEQ ID NO: 62640 - DNA, 110 bp, synthetic construct; identical to SEQ ID NO: 62639
  source 1..110: mol_type = other DNA

SEQ ID NO: 62641 - DNA, 110 bp, synthetic construct
  source 1..110: mol_type = other DNA
cctgggaagtaaaatcagtttaccgctcaggcatgcagtaatgactgtcatcagcaagaaacattcacttggtaaataaatgaaagtgcaaacataattctaatgaatgt

SEQ ID NO: 62642 - DNA, 110 bp, synthetic construct
  source 1..110: mol_type = other DNA
ctcaggcatgcagtaatgactgtcatcagcaagaaacattcacttggtaaataaatgaaagtgcaaacataattctaatgaatgttaaatttgtttactattaaatggca

SEQ ID NO: 62643 - DNA, 110 bp, synthetic construct
  source 1..110: mol_type = other DNA
caaaactttggttataaacctatcactgtgtatcaggtttaaaagtaggagctatgtaatttgtaatacaaattgggaaatcgttcaccttatcttaagatatggaccag

SEQ ID NO: 62644 - DNA, 110 bp, synthetic construct
  source 1..110: mol_type = other DNA
gtaatttgtaatacaaattgggaaatcgttcaccttatcttaagatatggaccaggcattgagtaggtgtttctttggaaatatgaaaaaactcagcagtaaaattgttg

SEQ ID NO: 62645 - DNA, 110 bp, synthetic construct
  source 1..110: mol_type = other DNA
aaatacaatggcttgggtcactgcagaggtgggggtttgaacccagtctggcacagtgtgctaaaagatctggcattgccacagttatggcataggtcagagctgcagct

SEQ ID NO: 62646 - DNA, 110 bp, synthetic construct
  source 1..110: mol_type = other DNA
gtgtgctaaaagatctggcattgccacagttatggcataggtcagagctgcagctcagattcaatttctggcccagaaacttccatatgccacaaatgaagccattaaaa

SEQ ID NO: 62647 - DNA, 110 bp, synthetic construct
  source 1..110: mol_type = other DNA
tgggggacagaagatcaagtgccatgcccaggtgaaatgccaccagacctggggggagacccaaagtctcaagggtgcctggactactgctgcagcagcaagagcaaaag

SEQ ID NO: 62648 - DNA, 110 bp, synthetic construct
  source 1..110: mol_type = other DNA
gagacccaaagtctcaagggtgcctggactactgctgcagcagcaagagcaaaagaggagtccccctcctccccttctcctatttcagaaggtactccccagagctaccc

SEQ ID NO: 62649 - DNA, 110 bp, synthetic construct
  source 1..110: mol_type = other DNA
taaggaccgcctgacaaaatggaacaaggacacttgatctgagttcaggaaaaaacaccagggatgcccaagcaggaaagggtcccaaggtaggtacccgaccagggact

SEQ ID NO: 62650 - DNA, 110 bp, synthetic construct
  source 1..110: mol_type = other DNA
gctgcatcctggccaagtgctcacctcagggctgagagctgaggtggaaagcccacagttgtgcagttgctgacaggagggccgccatgcttttccaggacatgcctatt

SEQ ID NO: 62651 - DNA, 110 bp, synthetic construct
  source 1..110: mol_type = other DNA
cagttgtgcagttgctgacaggagggccgccatgcttttccaggacatgcctattctcaagttaggtttaaataacccctcctctaggaagtcatccttaatgccagccc

SEQ ID NO: 62652 - DNA, 110 bp, synthetic construct
  source 1..110: mol_type = other DNA
aactcttgtacgttgttggtagaaatgtaaatcggtatagccattattgaaaacagcatggtggttcctcagaaaattgaaagtagaactaccatataattcagcaatcc

SEQ ID NO: 62653 - DNA, 110 bp, synthetic construct
  source 1..110: mol_type = other DNA
gcatggtggttcctcagaaaattgaaagtagaactaccatataattcagcaatcccacatctgggtatgtatccagaataattgagatctggttctcagatatactcgtg

SEQ ID NO: 62654 - DNA, 110 bp, synthetic construct
  source 1..110: mol_type = other DNA
cgggaactcctagccaacatcttaattgcgacctggtaacagactttgagccagaacaacacagctaactcactcccaaattattgaatttcagaacctgtgagctagta

SEQ ID NO: 62655 - DNA, 110 bp, synthetic construct
  source 1..110: mol_type = other DNA
acaacacagctaactcactcccaaattattgaatttcagaacctgtgagctagtaaatgtctgttgttttaaaccactaagtttgggggaggccttatatgaatcggcaa

SEQ ID NO: 62656 - DNA, 110 bp, synthetic construct
  source 1..110: mol_type = other DNA
acaccctctccagcatttattatttgtagacattttaatgatggccattctttctgactgacgtgagtggcatttgttacagcaggccttgcaaaataatgcatttggtc

SEQ ID NO: 62657 - DNA, 110 bp, synthetic construct
  source 1..110: mol_type = other DNA
gactgacgtgagtggcatttgttacagcaggccttgcaaaataatgcatttggtcagaggtttaacctatcattatgcattctgcaaggtgtgcaagttttggttggtcc

SEQ ID NO: 62658 - DNA, 110 bp, synthetic construct
  source 1..110: mol_type = other DNA
aacttataaattgtgattctactagtgagctttatctgtacatcagcactgccatggataatgtagtgcaatgggagttgcttactcttagtgcagtctcagaaatgtca

SEQ ID NO: 62659 - DNA, 110 bp, synthetic construct
  source 1..110: mol_type = other DNA
aaagccatttggcaaacagtttttattctaaagcaaggtgcaacaatagggttataagactggatttcttctgtggcttataaacttcttccaccaaagaagatttccaa

SEQ ID NO: 62660 - DNA, 110 bp, synthetic construct
  source 1..110: mol_type = other DNA
agagaacagaagccattcaatataaaacaaggaaggaattttttataggaaatccaatggctcatggtatccttgattttagaaacagcatgtaatctgagtgtggtgga

SEQ ID NO: 62661 - DNA, 110 bp, synthetic construct
  source 1..110: mol_type = other DNA
aaacgaaagagcactatcacctatgaaaatttttaaaagcctttgaatacaatcaattattttgagggaacagggaagataaattgtgatctccactgtatacagatttt

SEQ ID NO: 62662 - DNA, 110 bp, synthetic construct
  source 1..110: mol_type = other DNA
ttatatgagaagaaacttctagtcataataaagtggttccagccctttgtaagtcttttttttttttctttttgtgcatttgaacaaaccatctcatttcctacacatgc

SEQ ID NO: 62663 - DNA, 110 bp, synthetic construct
  source 1..110: mol_type = other DNA
ttttttttttttctttttgtgcatttgaacaaaccatctcatttcctacacatgcttttcccaacttactcattctcaaaacccagtgaaatcactaatctcctttaaaa

SEQ ID NO: 62664 - DNA, 110 bp, synthetic construct
  source 1..110: mol_type = other DNA
cagatgggtaaaagtctggaggtcttaaacctaatactactctaataaactccacataaggttcttaattctctaacataaaacaacttaatgcaaatgaggatacacag

SEQ ID NO: 62665 - DNA, 110 bp, synthetic construct
  source 1..110: mol_type = other DNA
ctggaggtcttaaacctaatactactctaataaactccacataaggttcttaattctctaacataaaacaacttaatgcaaatgaggatacacagtaaatattacttagg

SEQ ID NO: 62666 - DNA, 110 bp, synthetic construct
  source 1..110: mol_type = other DNA
ctgtgcaatctaagacaaactgcaccagaaattctttacctaggggattcaggaagatggtggagtagtaggacatgagacttgcctactcccacatatacattgagaat

SEQ ID NO: 62667 - DNA, 110 bp, synthetic construct
  source 1..110: mol_type = other DNA
gatggtggagtagtaggacatgagacttgcctactcccacatatacattgagaatccatctacatgtgaaactattcacacagaaaattcgctaaaaactgacataagac

SEQ ID NO: 62668 - DNA, 110 bp, synthetic construct
  source 1..110: mol_type = other DNA
ttatatcagccaatgttcaacaatggccaccctagaactgtcatgatgggtacataaatggaatggtcatgattgcagagagagagagtggcatggtctaaacaagaggg

SEQ ID NO: 62669 - DNA, 110 bp, synthetic construct
  source 1..110: mol_type = other DNA
aaatggaatggtcatgattgcagagagagagagtggcatggtctaaacaagagggtttccctacataccaaggctaatcaaactactgctgcctttgaatgccagcaaaa

SEQ ID NO: 62670 - DNA, 110 bp, synthetic construct
  source 1..110: mol_type = other DNA
ctacagctacatgtggaataattttctctgaaaaagacttagaaactagctgagcagctcctttacattaggcaaaggagggaaaaaagtcacactgaagcaagtaagag

SEQ ID NO: 62671 - DNA, 110 bp, synthetic construct
  source 1..110: mol_type = other DNA
agctcctttacattaggcaaaggagggaaaaaagtcacactgaagcaagtaagagaggctaagacccagttttaccaaaacataccctcttccaccctgtacagcaaccc

SEQ ID NO: 62672 - DNA, 110 bp, synthetic construct
  source 1..110: mol_type = other DNA
tttgctcatcctttaataaaatgagcttcaaacatttcactctttgaagattactgcctttggtaacctgacttcaacaattctttgaccttataagaaccaacaactat

SEQ ID NO: 62673 - DNA, 110 bp, synthetic construct
  source 1..110: mol_type = other DNA
gcctttggtaacctgacttcaacaattctttgaccttataagaaccaacaactattaatgctaccaggtttctatgtgcttcccactcctctaagtccactataataacc

SEQ ID NO: 62674 - DNA, 110 bp, synthetic construct
  source 1..110: mol_type = other DNA
gtcaatcaaattaataaggcattagtaaccttaaaagtgcttccatgtgatagtcaacatcctattatagaacaatatatagaaagattgcagcaagtctacctctgcta

SEQ ID NO: 62675 - DNA, 110 bp, synthetic construct; identical to SEQ ID NO: 62674
  source 1..110: mol_type = other DNA

SEQ ID NO: 62676 - DNA, 110 bp, synthetic construct
  source 1..110: mol_type = other DNA
cctgtactggacattaagaacaataaacaaaaacctcacaaacagatagaaagatataccatgtccttggattaaaagaataaatattgttaaaacaaccacactaccca

SEQ ID NO: 62677 - DNA, 110 bp, synthetic construct; identical to SEQ ID NO: 62676
  source 1..110: mol_type = other DNA

SEQ ID NO: 62678 - DNA, 110 bp, synthetic construct
  source 1..110: mol_type = other DNA
tttatggcaggattcagaacaattattttccaaatcaaaaagattttatgaggcagatccagggacttaaaatgatgctgacgaggacagccaaaataggattttggaat

SEQ ID NO: 62679 - DNA, 110 bp, synthetic construct
  source 1..110: mol_type = other DNA
gatccagggacttaaaatgatgctgacgaggacagccaaaataggattttggaatgaccccatattatcaacaaacttctcaatctgtttctcttgtgccacctgtaggg

SEQ ID NO: 62680 - DNA, 110 bp, synthetic construct
  source 1..110: mol_type = other DNA
ggagacttccctaaattaaaatcaagttttaggagctttcctgtaatccgtgattcttcttcctttattttgggcagcatcactgtgcaacactatattctttatgaact

SEQ ID NO: 62681 - DNA, 110 bp, synthetic construct
  source 1..110: mol_type = other DNA
cttcttcctttattttgggcagcatcactgtgcaacactatattctttatgaactttcattaactgaagcaaatcatgccatttcaatattgatctattgaaaaagagat

SEQ ID NO: 62682 - DNA, 110 bp, synthetic construct
  source 1..110: mol_type = other DNA
atgctctgagccatactcaaattccttttagttctttgaaggtgccatacttcgtcttgctttcgtaccattagagctgctattcttcatatctggaatactttgtctct

SEQ ID NO: 62683 - DNA, 110 bp, synthetic construct
  source 1..110: mol_type = other DNA
acatcatcgctagaaactgaaagaactgagtggtgatctcatcttttgcagccttcaagggagaaaaaacttggaactcaagttcctccagttgtctacctgttggaatg

SEQ ID NO: 62684 - DNA, 110 bp, synthetic construct
  source 1..110: mol_type = other DNA
cggattcgttaaccgctgcaccacaacgggaactccttgaagtcattttttatcatattaagtaaattacctattattgtttctttggttgggatcttttataatgagta

SEQ ID NO: 62685 - DNA, 110 bp, synthetic construct; identical to SEQ ID NO: 62684
  source 1..110: mol_type = other DNA

SEQ ID NO: 62686 - DNA, 110 bp, synthetic construct
  source 1..110: mol_type = other DNA
gctcaataaatgatattgtaagtgaaagaactgctgcactcaaatggaggttgcattacattcctgatagtccttctgattttgtgactaaaagtaataattttcaagac

SEQ ID NO: 62687 - DNA, 110 bp, synthetic construct
  source 1..110: mol_type = other DNA
atgcactctttttggccagtttggtttatgcaaccacagtgaagctggggatgagattatcctcactaaaacatgcacatgtttacatacatcacctgtgggagaattaa

SEQ ID NO: 62688 - DNA, 110 bp, synthetic construct
  source 1..110: mol_type = other DNA
acaaacaatgtcatcagcaattgtgctcatagcttgtaacacttgctggacaatgactacaagattccctttggggtccaaatgaaaaatataaatctaggaaaccaatg

SEQ ID NO: 62689 - DNA, 110 bp, synthetic construct
  source 1..110: mol_type = other DNA
gttcctagttggatttgctaaccactgtgccacgacggcaactccgagaatagcaattcttactaagctttgttatataccttataagaaatggccctaaaacccttcaa

SEQ ID NO: 62690 - DNA, 110 bp, synthetic construct; identical to SEQ ID NO: 62689
  source 1..110: mol_type = other DNA

SEQ ID NO: 62691 - DNA, 110 bp, synthetic construct
  source 1..110: mol_type = other DNA
tatctctcttgatttctgaggcaagaaggaaattttcactggtcacctctttaacaactcctgtggagagtgtgatgacacctcaaagggtgagagcagatgtatcctgc

SEQ ID NO: 62692 - DNA, 110 bp, synthetic construct
  source 1..110: mol_type = other DNA
gcaaaagcatgatgcacaacacctcacctcaagatgggaacagtgtaccatgtgcacagatagacagtgcatttagcactttgatctggagcactgtcaacaacatgact

SEQ ID NO: 62693 - DNA, 110 bp, synthetic construct
  source 1..110: mol_type = other DNA
acagatagacagtgcatttagcactttgatctggagcactgtcaacaacatgactgtgtccaaactgcaaggactccacccctctctcccctggtgaagaccctataaag

SEQ ID NO: 62694 - DNA, 110 bp, synthetic construct
  source 1..110: mol_type = other DNA
agagatggatgtatgacagatgaggttcacaaggaactttgtacactagtcttaagctgtgtcctagggagaactaagggttttggatgttttcctttggagggggttgg

SEQ ID NO: 62695 - DNA, 110 bp, synthetic construct
  source 1..110: mol_type = other DNA
acaaaattagtccaggaggacagaaacagccagtttttctccttctccctctcccactctgcatcaattagcttctccttcaatggttacatctctattgctctagcctc

SEQ ID NO: 62696 - DNA, 110 bp, synthetic construct
  source 1..110: mol_type = other DNA
gctcctccctgagctggcacatcctgacaccctgtggatcccctgcttcaccacggaccctgtgatagcagctgcccttgccatgttattgttcagacagtgaagtttag

SEQ ID NO: 62697 - DNA, 110 bp, synthetic construct
  source 1..110: mol_type = other DNA
tcatccccagaagtaaactgagacactaggttaagtaatttgcctagtgtcatgaaattactacccagaatttaaacctacacttcacaccaaatgtatgaactacgccg

SEQ ID NO: 62698 - DNA, 110 bp, synthetic construct
  source 1..110: mol_type = other DNA
aattactacccagaatttaaacctacacttcacaccaaatgtatgaactacgccggtcccatattcattctatctctacttctctctcattaagagctaccaaatatcaa

SEQ ID NO: 62699 - DNA, 110 bp, synthetic construct
  source 1..110: mol_type = other DNA
ccaaggacactaatttgtgtgtaggctgggtgctgaaagtgttctgggttccactgcaaatagcagctgagaaatcgaatagtcaggtgttccctagtgttaggcctgaa

SEQ ID NO: 62700 - DNA, 110 bp, synthetic construct
  source 1..110: mol_type = other DNA
ataagaaaacataggtaatatcagaaaacgtcctttaaccataaggtagcttaagaactcttcctcataatgcaactataataatatttatatcgaggcccaccctaacc

SEQ ID NO: 62701 - DNA, 110 bp, synthetic construct
  source 1..110: mol_type = other DNA
aactcttcctcataatgcaactataataatatttatatcgaggcccaccctaacctagagagtgcttgggtgcattctgtacacacttcattcttcaacttttttttttt

SEQ ID NO: 62702 - DNA, 110 bp, synthetic construct
  source 1..110: mol_type = other DNA
ggtatttttataataatgttttcgagggattttgactgtttctacagttagcaaacaaatacctgtttttgttggcattgatgaacactactatatgatttcagctgaga

SEQ ID NO: 62703 - DNA, 110 bp, synthetic construct
  source 1..110: mol_type = other DNA
caaatacctgtttttgttggcattgatgaacactactatatgatttcagctgagataatggatagttttttccatatttgatagcttttcctctccttttcttaaaattg

SEQ ID NO: 62704 - DNA, 110 bp, synthetic construct
  source 1..110: mol_type = other DNA
ggaacctccatatgccatgggtgaggcccttaaaaaagataaaagaaagagaaaattaccaaattgttttctagagtgactgcgccatttaacatttccattagctatgt

SEQ ID NO: 62705 - DNA, 110 bp, synthetic construct
  source 1..110: mol_type = other DNA
ttaccaaattgttttctagagtgactgcgccatttaacatttccattagctatgtataaatgatccagtttctctgcttactcttcaatatttgctgttgtcactttaac

SEQ ID NO: 62706 - DNA, 110 bp, synthetic construct
  source 1..110: mol_type = other DNA
ttgcctatttttttgttatttgtgcttttgatatcctgtctgagaaactattacctaatcctagctcatgaagatttacccctatgttttcttctaagagttttatagtt

SEQ ID NO: 62707 - DNA, 110 bp, synthetic construct; identical to SEQ ID NO: 62706
  source 1..110: mol_type = other DNA

SEQ ID NO: 62708 - DNA, 110 bp, synthetic construct
  source 1..110: mol_type = other DNA
ctttgtgttgttcccgctgtgactgcagagcccatttctgcagttttgagctgctccatgtgaggatttaccaatgaagagcgctatcaggagactgcatggctcaaagt

SEQ ID NO: 62709 - DNA, 110 bp, synthetic construct
  source 1..110: mol_type = other DNA
ccatgtgaggatttaccaatgaagagcgctatcaggagactgcatggctcaaagtagaaggaagaaagaagtttagagaaggaggaaaggcctgttctgtgggaacccac

SEQ ID NO: 62710 - DNA, 110 bp, synthetic construct
  source 1..110: mol_type = other DNA
agtcacagaaaacctctcttctcaacagctcctgttcaggacttaggaattaactggacaatagtcctttacaactcaggacaggcaaccagcttcaaggaatcagttat

SEQ ID NO: 62711 - DNA, 110 bp, synthetic construct
  source 1..110: mol_type = other DNA
ggacaatagtcctttacaactcaggacaggcaaccagcttcaaggaatcagttattgcatcattcctccagaagtaggcacctattctcttctgtaataattctgccttt

SEQ ID NO: 62712 - DNA, 110 bp, synthetic construct
  source 1..110: mol_type = other DNA
agattttcttagtccctaggctatgacaaagaaagtggggcattagctactaaatagcccaaagacctttttagtgtgtacttggcatacattactaatcaccctaaggg

SEQ ID NO: 62713 - DNA, 110 bp, synthetic construct
  source 1..110: mol_type = other DNA
gctaacgttgttcctgaaggggcattggagcaccagctggttgcattgagtgggggatggtcagctgccttgaataaccttctgacttcactcaggaagggaatttgagt

SEQ ID NO: 62714 - DNA, 110 bp, synthetic construct
  source 1..110: mol_type = other DNA
tatcttcttgctttctaagtcccccacaaaggggtcttatcaaaatatcttttagtcacattttatcttactttgaaaatacggattttcgtatttcatttcttcatcga

SEQ ID NO: 62715 - DNA, 110 bp, synthetic construct
  source 1..110: mol_type = other DNA
taagtcccccacaaaggggtcttatcaaaatatcttttagtcacattttatcttactttgaaaatacggattttcgtatttcatttcttcatcgacagagttcccctgtt

SEQ ID NO: 62716 - DNA, 110 bp, synthetic construct
  source 1..110: mol_type = other DNA
actttgagaatgaagagattaagaagggattatttcatatctgtatagttcttaaggaatagatatgatgggtaatcctaactatttgagcaaatgtcaactgccagcag

SEQ ID NO: 62717 - DNA, 110 bp, synthetic construct; identical to SEQ ID NO: 62716
  source 1..110: mol_type = other DNA

SEQ ID NO: 62718 - DNA, 110 bp, synthetic construct
  source 1..110: mol_type = other DNA
ctcatatttacccccttctttctagtggtggtacaacagttacagctttctgctggtctcaacatctcacttggtaagaatcccttgattctggtgtcttgcctgagtga

SEQ ID NO: 62719 - DNA, 110 bp, synthetic construct
  source 1..110: mol_type = other DNA
ggtttggttcagactggcccactctgtttatgacataaaaacttcagttttagaactaaacccctctcatgtaatagatctcttgtatggtgcatcttcctaaagtcact

SEQ ID NO: 62720 - DNA, 110 bp, synthetic construct
  source 1..110: mol_type = other DNA
tgagagaatgcattacccagaaattcttctttaaaatactgatcctcaactgcagttgccagttattgacaagtcctttgtgagaatgggtaaagctgccacaagatgct

SEQ ID NO: 62721 - DNA, 110 bp, synthetic construct
  source 1..110: mol_type = other DNA
ttgccagttattgacaagtcctttgtgagaatgggtaaagctgccacaagatgctatctcactcaaaccacaaaagcgacccaaaggcagtaaagaggttataaaatccc

SEQ ID NO: 62722 - DNA, 110 bp, synthetic construct
  source 1..110: mol_type = other DNA
ttgctttttatgcttaaagaaagaatatccagtcattgtttgggaacaggcaatttttcttcttgaaaggacatacctcttaactaaaagattggtccagcaatggtgat

SEQ ID NO: 62723 - DNA, 110 bp, synthetic construct
  source 1..110: mol_type = other DNA
tttcttcttgaaaggacatacctcttaactaaaagattggtccagcaatggtgatagaattactctccatggagaatacattttgtttctcttgctctcacttttaacat

SEQ ID NO: 62724 - DNA, 110 bp, synthetic construct
  source 1..110: mol_type = other DNA
gttcttgattatctttccagatatcccccttatcacacttttatcccttctcacaccctgtggtccaatctgtcatccccagaaattgaaagactacgttctaatctctc

SEQ ID NO: 62725 - DNA, 110 bp, synthetic construct
  source 1..110: mol_type = other DNA
acacactacttcccattgtttaaatacaaagaccaaaatctacctggtgtattcatttcctagggttgctataacaaaacaccataaactaggtggcttaagcagcagaa

SEQ ID NO: 62726 - DNA, 110 bp, synthetic construct
  source 1..110: mol_type = other DNA
acataaacattatttaaaaaagaggaaaagcatgtgtctgttaagatgaaatggtgcctttgatacttctttctgaagtttcttaagcccaaattaaagtgaagactcag

SEQ ID NO: 62727 - DNA, 110 bp, synthetic construct
  source 1..110: mol_type = other DNA
aaccttgaaaacattaatgaagctaatcaaaagaaggcagaaacaaaaagccatgttctatatgatttcatttatatggcaggtccagaataggcaaatccataaagaca

SEQ ID NO: 62728 - DNA, 110 bp, synthetic construct
  source 1..110: mol_type = other DNA
agacaacatcggatccttaacctgctgagccacagtgggaactcctagaatttcctctttaaatttctaaatgaaaggtttggcaaggcccatgacttagaatagatgaa

SEQ ID NO: 62729 - DNA, 110 bp, synthetic construct; identical to SEQ ID NO: 62728
  source 1..110: mol_type = other DNA

SEQ ID NO: 62730 - DNA, 110 bp, synthetic construct
  source 1..110: mol_type = other DNA
tagttgctgatgaaggcggcaacaagagtgcagaggaccaagaattctcaagagctggagggggataagtcctcctctgaaattaaaaagagagatgaaatcatagatac

SEQ ID NO: 62731 - DNA, 110 bp, synthetic construct
  source 1..110: mol_type = other DNA
tggagggggataagtcctcctctgaaattaaaaagagagatgaaatcatagatacaaatagaaaatgtttttgtacagagaaataaggcaggagacttctcttgatcagt

SEQ ID NO: 62732 - DNA, 110 bp, synthetic construct
  source 1..110: mol_type = other DNA
ggcaatttttattgcacttgttgttaagggacaattgagcaggtgccattttacgagctactaattcgtcagttattcccaagtggaggatccacacacaagggtcaatt

SEQ ID NO: 62733 - DNA, 110 bp, synthetic construct
  source 1..110: mol_type = other DNA
gtctaaaattatggcacaaatgatctatctaacaaaacagaaaagatcatggtcatgtaggacagactcgcatttgccagggacaagggggagggagtgggatggactgg

SEQ ID NO: 62734 - DNA, 110 bp, synthetic construct
  source 1..110: mol_type = other DNA
tatctaacaaaacagaaaagatcatggtcatgtaggacagactcgcatttgccagggacaagggggagggagtgggatggactgggggttagtagatgaaaactcttgca

SEQ ID NO: 62735 - DNA, 110 bp, synthetic construct
  source 1..110: mol_type = other DNA
ccaaatcttctatttttgtgacgcttctccagcctggaacaatttctgaactttagccctcaggttaaagctttgatggcaggcttttctgataccaatagcctgccagc

SEQ ID NO: 62736 - DNA, 110 bp, synthetic construct
  source 1..110: mol_type = other DNA
tctctatgacttatcaagttcagggccctccctctgtgctttctgtagatttctccaatgggtctgatcttgccactctttcctgacacactggacagtgatttttcagt

SEQ ID NO: 62737 - DNA, 110 bp, synthetic construct
  source 1..110: mol_type = other DNA
caatgggtctgatcttgccactctttcctgacacactggacagtgatttttcagtcagttctcttccctccactgccacaagttaaataactcccatcagccagtatgaa

SEQ ID NO: 62738 - DNA, 110 bp, synthetic construct
  source 1..110: mol_type = other DNA
ccttgctacatctcttgacatgaaatatctctctacaaattactttgtctgccgttggcaatttgtgaaagaaaaaaaaatcaaggtcaagaaaatatgctcatgaggta

SEQ ID NO: 62739 - DNA, 110 bp, synthetic construct
  source 1..110: mol_type = other DNA
ataacgtatctccctctcccactcatctcaatgctgttcatttaccctttgttgtggaggatttgttcatccaaattttcggtatttctccaggggagttattctatata

SEQ ID NO: 62740 - DNA, 110 bp, synthetic construct
  source 1..110: mol_type = other DNA
agacattttttctcacttgtctgcacattaagctggggtggctcagctgatcttatttgggtttaactagatgctccacattaaggattggattcaggtctgctccacgc

SEQ ID NO: 62741 - DNA, 110 bp, synthetic construct
  source 1..110: mol_type = other DNA
tttgggtttaactagatgctccacattaaggattggattcaggtctgctccacgcatctctcgacctccatggatcaacagactagctggaccatggacttctcacaatg

SEQ ID NO: 62742 - DNA, 110 bp, synthetic construct
  source 1..110: mol_type = other DNA
tacagtcatgaattgggaaggaagccgccctgaggagatgcaaagggtaaggaaatctattttttttctagagcctccataatgtaggccaacctcccaacaccctcatt

SEQ ID NO: 62743 - DNA, 110 bp, synthetic construct
  source 1..110: mol_type = other DNA
tctattttttttctagagcctccataatgtaggccaacctcccaacaccctcatttaagcccagtcagaatggttttggacttcttacctctgtaactgtaagatgatgt

SEQ ID NO: 62744 - DNA, 110 bp, synthetic construct
  source 1..110: mol_type = other DNA
aatgttgaaataatatcttaaaagtattgaagagctagagttctcttgtggcacatgggattgtggacccagcattatcattgtggtaacttgagttgctgctgtggtgc

SEQ ID NO: 62745 - DNA, 110 bp, synthetic construct
  source 1..110: mol_type = other DNA
tgggattgtggacccagcattatcattgtggtaacttgagttgctgctgtggtgcaggtttggtccctagccaatggatttacacatgccatgaacacagtcaaaaagga

SEQ ID NO: 62746 - DNA, 110 bp, synthetic construct
  source 1..110: mol_type = other DNA
agccttttcagatcaaggctgaactgtcataatttcttaaactcagggaggatcctcaaatgtttttgcaaatggatgatcaagatcagaggccacttttgactactaaa

SEQ ID NO: 62747 - DNA, 110 bp, synthetic construct
  source 1..110: mol_type = other DNA
tcaaatgtttttgcaaatggatgatcaagatcagaggccacttttgactactaaactgaccatatgcttgatattcagagcctgatgaatttcttttgcggggggaaggg

SEQ ID NO: 62748 - DNA, 110 bp, synthetic construct
  source 1..110: mol_type = other DNA
aggctagtcattctgatgtttgaaatgaatttataagaacactacaaatcaaacctgtcctatttgccttacattctccctgcactgtgaagccaaaaggtttgaatttg

SEQ ID NO: 62749 - DNA, 110 bp, synthetic construct
  source 1..110: mol_type = other DNA
tgtcctatttgccttacattctccctgcactgtgaagccaaaaggtttgaatttgaagtctgagtaatggaaacccaatgtctaaatgaaacaactgggcaaaccagagt

SEQ ID NO: 62750 - DNA, 110 bp, synthetic construct
  source 1..110: mol_type = other DNA
ggtattgcctcatcctttggcagggtacaagcaagaagctcaagctttttcactttctcttaaagtcagtctgtgggaaacccacatatcctggccgtgctgaacaacag

SEQ ID NO: 62751 - DNA, 110 bp, synthetic construct
  source 1..110: mol_type = other DNA
tctcttaaagtcagtctgtgggaaacccacatatcctggccgtgctgaacaacagacatgctaccctgtcattgctgctcagcaagcttcctgccttcaaattcttctgg

SEQ ID NO: 62752 - DNA, 110 bp, synthetic construct
  source 1..110: mol_type = other DNA
tcatgttagacaaagactgtggaactgtcagagaatggaggagaataaggagacatgatagttaaatgcagtgtggaatcctagattggactctggaatagaaaaagggc

SEQ ID NO: 62753 - DNA, 110 bp, synthetic construct
  source 1..110: mol_type = other DNA
ggagctggttcataggctactgcaggaaccacagccaagaccaaggtctgttgcttattacctgatgcatgggtaaatgatattcctctagagtcccttgtcatatggtg

SEQ ID NO: 62754 - DNA, 110 bp, synthetic construct
  source 1..110: mol_type = other DNA
tattacctgatgcatgggtaaatgatattcctctagagtcccttgtcatatggtgctggatcacacagctcccacaaaggcacttttgtccatggatagatgccaagtta

SEQ ID NO: 62755 - DNA, 110 bp, synthetic construct
  source 1..110: mol_type = other DNA
taggtacacaaataattaatgaaaccagctgtagggaaattattcagaccccacgccctgtattaagataagaaatgtattttcagagttcctgttataactcactggta

SEQ ID NO: 62756 - DNA, 110 bp, synthetic construct
  source 1..110: mol_type = other DNA
tgattgtcatcttcgaacttttagatgcagaactatgtataaaattgaattataaacctctttgtatatcttaacccacagagtagattgaggttttggattctagactg

SEQ ID NO: 62757 - DNA, 110 bp, synthetic construct
  source 1..110: mol_type = other DNA
acctctttgtatatcttaacccacagagtagattgaggttttggattctagactggcctttgatcacttctttccctctggacacaagagagtgctggatttaggatggg

SEQ ID NO: 62758 - DNA, 110 bp, synthetic construct
  source 1..110: mol_type = other DNA
agtgattctccaggaagtgacagagttgggcatcgctcttgttggtggccagctggtgcagatctagcacactctggttcacgcccttttccaggtgcaaggcgcactgc

SEQ ID NO: 62759 - DNA, 110 bp, synthetic construct
  source 1..110: mol_type = other DNA
gtgcagatctagcacactctggttcacgcccttttccaggtgcaaggcgcactgcatggccttgaggccgctctcccagtggtggcggtcgggtttcctgatgtcgtgga

SEQ ID NO: 62760 - DNA, 110 bp, synthetic construct
  source 1..110: mol_type = other DNA
agaggaagcaggagagtcattttctacttgttagtagctatggttaaaaaaaaaaaagtctggttggggaagatattgacttgataaggtttgagaattatctgtttatt

SEQ ID NO: 62761 - DNA, 110 bp, synthetic construct
  source 1..110: mol_type = other DNA
aagtctggttggggaagatattgacttgataaggtttgagaattatctgtttatttcatataacctttgtccttcctttctcaccttctcctgccagtggttagagctat

SEQ ID NO: 62762 - DNA, 110 bp, synthetic construct
  source 1..110: mol_type = other DNA
ttgcagtcaggccctagatgtgtgttaaatcgtgagactgcccctcgggacatagtaagtaaggtaggaaaataggcctctttcaaggaaaaactgggagtttctgcctg

SEQ ID NO: 62763 - DNA, 110 bp, synthetic construct
  source 1..110: mol_type = other DNA
taagtaaggtaggaaaataggcctctttcaaggaaaaactgggagtttctgcctgctggctctatgctgtgtcctgaagtgttagccctgttgagtctgcatgagcctgt

SEQ ID NO: 62764 - DNA, 110 bp, synthetic construct
  source 1..110: mol_type = other DNA
tttcttgcctttcaagaaaaaaataaatattcgtaccaacaccagattcttcattgtggagctctagcagccctggtgtcatttaattttttttttctttcagagaataa

SEQ ID NO: 62765 - DNA, 110 bp, synthetic construct; identical to SEQ ID NO: 62764
  source 1..110: mol_type = other DNA

SEQ ID NO: 62766 - DNA, 110 bp, synthetic construct
  source 1..110: mol_type = other DNA
gtgaatcagatacagaaaggcttcatgcacaaagatgttcctcacaggcttacttagagcaatgaaaaaactggaaacaaccgtgaaaaatgttactgtcttcatactct

SEQ ID NO: 62767 - DNA, 110 bp, synthetic construct
  source 1..110: mol_type = other DNA
agagcaatgaaaaaactggaaacaaccgtgaaaaatgttactgtcttcatactctttaactgcatcttggccagaaaatgtaattgaagcaggaggctacaagccttttt

SEQ ID NO: 62768 - DNA, 110 bp, synthetic construct
  source 1..110: mol_type = other DNA
aaatagagagatcattcttctccaacaagatgagattttctacatgtaatacatggagttacacaatactcaatgcttagggaagtcatcacttaaggcattgtaaggct

SEQ ID NO: 62769 - DNA, 110 bp, synthetic construct
  source 1..110: mol_type = other DNA
tagtcaaagaaagagtggcataaattaacattaatcagggaaaaagagaagctggacaatttaatgtgcattgttacattaataggatagtccaatattacaccctcagt

SEQ ID NO: 62770 - DNA, 110 bp, synthetic construct
  source 1..110: mol_type = other DNA
cagggaaaaagagaagctggacaatttaatgtgcattgttacattaataggatagtccaatattacaccctcagttaaccaaggctattcctcttagtataaattataaa

SEQ ID NO: 62771 - DNA, 110 bp, synthetic construct
  source 1..110: mol_type = other DNA
atcatattacttagggagttggcataggccttggatttctcaggctatgcaccggcaataacacaaactgcaggcacaggagcagaacgacctgaggaagaaaaatggtg

SEQ ID NO: 62772 - DNA, 110 bp, synthetic construct
  source 1..110: mol_type = other DNA
taattgaaggcagcaagcatagctctatgaaccaactcaaaaatacttaaaggaacttgcatcaagtataaatgagagcagtacagggaagacctggtaaaggaagtcag

SEQ ID NO: 62773 - DNA, 110 bp, synthetic construct
  source 1..110: mol_type = other DNA
aagagagacgagcatggaaatggcagacacatagggaaggagtttggattattagtggggacaatgcattgcacagcctgatcggaattgatgatgagtatcagaaagaa

SEQ ID NO: 62774 - DNA, 110 bp, synthetic construct
  source 1..110: mol_type = other DNA
tggggacaatgcattgcacagcctgatcggaattgatgatgagtatcagaaagaaacaggtaggacacagttgaagtccttaaactaagtaggataaagatctttcagga

SEQ ID NO: 62775 - DNA, 110 bp, synthetic construct
  source 1..110: mol_type = other DNA
gggtcctggggaaggatacctctgggaaagtgtagcgatggctctaggagctctgtctggtagctcagtgaacccattcaaggtcaaagaaagagataattaagaatttg

SEQ ID NO: 62776 - DNA, 110 bp, synthetic construct
  source 1..110: mol_type = other DNA
tctggtagctcagtgaacccattcaaggtcaaagaaagagataattaagaatttgcttaaaaggaaacttcaaattggttatgctacacaaagatatgagaccacctcta

SEQ ID NO: 62777 - DNA, 110 bp, synthetic construct
  source 1..110: mol_type = other DNA
tagcagtaaaatattcagtgagtgaatgaattcttaaaatatttataacagatgatatttactgagctcttactatctgcctggcattgtgccaagcacttcacactgta

SEQ ID NO: 62778 - DNA, 110 bp, synthetic construct
  source 1..110: mol_type = other DNA
tatttactgagctcttactatctgcctggcattgtgccaagcacttcacactgtatcactagagagatcaagatttgtgaaataatactgttttggaaatcaaggaaggt

SEQ ID NO: 62779 - DNA, 110 bp, synthetic construct
  source 1..110: mol_type = other DNA
gcatttcatttgtgattgaattgataccgaatggttgtcttttcttaatatgtacaaagactttttgatttgggagcttcgtattttgtgttgcaccattaaaaatgatg

SEQ ID NO: 62780 - DNA, 110 bp, synthetic construct
  source 1..110: mol_type = other DNA
accgaatggttgtcttttcttaatatgtacaaagactttttgatttgggagcttcgtattttgtgttgcaccattaaaaatgatgaaatttctcatgtagttaggacata

SEQ ID NO: 62781 - DNA, 110 bp, synthetic construct; identical to SEQ ID NO: 62779
  source 1..110: mol_type = other DNA

SEQ ID NO: 62782 - DNA, 110 bp, synthetic construct; identical to SEQ ID NO: 62780
  source 1..110: mol_type = other DNA

SEQ ID NO: 62783 - DNA, 110 bp, synthetic construct
  source 1..110: mol_type = other DNA
gttgtgtggaaaatcaggtaggtcactcagattcatcatccttgaagcgtagatataacactatatacctaactcatagctttgttggagaaagcaaatgagatatttta

SEQ ID NO: 62784 - DNA, 110 bp, synthetic construct
  source 1..110: mol_type = other DNA
tgtatgatctcacttatatgtggaatctaaaaaaaagttgaacttagagaaacagagtagaatgacggttgccacggttgagagtgacaaaaaaatgatatgttcatagg

SEQ ID NO: 62785 - DNA, 110 bp, synthetic construct
  source 1..110: mol_type = other DNA
agtagaatgacggttgccacggttgagagtgacaaaaaaatgatatgttcatagggaacaaactttcaattacaagatgaataggtcctagagatctaatgtacagtgtg

SEQ ID NO: 62786 - DNA, 110 bp, synthetic construct
  source 1..110: mol_type = other DNA
cttgtcaccccatgctgataatcagaggaccttcaattaggtacctacaaagcaaccaatgataaacgagagaaaagatggtacaagtttgccaaagaatactttcgtag

SEQ ID NO: 62787 - DNA, 110 bp, synthetic construct
  source 1..110: mol_type = other DNA
ccaatgataaacgagagaaaagatggtacaagtttgccaaagaatactttcgtagtttgattctcaaaagcaattagaatcacttcttttggccttggaattaatgaatt

SEQ ID NO: 62788 - DNA, 110 bp, synthetic construct
  source 1..110: mol_type = other DNA
gtatgcagtcctaaaagggaatgttcaacacttgcacacaagaggctgggtggattgcacaattacaataagctaaaattcagacataaaagatcatatatgattaattc

SEQ ID NO: 62789 - DNA, 110 bp, synthetic construct
  source 1..110: mol_type = other DNA
aatggaaggatgtatttttgaatgctttgatctctagtcctttattctgcttctaactagctatagcaatatcacttaatccagacctcagcattccaagtacaaaagca

SEQ ID NO: 62790 - DNA, 110 bp, synthetic construct
  source 1..110: mol_type = other DNA
actagctatagcaatatcacttaatccagacctcagcattccaagtacaaaagcatctcctcccacctactgctcacaagcttctgcatcagaatagaagacttacatag

SEQ ID NO: 62791 - DNA, 110 bp, synthetic construct
  source 1..110: mol_type = other DNA
tatttatcaagatcttcaagcattcaggatgacaaatgaaacatacacacagggtcagatataagacatctacaaactaactgatatactagtctaaaacagatggtgac

SEQ ID NO: 62792 - DNA, 110 bp, synthetic construct
  source 1..110: mol_type = other DNA
cagatataagacatctacaaactaactgatatactagtctaaaacagatggtgactgttttcttcctttatcctgcttgtttcattgtatccactaaaattttaaattgg

SEQ ID NO: 62793 - DNA, 110 bp, synthetic construct
  source 1..110: mol_type = other DNA
catggtactagacccatggctggtattctgccctgctgctatccatctgcaaagcagctatagtatgttcttcctaaataaaataacgattctttgctttaaatcttcta

SEQ ID NO: 62794 - DNA, 110 bp, synthetic construct
  source 1..110: mol_type = other DNA
agaaagcctcatttctttgagtgatttttgtagtagatgaactaaaaacaaaccaaccaaccaaccatgtcccaagttctgacgataataagggagaggaactataaatc

SEQ ID NO: 62795 - DNA, 110 bp, synthetic construct
  source 1..110: mol_type = other DNA
accaaccaaccatgtcccaagttctgacgataataagggagaggaactataaatccttgaagtttatgcttctgggaaagcctttattgccatgttgaatccttcttcct

SEQ ID NO: 62796 - DNA, 110 bp, synthetic construct
  source 1..110: mol_type = other DNA
ttatctcactcaaaaatagttgaatttcttaaaaagttcccctgagggacatttttaaaaaaacaagttaaaaaatgaaaagtattgagttcccttgtgatacagcaggc

SEQ ID NO: 62797 - DNA, 110 bp, synthetic construct; identical to SEQ ID NO: 62796
  source 1..110: mol_type = other DNA

SEQ ID NO: 62798 - DNA, 110 bp, synthetic construct
  source 1..110: mol_type = other DNA
agtatagtttgtttgttttttttttttttttgcacccatgaagatatataattctcataaccattctaaaagaggggcccatttcccagatgaggaaactgaggttacac

SEQ ID NO: 62799 - DNA, 110 bp, synthetic construct
  source 1..110: mol_type = other DNA
tagcttcctaactgctcccctactctcagccttgaccttgttaatttattctcagcagagttgttagagtgatctgataaaatgtttcatcataaccttctcaaatccct

SEQ ID NO: 62800 - DNA, 110 bp, synthetic construct
  source 1..110: mol_type = other DNA
ggtaaaagatttggaatttactctttgtagaatgagtagagttttaatgaagaggtgagatgatttaattgaccttttaaaacggttgttctgagggccacagttaggat

SEQ ID NO: 62801 - DNA, 110 bp, synthetic construct
  source 1..110: mol_type = other DNA
tgagatgatttaattgaccttttaaaacggttgttctgagggccacagttaggatgacagaagtgatgcaagagcaaattagggagaccgttaggatgctattttgttac

SEQ ID NO: 62802 - DNA, 110 bp, synthetic construct
  source 1..110: mol_type = other DNA
tcaaaggcagtcaggcaattgagccttatatgccatcctgagctaaggggaaagaggtagggatttgaagcttcagagaggaggaagacaattcagaggaagatgggaaa

SEQ ID NO: 62803 - DNA, 110 bp, synthetic construct
  source 1..110: mol_type = other DNA
ggtagggatttgaagcttcagagaggaggaagacaattcagaggaagatgggaaaagcaaatgtctagtaaacaaatgttttccatgtcatggagaggcaatggaacaca

SEQ ID NO: 62804 - DNA, 110 bp, synthetic construct
  source 1..110: mol_type = other DNA
tagataaggttatgtgataccatggaacattatgaaggcaggcctgaaactcagaacatatttagaaaatggatttaccaagttattaatgctacaaaatgacaatgcaa

SEQ ID NO: 62805 - DNA, 110 bp, synthetic construct
  source 1..110: mol_type = other DNA
gtaggtacttgtcagaattatcagggaaggatttgctttttgccttttccctcctactctttcacacacacacacacacccacagatgcacactataccataaaacagaa

SEQ ID NO: 62806 - DNA, 110 bp, synthetic construct
  source 1..110: mol_type = other DNA
actctttcacacacacacacacacccacagatgcacactataccataaaacagaagctttggagaaaataaacagaaaacaaagaagctttgacaagcaccagaatgtct

SEQ ID NO: 62807 - DNA, 110 bp, synthetic construct
  source 1..110: mol_type = other DNA
ctgccatctgttagtcattggcttcaagttgacttgggatgaaggatatgtggactccaggctcgttacacccctgaaggcaagagcatttctccagagaaagaggctgc

SEQ ID NO: 62808 - DNA, 110 bp, synthetic construct
  source 1..110: mol_type = other DNA
cctatggtgcctgcaattaatgctaaagaaggccagaaagaggatcaattaatgttggcatcttggtagttaaaaagtatttttcaaagaaaactggtgtgctggtctgt

SEQ ID NO: 62809 - DNA, 110 bp, synthetic construct
  source 1..110: mol_type = other DNA
cacactgtaccaaacacatacagtactcaaaagtattaacaggaaataatgaggttgcctgaactacactattttttaaaacatttgcagctaaaactatacatttagaa

SEQ ID NO: 62810 - DNA, 110 bp, synthetic construct
  source 1..110: mol_type = other DNA
tgcctgaactacactattttttaaaacatttgcagctaaaactatacatttagaaaactatttcctgctctgtgtatgaattatcaattacatagtcaaccacagtcatg

SEQ ID NO: 62811 - DNA, 110 bp, synthetic construct
  source 1..110: mol_type = other DNA
atatcaagaacatgaactaaatgtgaacaatttcaggagtggtaaagatagaatacaagttagaataggtttaaccagtgtatgaagacagttaaaggagactttgcagg

SEQ ID NO: 62812 - DNA, 110 bp, synthetic construct
  source 1..110: mol_type = other DNA
ggagtggtaaagatagaatacaagttagaataggtttaaccagtgtatgaagacagttaaaggagactttgcaggcaaaatatatcttttttctatgttaggatttaatt

SEQ ID NO: 62813 - DNA, 110 bp, synthetic construct
  source 1..110: mol_type = other DNA
atcaccccacatagctaccttttttttctgtgtggtgataacacttaaggattgccctttgtagcaaatttcaagtattaaatattatttacagtcacattgtgatacat

SEQ ID NO: 62814 - DNA, 110 bp, synthetic construct
  source 1..110: mol_type = other DNA
tttggcaaataccagtcaactataacttcttgtacattctccaggtaactgtttaacctcaaaggttacagatgttctgaaaatccaaatgtttattaggactcaatttg

SEQ ID NO: 62815 - DNA, 110 bp, synthetic construct
  source 1..110: mol_type = other DNA
acctcaaaggttacagatgttctgaaaatccaaatgtttattaggactcaatttgtcatgacaatttgttcagtttgagaccttcagcatcctaaacaattaaaatatgc

SEQ ID NO: 62816 - DNA, 110 bp, synthetic construct
  source 1..110: mol_type = other DNA
tgataatcacagagcgaagaggagtccacactcaacatccagtgtgggctctgatcaccaaaacccaaatcataccctctataatggggaataacagccagcacacactg

SEQ ID NO: 62817 - DNA, 110 bp, synthetic construct
  source 1..110: mol_type = other DNA
tactgattagtagcatttgcttatttctatggtcttgagtaaccccactatgcggatttcaaaagagcaacaatgctgtcactcaacctgcagacaggaagggaatcatg

SEQ ID NO: 62818 - DNA, 110 bp, synthetic construct
  source 1..110: mol_type = other DNA
tacttagcataaaacccttagattcattcatgttgtaccatatgatgatatttccttccttctaagtctgagtaacgtttaattgcaagtatatgccacattttctctac

SEQ ID NO: 62819 - DNA, 110 bp, synthetic construct
  source 1..110: mol_type = other DNA
ttccttctaagtctgagtaacgtttaattgcaagtatatgccacattttctctacccattcatcacacctcttggctatcttgaataatgctgcaataacacggatttga

SEQ ID NO: 62820 - DNA, 110 bp, synthetic construct
  source 1..110: mol_type = other DNA
tgacaacatgatcatggagagatatatgcactccatattcattgcaggattactgccaatactcagtaagaggaaacaacctaatcgttaatggatggataaagaattac

SEQ ID NO: 62821 - DNA, 110 bp, synthetic construct
  source 1..110: mol_type = other DNA
ccaatactcagtaagaggaaacaacctaatcgttaatggatggataaagaattacagcataatataattgcgccaaagaaaaaagaaatttatgccatttgcaacttgga

SEQ ID NO: 62822 - DNA, 110 bp, synthetic construct
  source 1..110: mol_type = other DNA
tactgacagttggagaagagaaggcagattgactaaggaccttggaatctgctgtggatgaaattgtgtctctcccaaatacgtatgtttaatctctaacctccaataag

SEQ ID NO: 62823 - DNA, 110 bp, synthetic construct
  source 1..110: mol_type = other DNA
tgctttcatcatttgcaaaaactttctcgcattctgtgggttctctttttgtttgttttttttttaatggtttcctttactgtgaaaaatcttttcaggttaattaggtc

SEQ ID NO: 62824 - DNA, 110 bp, synthetic construct; identical to SEQ ID NO: 62823
  source 1..110: mol_type = other DNA

SEQ ID NO: 62825 - DNA, 110 bp, synthetic construct
  source 1..110: mol_type = other DNA
agaccccaaagaatcaaagcaatcttgacaaagaataaagtagatggagttatcacacttcctgatttcaaatggtactacaaaactatagtaactgaaaccatattgtc

SEQ ID NO: 62826 - DNA, 110 bp, synthetic construct
  source 1..110: mol_type = other DNA
cacttcctgatttcaaatggtactacaaaactatagtaactgaaaccatattgtcctggcacaaaaacatacatagtgatcaatggaacagaatatagtgtgcagaaaag

SEQ ID NO: 62827 - DNA, 110 bp, synthetic construct
  source 1..110: mol_type = other DNA
acctagcttgggaacttccatatgctgcgggtgaggccttaaaacaattaaaaaaaataaactttccttttccatgctgaaagtttgtgttgtttaaaaataaatgtggc

SEQ ID NO: 62828 - DNA, 110 bp, synthetic construct; identical to SEQ ID NO: 62827
  source 1..110: mol_type = other DNA

SEQ ID NO: 62829 - DNA, 110 bp, synthetic construct
  source 1..110: mol_type = other DNA
atatttcaattttaaaattaaaaaaaaaaaaacttggttgtaccacagatttaaacactaaaaaagatgaatgggtgtgtacgtgtgtgactgctggtgtgtgtcctatg

SEQ ID NO: 62830 - DNA, 110 bp, synthetic construct
  source 1..110: mol_type = other DNA
cactaaaaaagatgaatgggtgtgtacgtgtgtgactgctggtgtgtgtcctatgaaaacagtagactttgattacctacttttgtgtaaagcactgtgtttagggccac

SEQ ID NO: 62831 - DNA, 110 bp, synthetic construct
  source 1..110: mol_type = other DNA
taacatgccattccttgactaagttagaacacagatgagaaggatgataatggattttcctactgctgcttcagtggtggaagtcacaccctggtccctaccctctgttt

SEQ ID NO: 62832 - DNA, 110 bp, synthetic construct
  source 1..110: mol_type = other DNA
aagtctcaaattcaataaccacgtcttgtctttacatgaacaatctgaatgaaaaagtcccaaacaagtgttacaagaatctggtaataacatttagaaactcttagagg

SEQ ID NO: 62833 - DNA, 110 bp, synthetic construct; identical to SEQ ID NO: 62832
  source 1..110: mol_type = other DNA

SEQ ID NO: 62834 - DNA, 110 bp, synthetic construct
  source 1..110: mol_type = other DNA
gctttaattacatatattaattagaattcttaacccttaggcaccttaatttctagtgaaaaaccaggaagtaagcaattatagacagtcacaccagcattctttagaaa

SEQ ID NO: 62835 - DNA, 110 bp, synthetic construct
  source 1..110: mol_type = other DNA
cttaggcaccttaatttctagtgaaaaaccaggaagtaagcaattatagacagtcacaccagcattctttagaaaatcaaatttctgattaaattgtatttatagactca

SEQ ID NO: 62836 - DNA, 110 bp, synthetic construct
  source 1..110: mol_type = other DNA
ctacatgggaaaaacctggggttggccacatggaaatggcctggaggaactagaccatagggtgaccacatatgagcttataaactgaggaaatccagttgggcttggag

SEQ ID NO: 62837 - DNA, 110 bp, synthetic construct
  source 1..110: mol_type = other DNA
catagggtgaccacatatgagcttataaactgaggaaatccagttgggcttggaggctaagcaccattgttttggggtactggaaagaaggggtagaatccaccactaaa

SEQ ID NO: 62838 - DNA, 110 bp, synthetic construct
  source 1..110: mol_type = other DNA
aagcaatgacaccatgtagcaacaaacaaatccagcaaccaggccttggattctaaacatcattctccaagataacaaaaacgaaacaaaatccagacatccttggagaa

SEQ ID NO: 62839 - DNA, 110 bp, synthetic construct
  source 1..110: mol_type = other DNA
aacatcattctccaagataacaaaaacgaaacaaaatccagacatccttggagaaatgacctattctagggctggggcaataaaaatacaagatgagttgggagcattat

SEQ ID NO: 62840 - DNA, 110 bp, synthetic construct
  source 1..110: mol_type = other DNA
ctctgtaagcattgctgatcaagagtcaggttttctagtttcggtggttttttcccctaggaaaattctaggaaaaatatttcctgactgtagttctcactttggagggg

SEQ ID NO: 62841 - DNA, 110 bp, synthetic construct
  source 1..110: mol_type = other DNA
gtttttcaaagattaaagcaggagaaagacaagtgtcaacaaatcctgaagctcctttcagcagaacttcaaattagtagcaaataagcacatcccctctggcaatgttc

SEQ ID NO: 62842 - DNA, 110 bp, synthetic construct
  source 1..110: mol_type = other DNA
cctattcttgattcggtagttccaaaccacttttttttttattttttattttttcacccacttctgtgagttatcattctgaatatagtcccaagattctgaggatgtgt

SEQ ID NO: 62843 - DNA, 110 bp, synthetic construct
  source 1..110: mol_type = other DNA
attattatacccagtgcaggcataggttacataggttcatcagaataaggatctatcaagtctataggtatgatgatcatagactgttttgatgacaaacagagtgatct

SEQ ID NO: 62844 - DNA, 110 bp, synthetic construct
  source 1..110: mol_type = other DNA
tcaagtctataggtatgatgatcatagactgttttgatgacaaacagagtgatctaagaacacatattttaccacggtcaagcaattagcaaatatcctggcctattata

SEQ ID NO: 62845 - DNA, 110 bp, synthetic construct
  source 1..110: mol_type = other DNA
gtagtggctcagagcttggcagagggaagcccatttgtctccatcctgagttccctcagggcttcctgtctggggtggctgttgtggcttgatggctgcaacatcctttg

SEQ ID NO: 62846 - DNA, 110 bp, synthetic construct
  source 1..110: mol_type = other DNA
tcagggcttcctgtctggggtggctgttgtggcttgatggctgcaacatcctttgcttactgatatggcaggcaacatcgtttcgttgatacctaggtaatcaatggatt

SEQ ID NO: 62847 - DNA, 110 bp, synthetic construct
  source 1..110: mol_type = other DNA
atggatcctagtcgggttcattaccattgagccacaatgggaactcctctcattgctttttggtaatattccatcatcaaaaaatttcctcatgtctccagctttttatt

SEQ ID NO: 62848 - DNA, 110 bp, synthetic construct
  source 1..110: mol_type = other DNA
aaactgttacaggatgcactactgtatgaacaatacataaataattttaatctcggaagattaaaatctgcaggaaagtggttaagtcatttcataggatcagggtttgg

SEQ ID NO: 62849 - DNA, 110 bp, synthetic construct
  source 1..110: mol_type = other DNA
tcctctacattattcattctgctggtcattgcctttaactcatatttcaactctgcaaacaaattttctcatttttcttggcgcctccttatagtttttacttttttttt

SEQ ID NO: 62850 - DNA, 110 bp, synthetic construct; identical to SEQ ID NO: 62849
  source 1..110: mol_type = other DNA

SEQ ID NO: 62851 - DNA, 110 bp, synthetic construct
  source 1..110: mol_type = other DNA
atttctgcagtgatactgagccacaggattcctctaaacatgatttaaaattctaatgtcaagagttcccatcatggcacagtagaaatggatccaactagtgcccatga

SEQ ID NO: 62852 - DNA, 110 bp, synthetic construct
  source 1..110: mol_type = other DNA
ctgagccacaggattcctctaaacatgatttaaaattctaatgtcaagagttcccatcatggcacagtagaaatggatccaactagtgcccatgaggatgcaggttcgat

SEQ ID NO: 62853 - DNA, 110 bp, synthetic construct
  source 1..110: mol_type = other DNA
ctaaaattgattacattgccttgttttgtgtagaaatgggtattttataagctacaagttaaaatgcaacttctgtacagagtggtttccaattttcctgtgacctcaaa

SEQ ID NO: 62854 - DNA, 110 bp, synthetic construct; identical to SEQ ID NO: 62853
  source 1..110: mol_type = other DNA

SEQ ID NO: 62855 - DNA, 110 bp, synthetic construct
  source 1..110: mol_type = other DNA
cagaaaagactccaaatagataaaacaaccttgaaaaagaagaatggagctggagaaatcacactccctgacttgagactattgtacaaagccatagtaatcaagacagt

SEQ ID NO: 62856 - DNA, 110 bp, synthetic construct
  source 1..110: mol_type = other DNA
caaccttgaaaaagaagaatggagctggagaaatcacactccctgacttgagactattgtacaaagccatagtaatcaagacagtatggtactggtgcaaaaacacatat

SEQ ID NO: 62857 - DNA, 110 bp, synthetic construct
  source 1..110: mol_type = other DNA
gtgaaagcaatgttcaaagggaaattcagagctgcctacacctacattaagaaaaagatctaaaattaataatccaagtttactttgtaaggacctattctctatttatt

SEQ ID NO: 62858 - DNA, 110 bp, synthetic construct; identical to SEQ ID NO: 62857
  source 1..110: mol_type = other DNA

SEQ ID NO: 62859 - DNA, 110 bp, synthetic construct
  source 1..110: mol_type = other DNA
catggaaatatggattgacatctttcatctaaaagttccttttttgtacagcaggctaaggatctgatattgtcactgcagcggcttgggttgctgctgtggcatgagtt

SEQ ID NO: 62860 - DNA, 110 bp, synthetic construct
  source 1..110: mol_type = other DNA
tgacatctttcatctaaaagttccttttttgtacagcaggctaaggatctgatattgtcactgcagcggcttgggttgctgctgtggcatgagtttgatccctgtctcag

SEQ ID NO: 62861 - DNA, 110 bp, synthetic construct
  source 1..110: mol_type = other DNA
gcccaggaacttccaaatgccatgggtgtggcaaaataaataaataaaagaaaaaagaaaaagattctaggcctctaatgaacagcataatgattatacttgatagtact

SEQ ID NO: 62862 - DNA, 110 bp, synthetic construct
  source 1..110: mol_type = other DNA
agaaaaagattctaggcctctaatgaacagcataatgattatacttgatagtactgtattaacttaaggaaaaatgcacagcataagagttgtaagttttattcagagtc

SEQ ID NO: 62863 - DNA, 110 bp, synthetic construct
  source 1..110: mol_type = other DNA
tgggtctagaagaaacaggggagattcataaggggtttcaggtctctaaggtggctgaaagtgtcttcttggcagatggaggaatcaagctcaaagcaacttaaatgaca

SEQ ID NO: 62864 - DNA, 110 bp, synthetic construct
  source 1..110: mol_type = other DNA
tgaaagtgtcttcttggcagatggaggaatcaagctcaaagcaacttaaatgacaaccttgaagataaatgaagtcactaaattgtgggatgaaagtgatactgaggatg

SEQ ID NO: 62865 - DNA, 110 bp, synthetic construct
  source 1..110: mol_type = other DNA
tgaccagggaaaaactgaggccaattgccaagttttcaatagcatttcaatttccttaagtctccatcattaaggaataaaatgattcctcttttaatttaaactaacag

SEQ ID NO: 62866 - DNA, 110 bp, synthetic construct; identical to SEQ ID NO: 62865
  source 1..110: mol_type = other DNA

SEQ ID NO: 62867 - DNA, 110 bp, synthetic construct
  source 1..110: mol_type = other DNA
gtttcataaaggctagaacattttcccaaggtcgcatgactcgtagatggcagaaccagaattgccttctgagacataaatatcagaatcaataacaatgagtttttctt

SEQ ID NO: 62868 - DNA, 110 bp, synthetic construct
  source 1..110: mol_type = other DNA
aaaatctgacatctagagctaggcaaagagttcctagacttgacacagttaagaacaattcattaaagaaaataccggtgttcctgtcatggcttattggtaatgaaccc

SEQ ID NO: 62869 - DNA, 110 bp, synthetic construct; identical to SEQ ID NO: 62868
  source 1..110: mol_type = other DNA

SEQ ID NO: 62870 - DNA, 110 bp, synthetic construct
  source 1..110: mol_type = other DNA
agtgtctttggctatcagtcccttaaggaattgcctcacctgcagataaaaaaactttaaagttgcatccctttccagattgatctacatcaaatattaggtcaatataa

SEQ ID NO: 62871 - DNA, 110 bp, synthetic construct
  source 1..110: mol_type = other DNA
gctggctcttgagctgaacccaagtacctttctctttggcttccttctttttctgatcattttccttcacatgtttcaggaagttgccttggctcttagagtgcttaata

SEQ ID NO: 62872 - DNA, 110 bp, synthetic construct
  source 1..110: mol_type = other DNA
atcattttccttcacatgtttcaggaagttgccttggctcttagagtgcttaatatgctcactaggcacattaatgctctggcaagaatctggccctcagcttgtttgtt

SEQ ID NO: 62873 - DNA, 110 bp, synthetic construct
  source 1..110: mol_type = other DNA
gagattatacctttatcttttgagttatttgcaaagattttctcccattccgtaggttgtcttttcacttttttaatggtttgcttttcttttgagtgtaattaggtttg

SEQ ID NO: 62874 - DNA, 110 bp, synthetic construct; identical to SEQ ID NO: 62873
  source 1..110: mol_type = other DNA

SEQ ID NO: 62875 - DNA, 110 bp, synthetic construct
  source 1..110: mol_type = other DNA
cagtccaactacaagaattcaagaggggtagagggggaaatttcaccctcttcctcgagaatatacttttataaagcgtccaacttttttctcttacttgtatttaaaag

SEQ ID NO: 62876 - DNA, 110 bp, synthetic construct
  source 1..110: mol_type = other DNA
cgagaatatacttttataaagcgtccaacttttttctcttacttgtatttaaaagaatggtttaaccagcataatgacttaacattcttcgtgagagacgttctgcttgt

SEQ ID NO: 62877 - DNA, 110 bp, synthetic construct
  source 1..110: mol_type = other DNA
taagtaagaaatgcctatgactaggtcatcaataaacatactagctttttttttttttttttgctttttaggactgcccttgcggtgtatggaggttcccaggctagggg

SEQ ID NO: 62878 - DNA, 110 bp, synthetic construct; identical to SEQ ID NO: 62877
  source 1..110: mol_type = other DNA

SEQ ID NO: 62879 - DNA, 110 bp, synthetic construct
  source 1..110: mol_type = other DNA
ggacaagatggagttttcagcaaagagactaagaaaatattgtagaaacatgtctcatgacacttacgtttttttgtttgtttgtttgtttgtttttcatttggttgatg

SEQ ID NO: 62880 - DNA, 110 bp, synthetic construct; identical to SEQ ID NO: 62879
  source 1..110: mol_type = other DNA

SEQ ID NO: 62881 - DNA, 110 bp, synthetic construct
  source 1..110: mol_type = other DNA
cataggacatttgtctttctgtgacttaattcactttaatgatattccctagaaacatccatattttcacaagtggcaagattttatttttaagcctgactaatattcca

SEQ ID NO: 62882 - DNA, 110 bp, synthetic construct; identical to SEQ ID NO: 62881
  source 1..110: mol_type = other DNA

SEQ ID NO: 62883 - DNA, 110 bp, synthetic construct
  source 1..110: mol_type = other DNA
agtatcagtgtaggaaataatttccaaagaattcatttctgagcacagctgatccatcaatcaattttaaattgtggctaaaaccagtcttttatactgatccttgccaa

SEQ ID NO: 62884 - DNA, 110 bp, synthetic construct
  source 1..110: mol_type = other DNA
atcaatcaattttaaattgtggctaaaaccagtcttttatactgatccttgccaaccagttcttttgggattaattagaataagaatttgttaactgttcttgcttatgc

SEQ ID NO: 62885 - DNA, 110 bp, synthetic construct
  source 1..110: mol_type = other DNA
ctgctacctctaagatgaagagtttggggcctgggaattagatgtccattatgggaattctcaagatgagcaggtgtgttgcatgagaagaaaatgtcatgtcctgggac

SEQ ID NO: 62886 - DNA, 110 bp, synthetic construct
  source 1..110: mol_type = other DNA
gctggataataagaatgttcatgtgttcaattcaccaaagcctaaacttaagagcagctttaaacattgattgaaagtttctaattcattcacccaaatctctttactct

SEQ ID NO: 62887 - DNA, 110 bp, synthetic construct
  source 1..110: mol_type = other DNA
tgttcatgtgttcaattcaccaaagcctaaacttaagagcagctttaaacattgattgaaagtttctaattcattcacccaaatctctttactctaacactattctcaat

SEQ ID NO: 62888 - DNA, 110 bp, synthetic construct
  source 1..110: mol_type = other DNA
cccattttttgtatagtatgttctataaatgtttgttagatgctcttggttgatggttcttccatatccttgctgattttgtgtctggttcttttatcatttgttgagag

SEQ ID NO: 62889 - DNA, 110 bp, synthetic construct
  source 1..110: mol_type = other DNA
gttcttccatatccttgctgattttgtgtctggttcttttatcatttgttgagagaaaaaaatgttcaacacttctggtatatctttgttaaattaccagttgttaaaag

SEQ ID NO: 62890 - DNA, 110 bp, synthetic construct
  source 1..110: mol_type = other DNA
ttaagctatctttagcttaatttggcaaatgataaatgagagctaaatttttgatggagttaaagtgagtagaaaagggggggaaggattacacagaaggtaaaggagag

SEQ ID NO: 62891 - DNA, 110 bp, synthetic construct
  source 1..110: mol_type = other DNA
gtggacctacaagaggcaagtagcctagacccccatgtcacctgatagcacagaatgtttgccaatccatggcaaaaaaagtgaagaaataaacttgcattgtatcaagc

SEQ ID NO: 62892 - DNA, 110 bp, synthetic construct
  source 1..110: mol_type = other DNA
tgtttgccaatccatggcaaaaaaagtgaagaaataaacttgcattgtatcaagctgttcatacttcaggttttatctgttacatcattttgccatcatgttttctgact

SEQ ID NO: 62893 - DNA, 110 bp, synthetic construct
  source 1..110: mol_type = other DNA
attccataacattttgaaatgtccagtgaacacaaaattctgaggtatctaatcattttattttgtaatgcagtccatgtctccactgacacccagccaatacaccaggg

SEQ ID NO: 62894 - DNA, 110 bp, synthetic construct
  source 1..110: mol_type = other DNA
ctattatggcaaataaatggctctataattcctaattaaatttacttcccattttctagcccctaatttttcttaccaccaagtctattgccaagttgcttccacctatt

SEQ ID NO: 62895 - DNA, 110 bp, synthetic construct
  source 1..110: mol_type = other DNA
ctagcccctaatttttcttaccaccaagtctattgccaagttgcttccacctattccacttagaggagggtttaataactttcccatccttttccctccaccttacatgt

SEQ ID NO: 62896 - DNA, 110 bp, synthetic construct
  source 1..110: mol_type = other DNA
ttcagtggtagcctaattacctttcataattattttgacattgtttactaagagctgtggatgtcaatcaataatatacacatttttacatgtaactgaatgctgctatc

SEQ ID NO: 62897 - DNA, 110 bp, synthetic construct
  source 1..110: mol_type = other DNA
ttaaggatctggcgttgtcattgctgtggagcaggttcagtccctgaactggaaatgttcacatgatgtaagcgcagccagaaagaaaccaagatctgtacaactgggtg

SEQ ID NO: 62898 - DNA, 110 bp, synthetic construct
  source 1..110: mol_type = other DNA
tgttcacatgatgtaagcgcagccagaaagaaaccaagatctgtacaactgggtgtgctagctgctgctgtggtatcatgtgttctaggcccttttggcaaatcgagcca

SEQ ID NO: 62899 - DNA, 110 bp, synthetic construct
  source 1..110: mol_type = other DNA
tatttgttaataaaatatcccatatcctacttatctctcagatatagcccttgtagtcatgggaaaactccaaaccttatctatcaatatattgaaatggccatggaaat

SEQ ID NO: 62900 - DNA, 110 bp, synthetic construct
  source 1..110: mol_type = other DNA
gtcatgggaaaactccaaaccttatctatcaatatattgaaatggccatggaaatttattatatattatacttcctttgatgcctctttccttccatgcttattctttat

SEQ ID NO: 62901 - DNA, 110 bp, synthetic construct
  source 1..110: mol_type = other DNA
cctgaaattctaatttttacttctttgaaagtgttttctttgggggggggcactttaagagtttctttttatatttggtttttagcagcttcactgtgaagtgcctagat

SEQ ID NO: 62902 - DNA, 110 bp, synthetic construct
  source 1..110: mol_type = other DNA
taagagtttctttttatatttggtttttagcagcttcactgtgaagtgcctagataaattttctttgtagttgttcttgctagggttcacagtgatccttccatctgtag

SEQ ID NO: 62903 - DNA, 110 bp, synthetic construct
  source 1..110: mol_type = other DNA
aaaattccctccattggtcacaaggactgtgggaaaactcagctcattgctaactgactgctaatgcctaatttaccctagtttgtaggcaaaaatatactgaactttta

SEQ ID NO: 62904 - DNA, 110 bp, synthetic construct
  source 1..110: mol_type = other DNA
gactgctaatgcctaatttaccctagtttgtaggcaaaaatatactgaacttttatctttcgcacaggtggtcatattgggcctactcttcttcaccagcagcatggcct

SEQ ID NO: 62905 - DNA, 110 bp, synthetic construct
  source 1..110: mol_type = other DNA
tatgtaaatttggttgtgttactcttgtgcttaaattattccagtagtgtcccatcaccatttggcacagactaaataatctgaacatggtgcatgtggcctttcatagc

SEQ ID NO: 62906 - DNA, 110 bp, synthetic construct
  source 1..110: mol_type = other DNA
caccatttggcacagactaaataatctgaacatggtgcatgtggcctttcatagcgggctcttagctgaatcttgcattgctaacacccttcttctctaaacttcagcac

SEQ ID NO: 62907 - DNA, 110 bp, synthetic construct
  source 1..110: mol_type = other DNA
aaacagtgatagttttatttattcttttccaatttggattcattttatttctttttctctctgattgccatggctaggccattcccaactatgttgaatagtagtggcat

SEQ ID NO: 62908 - DNA, 110 bp, synthetic construct
  source 1..110: mol_type = other DNA
ggattcattttatttctttttctctctgattgccatggctaggccattcccaactatgttgaatagtagtggcatgagcagacagccttgtcctattcctgatcttagtg

SEQ ID NO: 62909 - DNA, 110 bp, synthetic construct
  source 1..110: mol_type = other DNA
tccattgacacaatacaaataatgaatgtatttaaccccacaaatttccttatgtccatttttagaccttttgcctcccctcctgcccagtgccacccttgccctggaca

SEQ ID NO: 62910 - DNA, 110 bp, synthetic construct; identical to SEQ ID NO: 62909
  source 1..110: mol_type = other DNA

SEQ ID NO: 62911 - DNA, 110 bp, synthetic construct
  source 1..110: mol_type = other DNA
taaagtgaccattatgcaaggcaatgtatcaaaaagattatatttggggttctgtggcacagtgggttaaggatccggcattgtcactgcagtgtcttgggtcactgctg

SEQ ID NO: 62912 - DNA, 110 bp, synthetic construct
  source 1..110: mol_type = other DNA
gcaaggcaatgtatcaaaaagattatatttggggttctgtggcacagtgggttaaggatccggcattgtcactgcagtgtcttgggtcactgctgtggtgcaggctcagt

SEQ ID NO: 62913 - DNA, 110 bp, synthetic construct
  source 1..110: mol_type = other DNA
ctgcttgtagccaagcgctccaactagatctattgattgaacttacactgacattgcagaaaccaaatataattatagctgttaggaaagagtgaaatcagaaatttggt

SEQ ID NO: 62914 - DNA, 110 bp, synthetic construct
  source 1..110: mol_type = other DNA
cgctccaactagatctattgattgaacttacactgacattgcagaaaccaaatataattatagctgttaggaaagagtgaaatcagaaatttggtaaactttacatcaag

SEQ ID NO: 62915 - DNA, 110 bp, synthetic construct
  source 1..110: mol_type = other DNA
tattgtatccactaaggcatcactatagtgaaggtcatctaggttttctcttacgtttgctatcttctaggagttttatagttttgtgttttgcattagttttactgtcc

SEQ ID NO: 62916 - DNA, 110 bp, synthetic construct
  source 1..110: mol_type = other DNA
gaattgacaagttttggttgtcttggaaatttgatttctttttccgagaaaaattgggaaatttgccaacagtgcttctatatactggtttcctgttagtgagctagctt

SEQ ID NO: 62917 - DNA, 110 bp, synthetic construct
  source 1..110: mol_type = other DNA
gggaaatttgccaacagtgcttctatatactggtttcctgttagtgagctagcttcttgtctccatctagaacacgctaaaactctcccacagacttcctgtattccaaa

SEQ ID NO: 62918 - DNA, 110 bp, synthetic construct
  source 1..110: mol_type = other DNA
tgggaatgatctaaagatttcaattacctatgcttccactatgagctaaagtctcatcattaacatcatagtcaactattctctacaattgcattttgctgtaagcctcc

SEQ ID NO: 62919 - DNA, 110 bp, synthetic construct
  source 1..110: mol_type = other DNA
atcattaacatcatagtcaactattctctacaattgcattttgctgtaagcctccggattttattaggggcattagcagacaaaataacaccacaatagctttttgcttg

SEQ ID NO: 62920 - DNA, 110 bp, synthetic construct
  source 1..110: mol_type = other DNA
aaagttgcttgataagttgcttgaaagttgcttgatatgtatgataagtttcttaaatttactgagacttgttttgtggcctgtcatatgatctatcctggaaaacgtcc

SEQ ID NO: 62921 - DNA, 110 bp, synthetic construct
  source 1..110: mol_type = other DNA
gttgcttgaaagttgcttgatatgtatgataagtttcttaaatttactgagacttgttttgtggcctgtcatatgatctatcctggaaaacgtcctgtgtgcacttgaaa

SEQ ID NO: 62922 - DNA, 110 bp, synthetic construct
  source 1..110: mol_type = other DNA
aaaaagcatcagcatcatttttctgctcctaagaattactggggttttctcttccataacctgaagtcaaaaagcattattatgaacagtcaaatttcctgtggaatctg

SEQ ID NO: 62923 - DNA, 110 bp, synthetic construct
  source 1..110: mol_type = other DNA
tttctcttccataacctgaagtcaaaaagcattattatgaacagtcaaatttcctgtggaatctgttttttatcctatttcatgggaattcatcagatatatgtatctct

SEQ ID NO: 62924 - DNA, 110 bp, synthetic construct
  source 1..110: mol_type = other DNA
cccttgcttgtcgagatcaactaaatagagctcttttgcaaagttattttaccaatagcaccctgagctagaaaaatatacatctaaaacacacacatagagagaatcac

SEQ ID NO: 62925 - DNA, 110 bp, synthetic construct
  source 1..110: mol_type = other DNA
tagcaccctgagctagaaaaatatacatctaaaacacacacatagagagaatcacagatgaacatatatagacagatgtgaaaggagactttatatttttcatttagaag

SEQ ID NO: 62926 - DNA, 110 bp, synthetic construct
  source 1..110: mol_type = other DNA
tgctgaggtgtgggttcgattctcggccctcaggcagtgggttagggacctggcattgccacagctgtggcatatgtatgtcacagctgcagcatggatatgatccctgg

SEQ ID NO: 62927 - DNA, 110 bp, synthetic construct
  source 1..110: mol_type = other DNA
ttgccacagctgtggcatatgtatgtcacagctgcagcatggatatgatccctggcctgggaacttcatgcagcatgtgtggctggggggaaaggtagtagtttgcaagg

SEQ ID NO: 62928 - DNA, 110 bp, synthetic construct
  source 1..110: mol_type = other DNA
gaatttttgcatctatgtttatcatagatactgttctatagtttgctttccctgcagtgtctttttctagttttggtgttgggatggtgctgacttcattaaatgggttt

SEQ ID NO: 62929 - DNA, 110 bp, synthetic construct
  source 1..110: mol_type = other DNA
ctttccctgcagtgtctttttctagttttggtgttgggatggtgctgacttcattaaatgggtttattagtattctctcttcttttttcattttttaagttttattgaag

SEQ ID NO: 62930 - DNA, 110 bp, synthetic construct
  source 1..110: mol_type = other DNA
ttctactaagcagcctatttggaaatcgccttgagtgtgatgaagatgctgatggaggatgaccacatgtctcaaattcactgtccattatgaacttgacatagaagagg

SEQ ID NO: 62931 - DNA, 110 bp, synthetic construct
  source 1..110: mol_type = other DNA
caagttgaaaaagataagccaaatcatttgtggcgactagaaactaagctttctaacatatttaactgggggtgctcaaggaagaaaggagaataagtaagtttggggga

SEQ ID NO: 62932 - DNA, 110 bp, synthetic construct
  source 1..110: mol_type = other DNA
acatatttaactgggggtgctcaaggaagaaaggagaataagtaagtttgggggatggagagggttaaccttaaggagtgtcccctgagtttggcccggccacctggaac

SEQ ID NO: 62933 - DNA, 110 bp, synthetic construct
  source 1..110: mol_type = other DNA
cctattttgttaggcgttttaatcatgaatgcctgttgaactttgttgtatgctttttttgaatctagggcgaggatcatgtggttcttttaattcattttcatgagggg

SEQ ID NO: 62934 - DNA, 110 bp, synthetic construct
  source 1..110: mol_type = other DNA
tttttgaatctagggcgaggatcatgtggttcttttaattcattttcatgaggggtatcattttaaagggaggtggtatggactccaggctgctcggtgagcttggctaa

SEQ ID NO: 62935 - DNA, 110 bp, synthetic construct
  source 1..110: mol_type = other DNA
tggttttggcaatggaaaaacaactcaggaaatgtgcatcagataacttatctaggtaccttaggagctaaagcaggggatttgggggaggggtctgtcctggggaggcc

SEQ ID NO: 62936 - DNA, 110 bp, synthetic construct
  source 1..110: mol_type = other DNA
gtaccttaggagctaaagcaggggatttgggggaggggtctgtcctggggaggccctaaaacgtcctataaaaaacccagaggcaattagttttacaggaagtggtgaga

SEQ ID NO: 62937 - DNA, 110 bp, synthetic construct
  source 1..110: mol_type = other DNA
atgactgtattgaaaatattgaggtccacggaaaaaatgagattgagctttgtgctgatggattagaaacggaggtgttggtatgaatgcaatggttttcagcactgtag

SEQ ID NO: 62938 - DNA, 110 bp, synthetic construct
  source 1..110: mol_type = other DNA
tgatggattagaaacggaggtgttggtatgaatgcaatggttttcagcactgtaggtgggtgtggaaataaacataaatagcaatgtgtaggtgtgcatgtctgtgcatg

SEQ ID NO: 62939 - DNA, 110 bp, synthetic construct
  source 1..110: mol_type = other DNA
ggtcttgaaccctagtaattttctaagtggtaaggatcattgaataatttcttcttataatacatagtgttttaccccagctctaaaaaaagctttggaatgataaaggt

SEQ ID NO: 62940 - DNA, 110 bp, synthetic construct
  source 1..110: mol_type = other DNA
tataatacatagtgttttaccccagctctaaaaaaagctttggaatgataaaggtgaaaggagcatcttttgttattcgtaacaaacttctttcaaccatgtgagtttat

SEQ ID NO: 62941 - DNA, 110 bp, synthetic construct
  source 1..110: mol_type = other DNA
ctagaatagacaaaaagaccacaaaaaaaaaaaagaaagaaagaaaagaagaagaacctccaagagaagaaccttgggctcaaaggctggagttatcaacacagaagtta

SEQ ID NO: 62942 - DNA, 110 bp, synthetic construct
  source 1..110: mol_type = other DNA
acctccaagagaagaaccttgggctcaaaggctggagttatcaacacagaagttaaaatctaaagctacagaatattactcctaggcctaaaaaccgaatggaatactcc

SEQ ID NO: 62943 - DNA, 110 bp, synthetic construct
  source 1..110: mol_type = other DNA
atcattaattgttgattcttgtagtaaaagttgcatagggccagaaatatacatgggatacaagaacaataagaaaaatatttgcatctcattccacttgatcttcatac

SEQ ID NO: 62944 - DNA, 110 bp, synthetic construct; identical to SEQ ID NO: 62943
  source 1..110: mol_type = other DNA

SEQ ID NO: 62945 - DNA, 110 bp, synthetic construct
  source 1..110: mol_type = other DNA
tagtcatattcgtttccactgagccatgacgagaactcctagacagcagtgtcttaacttactaagttttatattcttatttgtcctttcactggattaaggagctattg

SEQ ID NO: 62946 - DNA, 110 bp, synthetic construct
  source 1..110: mol_type = other DNA
aacttactaagttttatattcttatttgtcctttcactggattaaggagctattgtttacccttttttatgtatttagagattaaggagaggctgagtcttaaccctggt

SEQ ID NO: 62947 - DNA, 110 bp, synthetic construct
  source 1..110: mol_type = other DNA
gtccatgacttcacccttgtatcactctaaattatttcaacagatttgaaagcagattgtacatatccgtatattccccctacaacacattagaattcactagaggttga

SEQ ID NO: 62948 - DNA, 110 bp, synthetic construct
  source 1..110: mol_type = other DNA
ttcaacagatttgaaagcagattgtacatatccgtatattccccctacaacacattagaattcactagaggttgatatttgactgtattttttttttcttttgaggtaaa

SEQ ID NO: 62949 - DNA, 110 bp, synthetic construct
  source 1..110: mol_type = other DNA
tccacccctttcccttgattgtgagtcctgtattataaacatttactttcagatctgaagtgtgtttaaaggcacagccaactgccaacccccaaatcgtgaagtgatca

SEQ ID NO: 62950 - DNA, 110 bp, synthetic construct
  source 1..110: mol_type = other DNA
tgaagtgtgtttaaaggcacagccaactgccaacccccaaatcgtgaagtgatcagaatttcttcttgtgttattgtcattttactttttctgttactcctattttaagt

SEQ ID NO: 62951 - DNA, 110 bp, synthetic construct
  source 1..110: mol_type = other DNA
tgacagctcttccctttgtagtccccctaacacaactgagaatggcttgattcttttcaaaaagactattaaatgttgaagagtaaacgaatagaatacaagaagtcctg

SEQ ID NO: 62952 - DNA, 110 bp, synthetic construct
  source 1..110: mol_type = other DNA
ttcaaaaagactattaaatgttgaagagtaaacgaatagaatacaagaagtcctggcagtcaaatctccttgccctcttgctgccgaagagaacgtcttaaaaatccaaa

SEQ ID NO: 62953 - DNA, 110 bp, synthetic construct
  source 1..110: mol_type = other DNA
aatcccaaactccctaggtcacaggttcccaaactttctgagtttaaggtccccttagttgttgcagtgattttttttttcacagcaaccctgagccaaaagaaatgcct

SEQ ID NO: 62954 - DNA, 110 bp, synthetic construct
  source 1..110: mol_type = other DNA
tagttgttgcagtgattttttttttcacagcaaccctgagccaaaagaaatgcctagtagttccatttattaagtaattaggtccaaacagcatcataggtatttatatt

SEQ ID NO: 62955 - DNA, 110 bp, synthetic construct
  source 1..110: mol_type = other DNA
ttgctggggacacactggaggtagaagcgtggggaaggcatgccatctaaaaaaaatcttgagatgctgattagacacccaattgaaaatgtcatgtaggtaagccagaa

SEQ ID NO: 62956 - DNA, 110 bp, synthetic construct
  source 1..110: mol_type = other DNA
atcttgagatgctgattagacacccaattgaaaatgtcatgtaggtaagccagaaaaatgaatctggggctcagagcaggtctttttttgaaatacacctatgggaggca

SEQ ID NO: 62957 - DNA, 110 bp, synthetic construct
  source 1..110: mol_type = other DNA
ctgggtatattgagttattctaacagccatgatattttggataggatactgtgggcaacataaaacagcagcactgtgtgaaggcgcagagcagctcaacagacctcgag

SEQ ID NO: 62958 - DNA, 110 bp, synthetic construct
  source 1..110: mol_type = other DNA
caacataaaacagcagcactgtgtgaaggcgcagagcagctcaacagacctcgagcagtcctttctgccaaatggggttacccacctgagttggatggttggaccatatg

SEQ ID NO: 62959 - DNA, 110 bp, synthetic construct
  source 1..110: mol_type = other DNA
catcatttaaacagacccatcattagaaatgaaattgaattcgtaataaaaacactccctacaacaatagtccaggaccagacggcttcacaggcaaagtctaccaagca

SEQ ID NO: 62960 - DNA, 110 bp, synthetic construct
  source 1..110: mol_type = other DNA
tccctacaacaatagtccaggaccagacggcttcacaggcaaagtctaccaagcaaaaaagaacttatacccacccttcttaaaattttacaaaagatggaggaagcaac

SEQ ID NO: 62961 - DNA, 110 bp, synthetic construct
  source 1..110: mol_type = other DNA
cgcagcggcttggttgtcaggggctgcctggatcccggagggtagattactgttttcgctgctgcaaactcaggcccaagacgaaaggcaagtcttgtgacactgttccc

SEQ ID NO: 62962 - DNA, 110 bp, synthetic construct
  source 1..110: mol_type = other DNA
tcgctgctgcaaactcaggcccaagacgaaaggcaagtcttgtgacactgttccctggcgagccctctgccccactctgtttcaactagcttttcctttaaatcgccccc

SEQ ID NO: 62963 - DNA, 110 bp, synthetic construct
  source 1..110: mol_type = other DNA
ttttaagagttcctgtctattctagataaaagtcctttatcagatgtgtcttctgaagatattttctcctggtctgtggcttgtcttctcattcttttaacactgtcttt

SEQ ID NO: 62964 - DNA, 110 bp, synthetic construct; identical to SEQ ID NO: 62963
  source 1..110: mol_type = other DNA

SEQ ID NO: 62965 - DNA, 110 bp, synthetic construct
  source 1..110: mol_type = other DNA
tgctcaatgaacccaaccacttgttgatgcaacagttctcatacttttgtcatataaatttccagcttcgctgtaccttctaagggcttcggagtacctccacagaagca

SEQ ID NO: 62966 - DNA, 110 bp, synthetic construct
  source 1..110: mol_type = other DNA
tgtatctagcccaggtcacagagggatttttaggtaccgcctacttcatgttgtgctgaaaacatcctgctaagaaacctgggagaacccaacttcactgaatgtcaaag

SEQ ID NO: 62967 - DNA, 110 bp, synthetic construct
  source 1..110: mol_type = other DNA
gagcagcgcccccctgtgggcatcttgggtagcgtcccatgacttcctggtagatggtagagaacacagcccagagctgtcctgcaggagcagtgaggacagtgttgacc

SEQ ID NO: 62968 - DNA, 110 bp, synthetic construct
  source 1..110: mol_type = other DNA
ggtagagaacacagcccagagctgtcctgcaggagcagtgaggacagtgttgacccaccaggtcctgtctcttgctagttaacgctgacacttcttgcctgccctgtgcc

SEQ ID NO: 62969 - DNA, 110 bp, synthetic construct
  source 1..110: mol_type = other DNA
cccaggctggatggtgtcactcccctcgtaggcctttcctacttccaggcgtgggttggaaccttcctgtgtgcttccaaaagctctctctttcccctcccgtaacctaa

SEQ ID NO: 62970 - DNA, 110 bp, synthetic construct
  source 1..110: mol_type = other DNA
ttggaaccttcctgtgtgcttccaaaagctctctctttcccctcccgtaacctaatgaatgccccaggttagattgtacatgctgtgaagtcaggggccttttaaaacct

SEQ ID NO: 62971 - DNA, 110 bp, synthetic construct
  source 1..110: mol_type = other DNA
agcctcagcctcacgtcccccctccccaggcaaggccgggcctctgggtggccacacagagggctagaccctgccctctctctgtctgacccctcctcctccttgggaac

SEQ ID NO: 62972 - DNA, 110 bp, synthetic construct
  source 1..110: mol_type = other DNA
acagagggctagaccctgccctctctctgtctgacccctcctcctccttgggaactcgtgattaagttgcactagggacaagtatccctcagagagtcaccgatgagaat

SEQ ID NO: 62973 - DNA, 110 bp, synthetic construct
  source 1..110: mol_type = other DNA
agcacagactttctcgcagttctggaggtcggaggtctggaatgcctttgaccgggctaacatcaagatgttggcaggtctgcgttccttctagaggctgcagaagagaa

SEQ ID NO: 62974 - DNA, 110 bp, synthetic construct
  source 1..110: mol_type = other DNA
gctaacatcaagatgttggcaggtctgcgttccttctagaggctgcagaagagaatccatttctgtgcttcttacagattctagggcttccttccttgcattccttggct

SEQ ID NO: 62975 - DNA, 110 bp, synthetic construct
  source 1..110: mol_type = other DNA
ggatcgaacctgcacctcacggttcctggtcggattcgtcaaccactgcgccacgacgggacctccaggtctttggaatcctgtagttccacaccttcgttttaccaatg

SEQ ID NO: 62976 - DNA, 110 bp, synthetic construct; identical to SEQ ID NO: 62975
  source 1..110: mol_type = other DNA

SEQ ID NO: 62977 - DNA, 110 bp, synthetic construct
  source 1..110: mol_type = other DNA
ctgaagaaggggcctgggttggcgcatcttagctcagccttttatccatatggacgctgaaaagacaagtattggggggaaatgtcatttccagagacatgttttgttcc

SEQ ID NO: 62978 - DNA, 110 bp, synthetic construct
  source 1..110: mol_type = other DNA
gctgaaaagacaagtattggggggaaatgtcatttccagagacatgttttgttccgtaggtggtcactcatcctttcaaaaccatcgagctacagatgaagaagaaggga

SEQ ID NO: 62979 - DNA, 110 bp, synthetic construct
  source 1..110: mol_type = other DNA
agctataattttcttggattttttttgttgatcaacaatttaacacagctgaaacttgaattgatccaactcaattggccttcctctactaaatccaggatggtgggcaa

SEQ ID NO: 62980 - DNA, 110 bp, synthetic construct
  source 1..110: mol_type = other DNA
ttgaattgatccaactcaattggccttcctctactaaatccaggatggtgggcaagtccttcagtgaacacactggggcttctgggaagtggtctccagccacaaagggg

SEQ ID NO: 62981 - DNA, 110 bp, synthetic construct
  source 1..110: mol_type = other DNA
tgagccacaatgggaactcctgtttgttttttattgcaggttcatactaaaaaggaaaggttaaatcgtctcttctattacaaatattattcctagagatagttttagat

SEQ ID NO: 62982 - DNA, 110 bp, synthetic construct; identical to SEQ ID NO: 62981
  source 1..110: mol_type = other DNA

SEQ ID NO: 62983 - DNA, 110 bp, synthetic construct
  source 1..110: mol_type = other DNA
catggtcagatttagataatgctctttttgctggcagtattatgggagtgatactacaggagtcgaccagtttgtctcctatgttggtgatttaacctcgatctctaggt

SEQ ID NO: 62984 - DNA, 110 bp, synthetic construct
  source 1..110: mol_type = other DNA
ggagctgtaatggcttataattaaggaaaaccacttatcaatgtcatccgtcaattagttcttcgtcatgactatgtcttgaacaagtacttgaaacaagttcagatctg

SEQ ID NO: 62985 - DNA, 110 bp, synthetic construct
  source 1..110: mol_type = other DNA
tagttcttcgtcatgactatgtcttgaacaagtacttgaaacaagttcagatctgcaccatgtaactctgggtcttgatgggctcaggcaatgagagtatcactttggct

SEQ ID NO: 62986 - DNA, 110 bp, synthetic construct
  source 1..110: mol_type = other DNA
tgtcccgcagctgcaggaggagagtcaggggctctggtctcctctaagtgtggtttcctcagcatgtcagcttccatggctcaaaaatgaggacgttggacgaacttatt

SEQ ID NO: 62987 - DNA, 110 bp, synthetic construct
  source 1..110: mol_type = other DNA
tcctcagcatgtcagcttccatggctcaaaaatgaggacgttggacgaacttatttcaaaattctgagatctacagttacaagtctgtgatgttttccgaagaaaacttg

SEQ ID NO: 62988 - DNA, 110 bp, synthetic construct
  source 1..110: mol_type = other DNA
agaagtaaaaacaaagactgtgccagtaggggagagagatcagatgcaatgccaaatgcagcaaaagcagctgggggcttacggtcaatgggtagagcgagggggtcaat

SEQ ID NO: 62989 - DNA, 110 bp, synthetic construct
  source 1..110: mol_type = other DNA
atgcagcaaaagcagctgggggcttacggtcaatgggtagagcgagggggtcaatgaatggaaaatgactaagaggggacattgatgataagcggatgctccttgctgaa

SEQ ID NO: 62990 - DNA, 110 bp, synthetic construct
  source 1..110: mol_type = other DNA
ggctttaaaaatttgttcacacttacagtgcatctctaaaagtaataaagctgcgatcattttgtgactcaaaagaataaaggctgggagttcctactgtggctcagcag

SEQ ID NO: 62991 - DNA, 110 bp, synthetic construct
  source 1..110: mol_type = other DNA
gagagaagaggctcaggtgattatcaagaggagatggagctgctcaggcatcatggttaccaggagagctatgtctggagctcggggatttatggaggcatctctcagtc

SEQ ID NO: 62992 - DNA, 110 bp, synthetic construct
  source 1..110: mol_type = other DNA
gttaccaggagagctatgtctggagctcggggatttatggaggcatctctcagtcctctgatacgctgtgctcctcgtcgggggaaaactgtggtaacccaataaaaatg

SEQ ID NO: 62993 - DNA, 110 bp, synthetic construct
  source 1..110: mol_type = other DNA
cccaatcgggcacctcagccattactacgtggaacaaaatgagctgtctccactgagccctgcctgaattcccaaccaaacgaccatgagcaacagcatgactgaagcca

SEQ ID NO: 62994 - DNA, 110 bp, synthetic construct
  source 1..110: mol_type = other DNA
gcaggggcatattttggccatctggtctacctcccccacttgcaatgctgcgagatgaggataaacactggaatggtgatctgagggcactaggtaactgctcttgcata

SEQ ID NO: 62995 - DNA, 110 bp, synthetic construct
  source 1..110: mol_type = other DNA
tgaggataaacactggaatggtgatctgagggcactaggtaactgctcttgcatatgtgaggggtcgcatgtgcacacatgcattttaggaagcgttttcaataaaggac

SEQ ID NO: 62996 - DNA, 110 bp, synthetic construct
  source 1..110: mol_type = other DNA
cctgctttgccagttgctttgatgaatagaatatgacagaagtaatgtgcctcgggccttaagtgtccaggcagctttggctctcaccccctgggaatccatctgcatgc

SEQ ID NO: 62997 - DNA, 110 bp, synthetic construct
  source 1..110: mol_type = other DNA
tcgagtaaattaaaaaatgaatgacttcctatcattcgtataagttttaataactttcccacatgagcttaaatgaacacttcagaacatctaattgtgcgatctcttaa

SEQ ID NO: 62998 - DNA, 110 bp, synthetic construct
  source 1..110: mol_type = other DNA
aggatgagggttggctccctggccgcattcagtgggttaaggatctggcaacaagctgcagcacgggttgaggatgtagctcggatctggtattgctatggctgtggcca

SEQ ID NO: 62999 - DNA, 110 bp, synthetic construct; identical to SEQ ID NO: 62998
  source 1..110: mol_type = other DNA

SEQ ID NO: 63000 - DNA, 110 bp, synthetic construct
  source 1..110: mol_type = other DNA
gaagccaaaaggattaggggttagctgcaagaagggagcaaagaatcttccagtcagaggtcagcagtgtacacaaaggctgtgaatccagagaaaacacagcgcagtga

SEQ ID NO: 63001 - DNA, 110 bp, synthetic construct
  source 1..110: mol_type = other DNA
tccttcacctcaagcctagggacggtggctctgcgatggcacattttctgcaggagagcttagggacacattacagtgatgtcggggctatacctggaaaatctaaagta

SEQ ID NO: 63002 - DNA, 110 bp, synthetic construct
  source 1..110: mol_type = other DNA
tttaaatttaggccaacttcaatccagagtgacctccttttaactaattacagctgcaaagaccctacttctaacagaacgtcacattttgaggttctggttgggaatga

SEQ ID NO: 63003 - DNA, 110 bp, synthetic construct
  source 1..110: mol_type = other DNA
gcaaagaccctacttctaacagaacgtcacattttgaggttctggttgggaatgaatttttggaggacattattctacctaatcctcttgccatagaagaaatgtcaggc

SEQ ID NO: 63004 - DNA, 110 bp, synthetic construct
  source 1..110: mol_type = other DNA
ttgttgtagctgcagtgtaggttgcaactgtagctcagattcaatctctggcccgagaatttccatatgccacaggtgaggccataaaaaatgccttaaacataagtgga

SEQ ID NO: 63005 - DNA, 110 bp, synthetic construct; identical to SEQ ID NO: 63004
  source 1..110: mol_type = other DNA

SEQ ID NO: 63006 - DNA, 110 bp, synthetic construct
  source 1..110: mol_type = other DNA
acatctacccttcaaggctggtctactgccttctccctaaagatccttcaatcattctaagactgctaggaagagtaacaaagtaagtcattaacaccttaggtacaaat

SEQ ID NO: 63007 - DNA, 110 bp, synthetic construct
  source 1..110: mol_type = other DNA
tctaagactgctaggaagagtaacaaagtaagtcattaacaccttaggtacaaatcacctttagcaagaaatgccttcctcggagacaagcagggtgggcaggttataga

SEQ ID NO: 63008 - DNA, 110 bp, synthetic construct
  source 1..110: mol_type = other DNA
gacctctccacctgcactggcctggtgccccatatccagggacacagttctccgtggtagacctttggagttgggtttgaaggtactttttgagaatccacactgccctg

SEQ ID NO: 63009 - DNA, 110 bp, synthetic construct
  source 1..110: mol_type = other DNA
ccactttacaaccctcccaggtggctgtcaccatcccccttagaggagaaagcgaactgggtcttagggaaattaacttatccgaggttgcgcctgagcggcagagaagg

SEQ ID NO: 63010 - DNA, 110 bp, synthetic construct
  source 1..110: mol_type = other DNA
actgggtcttagggaaattaacttatccgaggttgcgcctgagcggcagagaagggataccactgggccaggcactcacgtgccatggggaggggagcgggtggcctctt

SEQ ID NO: 63011 - DNA, 110 bp, synthetic construct
  source 1..110: mol_type = other DNA
gcagatggcgtcctgtgctttgtggcaggttgtcagctctgattcctgcacattaggatgctgctgtcagtaaactcacttcccaggggaacgtaaagtttggagaatca

SEQ ID NO: 63012 - DNA, 110 bp, synthetic construct
  source 1..110: mol_type = other DNA
ggatgctgctgtcagtaaactcacttcccaggggaacgtaaagtttggagaatcaggtcaggtacaagttggatactcaaaataaaatgaattaaactaggtctccgaaa

SEQ ID NO: 63013 - DNA, 110 bp, synthetic construct
  source 1..110: mol_type = other DNA
gtagaggaagtgatggcatttcctcagggaccagagatgaacatacaacttatgtaagacttatgtaagttataaggacttatataagaatataagctcatctactctca

SEQ ID NO: 63014 - DNA, 110 bp, synthetic construct
  source 1..110: mol_type = other DNA
gatgaacatacaacttatgtaagacttatgtaagttataaggacttatataagaatataagctcatctactctcacaagcacaccaaaatcacaatctgaagaactatca

SEQ ID NO: 63015 - DNA, 110 bp, synthetic construct
  source 1..110: mol_type = other DNA
gcacagaaaaacatttgtgggcaaagtaaaggctaactacaggctgtctggatcatgtggaaacagcacacaatggaccacagactgaatgtgggggggggtgctatggc

SEQ ID NO: 63016 - DNA, 110 bp, synthetic construct
  source 1..110: mol_type = other DNA
ctggcacccagcagggaggctggatagggtagacctaggatttttagtgaacaaaggagtaaattctccgcgtcaaagctgaaggaggagacagaccggagaacagcaga

SEQ ID NO: 63017 - DNA, 110 bp, synthetic construct
  source 1..110: mol_type = other DNA
ggagtaaattctccgcgtcaaagctgaaggaggagacagaccggagaacagcagagagacgcacataatgccaattggcatggcgactgcaaacccatagaaggtccctg

SEQ ID NO: 63018 - DNA, 110 bp, synthetic construct
  source 1..110: mol_type = other DNA
aaaaaagctagaataaatcagggagacttcagacttctccatagcaacactcagctgtggtagatagtagagtatattcagagttctggggtgggaagtgtgacccaata

SEQ ID NO: 63019 - DNA, 110 bp, synthetic construct
  source 1..110: mol_type = other DNA
tgtggtagatagtagagtatattcagagttctggggtgggaagtgtgacccaataacattttagtcagtctaactgatgtccaaatataaaacaaaacaaaacagatatt

SEQ ID NO: 63020 - DNA, 110 bp, synthetic construct
  source 1..110: mol_type = other DNA
gtctgcaggggtggtggtgaggggcatccaatgacttccaattctgtgctgggttcatcttctgctgcacagtagagcaatccaagggaaactttctccagctttattaa

SEQ ID NO: 63021 - DNA, 110 bp, synthetic construct
  source 1..110: mol_type = other DNA
catcttctgctgcacagtagagcaatccaagggaaactttctccagctttattaaaacagggggagggtgcgggatgctggggctgatgcacttaaaatgcgctttgaag

SEQ ID NO: 63022 - DNA, 110 bp, synthetic construct
  source 1..110: mol_type = other DNA
gttggttttattactaagttgtaagagttctaccttatggataccagttctctgtcaaatatatagcaactgttttctcccattgtgtagcttgctttttcattatctta

SEQ ID NO: 63023 - DNA, 110 bp, synthetic construct
  source 1..110: mol_type = other DNA
caaatatatagcaactgttttctcccattgtgtagcttgctttttcattatcttaaaggtgtcctttgaagacatgaagttttgcatttcaatgaagcccattatctaat

SEQ ID NO: 63024 - DNA, 110 bp, synthetic construct
  source 1..110: mol_type = other DNA
aggttgtattagagcattctggaacctcctggaaggtgagctagtgaaaatgtttgggtccagattgttaattgaagtgtgcacagcctcaaaatcttcctgcaatccct

SEQ ID NO: 63025 - DNA, 110 bp, synthetic construct
  source 1..110: mol_type = other DNA
gggtccagattgttaattgaagtgtgcacagcctcaaaatcttcctgcaatccctggaacttctcagcctgactgctagagatgaaggttgggtcttgtcacctgctgcc

SEQ ID NO: 63026 - DNA, 110 bp, synthetic construct
  source 1..110: mol_type = other DNA
ttcaagtgtaatgacaaaaccatggtcttttctaagtacctagaaatcagaaattgcaatcttaggtaaaatcttcccaagatgaaccttacaggccacgtataattttt

SEQ ID NO: 63027 - DNA, 110 bp, synthetic construct
  source 1..110: mol_type = other DNA
tttactcttcttttgggtctcagctggtggcatggaggctggcacagacgaggggaccacagagtgtgctgagggaacactccggaggtatactgttttgttaagggatg

SEQ ID NO: 63028 - DNA, 110 bp, synthetic construct
  source 1..110: mol_type = other DNA
accacagagtgtgctgagggaacactccggaggtatactgttttgttaagggatggaagccaggagtgccagtgatgccaggcactgccagagccccgttcccaggccgg

SEQ ID NO: 63029 - DNA, 110 bp, synthetic construct
  source 1..110: mol_type = other DNA
aaggatccccacctcccaaccaaggcagccaccttcagtttctgggatctcaggggagtggagggggtgttaggaggccaggcagtttaagctctgcaggaagactttgc

SEQ ID NO: 63030 - DNA, 110 bp, synthetic construct
  source 1..110: mol_type = other DNA
gagtggagggggtgttaggaggccaggcagtttaagctctgcaggaagactttgcctaggacctcccagcctgttgcctcagccagaaactaagagaggaaggagaggca

SEQ ID NO: 63031 - DNA, 110 bp, synthetic construct
  source 1..110: mol_type = other DNA
attgattatctcaaagttctggaggctagacgttagacatcagggtgttatcagggccatgctcttcccaaaggctctggaggaggatccttccttgcctctttcagctt

SEQ ID NO: 63032 - DNA, 110 bp, synthetic construct
  source 1..110: mol_type = other DNA
gccatgctcttcccaaaggctctggaggaggatccttccttgcctctttcagcttctggtggttccaggcatcctttggcttgtggccacatacctccaatctctgcact

SEQ ID NO: 63033 - DNA, 110 bp, synthetic construct
  source 1..110: mol_type = other DNA
aggtacctgggggtttttgtgtttttctcccccagactttatagctgttatctatgggaaggttagtccagtaggagcttacccagccatactaggagcagagccacctt

SEQ ID NO: 63034 - DNA, 110 bp, synthetic construct
  source 1..110: mol_type = other DNA
gggaaggttagtccagtaggagcttacccagccatactaggagcagagccaccttttcttgatttttgaaatgatatgagttcagcctttcctgtgtctttctctaaaag

SEQ ID NO: 63035 - DNA, 110 bp, synthetic construct
  source 1..110: mol_type = other DNA
cctgcctgcttatttctcctgccatccccaaaggtatccttccatctgagttagcaaatgcaatgtatgtacccttggaaccatctctgctctttcttgtgacagtccct

SEQ ID NO: 63036 - DNA, 110 bp, synthetic construct
  source 1..110: mol_type = other DNA
aaatgcaatgtatgtacccttggaaccatctctgctctttcttgtgacagtccctctgcctggatttgtccttccttctgatcctctttagacaatccaatttgaccttt

SEQ ID NO: 63037 - DNA, 110 bp, synthetic construct
  source 1..110: mol_type = other DNA
ggaaggagattcctgagctcacagctttccacctacacagatcttggtcaaggaaaagatgtctgccctccacaaccctgtcgtgttcagcctccacctacttcctagct

SEQ ID NO: 63038 - DNA, 110 bp, synthetic construct
  source 1..110: mol_type = other DNA
aagatgtctgccctccacaaccctgtcgtgttcagcctccacctacttcctagctggcctttctcctgaagtccctacccacccaacacacacacacacacacacacaca

SEQ ID NO: 63039 - DNA, 110 bp, synthetic construct
  source 1..110: mol_type = other DNA
gggagagactggggagggctttcttcctaagaagctccttgggataagacagaaggaagaggcagacagggagggagggagcaaggggagggtttcctgtctccactgag

SEQ ID NO: 63040 - DNA, 110 bp, synthetic construct
  source 1..110: mol_type = other DNA
gaagaggcagacagggagggagggagcaaggggagggtttcctgtctccactgagaatccatctctcttctccttgttttctgctttatgagtcccatgttacttggaga

SEQ ID NO: 63041 - DNA, 110 bp, synthetic construct
  source 1..110: mol_type = other DNA
gcggtaatgaaactggtttcccagctcctgcgaaaatcagcttgcatgcatgccggtgtgcacatgaaggcctgcttttggacgcagacacgtgtatgtaaatgagtgtg

SEQ ID NO: 63042 - DNA, 110 bp, synthetic construct
  source 1..110: mol_type = other DNA
tccacttgaatgctatgaaggtgttgttgtttcttttttccctgcttcctactctgtttaaacttcagggtctagaatggtgcctggcacaatgccagctatcaataaat

SEQ ID NO: 63043 - DNA, 110 bp, synthetic construct
  source 1..110: mol_type = other DNA
gtttaaacttcagggtctagaatggtgcctggcacaatgccagctatcaataaatatgggaataatagaatgaagggataaatgaatgaaaatcacccacagataatcac

SEQ ID NO: 63044 - DNA, 110 bp, synthetic construct
  source 1..110: mol_type = other DNA
cacactgtactagactaaaggggaaatggaaggagaaatggaagtaccaaaatatgccaatgctcccaaaagcatgatccaccgactggcagcattagccacatccgcaa

SEQ ID NO: 63045 - DNA, 110 bp, synthetic construct
  source 1..110: mol_type = other DNA
gccaatgctcccaaaagcatgatccaccgactggcagcattagccacatccgcaagctggttagaaacacacattctcgggcctcactgaatctgacctattgaatcaga

SEQ ID NO: 63046 - DNA, 110 bp, synthetic construct
  source 1..110: mol_type = other DNA
gcagggtgtctccagccagatcggccgaggataactggaaggtggagccgggtctttctcaggctcccgttccataggggaacggttccgtttgtccccttcgtagatac

SEQ ID NO: 63047 - DNA, 110 bp, synthetic construct
  source 1..110: mol_type = other DNA
ttctcaggctcccgttccataggggaacggttccgtttgtccccttcgtagatacatccagggagactggcattcatgttgccaagtgccgataaagacgggaaccatgg

SEQ ID NO: 63048 - DNA, 110 bp, synthetic construct
  source 1..110: mol_type = other DNA
tgagtcctcacttgtctcaccctagtccagaccccgatcccgactgccgccagctgtctatccagtttctttaactggaaaaaaggaataatacctgctttaaaggtacg

SEQ ID NO: 63049 - DNA, 110 bp, synthetic construct
  source 1..110: mol_type = other DNA
gtctatccagtttctttaactggaaaaaaggaataatacctgctttaaaggtacggatcatatgaaggggtgctacggtgctagattcatagcaaatgctcgatgaagtt

SEQ ID NO: 63050 - DNA, 110 bp, synthetic construct
  source 1..110: mol_type = other DNA
actttgtgcccgaaggcatctatttgatggtgctgggcatttggacatggcagatggtgagaagaatgtgcccagggaaggtggctcagctcaaggccagctcagcatct

SEQ ID NO: 63051 - DNA, 110 bp, synthetic construct
  source 1..110: mol_type = other DNA
ggtgagaagaatgtgcccagggaaggtggctcagctcaaggccagctcagcatctgggcctccgggggtgggtcacagctaggacaagtccactgtcagggcagagcctc

SEQ ID NO: 63052 - DNA, 110 bp, synthetic construct
  source 1..110: mol_type = other DNA
caacaacaacaaaacctctctctgattttaagctgaaattcagcttctggtaacgtttgccctcctggcacgttcacaggccactgtcccatcttccctgagtcatttgt

SEQ ID NO: 63053 - DNA, 110 bp, synthetic construct
  source 1..110: mol_type = other DNA
tttgccctcctggcacgttcacaggccactgtcccatcttccctgagtcatttgtgtgccctaaatggttcctcaggcaagtcctcaccatccatctccaggtgccaatt

SEQ ID NO: 63054 - DNA, 110 bp, synthetic construct
  source 1..110: mol_type = other DNA
gttgtttgtttttgtttttgttttttgggccacacctgcagcatgtggatgttcctgggccagagatcaaatctgagctgcatgtgtgacctatgccacagcagcagtaa

SEQ ID NO: 63055 - DNA, 110 bp, synthetic construct
  source 1..110: mol_type = other DNA
tgggccagagatcaaatctgagctgcatgtgtgacctatgccacagcagcagtaacgctggatccttaacccactacgctgggccagggatcgaaccagcaacgccacag

SEQ ID NO: 63056 - DNA, 110 bp, synthetic construct
  source 1..110: mol_type = other DNA
ccctaactcagaagccagcacgtggatgaggccagtgggaccatccatccgaatcaggaatcttcctcaggaactccaagcaacacgttgactgtgaggccccaggtgtg

SEQ ID NO: 63057 - DNA, 110 bp, synthetic construct
  source 1..110: mol_type = other DNA
aggaatcttcctcaggaactccaagcaacacgttgactgtgaggccccaggtgtggtcccacaccgcatcctggagagtgagtcccctctggtgggccggggaacccagg

SEQ ID NO: 63058 - DNA, 110 bp, synthetic construct
  source 1..110: mol_type = other DNA
cacagaaggaaagatctggtcatattgtttccagccctacatctgttcaggcctgtgaccagccccagagctcggctcccctagtacagggctagtaaatcctctctttg

SEQ ID NO: 63059 - DNA, 110 bp, synthetic construct
  source 1..110: mol_type = other DNA
tgaccagccccagagctcggctcccctagtacagggctagtaaatcctctctttggctaggttggtttgagctggatttctgccacttccaaagagtagaaagccaactg

SEQ ID NO: 63060 - DNA, 110 bp, synthetic construct
  source 1..110: mol_type = other DNA
ccaatcaaaagactcatttattttttaaatatgtgggtgagacttgagaattacatctgaaaggccactatccaggaataagtacagagctcaccctatagatttctgaa

SEQ ID NO: 63061 - DNA, 110 bp, synthetic construct
  source 1..110: mol_type = other DNA
tctgaaaggccactatccaggaataagtacagagctcaccctatagatttctgaagttctgtttgtctgtctgggctcttagtttagtgttctttgttttttgttttttc

SEQ ID NO: 63062 - DNA, 110 bp, synthetic construct
  source 1..110: mol_type = other DNA
accagcagcatctgcctcctttgggaactcatcaaaatgcacattctcaggccccacccccagctcacggaaccaggcactcagatggtgggacccagaaatctggagcc

SEQ ID NO: 63063 - DNA, 110 bp, synthetic construct
  source 1..110: mol_type = other DNA
acccccagctcacggaaccaggcactcagatggtgggacccagaaatctggagccctccaggagattctgatgctcactaaagtttgagaaccactatccctaagagatg

SEQ ID NO: 63064 - DNA, 110 bp, synthetic construct
  source 1..110: mol_type = other DNA
catgaataaagtggctgtgaacattctcatatatgcctttgggtggatatgaggacccatttctgttggggatgcacccaggcgtggaattgccgggtcctaaggtaggc

SEQ ID NO: 63065 - DNA, 110 bp, synthetic construct
  source 1..110: mol_type = other DNA
cccatttctgttggggatgcacccaggcgtggaattgccgggtcctaaggtaggcaagcgtttaactttattgctggttttcccaagtagttgtaccgattagcctttta

SEQ ID NO: 63066 - DNA, 110 bp, synthetic construct
  source 1..110: mol_type = other DNA
tccgccccagccctaaggatgcacctggcggcctgtctgagcctctaaaaagacactcagcatttacacagacccttccgggagctgaaagaggtaacagaagagggatc

SEQ ID NO: 63067 - DNA, 110 bp, synthetic construct
  source 1..110: mol_type = other DNA
ctcagcatttacacagacccttccgggagctgaaagaggtaacagaagagggatcccaaatcggggctggaagggagcttctagccctgagaatccacccccttccttgt

SEQ ID NO: 63068 - DNA, 110 bp, synthetic construct; identical to SEQ ID NO: 63066
  source 1..110: mol_type = other DNA

SEQ ID NO: 63069 - DNA, 110 bp, synthetic construct; identical to SEQ ID NO: 63067
  source 1..110: mol_type = other DNA

SEQ ID NO: 63070 - DNA, 110 bp, synthetic construct
  source 1..110: mol_type = other DNA
acaaggggctagccggtgcctgccaaatagctccagcaactttcctttgcagccattgctaaaaggcaatcaaatgtgaacacccaggaaggccagagtgaggtggccag

SEQ ID NO: 63071 - DNA, 110 bp, synthetic construct
  source 1..110: mol_type = other DNA
ttgctaaaaggcaatcaaatgtgaacacccaggaaggccagagtgaggtggccagcgcttggctaggagtggcctgtcgggggaaggagggactggctgcagccgccgct

SEQ ID NO: 63072 - DNA, 110 bp, synthetic construct
  source 1..110: mol_type = other DNA
gctgaggagcggggaccaggccacgctggaggagcctttccgacatcccgctggccatggcaaggcagttgagccggtggattaatggccttccttgccctgtttctgag

SEQ ID NO: 63073 - DNA, 110 bp, synthetic construct
  source 1..110: mol_type = other DNA
catggcaaggcagttgagccggtggattaatggccttccttgccctgtttctgagctgtggcccctaaaaccagcccctctcctgggttagggcctgggcggcccacgct

SEQ ID NO: 63074 - DNA, 110 bp, synthetic construct
  source 1..110: mol_type = other DNA
gtatgtggtcccgagaacagaagagtcagccatttgtgatggacaagtgcttctggccatctgcagagcaatcagatgcctcggattctccagagcagctggcatctcag

SEQ ID NO: 63075 - DNA, 110 bp, synthetic construct
  source 1..110: mol_type = other DNA
gccatctgcagagcaatcagatgcctcggattctccagagcagctggcatctcagtcaacacactggaagttccagaagccagcttgggccaatgaagtgactttgggaa

SEQ ID NO: 63076 - DNA, 110 bp, synthetic construct
  source 1..110: mol_type = other DNA
agagaaactctcttgagaaccaagggcccactctcgagaaaactatggtctcatcaaattagcaggtcacataacagagccacgcagtcaatgttaaccagcacctgggg

SEQ ID NO: 63077 - DNA, 110 bp, synthetic construct
  source 1..110: mol_type = other DNA
aaattagcaggtcacataacagagccacgcagtcaatgttaaccagcacctggggcggggatgtcttgctggcccccaagatatgctctccactcttcctcggcaaataa

SEQ ID NO: 63078 - DNA, 110 bp, synthetic construct
  source 1..110: mol_type = other DNA
cagcccccgctggagttccagccaatagccagctccaaccagatgtgtgagcaaaggagcctctggaagagtccagtgtcagtttttgagccaccccggtggaccccaag

SEQ ID NO: 63079 - DNA, 110 bp, synthetic construct
  source 1..110: mol_type = other DNA
ggagcctctggaagagtccagtgtcagtttttgagccaccccggtggaccccaagtgaagtataggtgagctgtcccaaaggggggctgctcaagttaacgattcgcgag

SEQ ID NO: 63080 - DNA, 110 bp, synthetic construct
  source 1..110: mol_type = other DNA
aaataacttgcccccaaggtcacacagctagtaaaaaaaaaaaaaaaaaaaaagggccatggtcaaactcagtcctggagtttcggagaggagccaattattggtcagat

SEQ ID NO: 63081 - DNA, 110 bp, synthetic construct
  source 1..110: mol_type = other DNA
gccatggtcaaactcagtcctggagtttcggagaggagccaattattggtcagattgtgccattcggaatccccgagaagttcgggaggcttccttagctcttgtagtca

SEQ ID NO: 63082 - DNA, 110 bp, synthetic construct
  source 1..110: mol_type = other DNA
gtaataggaactggggagacaggggtaagcaagacaaaccatcccttaaaaaagggaccagctcagagttccctttgaggcttagcaattaacgaacctgactagtatcc

SEQ ID NO: 63083 - DNA, 110 bp, synthetic construct
  source 1..110: mol_type = other DNA
taagcaagacaaaccatcccttaaaaaagggaccagctcagagttccctttgaggcttagcaattaacgaacctgactagtatccgtgaggacaagggtccgatccctgg

SEQ ID NO: 63084 - DNA, 110 bp, synthetic construct
  source 1..110: mol_type = other DNA
ggaggatggtacccccacagctttcactatcaagatgaagaggaaaacccttggccagcccgccaggcccggcccttcagatctttgctctaggcttctgtttccagccc

SEQ ID NO: 63085 - DNA, 110 bp, synthetic construct
  source 1..110: mol_type = other DNA
cagcccgccaggcccggcccttcagatctttgctctaggcttctgtttccagccccttcccacatctgggctgtcccgggagcctgcccggatccaccttctctccaccc

SEQ ID NO: 63086 - DNA, 110 bp, synthetic construct
  source 1..110: mol_type = other DNA
ctgtgcggctcactccggagtcccagccctcaccagctgcgtggtgacatctcttggaaggcattatctaccttaacccacgattctgagatgctgggcagggggactgc

SEQ ID NO: 63087 - DNA, 110 bp, synthetic construct
  source 1..110: mol_type = other DNA
ggaaggcattatctaccttaacccacgattctgagatgctgggcagggggactgcctttgccatctggagagccgctacctgtcctgctccttccggtggcccgagagag

SEQ ID NO: 63088 - DNA, 110 bp, synthetic construct
  source 1..110: mol_type = other DNA
taaaccagaggttcctacgacgccctccctaggttggattaagttgagcagctcacagaactcagggagacattttacttaccagatccctggtttattataaaaggatt

SEQ ID NO: 63089 - DNA, 110 bp, synthetic construct
  source 1..110: mol_type = other DNA
tccctaggttggattaagttgagcagctcacagaactcagggagacattttacttaccagatccctggtttattataaaaggatttgactcaggaacagccaggtggcag

SEQ ID NO: 63090 - DNA, 110 bp, synthetic construct
  source 1..110: mol_type = other DNA
aaagattagccttgaggaatgtggtcagcacaccctgcacgcataactcagcccggaacatcccagcagacaatcacaggaaatgctgcctgtcatgacgacgtgcacgc

SEQ ID NO: 63091 - DNA, 110 bp, synthetic construct
  source 1..110: mol_type = other DNA
tatgctaacgtggcaatgggtcgcttgaagatcggtgccaggagcgaagcaagggctgtgatcactgctcttctgagaggtgcgggaggtgaatgaaaggccactttgaa

SEQ ID NO: 63092 - DNA, 110 bp, synthetic construct
  source 1..110: mol_type = other DNA
ctgtgatcactgctcttctgagaggtgcgggaggtgaatgaaaggccactttgaacgtggcttctccccccctcccccggtcctcctccccgcagcacactcgaaggcct

SEQ ID NO: 63093 - DNA, 110 bp, synthetic construct
  source 1..110: mol_type = other DNA
gaggaggggatgctggctggttctgcggctgtcggaaaaagctgcaaattgggttcagctgctgctacaggaaggcactgctcctggcagagtgaagaagtgtgggcgat

SEQ ID NO: 63094 - DNA, 110 bp, synthetic construct
  source 1..110: mol_type = other DNA
cagctgctgctacaggaaggcactgctcctggcagagtgaagaagtgtgggcgatgctgctcacaggatcaggaagtgaacaggaagccagcagacgcccaaaggaagaa

SEQ ID NO: 63095 - DNA, 110 bp, synthetic construct
  source 1..110: mol_type = other DNA
tttctgatgttcaaaatgttcgcccgctgaacctgcccattcacccggccatggtaaatgctgtggttaaggggatctttttccccctgagcatattcctatggttacaa

SEQ ID NO: 63096 - DNA, 110 bp, synthetic construct
  source 1..110: mol_type = other DNA
aaatgctgtggttaaggggatctttttccccctgagcatattcctatggttacaaaaccaaaaaacagttcaggaatccttatcaaatgtggtctcggctccccctcctc

SEQ ID NO: 63097 - DNA, 110 bp, synthetic construct
  source 1..110: mol_type = other DNA
tgtccctcggggagcaacctaattggtcctggcggagatcgttcggatcgcccaggcaggcagctcagcgcaggtagaggccaccaaacagtagagtggaaatgccggcg

SEQ ID NO: 63098 - DNA, 110 bp, synthetic construct
  source 1..110: mol_type = other DNA
gcaggcagctcagcgcaggtagaggccaccaaacagtagagtggaaatgccggcgaagctttcatcagagcagggctgctgggcgctgagcccctgagacggtgcagatg

SEQ ID NO: 63099 - DNA, 110 bp, synthetic construct
  source 1..110: mol_type = other DNA
gccactcagccacggacagaaggcagcgtccgtctgttcagagctggttaggttgtgagaagcagagaatggctgatggaggaagaacagagagaagcagaaccacggca

SEQ ID NO: 63100 - DNA, 110 bp, synthetic construct
  source 1..110: mol_type = other DNA
tgagaagcagagaatggctgatggaggaagaacagagagaagcagaaccacggcacaccctcaggagagcggtagagaagggttcccttggcacccaggggctgtccaat

SEQ ID NO: 63101 - DNA, 110 bp, synthetic construct
  source 1..110: mol_type = other DNA
gttgcacctggagccgttctggccaccagcttgacccttctgtctgtcagtcctgtccaagacctcaggaagctcttgatctgatgtggtgcagtcaacactggccaggg

SEQ ID NO: 63102 - DNA, 110 bp, synthetic construct
  source 1..110: mol_type = other DNA
tccaagacctcaggaagctcttgatctgatgtggtgcagtcaacactggccagggcaggagtttctgttgtggctcagtgggctaggaacctgactagtatccacaagga

SEQ ID NO: 63103 - DNA, 110 bp, synthetic construct
  source 1..110: mol_type = other DNA
cctttattggctccttccctccctcatctcacttccacattgcccatagtttctgaatctccgaaaagctacttgctctcacgtctttgtctcagaaacaacccacgctc

SEQ ID NO: 63104 - DNA, 110 bp, synthetic construct
  source 1..110: mol_type = other DNA
aatctccgaaaagctacttgctctcacgtctttgtctcagaaacaacccacgctcagacaccaggattatcatgaattttttgtcattgttgaagagtcccagccttgga

SEQ ID NO: 63105 - DNA, 110 bp, synthetic construct
  source 1..110: mol_type = other DNA
tgcagagatggctccccacccggggggcccagcttccccaccccactcccatcagagctgtgatagggtttccaaggccacctagtagcttgtcacgccaccaagtgagc

SEQ ID NO: 63106 - DNA, 110 bp, synthetic construct
  source 1..110: mol_type = other DNA
agctgtgatagggtttccaaggccacctagtagcttgtcacgccaccaagtgagctcacacagctgaacctgcagccttggcacagcaggagggactcgagcaaatgcag

SEQ ID NO: 63107 - DNA, 110 bp, synthetic construct
  source 1..110: mol_type = other DNA
ttacagagagtgtacatggtgggaaaggcaaactcggtttttgaagatctttcagtaacacttagacaactccgcagtcgactgtttcaagaaaactctattctcagttt

SEQ ID NO: 63108 - DNA, 110 bp, synthetic construct
  source 1..110: mol_type = other DNA
taaggggagattacggaagggcaggggtcactgggggtcatttgagaattctgcctactacatagcttattcgattctcttgctatgcttgttcttaggcaccgtgctgt

SEQ ID NO: 63109 - DNA, 110 bp, synthetic construct
  source 1..110: mol_type = other DNA
tactacatagcttattcgattctcttgctatgcttgttcttaggcaccgtgctgtgaggaagcacaaagggcatgtggagaggtgctaaggcctcccggccaacaggacc

SEQ ID NO: 63110 - DNA, 110 bp, synthetic construct
  source 1..110: mol_type = other DNA
ggctgtccagcttgtacatatcttctgcgaggccatttctaagatccttgttgtttctcagaaattctttcaccacttccagttgatttaagatctgcaagaggaaacca

SEQ ID NO: 63111 - DNA, 110 bp, synthetic construct
  source 1..110: mol_type = other DNA
tctcagaaattctttcaccacttccagttgatttaagatctgcaagaggaaaccattcaatgtccagtttagagactcatatagcagacttttaattcagacgaaaaaat

SEQ ID NO: 63112 - DNA, 110 bp, synthetic construct
  source 1..110: mol_type = other DNA
aatataacaaataggatgtcacctccatccactccccgcctgtctcgactacattctgtcgctgccccttgtctgcgagctttcccctggatctctgtgacagtggctcc

SEQ ID NO: 63113 - DNA, 110 bp, synthetic construct
  source 1..110: mol_type = other DNA
ctgtcgctgccccttgtctgcgagctttcccctggatctctgtgacagtggctcccccaccagggtttaagaaatcagtactgattctaaagaaagcacaagttctttac

SEQ ID NO: 63114 - DNA, 110 bp, synthetic construct
  source 1..110: mol_type = other DNA
ttatcacaggatattgaatacagttccctgtgctctacaggaggagctcattgtttatccattctatacataacagtttgcacctaccaacccaaactccccatccatcc

SEQ ID NO: 63115 - DNA, 110 bp, synthetic construct; identical to SEQ ID NO: 63114
  source 1..110: mol_type = other DNA

SEQ ID NO: 63116 - DNA, 110 bp, synthetic construct
  source 1..110: mol_type = other DNA
tagcatcaggaaggtcccattttaatatcttgttatgtatgtaaataataagctcagccaccataatgacttactgcattcacagagcgcttgagcttataaagaaaatt

SEQ ID NO: 63117 - DNA, 110 bp, synthetic construct
  source 1..110: mol_type = other DNA
cttctatcttgagaaccttcctgacttgagatgcttcctgatgtatttgagacgcttcttctctgttctggatacttcctgacaagtttgagcctcttcctggagcattt

SEQ ID NO: 63118 - DNA, 110 bp, synthetic construct
  source 1..110: mol_type = other DNA
actgatagtttcattagtgatataaactaaatcacaggccagctagtttacagggagaaccagggaaagttacagctagaacagtcctcctagagcaagaaaaaacctcc

SEQ ID NO: 63119 - DNA, 110 bp, synthetic construct
  source 1..110: mol_type = other DNA
agaaccagggaaagttacagctagaacagtcctcctagagcaagaaaaaacctccaacattgacttcaaacactatcccttcaaagtagtctgaattttaagggttcctt

SEQ ID NO: 63120 - DNA, 110 bp, synthetic construct
  source 1..110: mol_type = other DNA
aagatgtttgcccgggttgttttccgggaatttggcgtcagctgtgtctagttccagctggagctggttaagagtggataggccctggagttagatttcctatatatata

SEQ ID NO: 63121 - DNA, 110 bp, synthetic construct
  source 1..110: mol_type = other DNA
gtctagttccagctggagctggttaagagtggataggccctggagttagatttcctatatatataaaattaaacttttgttggatttttttttcctgtttaaaaaaaaaa

SEQ ID NO: 63122 - DNA, 110 bp, synthetic construct
  source 1..110: mol_type = other DNA
acactcttgcactggatattaccaatctttttcagttttgtctattcaatgtgtgaaaagcgttttgtgattttctgagattcggtgaagttgcaagtctcaatatttta

SEQ ID NO: 63123 - DNA, 110 bp, synthetic construct
  source 1..110: mol_type = other DNA
aaaagcgttttgtgattttctgagattcggtgaagttgcaagtctcaatattttattggcccattaaatgcaatgcacgaaagaaaaaaaaattttactttcgtgcattg

SEQ ID NO: 63124 - DNA, 110 bp, synthetic construct
  source 1..110: mol_type = other DNA
taggcagagcatagtgagcatttatcttgatgtctgacttgaattaccaaatggttgggctgggtgagggcagtgcagttttttgattgtgaaagtggttgagaaaatca

SEQ ID NO: 63125 - DNA, 110 bp, synthetic construct
  source 1..110: mol_type = other DNA
caataacactgtattaaaaataactgaggtatagtttgaattgaaatgcccaactaaattatttcttgaaagccgtttacacttgaatctttctgaacctaggtggtgat

SEQ ID NO: 63126 - DNA, 110 bp, synthetic construct; identical to SEQ ID NO: 63125
  source 1..110: mol_type = other DNA

SEQ ID NO: 63127 - DNA, 110 bp, synthetic construct
  source 1..110: mol_type = other DNA
ctcagaataaggacattttcctacctcatatttattaatacagttatcacatgtatgaaatttaatgttgacttaatataacttgcccaccccaccaattccagactggt

SEQ ID NO: 63128 - DNA, 110 bp, synthetic construct
  source 1..110: mol_type = other DNA
gtctgcttggctgcctctagcgatgggggtggtgggtggaggtgttgcaaatattgtttttgcttcagtaagggccctcaacttaacaatgcctgggggagttcccatcg

SEQ ID NO: 63129 - DNA, 110 bp, synthetic construct
  source 1..110: mol_type = other DNA
tctttctgtgccagagaacaccaccccactacccatgaccttcagcaagcgccttcactgctgagtcacagctttcatgactgtgatgtaggaataacagtgcctctgcc

SEQ ID NO: 63130 - DNA, 110 bp, synthetic construct
  source 1..110: mol_type = other DNA
atttgggattagtttattttgtcccccacctaagtctccctacctatgacatgacttcactattctgttcacaagcttatgcaacaaaccctattttcttttcttccagt

SEQ ID NO: 63131 - DNA, 110 bp, synthetic construct
  source 1..110: mol_type = other DNA
cctcctggccttcttgttgttggttcccggtctctgcaggtcatggaatgatagccggtgttatttattcagcttatcatatgactgtaaaatggggaaaatatagaaat

SEQ ID NO: 63132 - DNA, 110 bp, synthetic construct
  source 1..110: mol_type = other DNA
tattccaaaaattaataaaaagaaagacttacatctagtagtgtgtgaagatgctgatcctggaaaacactgtgtagaaaatctaagtccttctcactgcagtctgtaag

SEQ ID NO: 63133 - DNA, 110 bp, synthetic construct
  source 1..110: mol_type = other DNA
tgactgagaagggatgctgtacccatgtattaaaaaggcaacctaatggagtgggtatttacaatatgattgtcaccaaagcagaaagttgtattgttcaaaatgtacaa

SEQ ID NO: 63134 - DNA, 110 bp, synthetic construct
  source 1..110: mol_type = other DNA
atggagtgggtatttacaatatgattgtcaccaaagcagaaagttgtattgttcaaaatgtacaagcaagtggctcaatgcatggatcctgtgatttttcatattaaatc

SEQ ID NO: 63135 - DNA, 110 bp, synthetic construct
  source 1..110: mol_type = other DNA
gcaatggacttcccacagagcctatatgctctcagctatatgaaaccaggctgcgaaccagaggttctgtttggcttctcttctcctgagtcttcacacaatagggatat

SEQ ID NO: 63136 - DNA, 110 bp, synthetic construct
  source 1..110: mol_type = other DNA
ttctcagatctcttcacttctctctgtccccaccgctgctgtcctagttttttcctcactacttctcatccatatgactgccatcccctcctaattgatcttcctgacac

SEQ ID NO: 63137 - DNA, 110 bp, synthetic construct
  source 1..110: mol_type = other DNA
gttaccgtcctccacgtgggtgggggccttagttcttgcagaagaactcaaagatattgttatttatattccttgaggaggaaccaggacccaactttaatcattgcact

SEQ ID NO: 63138 - DNA, 110 bp, synthetic construct
  source 1..110: mol_type = other DNA
attgttatttatattccttgaggaggaaccaggacccaactttaatcattgcactgttgtttcttgactgttccccctttgtttcctcattctctcccatccctgattag

SEQ ID NO: 63139 - DNA, 110 bp, synthetic construct
  source 1..110: mol_type = other DNA
aaccctttactgagaacaaagttattgataacaaattatcatgtacatgctcctattttagaatgtgattgtaattctgtaatgtgattgctgattactggaatgaaagc

SEQ ID NO: 63140 - DNA, 110 bp, synthetic construct
  source 1..110: mol_type = other DNA
ttttagaatgtgattgtaattctgtaatgtgattgctgattactggaatgaaagcctccaaggaggtgagatattgtatgtggaagcgttagcagaccttttctgaagag

SEQ ID NO: 63141 - DNA, 110 bp, synthetic construct
  source 1..110: mol_type = other DNA
tggagaaaagagacaacatgaacctcactcttaaaagggacatggcagggcccctccacttctcatgccttcttttcccagaagacttcgaaagtcacagtgtgacgaag

SEQ ID NO: 63142 - DNA, 110 bp, synthetic construct
  source 1..110: mol_type = other DNA
ccacttctcatgccttcttttcccagaagacttcgaaagtcacagtgtgacgaaggcagtagagaaggagaccattggttgttgagtacctcttgctaagtaccaggtag

SEQ ID NO: 63143 - DNA, 110 bp, synthetic construct
  source 1..110: mol_type = other DNA
aggatggctaaatgtgcatcctgagacgctgagtggatgtaagcttaacacagtgcaaaagaagatgcactatatagaacacactcctctgcaatttggaaactgcctga

SEQ ID NO: 63144 - DNA, 110 bp, synthetic construct
  source 1..110: mol_type = other DNA
caaaagaagatgcactatatagaacacactcctctgcaatttggaaactgcctgatttcatactcatttgtcttaatagtagattgtttggcaatttcattttgcctcta

SEQ ID NO: 63145 - DNA, 110 bp, synthetic construct
  source 1..110: mol_type = other DNA
ttcaactgtgattcttctaccacctctgagcagtggtgtgcttcccagccagtggtgacattagagcacattgcttctaaatagctgtcagcacgttgccatggcaatgg

SEQ ID NO: 63146 - DNA, 110 bp, synthetic construct
  source 1..110: mol_type = other DNA
tgacattagagcacattgcttctaaatagctgtcagcacgttgccatggcaatggggctctgctggtcagctagaatggaagttcttcagtttttgccagcagtcattct

SEQ ID NO: 63147 - DNA, 110 bp, synthetic construct
  source 1..110: mol_type = other DNA
taatctcagcaaagacaagcacaaccacagacaatccagagacctatgagtcagaagtatatgattattgttttaagccactgagtttggggtgatttcttatgtagctt

SEQ ID NO: 63148 - DNA, 110 bp, synthetic construct
  source 1..110: mol_type = other DNA
ctatctcaagccaccagtgagatattaatcttttctcttggtcctggctctttaccccatattcaccccattctccttgttctccctttccctgaaagtgaggctatacc

SEQ ID NO: 63149 - DNA, 110 bp, synthetic construct
  source 1..110: mol_type = other DNA
tgaacactcatcctgcaaagtccatggcagatgcttgtcccctgatgcaatgaggccttgatgagcggatctgggaaatggacgcccagtcctttctggggagaccatgc

SEQ ID NO: 63150 - DNA, 110 bp, synthetic construct
  source 1..110: mol_type = other DNA
ccttgatgagcggatctgggaaatggacgcccagtcctttctggggagaccatgccattatcacaatgtggagccaaccaagtgcgcccaccctatgatgactggtcaca

SEQ ID NO: 63151 - DNA, 110 bp, synthetic construct
  source 1..110: mol_type = other DNA
agttaccatctgatccagcaatcccacttctaggtatttatccaaaagaactgaaatcaggatctcaaggaggtattagctcgcctatgttcattgtagcactattcaca

SEQ ID NO: 63152 - DNA, 110 bp, synthetic construct
  source 1..110: mol_type = other DNA
cagcaatcccacttctaggtatttatccaaaagaactgaaatcaggatctcaaggaggtattagctcgcctatgttcattgtagcactattcacaataaccaagatatgg

SEQ ID NO: 63153 - DNA, 110 bp, synthetic construct
  source 1..110: mol_type = other DNA
ccctctgtgtatgaaagcaagctgcagggggaacattgctgggctccttgtatttctgttttcaaacatggaaaaggtgaccaggctcttccaccccagcaagcctgcct

SEQ ID NO: 63154 - DNA, 110 bp, synthetic construct
  source 1..110: mol_type = other DNA
ctgttttcaaacatggaaaaggtgaccaggctcttccaccccagcaagcctgccttttcttccctgttctgccttcatgtctttcattctttctgttatcgggtggcaat

SEQ ID NO: 63155 - DNA, 110 bp, synthetic construct
  source 1..110: mol_type = other DNA
tgctgctgaactcagagagccagtgtagtataggggccttggagtttatccaccaacttctgtcagtcattctttgaagactgttgctagagagcatagattccctggca

SEQ ID NO: 63156 - DNA, 110 bp, synthetic construct
  source 1..110: mol_type = other DNA
acttctgtcagtcattctttgaagactgttgctagagagcatagattccctggcattatcaaccaaaagggcttcaatatccaaaaaaaccccctgaggtgaagaaatac

SEQ ID NO: 63157 - DNA, 110 bp, synthetic construct
  source 1..110: mol_type = other DNA
tttggttaattttcagagttctgaaaatattgattttgacacatttttgccggtaacttcactgtttttatagggaggactggctttgtagcgatctttgctctgtcttt

SEQ ID NO: 63158 - DNA, 110 bp, synthetic construct; identical to SEQ ID NO: 63157
  source 1..110: mol_type = other DNA

SEQ ID NO: 63159 - DNA, 110 bp, synthetic construct
  source 1..110: mol_type = other DNA
tgtggcccttatctcactacttagacttatctcttcattggcccaagaccataccccattggtttttgttcctctagagcctcgtattgagaaaggcacataaatagtaa

SEQ ID NO: 63160 - DNA, 110 bp, synthetic construct
  source 1..110: mol_type = other DNA
ccattggtttttgttcctctagagcctcgtattgagaaaggcacataaatagtaataaatgctttttgaatggacttctgttccagctgctatccaccctctgaaagagt

SEQ ID NO: 63161 - DNA, 110 bp, synthetic construct
  source 1..110: mol_type = other DNA
aacttaaagttttcattagtgggactcaggccctgtgtgctccccagtctggtgcagagagcatccagcaaggctgaccagatacacaaaaaagatcttctctggatcat

SEQ ID NO: 63162 - DNA, 110 bp, synthetic construct
  source 1..110: mol_type = other DNA
agagagcatccagcaaggctgaccagatacacaaaaaagatcttctctggatcattttggtgcacatgtctgggaagttttgacagcccttgcttctcccagcattcatt

SEQ ID NO: 63163 - DNA, 110 bp, synthetic construct
  source 1..110: mol_type = other DNA
caaggctaggaatcaaacccacatccttatgggtactagttgagttcgttaccactgaatcacaaggggaactcctgagaaaattattttatgatatacactgccaactt

SEQ ID NO: 63164 - DNA, 110 bp, synthetic construct; identical to SEQ ID NO: 63163
  source 1..110: mol_type = other DNA

SEQ ID NO: 63165 - DNA, 110 bp, synthetic construct
  source 1..110: mol_type = other DNA
ccacttcatgtggaagttcctgggctagggatcaaacccttaccatacaagcaacctgagtcacaggagtgaaaccagatccctaacccactgagccaccagggaactcc

SEQ ID NO: 63166 - DNA, 110 bp, synthetic construct
  source 1..110: mol_type = other DNA
ctgagtcacaggagtgaaaccagatccctaacccactgagccaccagggaactcctctatatttttatttttaacctaccagtgtccttatatgtgaagtgactttcttg

SEQ ID NO: 63167 - DNA, 110 bp, synthetic construct
  source 1..110: mol_type = other DNA
aggcaagcactgagtcatggcctgtagcgtgtgaataaacaagttaataaagtacagttgaaccagtgtcattccagacctagcaagacttaaccatcacatcagctcgt

SEQ ID NO: 63168 - DNA, 110 bp, synthetic construct
  source 1..110: mol_type = other DNA
agttgaaccagtgtcattccagacctagcaagacttaaccatcacatcagctcgttctggggtaaaggattatgtgctttcttagagtcagagctaccatgggaaaaact

SEQ ID NO: 63169 - DNA, 110 bp, synthetic construct
  source 1..110: mol_type = other DNA
aggtctacatacccttgcatggcctggcccctgactttactgtctcatcttgcgccaggaagctcctagatttgcctgtcctaatcacactggctttcttttgggtccac

SEQ ID NO: 63170 - DNA, 110 bp, synthetic construct
  source 1..110: mol_type = other DNA
aggaaaaagattggatttaagagagagtttacaggaagaatctatagaacttggatgctgattgggttgcaagggcgagaaagaagccaaagatagcgctgagattcctc

SEQ ID NO: 63171 - DNA, 110 bp, synthetic construct
  source 1..110: mol_type = other DNA
ccatccctttggtttgctttaaccctttctacctttgtaactcattaaaattatcttatttgaaaattccatcatttttatactactggggttctgactgatagaagcac

SEQ ID NO: 63172 - DNA, 110 bp, synthetic construct
  source 1..110: mol_type = other DNA
aagaaacaatagtgcagtgatggggcagggtcctggctccccctcaaggaatatacatgacaatatctttgagttcttctgcaggaactacggcccccattcacgtggag

SEQ ID NO: 63173 - DNA, 110 bp, synthetic construct
  source 1..110: mol_type = other DNA
catgacaatatctttgagttcttctgcaggaactacggcccccattcacgtggaggatggtaccttggagctgagcaggggctgagcacaggcactgcgaccctcctctc

SEQ ID NO: 63174 - DNA, 110 bp, synthetic construct
  source 1..110: mol_type = other DNA
ccaaacaaacttccaatctagaactttgttttccgtttgagagctcagtgtagtcagatcattctggaggccaggatattatctagccaactatctctttcagtcaatat

SEQ ID NO: 63175 - DNA, 110 bp, synthetic construct
  source 1..110: mol_type = other DNA
agagatagttcagttaatggtggtgtgacatttggctctctaaatggaaaaaataatcaaacccacatgctcatggatacagactgggtttgtaacccactgagccacaa

SEQ ID NO: 63176 - DNA, 110 bp, synthetic construct
  source 1..110: mol_type = other DNA
tgacatttggctctctaaatggaaaaaataatcaaacccacatgctcatggatacagactgggtttgtaacccactgagccacaatgggaactccataataggtaaatat

SEQ ID NO: 63177 - DNA, 110 bp, synthetic construct
  source 1..110: mol_type = other DNA
gagccacgacgggaactccagaaaaaaatatttttaaaaaagaaaatgaatttgataacattgataacttcagattcattagtttctacgctcatgtttaaggcagaagc

SEQ ID NO: 63178 - DNA, 110 bp, synthetic construct; identical to SEQ ID NO: 63177
  source 1..110: mol_type = other DNA

SEQ ID NO: 63179 - DNA, 110 bp, synthetic construct
  source 1..110: mol_type = other DNA
gagctcatctgctgcggcacagggaaggtgtagcgtaacgggagacaggccagaagaccgaagacgcctccggtgggcacatctgaaccttcccttttgaatgttcctat

SEQ ID NO: 63180 - DNA, 110 bp, synthetic construct
  source 1..110: mol_type = other DNA
gaccgaagacgcctccggtgggcacatctgaaccttcccttttgaatgttcctatttttttcagtgaaagaagaaacaaagatcatccactgaaaatgagaaaagacggg

SEQ ID NO: 63181 - DNA, 110 bp, synthetic construct
  source 1..110: mol_type = other DNA
acctctcccaatcttaacagcttggtctcaggtaggagataaactatgtcaatcggtctagccaaagttcctggttgcctttcaaatctttgtaactgcccaagtcatca

SEQ ID NO: 63182 - DNA, 110 bp, synthetic construct
  source 1..110: mol_type = other DNA
tctgttatgccaggcattgcgctagatttttttttttcttttacacttctacatctatgctctcatttcatcagctgtcataggtaatgttctccccagttcacaagtaa

SEQ ID NO: 63183 - DNA, 110 bp, synthetic construct
  source 1..110: mol_type = other DNA
actgttatggtgactaacatatggtgcctggtttaaaagaggaaaaaaattaaaaggaaaatgaaccatataatgtacataacctggaagattttcaagatgcactgcag

SEQ ID NO: 63184 - DNA, 110 bp, synthetic construct
  source 1..110: mol_type = other DNA
ggaaaatgaaccatataatgtacataacctggaagattttcaagatgcactgcagcttaaaatatagtatattccaccatcatagtgttctacaaatgcatatgtttacc

SEQ ID NO: 63185 - DNA, 110 bp, synthetic construct
  source 1..110: mol_type = other DNA
atggtacgaggtgtgccaactgagggtgaggaggccgaaggatctatctccacgcaagcctccttagctgagggctgccctgcgggctctagcttttcagaccttctggc

SEQ ID NO: 63186 - DNA, 110 bp, synthetic construct
  source 1..110: mol_type = other DNA
aagcctccttagctgagggctgccctgcgggctctagcttttcagaccttctggctgactctgttggcaggctaagcaccctcctgtgttcaaagggagccctcctgtag

SEQ ID NO: 63187 - DNA, 110 bp, synthetic construct
  source 1..110: mol_type = other DNA
gttttactattacggctctaagactagggaatcccaagttgaacagagtccaaaggcttgctgacctgattttagtgacattcctaatcctgcctagaagcactcagtaa

SEQ ID NO: 63188 - DNA, 110 bp, synthetic construct
  source 1..110: mol_type = other DNA
gcttgctgacctgattttagtgacattcctaatcctgcctagaagcactcagtaattgacagcagggagattttatttaagagaaagaggagagaagggaaggaccgcga

SEQ ID NO: 63189 - DNA, 110 bp, synthetic construct
  source 1..110: mol_type = other DNA
aaattggaaatcctacttctgctcgtgtggtagagatctgacccttgctatcaaatgccaagtacctcagaccaagaactacttacccaaatgttctttgggtaaaatag

SEQ ID NO: 63190 - DNA, 110 bp, synthetic construct
  source 1..110: mol_type = other DNA
tgccaagtacctcagaccaagaactacttacccaaatgttctttgggtaaaatagtggatgtttagcaacttaagtgattaatttccttagatcaaggcagtgtaatatc

SEQ ID NO: 63191 - DNA, 110 bp, synthetic construct
  source 1..110: mol_type = other DNA
tttaccatgtagctgatggtcttgatgctctgtggcctgacagctccagggcccttccggttctcattctaaatagataaccggtttcatactgaatcttgcatttgtaa

SEQ ID NO: 63192 - DNA, 110 bp, synthetic construct
  source 1..110: mol_type = other DNA
tccggttctcattctaaatagataaccggtttcatactgaatcttgcatttgtaaattggcattcttcttaaagagggcacccaaattacataggcttcaggcccctcaa

SEQ ID NO: 63193 - DNA, 110 bp, synthetic construct
  source 1..110: mol_type = other DNA
aacctgtttattcttaccctctctgacctgagcccaagagtctgtaggtctaacgggtttaacagggtggtggagccagcttctactactgtatttttatttttattttt

SEQ ID NO: 63194 - DNA, 110 bp, synthetic construct
  source 1..110: mol_type = other DNA
tcatccactcaactgcccccaccatcgccttgtggcatagctctggatgtttctgtttgttttactacctctatatgtacacgcactgctggatgttgtctccaattctt

SEQ ID NO: 63195 - DNA, 110 bp, synthetic construct
  source 1..110: mol_type = other DNA
ctccatctgtccgctttggtcaccataggttacaattaaccagctgacaaccttgaaggtacagctacttaccaaggacacctctctggtgtactccagtggaagttgta

SEQ ID NO: 63196 - DNA, 110 bp, synthetic construct
  source 1..110: mol_type = other DNA
aaggtacagctacttaccaaggacacctctctggtgtactccagtggaagttgtagaatcacactaacacacgtaccagttacttgtgacaatggctgcaaccatccccc

SEQ ID NO: 63197 - DNA, 110 bp, synthetic construct
  source 1..110: mol_type = other DNA
cataacaaacagtaacaatgccaagagggtagtccttctttaatcatgtatttggaaggtgttcatgatgcatgcttcatttgtgaggtcagctcactgtcccacggtga

SEQ ID NO: 63198 - DNA, 110 bp, synthetic construct
  source 1..110: mol_type = other DNA
aaggtgttcatgatgcatgcttcatttgtgaggtcagctcactgtcccacggtgatgaactgaaataccactgagtctgtcttgaccacatttaccatggaccataggga

SEQ ID NO: 63199 - DNA, 110 bp, synthetic construct
  source 1..110: mol_type = other DNA
atacatagatatacattctttttctcaaattatcttccatcatgccttagcccaagagactggatagagttccctgagctgcacagcaggaccgcactgcttatccatcc

SEQ ID NO: 63200 - DNA, 110 bp, synthetic construct; identical to SEQ ID NO: 63199
  source 1..110: mol_type = other DNA

SEQ ID NO: 63201 - DNA, 110 bp, synthetic construct
  source 1..110: mol_type = other DNA
acaactttgatgtgttagtgaaacagaaagaaaatcaatacggctggagtgggatgacgtgggtagtaaggcaagatatgtaggcaagagtgagttcatatagggccctg

SEQ ID NO: 63202 - DNA, 110 bp, synthetic construct
  source 1..110: mol_type = other DNA
gacgtgggtagtaaggcaagatatgtaggcaagagtgagttcatatagggccctggaagttaagtaatgaggtagcagctcctctttgcaggtaagtcatgggaagattt

SEQ ID NO: 63203 - DNA, 110 bp, synthetic construct
  source 1..110: mol_type = other DNA
ggtctaatttttatttcacgcttcagtcaatatccacgctgttatgctcttggatatcctgtgaattgggaggttttgctcctgggctactaggaacacagactatgagt

SEQ ID NO: 63204 - DNA, 110 bp, synthetic construct
  source 1..110: mol_type = other DNA
atcctgtgaattgggaggttttgctcctgggctactaggaacacagactatgagttagtgcatgttctagagattgttccttccgctgttttggggtagttccattgaat

SEQ ID NO: 63205 - DNA, 110 bp, synthetic construct
  source 1..110: mol_type = other DNA
cagcggttatttccatgactgggtgtcttatcttacttatgttaaacaaatcctaagcacattttaaaatacagggcctgtgaattctggtcagaatttcatagcccagc

SEQ ID NO: 63206 - DNA, 110 bp, synthetic construct
  source 1..110: mol_type = other DNA
tccccccacgcccaggccagtttctcctgagaacactttttaaataaatcacatgtccacgagtcctcaaattagggtctgcttatgaagaacagaccctaagacatttt

SEQ ID NO: 63207 - DNA, 110 bp, synthetic construct
  source 1..110: mol_type = other DNA
aattggtcaaaccttttgacttaggcaaagaccatcttgttaatgaaatgcacagccactatttaaatcccagtttaaattacgtcgactggtccctagttttataactg

SEQ ID NO: 63208 - DNA, 110 bp, synthetic construct
  source 1..110: mol_type = other DNA
ccactatttaaatcccagtttaaattacgtcgactggtccctagttttataactgatgaaagctgccattgaaaatgtagcttatttacagaaacagtgacagaatcgca

SEQ ID NO: 63209 - DNA, 110 bp, synthetic construct
  source 1..110: mol_type = other DNA
cttccagtcctgagagtgaggacttgcctttttttttttttttcttcccatgaggacgggataactctgggttgtcttaggctggcacgtaagaatgttcaggaaattta

SEQ ID NO: 63210 - DNA, 110 bp, synthetic construct
  source 1..110: mol_type = other DNA
acgggataactctgggttgtcttaggctggcacgtaagaatgttcaggaaatttagagatgaagctagatggcctgtctagtcaaaaacaccttctgtggcccatgtaca

SEQ ID NO: 63211 - DNA, 110 bp, synthetic construct
  source 1..110: mol_type = other DNA
cctgcctctcccttctccctgggagccttctccactgcttctgaaaggtacacttggtaaataggactcccggaaaataagcgttaagagctggagtgcggcattggttg

SEQ ID NO: 63212 - DNA, 110 bp, synthetic construct
  source 1..110: mol_type = other DNA
ggtaaataggactcccggaaaataagcgttaagagctggagtgcggcattggttgccagggaaaatgcatttatttgctaagcgagcaagtgccaaacaccactaattga

SEQ ID NO: 63213 - DNA, 110 bp, synthetic construct
  source 1..110: mol_type = other DNA
tacagcttataaataaaatggcatttcgcccagtgacaaacttctaccaaataacagcctacaatcaggaagtaacttcttaaagtccttgaatagtcaaaaatcctgtg

SEQ ID NO: 63214 - DNA, 110 bp, synthetic construct
  source 1..110: mol_type = other DNA
agcctacaatcaggaagtaacttcttaaagtccttgaatagtcaaaaatcctgtgactaaatacatgatttcattcgatgcctattaatcctactttacacaaaatagga

SEQ ID NO: 63215 - DNA, 110 bp, synthetic construct
  source 1..110: mol_type = other DNA
tttttatacaagaaatcactttcagaatctgcatggattctcctacactgcatggtttggtttctctctgttcatacgcccttatgaagacgtttctagcgtgggctggg

SEQ ID NO: 63216 - DNA, 110 bp, synthetic construct
  source 1..110: mol_type = other DNA
tttggtttctctctgttcatacgcccttatgaagacgtttctagcgtgggctgggcattggtgtgaagctgtacttaaccaaattccacaggttctgtcacaggatgggg

SEQ ID NO: 63217 - DNA, 110 bp, synthetic construct
  source 1..110: mol_type = other DNA
atttacaatcttccttgaagtaaaggacagtaatggggtggactacatgaatgtttcccaaccttcatccaccagcgatgacgtctactttccaccttcacagcctccaa

SEQ ID NO: 63218 - DNA, 110 bp, synthetic construct
  source 1..110: mol_type = other DNA
tcccaaccttcatccaccagcgatgacgtctactttccaccttcacagcctccaagattttaaagggtttcttccaactttatttatgttttcaatgaccacatcaagag

SEQ ID NO: 63219 - DNA, 110 bp, synthetic construct
  source 1..110: mol_type = other DNA
gatctcaaccttaaaaatcaactctacttcagtaaaactttaaaaaatgcaaagaaatgtaaattgaaacgagaacttatggcgtgtggggtgtaagtaagccacgtgac

SEQ ID NO: 63220 - DNA, 110 bp, synthetic construct
  source 1..110: mol_type = other DNA
aatgtaaattgaaacgagaacttatggcgtgtggggtgtaagtaagccacgtgacatggaaaaacaatacattggcatgtgaaccctctctttgccacttcctagctaca

SEQ ID NO: 63221 - DNA, 110 bp, synthetic construct
  source 1..110: mol_type = other DNA
cagcatcctcacattgttgcaaaagccccaatgttgagatttgtggaatttctcctttcctatctgtgaacataagagataatagaaaatggccaacgttactctttgtg

SEQ ID NO: 63222 - DNA, 110 bp, synthetic construct
  source 1..110: mol_type = other DNA
tttcctatctgtgaacataagagataatagaaaatggccaacgttactctttgtgacttgacttctttgttttaaaaggtaaacacatttcccatcattcgttttttccc

SEQ ID NO: 63223 - DNA, 110 bp, synthetic construct
  source 1..110: mol_type = other DNA
gtgcaatttcaaggacatttcagtggttaccaggaacgagttacagaagtctaaatcaaaaccatcctgcgatctggcacagtaaacacctactttttctctgtccagaa

SEQ ID NO: 63224 - DNA, 110 bp, synthetic construct
  source 1..110: mol_type = other DNA
tcaaaaccatcctgcgatctggcacagtaaacacctactttttctctgtccagaaattctgcaccaccaattgctttctttggatatttatttcttttaacagttgcatt

SEQ ID NO: 63225 - DNA, 110 bp, synthetic construct
  source 1..110: mol_type = other DNA
tgtttgaatcgtggaggtaccaccatctcccttaaggactggataataaccatgccgtgaatttgcatagcacttttactcctttaagtgtgttaatacgtcgtattttg

SEQ ID NO: 63226 - DNA, 110 bp, synthetic construct
  source 1..110: mol_type = other DNA
cgtgaatttgcatagcacttttactcctttaagtgtgttaatacgtcgtattttgtcttattttgttttccaagacttctcccatcaagaaattgctcctctttttcaat

SEQ ID NO: 63227 - DNA, 110 bp, synthetic construct
  source 1..110: mol_type = other DNA
tagagacaaaaactgctcctgcgagagctctatgacttatgaaccattacaaacgtcctctcctgtccgacagaaaaaagacaaatacagtatgaatttatcacttaggt

SEQ ID NO: 63228 - DNA, 110 bp, synthetic construct
  source 1..110: mol_type = other DNA
ctaaatagtagcaactaccaagacttggttgcagtcatgtcaggatcccagaagatccaaatcacccctctcccagcccctctgaatggcatatttttatttatttattt

SEQ ID NO: 63229 - DNA, 110 bp, synthetic construct
  source 1..110: mol_type = other DNA
tccaaatcacccctctcccagcccctctgaatggcatatttttatttatttattttctaattttagtgttttttttttttaaccacgcctgtggcatgcgcaagttccct

SEQ ID NO: 63230 - DNA, 110 bp, synthetic construct
  source 1..110: mol_type = other DNA
ttggtaatattgcaatgccgcagacaatctcaatgtccgtgaacaggaaagcagatgttaattaaattttctttttttttcagtcctcaatattcccctttgatcttgac

SEQ ID NO: 63231 - DNA, 110 bp, synthetic construct
  source 1..110: mol_type = other DNA
tgttaattaaattttctttttttttcagtcctcaatattcccctttgatcttgacggccaacgcgtctgctaatctgtgagcgcaccgccgcagttgaaaatgaacgcct

SEQ ID NO: 63232 - DNA, 110 bp, synthetic construct
  source 1..110: mol_type = other DNA
ctgtgggtgtggccctataaaagaaaaaaaaaaaaagaaacttaaatctgttcttggagttccctggtagcctagtgagttaaggatctggtgttgtcactgtagcagct

SEQ ID NO: 63233 - DNA, 110 bp, synthetic construct; identical to SEQ ID NO: 63232
  source 1..110: mol_type = other DNA

SEQ ID NO: 63234 - DNA, 110 bp, synthetic construct
  source 1..110: mol_type = other DNA
tgggaactccccctagatcattttcctccttttatcctaagggtctctgtagctggacttttctagacagtgataactctagtgtgagagagaaagggactaactcatcc

SEQ ID NO: 63235 - DNA, 110 bp, synthetic construct
  source 1..110: mol_type = other DNA
gacttttctagacagtgataactctagtgtgagagagaaagggactaactcatccagtgttttagtaggttgacgaatggtcacccaaagatacctagacctgatccttg

SEQ ID NO: 63236 - DNA, 110 bp, synthetic construct
  source 1..110: mol_type = other DNA
tcctttttgcatccttgcatacctacatgagattgtctacaatgtagccagagcgatctttttaatttttttaatgattttcattttttccattatagttggtttaccgt

SEQ ID NO: 63237 - DNA, 110 bp, synthetic construct
  source 1..110: mol_type = other DNA
tgcatacctacatgagattgtctacaatgtagccagagcgatctttttaatttttttaatgattttcattttttccattatagttggtttaccgtgttctgtcaatttct

SEQ ID NO: 63238 - DNA, 110 bp, synthetic construct
  source 1..110: mol_type = other DNA
cagtaacgcaggatccgagcagcatctgcaatctacactacagctcaaggcaacgccaggtcctgaactcactgagggaggccagggatcaaactcaaagtccttatgga

SEQ ID NO: 63239 - DNA, 110 bp, synthetic construct; identical to SEQ ID NO: 63238
  source 1..110: mol_type = other DNA

SEQ ID NO: 63240 - DNA, 110 bp, synthetic construct
  source 1..110: mol_type = other DNA
atgttgaggtctagttgaaaaagagctcagaggagccagagtagagtttgcataaggaaataatttttgtcacaatgcacagaactaagaaaaatcgatatatctaggga

SEQ ID NO: 63241 - DNA, 110 bp, synthetic construct
  source 1..110: mol_type = other DNA
ggaaataatttttgtcacaatgcacagaactaagaaaaatcgatatatctagggaactgttgggtgtggggctggcgggaagcaaggatttggtaaggatgcttggtgtg

SEQ ID NO: 63242 - DNA, 110 bp, synthetic construct
  source 1..110: mol_type = other DNA
ggtaccttgaagtgaggttctccctgcctttataggaagacacctatatccttgggtgaaaggaattgaatacatacagttataaattactataacttgtagccatagtt

SEQ ID NO: 63243 - DNA, 110 bp, synthetic construct
  source 1..110: mol_type = other DNA
gtgaaaggaattgaatacatacagttataaattactataacttgtagccatagttctacatatacccctctgaacatcctaatcattagccggtaaccttttgtattctc

SEQ ID NO: 63244 - DNA, 110 bp, synthetic construct
  source 1..110: mol_type = other DNA
agttactgtcacctgcagagaaacaagcgaaacttcagttcctggccctttgattattctccctctgttggtggcatgatgattaggtccaaggcatcagtatatggttg

SEQ ID NO: 63245 - DNA, 110 bp, synthetic construct
  source 1..110: mol_type = other DNA
attctccctctgttggtggcatgatgattaggtccaaggcatcagtatatggttgtgccagtctggcataaaactcaggatgtacagaagcgccggttggcttttagggg

SEQ ID NO: 63246 - DNA, 110 bp, synthetic construct
  source 1..110: mol_type = other DNA
agacagataattttataaaaattacacaagcttttgccaaccctcttcagagccttcttaaccttttggcggttgcttcaggaatgtcacagagccagtcgagacagttt

SEQ ID NO: 63247 - DNA, 110 bp, synthetic construct
  source 1..110: mol_type = other DNA
tccttcctcagttctctttgcaagcaacagctgccactgacagaagtgaccagagccgaagaggtgacctgaggggtgactagcctacccagggatcaaacgctcagttt

SEQ ID NO: 63248 - DNA, 110 bp, synthetic construct
  source 1..110: mol_type = other DNA
ccgaagaggtgacctgaggggtgactagcctacccagggatcaaacgctcagtttggggctcatgagcgcctggctccaccagcctagcagatggaagggaagaagacag

SEQ ID NO: 63249 - DNA, 110 bp, synthetic construct
  source 1..110: mol_type = other DNA
ccatcctaaatggaagagtttgcatctaccaaccccaaactcacacttgcttaaatttaccaataaataattcccatgaaatatcaggatattttcagttaaataggctg

SEQ ID NO: 63250 - DNA, 110 bp, synthetic construct; identical to SEQ ID NO: 63249
  source 1..110: mol_type = other DNA

SEQ ID NO: 63251 - DNA, 110 bp, synthetic construct
  source 1..110: mol_type = other DNA
gaagactgaattagataaggtatgtaacgtcaaaagaagttgacttttccacacatgggaggctgcaatgactgctcttactgtgttcctgattgagctgctagtagcca

SEQ ID NO: 63252 - DNA, 110 bp, synthetic construct
  source 1..110: mol_type = other DNA
tgggaggctgcaatgactgctcttactgtgttcctgattgagctgctagtagccaaaacaacaggataaaaattggtgtactttctggagggacagttggccatatgtac

SEQ ID NO: 63253 - DNA, 110 bp, synthetic construct
  source 1..110: mol_type = other DNA
cagattggaataggccctgattctatggaaccacctaaggctggaagtaaatgttccctcccgtgagcttccaagttccccaatggaaccccacctttaactaccaccaa

SEQ ID NO: 63254 - DNA, 110 bp, synthetic construct
  source 1..110: mol_type = other DNA
ccctcccgtgagcttccaagttccccaatggaaccccacctttaactaccaccaaggccatcatgtgcccacagtgatgcaagtcaactctctgtgagcaaaccttcctc

SEQ ID NO: 63255 - DNA, 110 bp, synthetic construct
  source 1..110: mol_type = other DNA
aaaatgtttggccatggccacccagcctcatggctggtctgctgctgaggggacgccggaataggacgtagttggggttcaagttccctgtagccttgaggttctgtgaa

SEQ ID NO: 63256 - DNA, 110 bp, synthetic construct
  source 1..110: mol_type = other DNA
atttatatagacataaatcatatatatgtaggcagctcaggaaaaaattgcctaaggcataagaggcataagaagatagggagggattttgctcaaagccgaggataagt

SEQ ID NO: 63257 - DNA, 110 bp, synthetic construct
  source 1..110: mol_type = other DNA
ggcataagaggcataagaagatagggagggattttgctcaaagccgaggataagtcctccaccaagcacagcccctcaagatttgctaaaatgtagaccaactggtcctt

SEQ ID NO: 63258 - DNA, 110 bp, synthetic construct
  source 1..110: mol_type = other DNA
accatcccctctcaatggctgttcatcccactgagagtaaaatctctaccataatttctttcttttcttttctttttttttaatgaagttttgtcccatcacagtgcctt

SEQ ID NO: 63259 - DNA, 110 bp, synthetic construct
  source 1..110: mol_type = other DNA
agaaacaaccacccttttactgtactaatgtcatcaaatggaacagtcttaaaattcaggacacaaatgcaaacctaaatctattaccatctcagctgcccttcgcaatc

SEQ ID NO: 63260 - DNA, 110 bp, synthetic construct
  source 1..110: mol_type = other DNA
tcaggacacaaatgcaaacctaaatctattaccatctcagctgcccttcgcaatcagcaagaaatgtttccaatgcattgcttaaacttccattttgtagacttctaacc

SEQ ID NO: 63261 - DNA, 110 bp, synthetic construct
  source 1..110: mol_type = other DNA
acatgaccaaaaaaaaagaaaaagagtactgaggactcctggaggccagagatgacttctcctagtgaccaaagctcttccttaccaccttataggcaggctcccgaccc

SEQ ID NO: 63262 - DNA, 110 bp, synthetic construct
  source 1..110: mol_type = other DNA
cttctcctagtgaccaaagctcttccttaccaccttataggcaggctcccgaccccagccctgatgcaccagcagcacaaccaaccaacatgtaccaatggcttctctct

SEQ ID NO: 63263 - DNA, 110 bp, synthetic construct
  source 1..110: mol_type = other DNA
tttcaacgacacccctacctgggtactgctgccacgagagttcctcctaaggcactccttctgagaacggctcctttaagaggttgtaaatctgaatcacttaaattcat

SEQ ID NO: 63264 - DNA, 110 bp, synthetic construct
  source 1..110: mol_type = other DNA
tccttctgagaacggctcctttaagaggttgtaaatctgaatcacttaaattcatgtttccactctgaatggtttgtaccagctggaaaagcacacaaacatgaagcctg

SEQ ID NO: 63265 - DNA, 110 bp, synthetic construct
  source 1..110: mol_type = other DNA
tggaaccccatgggacatggccagttgccatgctgaccagttggaaatccagcgggcaagcaaaagcagcttttataaccactcagggaccaacgtaagatggtgacttt

SEQ ID NO: 63266 - DNA, 110 bp, synthetic construct
  source 1..110: mol_type = other DNA
aggccagggatggaacccgcatcctcacgatactagctggattcgtttccactgtatcgcaacggggaccgccccccgcctcctctccccacccaggtgattttttaagt

SEQ ID NO: 63267 - DNA, 110 bp, synthetic construct; identical to SEQ ID NO: 63266
  source 1..110: mol_type = other DNA

SEQ ID NO: 63268 - DNA, 110 bp, synthetic construct
  source 1..110: mol_type = other DNA
ttcagccaggtaagtgcaaaaccggatctccgagcctgcgctccaacaaaaacgtggaacatgaaggctcaggggagcttcctgggttgggaatattctgtgtgtgtggc

SEQ ID NO: 63269 - DNA, 110 bp, synthetic construct
  source 1..110: mol_type = other DNA
ggaacatgaaggctcaggggagcttcctgggttgggaatattctgtgtgtgtggccacaccttgttatcaggagagttagccctgtctacaactgcagcgggagaagacg

SEQ ID NO: 63270 - DNA, 110 bp, synthetic construct
  source 1..110: mol_type = other DNA
ccgtagtctttagttgcaccagcccatcaaaaatcgattatggatctccctaatggctcctatatttaagctcctcagagctgcgagagaaaatcttgcagataatctgt

SEQ ID NO: 63271 - DNA, 110 bp, synthetic construct
  source 1..110: mol_type = other DNA
ctccctaatggctcctatatttaagctcctcagagctgcgagagaaaatcttgcagataatctgtgtggcaaaagagtctgaaagagaatggatatgtgtacatgtataa

SEQ ID NO: 63272 - DNA, 110 bp, synthetic construct
  source 1..110: mol_type = other DNA
tcacaatggtctcggggaaactgacagatctggccaagcaaggggcttggttccaccccaggttccaaggatgtgtgtctgaccttttgccttcctgggcctgcagattt

SEQ ID NO: 63273 - DNA, 110 bp, synthetic construct
  source 1..110: mol_type = other DNA
aggccacaacagtgacacagtgcgtattggatttgtgttcctcagagtcatcctcaggcacagaactataatttaaatatcatcggctggttccaagattatattcgtat

SEQ ID NO: 63274 - DNA, 110 bp, synthetic construct
  source 1..110: mol_type = other DNA
aggcacagaactataatttaaatatcatcggctggttccaagattatattcgtatgtatggtttccctttatcctcaacctttaacgatggtaggcattatatgatctcc

SEQ ID NO: 63275 - DNA, 110 bp, synthetic construct
  source 1..110: mol_type = other DNA
ctggcctgcatggtttcccccatcatcgggagggaggggcgtccagtttcactagcagtatctgctgcttgcttctcatacattcgccctctttcacatcccttcctgat

SEQ ID NO: 63276 - DNA, 110 bp, synthetic construct
  source 1..110: mol_type = other DNA
cagtatctgctgcttgcttctcatacattcgccctctttcacatcccttcctgattctattccaagtttctgttttagaagtgattaacaaggaaaaaaactcacgggtg

SEQ ID NO: 63277 - DNA, 110 bp, synthetic construct
  source 1..110: mol_type = other DNA
tcagtacatcgtatcagagaatacatgagagcaatatgtcttatgactggtgatcttaaccataatcacccgatggaggtatcatctgttgagttttctctactgcaaaa

SEQ ID NO: 63278 - DNA, 110 bp, synthetic construct
  source 1..110: mol_type = other DNA
ttaaccataatcacccgatggaggtatcatctgttgagttttctctactgcaaaattacgattttctctttgtagctaataaatatcttgggaaagatacttttaggata

SEQ ID NO: 63279 - DNA, 110 bp, synthetic construct
  source 1..110: mol_type = other DNA
gtctcagacaccgctgaaaagccccttacaagccttgctgggacctccattgcagggagaagggagaaatctgggaccagaaggcaccgatggaaggagagagggagttg

SEQ ID NO: 63280 - DNA, 110 bp, synthetic construct
  source 1..110: mol_type = other DNA
ggggccctcaaatcattcttgattgagagccttgtgctctagcctgcaactcacagcagtgaagacttgggagggaaggaatcgcttgggaagcagctcaactgtttaac

SEQ ID NO: 63281 - DNA, 110 bp, synthetic construct
  source 1..110: mol_type = other DNA
gcagtgaagacttgggagggaaggaatcgcttgggaagcagctcaactgtttaacaaccctgatggtgaatttctctttctttgctaattggattttcatcttctgtacc

SEQ ID NO: 63282 - DNA, 110 bp, synthetic construct
  source 1..110: mol_type = other DNA
cccacccccacctcctgccagttcattcaagtctccgatcaagcgcagggcccctgattgcaggttcaaggctctacacaaatagatgaggtaaaaacaattgacatgca

SEQ ID NO: 63283 - DNA, 110 bp, synthetic construct
  source 1..110: mol_type = other DNA
gattgcaggttcaaggctctacacaaatagatgaggtaaaaacaattgacatgcagtttgcattggtatttgacataattggtcttggactcccttctggaaccccgagt

SEQ ID NO: 63284 - DNA, 110 bp, synthetic construct
  source 1..110: mol_type = other DNA
atctcttctgtctctgcccaagtgttcccccaggtatgtcttgcctcaaataatgactaaaggaatattgctgtaaatcagtaggacagctttttctttctgtctatctg

SEQ ID NO: 63285 - DNA, 110 bp, synthetic construct
  source 1..110: mol_type = other DNA
actaaaggaatattgctgtaaatcagtaggacagctttttctttctgtctatctgcaactttaaagaggcaaagataggtggggaaatatttgcaaaatacagtcacatt

SEQ ID NO: 63286 - DNA, 110 bp, synthetic construct
  source 1..110: mol_type = other DNA
atggaagggagtgggaggtagaaaccatactcttcctctagcaggaagaggaggcaagtatctttcagcagatgtgagttgcgcaacccctcctcgactcctttctatgc

SEQ ID NO: 63287 - DNA, 110 bp, synthetic construct
  source 1..110: mol_type = other DNA
aagtatctttcagcagatgtgagttgcgcaacccctcctcgactcctttctatgctaatcacccaaccaccctgggaccatgggacacctgtgctgccaacatggttttc

SEQ ID NO: 63288 - DNA, 110 bp, synthetic construct
  source 1..110: mol_type = other DNA
gttctaatatgcatctaaacatagtcactgaaacacccctatttccatacacttgtcctcagagatgcctgctgttaacagcttggcgataacgtggtatagatgcattt

SEQ ID NO: 63289 - DNA, 110 bp, synthetic construct
  source 1..110: mol_type = other DNA
tcctcagagatgcctgctgttaacagcttggcgataacgtggtatagatgcatttgagccagtttaactgcaagcagatacgtatgtaacgctgtgtgtgtttttgcacc

SEQ ID NO: 63290 - DNA, 110 bp, synthetic construct
  source 1..110: mol_type = other DNA
agtcagatttgtttctgctgcgccacagtgggaactgtgggattgacatctttattgaattctaccgtcagtgaacttagtcagcttgtcttttctgccatttaatagtg

SEQ ID NO: 63291 - DNA, 110 bp, synthetic construct
  source 1..110: mol_type = other DNA
tccgatagccacgttctcatctttttctttagatcttagaataagaaaaccggcagtggcgtctgccaagtctacagcggcatatgggtgcggccatcttgagggtgtgg

SEQ ID NO: 63292 - DNA, 110 bp, synthetic construct
  source 1..110: mol_type = other DNA
gtggcgtctgccaagtctacagcggcatatgggtgcggccatcttgagggtgtggccgggcggtgggggggggctctgtctcaggtcagggttcagagagcaggggtcag

SEQ ID NO: 63293 - DNA, 110 bp, synthetic construct
  source 1..110: mol_type = other DNA
aattcctttacctttccaaatgaattctagaatcatcttgctgatacttagaaaaaatgctgctgggatttggactgaaactcagttgaatctatagagaaaaatgcaga

SEQ ID NO: 63294 - DNA, 110 bp, synthetic construct
  source 1..110: mol_type = other DNA
aatgctgctgggatttggactgaaactcagttgaatctatagagaaaaatgcagagtattgacaacaatattgactcagccaatccatgaatacagtttctctctccatt

SEQ ID NO: 63295 - DNA, 110 bp, synthetic construct
  source 1..110: mol_type = other DNA
acaacaagatctgaggccaagcgagcagagcgctcaggtgtcagggcactgctgggcatgcgtttcgccccttgagaggcgcaaaccctccaaaccatgcgtctcttcca

SEQ ID NO: 63296 - DNA, 110 bp, synthetic construct
  source 1..110: mol_type = other DNA
gcatgcgtttcgccccttgagaggcgcaaaccctccaaaccatgcgtctcttccaaaaactgtgctcacaatgggactaaatcacggagccaagtatttttccatcttat

SEQ ID NO: 63297 - DNA, 110 bp, synthetic construct; identical to SEQ ID NO: 63295
  source 1..110: mol_type = other DNA

SEQ ID NO: 63298 - DNA, 110 bp, synthetic construct; identical to SEQ ID NO: 63296
  source 1..110: mol_type = other DNA

SEQ ID NO: 63299 - DNA, 110 bp, synthetic construct
  source 1..110: mol_type = other DNA
gccatctccagccacaagcatccaggtcaccgagaaccacgctctatcagcccaggactgctccctaagggcggtcctttgcccctaacgcttcttttggggccccaacg

SEQ ID NO: 63300 - DNA, 110 bp, synthetic construct
  source 1..110: mol_type = other DNA
gactgctccctaagggcggtcctttgcccctaacgcttcttttggggccccaacgttgctgcttggtttttacaataaacaaaatgaagctttggagttcccgtcatggt

SEQ ID NO: 63301 - DNA, 110 bp, synthetic construct
  source 1..110: mol_type = other DNA
gccacggctctgctcaaaattcttcagtgactttgtcacccctggcaaaagaaatctccgctccttaacatggcattcaaggcccaccaagacctggcatctgccaccac

SEQ ID NO: 63302 - DNA, 110 bp, synthetic construct
  source 1..110: mol_type = other DNA
ctccgctccttaacatggcattcaaggcccaccaagacctggcatctgccaccactccaattttacttcctaccaccacctaccccttacacagacactcaccatattca

SEQ ID NO: 63303 - DNA, 110 bp, synthetic construct
  source 1..110: mol_type = other DNA
agattggtggttgtcagagtagggtggtaacatgagttttttagggtgaaggagaaaccgagcaggaccctgttgggctcctaggtacaaatctttttgtgtccccccac

SEQ ID NO: 63304 - DNA, 110 bp, synthetic construct
  source 1..110: mol_type = other DNA
aaccgagcaggaccctgttgggctcctaggtacaaatctttttgtgtccccccacttcttgtttgtaggacatgggcttcactcagccttcaggaccctccctgagtgtc

SEQ ID NO: 63305 - DNA, 110 bp, synthetic construct
  source 1..110: mol_type = other DNA
gagcgaggccagggatccaacacccatcctcacggagactagtcaggttggtaacctgctgagacatgccaggagctaactccctaagacaccttcctaaggctgctgct

SEQ ID NO: 63306 - DNA, 110 bp, synthetic construct; identical to SEQ ID NO: 63305
  source 1..110: mol_type = other DNA

SEQ ID NO: 63307 - DNA, 110 bp, synthetic construct
  source 1..110: mol_type = other DNA
aaaattaaaggagttcccactgtggtacaacagagtcagcagtatctctgcagcgctgggacgcaggtttgatcctgagcccagcagagtaggttaaggatctggtgttg

SEQ ID NO: 63308 - DNA, 110 bp, synthetic construct
  source 1..110: mol_type = other DNA
ctgggacgcaggtttgatcctgagcccagcagagtaggttaaggatctggtgttgctacaggtgaggcaaaggccacagctgcagcttgaatctgacccctggcctggga

SEQ ID NO: 63309 - DNA, 110 bp, synthetic construct
  source 1..110: mol_type = other DNA
tcaaaagccatcccttccatggatccctactctcttctcatccatccccctagagataatcacgaccttgacttttatgctatttagtttttgcttttctccatggtttt

SEQ ID NO: 63310 - DNA, 110 bp, synthetic construct
  source 1..110: mol_type = other DNA
ataatcacgaccttgacttttatgctatttagtttttgcttttctccatggttttgccccctaagaatacagccctaaaaatatagtgtgcttttttctgtttttttttt

SEQ ID NO: 63311 - DNA, 110 bp, synthetic construct
  source 1..110: mol_type = other DNA
catgaaaggaaacctagtgttcatcaacagaggaatggataaggaagatgtgatacacatacacacacacacacacacatatatataatggaatactactcagccataaa

SEQ ID NO: 63312 - DNA, 110 bp, synthetic construct; identical to SEQ ID NO: 63311
  source 1..110: mol_type = other DNA

SEQ ID NO: 63313 - DNA, 110 bp, synthetic construct
  source 1..110: mol_type = other DNA
agatccttaacccactgaacggcgaggtcaaggatcaaatccacatcctcattaccactgagccccaatgagaactcctgcagtcagattctcaacccactgtgccacag

SEQ ID NO: 63314 - DNA, 110 bp, synthetic construct; identical to SEQ ID NO: 63313
  source 1..110: mol_type = other DNA

SEQ ID NO: 63315 - DNA, 110 bp, synthetic construct
  source 1..110: mol_type = other DNA
gagtcctcatggatcctagtcaggttcgttaattacggagccacgatgggaactcctgtggactctatttcaatcaagcctttcatttccttacaattaaatagttactt

SEQ ID NO: 63316 - DNA, 110 bp, synthetic construct; identical to SEQ ID NO: 63315
  source 1..110: mol_type = other DNA

SEQ ID NO: 63317 - DNA, 110 bp, synthetic construct
  source 1..110: mol_type = other DNA
agtgaagaagccccccccccactccttcctgaagtatttgtgatcaactggccatcaggagtgacttggaagcagcctttgggtgcctgtgacacaccttctggactgta

SEQ ID NO: 63318 - DNA, 110 bp, synthetic construct
  source 1..110: mol_type = other DNA
caggagtgacttggaagcagcctttgggtgcctgtgacacaccttctggactgtagagaaggttcccaggagcaggacaagtgatggtgcagggctctcatcatagttga

SEQ ID NO: 63319 - DNA, 110 bp, synthetic construct
  source 1..110: mol_type = other DNA
gcttcataaaatgatttgggaaggattctctcttctcctgttttctggaagagatctaagagaattggtgttatctttaaacgtttgttggaatttgccagtaaaaccat

SEQ ID NO: 63320 - DNA, 110 bp, synthetic construct
  source 1..110: mol_type = other DNA
ctaagagaattggtgttatctttaaacgtttgttggaatttgccagtaaaaccatctgggcctgggcatttctcttaaaaaagatatttagctatgaatttaatttcctt

SEQ ID NO: 63321 - DNA, 110 bp, synthetic construct
  source 1..110: mol_type = other DNA
tccatatgccacaagtgtggccctcaaaagacaaaaaaaaaaaaaaaaaaaaaaaaaaaaaaagaacgagcttgtattctttgctaggttttctctgctttaagtagttg

SEQ ID NO: 63322 - DNA, 110 bp, synthetic construct; identical to SEQ ID NO: 63321
  source 1..110: mol_type = other DNA

SEQ ID NO: 63323 - DNA, 110 bp, synthetic construct
  source 1..110: mol_type = other DNA
gctaagaattgctgacattttgaaaattataatctcatcaaattaatcacctcggcttcaaaaagaaggacacttcagattgggcagttacctttttttttttttttttt

SEQ ID NO: 63324 - DNA, 110 bp, synthetic construct
  source 1..110: mol_type = other DNA
ttacaaaatgcctagttaactttcagtctatgcagaaccaatattttaccacttcaattggtaatcacccatttatgttatagttgcctgtctatacacatggattgaaa

SEQ ID NO: 63325 - DNA, 110 bp, synthetic construct
  source 1..110: mol_type = other DNA
ttaccacttcaattggtaatcacccatttatgttatagttgcctgtctatacacatggattgaaaatcccatcagaaaatgttatttttgctatcagtcatcaaaaatgt

SEQ ID NO: 63326 - DNA, 110 bp, synthetic construct
  source 1..110: mol_type = other DNA
tgttcagggtcagatggtaactgagtgctgacatttctctgagactgtatcacgcagtgggccatgtgtcaggtctgattgaatcctcacagccaccctgcagggaaggt

SEQ ID NO: 63327 - DNA, 110 bp, synthetic construct
  source 1..110: mol_type = other DNA
agactcccagaaggagagcaggagttgagcctaaaccacctcatttgcatgagcgatctaggcaccaggagccgcccttctcaggcagggaatggccggcacccctccaa

SEQ ID NO: 63328 - DNA, 110 bp, synthetic construct
  source 1..110: mol_type = other DNA
atctaggcaccaggagccgcccttctcaggcagggaatggccggcacccctccaaatccaagttcccaggcgccagccaggggccagcccggcccgcaggcctttcctag

SEQ ID NO: 63329 - DNA, 110 bp, synthetic construct
  source 1..110: mol_type = other DNA
tcaagggaggatgaggttctacggtaataagaagtaagaaggggcagggtaatataggaagatctagtggctgtccgtgtgagtttcgagtcacgggggcacttagatgt

SEQ ID NO: 63330 - DNA, 110 bp, synthetic construct
  source 1..110: mol_type = other DNA
aggaagatctagtggctgtccgtgtgagtttcgagtcacgggggcacttagatgtgtgccagtgcgggcagaatcagagcagtatgaagtctggaatacgctaatgcgtg

SEQ ID NO: 63331 - DNA, 110 bp, synthetic construct
  source 1..110: mol_type = other DNA
cagtggcccaaggacctctactgtgctgctgtaagcatttcggtcatagcttgaagccttatggttccactatggctgccatgtccctaaagatgggaaagcaagcaggg

SEQ ID NO: 63332 - DNA, 110 bp, synthetic construct
  source 1..110: mol_type = other DNA
ctggcaacctcctggttcctagtcaaactcgtttccgctgcaccagaataggaactcctgaaagtgagcagttttacaaagctgactttctttaggaattcagccatttg

SEQ ID NO: 63333 - DNA, 110 bp, synthetic construct; identical to SEQ ID NO: 63332
  source 1..110: mol_type = other DNA

SEQ ID NO: 63334 - DNA, 110 bp, synthetic construct
  source 1..110: mol_type = other DNA
ctctgtccccctggcaaccactaatccgttctccatctctataattgtgttatttcgagaatggtacataaatagaaccatataatatgaaacctttgcagactggcttt

SEQ ID NO: 63335 - DNA, 110 bp, synthetic construct
  source 1..110: mol_type = other DNA
cgagaatggtacataaatagaaccatataatatgaaacctttgcagactggcttttttcactcagcgtaattcccttgagatccacttgcactgttccctgtatcaatag

SEQ ID NO: 63336 - DNA, 110 bp, synthetic construct
  source 1..110: mol_type = other DNA
gccttcaagtaaccattcctccatcaacatctctctcatctggagctcaaacccaggcctgttaatttttccaccatcaatgcatacgaggactgatctcaaactcgact

SEQ ID NO: 63337 - DNA, 110 bp, synthetic construct
  source 1..110: mol_type = other DNA
ggcctgttaatttttccaccatcaatgcatacgaggactgatctcaaactcgacttctgtgaacccttccaacattaatgaccttgataaggtccatgcgataaagccca

SEQ ID NO: 63338 - DNA, 110 bp, synthetic construct
  source 1..110: mol_type = other DNA
tgtaaagcaccccctgtggagctacccaagaataagggactctgagctcattcatttgactccagatatcatgattgcgtcaataatccaccactcttaatacgcagtgt

SEQ ID NO: 63339 - DNA, 110 bp, synthetic construct
  source 1..110: mol_type = other DNA
ttgactccagatatcatgattgcgtcaataatccaccactcttaatacgcagtgtgggagttgctcaacttttgtggggccaatgtggggtggcactgctgacatggatg

SEQ ID NO: 63340 - DNA, 110 bp, synthetic construct
  source 1..110: mol_type = other DNA
gcattagccatcattgctgtgcctgttgatcccccattagccactaatacagtgtccaaaggcagtgatgctccagtacagttcatgctgaccatacattaaactatcac

SEQ ID NO: 63341 - DNA, 110 bp, synthetic construct
  source 1..110: mol_type = other DNA
ccaaaggcagtgatgctccagtacagttcatgctgaccatacattaaactatcactgtgtttgctaattccatactaacctcaacactttttttttttgccttttctagg

SEQ ID NO: 63342 - DNA, 110 bp, synthetic construct
  source 1..110: mol_type = other DNA
aatacatacaaataaaaccagcacatatgcatggaaccaaatgaggtcttaaaaatcatattctctgggcttcttttagctgcgcatgtcctagacttggtgctagagat

SEQ ID NO: 63343 - DNA, 110 bp, synthetic construct
  source 1..110: mol_type = other DNA
tcatattctctgggcttcttttagctgcgcatgtcctagacttggtgctagagatgctggcaaaccagaaaggccaactgttgcggacaaaaccgtcccaagaaaaacct

SEQ ID NO: 63344 - DNA, 110 bp, synthetic construct
  source 1..110: mol_type = other DNA
atgattaaataaagaattcagagggagtatagaaaagtttacagttcacaccatttttcatttcctcaaacacagtcaatcccgatgttagtaatttctaacgtaactgc

SEQ ID NO: 63345 - DNA, 110 bp, synthetic construct
  source 1..110: mol_type = other DNA
tttcatttcctcaaacacagtcaatcccgatgttagtaatttctaacgtaactgcactgtggtctgagaatgttctctgcatgatgttgagcctttgaaatgtgttgaaa

SEQ ID NO: 63346 - DNA, 110 bp, synthetic construct
  source 1..110: mol_type = other DNA
agcttgggagcgcagggacacaggttcaatccccagcccggcacagtgagttaaggatcacacagtgagttaaggatccagcattgctgcagttgcagctcaggtcacag

SEQ ID NO: 63347 - DNA, 110 bp, synthetic construct
  source 1..110: mol_type = other DNA
tcaatccccagcccggcacagtgagttaaggatcacacagtgagttaaggatccagcattgctgcagttgcagctcaggtcacagctacagctcggatttgatccctggc

SEQ ID NO: 63348 - DNA, 110 bp, synthetic construct
  source 1..110: mol_type = other DNA
aagagctggaaaatgtctcatactcacaacaagaaaaaagttgatcaaactgaaaatcaatgacttttcttagctccgccatcggagaactgaagtcacaggacaaactt

SEQ ID NO: 63349 - DNA, 110 bp, synthetic construct
  source 1..110: mol_type = other DNA
atcaatgacttttcttagctccgccatcggagaactgaagtcacaggacaaacttctgccccccaaactggagagacccatgaagatagagaattcaggtcagtttacct

SEQ ID NO: 63350 - DNA, 110 bp, synthetic construct
  source 1..110: mol_type = other DNA
atacacatgcaaccctcctgggcatgggcacgacaaacagaaggacccacgccgcatacagaggcacacacacttctaggcattcacacaaccaccgagactcatgacac

SEQ ID NO: 63351 - DNA, 110 bp, synthetic construct
  source 1..110: mol_type = other DNA
ggcctctatggagagagtctaacgttgggtcatgcagaaggtgctcaatacatacagactgaagccactggaggaaaaggtactggggagagggtctggggtaagcagca

SEQ ID NO: 63352 - DNA, 110 bp, synthetic construct
  source 1..110: mol_type = other DNA
agactgaagccactggaggaaaaggtactggggagagggtctggggtaagcagcaggcactcaataaatgcttgctgaataccctggaggaaagagcctttagagaaggc

SEQ ID NO: 63353 - DNA, 110 bp, synthetic construct
  source 1..110: mol_type = other DNA
tgcgcctcccagtaacattgtgctttagaaacggcactttagccaacagcagaagttaatgggggaaagaagggccacgtgactcaaagacattcaggctctttaatgtc

SEQ ID NO: 63354 - DNA, 110 bp, synthetic construct
  source 1..110: mol_type = other DNA
ctaggggagagaggggtagtccgatgcgcctgctcaaaagcacttgcgaagctgcattcttcaatcaacagggcgcttttactgagcaccccggagagttcccttacctg

SEQ ID NO: 63355 - DNA, 110 bp, synthetic construct
  source 1..110: mol_type = other DNA
attcttcaatcaacagggcgcttttactgagcaccccggagagttcccttacctgtgcggctttgctgggctcagaatatggccgcacccaggtgtggctgtttcatggg

SEQ ID NO: 63356 - DNA, 110 bp, synthetic construct
  source 1..110: mol_type = other DNA
gtgaatgtaggagggatggattgggggtttttgatacaacacatgaaagatgtgtttaatgttctgcctgctagttgttaatacttctttgttatatcattcacgacatg

SEQ ID NO: 63357 - DNA, 110 bp, synthetic construct
  source 1..110: mol_type = other DNA
ttaatgttctgcctgctagttgttaatacttctttgttatatcattcacgacatgctctattttgccatgttttgtgttccttctgatgatttggagtggttggattctt

SEQ ID NO: 63358 - DNA, 110 bp, synthetic construct
  source 1..110: mol_type = other DNA
tgggacactgcatttatttttaccatcagctttatgaagtaaacttacaattattccacatgtccagtagctcatctcagtgccacttacaacatggccatttatttcca

SEQ ID NO: 63359 - DNA, 110 bp, synthetic construct
  source 1..110: mol_type = other DNA
cgattggacccctagcttgggaacctctgtgtgctgcaagtgaagccctaaaaagcaaaaaaagagtgaacagaccaattaccagtaatgaaactgaatcagttatttta

SEQ ID NO: 63360 - DNA, 110 bp, synthetic construct; identical to SEQ ID NO: 63359
  source 1..110: mol_type = other DNA

SEQ ID NO: 63361 - DNA, 110 bp, synthetic construct
  source 1..110: mol_type = other DNA
cctttttgaactctgatagactgcaaaggtctgtttcattatttgcttcttcaggggaatggttcctgtgtttttcaatattacttatatttttcttattctgtgagttt

SEQ ID NO: 63362 - DNA, 110 bp, synthetic construct
  source 1..110: mol_type = other DNA
ggaatggttcctgtgtttttcaatattacttatatttttcttattctgtgagtttaggaaaaacaattatttatagagctcctatttataggcattcctgggtagcttgt

SEQ ID NO: 63363 - DNA, 110 bp, synthetic construct
  source 1..110: mol_type = other DNA
ctgctcctcctttgtttctgcattccctcaattccctgattagtaactgcttgagtctgctctttgggactcagggaaggtccaggaaactaaagtctctttctacaaac

SEQ ID NO: 63364 - DNA, 110 bp, synthetic construct
  source 1..110: mol_type = other DNA
tctgctctttgggactcagggaaggtccaggaaactaaagtctctttctacaaacaagaaacaggggacacagaggtgctttggtagctgggagggtccttcagggtcct

SEQ ID NO: 63365 - DNA, 110 bp, synthetic construct
  source 1..110: mol_type = other DNA
atctccttatctgacataacagggcccaacactccccaacccacccaacccccatttaccaacgtgtctccacctcaggatccgggagaagcaagattaatgtctggacc

SEQ ID NO: 63366 - DNA, 110 bp, synthetic construct
  source 1..110: mol_type = other DNA
tggttctttctgagcattccccacacctatcctcagggcccctctcaggtagcaggtagggagttcacggtcattagaagcccctagaggagttcccatcgtggctcagt

SEQ ID NO: 63367 - DNA, 110 bp, synthetic construct; identical to SEQ ID NO: 63366
  source 1..110: mol_type = other DNA

SEQ ID NO: 63368 - DNA, 110 bp, synthetic construct
  source 1..110: mol_type = other DNA
ctccaaagaatatatataaatggggccaataactatatgaaaagatgttaaacattgctaaccattagggaaatacaaatcaaaaccacaatgagataccacctcatacc

SEQ ID NO: 63369 - DNA, 110 bp, synthetic construct; identical to SEQ ID NO: 63368
  source 1..110: mol_type = other DNA

SEQ ID NO: 63370 - DNA, 110 bp, synthetic construct
  source 1..110: mol_type = other DNA
ctggttacagctatggcgtgggttcaattcctgaccggggaacttctgcaggccatgggtgtgaccaaaaaattactgtttgttataaaaaacagtgtgaaaaattaaca

SEQ ID NO: 63371 - DNA, 110 bp, synthetic construct
  source 1..110: mol_type = other DNA
ggcgggtataatgagggtgggcacgtctgggcactccccacagatgcgccttggtctttttacccagtggccccctctctcccttcacagggtccttattgtggattggg

SEQ ID NO: 63372 - DNA, 110 bp, synthetic construct
  source 1..110: mol_type = other DNA
aaatagacatttcattgttagctgtatacacagttgaaacctgtgatcggccaactgaggtccaggtactcatgtaccttttttaaaatgtttggtctttttatggccac

SEQ ID NO: 63373 - DNA, 110 bp, synthetic construct
  source 1..110: mol_type = other DNA
gagcatacagaaacagcagcagtgggctaagattctggctgcagcagctcaggtcgctgcagaggcgcaggttcgatcctaggcccagagcagtgggttaaaagctccgg

SEQ ID NO: 63374 - DNA, 110 bp, synthetic construct
  source 1..110: mol_type = other DNA
gctgcagaggcgcaggttcgatcctaggcccagagcagtgggttaaaagctccggtgttgccacaattctggcataggttgctgcagtgctcagattcaatccttggccc

SEQ ID NO: 63375 - DNA, 110 bp, synthetic construct
  source 1..110: mol_type = other DNA
atttaatggaggggagcaaaggctttgccatggcagacctctaagagctagaaatggggctggaagagcggccatgactgcatgcaaacctgcacagaacacgcagtcaa

SEQ ID NO: 63376 - DNA, 110 bp, synthetic construct
  source 1..110: mol_type = other DNA
ggggctggaagagcggccatgactgcatgcaaacctgcacagaacacgcagtcaattctcagcacgtgtcgaaggggatcattctgattaaatacggaaaaaagagggag

SEQ ID NO: 63377 - DNA, 110 bp, synthetic construct
  source 1..110: mol_type = other DNA
cctgcgtcctcatggatactagtcagggtcgctaactgctgagccatgacggaactcctgggtctcatatttttgtaggtatcctgtacctacaaaattagttttttctc

SEQ ID NO: 63378 - DNA, 110 bp, synthetic construct; identical to SEQ ID NO: 63377
  source 1..110: mol_type = other DNA

SEQ ID NO: 63379 - DNA, 110 bp, synthetic construct
  source 1..110: mol_type = other DNA
ggctcctgtctcaccttagtctcttttttttccctttttggccacacccacagtagggatcaaatctgagccacagctgcggcaaggctggttccttaacctgggctggg

SEQ ID NO: 63380 - DNA, 110 bp, synthetic construct
  source 1..110: mol_type = other DNA
acaataggaactcctgttgtgccaatttctgctgtgcagcaaagtaacccagtcatacatatatacgtttcttttcataaacttcatggtccgtaacaagagattggata

SEQ ID NO: 63381 - DNA, 110 bp, synthetic construct
  source 1..110: mol_type = other DNA
tttctgctgtgcagcaaagtaacccagtcatacatatatacgtttcttttcataaacttcatggtccgtaacaagagattggatatagttctctgtgctgtacagtagga

SEQ ID NO: 63382 - DNA, 110 bp, synthetic construct
  source 1..110: mol_type = other DNA
atttcttttttaaaggcaattgatacgcccaccactgagttaggccccgcccagtcctcattaaatatggcagcgagcagggccgacctactgcggctgcgcgcgcggaa

SEQ ID NO: 63383 - DNA, 110 bp, synthetic construct
  source 1..110: mol_type = other DNA
cctcattaaatatggcagcgagcagggccgacctactgcggctgcgcgcgcggaaactcctcccagcaccgttctcgcggccgctctccccgccctgctgcctcccccgc

SEQ ID NO: 63384 - DNA, 110 bp, synthetic construct
  source 1..110: mol_type = other DNA
cctgttgcactgtctctgcccttcacccttacctcaagcctcttccgtcaccaccccccgcccccgaacacatgcacacagccagctcggtctccagtctgttttgccag

SEQ ID NO: 63385 - DNA, 110 bp, synthetic construct
  source 1..110: mol_type = other DNA
atctgagaccctttggggactgcacgttacatccatccagagcaaatccaaactgcttaccctggcctctgaggctttccacaaccttcgtctggtctatcttgctaacc

SEQ ID NO: 63386 - DNA, 110 bp, synthetic construct
  source 1..110: mol_type = other DNA
ttctctagttgtagagctaggactttttttgtttgtttggcacagcaatcagacgtctggggactatccccttgtttgtatttttctcctcacccctgcagaggtggaac

SEQ ID NO: 63387 - DNA, 110 bp, synthetic construct
  source 1..110: mol_type = other DNA
tgtgccctgggggtgatagctataggaaatctttcttcatttgttacaattctcagggacctgtgagcataagccctgctggccatcagatccagttggtctctagaggt

SEQ ID NO: 63388 - DNA, 110 bp, synthetic construct
  source 1..110: mol_type = other DNA
cacccaacccttaaagctgtagctaggcttgctgcttctgagcagaggactgttcctggctgcgtaaaattgcctcaagtggaagcaggaggtatggtggtttgataccc

SEQ ID NO: 63389 - DNA, 110 bp, synthetic construct
  source 1..110: mol_type = other DNA
tctgtagaataaaaataagcctataagacagagaagagaaggcagaccagctagagagcttgtaccctaaggaatgacacagaagtgagtcttttggatttacattgtgt

SEQ ID NO: 63390 - DNA, 110 bp, synthetic construct
  source 1..110: mol_type = other DNA
accatcccttgcaaaactcatgcctaagacaatctttccacttggcctctttatactggatgaggcaaaggggtgtaaggaggcaaatgtctaccccatgccagtcctta

SEQ ID NO: 63391 - DNA, 110 bp, synthetic construct
  source 1..110: mol_type = other DNA
agctgcagggcctgaactgatttgagatgttttctaagttgttatattagctgtactgtgctagtaagatgacagggcatttccacatcttttgcctcatatgctcctca

SEQ ID NO: 63392 - DNA, 110 bp, synthetic construct
  source 1..110: mol_type = other DNA
ggacctttgttggggcccaagaagaaagagttggtaacatatgtcaattacatatcaataagattagaagaaaaaaaatttaaaataaaaataaactctttccccacctt

SEQ ID NO: 63393 - DNA, 110 bp, synthetic construct
  source 1..110: mol_type = other DNA
tcctgggtctgccttccagcacttcctacttctgagttatcttcctctcatacacttggtcatgcactgcctctttcctattcttggacatatccatcacttgtcctttt

SEQ ID NO: 63394 - DNA, 110 bp, synthetic construct
  source 1..110: mol_type = other DNA
ttggtcatgcactgcctctttcctattcttggacatatccatcacttgtccttttctctagccacctcaggttaaacagttcccttttttcatgtcccattaataaatca

SEQ ID NO: 63395 - DNA, 110 bp, synthetic construct
  source 1..110: mol_type = other DNA
atcacttgcatgcattacagtcaccactgggtcaaaacaaaccatgttctcaaaggaagtaccagtgtttctggtaatgagattcaagtgaaatctgtccctagaatcat

SEQ ID NO: 63396 - DNA, 110 bp, synthetic construct
  source 1..110: mol_type = other DNA
cccttatttcctgacacttgcgaccacagacatatgcgacagccacacacgcatacacactgacattcagtggacactgaaacaaatgcagcaacaaccagatatgcttc

SEQ ID NO: 63397 - DNA, 110 bp, synthetic construct
  source 1..110: mol_type = other DNA
tactgcagttagggaagcccctcgggctaggaagtgatttagctagaacacctccagggtggagaaacacagcagaacttcaaacagacagcctactggggagtagatgg

SEQ ID NO: 63398 - DNA, 110 bp, synthetic construct
  source 1..110: mol_type = other DNA
agggtggagaaacacagcagaacttcaaacagacagcctactggggagtagatgggaggaatccatggtgtatcatttagagatggagaatttagatatgaaatagaggc

SEQ ID NO: 63399 - DNA, 110 bp, synthetic construct
  source 1..110: mol_type = other DNA
atatttatctgtctctaacatcccttctcattgcttttttgtaaagtgaaaaacaggagtcacaggcatctcctcttttctaaatcaattaaggagttttatagactcat

SEQ ID NO: 63400 - DNA, 110 bp, synthetic construct
  source 1..110: mol_type = other DNA
ggagtcacaggcatctcctcttttctaaatcaattaaggagttttatagactcattgacactttctaatttttttaggtgctgagaggtcttgttatttcccttttattt

SEQ ID NO: 63401 - DNA, 110 bp, synthetic construct
  source 1..110: mol_type = other DNA
cgtgtcttcagtgagctctgcttgtacaaaaccctatcacccttctggcttcttttacctttttccaaattatttggttgtcctcctcctccaccccaatatacaagtca

SEQ ID NO: 63402 - DNA, 110 bp, synthetic construct
  source 1..110: mol_type = other DNA
tacctttttccaaattatttggttgtcctcctcctccaccccaatatacaagtcacctgctgtagaacagttcaaagtatagaaaactatatagcaggggatacaatcac

SEQ ID NO: 63403 - DNA, 110 bp, synthetic construct
  source 1..110: mol_type = other DNA
agttaataaatggaagagctaagactctgggccaggttttcctggctcccaagccatgctttcatcactatgcctccatttccagaacacattttcatttagcttccata

SEQ ID NO: 63404 - DNA, 110 bp, synthetic construct
  source 1..110: mol_type = other DNA
tttcttacagccctcctgttagttgcattcatttaaaaatcagctaaagggacccatcttccctgtgtcagatcactgggagcatctctgggcccatgatatatgccacc

SEQ ID NO: 63405 - DNA, 110 bp, synthetic construct
  source 1..110: mol_type = other DNA
gggagtacaaatgtagatttttttttagaagtttttgaactttaagaactaccattttaaagcaactagatatgctagctgtaggtcaacatatatgaacctcatggcaa

SEQ ID NO: 63406 - DNA, 110 bp, synthetic construct
  source 1..110: mol_type = other DNA
tgaactttaagaactaccattttaaagcaactagatatgctagctgtaggtcaacatatatgaacctcatggcaaccacaaatcaaaatcctacaatagatacacaagaa

SEQ ID NO: 63407 - DNA, 110 bp, synthetic construct
  source 1..110: mol_type = other DNA
ataacacaacaatgacctcaaacaacttataaaacatttgagtggaatcatatttttgaactaagaggtacttagcgataccctgctcctgtcctttcattttagaaaaa

SEQ ID NO: 63408 - DNA, 110 bp, synthetic construct
  source 1..110: mol_type = other DNA
ttgaactaagaggtacttagcgataccctgctcctgtcctttcattttagaaaaatgaaatttctatagcaggaggacttacttaaagtcatgtcaaattaacagaagaa

SEQ ID NO: 63409 - DNA, 110 bp, synthetic construct
  source 1..110: mol_type = other DNA
cccatcagtgtgacagggtatgttgggttaagcaaaagctaggattctgggcacctggggctgagtatttgtacatggagagagaggaggaactggagatagaggtctga

SEQ ID NO: 63410 - DNA, 110 bp, synthetic construct
  source 1..110: mol_type = other DNA
tggggctgagtatttgtacatggagagagaggaggaactggagatagaggtctgataccaaagtataaaagactatggctgtttggctaaattgagtctcaactagttaa

SEQ ID NO: 63411 - DNA, 110 bp, synthetic construct
  source 1..110: mol_type = other DNA
tttttctggaccactgccagggatctagatcttaacctcatgttccatcatttgagctgaaggttgtagctgatccatagaagttcagtaaacaaggaatagatttctga

SEQ ID NO: 63412 - DNA, 110 bp, synthetic construct
  source 1..110: mol_type = other DNA
tgactgggattcctcaggttatagcgtcacatgttgtcactctagactccagtaccaccaggctgtttccatgctaccaatcctaatttttcccagggtagccagcccca

SEQ ID NO: 63413 - DNA, 110 bp, synthetic construct
  source 1..110: mol_type = other DNA
cgacagtggcatccagcttttgaaatggctcccggaccaagacccaccacaggcacaatcagcttcctgagagggttcttcagtctttttgtccctactaagcagtttat

SEQ ID NO: 63414 - DNA, 110 bp, synthetic construct
  source 1..110: mol_type = other DNA
ctccctgccacctgtaggttgtgcaagaggcactacattacacttagtcctcttatgcccttatctcacacaatagttgcctggaaaccagtagcattcacaaaaagtgc

SEQ ID NO: 63415 - DNA, 110 bp, synthetic construct
  source 1..110: mol_type = other DNA
tgcccttatctcacacaatagttgcctggaaaccagtagcattcacaaaaagtgcctaatctcccctaaaagagcaagagacttctcaccacctgtctcctctatagagc

SEQ ID NO: 63416 - DNA, 110 bp, synthetic construct
  source 1..110: mol_type = other DNA
cagagaaactggcgatcagtaaagagctgataaatgtgtgaataagttgagcacctttcccacccggaatccatgcccatccctagccagaggcccagatccaaagcaga

SEQ ID NO: 63417 - DNA, 110 bp, synthetic construct
  source 1..110: mol_type = other DNA
aacacttctctgttttcgggagtggcccataaccgcaaacacatttgctaatgtagctagcctgcccgccctgggacagctggctgggccctgtgcctggggccaggcca

SEQ ID NO: 63418 - DNA, 110 bp, synthetic construct
  source 1..110: mol_type = other DNA
gaatcaaagatattattgagacatagaggaaagggattcataactgaaatatattcatgggtacttctaaagacacaaatctgaaagaaggatttgggttacccgccagt

SEQ ID NO: 63419 - DNA, 110 bp, synthetic construct
  source 1..110: mol_type = other DNA
tggaaataaaactcaccctttgcatgccggttctgactcttttgggaagtggaacggggagggttggtgtgaagttgtcttcacgcctgctagcttgaaagcaggagtct

SEQ ID NO: 63420 - DNA, 110 bp, synthetic construct
  source 1..110: mol_type = other DNA
taaataaacaagtgagagtacatcaaccaacaaagcttatgcaagcaaaggaaacaatccagactgagaaatgcaacctacagaatgggagaaaatacttgtgaaccata

SEQ ID NO: 63421 - DNA, 110 bp, synthetic construct
  source 1..110: mol_type = other DNA
aatccagactgagaaatgcaacctacagaatgggagaaaatacttgtgaaccatatatatgataaggggttaatcttcagaatatataagcaactcttacaactcaatag

SEQ ID NO: 63422 - DNA, 110 bp, synthetic construct
  source 1..110: mol_type = other DNA
tctaccttttgtgatgtagtagaaggaacactggatataatcaagatatctggattttaaactctgttctgctttgaggaagtcacctaataactctagacttaagtttt

SEQ ID NO: 63423 - DNA, 110 bp, synthetic construct
  source 1..110: mol_type = other DNA
gaattgttccacattccatattagccctgccagaaaagtttggaagccaaagccctggcaggaaacactcagcctggccatcagggttggggagagaaaagaatatcctg

SEQ ID NO: 63424 - DNA, 110 bp, synthetic construct
  source 1..110: mol_type = other DNA
ctctcgcctacctgggatggcttcatgcctcaccacagaccaagtcctgtgctcaccttgctgtgctcaatatcttggaaatccacatcgttcacagctaggacttggtc

SEQ ID NO: 63425 - DNA, 110 bp, synthetic construct
  source 1..110: mol_type = other DNA
acctgtctgactctgtaccttttgttgaaacagctagagtgtgagctgtttgaagacaaagatcattgtatatgatctcatatattgaattagttaaaacactcacagag

SEQ ID NO: 63426 - DNA, 110 bp, synthetic construct
  source 1..110: mol_type = other DNA
ggataaagaagttgtgggagacacacacacacactggcatattccatattcagccacaagaaagaaaattcctccgtcttgcaacaatatggataaactttgagggcatt

SEQ ID NO: 63427 - DNA, 110 bp, synthetic construct
  source 1..110: mol_type = other DNA
cctccgctatccccttgttgatcccttctccaggttaaacagctcctctgccggttcatacgcgatgattctgaagccctcgcacactcctggtctctgtcttttgtgcc

SEQ ID NO: 63428 - DNA, 110 bp, synthetic construct
  source 1..110: mol_type = other DNA
ttcatagtctctgcttctaggccagacctgggtccgattccacaggtgagccttgctcaggctcagatggcaactcagagcatagtgacagatgaattactacaggctgg

SEQ ID NO: 63429 - DNA, 110 bp, synthetic construct
  source 1..110: mol_type = other DNA
ctcaggctcagatggcaactcagagcatagtgacagatgaattactacaggctgggagtccgggagctgatgggcgggtagaaagcacccagaatttttaggtctggctt

SEQ ID NO: 63430 - DNA, 110 bp, synthetic construct
  source 1..110: mol_type = other DNA
agtgggaactcctgtttttgtaaagatttaactggcaggactggtttttgtttttaggatagctctttgctaatgaacacacatatacacatccacatattcacaaacac

SEQ ID NO: 63431 - DNA, 110 bp, synthetic construct
  source 1..110: mol_type = other DNA
aggatagctctttgctaatgaacacacatatacacatccacatattcacaaacacacccacatcccacaccacccacacaactgtggcagctctttctggccctccaaca

SEQ ID NO: 63432 - DNA, 110 bp, synthetic construct
  source 1..110: mol_type = other DNA
cagagataagagctgaaattaaggtaggagcagtgggaaggaaaagatgaagctgagcagaagagaacaatgatgaagacgataacaatacaggggatgcaagataatga

SEQ ID NO: 63433 - DNA, 110 bp, synthetic construct
  source 1..110: mol_type = other DNA
catttagtgccttataaagtacaatatatattctactcatttaagtttaattttcattgtatgtatccctctgatgaaatataacccccaacttaggacagggatcttgg

SEQ ID NO: 63434 - DNA, 110 bp, synthetic construct; identical to SEQ ID NO: 63433
  source 1..110: mol_type = other DNA

SEQ ID NO: 63435 - DNA, 110 bp, synthetic construct
  source 1..110: mol_type = other DNA
ttctgatttcaaaaggaattaaaacattatcgtggacacttgaaaatgtggtaagtcctaggaactgcatactatacacaaaggataagtcagatctgctaatacctccc

SEQ ID NO: 63436 - DNA, 110 bp, synthetic construct; identical to SEQ ID NO: 63435
  source 1..110: mol_type = other DNA

SEQ ID NO: 63437 - DNA, 110 bp, synthetic construct
  source 1..110: mol_type = other DNA
tagttggtttatagtgttgttaaaatcctctatatttcttggtaatttatcagttgttctatacattattaagagtgaattactggagttcccatcatgactcagaggtt

SEQ ID NO: 63438 - DNA, 110 bp, synthetic construct
  source 1..110: mol_type = other DNA
gttgttaaaatcctctatatttcttggtaatttatcagttgttctatacattattaagagtgaattactggagttcccatcatgactcagaggttaacgaacctgactag

SEQ ID NO: 63439 - DNA, 110 bp, synthetic construct
  source 1..110: mol_type = other DNA
ccaaccaccaaattggtgaagttggttttttttcccctggtaggttgcttcatttataaataggctggctttggtatgaaactaccttctgtctattgactaataccaaa

SEQ ID NO: 63440 - DNA, 110 bp, synthetic construct
  source 1..110: mol_type = other DNA
ataaataggctggctttggtatgaaactaccttctgtctattgactaataccaaaatgtcccaaatatttgacttcaatttgatgttacagtttatctgggaaggtgtta

SEQ ID NO: 63441 - DNA, 110 bp, synthetic construct
  source 1..110: mol_type = other DNA
ctgctaggccaccagggaactccctacatttgaacttttaaaaagaacttttgacatctataaactttaacttatttaatatgaacttatgtagtgagaatgtagttgat

SEQ ID NO: 63442 - DNA, 110 bp, synthetic construct; identical to SEQ ID NO: 63441
  source 1..110: mol_type = other DNA

SEQ ID NO: 63443 - DNA, 110 bp, synthetic construct
  source 1..110: mol_type = other DNA
tcttttccttgatgaactcactaactggaattgtgtcaactaccacctctctagtcctgggctcctttcagagcttgtcttgtattttgtattacaagctgaatatctct

SEQ ID NO: 63444 - DNA, 110 bp, synthetic construct
  source 1..110: mol_type = other DNA
cctgggctcctttcagagcttgtcttgtattttgtattacaagctgaatatctctgtcttaatattccactagcacctcaaacttaacatgcccaaaatgaaattttcat

SEQ ID NO: 63445 - DNA, 110 bp, synthetic construct
  source 1..110: mol_type = other DNA
ataatggacgcaagtattgaggcactatagccatagctacattcattaattaaaggtaagtagctttctggcttccaaagtgacctgcgtatacagaacaccatcttcag

SEQ ID NO: 63446 - DNA, 110 bp, synthetic construct; identical to SEQ ID NO: 63445
  source 1..110: mol_type = other DNA

SEQ ID NO: 63447 - DNA, 110 bp, synthetic construct
  source 1..110: mol_type = other DNA
cacaaggagctctgaagctcctcctcaatccagtgtgatctcttcaccagtgaagggacttcccagggcaggggaatctttcctccttcacagctccttccttggggcta

SEQ ID NO: 63448 - DNA, 110 bp, synthetic construct
  source 1..110: mol_type = other DNA
ggacttcccagggcaggggaatctttcctccttcacagctccttccttggggctaaggtcctgtcataattcttttttctttttgtcctaactggttacatgggtttttt

SEQ ID NO: 63449 - DNA, 110 bp, synthetic construct
  source 1..110: mol_type = other DNA
gccaagaactgaatctgagccacagctgcagcaatgctggatccttaatcctgcacaacagcaggaactcccaagcattactgatttaatatcattaatcttacttttct

SEQ ID NO: 63450 - DNA, 110 bp, synthetic construct
  source 1..110: mol_type = other DNA
caacagcaggaactcccaagcattactgatttaatatcattaatcttacttttctctccagttatcactacaaataattgttctcaatttttcatatttgtgggctttta

SEQ ID NO: 63451 - DNA, 110 bp, synthetic construct
  source 1..110: mol_type = other DNA
ccctataatttttctacttttgctcttgggctccaaagatctgaaatggcttccatatactcctttctcaatgtcatgttctaatcaaattttgtctttatggaaccttt

SEQ ID NO: 63452 - DNA, 110 bp, synthetic construct
  source 1..110: mol_type = other DNA
tatactcctttctcaatgtcatgttctaatcaaattttgtctttatggaacctttcccatgtaccaaaccttccaccattcacctgcaagttgtttctgcctcatttata

SEQ ID NO: 63453 - DNA, 110 bp, synthetic construct
  source 1..110: mol_type = other DNA
agactaaaaatagtactatcatatgacccagtaatttctcttctgggtatttatccaaaggaaataaaaacaccaactcaaacggatatatgcattttcatgttcaatgc

SEQ ID NO: 63454 - DNA, 110 bp, synthetic construct
  source 1..110: mol_type = other DNA
caaaggaaataaaaacaccaactcaaacggatatatgcattttcatgttcaatgcagcattatttacaacagccaagacgtggaaataacctaagtgtcctaccatggat

SEQ ID NO: 63455 - DNA, 110 bp, synthetic construct
  source 1..110: mol_type = other DNA
ggaagtatcatggatgctgagaaaagaggttgatgagtaggtcaagtctgcagaaggcagtaactggagatgcccagagcacgtgtatttcttcattcttaggaagattg

SEQ ID NO: 63456 - DNA, 110 bp, synthetic construct
  source 1..110: mol_type = other DNA
ggcagtaactggagatgcccagagcacgtgtatttcttcattcttaggaagattgaatgatgtaacacatgagactgcctttctgtaagtgcctttgcccttgcagaatt

SEQ ID NO: 63457 - DNA, 110 bp, synthetic construct
  source 1..110: mol_type = other DNA
gtagctgcaaatttgtgcttcatgggaaacaagtgtctgtataattctaattgtggaaacttgctccttctgccatttgagtagtcaaaggaaaagacatacacacaagc

SEQ ID NO: 63458 - DNA, 110 bp, synthetic construct
  source 1..110: mol_type = other DNA
gaaacttgctccttctgccatttgagtagtcaaaggaaaagacatacacacaagcatagcaactgatcagagaactgtggaaaaaaaaaacacgaatattccctcaattc

SEQ ID NO: 63459 - DNA, 110 bp, synthetic construct
  source 1..110: mol_type = other DNA
tttggatatcaaaacttaactgaacctcattttgttttagcattcatagttaatatactacagcatatttagccagtttgctgcatagtatcacagtgattaagaacact

SEQ ID NO: 63460 - DNA, 110 bp, synthetic construct
  source 1..110: mol_type = other DNA
tactacagcatatttagccagtttgctgcatagtatcacagtgattaagaacactgactctctagtcaacttgccaggcttaaatattgagacattgtggaaagttactt

SEQ ID NO: 63461 - DNA, 110 bp, synthetic construct
  source 1..110: mol_type = other DNA
ttacctttatgcatgtattgcttcatttgattatgctgcattaattctgtattcattcttcactctttttttgattctctttctctcttgcttctctgactggataattt

SEQ ID NO: 63462 - DNA, 110 bp, synthetic construct
  source 1..110: mol_type = other DNA
attgcttacagaatctggaaattacactgtacacctagggatacacagaaagattgcaggtagagagcatatgaaaagccttggcttctgcttttattggggttaaggac

SEQ ID NO: 63463 - DNA, 110 bp, synthetic construct; identical to SEQ ID NO: 63462
  source 1..110: mol_type = other DNA

SEQ ID NO: 63464 - DNA, 110 bp, synthetic construct
  source 1..110: mol_type = other DNA
tggtgctcaatcaatcctcattgaagagattaataaatggatgaaagagaataaaggaacaacacggtatgatttgtactgagcagaccttattactagggaacagacct

SEQ ID NO: 63465 - DNA, 110 bp, synthetic construct
  source 1..110: mol_type = other DNA
ggaacaacacggtatgatttgtactgagcagaccttattactagggaacagaccttattactaggccatacaactattgaatggagcaaggtacagaaactactgcacat

SEQ ID NO: 63466 - DNA, 110 bp, synthetic construct
  source 1..110: mol_type = other DNA
cttaggctggcagctgcagctctgattggattaccagcccaggaaccaccatatgcagtgggtgtagtcctaaaaagagaaaaagacaaaaaatattccaaaaatttaaa

SEQ ID NO: 63467 - DNA, 110 bp, synthetic construct; identical to SEQ ID NO: 63466
  source 1..110: mol_type = other DNA

SEQ ID NO: 63468 - DNA, 110 bp, synthetic construct
  source 1..110: mol_type = other DNA
aagctagaatccttgaacatttccaccatcttttggtaaggaaaaaattatgttctccttcctaactctcagtggcccaaacttaattataataagtgtgtctttgaaca

SEQ ID NO: 63469 - DNA, 110 bp, synthetic construct
  source 1..110: mol_type = other DNA
ccatcttttggtaaggaaaaaattatgttctccttcctaactctcagtggcccaaacttaattataataagtgtgtctttgaacactttattacacttatagcagttgaa

SEQ ID NO: 63470 - DNA, 110 bp, synthetic construct
  source 1..110: mol_type = other DNA
actgaacaaacagtaactaagaaccagctaattataaagcatcatggtagacactaaaggcataagaaaatgccttcaacaaggtcatttaaaatacaagaaataggaat

SEQ ID NO: 63471 - DNA, 110 bp, synthetic construct
  source 1..110: mol_type = other DNA
ggtagacactaaaggcataagaaaatgccttcaacaaggtcatttaaaatacaagaaataggaattcccattgtggctgagtggttagcgaacctgactagcatccatga

SEQ ID NO: 63472 - DNA, 110 bp, synthetic construct
  source 1..110: mol_type = other DNA
acaaggctaaatctttaatctctagaccatcatggaacttctgtttctctattgtgtttatagtttccttgatatgcaaaagcttatgtttgattaggtaccatttgttt

SEQ ID NO: 63473 - DNA, 110 bp, synthetic construct; identical to SEQ ID NO: 63472
  source 1..110: mol_type = other DNA

SEQ ID NO: 63474 - DNA, 110 bp, synthetic construct
  source 1..110: mol_type = other DNA
aagtctcatgaagttaactattagtgtcttaggaaggccatgtggtaatattcagaagcatttaacttgtgtgcaaagttttcgagctgatatcttcaacttattgttct

SEQ ID NO: 63475 - DNA, 110 bp, synthetic construct
  source 1..110: mol_type = other DNA
aagcatttaacttgtgtgcaaagttttcgagctgatatcttcaacttattgttctgtatagtaggctcccacttcagtctacaactttgttgtccttcacagagttcctc

SEQ ID NO: 63476 - DNA, 110 bp, synthetic construct
  source 1..110: mol_type = other DNA
atatcgagtatagttccctgtgctatacagtaggtcaaaaatacagttattatagatatttatgagctgtcaagcagtcatgaaacatctgggtttccacagactgcatg

SEQ ID NO: 63477 - DNA, 110 bp, synthetic construct; identical to SEQ ID NO: 63476
  source 1..110: mol_type = other DNA

SEQ ID NO: 63478 - DNA, 110 bp, synthetic construct
  source 1..110: mol_type = other DNA
caataaccctgagaagaagtcagagaagcatcattattaccatttaattgataggaaaaatgagacccaggtttggtaaataactgatccgatagtaaaaaaaattggca

SEQ ID NO: 63479 - DNA, 110 bp, synthetic construct; identical to SEQ ID NO: 63478
  source 1..110: mol_type = other DNA

SEQ ID NO: 63480 - DNA, 110 bp, synthetic construct
  source 1..110: mol_type = other DNA
agcaactggaggttgggtttaggggatgtgttgagtaggaatacttgatcttgcacaaaatattttttgattatagttctcagaggaactcactagattatgagtaattt

SEQ ID NO: 63481 - DNA, 110 bp, synthetic construct
  source 1..110: mol_type = other DNA
catcagtgaatagactaaccaggaatatgatcagcatgggacaaatttgaaaagtactagaagtcagttatacctaccagaccgctatggaacactcctcctaacaaaag

SEQ ID NO: 63482 - DNA, 110 bp, synthetic construct
  source 1..110: mol_type = other DNA
actagaagtcagttatacctaccagaccgctatggaacactcctcctaacaaaagtaagacacacattcttctggaatgcatatgaaacatatattagaatagataatac

SEQ ID NO: 63483 - DNA, 110 bp, synthetic construct
  source 1..110: mol_type = other DNA
ggtgattgtgtcaacttaaaaataatgtcttccaatcaatgaaataaacatgtctttccaattagaactttctctggatatgcctaggaatcggcttgctagatcatatg

SEQ ID NO: 63484 - DNA, 110 bp, synthetic construct
  source 1..110: mol_type = other DNA
ttaaaaataatgtcttccaatcaatgaaataaacatgtctttccaattagaactttctctggatatgcctaggaatcggcttgctagatcatatggctaggtctatattt

SEQ ID NO: 63485 - DNA, 110 bp, synthetic construct
  source 1..110: mol_type = other DNA
ggttggtggtgtggagacagcctgggggactaggaagtagtcagtagggttagcagtacggagacaccctgagggtttaggaagcagtgccacatgggtggagggagcaa

SEQ ID NO: 63486 - DNA, 110 bp, synthetic construct; identical to SEQ ID NO: 63485
  source 1..110: mol_type = other DNA

SEQ ID NO: 63487 - DNA, 110 bp, synthetic construct
  source 1..110: mol_type = other DNA
gatgtgatctctatgccatgttataaatcatatccctggggtttgggttggggcatctacattttataaagctacttaggtggtactggtgcatagtaaaaggtgactac

SEQ ID NO: 63488 - DNA, 110 bp, synthetic construct
  source 1..110: mol_type = other DNA
tctacattttataaagctacttaggtggtactggtgcatagtaaaaggtgactacctcctcttgacaattggaggagggagggtaagtataatattcccaaccagatttt

SEQ ID NO: 63489 - DNA, 110 bp, synthetic construct
  source 1..110: mol_type = other DNA
gtgtgcatctattaaccccagaaacccagaccataccactccctcccccaccctgttagcaaacacaagtctgtttaccaaggccatgattttattttctgtggaaaggt

SEQ ID NO: 63490 - DNA, 110 bp, synthetic construct; identical to SEQ ID NO: 63489
  source 1..110: mol_type = other DNA

SEQ ID NO: 63491 - DNA, 110 bp, synthetic construct
  source 1..110: mol_type = other DNA
agatcatctgaactactgtctcattcaccaaaaactgagacacttgggcagaggctgggcactgagacttcagttctagaggttagtccctgggagcaggctggtcttgg

SEQ ID NO: 63492 - DNA, 110 bp, synthetic construct; identical to SEQ ID NO: 63491
  source 1..110: mol_type = other DNA

SEQ ID NO: 63493 - DNA, 110 bp, synthetic construct
  source 1..110: mol_type = other DNA
aataaacaaaactcccaggaaacaaatgttgaggaccagacagcttcacagggggattctaacaaatatgtaaagaatgaatagctatttttattaagctattacaaatc

SEQ ID NO: 63494 - DNA, 110 bp, synthetic construct
  source 1..110: mol_type = other DNA
attctaacaaatatgtaaagaatgaatagctatttttattaagctattacaaatcattgaagagaaaggaatacttccaagcttacttagaaagccaccactggcctgat

SEQ ID NO: 63495 - DNA, 110 bp, synthetic construct
  source 1..110: mol_type = other DNA
cagctttttcctgagttgcagtgcccctggggctcagctgtatttacagcccatatctctgagtgtgagcaaaccactggggcccacacccaaggtagcagaagcacagg

SEQ ID NO: 63496 - DNA, 110 bp, synthetic construct
  source 1..110: mol_type = other DNA
tctctgagtgtgagcaaaccactggggcccacacccaaggtagcagaagcacaggaggctatacagaatggtggcaattagggcagtgatcatgaacatggagatcattc

SEQ ID NO: 63497 - DNA, 110 bp, synthetic construct
  source 1..110: mol_type = other DNA
taatcagcattgttgagcatcttttcatgtcttttgtgtccatcttgctgtcttctttgtatatatgtctattgtatttttaggtttgcagttactataacctttcaatg

SEQ ID NO: 63498 - DNA, 110 bp, synthetic construct
  source 1..110: mol_type = other DNA
gtgtccatcttgctgtcttctttgtatatatgtctattgtatttttaggtttgcagttactataacctttcaatgccagaggccagctctggcggccagggagtgtacac

SEQ ID NO: 63499 - DNA, 110 bp, synthetic construct
  source 1..110: mol_type = other DNA
gaggagtgatgggcagacacagtcaatcataaaggacaaagttagtatctcagcgtgagattttattctctctgtatacaaagatttgaaagccttctggcctactgcat

SEQ ID NO: 63500 - DNA, 110 bp, synthetic construct
  source 1..110: mol_type = other DNA
tactctgatataactatccatctactcaggcctgaattaatgtcatccattcgtttcatatgaattacagaaagagaacacacgattgatctcagcttgattagaaccag

SEQ ID NO: 63501 - DNA, 110 bp, synthetic construct
  source 1..110: mol_type = other DNA
tcatatgaattacagaaagagaacacacgattgatctcagcttgattagaaccagcattaaaatcttaatcagaagcaaagggctctgcttagatcagatcatctctatc

SEQ ID NO: 63502 - DNA, 110 bp, synthetic construct
  source 1..110: mol_type = other DNA
aaagacattttttcttcttagatagtaaaactctaaaccctattgaatcaacagctatgctatgagagaccctgagttctaaactgttggttttttgaaatagtatagga

SEQ ID NO: 63503 - DNA, 110 bp, synthetic construct
  source 1..110: mol_type = other DNA
aatcaacagctatgctatgagagaccctgagttctaaactgttggttttttgaaatagtataggatacatatatttgacattttcataactgcaagagaatgtggttagc

SEQ ID NO: 63504 - DNA, 110 bp, synthetic construct
  source 1..110: mol_type = other DNA
caaatatttatttctcaaagtaccaggttctgggatgtccaagatcaagacaccagtagacctggtgtctggtgagagcccattttctggcttgtagacagccaacttct

SEQ ID NO: 63505 - DNA, 110 bp, synthetic construct; identical to SEQ ID NO: 63504
  source 1..110: mol_type = other DNA

SEQ ID NO: 63506 - DNA, 110 bp, synthetic construct
  source 1..110: mol_type = other DNA
gaggtgacccggagctatgtggagcttcacagggctttccccaggttggggcagggctggagtcctgcaaattggcatgggagcttcttgccaggttggggcgcagcccg

SEQ ID NO: 63507 - DNA, 110 bp, synthetic construct
  source 1..110: mol_type = other DNA
taaaatttaataacaaaaagtgggatgggaaactaaacatgaagaccctggacttaacatctcatctacaagagaccaatccaagattactaagactgcctggctatcat

SEQ ID NO: 63508 - DNA, 110 bp, synthetic construct
  source 1..110: mol_type = other DNA
aacatctcatctacaagagaccaatccaagattactaagactgcctggctatcatgtaattatgtcatataactatttcattgttctttcgtatactcaaaaaggatatg

SEQ ID NO: 63509 - DNA, 110 bp, synthetic construct
  source 1..110: mol_type = other DNA
aataacaatattcattgaaataattccttaaataccatgataaatccttctctgattcccccaaacaaaagtgttatctccaacctctgaactctaataagactttgtct

SEQ ID NO: 63510 - DNA, 110 bp, synthetic construct
  source 1..110: mol_type = other DNA
ttcccccaaacaaaagtgttatctccaacctctgaactctaataagactttgtctgtatttctctcatggcatctatcatacaccccaccatgtattttacatagctgtg

SEQ ID NO: 63511 - DNA, 110 bp, synthetic construct
  source 1..110: mol_type = other DNA
cttgagtaagttattcatatgttttggacttctcttgtgttttttcagtctctttttaaaagctataagttaatcaacatatcttccacaatttcctgaggtagatcaca

SEQ ID NO: 63512 - DNA, 110 bp, synthetic construct
  source 1..110: mol_type = other DNA
cagtctctttttaaaagctataagttaatcaacatatcttccacaatttcctgaggtagatcacacatctattcaattttctatatacaatactcaggaaaacgccattt

SEQ ID NO: 63513 - DNA, 110 bp, synthetic construct
  source 1..110: mol_type = other DNA
aacaacaacaaaaatctggctgcaaaatttatgacaacacagcaatggaatgactgttgtaaatgagattagctgctgctgatagtgacaatactgggatagtgtttata

SEQ ID NO: 63514 - DNA, 110 bp, synthetic construct
  source 1..110: mol_type = other DNA
gttgtaaatgagattagctgctgctgatagtgacaatactgggatagtgtttataaatccacagaggctggagttcccatcctagcacagtggaaataatccgactagga

SEQ ID NO: 63515 - DNA, 110 bp, synthetic construct
  source 1..110: mol_type = other DNA
gtattgtcagaggtagtgaagggaaaactttcttaaatctgtaagcattagtggttttttttgttttttgttttttttttttgtcatgaggattgaagaagtttgagcag

SEQ ID NO: 63516 - DNA, 110 bp, synthetic construct
  source 1..110: mol_type = other DNA
tatgaatctataaggtgtaatatacaagatttctcactcttttttgatggaaagaaccttttgttttcagaacaaacatcccacgaaaaacactttgggaaatacagcta

SEQ ID NO: 63517 - DNA, 110 bp, synthetic construct
  source 1..110: mol_type = other DNA
accttttgttttcagaacaaacatcccacgaaaaacactttgggaaatacagctatagtggtaagaagttgctgagtttgtagtcagaaatcttgtatttaattcctcac

SEQ ID NO: 63518 - DNA, 110 bp, synthetic construct
  source 1..110: mol_type = other DNA
ggttatttctcccttgaattcttcacaaagcccattttttagcgacttcataatcctttgcacttttccctgttaatgtgcacaggctttggaaccagacaaataagtct

SEQ ID NO: 63519 - DNA, 110 bp, synthetic construct
  source 1..110: mol_type = other DNA
ctttgcacttttccctgttaatgtgcacaggctttggaaccagacaaataagtctgaaatctgaatctatctctgtgacacccgaaaaaatatttaatcattctgagttt

SEQ ID NO: 63520 - DNA, 110 bp, synthetic construct
  source 1..110: mol_type = other DNA
tatttgattccatttatacaaaatgccaaagtattcaatctatagagacagacaggagattattggatccctagggctagtacgttgcaggcattctagggaacaatttc

SEQ ID NO: 63521 - DNA, 110 bp, synthetic construct
  source 1..110: mol_type = other DNA
gagattattggatccctagggctagtacgttgcaggcattctagggaacaatttctgataaatgtgggttttcttttttattgataataatatccaaaaattagattgtg

SEQ ID NO: 63522 - DNA, 110 bp, synthetic construct
  source 1..110: mol_type = other DNA
acatatgtagaaaataaatatactacaaggcagaatgcagtaagtgtgagtgaaaggaagatagaaatgattacacaagtcttgaattaaaaatattatcctggagtgag

SEQ ID NO: 63523 - DNA, 110 bp, synthetic construct; identical to SEQ ID NO: 63522
  source 1..110: mol_type = other DNA

SEQ ID NO: 63524 - DNA, 110 bp, synthetic construct
  source 1..110: mol_type = other DNA
tgcaggttcaatacctggcctttatcagtgggttaaggctccagcattgccacaggctaagctgtcatgcaggccataaatgcggctcagatctagagttgctgtggctg

SEQ ID NO: 63525 - DNA, 110 bp, synthetic construct
  source 1..110: mol_type = other DNA
tggcctttatcagtgggttaaggctccagcattgccacaggctaagctgtcatgcaggccataaatgcggctcagatctagagttgctgtggctgtggcataggccagca

SEQ ID NO: 63526 - DNA, 110 bp, synthetic construct
  source 1..110: mol_type = other DNA
caaattcatcagaacagcaacaggatcatacatcatgaccaaatgcaatttatccctgagatgcaagatgcttcaacaaacacaaatctgtaaaatatgatacaccacat

SEQ ID NO: 63527 - DNA, 110 bp, synthetic construct
  source 1..110: mol_type = other DNA
tcatacatcatgaccaaatgcaatttatccctgagatgcaagatgcttcaacaaacacaaatctgtaaaatatgatacaccacattaagagaatgaaatataaaaatctc

SEQ ID NO: 63528 - DNA, 110 bp, synthetic construct
  source 1..110: mol_type = other DNA
tccactgtaattctttctctgttgcttgtgtagttgggagtggatataatacaaagtaaatcagcatggaaataaaggcctcaccagatggacacatattcatactgaag

SEQ ID NO: 63529 - DNA, 110 bp, synthetic construct
  source 1..110: mol_type = other DNA
gtaaatcagcatggaaataaaggcctcaccagatggacacatattcatactgaagagcttggtaattagttttacctctgctaatgtaaaagaaatgatgtcctcatagg

SEQ ID NO: 63530 - DNA, 110 bp, synthetic construct
  source 1..110: mol_type = other DNA
atctcccaaacagcacaaatatagatacagatacaaacacacagatagacacacattccagaggcttatattacataaatatagaaggttccttcaggcagagattactc

SEQ ID NO: 63531 - DNA, 110 bp, synthetic construct
  source 1..110: mol_type = other DNA
ttccagaggcttatattacataaatatagaaggttccttcaggcagagattactctttctggacaaatccaaatgccttatgtatcaaaagacaagcacttaaggatgca

SEQ ID NO: 63532 - DNA, 110 bp, synthetic construct
  source 1..110: mol_type = other DNA
aattgtttgatttactcattataaattattctcaatatgaaaagctcataagagatacctacaaggatggagaattttgactggcagtgtcaggagagccaaggacaaag

SEQ ID NO: 63533 - DNA, 110 bp, synthetic construct
  source 1..110: mol_type = other DNA
tacctacaaggatggagaattttgactggcagtgtcaggagagccaaggacaaaggagacacctctaataaatttttaaatggcattaagaaatgttgaaatctaattgg

SEQ ID NO: 63534 - DNA, 110 bp, synthetic construct
  source 1..110: mol_type = other DNA
aaataaaatttacattagaaagtgtgcatgtaccagtgaaactgacaacactaatggcatgaacttagccagaacccagaactcaagtcccagattgaacccacattctg

SEQ ID NO: 63535 - DNA, 110 bp, synthetic construct; identical to SEQ ID NO: 63534
  source 1..110: mol_type = other DNA

SEQ ID NO: 63536 - DNA, 110 bp, synthetic construct
  source 1..110: mol_type = other DNA
gtgagtataatgggatattaaaaaggtgtttagcctactgaatttgacatgaaaaggaagagtggtctctgaaatattggggatttatgtcactttgatgcaggagaagg

SEQ ID NO: 63537 - DNA, 110 bp, synthetic construct; identical to SEQ ID NO: 63536
  source 1..110: mol_type = other DNA

SEQ ID NO: 63538 - DNA, 110 bp, synthetic construct
  source 1..110: mol_type = other DNA
acaactcactattactcttagagatccactagtaatattttttcctttccccatgacattatgcatttctggtctagagttattagttccaaagggacaaattcttctat

SEQ ID NO: 63539 - DNA, 110 bp, synthetic construct
  source 1..110: mol_type = other DNA
acattatgcatttctggtctagagttattagttccaaagggacaaattcttctatcaggagacagaacaatgattcatgtgaattggaaattaatactgctacctggtta

SEQ ID NO: 63540 - DNA, 110 bp, synthetic construct
  source 1..110: mol_type = other DNA
ccctgccatcctgtaaactttgcaattgcacagctgctagactaaataaagaatctagattcaacaacagagacatcaatggtttattgcatagggtatctcataaggca

SEQ ID NO: 63541 - DNA, 110 bp, synthetic construct
  source 1..110: mol_type = other DNA
tgttgtttttatactttattcaacacactcatattttagtatcagcactattcatttccagaacactgttatcattacaaacggaaactctgttcccattaaacaatgac

SEQ ID NO: 63542 - DNA, 110 bp, synthetic construct
  source 1..110: mol_type = other DNA
ttccagaacactgttatcattacaaacggaaactctgttcccattaaacaatgactccccatttctctattatccttctactttctgtcaatcatccttctactttttgt

SEQ ID NO: 63543 - DNA, 110 bp, synthetic construct
  source 1..110: mol_type = other DNA
cttagctatgaggtccacataaactgttgccatttttacttcttgattagaaagatggatccacttgacaatgagaaactgtgggatttcttgaattagaactgttgtag

SEQ ID NO: 63544 - DNA, 110 bp, synthetic construct
  source 1..110: mol_type = other DNA
tggatccacttgacaatgagaaactgtgggatttcttgaattagaactgttgtaggtgaatttatagaagacatgatcagaataataatattatcataatcaatagttgc

SEQ ID NO: 63545 - DNA, 110 bp, synthetic construct
  source 1..110: mol_type = other DNA
atcttgacccttcccctattttaacatatttaattgattgttaccttcttgtattccatctgccatcaaccagaaagcctaaataggcaatctgaatttgggacaatatc

SEQ ID NO: 63546 - DNA, 110 bp, synthetic construct
  source 1..110: mol_type = other DNA
ccatctgccatcaaccagaaagcctaaataggcaatctgaatttgggacaatatcgtgcacattgagctgaagttttccaaaatagagacaaggagatgagacacagagt

SEQ ID NO: 63547 - DNA, 110 bp, synthetic construct
  source 1..110: mol_type = other DNA
tggatgaggaagatgtggtatatatatatagaatggaatactactcagccaaaaaacacctggaagggggctttaacaaagtcagagagaactatttgaaaatactagtt

SEQ ID NO: 63548 - DNA, 110 bp, synthetic construct
  source 1..110: mol_type = other DNA
acacctggaagggggctttaacaaagtcagagagaactatttgaaaatactagtttggtcttaaagtggctccaaaagctcagagaacatgcaaaaattcctatttttct

SEQ ID NO: 63549 - DNA, 110 bp, synthetic construct
  source 1..110: mol_type = other DNA
gtatagtcaggtagattttcccagcaagggttattagaaaccttagaaaaaatgtctagccagattggaaaattatgttttagtaattcactgcaattttcatgcccaca

SEQ ID NO: 63550 - DNA, 110 bp, synthetic construct
  source 1..110: mol_type = other DNA
ctagccagattggaaaattatgttttagtaattcactgcaattttcatgcccacagaggaagtccttcaataccaaaaatccttaatgagaaagacttaggttgttaagg

SEQ ID NO: 63551 - DNA, 110 bp, synthetic construct
  source 1..110: mol_type = other DNA
ggattcgtttctgctgtgccacaacagcaactcctggatcaacacttttatagtttatctcaaatttggcaaattttcatctgttacttttcaaaaattttttctctaag

SEQ ID NO: 63552 - DNA, 110 bp, synthetic construct; identical to SEQ ID NO: 63551
  source 1..110: mol_type = other DNA

SEQ ID NO: 63553 - DNA, 110 bp, synthetic construct
  source 1..110: mol_type = other DNA
ccaccgtcctctttatgataaggctgcgcagtcgcttctagagaccggcgcgccacattgggaagcttcagtaatgggattttacaagaccgaagcccgctgcggcgccc

SEQ ID NO: 63554 - DNA, 110 bp, synthetic construct
  source 1..110: mol_type = other DNA
agtttgtttggaatccttgagaaggacatcatagtcaagatagaatgatactaaaatgcctttgagagggaaaattaaaaagaggaataatacaaaatatagccctaata

SEQ ID NO: 63555 - DNA, 110 bp, synthetic construct; identical to SEQ ID NO: 63554
  source 1..110: mol_type = other DNA

SEQ ID NO: 63556 - DNA, 110 bp, synthetic construct
  source 1..110: mol_type = other DNA
atttggagtaccagatgagggcattattacttgtatagttatgttttcttagaatgccagaattatgttgccagaatttgtctctctgtctgccagtgctgaattgaaat

SEQ ID NO: 63557 - DNA, 110 bp, synthetic construct
  source 1..110: mol_type = other DNA
attacttgtatagttatgttttcttagaatgccagaattatgttgccagaatttgtctctctgtctgccagtgctgaattgaaatacagagaaagggttctgggtaaagg

SEQ ID NO: 63558 - DNA, 110 bp, synthetic construct
  source 1..110: mol_type = other DNA
atgcaaatatattatcttacagttctataggtcagaagtctgaagaacatgtcactgggctaaaatcaaggttttagcagggttctgttcctttctggatactctagggg

SEQ ID NO: 63559 - DNA, 110 bp, synthetic construct; identical to SEQ ID NO: 63558
  source 1..110: mol_type = other DNA

SEQ ID NO: 63560 - DNA, 110 bp, synthetic construct
  source 1..110: mol_type = other DNA
tttttgactcaaaatcattggctaacacttatctcatggccccacccaaatacaaaaaggccaggaagtacattcttaccatgtgtgcaaaagatggagagacagacata

SEQ ID NO: 63561 - DNA, 110 bp, synthetic construct
  source 1..110: mol_type = other DNA
aaaggccaggaagtacattcttaccatgtgtgcaaaagatggagagacagacatatttggcaaacaacactgataaacatggcctggttcaaacatattctaaacttagg

SEQ ID NO: 63562 - DNA, 110 bp, synthetic construct
  source 1..110: mol_type = other DNA
tctgtaaatctgaatttttacaaaataaatacttaaaaaaccctcaggcaaggttcttgggataccatcttggggcttgaatacttttgaacttccagtgtatgaaggca

SEQ ID NO: 63563 - DNA, 110 bp, synthetic construct
  source 1..110: mol_type = other DNA
cttgggataccatcttggggcttgaatacttttgaacttccagtgtatgaaggcattggatgtagaatctaggtaggggcacaggcatgccgtggataatgaaagaacca

SEQ ID NO: 63564 - DNA, 110 bp, synthetic construct
  source 1..110: mol_type = other DNA
ttacctctccaaggtataccttaaaaactcttttcacatatacatcaagagacatgtagaaaaatgtctatagctttgctcatataacaaatagatgagacaacctaaat

SEQ ID NO: 63565 - DNA, 110 bp, synthetic construct
  source 1..110: mol_type = other DNA
gtagaaaaatgtctatagctttgctcatataacaaatagatgagacaacctaaatgttcatcaacagtgaaatttataggagtttccgctgtggcagagtgggtaagaat

SEQ ID NO: 63566 - DNA, 110 bp, synthetic construct
  source 1..110: mol_type = other DNA
aaaaaaaaatatcttatggaattgcatatattcctgctggtgggaacaaatacctattccacagctctacagaggtgatggtaatttttgtatcaaataacatacataca

SEQ ID NO: 63567 - DNA, 110 bp, synthetic construct
  source 1..110: mol_type = other DNA
gctggtgggaacaaatacctattccacagctctacagaggtgatggtaatttttgtatcaaataacatacatacatttaaaaaaaactttcttaaagtttaaaagagtag

SEQ ID NO: 63568 - DNA, 110 bp, synthetic construct
  source 1..110: mol_type = other DNA
caaggtcttgtgcttcatgactctctgttacctaggtagatatctaattggagattcagtgctgaagttctctggtggctgtggggttaaagcactgaatcctaaccatt

SEQ ID NO: 63569 - DNA, 110 bp, synthetic construct
  source 1..110: mol_type = other DNA
atgttccaaacgtcacatcaccaaaaaatatctgctgagctcctactgcattattggtagcagtcagaatttagatggagttaaaataaagaagaaccaacacaatcacc

SEQ ID NO: 63570 - DNA, 110 bp, synthetic construct; identical to SEQ ID NO: 63569
  source 1..110: mol_type = other DNA

SEQ ID NO: 63571 - DNA, 110 bp, synthetic construct
  source 1..110: mol_type = other DNA
tatacaattgcactaccaattatttgataaaagaaacaggccaatttctattgaaaggaatagggtttcaaacattaaaaatacttcctctgaattacctggaaagcttg

SEQ ID NO: 63572 - DNA, 110 bp, synthetic construct
  source 1..110: mol_type = other DNA
aggaatagggtttcaaacattaaaaatacttcctctgaattacctggaaagcttgttaaattcagatcctcaggcttcacacaaaaagattctgtaccatagtggagact

SEQ ID NO: 63573 - DNA, 110 bp, synthetic construct
  source 1..110: mol_type = other DNA
aattggatgctaccttgcttacatggtttgcctgcaaatttgctaaggggaagctgagtgtagagagtccatcattctttatctacttcatttttacttcttttcatcca

SEQ ID NO: 63574 - DNA, 110 bp, synthetic construct
  source 1..110: mol_type = other DNA
tcagaccagagccagactctttccttacttacttgtaagggaatcaccagagagattcatatatcagaactcatttatatatactttatcctgcatagcctgtcgtatat

SEQ ID NO: 63575 - DNA, 110 bp, synthetic construct
  source 1..110: mol_type = other DNA
actctttccttacttacttgtaagggaatcaccagagagattcatatatcagaactcatttatatatactttatcctgcatagcctgtcgtatataaatattcatagaat

SEQ ID NO: 63576 - DNA, 110 bp, synthetic construct
  source 1..110: mol_type = other DNA
ctccctttcaggttaaaaatatctttcattagtcctgttagattctgagacattatctgaccctgtaaggatatacctgctctatgcttcttgttccctcttgtgttaga

SEQ ID NO: 63577 - DNA, 110 bp, synthetic construct
  source 1..110: mol_type = other DNA
tgttagattctgagacattatctgaccctgtaaggatatacctgctctatgcttcttgttccctcttgtgttagaattcttttttttttctttttctttttttaattgtt

SEQ ID NO: 63578 - DNA, 110 bp, synthetic construct
  source 1..110: mol_type = other DNA
aaatggaacattggaaagcactcaaatatgaaactgaaaaatttcattatttccctaagtaagagctatccccccttccaggaagaggttcagaaaacgctcttttctta

SEQ ID NO: 63579 - DNA, 110 bp, synthetic construct
  source 1..110: mol_type = other DNA
taagtaagagctatccccccttccaggaagaggttcagaaaacgctcttttcttaattggtatgccaaagtatatcactttgctaattatctttttaagtagtacaagtt

SEQ ID NO: 63580 - DNA, 110 bp, synthetic construct
  source 1..110: mol_type = other DNA
agcccagaaattcctctcacttaactgaagaactgaagtaatttatagtggaattttccttcctacatagacctaggctgttatgtctctggcataaacacccacacctt

SEQ ID NO: 63581 - DNA, 110 bp, synthetic construct
  source 1..110: mol_type = other DNA
ggaatttttaagtattgctttaaactgccaagggaataggcacctccttcaataggatagaatattaagggtgggcttataaatgtataatgtgagaggttatcctttga

SEQ ID NO: 63582 - DNA, 110 bp, synthetic construct
  source 1..110: mol_type = other DNA
aacatatttaatctcctcagtaagagtacccacattctaatatctagttctattttaaggttaacagaggcatgctcactaatggaaatactacatattgtatacttcat

SEQ ID NO: 63583 - DNA, 110 bp, synthetic construct; identical to SEQ ID NO: 63582
  source 1..110: mol_type = other DNA

SEQ ID NO: 63584 - DNA, 110 bp, synthetic construct
  source 1..110: mol_type = other DNA
cctaaaattttttatgacaccatgcccttatggatgccaatttaatcaacccgttcaacctggccctgtctaacaagcctcacagtattaattattctgtcacattcaga

SEQ ID NO: 63585 - DNA, 110 bp, synthetic construct
  source 1..110: mol_type = other DNA
attacacaaaaacaattaaaatcagtgatatcttccagctttttcccagtgaagaaaaacaattgctttaagaacatgttcaacctattcccttccaaaagagactctgg

SEQ ID NO: 63586 - DNA, 110 bp, synthetic construct
  source 1..110: mol_type = other DNA
aaaacaattgctttaagaacatgttcaacctattcccttccaaaagagactctgggttttatctttacaggttattttgacacagatccttacgtttcttactttttttt

SEQ ID NO: 63587 - DNA, 110 bp, synthetic construct
  source 1..110: mol_type = other DNA
tgttgaactgaataagcaatcagtcaaaatataaatgccctatagaaataataaatatagtcacatattaacttgctttacagattaactggggtacctctgacattgtc

SEQ ID NO: 63588 - DNA, 110 bp, synthetic construct
  source 1..110: mol_type = other DNA
tatagtcacatattaacttgctttacagattaactggggtacctctgacattgtctactattacttgtgttgtgtattttgaaggttcgagacttctatttccccctagg

SEQ ID NO: 63589 - DNA, 110 bp, synthetic construct
  source 1..110: mol_type = other DNA
tgtaccctcaaaacatatccttgatttgaccagttctcaaaatctccactgctaccactcacaggtccaagccaccatcctccaaattctgaattattttatcagtctct

SEQ ID NO: 63590 - DNA, 110 bp, synthetic construct
  source 1..110: mol_type = other DNA
cactcacaggtccaagccaccatcctccaaattctgaattattttatcagtctcttaactggtctcctggctttggccttcttactcctacagttgattcttcacacaac

SEQ ID NO: 63591 - DNA, 110 bp, synthetic construct
  source 1..110: mol_type = other DNA
tctgaaggatgctccaaagaggtaagggaggaatcaggatatgtaggagttttcgcaacaaaaaccagataatgggaacatcagctgattactggtccaagaaaaccaga

SEQ ID NO: 63592 - DNA, 110 bp, synthetic construct
  source 1..110: mol_type = other DNA
aacttgataatcaaagaaggcttttctgaagtagtgattggtaacctgaatccttaatataaagaaaccagctgtggggttggtcaagtggaaaacccttccaggctaag

SEQ ID NO: 63593 - DNA, 110 bp, synthetic construct
  source 1..110: mol_type = other DNA
aatataaagaaaccagctgtggggttggtcaagtggaaaacccttccaggctaagggagcagctaatactacagctttaacattggcaagctcttggcatgatggaaaaa

SEQ ID NO: 63594 - DNA, 110 bp, synthetic construct
  source 1..110: mol_type = other DNA
ctttatttgtactttatattgagtggcagggtgttgtggtaacaagagaaacaaaggcccattaacaagtagggctgggttgtttagagaagcagaattaggaaagaaga

SEQ ID NO: 63595 - DNA, 110 bp, synthetic construct
  source 1..110: mol_type = other DNA
ggcccattaacaagtagggctgggttgtttagagaagcagaattaggaaagaagactctggagccagattgtttgggcccaaaactcacttctaccacttcgtacctggt

SEQ ID NO: 63596 - DNA, 110 bp, synthetic construct
  source 1..110: mol_type = other DNA
attagatttactgtctgcaaagtactcatcattgagaattatagaccacttagaagattgtcaaggacaagttaaaactgaatataggtctctcaataggcatgtggaat

SEQ ID NO: 63597 - DNA, 110 bp, synthetic construct
  source 1..110: mol_type = other DNA
gattgtcaaggacaagttaaaactgaatataggtctctcaataggcatgtggaatcagagcagtgattccataagttctcagggatattttcctttcatggtaggaagag

SEQ ID NO: 63598 - DNA, 110 bp, synthetic construct
  source 1..110: mol_type = other DNA
ctcatttaaagcaggaggtgttatgtggaagatcacttaagcaaaccaaggtatctgtaaatgctagagaatttggtctaaaactctggagggatttatagaggactaag

SEQ ID NO: 63599 - DNA, 110 bp, synthetic construct
  source 1..110: mol_type = other DNA
tgtaaatgctagagaatttggtctaaaactctggagggatttatagaggactaaggattccacatgtgaaattgaggaggacagatgtctagaaaatactgttttattca

SEQ ID NO: 63600 - DNA, 110 bp, synthetic construct
  source 1..110: mol_type = other DNA
agcttccagccacagtcacagccacagccatgccagatttgagctgtgtctgtgccctactctgcatctcatgggcaatgtgtgatccccaacccactaagcagggccag

SEQ ID NO: 63601 - DNA, 110 bp, synthetic construct
  source 1..110: mol_type = other DNA
gatttgagctgtgtctgtgccctactctgcatctcatgggcaatgtgtgatccccaacccactaagcagggccagggatcaaacctgtaacctcatagatactattcggg

SEQ ID NO: 63602 - DNA, 110 bp, synthetic construct
  source 1..110: mol_type = other DNA
ttagaaactcccagatctgaagtggaagttatagctctgatggtcgtgcattgtacattgactttatggcaacttcattctatataaagaatgaaagggacaagtattga

SEQ ID NO: 63603 - DNA, 110 bp, synthetic construct
  source 1..110: mol_type = other DNA
ttattttatgatatttgatgcgaagactgacttaaaactgttccggttaatacatcacatttttcaaccatccagctttctctctctctcacccatgtagattgcctgta

SEQ ID NO: 63604 - DNA, 110 bp, synthetic construct
  source 1..110: mol_type = other DNA
tatagggaggaataaagttcaatgttatatataactagtaagaagagctgggactcaaatcttgtttgatctgattccaaattgcatgctctaaaccatcagagtaaact

SEQ ID NO: 63605 - DNA, 110 bp, synthetic construct
  source 1..110: mol_type = other DNA
ggttattacaaaatcttgagtatagttccctaggatattcagcaggtacttgtcttctgcccattttttaactgagtgttttgtggtttttgatattgagttgtataagg

SEQ ID NO: 63606 - DNA, 110 bp, synthetic construct
  source 1..110: mol_type = other DNA
agatgtttgttggaagaacttatttctgtgattttggacacttgatttttgtcatgatcctgagaatcaggcccctgtgtcctctgttcgcttcttccttgatgtctctc

SEQ ID NO: 63607 - DNA, 110 bp, synthetic construct
  source 1..110: mol_type = other DNA
gatcctgagaatcaggcccctgtgtcctctgttcgcttcttccttgatgtctctctattttccagacctggttatgtattttgtagtatctgtacagaagagggagttct

SEQ ID NO: 63608 - DNA, 110 bp, synthetic construct
  source 1..110: mol_type = other DNA
ctgtgcctgacaggatacaagggtagtaggtaggataggtactaatgaatgaatgaactatcagcctggatggagaagtatgcgaagtgagaaggaatataaacaagtat

SEQ ID NO: 63609 - DNA, 110 bp, synthetic construct
  source 1..110: mol_type = other DNA
aactatcagcctggatggagaagtatgcgaagtgagaaggaatataaacaagtattactgatgcctcacctgaccaccccatttaaatttgcaaaatctctccaacactc

SEQ ID NO: 63610 - DNA, 110 bp, synthetic construct
  source 1..110: mol_type = other DNA
atcacatagttttgggttgaattaagaaatcaaattagccctctcaatcttcatttgaataaacaacctcctcacaagctattcaattcaagcatcaagtaaatgcttcc

SEQ ID NO: 63611 - DNA, 110 bp, synthetic construct
  source 1..110: mol_type = other DNA
tgaataaacaacctcctcacaagctattcaattcaagcatcaagtaaatgcttccagcatcatgtaaatatatcctgtgcattctctggaattgccaatgtaagattcaa

SEQ ID NO: 63612 - DNA, 110 bp, synthetic construct
  source 1..110: mol_type = other DNA
tggaagcacaaatgaaagcccagtagcaaagcaggagaccacattctcattgactgggcagggtctctgaagctcgtcaccctaaaaggggagactagccctggggctga

SEQ ID NO: 63613 - DNA, 110 bp, synthetic construct
  source 1..110: mol_type = other DNA
gggcagggtctctgaagctcgtcaccctaaaaggggagactagccctggggctgacacactgcagcattcatgactcccttcccctctaattaggagatattggcactct

SEQ ID NO: 63614 - DNA, 110 bp, synthetic construct
  source 1..110: mol_type = other DNA
attccaactttaaggccttcccttctggttgaaaaacagaaatgtcttactgagtaaagaaatcttccctagaagatgatctcgtgcactttgcaatccggtctctccca

SEQ ID NO: 63615 - DNA, 110 bp, synthetic construct
  source 1..110: mol_type = other DNA
aaagaaatcttccctagaagatgatctcgtgcactttgcaatccggtctctcccacagtgctagtcgctagccaccaccacatcacacagatcttgtccagaaaactaag

SEQ ID NO: 63616 - DNA, 110 bp, synthetic construct
  source 1..110: mol_type = other DNA
aaatgagcaggactagatatatacttatttcatacgaaatgggtgtggcattttcatgggtgtagattaagatgcatggctcaagaaacgggatatgcacagctctaaag

SEQ ID NO: 63617 - DNA, 110 bp, synthetic construct
  source 1..110: mol_type = other DNA
ataaatgcatatttttatagtctaacattgtggtagtcaatgttggctctataccataatcacttggggaattaaaaaagagaaaacaaaacactcatgtgtgggtccca

SEQ ID NO: 63618 - DNA, 110 bp, synthetic construct
  source 1..110: mol_type = other DNA
tgtactgtatgttcttcgagaaataacgcaaataataaaagtgtgtgaattaacaatgtgggaaatgccttactcacttccactgactccattaagacagggggcatccc

SEQ ID NO: 63619 - DNA, 110 bp, synthetic construct; identical to SEQ ID NO: 63618
  source 1..110: mol_type = other DNA

SEQ ID NO: 63620 - DNA, 110 bp, synthetic construct
  source 1..110: mol_type = other DNA
attggccaaggggtcccagactcgcctcctcatccttcccgccattttcgcctcgttggcctgagtccaccgtctcccctctactcaggacctcacccctgcaacagggt

SEQ ID NO: 63621 - DNA, 110 bp, synthetic construct
  source 1..110: mol_type = other DNA
tgggccagagaaaagaccagtatccggtctaggcccaaggaagagaccaataccagatcttggtttaggtccaagaaaggaatctcagagtccagttctgggtctgaatg

SEQ ID NO: 63622 - DNA, 110 bp, synthetic construct
  source 1..110: mol_type = other DNA
ttaagactccatcttttcatgttgaaaacatttgcctaacagggctgctgtggggaagaagtgaggtgactgtgcttggtggacccttgttcccacctatgcatacagaa

SEQ ID NO: 63623 - DNA, 110 bp, synthetic construct
  source 1..110: mol_type = other DNA
taatgttcataacagcacttacaatcaccaagacatggaagcaacctaaatgtttatagacagataaatggataaagatgtggtatatataatggaatactactaagccg

SEQ ID NO: 63624 - DNA, 110 bp, synthetic construct
  source 1..110: mol_type = other DNA
atagacagataaatggataaagatgtggtatatataatggaatactactaagccgtaaaaagaatgaaatactaggagttcccattgtggctcagtgggttaagagccca

SEQ ID NO: 63625 - DNA, 110 bp, synthetic construct
  source 1..110: mol_type = other DNA
gatgttagaggaagttatgaaagattaggaccgaaaagtgttgacttgatacagcaattaaaaaggcaatgtgggaattcccatcgtggcgcagtggttaacgaatccga

SEQ ID NO: 63626 - DNA, 110 bp, synthetic construct; identical to SEQ ID NO: 63625
  source 1..110: mol_type = other DNA

SEQ ID NO: 63627 - DNA, 110 bp, synthetic construct
  source 1..110: mol_type = other DNA
tcaagaaccataagtcacagaaaatggtgcagccttctctgcccctggcttcatggcccattcactccagacagccctgcatgccgtttccatggagttgctccttctct

SEQ ID NO: 63628 - DNA, 110 bp, synthetic construct
  source 1..110: mol_type = other DNA
aagctgccagttagacttcagtgtgctcttaacatactagtttatgggctttacattgtatttaatccttttggactttcccaaactgcatgtttaaagtgagacaaagg

SEQ ID NO: 63629 - DNA, 110 bp, synthetic construct
  source 1..110: mol_type = other DNA
tagcttcattatcgctggtgctctccagtgggggatttcatttgatgtgtcacccaggtgggaccacatgtctccacggagctgcagctcagccagatcattcaagtttg

SEQ ID NO: 63630 - DNA, 110 bp, synthetic construct
  source 1..110: mol_type = other DNA
ttctgcatatattgagatgattatatggcttttatccttcaatgtgttgatatggtatatcatgttgattgatttatggatattgaaaagtccttgccggaattcctgtt

SEQ ID NO: 63631 - DNA, 110 bp, synthetic construct
  source 1..110: mol_type = other DNA
gttgatatggtatatcatgttgattgatttatggatattgaaaagtccttgccggaattcctgttgtggctcagcaggttaaggacctgatattgtcattgtgaggatgc

SEQ ID NO: 63632 - DNA, 110 bp, synthetic construct
  source 1..110: mol_type = other DNA
aggttatgtatcccatgaccaaggcaatggattcaactaacccattagtattctcaggagtggaacccatctggagctctttgtaaagttgagtggcagggccagacttg

SEQ ID NO: 63633 - DNA, 110 bp, synthetic construct
  source 1..110: mol_type = other DNA
gctcctaaatccaaaggggtgtggaagaggaggaggagcagcagtaacccttttccgtgacgtgccagagcggttctctaatctccacctccttcccggtgtaatcagtc

SEQ ID NO: 63634 - DNA, 110 bp, synthetic construct
  source 1..110: mol_type = other DNA
cgtgacgtgccagagcggttctctaatctccacctccttcccggtgtaatcagtcagcccggaggcatcaaactgttagcgatggagacgcagctgtaggtgatttccac

SEQ ID NO: 63635 - DNA, 110 bp, synthetic construct
  source 1..110: mol_type = other DNA
tttgtccactcatctgttggtggacacttgtgttgcttctatattttggcttgtaaatacaggttgtaagtaatactactatgaacattggagtttatatatctttacac

SEQ ID NO: 63636 - DNA, 110 bp, synthetic construct
  source 1..110: mol_type = other DNA
gttggtggacacttgtgttgcttctatattttggcttgtaaatacaggttgtaagtaatactactatgaacattggagtttatatatctttacacattagtattttggtt

SEQ ID NO: 63637 - DNA, 110 bp, synthetic construct
  source 1..110: mol_type = other DNA
aaagtcttctcttctaaatgtggatttcacttttcctctctttgctctcaaaaacactgttcctcctcacattatatttaaagcagttcactgttattatgtttttttat

SEQ ID NO: 63638 - DNA, 110 bp, synthetic construct
  source 1..110: mol_type = other DNA
ttaatggctaaaaagagcatgttttagcatcaagtgtcctctttagaagaattgctcagtgcaataatgtgagttgctgtttgccattgactggaagacagagggtttga

SEQ ID NO: 63639 - DNA, 110 bp, synthetic construct
  source 1..110: mol_type = other DNA
tggacttcatcacagcatggtgtaatctcaaccttgttggaattcttatgcaataatgttccacaatataaaaactgaaagcaaccaatctttgaattcctgcacttaga

SEQ ID NO: 63640 - DNA, 110 bp, synthetic construct
  source 1..110: mol_type = other DNA
attctccaaaataaaaacaaattatatttatgcaaaaattcatttttttaggagtttctcttgtggtacagccagttaaggatccagcgttgtcactgcagcagcttggg

SEQ ID NO: 63641 - DNA, 110 bp, synthetic construct; identical to SEQ ID NO: 63640
  source 1..110: mol_type = other DNA

SEQ ID NO: 63642 - DNA, 110 bp, synthetic construct
  source 1..110: mol_type = other DNA
agagaatcattgctctaggtcagggttggcaagcattttctgtaaagggccatattgtaaatattttaagacttgcaaaccaggcaatgtctatggcaactactcacctt

SEQ ID NO: 63643 - DNA, 110 bp, synthetic construct
  source 1..110: mol_type = other DNA
aaggatcaggcatggccacaagctggagcataggtcacagatgcagctcggatctggtattgccatgattgccatgcagttccaattcagtccctagactgggaacttcc

SEQ ID NO: 63644 - DNA, 110 bp, synthetic construct; identical to SEQ ID NO: 63643
  source 1..110: mol_type = other DNA

SEQ ID NO: 63645 - DNA, 110 bp, synthetic construct
  source 1..110: mol_type = other DNA
ctcctttcaccacagcatatgaaaattcctacttctctcaaagttcttaaaatcccttggatttcagctgtttcttattgaaacttcctatactctgataagtcactttc

SEQ ID NO: 63646 - DNA, 110 bp, synthetic construct
  source 1..110: mol_type = other DNA
aataaccttctaactggtttcctggtgcttacctcttggtgtcttcagatttcatatccccatcacttgtttgctgaggatatggaggaggaatacatccagaataaaca

SEQ ID NO: 63647 - DNA, 110 bp, synthetic construct
  source 1..110: mol_type = other DNA
acatgcttatagattagtaaatatatataattgtcttgcactggggataggtcatgaaacaaactgtttttcaagggaggagtcacgcactatgttcaaggttaagtgct

SEQ ID NO: 63648 - DNA, 110 bp, synthetic construct
  source 1..110: mol_type = other DNA
agagagagggaaggaagacctgatggataattttaaaagcctgttaactgttgacaacaaattgggcagaaattagaggtttttaagcaaggaggtcaatattaatatta

SEQ ID NO: 63649 - DNA, 110 bp, synthetic construct; identical to SEQ ID NO: 63648
  source 1..110: mol_type = other DNA

SEQ ID NO: 63650 - DNA, 110 bp, synthetic construct
  source 1..110: mol_type = other DNA
aaaaaaaaaaaaaagtgcctataatatgctgctacaatagacccaccttagggcaaaggacacacatacattgaaagtgaggaaaaagatatttcatgcaaatagaagtg

SEQ ID NO: 63651 - DNA, 110 bp, synthetic construct
  source 1..110: mol_type = other DNA
aaggacacacatacattgaaagtgaggaaaaagatatttcatgcaaatagaagtgacaagaaagcagaaattccaatatccacatcagaccagactttaaaacaaagtcc

SEQ ID NO: 63652 - DNA, 110 bp, synthetic construct
  source 1..110: mol_type = other DNA
aacactaccatgccaaatttggatgggacttttgagttcaccaagtacttttgcagacattgtcttatctgagcttgtaaagtattattactatcctcattacatatatg

SEQ ID NO: 63653 - DNA, 110 bp, synthetic construct
  source 1..110: mol_type = other DNA
agaacttcgattgagaccgcgagtgcggggagggaaccccctggagcgggcttgcagtaaaggcgccccctgggcacccaggtcgctccaaagtcaaggaaaggcaaagg

SEQ ID NO: 63654 - DNA, 110 bp, synthetic construct
  source 1..110: mol_type = other DNA
tttcttcacaggaagaccatttgtgtagttcagagccccactgcatgtagtccatttcttttttaaaaaatttttattacagtttgtttatgatgttgtattagtttcag

SEQ ID NO: 63655 - DNA, 110 bp, synthetic construct
  source 1..110: mol_type = other DNA
tggaaaacttgaagagctccaaagcacttacagtgtttaaaaggttccaaatggtttattatgacattgacaaacatcgtaaatatgcaatttgcatttttaaatttctg

SEQ ID NO: 63656 - DNA, 110 bp, synthetic construct
  source 1..110: mol_type = other DNA
tctagattggtgtatgagagtagaatggtatgtacagacaaggggaggttaccaaaggatctgaggatagggaggtatcaaacttcagtgagactaacctagagatttat

SEQ ID NO: 63657 - DNA, 110 bp, synthetic construct
  source 1..110: mol_type = other DNA
gttgcttctgttttctattcgtacttatgatcagcttcctagaatgccagcttaaggaccacggcaatttttgcctctcttacatttgcttcatatctcgtgccttgagc

SEQ ID NO: 63658 - DNA, 110 bp, synthetic construct
  source 1..110: mol_type = other DNA
tgggccaagaaccacagtcgcggcagccgtgcctgtgatttctgtcacaaagatcacaatacatactgccaaatcacacataatttcaagacacattatagttgtagagc

SEQ ID NO: 63659 - DNA, 110 bp, synthetic construct
  source 1..110: mol_type = other DNA
agaataggggtccccaaacaggtccacaatctagggatataaggaaagactcagctgctgtcagggccagtccctaccccagggtggcccactctctctgtgggcataaa

SEQ ID NO: 63660 - DNA, 110 bp, synthetic construct; identical to SEQ ID NO: 63659
  source 1..110: mol_type = other DNA

SEQ ID NO: 63661 - DNA, 110 bp, synthetic construct
  source 1..110: mol_type = other DNA
gcaaaaagtatatatatactcatcatctgttgctgcaataaagtcccacgtctctgacctatgagtctcgtgtctttctagttctgtaccttgaacagagaagtttgcag

SEQ ID NO: 63662 - DNA, 110 bp, synthetic construct; identical to SEQ ID NO: 63661
  source 1..110: mol_type = other DNA

SEQ ID NO: 63663 - DNA, 110 bp, synthetic construct
  source 1..110: mol_type = other DNA
ctttttctaaaggaaaagtaagtgttagatccttcaggaaaaggtaggtgttgagatccttcttgccccaagtgtgatcaaaggactggcagctcttttgctatggagaa

SEQ ID NO: 63664 - DNA, 110 bp, synthetic construct
  source 1..110: mol_type = other DNA
atccttcttgccccaagtgtgatcaaaggactggcagctcttttgctatggagaacctcaggccccaccttaaaactactgaatctgaatttgcagtttaacagttgtcc

SEQ ID NO: 63665 - DNA, 110 bp, synthetic construct
  source 1..110: mol_type = other DNA
ttacttcttgcctctggatcaagtccaaactccctagctttccccaaaggactctcaagaactgacccctttttacctctataactttatcgcttgtactctgggttcca

SEQ ID NO: 63666 - DNA, 110 bp, synthetic construct
  source 1..110: mol_type = other DNA
tacttttctttctttttctttttccttttttttttttttttttttgtttttgtttttttttttgccttgtccatggcttgcagaagttcccaggtcagagatcgaacctg

SEQ ID NO: 63667 - DNA, 110 bp, synthetic construct; identical to SEQ ID NO: 63666
  source 1..110: mol_type = other DNA

SEQ ID NO: 63668 - DNA, 110 bp, synthetic construct
  source 1..110: mol_type = other DNA
ttaagtcccacagagggaatgaaagggcttcagttagcacctctttccttctaagggctagactttcctattaacgatttctgtgagctatatttgccagtcaggtaaca

SEQ ID NO: 63669 - DNA, 110 bp, synthetic construct
  source 1..110: mol_type = other DNA
ggctagactttcctattaacgatttctgtgagctatatttgccagtcaggtaacaatctgagaagtttctgctgttcctgtgacagcaaagaaatgctttggcaggaatc

SEQ ID NO: 63670 - DNA, 110 bp, synthetic construct
  source 1..110: mol_type = other DNA
agtcatatggcttacattaaggggatgtattttgctcgagatccagactataaccatgaagttttttagctggttttgcaaaaacataatccctcattagaacagcaaaa

SEQ ID NO: 63671 - DNA, 110 bp, synthetic construct
  source 1..110: mol_type = other DNA
tcgagatccagactataaccatgaagttttttagctggttttgcaaaaacataatccctcattagaacagcaaaatttaacatgaatagtaaagcagactcatcgaaaca

SEQ ID NO: 63672 - DNA, 110 bp, synthetic construct
  source 1..110: mol_type = other DNA
ggagcagtgagaggtattagggatggtggaaaaccgacattcccttacaagtaacttgtagggtgtttaagcaaggcaggaccagcttcctcaagctgcggatgcttcta

SEQ ID NO: 63673 - DNA, 110 bp, synthetic construct
  source 1..110: mol_type = other DNA
ttgtagggtgtttaagcaaggcaggaccagcttcctcaagctgcggatgcttctactgacaaagaaggctcatgggggagttcccgtcgtcgtggctcagtggttaacga

SEQ ID NO: 63674 - DNA, 110 bp, synthetic construct
  source 1..110: mol_type = other DNA
tagtgccaagaaggaagccagctcctaaatccttccgcctgcagtaaccgggtgagaggaaaaggaagaaagagagctttgcgacagaaccttctggattgttacaactg

SEQ ID NO: 63675 - DNA, 110 bp, synthetic construct
  source 1..110: mol_type = other DNA
gaggaaaaggaagaaagagagctttgcgacagaaccttctggattgttacaactgggttccaggcaggaaggtaatgtctggtgtgcttaaagctatgggaagccccagc

SEQ ID NO: 63676 - DNA, 110 bp, synthetic construct; identical to SEQ ID NO: 63674
  source 1..110: mol_type = other DNA

SEQ ID NO: 63677 - DNA, 110 bp, synthetic construct; identical to SEQ ID NO: 63675
  source 1..110: mol_type = other DNA

SEQ ID NO: 63678 - DNA, 110 bp, synthetic construct
  source 1..110: mol_type = other DNA
ccctcgaagccctttgctgcctaagcccagcctgcctctccaacctccagtgccctctgcaccccctcccctgcatctcccctgtagggacccctactctgttaataggc

SEQ ID NO: 63679 - DNA, 110 bp, synthetic construct
  source 1..110: mol_type = other DNA
tctgcaccccctcccctgcatctcccctgtagggacccctactctgttaataggccatgtctttcacatgtcatcttttcagagttgtgggcttctgaagcccacccgca

SEQ ID NO: 63680 - DNA, 110 bp, synthetic construct
  source 1..110: mol_type = other DNA
atactacttaggttcttaatccactgagccacaacgggaacgctctgctttttaattgacataaaaaatgggcccatatcaatgcactaggtcaatgtcatatcattata

SEQ ID NO: 63681 - DNA, 110 bp, synthetic construct
  source 1..110: mol_type = other DNA
ttgacataaaaaatgggcccatatcaatgcactaggtcaatgtcatatcattatattgtttagaattggtagaaagttatagaactgtggggactgatgcaatttaattc

SEQ ID NO: 63682 - DNA, 110 bp, synthetic construct
  source 1..110: mol_type = other DNA
ccccattaaacacatctccctaatttcaatttctggaacatttgcaacgtgctcgctctgctgctgcattttgtccaggaatgtttttcttctttgctctccacacagta

SEQ ID NO: 63683 - DNA, 110 bp, synthetic construct
  source 1..110: mol_type = other DNA
aataggtgaattttaagcaaagaacaaggacatgtgatcaagtcagacatgcaaaggcactcatcaactccgtgagaatcataaggcatacattttggatccacactcac

SEQ ID NO: 63684 - DNA, 110 bp, synthetic construct
  source 1..110: mol_type = other DNA
ggcactcatcaactccgtgagaatcataaggcatacattttggatccacactcacatcaacagtctctacagaatttatccggcatcagcacctggctgagagtttataa

SEQ ID NO: 63685 - DNA, 110 bp, synthetic construct
  source 1..110: mol_type = other DNA
ggacagtatcaagaagacaacctacagattgggagaaaatatttgcaaacaatgctactgataagggattaatttctaagatgtacacatagttcatacagcttaatata

SEQ ID NO: 63686 - DNA, 110 bp, synthetic construct; identical to SEQ ID NO: 63685
  source 1..110: mol_type = other DNA

SEQ ID NO: 63687 - DNA, 110 bp, synthetic construct
  source 1..110: mol_type = other DNA
tctctgccatgtgaggattcaacaagaaatagcagtctgcaacccagaagaggactctcaattgaatctgatcatgctggaacgctgacctcagattcccagcctctaga

SEQ ID NO: 63688 - DNA, 110 bp, synthetic construct
  source 1..110: mol_type = other DNA
tctcaattgaatctgatcatgctggaacgctgacctcagattcccagcctctagaattgtgaagaataaatctctgttgtttataagtcacccagtttatggtactttgt

SEQ ID NO: 63689 - DNA, 110 bp, synthetic construct
  source 1..110: mol_type = other DNA
taaccaaggaaagagaaggctgaagagctctcctgaggatcagaagaattaagtactgatacatgctacaccacggataaatcctgaaagtattatgctaaatgaaagaa

SEQ ID NO: 63690 - DNA, 110 bp, synthetic construct
  source 1..110: mol_type = other DNA
agctctcctgaggatcagaagaattaagtactgatacatgctacaccacggataaatcctgaaagtattatgctaaatgaaagaagccagacacagaaggccacatgttc

SEQ ID NO: 63691 - DNA, 110 bp, synthetic construct
  source 1..110: mol_type = other DNA
gcattttctttcatctcagttctgtcccatacatgccatctgactggttattactttctgatgagttgacagtcaatcaaaatgaaatatttgcttccctgaatctgtct

SEQ ID NO: 63692 - DNA, 110 bp, synthetic construct
  source 1..110: mol_type = other DNA
tttagtcaatttgcctatcaaaatgcttgcactaatatataactccccaacaatatattagtacccatttctctacactcttaagaaatcctgaaagtcatcatgctttt

SEQ ID NO: 63693 - DNA, 110 bp, synthetic construct; identical to SEQ ID NO: 63692
  source 1..110: mol_type = other DNA

SEQ ID NO: 63694 - DNA, 110 bp, synthetic construct
  source 1..110: mol_type = other DNA
ggctgtcgctcccgaattgggataaaaaggttggagtagaggaagacaaccttggatctaagtcagatggctactgggaggatcatggtcctctttggactttctggccc

SEQ ID NO: 63695 - DNA, 110 bp, synthetic construct
  source 1..110: mol_type = other DNA
atctaagtcagatggctactgggaggatcatggtcctctttggactttctggcccaccagaacaaagaaaccagtaccctcgactcagaggtaacttaaaagcgaaaaaa

SEQ ID NO: 63696 - DNA, 110 bp, synthetic construct
  source 1..110: mol_type = other DNA
aggcttctgcaggaaagtaaccaagatgagacacgaattaatgattcattggatgcaggtggcaagagggcagtatcaaaaatgccttcccgggagttccctttgtggct

SEQ ID NO: 63697 - DNA, 110 bp, synthetic construct
  source 1..110: mol_type = other DNA
cagattcagttgatatatttgtggattgctcatcaggtgtaaagatagcaaagacagggctggaatgaaggctctcaccccccaggagtgtccccctgccttggggcact

SEQ ID NO: 63698 - DNA, 110 bp, synthetic construct
  source 1..110: mol_type = other DNA
gcgagttgcccagagctctgcatggttccttccattccccagccaccccctcctccgtttgcgttgaagaagggattgcacaggttgatggagaaaagacttcctaaaga

SEQ ID NO: 63699 - DNA, 110 bp, synthetic construct
  source 1..110: mol_type = other DNA
cgtttgcgttgaagaagggattgcacaggttgatggagaaaagacttcctaaagagcatggagcattctgcatggatttgggttttgttgttgtactaagtgccgtgcct

SEQ ID NO: 63700 - DNA, 110 bp, synthetic construct
  source 1..110: mol_type = other DNA
cgctcagtgtctcctcctggccctggctcctacccctcaacactcacacatcttcccaaagagcagagcacctgagaataccacgtggccaaggaattcagaaagagcgg

SEQ ID NO: 63701 - DNA, 110 bp, synthetic construct
  source 1..110: mol_type = other DNA
ccaaagagcagagcacctgagaataccacgtggccaaggaattcagaaagagcgggtgaagacttgccagccaataactgtgcgagggagctggtcttttaggacttctc

SEQ ID NO: 63702 - DNA, 110 bp, synthetic construct
  source 1..110: mol_type = other DNA
ccgtagctctgtctccacaccggtgcatttactcctcccagttcacagcatctcctccactggggcctgcaggtaccctgccgtccaggacagcactgtcccctggcttg

SEQ ID NO: 63703 - DNA, 110 bp, synthetic construct
  source 1..110: mol_type = other DNA
tccactggggcctgcaggtaccctgccgtccaggacagcactgtcccctggcttgtgatcttacacgtaacttgcagggagggtgcactggctgttcattggaacttgga

SEQ ID NO: 63704 - DNA, 110 bp, synthetic construct
  source 1..110: mol_type = other DNA
atgagatttttcagtctttgatttggtttcccatcagcaacttcctgtgattgaggctgagcccttctgccaggtaaaggcatcggctccacagcaagaaaagtcagaga

SEQ ID NO: 63705 - DNA, 110 bp, synthetic construct
  source 1..110: mol_type = other DNA
gctgagcccttctgccaggtaaaggcatcggctccacagcaagaaaagtcagagaagttcccaggagccttttcttcctaccttgtgtcttgggtcttagattgttgata

SEQ ID NO: 63706 - DNA, 110 bp, synthetic construct; identical to SEQ ID NO: 63704
  source 1..110: mol_type = other DNA

SEQ ID NO: 63707 - DNA, 110 bp, synthetic construct; identical to SEQ ID NO: 63705
  source 1..110: mol_type = other DNA

SEQ ID NO: 63708 - DNA, 110 bp, synthetic construct
  source 1..110: mol_type = other DNA
gagtttgggaggagaaacacactcctgaccgatgccccagcaccctgtgggctgtgtacccacaccccgcctcatctcatcctctcttcattacgaccattgtgacaagc

SEQ ID NO: 63709 - DNA, 110 bp, synthetic construct
  source 1..110: mol_type = other DNA
gggaatccactgagatataggacaggtgattatactcattttatagaagaggaaccaatgagttgtaaaatacaactaatctctagcaactagtgttagaacacagctcc

SEQ ID NO: 63710 - DNA, 110 bp, synthetic construct
  source 1..110: mol_type = other DNA
caatgagttgtaaaatacaactaatctctagcaactagtgttagaacacagctcccctgacttctagttactctggttactctctctctgtgaccatttatgatagatgc

SEQ ID NO: 63711 - DNA, 110 bp, synthetic construct
  source 1..110: mol_type = other DNA
gctagatgccggcaacacagaaacaatcccactaggttctccaccccaggcgctctctcccgcctagagggccaaacaggacattacaactttgtgggatgggaagcaag

SEQ ID NO: 63712 - DNA, 110 bp, synthetic construct
  source 1..110: mol_type = other DNA
tctcccgcctagagggccaaacaggacattacaactttgtgggatgggaagcaagataagggaagagcaaagtgttgtggaagtagactaagatggctattgtcccaggg

SEQ ID NO: 63713 - DNA, 110 bp, synthetic construct
  source 1..110: mol_type = other DNA
atcctcactcttttttttttttttttcccccctccttctgcacttggccttgtaaaagccacagaacttcccgcctcaaagtgagctggggagagaagacccaaacggcc

SEQ ID NO: 63714 - DNA, 110 bp, synthetic construct
  source 1..110: mol_type = other DNA
ccttctccacacgaatgtgaagtcctgaagctgctttaccaagcacggacttcttttaaagtctactgcaagtctctaagggtaaagagacagaaaactcaaggtatttg

SEQ ID NO: 63715 - DNA, 110 bp, synthetic construct
  source 1..110: mol_type = other DNA
ttaaagtctactgcaagtctctaagggtaaagagacagaaaactcaaggtatttgcatcgactgtttgaaaaaaatctacttacaaatgtctttgtaccaccacgcaaag

SEQ ID NO: 63716 - DNA, 110 bp, synthetic construct
  source 1..110: mol_type = other DNA
gggatcaaacccgcatcctcatgaatatgaatcgggtttgttaaccactgagccacaataggaactccaacatgtggatcttgagggggaacataatatcacccataaca

SEQ ID NO: 63717 - DNA, 110 bp, synthetic construct; identical to SEQ ID NO: 63716
  source 1..110: mol_type = other DNA

SEQ ID NO: 63718 - DNA, 110 bp, synthetic construct
  source 1..110: mol_type = other DNA
ggatccgtcattgccgtgagctgtggtataagtcgtagactcggctcggatcctgcgttgctgcagctgtgtcatgggctggcggctgcagctccatttcaacccctagc

SEQ ID NO: 63719 - DNA, 110 bp, synthetic construct; identical to SEQ ID NO: 63718
  source 1..110: mol_type = other DNA

SEQ ID NO: 63720 - DNA, 110 bp, synthetic construct
  source 1..110: mol_type = other DNA
gatgttgagcatcttttcatgtacctgttggccatctgtctgtcttctttagaaacatctctattcgcatcttttgcttttttaaaataggattgtttgtttatttattt

SEQ ID NO: 63721 - DNA, 110 bp, synthetic construct; identical to SEQ ID NO: 63720
  source 1..110: mol_type = other DNA

SEQ ID NO: 63722 - DNA, 110 bp, synthetic construct
  source 1..110: mol_type = other DNA
aatctggcatttattctgtagactcttccacattccagatttggctgattacttcctcgaggtgctattttacttgtttctctatttcctgtggactgcaaagggagcta

SEQ ID NO: 63723 - DNA, 110 bp, synthetic construct
  source 1..110: mol_type = other DNA
gaagaataatcaggtgtcaactgtagggtattggttctaagtacaatacagatttatccaagagggatcccagagaaggatggtatgtgggttcttcaaaattttcacat

SEQ ID NO: 63724 - DNA, 110 bp, synthetic construct
  source 1..110: mol_type = other DNA
atccaagagggatcccagagaaggatggtatgtgggttcttcaaaattttcacataggacagcacggtttatctgcactaagaatatgcttagatagcaagataaggaag

SEQ ID NO: 63725 - DNA, 110 bp, synthetic construct
  source 1..110: mol_type = other DNA
aagtacattttaaatttcagaataactttagatttatggaaaagttgcaaaggcagtacagagtttgtgtacttctcatccagtttcccctactgttcccttcctatttt

SEQ ID NO: 63726 - DNA, 110 bp, synthetic construct; identical to SEQ ID NO: 63725
  source 1..110: mol_type = other DNA

SEQ ID NO: 63727 - DNA, 110 bp, synthetic construct
  source 1..110: mol_type = other DNA
cacttagcaaagagccagcctgatcccaagccctctttcctgtgctggctctttctctctttgagggccctgtcctgacgatgtccctcttattggggctggggcatcca

SEQ ID NO: 63728 - DNA, 110 bp, synthetic construct
  source 1..110: mol_type = other DNA
caaaggaggaaatgatggtcttcccagggagatgcaattttctgggggtaccatataccactcaacctttcccgacacccaacgagcagcctacaaggggtgctaggctg

SEQ ID NO: 63729 - DNA, 110 bp, synthetic construct
  source 1..110: mol_type = other DNA
tcaacccctagcctgggaccctccatacgccgggggtgagggcctaaaaagatgccccctcaaaagtaccatcatattgcccttcaaaaagctattccagtttacattgc

SEQ ID NO: 63730 - DNA, 110 bp, synthetic construct; identical to SEQ ID NO: 63729
  source 1..110: mol_type = other DNA

SEQ ID NO: 63731 - DNA, 110 bp, synthetic construct
  source 1..110: mol_type = other DNA
ttttttaaaactttttttgggtgtttatgcagcatgcagaatttctcgggccatggattgaccccgtactgcagcagtgacccgagctacggcagtgacaatgctggatc

SEQ ID NO: 63732 - DNA, 110 bp, synthetic construct
  source 1..110: mol_type = other DNA
gattgaccccgtactgcagcagtgacccgagctacggcagtgacaatgctggatccttaaactgctaggccaccagggaactcctacctttttcactttttccctgttgg

SEQ ID NO: 63733 - DNA, 110 bp, synthetic construct
  source 1..110: mol_type = other DNA
tgccacagctgtaaccagacccacagcagtgacaatgctggatccttaacctgcttagccaccaggggattcccatcttttgtcttttctatcaagattggtttacttac

SEQ ID NO: 63734 - DNA, 110 bp, synthetic construct
  source 1..110: mol_type = other DNA
tagccaccaggggattcccatcttttgtcttttctatcaagattggtttacttactttacaataacttgtattgtttgttcacttctgaaacgaccttcatatagatata

SEQ ID NO: 63735 - DNA, 110 bp, synthetic construct
  source 1..110: mol_type = other DNA
cagaattttctcttgtgttttttctttttttttttttttcccctccatgactggttttttcttattctggtcctgggctttaatggaggggcctttataaggttcattcc

SEQ ID NO: 63736 - DNA, 110 bp, synthetic construct
  source 1..110: mol_type = other DNA
tttttcttattctggtcctgggctttaatggaggggcctttataaggttcattcctcacccctataatcgtcctctcttcagccaggagacctcctgagaccttgagaac

SEQ ID NO: 63737 - DNA, 110 bp, synthetic construct
  source 1..110: mol_type = other DNA
caaactttcctctttctttacatgcctcataattttttgttgaagtgtggacattttagataatgtattgtagccagtctgaatactaattctcttgctctccaaggcct

SEQ ID NO: 63738 - DNA, 110 bp, synthetic construct
  source 1..110: mol_type = other DNA
ttagataatgtattgtagccagtctgaatactaattctcttgctctccaaggcctgtatgcttgttcatttgcttaatgagtttgctagactgttttagtgaaatctatt

SEQ ID NO: 63739 - DNA, 110 bp, synthetic construct
  source 1..110: mol_type = other DNA
taagtttacaatctaaaattagttgtttgagggccgtttttaaatgaaaaataactaaatatgttgtatttttcagggtgatgatggaattccagggccaccaggaccaa

SEQ ID NO: 63740 - DNA, 110 bp, synthetic construct
  source 1..110: mol_type = other DNA
taaatatgttgtatttttcagggtgatgatggaattccagggccaccaggaccaaaagggatcagagtaagtgatgtttgctgtatcagttgctttgttggtcgaaacag

SEQ ID NO: 63741 - DNA, 110 bp, synthetic construct
  source 1..110: mol_type = other DNA
aaactttgggaacagaggcaggcaaaggttttcttcttttttactttttattagggtatagttgatgtacagtgttgagccagtttcttctgtacagcatagtgacacag

SEQ ID NO: 63742 - DNA, 110 bp, synthetic construct
  source 1..110: mol_type = other DNA
gtatagttgatgtacagtgttgagccagtttcttctgtacagcatagtgacacagtcatacacacacacacacacacacatatatatgttatatgtaattaatatataat

SEQ ID NO: 63743 - DNA, 110 bp, synthetic construct
  source 1..110: mol_type = other DNA
tagttagtgagttgttaagaaataagggtagcattaaaaggtcagatggtagtttgttttacaaatgaggcaatttatgagacagtgtccttgttagtcaaaaatcataa

SEQ ID NO: 63744 - DNA, 110 bp, synthetic construct
  source 1..110: mol_type = other DNA
gttttacaaatgaggcaatttatgagacagtgtccttgttagtcaaaaatcataattaatataatacagtgcaaactctggacagggaatcaataggcagaagtttgagt

SEQ ID NO: 63745 - DNA, 110 bp, synthetic construct
  source 1..110: mol_type = other DNA
aaaaagaaatagcttattttttagctccgtccatttccatggcatctaataattcttttcagtaatgtgttacatcatttacgtaaagttgaactgaaacaaaccagctt

SEQ ID NO: 63746 - DNA, 110 bp, synthetic construct; identical to SEQ ID NO: 63745
  source 1..110: mol_type = other DNA

SEQ ID NO: 63747 - DNA, 110 bp, synthetic construct
  source 1..110: mol_type = other DNA
ctgtctgactttttatttttattttgaaaatcctgctgcattgtcgagtagccgtggccaaagtgcatctttttattcttttggagcttccaagtcaaagactatgtgac

SEQ ID NO: 63748 - DNA, 110 bp, synthetic construct
  source 1..110: mol_type = other DNA
tatctcctcttgcataattttttgtctctgggggttaaaacctttatgcaattcttactgttgctttagtgaggtttcaggaggaagaaaaataaacataggcatgcagt

SEQ ID NO: 63749 - DNA, 110 bp, synthetic construct
  source 1..110: mol_type = other DNA
acccatcaacttctgaagaggttttctatatttagaaaactgtcagtgtaatcaggctcatggtttagctatagatgtcaaaattcaggtttctagcctcccttgcagct

SEQ ID NO: 63750 - DNA, 110 bp, synthetic construct
  source 1..110: mol_type = other DNA
tatcattattgtcattatttcagggcataagttttcggtttattaaaaccaaaaattacgtccctccagggtactatcaagtgcagttcaagattaccagaccatctcta

SEQ ID NO: 63751 - DNA, 110 bp, synthetic construct
  source 1..110: mol_type = other DNA
ttacgtccctccagggtactatcaagtgcagttcaagattaccagaccatctctatggcctttatacattgcaacttcaaccctgtaatatttaatccctcagggtactt

SEQ ID NO: 63752 - DNA, 110 bp, synthetic construct
  source 1..110: mol_type = other DNA
aatagtggctcttccttggctatggcacaatgaaagtacttcgggccaatagcccttgccccagttcataaactggtgtttccgtatcaggagagaccagccaaggggac

SEQ ID NO: 63753 - DNA, 110 bp, synthetic construct
  source 1..110: mol_type = other DNA
ttgccccagttcataaactggtgtttccgtatcaggagagaccagccaaggggacctcagatactgccacccccttcactgagcattaggctcatagaagggggtcttgc

SEQ ID NO: 63754 - DNA, 110 bp, synthetic construct
  source 1..110: mol_type = other DNA
cctcgtgaatatagatgcaaaaatccttaacaaaatgtttagaattcagcaatatgtaatgagaattatatcctataaccaaatgggatttattccaggggtgcaaggct

SEQ ID NO: 63755 - DNA, 110 bp, synthetic construct
  source 1..110: mol_type = other DNA
gtaatgagaattatatcctataaccaaatgggatttattccaggggtgcaaggctggttcatgttagaaaataaatcactgtataaagtctgcaatattaataggctaaa

SEQ ID NO: 63756 - DNA, 110 bp, synthetic construct
  source 1..110: mol_type = other DNA
tgtctctggtgactctccaacctgtatattcttcctttcatatgctaatctgcctgtcaacacacaggaacccaaatttgagcccacgttgaatgagtttacaatttatg

SEQ ID NO: 63757 - DNA, 110 bp, synthetic construct
  source 1..110: mol_type = other DNA
gcttggcctgcagcatatccaaactagaaaggagatgggatagcaggattgacctgtgcacactactatatataaaagagataggttacaaggacctactgtacagcaca

SEQ ID NO: 63758 - DNA, 110 bp, synthetic construct
  source 1..110: mol_type = other DNA
cacaacctgaacatcagtactggaagccctgactctgccaatacccagtgcctgaaatcttcttcctggagccagccctattacagacatgagtttgctctctctcttgc

SEQ ID NO: 63759 - DNA, 110 bp, synthetic construct
  source 1..110: mol_type = other DNA
ctccaatacgctgggcctttcactttcctcggaatacagacagaaagaagcctcgctcgatacccctatttatgcgctcagattccttacaatgcacccctcctgatcat

SEQ ID NO: 63760 - DNA, 110 bp, synthetic construct
  source 1..110: mol_type = other DNA
gtagcttgcacactatctagaggcatgctgaccaacatggaaatgaaattaaaagttgaattcttcagtcacattaaccacatctcaaatgttcaatggccacacgtgac

SEQ ID NO: 63761 - DNA, 110 bp, synthetic construct
  source 1..110: mol_type = other DNA
gcaaacaaagtacatgttcacatcttttgtcccagtagaagtatgtgggagttcacgtcgtggctcagtggttaaggaacccgaagcgtatccatgaggacacaggttcg

SEQ ID NO: 63762 - DNA, 110 bp, synthetic construct; identical to SEQ ID NO: 63761
  source 1..110: mol_type = other DNA

SEQ ID NO: 63763 - DNA, 110 bp, synthetic construct
  source 1..110: mol_type = other DNA
ggaaaataactttatagtgaagaaacttcacaaatacgatcttacacaggtggtcaagataaacaccattagtgataagtcatgttgatagccttagatacgatgtgaag

SEQ ID NO: 63764 - DNA, 110 bp, synthetic construct
  source 1..110: mol_type = other DNA
aagataaacaccattagtgataagtcatgttgatagccttagatacgatgtgaagagaatggcactgcataccttaaaaccccccaaatccagtctaatcatgagaataa

SEQ ID NO: 63765 - DNA, 110 bp, synthetic construct
  source 1..110: mol_type = other DNA
catcctcctgcatgatcctgccacccagcagtaaccaatatttacacggtagcatatttctctccccacctttattgctgtatattttcgtgacatggttgagatcctac

SEQ ID NO: 63766 - DNA, 110 bp, synthetic construct
  source 1..110: mol_type = other DNA
atttctctccccacctttattgctgtatattttcgtgacatggttgagatcctacctcgtcaaaacaacagctactattttgttgtctgctttcccccctgaagtagcat

SEQ ID NO: 63767 - DNA, 110 bp, synthetic construct
  source 1..110: mol_type = other DNA
gcccacactcacacctacgcttctactgtttccatgacaacagggggggcactgacactcttctgtctcttacacagaatagcgctcctgatttgcccactgttagtcct

SEQ ID NO: 63768 - DNA, 110 bp, synthetic construct
  source 1..110: mol_type = other DNA
cactcttctgtctcttacacagaatagcgctcctgatttgcccactgttagtcctttgcttgtacggttccttggagtctcctggatcagttgcccaaacaagattccag

SEQ ID NO: 63769 - DNA, 110 bp, synthetic construct
  source 1..110: mol_type = other DNA
actaactctaagcaagcaaacaagtaaattaacaaacctccaggccaacccatgatcaaatagaaatgtaaaataaaatcctactagacgttggatttctatatcttttc

SEQ ID NO: 63770 - DNA, 110 bp, synthetic construct
  source 1..110: mol_type = other DNA
acctccaggccaacccatgatcaaatagaaatgtaaaataaaatcctactagacgttggatttctatatcttttctttggacaactatctccatgaaatgtttacaagat

SEQ ID NO: 63771 - DNA, 110 bp, synthetic construct
  source 1..110: mol_type = other DNA
cattcccaccaacaatgcactagggtttccttccctccacatccttgccaacacttgttatctctagtctccttgatagtagccatgcaaagaggtgtgtggtgatatct

SEQ ID NO: 63772 - DNA, 110 bp, synthetic construct
  source 1..110: mol_type = other DNA
ccacctttcagttctcctgaggctgagtttgtcttgcactaggattctcatgggatgcctggtttattaccataaaacctaccttttattgagccagcttgaataggact

SEQ ID NO: 63773 - DNA, 110 bp, synthetic construct
  source 1..110: mol_type = other DNA
tgcctggtttattaccataaaacctaccttttattgagccagcttgaataggactgttttctttcgataaaaattgtcagatctacacttgtctttccatttctttcttt

SEQ ID NO: 63774 - DNA, 110 bp, synthetic construct
  source 1..110: mol_type = other DNA
gccccaacttagggagaagccccaacatcccaccagccacctaggccatcagcttgggggccatctttgacctctcctcttactcctgctgattcctgtccatatcagtt

SEQ ID NO: 63775 - DNA, 110 bp, synthetic construct
  source 1..110: mol_type = other DNA
gggggccatctttgacctctcctcttactcctgctgattcctgtccatatcagttacttagtcctggtgattcgatgtccttatctgctttcaaacctgccccgccctcc

SEQ ID NO: 63776 - DNA, 110 bp, synthetic construct
  source 1..110: mol_type = other DNA
agggatcgaacctgcatcctgtatcctcatggatactagttggattcgtttctgctttgccccaatgggaacccctgcatttataattttgctgggtatttccaaaccca

SEQ ID NO: 63777 - DNA, 110 bp, synthetic construct
  source 1..110: mol_type = other DNA
tttgccccaatgggaacccctgcatttataattttgctgggtatttccaaacccatgaaatttataccaatttaaatgcttctgagcaatgtgggagaggtctgtttcca

SEQ ID NO: 63778 - DNA, 110 bp, synthetic construct
  source 1..110: mol_type = other DNA
tgatccaagagctggttcccccttgaaagttcaccgagacccagggaatactaactgcactgtgcactgttatgtgaggcccggtggcgggtcctgttagttgttgttgt

SEQ ID NO: 63779 - DNA, 110 bp, synthetic construct
  source 1..110: mol_type = other DNA
tgcactgtgcactgttatgtgaggcccggtggcgggtcctgttagttgttgttgttgtgttgtttttcctttttttggccaccccacactatatgaagtcctcgggccag

SEQ ID NO: 63780 - DNA, 110 bp, synthetic construct
  source 1..110: mol_type = other DNA
gctaatgtcttttctggaaggatctgttttacactctgctactggtttactggttaccgagtgacccaaaattgcaggaaaacttacagaaatgaaatgtatgcacattt

SEQ ID NO: 63781 - DNA, 110 bp, synthetic construct
  source 1..110: mol_type = other DNA
accgagtgacccaaaattgcaggaaaacttacagaaatgaaatgtatgcacatttcccccccgccccagtaaaaatcttttacatcaagcaaggctctacctcatcaaga

SEQ ID NO: 63782 - DNA, 110 bp, synthetic construct
  source 1..110: mol_type = other DNA
aaaaatgccaaattacaacatcaaaatataaaagcaaatttggtttacaatgaatctacttacacagaagtacccaatgtagtcagggcctttgaaagaaataaagtagg

SEQ ID NO: 63783 - DNA, 110 bp, synthetic construct
  source 1..110: mol_type = other DNA
ctacttacacagaagtacccaatgtagtcagggcctttgaaagaaataaagtaggtctgttagctatttccagtaactcaaaaagtctaatagcaagtgaacatttgtaa

SEQ ID NO: 63784 - DNA, 110 bp, synthetic construct
  source 1..110: mol_type = other DNA
ttcacgaaatcctttctttgagtttgaaagccattctggaactagtgtcttccaaaaagactaacattgtgctcttaaaaccacccagcaaaatatgtgagatccctggt

SEQ ID NO: 63785 - DNA, 110 bp, synthetic construct
  source 1..110: mol_type = other DNA
aaagactaacattgtgctcttaaaaccacccagcaaaatatgtgagatccctggtgatatctacacataaatttctaggctaaagtattcgtaaagatctataaaattag

SEQ ID NO: 63786 - DNA, 110 bp, synthetic construct
  source 1..110: mol_type = other DNA
agtttttaaaaatacattttgttcactgcaatggaaaaccacacttgttgatgtttaatggccaagtctcttttatgtgctatggtctatacaaaatgtaggactgcatt

SEQ ID NO: 63787 - DNA, 110 bp, synthetic construct
  source 1..110: mol_type = other DNA
taatggccaagtctcttttatgtgctatggtctatacaaaatgtaggactgcattaacttcaaaggtggtgagaagattaaaataaaaagttcatgggacatgacatgcc

SEQ ID NO: 63788 - DNA, 110 bp, synthetic construct
  source 1..110: mol_type = other DNA
ggccctgacctctttccccaaactcacttttcagtcctttgctcagagcagacgtgcttaccagacgcacacggatacctttcgcacaacgtacttgcctggccacttgc

SEQ ID NO: 63789 - DNA, 110 bp, synthetic construct
  source 1..110: mol_type = other DNA
gcttaccagacgcacacggatacctttcgcacaacgtacttgcctggccacttgcacccccactggagatttgtttcaatgggagaattaattcttgggtcaacgtggct

SEQ ID NO: 63790 - DNA, 110 bp, synthetic construct
  source 1..110: mol_type = other DNA
atgaactacttcctagattgtttttgtgcatgagacaggatcgaaaaaaattaaaaaggcttctcgttctctgggtggagagtgagcctttcagatcttccccagcttgg

SEQ ID NO: 63791 - DNA, 110 bp, synthetic construct
  source 1..110: mol_type = other DNA
aaggcttctcgttctctgggtggagagtgagcctttcagatcttccccagcttggtatttctcagcagatggaacgtcaacccagatgcagacccatcctggtcagcctc

SEQ ID NO: 63792 - DNA, 110 bp, synthetic construct
  source 1..110: mol_type = other DNA
tactggcaccagcaagctgtaggttggaattcttagcctacataatggaaagttgagaggtgctttctgaagaacaaggactgaaaaataggatgtatcatgaaaataac

SEQ ID NO: 63793 - DNA, 110 bp, synthetic construct
  source 1..110: mol_type = other DNA
agaggtgctttctgaagaacaaggactgaaaaataggatgtatcatgaaaataactatgtctttaatagaaatgaatgatatataccccacatctatttcctcctataga

SEQ ID NO: 63794 - DNA, 110 bp, synthetic construct
  source 1..110: mol_type = other DNA
tcatcagatacatttcccaccttctgacaggcaagtgtcttatcaatgtggctaaagttgttgctatttcttgctcattaggtacagtcaacatgccatcaatgtaactg

SEQ ID NO: 63795 - DNA, 110 bp, synthetic construct
  source 1..110: mol_type = other DNA
agttgttgctatttcttgctcattaggtacagtcaacatgccatcaatgtaactgaccagggtggtactttatggaagggaaagttgatcaagatccctgcaaactgaaa

SEQ ID NO: 63796 - DNA, 110 bp, synthetic construct
  source 1..110: mol_type = other DNA
gacactggcttgggtttcaacacagcttcggttcataaggcacagtatgcctgaccttgtcagatggatgaactctacaacagctgctgttcccagtgcctatcagctac

SEQ ID NO: 63797 - DNA, 110 bp, synthetic construct
  source 1..110: mol_type = other DNA
cagaagtggccttcttaatcccagtggaagtggcctctagatgccagtggcctgtctacccatggaggttttggctttttcatctccatctgaggggatcaagcctgtat

SEQ ID NO: 63798 - DNA, 110 bp, synthetic construct
  source 1..110: mol_type = other DNA
cctatgggaccaacaaagctctccctccttcccaaatgtggtccggattcaggaagccaaaggggccctctggtgggtgatacagacctgaagcccgatggcttcatcca

SEQ ID NO: 63799 - DNA, 110 bp, synthetic construct
  source 1..110: mol_type = other DNA
gccaaaggggccctctggtgggtgatacagacctgaagcccgatggcttcatccagatgccaacatactggtgcactctgcagcttagaagtccaagtcctaaatgtccc

SEQ ID NO: 63800 - DNA, 110 bp, synthetic construct
  source 1..110: mol_type = other DNA
gggctataaacagtatttaggggccgctgcggactgcctgaaagtgtcctattgttatttctgtctggaagtttcccttctggggaattagggagatggagcgggttggg

SEQ ID NO: 63801 - DNA, 110 bp, synthetic construct
  source 1..110: mol_type = other DNA
tatttctgtctggaagtttcccttctggggaattagggagatggagcgggttgggtggaagatggaggaaggagaaccgctggggaagaaagaggcgaactggtttacct

SEQ ID NO: 63802 - DNA, 110 bp, synthetic construct
  source 1..110: mol_type = other DNA
ggcagcacccactcctaacttttcttgtgaaaacagctttctgcaattaaagcatcttctccagacctcctcagatgtgacaccaatcgagtgagcatctttgcccatag

SEQ ID NO: 63803 - DNA, 110 bp, synthetic construct
  source 1..110: mol_type = other DNA
caagtgttaaagttgggcgggggggggggggggagaccttctggaccattcagctcaacctcttcaggtcacagaagaaaccaatggagggaggggccagggaggtgatg

SEQ ID NO: 63804 - DNA, 110 bp, synthetic construct
  source 1..110: mol_type = other DNA
caacctcttcaggtcacagaagaaaccaatggagggaggggccagggaggtgatgtatccaaggtcacacagctaataaatgataagtttgggattctggttcagatttc

SEQ ID NO: 63805 - DNA, 110 bp, synthetic construct
  source 1..110: mol_type = other DNA
gtgaaacaggaactattgttatccccgttttacagaggaggaaactgaggctcggaaaacttagctacattgcccagtcatacagccacaacatgagccaagcccagacg

SEQ ID NO: 63806 - DNA, 110 bp, synthetic construct
  source 1..110: mol_type = other DNA
gaaagaaagaaaagcagctttctttgattctactgcaaaggatggctgaatatcttcatatacagaagcagcatttggatccccaagcttgtagcatgaatgtctatcaa

SEQ ID NO: 63807 - DNA, 110 bp, synthetic construct
  source 1..110: mol_type = other DNA
tcatatacagaagcagcatttggatccccaagcttgtagcatgaatgtctatcaagctaagacatgtgccaactcagtgaccaaagctttatcatagtagctgatagata

SEQ ID NO: 63808 - DNA, 110 bp, synthetic construct
  source 1..110: mol_type = other DNA
ggaaacgcctgtccgagaggggagattcgtagcatggtgaggctgcaagtgccttgtgacgttcatctggtgcaaaccttccatttggatgaggaaaatgaggaccagag

SEQ ID NO: 63809 - DNA, 110 bp, synthetic construct
  source 1..110: mol_type = other DNA
gtgacgttcatctggtgcaaaccttccatttggatgaggaaaatgaggaccagagaagtgcagtaagctgcctgaggccccacagcttccccatggcggaacagaagtca

SEQ ID NO: 63810 - DNA, 110 bp, synthetic construct
  source 1..110: mol_type = other DNA
atattaatcaggaaggccccttacttctgctgctgttataggaacttaaagcagtaggtttaggagttccctgatggctcagtaggttaaggatccagcgttgtcactcc

SEQ ID NO: 63811 - DNA, 110 bp, synthetic construct
  source 1..110: mol_type = other DNA
gccccttacttctgctgctgttataggaacttaaagcagtaggtttaggagttccctgatggctcagtaggttaaggatccagcgttgtcactccagtggctcaggtcac

SEQ ID NO: 63812 - DNA, 110 bp, synthetic construct
  source 1..110: mol_type = other DNA
aggatccatttctcccctccccatctctcccaggctgtgcttgggttgacagagttggctgttctctaattagactgagtcccaataccgtgtaatggctctggcctgag

SEQ ID NO: 63813 - DNA, 110 bp, synthetic construct
  source 1..110: mol_type = other DNA
tggctgttctctaattagactgagtcccaataccgtgtaatggctctggcctgagatgtaagggcaaggtagggggattgctacaggtaccaggctaattgccttgaccc

SEQ ID NO: 63814 - DNA, 110 bp, synthetic construct
  source 1..110: mol_type = other DNA
tttcaacttttcaccattagtatgatgttgactatatgtttgttatatatggcctttattatgttgaggtgtgttccctctgtacccagtttgtgagagtttttatcata

SEQ ID NO: 63815 - DNA, 110 bp, synthetic construct; identical to SEQ ID NO: 63814
  source 1..110: mol_type = other DNA

SEQ ID NO: 63816 - DNA, 110 bp, synthetic construct
  source 1..110: mol_type = other DNA
tttatacacatgctgcatagtacgtgtcattctgcaacttggttttttttgccctgcgttatcttgaagatcttgtcacgtatgtaaagatccagctcatttacaataaa

SEQ ID NO: 63817 - DNA, 110 bp, synthetic construct
  source 1..110: mol_type = other DNA
gcgttatcttgaagatcttgtcacgtatgtaaagatccagctcatttacaataaattgctgcatagtgtggagtatgatggaaccactttgatttatataattattccct

SEQ ID NO: 63818 - DNA, 110 bp, synthetic construct
  source 1..110: mol_type = other DNA
cttttgcattcagagcagggggtttaaagtgcagctgctatagcaaaagctgtgaggactgagagccacagagacccagagtctactcctgggactaatttctggctgta

SEQ ID NO: 63819 - DNA, 110 bp, synthetic construct
  source 1..110: mol_type = other DNA
ggactgagagccacagagacccagagtctactcctgggactaatttctggctgtaggacttgaggcaggggtgggaagggagtcaggataaccaggctgctttcacccag

SEQ ID NO: 63820 - DNA, 110 bp, synthetic construct
  source 1..110: mol_type = other DNA
tccgttaatgtcgtaacatagacttctttgacttgtctaggacatttttgagaccctaaaatcagtcatctgtgctcttggcggtttagctgccgtctcatcagctccag

SEQ ID NO: 63821 - DNA, 110 bp, synthetic construct
  source 1..110: mol_type = other DNA
ctaaaatcagtcatctgtgctcttggcggtttagctgccgtctcatcagctccaggtgccgtgccttgcacccgatcctattcttcatggaggtatctcagaagcattag

SEQ ID NO: 63822 - DNA, 110 bp, synthetic construct
  source 1..110: mol_type = other DNA
ggggccttaaatggggttattgcaccattttataaacaaataatattagtttagcttttatctaaaaagcaatgcacggctcatgttcattttgatgttaagttaaatgc

SEQ ID NO: 63823 - DNA, 110 bp, synthetic construct
  source 1..110: mol_type = other DNA
tgagccaagacagaggagggaggatgtgttaaagaccagccagcacaggaagcaccgctggcttggttcacatctggggaacagcttcatgttggcttgtagttttactg

SEQ ID NO: 63824 - DNA, 110 bp, synthetic construct
  source 1..110: mol_type = other DNA
cgctggcttggttcacatctggggaacagcttcatgttggcttgtagttttactgcccattagttctccttccacctcctccaggacctcacccccacctccatccatca

SEQ ID NO: 63825 - DNA, 110 bp, synthetic construct
  source 1..110: mol_type = other DNA
ccgtgtgtccttttttctaccttgactgtcttcccctggccaacgacctcaaatgacatggcactcccctcagatctttcttcgaggtgcttactcaactctgaggacaa

SEQ ID NO: 63826 - DNA, 110 bp, synthetic construct
  source 1..110: mol_type = other DNA
acatggcactcccctcagatctttcttcgaggtgcttactcaactctgaggacaagaactgggtcagggtcaccagtgtagccccagtgcctagcataaggtttgcccct

SEQ ID NO: 63827 - DNA, 110 bp, synthetic construct
  source 1..110: mol_type = other DNA
cctgcgcggtggaatccactcacgtgtccatccatgcaggcatttatggagtgactgccccgtgccgtgcactgggacacgatgtgaatacaaaagaacatctgccctta

SEQ ID NO: 63828 - DNA, 110 bp, synthetic construct
  source 1..110: mol_type = other DNA
tgccccgtgccgtgcactgggacacgatgtgaatacaaaagaacatctgcccttaaggggctcacggtcttgtttccattaccaagagttcggctattcacccagcccag

SEQ ID NO: 63829 - DNA, 110 bp, synthetic construct
  source 1..110: mol_type = other DNA
cctgtgggatataggatgatggagatagcaataaaatgtattccaggtaattgcataattaaaggcagagaagcagggaaagtgcctttttcttaatagccctgaaaaaa

SEQ ID NO: 63830 - DNA, 110 bp, synthetic construct
  source 1..110: mol_type = other DNA
taattaaaggcagagaagcagggaaagtgcctttttcttaatagccctgaaaaaagaactgcatcttgtcgactacagttacagaggtttttactcttccatagcacaat

SEQ ID NO: 63831 - DNA, 110 bp, synthetic construct
  source 1..110: mol_type = other DNA
agcagagtcttgggagctgctgggactcgggtttcttccccggcctggcacagtgggttagggatctggtgttgccacggctacagcctaggttgcaactgtgactttga

SEQ ID NO: 63832 - DNA, 110 bp, synthetic construct
  source 1..110: mol_type = other DNA
ggttagggatctggtgttgccacggctacagcctaggttgcaactgtgactttgatctgatcactggcctaggagctccatatgctgcagggcagtcaaaaatgaaaaaa

SEQ ID NO: 63833 - DNA, 110 bp, synthetic construct
  source 1..110: mol_type = other DNA
tacaacagcaaaaacagaactgaccaaaaattagatactttggatttcatcaaaattaaaaacattggtgcttcagatgataccatcaagaaaataaagagacaacccac

SEQ ID NO: 63834 - DNA, 110 bp, synthetic construct
  source 1..110: mol_type = other DNA
agaactgaccaaaaattagatactttggatttcatcaaaattaaaaacattggtgcttcagatgataccatcaagaaaataaagagacaacccacagaataggagaaaat

SEQ ID NO: 63835 - DNA, 110 bp, synthetic construct
  source 1..110: mol_type = other DNA
atattttcggatttttgcatcctaatagcccacttttttctcacaataactatagaatactaaataagacatgtcaggttgacttcctccccaaaaggcccatggtcttc

SEQ ID NO: 63836 - DNA, 110 bp, synthetic construct
  source 1..110: mol_type = other DNA
tttgggggctggtattcatagggaacaaaagtaaacctactgtgattatcttttccacttgtttgttaatcagaaatcaaaacagatgtacctttaagtactgcaaaaac

SEQ ID NO: 63837 - DNA, 110 bp, synthetic construct
  source 1..110: mol_type = other DNA
cacttgtttgttaatcagaaatcaaaacagatgtacctttaagtactgcaaaaacatttcctagaccgtagctccaaagaaagtcgaaagatagccctgtctctttgctt

SEQ ID NO: 63838 - DNA, 110 bp, synthetic construct
  source 1..110: mol_type = other DNA
tgaatcatacattttaaatggttaatcttatgtgaatgttgcctgaattttaaaatacaagctaccatttcttgaacatttgattcaggcactttatgtggccttcacat

SEQ ID NO: 63839 - DNA, 110 bp, synthetic construct
  source 1..110: mol_type = other DNA
tacaagctaccatttcttgaacatttgattcaggcactttatgtggccttcacatctcaccctcccaacaactctgtgagataaacattattatctccattttcaggata

SEQ ID NO: 63840 - DNA, 110 bp, synthetic construct
  source 1..110: mol_type = other DNA
tggcatcaccatactaccaaaaccaaagatatcatacacaaaaaataaaattataggccaatatcattaatgaacatagaggcaaaagtcctccacaaaatattagcaac

SEQ ID NO: 63841 - DNA, 110 bp, synthetic construct; identical to SEQ ID NO: 63840
  source 1..110: mol_type = other DNA

SEQ ID NO: 63842 - DNA, 110 bp, synthetic construct
  source 1..110: mol_type = other DNA
tgttgtggtctttaaaattgcgaaagtggcacttcttttttcttttttttctttcttttttttttttggtctttttagggctgcacccctggcatatggaggttccaagg

SEQ ID NO: 63843 - DNA, 110 bp, synthetic construct; identical to SEQ ID NO: 63842
  source 1..110: mol_type = other DNA

SEQ ID NO: 63844 - DNA, 110 bp, synthetic construct
  source 1..110: mol_type = other DNA
tggaacccacatcctcatggatcctagtcagaataatttctgctgagccatgattggaactcccgtttggggcaatttttaagtctgagggagctcccgtaaagttcttg

SEQ ID NO: 63845 - DNA, 110 bp, synthetic construct
  source 1..110: mol_type = other DNA
ggaactcccgtttggggcaatttttaagtctgagggagctcccgtaaagttcttgacttaaaaaaaaaaacttagagttcccattgtggctcatcagaacccgaataata

SEQ ID NO: 63846 - DNA, 110 bp, synthetic construct
  source 1..110: mol_type = other DNA
aagcttttaggactctcaggaataaaattagtcaggtgatgagatggtgttttgggacaggggaccctgtttattctagtccttatgaaatgccttctaactgactgcct

SEQ ID NO: 63847 - DNA, 110 bp, synthetic construct
  source 1..110: mol_type = other DNA
gacaggggaccctgtttattctagtccttatgaaatgccttctaactgactgcctagatactagattgctcttttaaaagccatctttgaaaagcttaaatctgatcatg

SEQ ID NO: 63848 - DNA, 110 bp, synthetic construct
  source 1..110: mol_type = other DNA
cagagtctttctgacgctctagttgcgtgtattttagcaggtattataaatgcccgagttgaagcgtttaaaggaaaacatagttctgagtcagatctctatggaggaaa

SEQ ID NO: 63849 - DNA, 110 bp, synthetic construct
  source 1..110: mol_type = other DNA
gagttgaagcgtttaaaggaaaacatagttctgagtcagatctctatggaggaaaaaaaacaacacctagaagggaagttgcagtaacattaccgctgaattggccccag

SEQ ID NO: 63850 - DNA, 110 bp, synthetic construct
  source 1..110: mol_type = other DNA
atgggaaacaggaacccaatggtcatgcaggtcagaagcttgactacccagtgtttccgccgccatccagggaagccgtcgtaccagagagtggcaagcaactgttggca

SEQ ID NO: 63851 - DNA, 110 bp, synthetic construct
  source 1..110: mol_type = other DNA
aattcattctgactggctttcaagacagaagaacttaattttaatgtagtggaagtgacaactgaaagtcagaagttggcccagctataaaagtcactccattgagcctg

SEQ ID NO: 63852 - DNA, 110 bp, synthetic construct
  source 1..110: mol_type = other DNA
tgacaactgaaagtcagaagttggcccagctataaaagtcactccattgagcctgagaaaatcaccttctctgtgagtctcactgtcaccatctataacatgggggagga

SEQ ID NO: 63853 - DNA, 110 bp, synthetic construct
  source 1..110: mol_type = other DNA
atggtgggctagggtgagggtggagcagagggggtcttgctgccagtctgaagccaaactccctactcagtaaagccatggcagggactattttatccattcaagattta

SEQ ID NO: 63854 - DNA, 110 bp, synthetic construct
  source 1..110: mol_type = other DNA
aaactccctactcagtaaagccatggcagggactattttatccattcaagatttatagaggccagctgtgcccaatcctttggcgagatgggggagggcctccatgaaaa

SEQ ID NO: 63855 - DNA, 110 bp, synthetic construct; identical to SEQ ID NO: 63853
  source 1..110: mol_type = other DNA

SEQ ID NO: 63856 - DNA, 110 bp, synthetic construct; identical to SEQ ID NO: 63854
  source 1..110: mol_type = other DNA

SEQ ID NO: 63857 - DNA, 110 bp, synthetic construct
  source 1..110: mol_type = other DNA
gggttttcctccattgttctccttccaataatttagactattgccagagtatctctattgcctataaatgatcccctaggactctgtcatctacagcttcaccttagtgc

SEQ ID NO: 63858 - DNA, 110 bp, synthetic construct
  source 1..110: mol_type = other DNA
tattgcctataaatgatcccctaggactctgtcatctacagcttcaccttagtgctcctcagatctggataacagatcacttggaagtcagaagactctttatgaaccct

SEQ ID NO: 63859 - DNA, 110 bp, synthetic construct
  source 1..110: mol_type = other DNA
ctcagaatcacagcagctaaaagtcagcagcctagtagccattacagatgacataatgggtttggaactcaccaaatgcccattctcagagaattgtcactgtttggtct

SEQ ID NO: 63860 - DNA, 110 bp, synthetic construct
  source 1..110: mol_type = other DNA
ttaacaatatattttaaaagccatttttgtactccttagttcatttgattctgaaagctttcttgtgaggtagatcagctaaatatcattatttcccaagcaacagagag

SEQ ID NO: 63861 - DNA, 110 bp, synthetic construct; identical to SEQ ID NO: 63860
  source 1..110: mol_type = other DNA

SEQ ID NO: 63862 - DNA, 110 bp, synthetic construct
  source 1..110: mol_type = other DNA
tgcttatgattgcctcaaaaagcaacagaatgggcaccttttcagatggtacttgagtaatccttgttctgttctgtctctcagcagtgaacattagaacaaattgcctg

SEQ ID NO: 63863 - DNA, 110 bp, synthetic construct
  source 1..110: mol_type = other DNA
agtaatccttgttctgttctgtctctcagcagtgaacattagaacaaattgcctgatgtaacataaacagttccacttaatgcaaaatctgtttctctcatttgctgagt

SEQ ID NO: 63864 - DNA, 110 bp, synthetic construct
  source 1..110: mol_type = other DNA
tctctattctgtaccattggtatgtgtctgtttttatgtcagtgccatactattttgcttattataactttgtaatatagtttgaaatcaggaagtgtggtacttcccac

SEQ ID NO: 63865 - DNA, 110 bp, synthetic construct
  source 1..110: mol_type = other DNA
tgcttattataactttgtaatatagtttgaaatcaggaagtgtggtacttcccactttatgcttctttctcaagatttctttggctgttccaggatttttgtgattctat

SEQ ID NO: 63866 - DNA, 110 bp, synthetic construct
  source 1..110: mol_type = other DNA
tttgatgatgaccatcttgaatggtgtgaagtgatacctccttgtagctttgattttcatttctctaataattagggcaaacatcttttcatgtgatttttggccatctg

SEQ ID NO: 63867 - DNA, 110 bp, synthetic construct; identical to SEQ ID NO: 63866
  source 1..110: mol_type = other DNA

SEQ ID NO: 63868 - DNA, 110 bp, synthetic construct
  source 1..110: mol_type = other DNA
tgagaatccgtcattgctgtgagctgtggtgtaggtctataaccagataaactaccattcatgagtgagggacaaatgaagatattttttatggtgtaaaaagactaaga

SEQ ID NO: 63869 - DNA, 110 bp, synthetic construct
  source 1..110: mol_type = other DNA
gtggtgtaggtctataaccagataaactaccattcatgagtgagggacaaatgaagatattttttatggtgtaaaaagactaagagaatttaccacttataaaacatctt

SEQ ID NO: 63870 - DNA, 110 bp, synthetic construct
  source 1..110: mol_type = other DNA
atgaggttctcatgtattattgcttgggctagagttcttcaaggtgtggcatgtgtgtctctgtgtgctgaaggtcaaggacggcccttactatagctgtactggacagt

SEQ ID NO: 63871 - DNA, 110 bp, synthetic construct
  source 1..110: mol_type = other DNA
tgtctctgtgtgctgaaggtcaaggacggcccttactatagctgtactggacagtatccttcttgcttcccgaagtgcctcccagtacttctaccttggagcccttgagg

SEQ ID NO: 63872 - DNA, 110 bp, synthetic construct
  source 1..110: mol_type = other DNA
attcatttgagatcttggggagaaaaatggcttatagcctatagccagtgactgttagactggtttatgactggataaactggtccaaccatcccttctttctcttcagg

SEQ ID NO: 63873 - DNA, 110 bp, synthetic construct
  source 1..110: mol_type = other DNA
tagactggtttatgactggataaactggtccaaccatcccttctttctcttcaggagctccagtaaaactataaatgttaagtaccttgttttcaattaacagcctgcaa

SEQ ID NO: 63874 - DNA, 110 bp, synthetic construct
  source 1..110: mol_type = other DNA
tggattatctgggttgggccaatatcattacaagtgttctttgaagggagagccaggagtttccttgtcatggagcacttaaagatccactgttgtcactacagtggccc

SEQ ID NO: 63875 - DNA, 110 bp, synthetic construct
  source 1..110: mol_type = other DNA
cattacaagtgttctttgaagggagagccaggagtttccttgtcatggagcacttaaagatccactgttgtcactacagtggcccaggtcactgctgtggtgggtttgat

SEQ ID NO: 63876 - DNA, 110 bp, synthetic construct
  source 1..110: mol_type = other DNA
actgggatctggatctttcccagacttaaaatcttaaatacgaacttccctatgtgatataggccaggtactttttctacaactgcagaaagatatgccaggaaaattcc

SEQ ID NO: 63877 - DNA, 110 bp, synthetic construct
  source 1..110: mol_type = other DNA
ttccctatgtgatataggccaggtactttttctacaactgcagaaagatatgccaggaaaattccagtgcagatatacccttaatttgttttttgggttttttttatttt

SEQ ID NO: 63878 - DNA, 110 bp, synthetic construct
  source 1..110: mol_type = other DNA
aaaaagaaaaaaaagaaaaaaaggaattctcctgaggtgcagtggttaaggatccagcatattcactactgtggttcaggtcactgccgtggtgtagatttgatccctgg

SEQ ID NO: 63879 - DNA, 110 bp, synthetic construct; identical to SEQ ID NO: 63878
  source 1..110: mol_type = other DNA

SEQ ID NO: 63880 - DNA, 110 bp, synthetic construct
  source 1..110: mol_type = other DNA
tctcagttgacccttaagccagctgtggtgaataggtgatttgtccaaggtagcagtcaagtctcctgattcctagtctcttgatctagttctcctatcacatatcagaa

SEQ ID NO: 63881 - DNA, 110 bp, synthetic construct
  source 1..110: mol_type = other DNA
gtcaagtctcctgattcctagtctcttgatctagttctcctatcacatatcagaaaataagactctacagataatgatagctgatgtattgagggctcactacaagtttg

SEQ ID NO: 63882 - DNA, 110 bp, synthetic construct
  source 1..110: mol_type = other DNA
tccaggaaatgaaaggaaatcttagcaatggactcaaatgccctttttcctgtgaagacagaaaggtcacaccattgtgatgccctctttttagtggaatgggcatgaca

SEQ ID NO: 63883 - DNA, 110 bp, synthetic construct
  source 1..110: mol_type = other DNA
cagcagtggtatttttggtattttttattttagccattctaaagatatagtagtatctcattacagacctaatgacatgattgtctattcatgtgcttagctgccattca

SEQ ID NO: 63884 - DNA, 110 bp, synthetic construct; identical to SEQ ID NO: 63883
  source 1..110: mol_type = other DNA

SEQ ID NO: 63885 - DNA, 110 bp, synthetic construct
  source 1..110: mol_type = other DNA
aagaacatagatacacaagtagatggaaagagctcttataggaattatgatacaatgagaaatgatggaaaggtagacctgatcttactgaaatctgaggctcaagagag

SEQ ID NO: 63886 - DNA, 110 bp, synthetic construct
  source 1..110: mol_type = other DNA
tgagaaatgatggaaaggtagacctgatcttactgaaatctgaggctcaagagaggagggctttgcaaaaggggatttttagtctgttataagcaaaggccataaagaca

SEQ ID NO: 63887 - DNA, 110 bp, synthetic construct
  source 1..110: mol_type = other DNA
taatatccaaaatacacaaacagctcatacaactcaacataaaaaacaatccccccaaaataggcagaaaacctaaatagacgttttaccaaagaagacattcgaatggc

SEQ ID NO: 63888 - DNA, 110 bp, synthetic construct
  source 1..110: mol_type = other DNA
catacaactcaacataaaaaacaatccccccaaaataggcagaaaacctaaatagacgttttaccaaagaagacattcgaatggccaacaggcacataaaaagatgttca

SEQ ID NO: 63889 - DNA, 110 bp, synthetic construct
  source 1..110: mol_type = other DNA
ccaggggaaaatgtggaaaacttttttctaaaagctctagcttctattggtcaagggtggtcccaagaacattcaatcttaggatgtcctcaaaatcacagagtagggag

SEQ ID NO: 63890 - DNA, 110 bp, synthetic construct
  source 1..110: mol_type = other DNA
ggtggtcccaagaacattcaatcttaggatgtcctcaaaatcacagagtagggagcaataaacagcagcagtgggtccaacatagaagtgccagattggaagtctttgag

SEQ ID NO: 63891 - DNA, 110 bp, synthetic construct
  source 1..110: mol_type = other DNA
gctgaaaaacttgccaaggtcacagagctaaagatgtaggtatgataaagctccctctcaccactaggcaatactcacgtaggttcttccctggctcccactgttgatga

SEQ ID NO: 63892 - DNA, 110 bp, synthetic construct
  source 1..110: mol_type = other DNA
cttggtaggatgtccaagagagcattaatgtgggcattcacagtactacatgagctaggttgtaatgagcaaataaaataagcggcctcttgaagttcttgttgtggatc

SEQ ID NO: 63893 - DNA, 110 bp, synthetic construct
  source 1..110: mol_type = other DNA
taggttgtaatgagcaaataaaataagcggcctcttgaagttcttgttgtggatcagtgataatgaacccaagtagtatctatgaggatgtgggttcgatccccggcctt

SEQ ID NO: 63894 - DNA, 110 bp, synthetic construct
  source 1..110: mol_type = other DNA
ctgatttatatttgaaaactgtcttctttgtaatattagcattcccaggtctcaggtcttccccaaagctttcatcttctcttagtgatcatcttgcatttataaccacc

SEQ ID NO: 63895 - DNA, 110 bp, synthetic construct
  source 1..110: mol_type = other DNA
gtcttccccaaagctttcatcttctcttagtgatcatcttgcatttataaccaccaaacttcacttatcgtttcccttttggcccatgccatcaaggtatcccaatgctg

SEQ ID NO: 63896 - DNA, 110 bp, synthetic construct
  source 1..110: mol_type = other DNA
agctgcagctctgattcaaccctggcatgggaacttccatatggttacaggtgggccctgaaaaataaataaataaatactcctgtgaacctcaccctaccctccaccac

SEQ ID NO: 63897 - DNA, 110 bp, synthetic construct
  source 1..110: mol_type = other DNA
ccctgaaaaataaataaataaatactcctgtgaacctcaccctaccctccaccacttcagctgagttagatgggagaagtacattgaactaaattaaatcataggagttg

SEQ ID NO: 63898 - DNA, 110 bp, synthetic construct
  source 1..110: mol_type = other DNA
caattcaaaccctagcctggcagcctccatatgctacaggtgaggctctaaaaagacacacacgaaaaaaagtagggcacatctcctggtgtaaggacttagagccagac

SEQ ID NO: 63899 - DNA, 110 bp, synthetic construct; identical to SEQ ID NO: 63898
  source 1..110: mol_type = other DNA

SEQ ID NO: 63900 - DNA, 110 bp, synthetic construct
  source 1..110: mol_type = other DNA
gcttggccaaagcttctgctttttcaagagaagacagaaaaactaggttgttttatgtaaacctttctgagtacgttacgtttgtaaacagtgcttgagtcaaatacatc

SEQ ID NO: 63901 - DNA, 110 bp, synthetic construct
  source 1..110: mol_type = other DNA
tgtaaacctttctgagtacgttacgtttgtaaacagtgcttgagtcaaatacatcgtatctgtcagctaccagtttacaactcctccttctagggcttctaacatgcaag

SEQ ID NO: 63902 - DNA, 110 bp, synthetic construct
  source 1..110: mol_type = other DNA
agatctgttgttcgcctcacctgtggcgcaggctacaactgtggttcaggtttgatcagtccctggcctgggagctcccacatgccatgggtgtggccaataatacatac

SEQ ID NO: 63903 - DNA, 110 bp, synthetic construct
  source 1..110: mol_type = other DNA
tcagtccctggcctgggagctcccacatgccatgggtgtggccaataatacatacaaacatacatacaaattttaaaagttaaatagggcattcctgtcatggctcagag

SEQ ID NO: 63904 - DNA, 110 bp, synthetic construct
  source 1..110: mol_type = other DNA
tcacaaccacagagatatttgcatatcatttgtataagacaagtaaactccatggcctattaatcaatcttcaaattaaatttgatgccttcaaccattctgcattcctt

SEQ ID NO: 63905 - DNA, 110 bp, synthetic construct
  source 1..110: mol_type = other DNA
cctattaatcaatcttcaaattaaatttgatgccttcaaccattctgcattccttctcagttttccactatcctccctgacaaagttctgagaccttaatggggagaaat

SEQ ID NO: 63906 - DNA, 110 bp, synthetic construct
  source 1..110: mol_type = other DNA
atgatacagtgatctaagaatcatcgctaatgatttagacaaagtaaacagtgaacgctacttttctttttgcttacaaaaatgggggaagagtaacaggaggttaaggg

SEQ ID NO: 63907 - DNA, 110 bp, synthetic construct
  source 1..110: mol_type = other DNA
cgctacttttctttttgcttacaaaaatgggggaagagtaacaggaggttaagggcgaagaattaacaggcttgctagatacaaaacacctctaaattaaagaaatggtt

SEQ ID NO: 63908 - DNA, 110 bp, synthetic construct
  source 1..110: mol_type = other DNA
tgtcttattcactgctgtagcccccacacctagcacatgctgtatctggcccaaagtgggtatccaagaaatagttgttgggtgaagggaacatatttcatgacacaggt

SEQ ID NO: 63909 - DNA, 110 bp, synthetic construct
  source 1..110: mol_type = other DNA
gtgggtatccaagaaatagttgttgggtgaagggaacatatttcatgacacaggtttttgtgtaaatgagtcatgtataatccttttcaattccccatcttactttgtgt

SEQ ID NO: 63910 - DNA, 110 bp, synthetic construct
  source 1..110: mol_type = other DNA
tatccctttcatagatgagaaaactaaagatgagatgtcagatgacacaggcaagaaatgtgaaaaagattgggacccagtattctttaccccttcgttacacttcctca

SEQ ID NO: 63911 - DNA, 110 bp, synthetic construct
  source 1..110: mol_type = other DNA
aaatgtgaaaaagattgggacccagtattctttaccccttcgttacacttcctcagatgaatcttgggcaataaggtagaggaagagcctgggttaatgttgggagtgca

SEQ ID NO: 63912 - DNA, 110 bp, synthetic construct
  source 1..110: mol_type = other DNA
accatttcatttctctcccgcactctactgccaatacttttaaaatgtacttgaagttttcattctttactgtgtctttatactccttgaaatctggcttctattcccac

SEQ ID NO: 63913 - DNA, 110 bp, synthetic construct
  source 1..110: mol_type = other DNA
cccttgtatgttatttgttgcttttcctttgttgcttttaatattttctctttgtctttaatttttgtcagtttgattaatatgtgcctcagaatgttcctctttgggtt

SEQ ID NO: 63914 - DNA, 110 bp, synthetic construct; identical to SEQ ID NO: 63913
  source 1..110: mol_type = other DNA

SEQ ID NO: 63915 - DNA, 110 bp, synthetic construct
  source 1..110: mol_type = other DNA
caggggcggactatgtccattttcttcacaattgtagatgtgaacatagtagatatttgataaatagtcaatgaataaataaatgtgtttaacctcacaatcattgatct

SEQ ID NO: 63916 - DNA, 110 bp, synthetic construct; identical to SEQ ID NO: 63915
  source 1..110: mol_type = other DNA

SEQ ID NO: 63917 - DNA, 110 bp, synthetic construct
  source 1..110: mol_type = other DNA
tagctcgtattttgctggtctatcagacaaaccttatacgttggtgattattaaagtaatagaagcacctgccatttatttcctactatatgtcaaacagtatactaaga

SEQ ID NO: 63918 - DNA, 110 bp, synthetic construct
  source 1..110: mol_type = other DNA
tggtctatcagacaaaccttatacgttggtgattattaaagtaatagaagcacctgccatttatttcctactatatgtcaaacagtatactaagaacttacacatattaa

SEQ ID NO: 63919 - DNA, 110 bp, synthetic construct
  source 1..110: mol_type = other DNA
ctccatcaagaggaggccctagctctaggatctcttgacaagatctttatttcgtgtttccatactcacactcagactgaaagcctggcatatccgtaaatttacagagc

SEQ ID NO: 63920 - DNA, 110 bp, synthetic construct
  source 1..110: mol_type = other DNA
cgtgggtttgatccctgccgcgatcagtgggttaaggatttggcgttaccatgagctgtgttgtaggtcgcaggtgtggctcaaatccatcattgctgtggctgtggcat

SEQ ID NO: 63921 - DNA, 110 bp, synthetic construct; identical to SEQ ID NO: 63920
  source 1..110: mol_type = other DNA

SEQ ID NO: 63922 - DNA, 110 bp, synthetic construct
  source 1..110: mol_type = other DNA
taccacaataaatttagttaacatccatcactttttttagtgacagtcatcctcatgtgcataaagtaatatctccttgcatgtccataatgactaatgatactgagcat

SEQ ID NO: 63923 - DNA, 110 bp, synthetic construct; identical to SEQ ID NO: 63922
  source 1..110: mol_type = other DNA

SEQ ID NO: 63924 - DNA, 110 bp, synthetic construct
  source 1..110: mol_type = other DNA
taatagaatcactgcgcaactgactttctttggagattgtgactgtcaatatcgtctctaggcttgaactgtttagagaaacagctttcaagtgtggattatttgccttt

SEQ ID NO: 63925 - DNA, 110 bp, synthetic construct
  source 1..110: mol_type = other DNA
ttccttgaagagagataaaagaggtctcaagcctatgctgggcatatctcttcatttgaaaatatcttgggaatatctttccctgtttcctgttctggccttgatctgaa

SEQ ID NO: 63926 - DNA, 110 bp, synthetic construct
  source 1..110: mol_type = other DNA
taacttaacttcattcacatataaaaacaactcctctgccctcacctaccttacactatcaatgccacaaatttcatatttatctacatgcattcatcaacatagatttg

SEQ ID NO: 63927 - DNA, 110 bp, synthetic construct
  source 1..110: mol_type = other DNA
aaagaaattcatgactatacttgctatcgtatttttcttgaggatatatccacaatattatttaatgccctgtataaagacacatacatgaacactggtacatacacact

SEQ ID NO: 63928 - DNA, 110 bp, synthetic construct; identical to SEQ ID NO: 63927
  source 1..110: mol_type = other DNA

SEQ ID NO: 63929 - DNA, 110 bp, synthetic construct
  source 1..110: mol_type = other DNA
ttttacttcctgctagtataaaatctcaaagttagccagaggtaagggattaaagccttctcatatctttcttgaacatgtatatagccatagacatatacacagctatg

SEQ ID NO: 63930 - DNA, 110 bp, synthetic construct; identical to SEQ ID NO: 63929
  source 1..110: mol_type = other DNA

SEQ ID NO: 63931 - DNA, 110 bp, synthetic construct
  source 1..110: mol_type = other DNA
aaaatacttttctaaacaattgtttatacaatgtatcctcaatgatctgatgggaacacaggcaagatgcaatttctgttaagctggagatctcataatggaaaagacac

SEQ ID NO: 63932 - DNA, 110 bp, synthetic construct
  source 1..110: mol_type = other DNA
acacaggcaagatgcaatttctgttaagctggagatctcataatggaaaagacacacatcagcagacatagtgaagtttcagatagccaaagtagcaggtaatcatattc

SEQ ID NO: 63933 - DNA, 110 bp, synthetic construct
  source 1..110: mol_type = other DNA
cctggaggagaaggcaattcaaggtcatcaaagtgctttggattctagaccttcaagctggccttcaaggtccatttcaagcagctcaatcttttctctaatcagattta

SEQ ID NO: 63934 - DNA, 110 bp, synthetic construct
  source 1..110: mol_type = other DNA
attagaaatatcctcttatagaagtagcaacatttgagaactgtggttatgagtctgagcatttcccatctattgcttgctgaatttcaaacaggacagaatgcaaagag

SEQ ID NO: 63935 - DNA, 110 bp, synthetic construct
  source 1..110: mol_type = other DNA
aaagagcaatacgtttagccgaaaaacacagtaactgcctcttcctagttatatgaattcagacaagtcatttaacatcattcggctccagttttatcatctctaaggta

SEQ ID NO: 63936 - DNA, 110 bp, synthetic construct
  source 1..110: mol_type = other DNA
tgcctcttcctagttatatgaattcagacaagtcatttaacatcattcggctccagttttatcatctctaaggtagagataatgacttttctcacagcattattatgaga

SEQ ID NO: 63937 - DNA, 110 bp, synthetic construct
  source 1..110: mol_type = other DNA
taaatgaattataaggtttggcttaattatgggggcttagaagtccagacccatgatagccaatggtatagtaccagttggagtccaaaagcctgagaagcaagcagaag

SEQ ID NO: 63938 - DNA, 110 bp, synthetic construct
  source 1..110: mol_type = other DNA
atagccaatggtatagtaccagttggagtccaaaagcctgagaagcaagcagaagggataatggtgtagattccagtccaagtccaaaaatagaagaagactgatacccc

SEQ ID NO: 63939 - DNA, 110 bp, synthetic construct
  source 1..110: mol_type = other DNA
aacctattacctctccaagagaaattttgaaagatattgctcataaaggggaaaactttattggcggaaattgcacaataatgaatctcaaggaaagaaggagtgcatgc

SEQ ID NO: 63940 - DNA, 110 bp, synthetic construct
  source 1..110: mol_type = other DNA
aaatctttcttgaataatattcagctcatgcaggcactttactttctcatgtaatattatgtgctttgtgctgatacagttttcatatctgttgtaatgcccttgggcac

SEQ ID NO: 63941 - DNA, 110 bp, synthetic construct
  source 1..110: mol_type = other DNA
agcttttgatcgccttcaaatctcaatgagagccttgctattctcggttctaggtttttctcttttatccctttaactatatcacgctactccctctggcctgcagagtt

SEQ ID NO: 63942 - DNA, 110 bp, synthetic construct
  source 1..110: mol_type = other DNA
ttataatcaatttcatgtgccaaaaccttaacaattctgttcagcagactcaagagggcagaacagcagaacatgcagctcatcttttcccacaaatgcatcaaaaatac

SEQ ID NO: 63943 - DNA, 110 bp, synthetic construct
  source 1..110: mol_type = other DNA
gggcagaacagcagaacatgcagctcatcttttcccacaaatgcatcaaaaatacatctacaaatggaaaagttctaatagagcacctgctgaatattaacaggggaccc

SEQ ID NO: 63944 - DNA, 110 bp, synthetic construct
  source 1..110: mol_type = other DNA
ttaagggtttaagagagtgtgggaaggggaaatctaacaggtacaggacttcctttgcggatgatgaaaatgttctggagctagatagtgttgatagttacacaactttg

SEQ ID NO: 63945 - DNA, 110 bp, synthetic construct
  source 1..110: mol_type = other DNA
ggacttcctttgcggatgatgaaaatgttctggagctagatagtgttgatagttacacaactttgcgaataaactaaaatcactgtttactttaaaatgttaaaatggtg

SEQ ID NO: 63946 - DNA, 110 bp, synthetic construct
  source 1..110: mol_type = other DNA
acctttaatgtcctcttcatcaagtgttgcaaacttacttggtacctagaaaacttcctacttgagacttgatgccatgtcatacatttcctgcattccatttgtggttt

SEQ ID NO: 63947 - DNA, 110 bp, synthetic construct
  source 1..110: mol_type = other DNA
gaagataggacatattctaaattatatagtttgtggccagtttggctggaaggggggaagagttagaacagatatagtaatattgaagactggcaagtcatcctgaggtc

SEQ ID NO: 63948 - DNA, 110 bp, synthetic construct
  source 1..110: mol_type = other DNA
ggaagagttagaacagatatagtaatattgaagactggcaagtcatcctgaggtcaaattaagtctttgtccttctaagcatagtacatatatgtatcatatgaaacacg

SEQ ID NO: 63949 - DNA, 110 bp, synthetic construct
  source 1..110: mol_type = other DNA
atttcatcaatgtccaaggtccagctcttataccaaaagttaaaaaaattttgggccctaaagtttctaagattcttgtgtgactgattcaaataaaataattaatcagg

SEQ ID NO: 63950 - DNA, 110 bp, synthetic construct
  source 1..110: mol_type = other DNA
ttaataaactagcaggtagagttgttctggcctaaggatcagaaccattcctagctggggcagcgggcgagcatgttcatgtgagtagggtgcaagtgaagcaggaactg

SEQ ID NO: 63951 - DNA, 110 bp, synthetic construct
  source 1..110: mol_type = other DNA
tggggcagcgggcgagcatgttcatgtgagtagggtgcaagtgaagcaggaactggtcaggaagggtatatacaaataaaagaaaagccatcttgggtgacctgagcata

SEQ ID NO: 63952 - DNA, 110 bp, synthetic construct
  source 1..110: mol_type = other DNA
cacatcctcattttctacccatggctgatataaacacagacaaaaagcctcctcattctaattttgctggaacacagaacctatacattgtctattaaactacaataaca

SEQ ID NO: 63953 - DNA, 110 bp, synthetic construct
  source 1..110: mol_type = other DNA
agcctcctcattctaattttgctggaacacagaacctatacattgtctattaaactacaataacaaacttctcatatgaccaaaggaataaaagtatgttttctgaatat

SEQ ID NO: 63954 - DNA, 110 bp, synthetic construct
  source 1..110: mol_type = other DNA
aagtgtccatcagtggataaagggataaaaaatataattatatatagatgagctgtagtttggcacttgccatcagcttctgcatggattaaatcatgaaagccacagta

SEQ ID NO: 63955 - DNA, 110 bp, synthetic construct
  source 1..110: mol_type = other DNA
tagtttggcacttgccatcagcttctgcatggattaaatcatgaaagccacagtagctgccaacccatgctaccccctgagcagagctcagggtagagatcaggagtgag

SEQ ID NO: 63956 - DNA, 110 bp, synthetic construct
  source 1..110: mol_type = other DNA
aattttgcggaagcagaaatgagctgacttcccaatagacctcatttctctagtcctttcatcatgtttccatacctatttttaaaaatcactatgtaaatgaaaaagaa

SEQ ID NO: 63957 - DNA, 110 bp, synthetic construct
  source 1..110: mol_type = other DNA
atgaccttgggcagtttaattagctttcctataaaatgcaatattcctcacctttaaaatgaggataacaggagttcccgtcatggcacggtggaaaccaatctgactag

SEQ ID NO: 63958 - DNA, 110 bp, synthetic construct; identical to SEQ ID NO: 63957
  source 1..110: mol_type = other DNA

SEQ ID NO: 63959 - DNA, 110 bp, synthetic construct; identical to SEQ ID NO: 63957
  source 1..110: mol_type = other DNA

SEQ ID NO: 63960 - DNA, 110 bp, synthetic construct; identical to SEQ ID NO: 63957
  source 1..110: mol_type = other DNA

SEQ ID NO: 63961 - DNA, 110 bp, synthetic construct
  source 1..110: mol_type = other DNA
cttcctactttcctagagacagaaaggagggtcagagtgtccctcttgcattggctttttcttaagtaactttaattgaaaataatatgccattgaagcatatgtggggg

SEQ ID NO: 63962 - DNA, 110 bp, synthetic construct
  source 1..110: mol_type = other DNA
tttttcttaagtaactttaattgaaaataatatgccattgaagcatatgtgggggcagcttgacctggccccaacactacaatcatggagtgattttgatagctatttta

SEQ ID NO: 63963 - DNA, 110 bp, synthetic construct
  source 1..110: mol_type = other DNA
atccaattttctttcacagaaaattggtttgcacctattgtagcagtagaggaaattttctcctctctaaataatattagggtttaacaaccagtacatatagtgtactt

SEQ ID NO: 63964 - DNA, 110 bp, synthetic construct
  source 1..110: mol_type = other DNA
ggtttgcacctattgtagcagtagaggaaattttctcctctctaaataatattagggtttaacaaccagtacatatagtgtacttgttgcttaatattcattaaataaac

SEQ ID NO: 63965 - DNA, 110 bp, synthetic construct
  source 1..110: mol_type = other DNA
tggcagtagagaaattatgggacactatatagttgcggtatgcaccaaataatgtgggaataaacattttttaaagaacaaccttcctggaaattcacagagccacatga

SEQ ID NO: 63966 - DNA, 110 bp, synthetic construct
  source 1..110: mol_type = other DNA
gggaataaacattttttaaagaacaaccttcctggaaattcacagagccacatgatttttatggctacttttataatcaactttctacatctcattataaagttcctcct

SEQ ID NO: 63967 - DNA, 110 bp, synthetic construct
  source 1..110: mol_type = other DNA
agagatggttcttatatccagacacatcttcacttccttaagtgagctgggtatacccatgacagtaagaactagagattcttctccaagtccccatgttcaattactca

SEQ ID NO: 63968 - DNA, 110 bp, synthetic construct
  source 1..110: mol_type = other DNA
gacaggactgaaagccttccttgagccacacacagctctatctgcaaagaatggaggttttactgcctcacgggcctcaagaaccaattaggacaaaccactagcaggac

SEQ ID NO: 63969 - DNA, 110 bp, synthetic construct
  source 1..110: mol_type = other DNA
ggttttactgcctcacgggcctcaagaaccaattaggacaaaccactagcaggacactaagtagtgctaaccttagggatgacttttaggaagccagactttaaaataaa

SEQ ID NO: 63970 - DNA, 110 bp, synthetic construct
  source 1..110: mol_type = other DNA
gattatagatgcaaatatcaaaaaaacccaaagcaaacagaaactagtagcgcataaaaatcataatacattattaaagttaggttgatctcaggaaaatacggctgctt

SEQ ID NO: 63971 - DNA, 110 bp, synthetic construct
  source 1..110: mol_type = other DNA
gaggagcttgttatactgcaggcacaatagtataaatatcaacctggatttcagccctacttcaaccactaatgtgcttggaggcaaattataactcaatttccatctat

SEQ ID NO: 63972 - DNA, 110 bp, synthetic construct
  source 1..110: mol_type = other DNA
ccgttggcaactgtgcctaagcctcctgcatctttttttttttttttttaagtaagaggagcacttctgtaaatgcttaatggaaatccttcaagttccactattaataa

SEQ ID NO: 63973 - DNA, 110 bp, synthetic construct
  source 1..110: mol_type = other DNA
gaggagcacttctgtaaatgcttaatggaaatccttcaagttccactattaataaaaagtggcccctcctttggagaaaagcagagaatgaatgtctcaggatacaatat

SEQ ID NO: 63974 - DNA, 110 bp, synthetic construct
  source 1..110: mol_type = other DNA
atcctaattaacacctgaccaaagataactggtagaaaaacaaaaaacaaaagaatgacattttagcgaattattagctagtctttattaagtgtaaactgtgtggcaag

SEQ ID NO: 63975 - DNA, 110 bp, synthetic construct
  source 1..110: mol_type = other DNA
tgaccaaagataactggtagaaaaacaaaaaacaaaagaatgacattttagcgaattattagctagtctttattaagtgtaaactgtgtggcaagtgctgttctaagcac

SEQ ID NO: 63976 - DNA, 110 bp, synthetic construct
  source 1..110: mol_type = other DNA
ctagattcactttgccaatagaaactgagctgagtgtatcatgaattatcagtacggtagttcttaaattcctcgatactatcgtgctaccagaactaatagatgttttc

SEQ ID NO: 63977 - DNA, 110 bp, synthetic construct
  source 1..110: mol_type = other DNA
cccagtttctgggagcctcggactccagccttgtgagtgactaaattccaccacttactgccctcaggccaaatccaagaaaggttttctggctcataaatttttcctgc

SEQ ID NO: 63978 - DNA, 110 bp, synthetic construct
  source 1..110: mol_type = other DNA
tactgccctcaggccaaatccaagaaaggttttctggctcataaatttttcctgctgtttggagtagagggcacagagcctgggtgtcataacagaaagtgctaatctgt

SEQ ID NO: 63979 - DNA, 110 bp, synthetic construct
  source 1..110: mol_type = other DNA
agaataaaggccaatcaaagggaaaccaacttcaattgaaaggtcctcaagagcaatcagaagaataccgacactattcagatagatctcgaggccaatcagaaaagtct

SEQ ID NO: 63980 - DNA, 110 bp, synthetic construct
  source 1..110: mol_type = other DNA
atcagaagaataccgacactattcagatagatctcgaggccaatcagaaaagtctaatggccaagcagagagatctcgtggctacaaagaaagatctcgtggccaatcag

SEQ ID NO: 63981 - DNA, 110 bp, synthetic construct
  source 1..110: mol_type = other DNA
cgccacgacgggaactcctttttccagtttcttaagccagcttccctccgccctgcaatgtgcttgctgtttcaggtgctgttctaaataggcattcttaattgggagag

SEQ ID NO: 63982 - DNA, 110 bp, synthetic construct
  source 1..110: mol_type = other DNA
tagttccatttcctaaatagtttttatttcacagtatctgccccctcctccctaataccgatcctgctctcagctagctgtcaagtaatcactggcaaggtcttagctga

SEQ ID NO: 63983 - DNA, 110 bp, synthetic construct
  source 1..110: mol_type = other DNA
taccgatcctgctctcagctagctgtcaagtaatcactggcaaggtcttagctgataaggcttaaaccagaggtttccaacatgtgtgtgtgtgagagagagagacagac

SEQ ID NO: 63984 - DNA, 110 bp, synthetic construct
  source 1..110: mol_type = other DNA
aactttgttgtaggactataccctcaagatttgagtttagcaggtcaaatcagagttcaaagagtgaggcaaatttgggctttattaaaggcatgatcaggtcctggagc

SEQ ID NO: 63985 - DNA, 110 bp, synthetic construct
  source 1..110: mol_type = other DNA
ttcaaagagtgaggcaaatttgggctttattaaaggcatgatcaggtcctggagctggagtaagagaaagcagcaagggagttcccactgtggtgcaatggggcgggcgg

SEQ ID NO: 63986 - DNA, 110 bp, synthetic construct
  source 1..110: mol_type = other DNA
tgcaacagcctcatgccagttcatggctgtgaggtcaccaatcgtacaacctcgcccctccctcccccagcttggctgcattccagatggtgaagggtacccagtgtggg

SEQ ID NO: 63987 - DNA, 110 bp, synthetic construct
  source 1..110: mol_type = other DNA
ttgtttttaaagacgaattcctttggcgatctctgaaatttaaacattggctttagcaaaaagagctttgacttcagacagtggcactccaaaaaaaagggccgttcttt

SEQ ID NO: 63988 - DNA, 110 bp, synthetic construct; identical to SEQ ID NO: 63987
  source 1..110: mol_type = other DNA

SEQ ID NO: 63989 - DNA, 110 bp, synthetic construct
  source 1..110: mol_type = other DNA
caataagttcatatgtgtggacacttaggctttcctgactggaattttcgtcactgaccttccttctcccttggccagagggtcaagtccagattttgagtgtagccctt

SEQ ID NO: 63990 - DNA, 110 bp, synthetic construct
  source 1..110: mol_type = other DNA
tgatcttataaatcaaatctgtccacaggcaggagtggggacactgagcccaagaaaaattggagagaacaggaacaagtcagaaaccaggtcaggatggtcctggccta

SEQ ID NO: 63991 - DNA, 110 bp, synthetic construct
  source 1..110: mol_type = other DNA
aaaattggagagaacaggaacaagtcagaaaccaggtcaggatggtcctggcctatggctgagaaaggaattagagtatactgagttcacctttgtgggcaatgaaactg

SEQ ID NO: 63992 - DNA, 110 bp, synthetic construct
  source 1..110: mol_type = other DNA
tggtgaagtcagtaaattagctaaggaagaatatatggtagcttgttatttatgtgtgggataggccagtttctcttcagtggcagtagacataaagtggtaattacaca

SEQ ID NO: 63993 - DNA, 110 bp, synthetic construct
  source 1..110: mol_type = other DNA
attgatttgtggatattgaagaatcctggcagcaaagctgatacatttaaaagttaccccagactcccaggtaattcacatacctttcttgccaacagataggagtcatt

SEQ ID NO: 63994 - DNA, 110 bp, synthetic construct
  source 1..110: mol_type = other DNA
ttacatgaaatatctttttccatcccatcattttcagtctatatgtggcttttgccctaaagtgggtctcttctaggcagcacgttataggttcttgttttattatccaa

SEQ ID NO: 63995 - DNA, 110 bp, synthetic construct
  source 1..110: mol_type = other DNA
ttttccatcccatcattttcagtctatatgtggcttttgccctaaagtgggtctcttctaggcagcacgttataggttcttgttttattatccaatctgccactctgtgt

SEQ ID NO: 63996 - DNA, 110 bp, synthetic construct
  source 1..110: mol_type = other DNA
cttaccccatgcttctacagtgattatgtctgtggctaattttttttttttttgtctttttactttttctagggccgctcctgcagtacatggaggttcccaggctaggt

SEQ ID NO: 63997 - DNA, 110 bp, synthetic construct; identical to SEQ ID NO: 63996
  source 1..110: mol_type = other DNA

SEQ ID NO: 63998 - DNA, 110 bp, synthetic construct
  source 1..110: mol_type = other DNA
gtaccaagtaagcatgttacaagcaacgttgtttctcatataaccattataacaacactttggaacaatttgaccaatgtcattcagctgataagtgacaaacacaagat

SEQ ID NO: 63999 - DNA, 110 bp, synthetic construct; identical to SEQ ID NO: 63998
  source 1..110: mol_type = other DNA

SEQ ID NO: 64000 - DNA, 110 bp, synthetic construct
  source 1..110: mol_type = other DNA
ggctttatccaaatatcatctctgacttctgtcttattccctccattctattgtagcacattacatgtatatacctagtggaatttcaattaatgtttgaatcttgattc

SEQ ID NO: 64001 - DNA, 110 bp, synthetic construct
  source 1..110: mol_type = other DNA
agtcctatggactcaccaatcttgcatgcttctgattcactctcagagctctttaaaaattctggctcatattcactctacggttctttctactcctgggtacctcaagt

SEQ ID NO: 64002 - DNA, 110 bp, synthetic construct
  source 1..110: mol_type = other DNA
aacaaacaaacaaaaaaaggtgatctctgaagatatccactaagctaggcagtattcctggaactttaatgtgataggtctagggtggagctgtaattctgcatttaaaa

SEQ ID NO: 64003 - DNA, 110 bp, synthetic construct
  source 1..110: mol_type = other DNA
tcctggaactttaatgtgataggtctagggtggagctgtaattctgcatttaaaataagatccaggagttcctgtcatggtgcagtgggaacgaatcagactaggaacca

SEQ ID NO: 64004 - DNA, 110 bp, synthetic construct
  source 1..110: mol_type = other DNA
agataacttgggtccacaatgattaatgaatgaaaatattaataagggctgaatgaattctttgttgtttttaggagggaacagattcattgaagacatagaaatgatga

SEQ ID NO: 64005 - DNA, 110 bp, synthetic construct; identical to SEQ ID NO: 64004
  source 1..110: mol_type = other DNA

SEQ ID NO: 64006 - DNA, 110 bp, synthetic construct
  source 1..110: mol_type = other DNA
tccactaattgtatagcagggccatttctttctctctctctctctctctctctttttttttttttttgaattttagttcccagtgtgacttaattaattggatgagaaca

SEQ ID NO: 64007 - DNA, 110 bp, synthetic construct
  source 1..110: mol_type = other DNA
gcagggccatttctttctctctctctctctctctctctttttttttttttttgaattttagttcccagtgtgacttaattaattggatgagaacaagtgaaaaataacca

SEQ ID NO: 64008 - DNA, 110 bp, synthetic construct
  source 1..110: mol_type = other DNA
cctttcatttatcaacttcttcttctttcatatctaccaatctatctacctatcatcatcatcatctatcatctagctgtctagtgctctctttccgatgtacagaatta

SEQ ID NO: 64009 - DNA, 110 bp, synthetic construct
  source 1..110: mol_type = other DNA
catgatggaagataatgtgagaaaaaaggagtatgtatatgtatgtattactgggccactttgctgtacaacagaaattgatagaacactgtaaatcagctgtaacagaa

SEQ ID NO: 64010 - DNA, 110 bp, synthetic construct; identical to SEQ ID NO: 64009
  source 1..110: mol_type = other DNA

SEQ ID NO: 64011 - DNA, 110 bp, synthetic construct
  source 1..110: mol_type = other DNA
cctttctatcacacctagcattacagatcaccacacctgaaacaatcttaaaattagcccaccctgctcctgtatcaaagctttgttgttgatcactgtgcaagtgttca

SEQ ID NO: 64012 - DNA, 110 bp, synthetic construct
  source 1..110: mol_type = other DNA
atattggatgaaagaatacatgtatagaccaatggaacagagcaaagatgccagaaatagacccatacaaatatggttgactgatctttgacataagtggaaaagcaatt

SEQ ID NO: 64013 - DNA, 110 bp, synthetic construct
  source 1..110: mol_type = other DNA
aatagacccatacaaatatggttgactgatctttgacataagtggaaaagcaattccatggggaaagggtcatcttttcaatagatggtgctagaacagttagataccca

SEQ ID NO: 64014 - DNA, 110 bp, synthetic construct
  source 1..110: mol_type = other DNA
atccccattttcatgagtaatcactcttaatgtcaaggctcctgagtcctacctctgtctgtgatgctttgcatttccctgccggtgactgaagcaaccgccccctttcc

SEQ ID NO: 64015 - DNA, 110 bp, synthetic construct
  source 1..110: mol_type = other DNA
tgtctgtgatgctttgcatttccctgccggtgactgaagcaaccgccccctttcccaaatccctttaccaggccctctgtaaatggcccttgcttcatatttaacaaata

SEQ ID NO: 64016 - DNA, 110 bp, synthetic construct
  source 1..110: mol_type = other DNA
ttagtgtccactagtgactttgttgaaaagaaagtcccaaatcgaagtcccaattaaagacattagttgtagaaaataatccataaaaagtggccatcactgctatcacc

SEQ ID NO: 64017 - DNA, 110 bp, synthetic construct
  source 1..110: mol_type = other DNA
aaagacattagttgtagaaaataatccataaaaagtggccatcactgctatcaccacaatcctgccatgacatatataaatgcctatatcatttgggccttatatttagt

SEQ ID NO: 64018 - DNA, 110 bp, synthetic construct
  source 1..110: mol_type = other DNA
tggccaggacatccagtgttacagtgactgcttggcaggtaattgcactgatccttgggtcttatcctttttcattctgaggtacaattcattttttccaggtttaagac

SEQ ID NO: 64019 - DNA, 110 bp, synthetic construct
  source 1..110: mol_type = other DNA
tgggtcttatcctttttcattctgaggtacaattcattttttccaggtttaagaccaggccaaaatgagatgttaaatggggaggcagctgagataatcaccccttcact

SEQ ID NO: 64020 - DNA, 110 bp, synthetic construct
  source 1..110: mol_type = other DNA
aaaaagcaacacctagtctgaagagtgagagcttttttttgcagatagaaacagggtcatgaaatacagctcggtttgccaattcataaaatggggaaggtgatgctatc

SEQ ID NO: 64021 - DNA, 110 bp, synthetic construct
  source 1..110: mol_type = other DNA
gtcatgaaatacagctcggtttgccaattcataaaatggggaaggtgatgctatctttctatccatctctatgtgcttttaatgtggttaagttaaggcagtgcctgcaa

SEQ ID NO: 64022 - DNA, 110 bp, synthetic construct
  source 1..110: mol_type = other DNA
ctaattccaaggcaggctgggaaatattctttctgtatggttgtgtaaaggaaatgggattggttaacatctagctagtctctgccacagtatgagacatattttacgca

SEQ ID NO: 64023 - DNA, 110 bp, synthetic construct
  source 1..110: mol_type = other DNA
gggattggttaacatctagctagtctctgccacagtatgagacatattttacgcataaggaaggtgaggcttcctagacctcagggagctaggaggaggtgttggagcca

SEQ ID NO: 64024 - DNA, 110 bp, synthetic construct
  source 1..110: mol_type = other DNA
aatcatggagatgatatgaaattgactgatattttagaaacactgattgaacctaattctccatgggaagaactgtggctcagggaggggggaaataatgtgcttaaagt

SEQ ID NO: 64025 - DNA, 110 bp, synthetic construct; identical to SEQ ID NO: 64024
  source 1..110: mol_type = other DNA

SEQ ID NO: 64026 - DNA, 110 bp, synthetic construct
  source 1..110: mol_type = other DNA
ggtttgtggttaggaatttaggggaagggttcctacagggttccttaaaccatatcatgtaaacaatgaactccttcaagggcggaagctacaatagcatatgtaactcc

SEQ ID NO: 64027 - DNA, 110 bp, synthetic construct
  source 1..110: mol_type = other DNA
catgtaaacaatgaactccttcaagggcggaagctacaatagcatatgtaactccctatgaactgggtttttcatttgtataagattcacttgaactctattccatacca

SEQ ID NO: 64028 - DNA, 110 bp, synthetic construct
  source 1..110: mol_type = other DNA
ctttttggaccatagttcttaagcaggtgtgccagaaggtagtgtgcttaactctttgaattttaaagatattgtttaattagtatttattttgtagctaagctattggg

SEQ ID NO: 64029 - DNA, 110 bp, synthetic construct
  source 1..110: mol_type = other DNA
ttgaattttaaagatattgtttaattagtatttattttgtagctaagctattgggtctcccacagctaaattaatgcctcaagagaatgcgccacggggttggagatcat

SEQ ID NO: 64030 - DNA, 110 bp, synthetic construct
  source 1..110: mol_type = other DNA
agttatccttttctgaatcgtatttccagtgtcaagtctgagaacttgctgcctagacctatagtctaaatattttctcctgcgtctttttctacaatgttatagtttta

SEQ ID NO: 64031 - DNA, 110 bp, synthetic construct
  source 1..110: mol_type = other DNA
gtctgagaacttgctgcctagacctatagtctaaatattttctcctgcgtctttttctacaatgttatagttttacattttacatcgtcattgatatatttggagttaat

SEQ ID NO: 64032 - DNA, 110 bp, synthetic construct
  source 1..110: mol_type = other DNA
caaactgaaatttgaaatgatgtttttttttctctaaccagaactagataaacctttcaggtatggctttcttcacccaaggttagaacaaaccttaggaatattgtttt

SEQ ID NO: 64033 - DNA, 110 bp, synthetic construct
  source 1..110: mol_type = other DNA
ctacatatttgttcccgcaattgcctgggccaacagcacccttgtgtcgggcactaggttctcattttgaagtcaatttattcaaaaataagttctctttggatacccgg

SEQ ID NO: 64034 - DNA, 110 bp, synthetic construct
  source 1..110: mol_type = other DNA
aggttctcattttgaagtcaatttattcaaaaataagttctctttggatacccggtggatgaccagacctaggataggagagacacaagaaggagaaagcaccaccttgt

SEQ ID NO: 64035 - DNA, 110 bp, synthetic construct
  source 1..110: mol_type = other DNA
gagtcctcatgggtgctagttgggttcgttactgctcagccacaatgggaactccaagaatgtgatttttaaagtctccttaggagcacatagcacagaaacataattca

SEQ ID NO: 64036 - DNA, 110 bp, synthetic construct; identical to SEQ ID NO: 64035
  source 1..110: mol_type = other DNA

SEQ ID NO: 64037 - DNA, 110 bp, synthetic construct
  source 1..110: mol_type = other DNA
ttatttaattttgaaagaataaatgaacctaaagacatgagctaaggtcagggaactttcaaagtcaagagcaacatggacatggcagtaagaaggcttgaccagactta

SEQ ID NO: 64038 - DNA, 110 bp, synthetic construct
  source 1..110: mol_type = other DNA
ctttcaaagtcaagagcaacatggacatggcagtaagaaggcttgaccagacttagacatcataaaaatcctaataggaaaaggtattccttgaggaggtagccaagtgg

SEQ ID NO: 64039 - DNA, 110 bp, synthetic construct
  source 1..110: mol_type = other DNA
gtcggattcctttccactgagccaaaacgcaactccaaaaatgagctttttgtaacaaactaccataggggccaagaagagcttcaccatccaggcagaatccttcaaac

SEQ ID NO: 64040 - DNA, 110 bp, synthetic construct; identical to SEQ ID NO: 64039
  source 1..110: mol_type = other DNA

SEQ ID NO: 64041 - DNA, 110 bp, synthetic construct
  source 1..110: mol_type = other DNA
cacttcttggtttcaaactctatcaccaactcatagtaatctacacagtatggtactgggatagaaacagacacatagaccaatggagcagaataaagagcccacaaatg

SEQ ID NO: 64042 - DNA, 110 bp, synthetic construct
  source 1..110: mol_type = other DNA
atgtacatataacgcatgactgggtcactttgctgtaccatagaaattgaagctacaatgtaaatcaactataataaataacgaaagatggagaattcttgtcatatgta

SEQ ID NO: 64043 - DNA, 110 bp, synthetic construct
  source 1..110: mol_type = other DNA
caatgtaaatcaactataataaataacgaaagatggagaattcttgtcatatgtaaactatcgccttacgcatcctcagtcacaaccatgctctgctccaattccaaagg

SEQ ID NO: 64044 - DNA, 110 bp, synthetic construct
  source 1..110: mol_type = other DNA
gcaggggccacttcagcgcaaacacttgggctgaaggagccctgaaatgagtttttcaatgatcacagaacacattagaaacatttctcgctgagtccctttatgcgctg

SEQ ID NO: 64045 - DNA, 110 bp, synthetic construct
  source 1..110: mol_type = other DNA
tcaatgatcacagaacacattagaaacatttctcgctgagtccctttatgcgctgcaggcagagcagactggatggggtgaaaatcatcccggttctgcatctctgacag

SEQ ID NO: 64046 - DNA, 110 bp, synthetic construct
  source 1..110: mol_type = other DNA
ctttgaaaaacaatgcaagcttgcacctaccctgattcttatctgtggccctattttccactcctaaactatacaactatagtcaattctctcccaaagcagaagaacag

SEQ ID NO: 64047 - DNA, 110 bp, synthetic construct
  source 1..110: mol_type = other DNA
tggccctattttccactcctaaactatacaactatagtcaattctctcccaaagcagaagaacagtctttgaggcattaggctgctgtgaccctcctttgcctgacagcg

SEQ ID NO: 64048 - DNA, 110 bp, synthetic construct; identical to SEQ ID NO: 64047
  source 1..110: mol_type = other DNA

SEQ ID NO: 64049 - DNA, 110 bp, synthetic construct; identical to SEQ ID NO: 64047
  source 1..110: mol_type = other DNA

SEQ ID NO: 64050 - DNA, 110 bp, synthetic construct
  source 1..110: mol_type = other DNA
agccccatgagatctttctgagtgacagaccccgtgcgagattctgccagctctttggcaacaggttgcctcttaaatcagagacgagactctttcaccgtggcagaatc

SEQ ID NO: 64051 - DNA, 110 bp, synthetic construct
  source 1..110: mol_type = other DNA
gtcaatttctgctgtatggcaaagtgacccagttatacatttatctaccttcaacaaactgtctgcttttgagaggttttacatttattttcactgcatgtagtttcctt

SEQ ID NO: 64052 - DNA, 110 bp, synthetic construct
  source 1..110: mol_type = other DNA
gtttgcttttattttaattaattaattttaatttttaagagccgcctttggttcagggccaaattgagcaggaaggacagagctcccctacaccccctatccacccaagg

SEQ ID NO: 64053 - DNA, 110 bp, synthetic construct
  source 1..110: mol_type = other DNA
gggccaaattgagcaggaaggacagagctcccctacaccccctatccacccaaggcacaacctctcccactagcaagatcgcacacaacaaaaaccctgggtggttggta

SEQ ID NO: 64054 - DNA, 110 bp, synthetic construct
  source 1..110: mol_type = other DNA
tagattactgtaactctgactatgcctcggctaatatagtacctaactccttcacaatacaagccagtagaaaaacacaatcatgtggcacatactcacacgcacacatg

SEQ ID NO: 64055 - DNA, 110 bp, synthetic construct
  source 1..110: mol_type = other DNA
aatacaagccagtagaaaaacacaatcatgtggcacatactcacacgcacacatgtatgtacgtgtacagagaactcctcagggcatgatagcatgagtgacgtgaaggg

SEQ ID NO: 64056 - DNA, 110 bp, synthetic construct
  source 1..110: mol_type = other DNA
aaaacggaaacaactttagaattttccagaaatttcaaagttaagcctaccacttggaatatacccaaaatgcaccctatggaaagtgtcttaccagaagcactcttggt

SEQ ID NO: 64057 - DNA, 110 bp, synthetic construct
  source 1..110: mol_type = other DNA
ggaatatacccaaaatgcaccctatggaaagtgtcttaccagaagcactcttggtacaaaaccgtcttaagcaggcaccaggaaaagctatggacaactgtgtgaagaag

SEQ ID NO: 64058 - DNA, 110 bp, synthetic construct
  source 1..110: mol_type = other DNA
gaactccacagctcctttttctgactccgaatcctcttgcagcctttttatgaggacccttgtgattacactgggctctcctggatagtccaggataatctccccatctc

SEQ ID NO: 64059 - DNA, 110 bp, synthetic construct; identical to SEQ ID NO: 64058
  source 1..110: mol_type = other DNA

SEQ ID NO: 64060 - DNA, 110 bp, synthetic construct
  source 1..110: mol_type = other DNA
ctgtaaagccctactctgatcgtcccttttgatctcttcagaatgttttctaacaggacttatttagctatcacgctcttctataatgtcccctgtcagagagagaacaa

SEQ ID NO: 64061 - DNA, 110 bp, synthetic construct
  source 1..110: mol_type = other DNA
acacatcatttgatgttgcagcagaaactacatgctttgtctcatggccaaaagaagggcttcgaggatggtgaaatctagccgtcaccttcattcacaacttggtttct

SEQ ID NO: 64062 - DNA, 110 bp, synthetic construct
  source 1..110: mol_type = other DNA
agggcttcgaggatggtgaaatctagccgtcaccttcattcacaacttggtttcttctgagattattgccaattagtgcacactacgtcaatggcaacacctggtcacac

SEQ ID NO: 64063 - DNA, 110 bp, synthetic construct
  source 1..110: mol_type = other DNA
tcttcagaaagtaggcacagaaggaacccacctcaacataataaacgtcatatatgataagcccacagctaacatcatacgcaatagtgaaaagctgaaagtatttcttc

SEQ ID NO: 64064 - DNA, 110 bp, synthetic construct
  source 1..110: mol_type = other DNA
cacagaaggaacccacctcaacataataaacgtcatatatgataagcccacagctaacatcatacgcaatagtgaaaagctgaaagtatttcttctaagatcaggaacaa

SEQ ID NO: 64065 - DNA, 110 bp, synthetic construct
  source 1..110: mol_type = other DNA
atagcaatagaattataacagcgtaattttatatgtcaacttgactgagcaaagggacgaccagatagctggtaaaacattatttctgggtgattctatgttggtgttgc

SEQ ID NO: 64066 - DNA, 110 bp, synthetic construct
  source 1..110: mol_type = other DNA
gacgaccagatagctggtaaaacattatttctgggtgattctatgttggtgttgccggaagagattagcatttgcatcagtagcctgaataaaagagatctgcccttacc

SEQ ID NO: 64067 - DNA, 110 bp, synthetic construct
  source 1..110: mol_type = other DNA
aagctgttagagaaatataaattattaccaaaatgatataccactatttatctatcaggatattaaacagcttaaaaccagggagttccctttgtggctcagtggttaat

SEQ ID NO: 64068 - DNA, 110 bp, synthetic construct; identical to SEQ ID NO: 64067
  source 1..110: mol_type = other DNA

SEQ ID NO: 64069 - DNA, 110 bp, synthetic construct
  source 1..110: mol_type = other DNA
ttgggtggcagataagtcttctcaggttctcctttaaccaaagtgcttctttggaccaaccagagagtccctctggagtcctctgcagcattcccagctgttatgtatca

SEQ ID NO: 64070 - DNA, 110 bp, synthetic construct
  source 1..110: mol_type = other DNA
ccaaccagagagtccctctggagtcctctgcagcattcccagctgttatgtatcatgggcataacatcactgcatgcctggacatggagaatacaggaatgctgccaata

SEQ ID NO: 64071 - DNA, 110 bp, synthetic construct
  source 1..110: mol_type = other DNA
tctaaaaccaaaaagcaaaggggaaaaaaagctgaaaaaaataacagaatatccaagaactgtgggacaactacaaaaagtttaatatatgtgtaatgggactatcagaa

SEQ ID NO: 64072 - DNA, 110 bp, synthetic construct
  source 1..110: mol_type = other DNA
ttggaaaacaggtagctcctcaaaatactaagcatcgtgttaccatgacccagcaatactactcctacttatacaacaaaggaaaatgaaaacatatgtctacataaaaa

SEQ ID NO: 64073 - DNA, 110 bp, synthetic construct; identical to SEQ ID NO: 64072
  source 1..110: mol_type = other DNA

SEQ ID NO: 64074 - DNA, 110 bp, synthetic construct
  source 1..110: mol_type = other DNA
ggttcctagtcagattcatttccactgcaccagaagggaactcccaattctttgctttcaacaaaattgagtgagtacctaattgtcagctaaccattaaaaaactttga

SEQ ID NO: 64075 - DNA, 110 bp, synthetic construct
  source 1..110: mol_type = other DNA
aattctttgctttcaacaaaattgagtgagtacctaattgtcagctaaccattaaaaaactttgataaaagatcgctgctattttttttttatgtacttggaaagggtcc

SEQ ID NO: 64076 - DNA, 110 bp, synthetic construct
  source 1..110: mol_type = other DNA
gtctgagttgaaaggccactctctagatggagaacattgggacagttacttaactttctaagtctcatcagtttcttggtccataaaatgggagtgacattgataataat

SEQ ID NO: 64077 - DNA, 110 bp, synthetic construct
  source 1..110: mol_type = other DNA
ttctaagtctcatcagtttcttggtccataaaatgggagtgacattgataataatacctcatgagctaagtgtgaagcctaaatgacataattcatgagaaacacttggc

SEQ ID NO: 64078 - DNA, 110 bp, synthetic construct
  source 1..110: mol_type = other DNA
ccattgagaccgtggtctgatcaataccgcaaaaatgagttgctaactttggggccaaatcattctctttcttaaaccagtcgttgccgggctccttctggcacggacgt

SEQ ID NO: 64079 - DNA, 110 bp, synthetic construct
  source 1..110: mol_type = other DNA
caaatcattctctttcttaaaccagtcgttgccgggctccttctggcacggacgtgggatgtggagaagggggtggcaggggtggatttttgaattggccctgcgcccgc

SEQ ID NO: 64080 - DNA, 110 bp, synthetic construct
  source 1..110: mol_type = other DNA
agtaacccaactttggtgacataggctgcacacagctcttttaagcaatgagtggagaataatttgaaatataaaggccataatgagctttgggaattgtctctgactat

SEQ ID NO: 64081 - DNA, 110 bp, synthetic construct
  source 1..110: mol_type = other DNA
aaataataagtaaaatgcaagctagtataaagtatttaaagggtcctgtgaactaaagtagttggaagatgggatctcatcagaacatggaagaatgaacaagttaggca

SEQ ID NO: 64082 - DNA, 110 bp, synthetic construct
  source 1..110: mol_type = other DNA
acaggttgaagtattgacaagtcgaacaggacaaggaggaagctatcctttgacaagcaaatatgaataaaaagtcaaagagtgagaaaacgttcatttccatgcagtcc

SEQ ID NO: 64083 - DNA, 110 bp, synthetic construct
  source 1..110: mol_type = other DNA
ggaaaaaaatgtcatgctacaaaggacacagaaaaagcaaagatttgaagtaagtggagtaaggaatcatcatggcaaataaatatcagattagcagagggcttcctttt

SEQ ID NO: 64084 - DNA, 110 bp, synthetic construct
  source 1..110: mol_type = other DNA
ggagtaaggaatcatcatggcaaataaatatcagattagcagagggcttcctttttggtctggtgagtttttgctttttggaaacatgcgttgctttctccaagcagcac

SEQ ID NO: 64085 - DNA, 110 bp, synthetic construct
  source 1..110: mol_type = other DNA
gcaaggagggatttagttccttgtctgacagacagagatgcgcttgacttggccatcactgacaactggggctcctactttactcatgccgtattatttgccttgagctt

SEQ ID NO: 64086 - DNA, 110 bp, synthetic construct
  source 1..110: mol_type = other DNA
tcactgacaactggggctcctactttactcatgccgtattatttgccttgagctttgaacgagattttaaaaggttttttttttttttaatcatcttttccccaccatgt

SEQ ID NO: 64087 - DNA, 110 bp, synthetic construct
  source 1..110: mol_type = other DNA
tcaacacttattggccaattggtatccttccttgaactgataatttcatgaagggttgtgaaatgatggtgatttttctcatatgtcatttaatctacatttataagctg

SEQ ID NO: 64088 - DNA, 110 bp, synthetic construct
  source 1..110: mol_type = other DNA
ttgtgaaatgatggtgatttttctcatatgtcatttaatctacatttataagctgacacttttctataaagcactgctttcagtcatcagctaggctgcttgatttttct

SEQ ID NO: 64089 - DNA, 110 bp, synthetic construct
  source 1..110: mol_type = other DNA
ttcaagtgagccctccctctggcttgctgagcaggcagcaggtggagagacagagcgtggctgcagaccacagtcagggatcaccaggtccgggcactctttcatccttg

SEQ ID NO: 64090 - DNA, 110 bp, synthetic construct
  source 1..110: mol_type = other DNA
cgtggctgcagaccacagtcagggatcaccaggtccgggcactctttcatccttgtggctgtaaagtgtctgttccccgccctgatcatctgggtgggttggagacagaa

SEQ ID NO: 64091 - DNA, 110 bp, synthetic construct
  source 1..110: mol_type = other DNA
aactgcctgtggactgtggactcacaattagagttttgcagatgcaaactaagcattgttagagtgtgttcctctttgaggtgcttcagatgttaactgtctgtagggta

SEQ ID NO: 64092 - DNA, 110 bp, synthetic construct
  source 1..110: mol_type = other DNA
ttgttagagtgtgttcctctttgaggtgcttcagatgttaactgtctgtagggtatatatgttcatgtatatggataggtgttgtgtgtatctcacactgtgctgagtat

SEQ ID NO: 64093 - DNA, 110 bp, synthetic construct
  source 1..110: mol_type = other DNA
aggctggaaggcccttttgtgtggtcaccctctttggtatgtaggacagggagtacagggtgctggtacatttggctacccttgctttcattctccacgtaagtgataat

SEQ ID NO: 64094 - DNA, 110 bp, synthetic construct
  source 1..110: mol_type = other DNA
acccaagcaatcccccctcaacaccccgggaggtttcccttgcggctttggacgcctgccgactggtgtgacgtgtgcgggaggaggacgaacccgctgcgtttctctgt

SEQ ID NO: 64095 - DNA, 110 bp, synthetic construct
  source 1..110: mol_type = other DNA
agcactcgagtagaaattttcaaaatggtgtggtttctggtaatggaaaaggctagtgtaggatcgtatcatagaggcaagtgtcatagaaaagaccagataaagcagcc

SEQ ID NO: 64096 - DNA, 110 bp, synthetic construct
  source 1..110: mol_type = other DNA
gtgtaggatcgtatcatagaggcaagtgtcatagaaaagaccagataaagcagccatggggtcttggtgatgaagagccagagggaggattccataatggtgcttgctgt

SEQ ID NO: 64097 - DNA, 110 bp, synthetic construct
  source 1..110: mol_type = other DNA
accagcagctagagctcctctcaaaaacagttccctcagtggcagtactcgtggaacttgaataagcctgttgcttatgctcaaggtctgcaagagcctgaaaggggtgt

SEQ ID NO: 64098 - DNA, 110 bp, synthetic construct
  source 1..110: mol_type = other DNA
acttgaataagcctgttgcttatgctcaaggtctgcaagagcctgaaaggggtgtctgggaggcaggtgctcctccgaactgcccagctccacgggggcactcccggggc

SEQ ID NO: 64099 - DNA, 110 bp, synthetic construct
  source 1..110: mol_type = other DNA
tcctcgcccacaatctcccaggtgctctgaatatcacttaatccattaagaatcctgccccttcagggacccagccattggccaattccatagtactccagcttctatgc

SEQ ID NO: 64100 - DNA, 110 bp, synthetic construct
  source 1..110: mol_type = other DNA
tgccccttcagggacccagccattggccaattccatagtactccagcttctatgccacactgagtgtcagcacactcgacttcatgccatcaactaccctgtcatttacg

SEQ ID NO: 64101 - DNA, 110 bp, synthetic construct
  source 1..110: mol_type = other DNA
gtggaaaaagccaaccctctaagggctacatacaatatgattccgtttatactgaagtgacaaaaattatagagacagagaatggatgagtagttccaggggtgaaggat

SEQ ID NO: 64102 - DNA, 110 bp, synthetic construct
  source 1..110: mol_type = other DNA
agtgacaaaaattatagagacagagaatggatgagtagttccaggggtgaaggatgatgggaggacagggagtgaacagatgtaactatacaggggtagctagagggaga

SEQ ID NO: 64103 - DNA, 110 bp, synthetic construct
  source 1..110: mol_type = other DNA
gagcctgagccccaagctcaaataccccactggacagattattggatctctcacgggaatgttgcttatgcctgtgcttttcttttttctttctttcttctttttttttt

SEQ ID NO: 64104 - DNA, 110 bp, synthetic construct
  source 1..110: mol_type = other DNA
tttgcatttcatttttctggggctgaagctcccgtcaaccctgacattgatattcaaccgcctagacaatgtctccaagctggatgttccatctgcatctcaatctcaat

SEQ ID NO: 64105 - DNA, 110 bp, synthetic construct
  source 1..110: mol_type = other DNA
aaccgcctagacaatgtctccaagctggatgttccatctgcatctcaatctcaattcccatccccccaccccgccacaaacctgcccctcaacccagtgactcctatctc

SEQ ID NO: 64106 - DNA, 110 bp, synthetic construct
  source 1..110: mol_type = other DNA
acagaatggataaacaagtcttactgtatagcacagggactcatgtgcaatatcctatggtaaaccataatggaaaagaatacgaaaaagtatgtgtgtatatatatata

SEQ ID NO: 64107 - DNA, 110 bp, synthetic construct
  source 1..110: mol_type = other DNA
gggactcatgtgcaatatcctatggtaaaccataatggaaaagaatacgaaaaagtatgtgtgtatatatatatatgtacacacacatatgtataatgaacagagtcact

SEQ ID NO: 64108 - DNA, 110 bp, synthetic construct
  source 1..110: mol_type = other DNA
cagaacgaaaccacacttggctaaaaggaaagccaaggggaatacagaggagcacatggatgctggtgtacaatttctgccataatagaccttgcttttgatacaacagc

SEQ ID NO: 64109 - DNA, 110 bp, synthetic construct
  source 1..110: mol_type = other DNA
atggatgctggtgtacaatttctgccataatagaccttgcttttgatacaacagcttgaatacctgaaacaagccctcaaattggatttactacagttttaacatccttc

SEQ ID NO: 64110 - DNA, 110 bp, synthetic construct
  source 1..110: mol_type = other DNA
aatcccaaagaccaatctagttcatacagcctcttaaccttcctggtataacctctatctttggcttctggctaaaataatttccccacccccagcccagtcctctgaac

SEQ ID NO: 64111 - DNA, 110 bp, synthetic construct
  source 1..110: mol_type = other DNA
tatctttggcttctggctaaaataatttccccacccccagcccagtcctctgaacgctcctctgccaattctcctcaggatctttggtaaactgcatttgcaaacagggt

SEQ ID NO: 64112 - DNA, 110 bp, synthetic construct
  source 1..110: mol_type = other DNA
ataaaagctgtaactggggggaagtggatggataaattccagatggccccaggggggcactctgacattttcagtccctgactggaatgattacagtttaacagtgtgac

SEQ ID NO: 64113 - DNA, 110 bp, synthetic construct
  source 1..110: mol_type = other DNA
ggcactctgacattttcagtccctgactggaatgattacagtttaacagtgtgacgcaacctttttcatgtcacagcccacacagagcacacttgtctagcacacaggga

SEQ ID NO: 64114 - DNA, 110 bp, synthetic construct
  source 1..110: mol_type = other DNA
ttttgtaacagatctactattgagaagaatggccttctattatggagaggatactctttcacttaattaaggttcaaagtgaatgtttcatcaaagtcagttgcactctc

SEQ ID NO: 64115 - DNA, 110 bp, synthetic construct
  source 1..110: mol_type = other DNA
agaggatactctttcacttaattaaggttcaaagtgaatgtttcatcaaagtcagttgcactctcaatacactttcaaacgtttttaaattgtttaaattggtcaagttg

SEQ ID NO: 64116 - DNA, 110 bp, synthetic construct
  source 1..110: mol_type = other DNA
ggaggcctgtcattctttcatagacgtattcaaccgtcattcggttaaactgagctgtgtcgttcagcgtgcacacaggattcgaagaattctcataaactacgagatcc

SEQ ID NO: 64117 - DNA, 110 bp, synthetic construct
  source 1..110: mol_type = other DNA
tgtgtcgttcagcgtgcacacaggattcgaagaattctcataaactacgagatcctttatatccttcttctttccagagcccctgggtgaagagcctgtttggcattgtg

SEQ ID NO: 64118 - DNA, 110 bp, synthetic construct
  source 1..110: mol_type = other DNA
agagaactgccctcatgctgcctctggttctccatcagggtcaggcaaaccactcacagccctagaaagcagagggtctttgctttgcctgcaggtcccaaactgtcttt

SEQ ID NO: 64119 - DNA, 110 bp, synthetic construct
  source 1..110: mol_type = other DNA
acagccctagaaagcagagggtctttgctttgcctgcaggtcccaaactgtctttgtttttattaaaaaaattttattgggagttcccttgtgggacagtggattaagga

SEQ ID NO: 64120 - DNA, 110 bp, synthetic construct
  source 1..110: mol_type = other DNA
ggaacccacaacctcatggttactagttggatacgtttctgctgagccacaacgggaactcccagctgggtggctttactctccaaagacaacaggcaacaaaaacccaa

SEQ ID NO: 64121 - DNA, 110 bp, synthetic construct; identical to SEQ ID NO: 64120
  source 1..110: mol_type = other DNA

SEQ ID NO: 64122 - DNA, 110 bp, synthetic construct
  source 1..110: mol_type = other DNA
ctcagtttctgcatctgaaaaatgaggatcacgtctaacagtatctttctcgctgctgtgagaattccacgagctctaatacgtggacagcccttggcacagtgcctggt

SEQ ID NO: 64123 - DNA, 110 bp, synthetic construct
  source 1..110: mol_type = other DNA
ctgtgagaattccacgagctctaatacgtggacagcccttggcacagtgcctggtacatggctaactcctgctgcacacttactgaaatgatgctgtctacgaggcagat

SEQ ID NO: 64124 - DNA, 110 bp, synthetic construct
  source 1..110: mol_type = other DNA
actacaataatactaattttcattttaggaaaaaagggttgcccatttttcatatcagtggaatttgatggaaagagataggtgcatctctggagttaatcgttaccatg

SEQ ID NO: 64125 - DNA, 110 bp, synthetic construct
  source 1..110: mol_type = other DNA
cagtggaatttgatggaaagagataggtgcatctctggagttaatcgttaccatgtgacaaaggtaaggtgactctgatgctagccatctgtcacggtggaaatggcttc

SEQ ID NO: 64126 - DNA, 110 bp, synthetic construct
  source 1..110: mol_type = other DNA
tttcttggatctttcttttgaatgaccagacttcttcttcctcttcttctcttctgcataaaatacagattaaaaaaaacctaacttctaaagaagtatttctgaacact

SEQ ID NO: 64127 - DNA, 110 bp, synthetic construct; identical to SEQ ID NO: 64126
  source 1..110: mol_type = other DNA

SEQ ID NO: 64128 - DNA, 110 bp, synthetic construct
  source 1..110: mol_type = other DNA
ctccagcaaatcatttctgtttaattgctagcttcttcaggattactggctgctgggtatggaggactgggtcaggagacatatccaaactgctccagaactagaatgaa

SEQ ID NO: 64129 - DNA, 110 bp, synthetic construct
  source 1..110: mol_type = other DNA
ggtatggaggactgggtcaggagacatatccaaactgctccagaactagaatgaagtctctctctttcctctctgtgcccaaatcagcttgtaaaatcaagcaaagcctc

SEQ ID NO: 64130 - DNA, 110 bp, synthetic construct
  source 1..110: mol_type = other DNA
taaaatttttgccattttaattacagtgtgtcttgctgtgatcctctttgggttgatcctgtgttggccttcctgtgtttactagagctggatgtctgtttcccttccca

SEQ ID NO: 64131 - DNA, 110 bp, synthetic construct
  source 1..110: mol_type = other DNA
atcctgtgttggccttcctgtgtttactagagctggatgtctgtttcccttcccaggttgagggagttttcagctgttatgtcttcaaatatgtctttttccctttctag

SEQ ID NO: 64132 - DNA, 110 bp, synthetic construct
  source 1..110: mol_type = other DNA
catccttaggctagtccctgagacccacaggctgctacgggccaccagggataggcagcctggctacctgagacatattaggaagcttccataattagagagagaaccag

SEQ ID NO: 64133 - DNA, 110 bp, synthetic construct
  source 1..110: mol_type = other DNA
cagcctggctacctgagacatattaggaagcttccataattagagagagaaccagagagcaagaggcagggtatcgcggaattctcttctctcgaaacatacctgaaagt

SEQ ID NO: 64134 - DNA, 110 bp, synthetic construct
  source 1..110: mol_type = other DNA
aggtttccatcagccctggtgacaattcacctgtgagagattcagctgaacacaagagagacagggccaattctctgtgtatgtggaataggcaactgctcatgcccgtg

SEQ ID NO: 64135 - DNA, 110 bp, synthetic construct
  source 1..110: mol_type = other DNA
aattcacaaaactatgcttctggtcctatggcaatattaatattaataataataacaatgatgaagactgctattcatagacttcttggtacttgccaggctctgtgcta

SEQ ID NO: 64136 - DNA, 110 bp, synthetic construct
  source 1..110: mol_type = other DNA
caatgatgaagactgctattcatagacttcttggtacttgccaggctctgtgctatgctatttatatgcattattcaatgttaagaagtaagtgctgttattatcctcat

SEQ ID NO: 64137 - DNA, 110 bp, synthetic construct
  source 1..110: mol_type = other DNA
aaccacactacttgctacccataattttttttaaattaaaaaaaacattttttagacacacccacagcatgtggaagttcccagggctagggatcaaattcaagccagag

SEQ ID NO: 64138 - DNA, 110 bp, synthetic construct
  source 1..110: mol_type = other DNA
tacccataattttttttaaattaaaaaaaacattttttagacacacccacagcatgtggaagttcccagggctagggatcaaattcaagccagagctgcaacctatacca

SEQ ID NO: 64139 - DNA, 110 bp, synthetic construct
  source 1..110: mol_type = other DNA
caaatcctgctgcttaagcaactaagtttatgtaatattctaaatcctttgttattttaacaattcattaagttctcttatagccgcactttgtggtgcccccaattaca

SEQ ID NO: 64140 - DNA, 110 bp, synthetic construct
  source 1..110: mol_type = other DNA
tttaacaattcattaagttctcttatagccgcactttgtggtgcccccaattacaacagtaatgtcaaagatcactgtcatggagttcccatcgtggcgcagtggaaatg

SEQ ID NO: 64141 - DNA, 110 bp, synthetic construct
  source 1..110: mol_type = other DNA
acctcgacatgataaaaggcatttaatgaaacacccacagctaacatacttaacggtgaaagactgaaagcttcccccctaagatgaggaacaaaacaaagctgcgtgct

SEQ ID NO: 64142 - DNA, 110 bp, synthetic construct
  source 1..110: mol_type = other DNA
ttctgcatatagttaagttattgctggctgtaccagtgtaggaatgacttgtgaaaacatttctgaagtggtaaatctaaagcttatttaagattagttattgcataaag

SEQ ID NO: 64143 - DNA, 110 bp, synthetic construct
  source 1..110: mol_type = other DNA
agcagattatcctgcacttggttgagacctcttaccgaacccttggaataaataatatcttcagctcagagagtgggtgttgaatagagattttatgactcataacggag

SEQ ID NO: 64144 - DNA, 110 bp, synthetic construct
  source 1..110: mol_type = other DNA
tatcttcagctcagagagtgggtgttgaatagagattttatgactcataacggagtgtcaaaatagccattgctgatgtatgggtcctttgtcaattttggaaatgacac

SEQ ID NO: 64145 - DNA, 110 bp, synthetic construct
  source 1..110: mol_type = other DNA
gagaataagttttcacgtaaaagatggcctcctgtgtcttatacctcagaatatggagctacatctacaatttaatccttggaatactcagattgataatgcaacttgat

SEQ ID NO: 64146 - DNA, 110 bp, synthetic construct
  source 1..110: mol_type = other DNA
tgttgaaaatagtagacattaatgtttagaagaatagagactgatgaggtaaatattatttatgtctgggaatgggattctctttctgttaagccattaatgtgtgattg

SEQ ID NO: 64147 - DNA, 110 bp, synthetic construct
  source 1..110: mol_type = other DNA
ttatttatgtctgggaatgggattctctttctgttaagccattaatgtgtgattgagtcaatgtagtaaggagttaaagtgggtttaggttttctcatgtttatttttac

SEQ ID NO: 64148 - DNA, 110 bp, synthetic construct
  source 1..110: mol_type = other DNA
tcttaactcttcatagtctagctaaatatagacccaatttatcaagcggtacagttgaaatttctatctgtagtctctgtacataccttaatagtgactacacaagtttt

SEQ ID NO: 64149 - DNA, 110 bp, synthetic construct
  source 1..110: mol_type = other DNA
tgaaatttctatctgtagtctctgtacataccttaatagtgactacacaagtttttccaagagtgaaatgaagggatagtctatcaaagcctgaactgcaatctttatct

SEQ ID NO: 64150 - DNA, 110 bp, synthetic construct
  source 1..110: mol_type = other DNA
tttgcatccaaaaaccccaagctgcccttccatcaccctccctcctccaccttcccccttcccccttgggaaccccaagtcagctctccttggccgtgatctgtttcttt

SEQ ID NO: 64151 - DNA, 110 bp, synthetic construct
  source 1..110: mol_type = other DNA
ttgtgtctcctcttgccttgctttcttttaggacatctactgataccgggctgatgcatgtctaggggtgtccttgttttgaatttcagctctgccatttactagctata

SEQ ID NO: 64152 - DNA, 110 bp, synthetic construct
  source 1..110: mol_type = other DNA
gcatgtctaggggtgtccttgttttgaatttcagctctgccatttactagctatataaatttgggccagttatttaatctctcagtgtcagttatctatatgtgtgaaac

SEQ ID NO: 64153 - DNA, 110 bp, synthetic construct
  source 1..110: mol_type = other DNA
tatatgtttgttacttgttagtgtggatgctaagagaaatagtatcagaaaaaattggattaactggccaatactttgttagttggcatatctctgcctactcatataaa

SEQ ID NO: 64154 - DNA, 110 bp, synthetic construct
  source 1..110: mol_type = other DNA
tggattaactggccaatactttgttagttggcatatctctgcctactcatataaaggaagccagtgataggaataacgagtcaaattaggagaactaggctttagtctga

SEQ ID NO: 64155 - DNA, 110 bp, synthetic construct
  source 1..110: mol_type = other DNA
gggaactccagtttctccatcttaaaacctttgtcatgttaatttcatgcttcagggtttcccctactacgtgcgtattttagtttcagatctgacatttgcatggccca

SEQ ID NO: 64156 - DNA, 110 bp, synthetic construct
  source 1..110: mol_type = other DNA
ggtttcccctactacgtgcgtattttagtttcagatctgacatttgcatggcccatatgtgggaattttgatttcttgtgggagactttttctctaccctgagccccagt

SEQ ID NO: 64157 - DNA, 110 bp, synthetic construct
  source 1..110: mol_type = other DNA
cccaatataatttttattctactgtagagcatgatgacccagttatgcatacatgtacaaatcctattttcacacattaccacgctctgtcattagtgactagacatagt

SEQ ID NO: 64158 - DNA, 110 bp, synthetic construct
  source 1..110: mol_type = other DNA
attctactgtagagcatgatgacccagttatgcatacatgtacaaatcctattttcacacattaccacgctctgtcattagtgactagacatagttcttagtgctacaca

SEQ ID NO: 64159 - DNA, 110 bp, synthetic construct
  source 1..110: mol_type = other DNA
ttctccaaatatactttctaccccattttgtcttattctgggacttctattttgcctatgttggtatgcctagtgttgtcacgcacatctattaggcttttcaattttct

SEQ ID NO: 64160 - DNA, 110 bp, synthetic construct
  source 1..110: mol_type = other DNA
ctatgttggtatgcctagtgttgtcacgcacatctattaggcttttcaattttcttaaaatttttttcccctctattcctaagatgcagcagtctcaatggactcatcat

SEQ ID NO: 64161 - DNA, 110 bp, synthetic construct
  source 1..110: mol_type = other DNA
gcaagtgccatttttgaatcttcactctagctcattagctctaagacctggtctgacctaccagcccatctgtaccaatagtgggatgcctcaggcaaagcagctagcca

SEQ ID NO: 64162 - DNA, 110 bp, synthetic construct
  source 1..110: mol_type = other DNA
tttcaaattgcaaatgtgaaactggttggttaggttcagaatgtattggaatgcatatgaagatattaagaatcaattaagcaggcagttgaaagtggatctggaggcct

SEQ ID NO: 64163 - DNA, 110 bp, synthetic construct
  source 1..110: mol_type = other DNA
ttgtggagctaggatttgaatttaggtactctaaatggttgaccacttgtaaactagctttctgtatgccatgccacttcaaattcagtatattgaaaattaaactccta

SEQ ID NO: 64164 - DNA, 110 bp, synthetic construct
  source 1..110: mol_type = other DNA
agctttctgtatgccatgccacttcaaattcagtatattgaaaattaaactcctaaatccccacccctaaccctaaagaagtctctttaatgaaactttctctacttctt

SEQ ID NO: 64165 - DNA, 110 bp, synthetic construct
  source 1..110: mol_type = other DNA
ataagaatcagaataaaacatttatttctcagtattttccctcccaaaagaagcagtttaaagtcagatttcaaattggaatggagttgagagccgagatacaaagtcaa

SEQ ID NO: 64166 - DNA, 110 bp, synthetic construct
  source 1..110: mol_type = other DNA
gtttaaagtcagatttcaaattggaatggagttgagagccgagatacaaagtcaaataatacagaaactaactggagcagaaaagagaggagatgcaaaacaatgaaagg

SEQ ID NO: 64167 - DNA, 110 bp, synthetic construct
  source 1..110: mol_type = other DNA
aaaaatgctgtgtattcacttcatttaatatacatcaccagcacacagcacatgcttgaaagcttttaggggaattatatgtgtgacatagcacatttgtagaaatctgc

SEQ ID NO: 64168 - DNA, 110 bp, synthetic construct
  source 1..110: mol_type = other DNA
ttgaaagcttttaggggaattatatgtgtgacatagcacatttgtagaaatctgctattttgtaaatggccatgagaattcaaattgaaccccatcaaaccagatggtgg

SEQ ID NO: 64169 - DNA, 110 bp, synthetic construct
  source 1..110: mol_type = other DNA
gagaaaagggaatcctcctgcactgttggtgggcatgtaagctagtacaacaactatggaaagtcttcttttaaaaacttgaactcattttggcacatcccctgaattac

SEQ ID NO: 64170 - DNA, 110 bp, synthetic construct
  source 1..110: mol_type = other DNA
atggaaagtcttcttttaaaaacttgaactcattttggcacatcccctgaattacccatatgtatgtgaaaatctaatgacacctggaaatgggacaagttcctcatttt

SEQ ID NO: 64171 - DNA, 110 bp, synthetic construct
  source 1..110: mol_type = other DNA
tacctcttggctatcatgaataatgctgtaatgaacatgagaatgcaaatatctcttcaagatccttgcttcagtctaaatttcttttctgatatggatacctaagggat

SEQ ID NO: 64172 - DNA, 110 bp, synthetic construct
  source 1..110: mol_type = other DNA
tgccatcatggtttatttaaagccttactaaaaattgaagacttccttactgtatctctttgaaagacataaaaaatggattactattcctaacacagattctgtgtggc

SEQ ID NO: 64173 - DNA, 110 bp, synthetic construct; identical to SEQ ID NO: 64172
  source 1..110: mol_type = other DNA

SEQ ID NO: 64174 - DNA, 110 bp, synthetic construct
  source 1..110: mol_type = other DNA
aaccctgtacctgaatgtttatcacagctttattcatagtagtcccaaactggacacaacccaaatgtttctcaggcagaagatgaataaactgtggcacaactatacat

SEQ ID NO: 64175 - DNA, 110 bp, synthetic construct
  source 1..110: mol_type = other DNA
acaacccaaatgtttctcaggcagaagatgaataaactgtggcacaactatacataagaataaattgtggtacaaccagaattcaaaaggatccaactcttgatatatat

SEQ ID NO: 64176 - DNA, 110 bp, synthetic construct
  source 1..110: mol_type = other DNA
tggaataccaaaatgagagaatttatcattagcaggcttgccctaaatttaaaaagtataatttaggctgatggcaaattattccacattgcagtttggagatataatat

SEQ ID NO: 64177 - DNA, 110 bp, synthetic construct; identical to SEQ ID NO: 64176
  source 1..110: mol_type = other DNA

SEQ ID NO: 64178 - DNA, 110 bp, synthetic construct
  source 1..110: mol_type = other DNA
tgagcatgcagttttctttttagtgtctggtctacctttggtaatcaatgtgatctggcttccttaaatgagtttcaatgtgttcccccttctggttttttgaaacagtt

SEQ ID NO: 64179 - DNA, 110 bp, synthetic construct
  source 1..110: mol_type = other DNA
tggcttccttaaatgagtttcaatgtgttcccccttctggttttttgaaacagtttaaaaatatttggtaaggacattatgcatgagtccctggtcctggtcctttcttt

SEQ ID NO: 64180 - DNA, 110 bp, synthetic construct
  source 1..110: mol_type = other DNA
tttgtttaagtaataaagaaaatacatatagctaagcctgtagacaagaacaatgtcttaactgcaatttgttgagaagaggaaagtaagcacatgcatttcagactact

SEQ ID NO: 64181 - DNA, 110 bp, synthetic construct
  source 1..110: mol_type = other DNA
tttctcttctgcagatgagtaaactgcagctaaaggtattaaacaacttgtgtaaaatcttgttttctttctgcaaactaaactatatgcatctttaggacaatgaccac

SEQ ID NO: 64182 - DNA, 110 bp, synthetic construct
  source 1..110: mol_type = other DNA
tgagtaaactgcagctaaaggtattaaacaacttgtgtaaaatcttgttttctttctgcaaactaaactatatgcatctttaggacaatgaccacaatgtaaatctctgt

SEQ ID NO: 64183 - DNA, 110 bp, synthetic construct
  source 1..110: mol_type = other DNA
gttgccaggggttgaggggaaggtgggggtgaataggcagaatagagaagatttggtgcagttaaaatactctatatgataccacaatggtagatacaggtccttataca

SEQ ID NO: 64184 - DNA, 110 bp, synthetic construct
  source 1..110: mol_type = other DNA
ggggtgaataggcagaatagagaagatttggtgcagttaaaatactctatatgataccacaatggtagatacaggtccttatacatttgtataaatccagagaatttata

SEQ ID NO: 64185 - DNA, 110 bp, synthetic construct
  source 1..110: mol_type = other DNA
ttttgaagtaaagggacttcaaatgacagcatgaagttaataactaaagcattaggaaccctgaggggatcctgtaagggagcaaagagcaaatacacaatgcaagtaga

SEQ ID NO: 64186 - DNA, 110 bp, synthetic construct
  source 1..110: mol_type = other DNA
gaaccctgaggggatcctgtaagggagcaaagagcaaatacacaatgcaagtagagagaaaacaaatacatgacagtgcttaatggacttccaccaaaacatcttcctta

SEQ ID NO: 64187 - DNA, 110 bp, synthetic construct
  source 1..110: mol_type = other DNA
ttctagagagttggcagagctagctgggtcacttcaaggcaaaggaacacttcgcgagggcaggtgagactggcaggcttgccctggtgcacctgggcctcagagctctt

SEQ ID NO: 64188 - DNA, 110 bp, synthetic construct
  source 1..110: mol_type = other DNA
cactatccaaaaaaccagacccctatccaaaaaatcagatccaatgggatgcttcacaaatgaggaaccatgtatgagtcctaagggacaaggtttaaataaagaatttc

SEQ ID NO: 64189 - DNA, 110 bp, synthetic construct
  source 1..110: mol_type = other DNA
acaaatgaggaaccatgtatgagtcctaagggacaaggtttaaataaagaatttcaacaataacatattaatcagaatcttgccacatttccttctgggagttctgttat

SEQ ID NO: 64190 - DNA, 110 bp, synthetic construct
  source 1..110: mol_type = other DNA
agcatttagacactaagcttctgggaacaaggctcttcagaaagaaaagaaaatttacagccagatttatagccagatgccttaaaatatgatttaacatgacttctttt

SEQ ID NO: 64191 - DNA, 110 bp, synthetic construct
  source 1..110: mol_type = other DNA
tacagccagatttatagccagatgccttaaaatatgatttaacatgacttcttttgtagcttgatacccacagcaaacctaaatcacactgctttctcagtggtaaaaat

SEQ ID NO: 64192 - DNA, 110 bp, synthetic construct
  source 1..110: mol_type = other DNA
gggcctaggtatgatgcacttttaaccagaaatgtaagtgatataaggacaatttttttttgtattgtcacccctatgacagggtcacagcataagctaagtcatctttc

SEQ ID NO: 64193 - DNA, 110 bp, synthetic construct
  source 1..110: mol_type = other DNA
ttttttgtattgtcacccctatgacagggtcacagcataagctaagtcatctttcagattccaaatcagaagatttggcatcaagaaaacttagccaaacctggataacc

SEQ ID NO: 64194 - DNA, 110 bp, synthetic construct
  source 1..110: mol_type = other DNA
aatagtatgtgtagtaaggctgcaaggattaaatctatgaaaagtacttaatgcactacctggcacattgtacgtactctcagtagatattatttattagtattaaatac

SEQ ID NO: 64195 - DNA, 110 bp, synthetic construct
  source 1..110: mol_type = other DNA
ttttttaaaggggaaagacttagttggctctcatgcccttttcttcttgatcctgcctggaacatgaaattgaggctggaagtttaatatcatgagttgacaaagcatga

SEQ ID NO: 64196 - DNA, 110 bp, synthetic construct
  source 1..110: mol_type = other DNA
aaagtacttgagtagaaacagagatatcaatggaaccagttggaaagccctgggaaacaaaccagtattcataaatatttgtagtggcattaaaacacaattgagataga

SEQ ID NO: 64197 - DNA, 110 bp, synthetic construct
  source 1..110: mol_type = other DNA
caagctgagctgagcacctcagcaggcagtctgggagttctgactaggccccaaactggaataaactactcaggcacaaacacagtcatgtctgcataattcagtgggta

SEQ ID NO: 64198 - DNA, 110 bp, synthetic construct
  source 1..110: mol_type = other DNA
ctggaataaactactcaggcacaaacacagtcatgtctgcataattcagtgggtagatcctgtgctcagtaagtggaattttaaagccaaataggccaaaaacagggaga

SEQ ID NO: 64199 - DNA, 110 bp, synthetic construct
  source 1..110: mol_type = other DNA
atgcctggagggcaaactctataaatgtcctaattttctacttagatcctgtccaattatttccaatggactacatgatcttcaaaggcatggtcatgtctaagaaaaaa

SEQ ID NO: 64200 - DNA, 110 bp, synthetic construct
  source 1..110: mol_type = other DNA
attatttccaatggactacatgatcttcaaaggcatggtcatgtctaagaaaaaaatgttcaaatgcaatgcttcatcacctgttcaccagacagaatgataacatgtca

SEQ ID NO: 64201 - DNA, 110 bp, synthetic construct
  source 1..110: mol_type = other DNA
caacaattaatgatggtgatggtctgggctttagaacattcacatgcctttctgggcttctttgtccagccagagaagacaatgtccaaataatatttctatagataata

SEQ ID NO: 64202 - DNA, 110 bp, synthetic construct
  source 1..110: mol_type = other DNA
gggctttagaacattcacatgcctttctgggcttctttgtccagccagagaagacaatgtccaaataatatttctatagataatatttataccatttacataatatgtat

SEQ ID NO: 64203 - DNA, 110 bp, synthetic construct
  source 1..110: mol_type = other DNA
agtaaggaattcccctcaatgctcagcctgctctttaatgggtccttagcgcataaataaggcaatggcagctaataaaataataactgttcattaaggggtaaggtatt

SEQ ID NO: 64204 - DNA, 110 bp, synthetic construct
  source 1..110: mol_type = other DNA
aataaggcaatggcagctaataaaataataactgttcattaaggggtaaggtattcactggtaaatgtgttatgtcacagcaacaatacaccaagaaataaggcaagagg

SEQ ID NO: 64205 - DNA, 110 bp, synthetic construct
  source 1..110: mol_type = other DNA
tagcttacaaatgacagacctgaaccagtaaggtaactggcccaagaccacacagcaaattagggactggaccatataaaaacctatagtagaagttcctgtgctggcgc

SEQ ID NO: 64206 - DNA, 110 bp, synthetic construct
  source 1..110: mol_type = other DNA
cagtaaggtaactggcccaagaccacacagcaaattagggactggaccatataaaaacctatagtagaagttcctgtgctggcgcagcagtaacaaacccaactagtatc

SEQ ID NO: 64207 - DNA, 110 bp, synthetic construct
  source 1..110: mol_type = other DNA
tgctgtgagagaccatcccaggttcctcatgcccctgtcctcctgcggcacttgattcgcattgggctttccacttaggttacctacgtatattgagatggagcaagggt

SEQ ID NO: 64208 - DNA, 110 bp, synthetic construct
  source 1..110: mol_type = other DNA
gacatgaaatgaagaaaaggtagaggataaggagctaaaactctgcatagcatggccagggaagggctttcagaagaggtgattttgaaataatgatctaaatggtgaga

SEQ ID NO: 64209 - DNA, 110 bp, synthetic construct
  source 1..110: mol_type = other DNA
ccagggaagggctttcagaagaggtgattttgaaataatgatctaaatggtgagaaagggccaattatatgaagaatcagggaaagttcatgtaatgcataaggaacaac

SEQ ID NO: 64210 - DNA, 110 bp, synthetic construct
  source 1..110: mol_type = other DNA
gctcactttttcttgtaatgaatgggtacctgacatgtcataatgcctagccagtattcactaaattgaatatacatggttggaggtaagctataatacttatattatta

SEQ ID NO: 64211 - DNA, 110 bp, synthetic construct
  source 1..110: mol_type = other DNA
attcactaaattgaatatacatggttggaggtaagctataatacttatattattattatcagctaccacttgttgcatatttaccagataccagacattgtgccaagtgc

SEQ ID NO: 64212 - DNA, 110 bp, synthetic construct
  source 1..110: mol_type = other DNA
ttattatgaggtcattctacaggctggttactactttttggaggattcaaggagtctcacacctccaagttcccatcctagaagaacttagctgagtagacatgaactca

SEQ ID NO: 64213 - DNA, 110 bp, synthetic construct
  source 1..110: mol_type = other DNA
ctcacacctccaagttcccatcctagaagaacttagctgagtagacatgaactcagtcaccaggaagggctcaaaatgaagagggcataaatgctctcaggaagaggaat

SEQ ID NO: 64214 - DNA, 110 bp, synthetic construct
  source 1..110: mol_type = other DNA
taatttttagaggttgttccctcaaaaaatcactaggtaccaagaagcaaatgtagtcacttaaagtgaggtttggatgaagcatagggtgaaaggagggcttcccactt

SEQ ID NO: 64215 - DNA, 110 bp, synthetic construct
  source 1..110: mol_type = other DNA
gtcacttaaagtgaggtttggatgaagcatagggtgaaaggagggcttcccacttttgtctgtgataaatttctgttttcatcattcagatatggttttgttagagcggg

SEQ ID NO: 64216 - DNA, 110 bp, synthetic construct
  source 1..110: mol_type = other DNA
acctaactttctataatcttcccttgtactactgcaagccagaaaacctacatttcaagactctcttccagctagtttcgttagcttttgcccatggaaggccctttcat

SEQ ID NO: 64217 - DNA, 110 bp, synthetic construct
  source 1..110: mol_type = other DNA
caagactctcttccagctagtttcgttagcttttgcccatggaaggccctttcatgagataatgaagtgggagggaagagtgcataggtgatcccaaagaggaccagcaa

SEQ ID NO: 64218 - DNA, 110 bp, synthetic construct
  source 1..110: mol_type = other DNA
agtttagtcaaagcacatcttccccttttatattcacaattccagagacctttaaaatgtttggcttttgtgaggaaatagtccattcataaagcaacaataacaaaaaa

SEQ ID NO: 64219 - DNA, 110 bp, synthetic construct; identical to SEQ ID NO: 64218
  source 1..110: mol_type = other DNA

SEQ ID NO: 64220 - DNA, 110 bp, synthetic construct
  source 1..110: mol_type = other DNA
taaaaggctcttgcaccacaggaatgcactaaaaccagctgcatcaaagctccgagaaaattcatgacactctcaccatagtccctcctcctggcacagcaccacacaat

SEQ ID NO: 64221 - DNA, 110 bp, synthetic construct
  source 1..110: mol_type = other DNA
tcttccctagagcctttggagggagccagcaccttgatttcagacttccagcctccagaactgtgagagaataaatgtctgttgtttaaaaccactcagtttcagctaat

SEQ ID NO: 64222 - DNA, 110 bp, synthetic construct
  source 1..110: mol_type = other DNA
cagaactgtgagagaataaatgtctgttgtttaaaaccactcagtttcagctaatttgttacagcagccataggaaactaattcaggatgtttctatttctttgtggtta

SEQ ID NO: 64223 - DNA, 110 bp, synthetic construct
  source 1..110: mol_type = other DNA
gtcgttttagccattttttaaagataaaaaatgcttattgaactagaaacatacttcgataaagacccaaattatattaagggaaagaacagaggactgctcacaggtga

SEQ ID NO: 64224 - DNA, 110 bp, synthetic construct
  source 1..110: mol_type = other DNA
tcgataaagacccaaattatattaagggaaagaacagaggactgctcacaggtgataaattttctgtttactgatgttctgtcagcagtttaaaaaatgcaagcaaaatc

SEQ ID NO: 64225 - DNA, 110 bp, synthetic construct
  source 1..110: mol_type = other DNA
tttgtagataagtgctacaaatagtaattttttccccctgctaacaccttaaccattacttcagatttataaagtattcctgtctcatagcctctggacaactggttatt

SEQ ID NO: 64226 - DNA, 110 bp, synthetic construct
  source 1..110: mol_type = other DNA
accttaaccattacttcagatttataaagtattcctgtctcatagcctctggacaactggttattatagcaataaaaatggaaatagaagaaatctagttagagaaaact

SEQ ID NO: 64227 - DNA, 110 bp, synthetic construct
  source 1..110: mol_type = other DNA
cttttcttaaccattctgttcttatctgtcaaatggagagaatgtttccctcacaagattctaggaataaagctaaagaacccaagaggaaaacatctagcacacagtag

SEQ ID NO: 64228 - DNA, 110 bp, synthetic construct
  source 1..110: mol_type = other DNA
tgagaaatcagaaaagatcttgagtacagcctatgggcaatcacccctgtgggggctctggaggtaaatgatgaggtatagtatgacatggtgagaggtcaccagaagtt

SEQ ID NO: 64229 - DNA, 110 bp, synthetic construct
  source 1..110: mol_type = other DNA
ctctggaggtaaatgatgaggtatagtatgacatggtgagaggtcaccagaagttgcctcacttagttcaagttgttgccaagagttctgaagtctcccctaagaatttc

SEQ ID NO: 64230 - DNA, 110 bp, synthetic construct
  source 1..110: mol_type = other DNA
gaatgctctacactgttctgtcttctaacttcatgagctagatgtccagcatgtcttgctggctgctgttgctttaggggaagaaaccatcttctcaggaccatgtggtg

SEQ ID NO: 64231 - DNA, 110 bp, synthetic construct
  source 1..110: mol_type = other DNA
aattcattattactctccccaattctgccagtcattccaccatttctcaatttatttgcacctagcaacatgccaaatttggtagagattctactaaagcctttttggag

SEQ ID NO: 64232 - DNA, 110 bp, synthetic construct
  source 1..110: mol_type = other DNA
ttgcacctagcaacatgccaaatttggtagagattctactaaagcctttttggagtatactgccccaccccctgaaaagtgacttcttttccttttcatcaacttttgga

SEQ ID NO: 64233 - DNA, 110 bp, synthetic construct
  source 1..110: mol_type = other DNA
ataaaacagtttgtctgatctcataagacacatatagagacacaaatatactacaagtctgggcatgggaacatttgacacctgagaagtgtgagaagaatattctagaa

SEQ ID NO: 64234 - DNA, 110 bp, synthetic construct
  source 1..110: mol_type = other DNA
agtctgggcatgggaacatttgacacctgagaagtgtgagaagaatattctagaagtcaaaattacagttgctagataggaaactgaagcccgaccaatctgacacaatg

SEQ ID NO: 64235 - DNA, 110 bp, synthetic construct
  source 1..110: mol_type = other DNA
atgtgcatttcgattctctgaaaattggtatcatatgtgtggtctatatggaaattctctactaggcagaaaactccattccccaatcgatttaactactgtccacttaa

SEQ ID NO: 64236 - DNA, 110 bp, synthetic construct
  source 1..110: mol_type = other DNA
tctctactaggcagaaaactccattccccaatcgatttaactactgtccacttaattacctactagaatcagaaagggccaagttacttctgcacaataagcctgttaag

SEQ ID NO: 64237 - DNA, 110 bp, synthetic construct
  source 1..110: mol_type = other DNA
tgtagaataacatggcttctgcttctcttgccaacttttaaaagacttgattaataaataatcacaatgataatgattacaagttcccttaaagtcatcatctccttccc

SEQ ID NO: 64238 - DNA, 110 bp, synthetic construct
  source 1..110: mol_type = other DNA
aaataatcacaatgataatgattacaagttcccttaaagtcatcatctccttccctaccattgtcaggatctgctttttgtatgttttaagcctggtgtgctcccctaga

SEQ ID NO: 64239 - DNA, 110 bp, synthetic construct
  source 1..110: mol_type = other DNA
caaaatcacggcatgtatttctgcagagccaaatgtgacatctctgctcccctttgtgctagcgataaactgaaagatggccatttaacattcagcaacacctttaacat

SEQ ID NO: 64240 - DNA, 110 bp, synthetic construct
  source 1..110: mol_type = other DNA
gtgctagcgataaactgaaagatggccatttaacattcagcaacacctttaacatcatgcattattcatcctcaaaaaaaaaaaatcctataatgtaactcaagaaaagt

SEQ ID NO: 64241 - DNA, 110 bp, synthetic construct
  source 1..110: mol_type = other DNA
aatataaatattagaccactggaagagtttgtgtaaaagaagcttggacaaacatgtggcaaggatcagggaaaaaagactattttgattaaacactcttattctgtatc

SEQ ID NO: 64242 - DNA, 110 bp, synthetic construct
  source 1..110: mol_type = other DNA
tgcctacatgtgcacacataaacacacatgggcataaatacaatgtagtatctaaaatctaagtcttttgaatatgacaaataaggaaaaatatttagctacaagtgcat

SEQ ID NO: 64243 - DNA, 110 bp, synthetic construct; identical to SEQ ID NO: 64242
  source 1..110: mol_type = other DNA

SEQ ID NO: 64244 - DNA, 110 bp, synthetic construct
  source 1..110: mol_type = other DNA
attatagatgaaatttgtaggtttataagagagaaagatgaactatctaaacatagggggaatcagctcaagagatttttaccaacactttagagtgctagagtggttac

SEQ ID NO: 64245 - DNA, 110 bp, synthetic construct
  source 1..110: mol_type = other DNA
gggggaatcagctcaagagatttttaccaacactttagagtgctagagtggttaccaaacgatccctctaggtctggagaagcattttatagaaaatcaccactttactg

SEQ ID NO: 64246 - DNA, 110 bp, synthetic construct
  source 1..110: mol_type = other DNA
aaatatatcatgtatctaagtggtatgcatgtgcctatgtatgcacacataaaacacaaaaataaattcatgacattcaggcaaatcaaaatcaagttcaaatgtgcctg

SEQ ID NO: 64247 - DNA, 110 bp, synthetic construct; identical to SEQ ID NO: 64246
  source 1..110: mol_type = other DNA

SEQ ID NO: 64248 - DNA, 110 bp, synthetic construct
  source 1..110: mol_type = other DNA
cttacgttttaattcagttgaaatatcaggttgcatgggtccttataaagtaatgatgggtggagaaaaaagaagggatgctaattaaaagaaaatgtaactgatattga

SEQ ID NO: 64249 - DNA, 110 bp, synthetic construct
  source 1..110: mol_type = other DNA
atttatccctctgaggtttgagttaaagtacaattgattttatatttgagaaacttagctctgcattaaatgtgtatatactctctgtggacccccaagaaatacaactt

SEQ ID NO: 64250 - DNA, 110 bp, synthetic construct; identical to SEQ ID NO: 64249
  source 1..110: mol_type = other DNA

SEQ ID NO: 64251 - DNA, 110 bp, synthetic construct
  source 1..110: mol_type = other DNA
agattcgttaaccactgagccacgacgggaactccggcagtaactgatcttaaataaatgtgtttatttaaacaaggggagtcgaaagatacatggatccctatagcact

SEQ ID NO: 64252 - DNA, 110 bp, synthetic construct
  source 1..110: mol_type = other DNA
gatcttaaataaatgtgtttatttaaacaaggggagtcgaaagatacatggatccctatagcactattaacaacggctatgacatggaaacaacctaaatgtccatcaac

SEQ ID NO: 64253 - DNA, 110 bp, synthetic construct
  source 1..110: mol_type = other DNA
gctgtgatatgtagatgaaggagaatatattttaagtgctttaatatgaactcaatgctcatgaagggtgccagattgaaagcattggagtctgaagtcattgggttatg

SEQ ID NO: 64254 - DNA, 110 bp, synthetic construct
  source 1..110: mol_type = other DNA
tccatcaatgaccctctgttaatattcttatttatttatttttttattcagctctccttatattgtgtcctaaaacacaactttggctcaatccacctatcttttttgct

SEQ ID NO: 64255 - DNA, 110 bp, synthetic construct
  source 1..110: mol_type = other DNA
aatagttttgtgttactcctcccaagcaatgtatattcagccaagaaaagctgcatggtagaaattacagttggtaaaggcagggcagaaaagggcaaaggaggcaacct

SEQ ID NO: 64256 - DNA, 110 bp, synthetic construct
  source 1..110: mol_type = other DNA
tggtagaaattacagttggtaaaggcagggcagaaaagggcaaaggaggcaacctcttagttctcattatctgggaaatcatggtactagatattaaagtcaatccttga

SEQ ID NO: 64257 - DNA, 110 bp, synthetic construct
  source 1..110: mol_type = other DNA
ccaaactgagttaaaagtctgctggttttataattaacataactttcacattcttgaccttaaaaatatatatctcgattggctggaataaggcctaaagtcaattcttt

SEQ ID NO: 64258 - DNA, 110 bp, synthetic construct
  source 1..110: mol_type = other DNA
gaccttaaaaatatatatctcgattggctggaataaggcctaaagtcaattctttgaaaagtctaaatggttgatatattatctgaatccttttacatctgaagatttgc

SEQ ID NO: 64259 - DNA, 110 bp, synthetic construct
  source 1..110: mol_type = other DNA
gacaactatttcattatggtgaaaatgttcattactacaattatcaaaaatagattagagtgcttgataaaccaatagtctgcagtatgcagtgtccttgtgcaatgctt

SEQ ID NO: 64260 - DNA, 110 bp, synthetic construct
  source 1..110: mol_type = other DNA
tagagtgcttgataaaccaatagtctgcagtatgcagtgtccttgtgcaatgcttggttcccagactcagagacaattcgtcaggaagggtggcaggttattcttggttc

SEQ ID NO: 64261 - DNA, 110 bp, synthetic construct
  source 1..110: mol_type = other DNA
ttccttagatcatacctaattgtttaagataacttttttttctggatagttaaaaagagccccagtaaactctggttcctcactgtaattacttaggcattccagggcac

SEQ ID NO: 64262 - DNA, 110 bp, synthetic construct
  source 1..110: mol_type = other DNA
agagccccagtaaactctggttcctcactgtaattacttaggcattccagggcacaatgggaaattttacttaaaaaatttttgtattgaaacagctgcctctctcatta

SEQ ID NO: 64263 - DNA, 110 bp, synthetic construct
  source 1..110: mol_type = other DNA
tagaaactgagtattgtgatttgccacttccaattcattaaaccaacatttctatctcttgacaagttataaaaaacagtgaattagatgtattttatcctgctgacaat

SEQ ID NO: 64264 - DNA, 110 bp, synthetic construct
  source 1..110: mol_type = other DNA
tttctcctccggtgcgtcttccccttccaaggtagttgaggaagaagtgtcatataaacgtagcagtgccaaaaggttgaagcagtcatgattgctaactatgaaggatg

SEQ ID NO: 64265 - DNA, 110 bp, synthetic construct
  source 1..110: mol_type = other DNA
aaagtacagagaattctcatgtacccatacctacatgcatgcacacattatcagcattactcaccaaaaagtagtacttttttgttgttgtttaaggatgacacatccta

SEQ ID NO: 64266 - DNA, 110 bp, synthetic construct
  source 1..110: mol_type = other DNA
tgagaggtcagggaagaaatggggcagaggaaaagggagatttctaaccactgtttcaaacaagagctagtatttgtctctcaacatttcaccattgctgagtacatggt

SEQ ID NO: 64267 - DNA, 110 bp, synthetic construct
  source 1..110: mol_type = other DNA
ctgttcattcagagtagaccacttctttgttcttaacaagccatgctctggggctttccaaataaccctaacagttatttctactgcttctttgtggatctgtttccttt

SEQ ID NO: 64268 - DNA, 110 bp, synthetic construct
  source 1..110: mol_type = other DNA
aggctaagaatagaggccagaccaaatgacttcaagactgaagaataaagcttagactttttaaagtatctcacaaattatttagtttaagctcaaccttgaatgattta

SEQ ID NO: 64269 - DNA, 110 bp, synthetic construct
  source 1..110: mol_type = other DNA
ctgtaagtgtccttaggtctgaagtgtgtctcttgtaaacagcatatacacagatatgttttcatatccattgagccaatctttgtattttcattggaacatttaatcca

SEQ ID NO: 64270 - DNA, 110 bp, synthetic construct
  source 1..110: mol_type = other DNA
gaggctaaggagcagtgtgctcttggctggggagtgaaacgccatggcagagggaacccaggaggtctgggatccctgaagcgaggcaccattgttggggaaggcgagag

SEQ ID NO: 64271 - DNA, 110 bp, synthetic construct
  source 1..110: mol_type = other DNA
acccaggaggtctgggatccctgaagcgaggcaccattgttggggaaggcgagaggagaaggggctgaccaccataggaattttcctgtgtgcaggctctcagagggtgg

SEQ ID NO: 64272 - DNA, 110 bp, synthetic construct
  source 1..110: mol_type = other DNA
tttggtgatacctacctatgtatttcaaaaactaacaatcaaactagaacttacttgccctcaaagacaaagaggaatataagctgagaggacagcccccaatctttatc

SEQ ID NO: 64273 - DNA, 110 bp, synthetic construct
  source 1..110: mol_type = other DNA
aggaacagaagtaccaaataagaaatattgttgactttggtatacttagtcttcatgtagtcctcactttaatacattcaacagtgacaccctaaaatatctttcttttg

SEQ ID NO: 64274 - DNA, 110 bp, synthetic construct
  source 1..110: mol_type = other DNA
tttggtatacttagtcttcatgtagtcctcactttaatacattcaacagtgacaccctaaaatatctttcttttgcctaatttgcacatttttgtaacagttgacaaata

SEQ ID NO: 64275 - DNA, 110 bp, synthetic construct
  source 1..110: mol_type = other DNA
ctttgtctctctgtacacagacacacacatacatatgtgtaaatttatatacctcttttctagacatttattcattaacctcatggagtaaaattcagctaactaccaaa

SEQ ID NO: 64276 - DNA, 110 bp, synthetic construct; identical to SEQ ID NO: 64275
  source 1..110: mol_type = other DNA

SEQ ID NO: 64277 - DNA, 110 bp, synthetic construct
  source 1..110: mol_type = other DNA
atataggctatcacagaataccgagtagtgctccctgtgctacacagcaaaccctgttgactatccattctttatacaatagtgtgcatatggccaaggacttattttct

SEQ ID NO: 64278 - DNA, 110 bp, synthetic construct; identical to SEQ ID NO: 64277
  source 1..110: mol_type = other DNA

SEQ ID NO: 64279 - DNA, 110 bp, synthetic construct
  source 1..110: mol_type = other DNA
gggaatgcactcaaccaagcagttggggagctaagaaaaagaatggggacccacggaaaggtgcttctattgagggtcaagatgggggaaacaagtaatagtcacaaaag

SEQ ID NO: 64280 - DNA, 110 bp, synthetic construct
  source 1..110: mol_type = other DNA
tgctcttatggatcagaagaatttcagagttccttactctgccattttctctgatacctccatataacattcttaaaaatgcgttgttatagaaatggctaagttagcag

SEQ ID NO: 64281 - DNA, 110 bp, synthetic construct
  source 1..110: mol_type = other DNA
acctccatataacattcttaaaaatgcgttgttatagaaatggctaagttagcaggtggtaaggtaggctaaaggaagagtgtttctgtgtgtgtgtgtgtgtgtgtgtg

SEQ ID NO: 64282 - DNA, 110 bp, synthetic construct
  source 1..110: mol_type = other DNA
gacaagaaaagctgcaacaagcctggctgggccgtgaaaagatctcagagagtctttctgagtcgggctgcgctggggaggagccagttgggatggtagtggcccagcta

SEQ ID NO: 64283 - DNA, 110 bp, synthetic construct; identical to SEQ ID NO: 64282
  source 1..110: mol_type = other DNA

SEQ ID NO: 64284 - DNA, 110 bp, synthetic construct
  source 1..110: mol_type = other DNA
ttcataaattcctagaaacacactcttctaagactgaatcattaacaaagaggaagtctgaatagactgtttacaagtaatgaaatttaatcagtaatcaaaaacctccc

SEQ ID NO: 64285 - DNA, 110 bp, synthetic construct; identical to SEQ ID NO: 64284
  source 1..110: mol_type = other DNA

SEQ ID NO: 64286 - DNA, 110 bp, synthetic construct
  source 1..110: mol_type = other DNA
atacaattgagctctttataattaattcagttactccatgaaataagaaaagagactgtttcactaagagactgttttcagattatttccagaatctcaaaaagtgccca

SEQ ID NO: 64287 - DNA, 110 bp, synthetic construct
  source 1..110: mol_type = other DNA
ctgtttcactaagagactgttttcagattatttccagaatctcaaaaagtgcccagtatatatgtgatctgtgtatgtatgtgtgtgtgtgaatatatatatatatggaa

SEQ ID NO: 64288 - DNA, 110 bp, synthetic construct
  source 1..110: mol_type = other DNA
tttcaaacagttttcagcaaatgaaaataattgctcacatacaaggattgaaagcctagatttctaatcaagcaaaattactgccttgaagactactctgagaaatactt

SEQ ID NO: 64289 - DNA, 110 bp, synthetic construct; identical to SEQ ID NO: 64288
  source 1..110: mol_type = other DNA

SEQ ID NO: 64290 - DNA, 110 bp, synthetic construct
  source 1..110: mol_type = other DNA
aaagcaaaagggaggttgtcagcacacagtctggctctgtaaaatcaagagaatgcacacaagcttaagaattttgccacaatatggagcaaggagtgtggaacagaggt

SEQ ID NO: 64291 - DNA, 110 bp, synthetic construct
  source 1..110: mol_type = other DNA
tcactaatatactttcgtaatatccttatcaaaattttcagtatcgtagaaatcccccaagtgaatattaggtataaattgcaaggggcattattcaagaaaatggcagg

SEQ ID NO: 64292 - DNA, 110 bp, synthetic construct
  source 1..110: mol_type = other DNA
gattttctgtttatatgatctatccattgtcaaaagtggggtgttgacgtccattaatattaatatactattgtagattagtattctcttcagctctgggaatatttgtt

SEQ ID NO: 64293 - DNA, 110 bp, synthetic construct; identical to SEQ ID NO: 64292
  source 1..110: mol_type = other DNA

SEQ ID NO: 64294 - DNA, 110 bp, synthetic construct
  source 1..110: mol_type = other DNA
caggagtggtatttctgggtcataaggtaattctttttttagttttattgaggaacatcaattctgttttccatagtagctgcactgatttacattcacaccacactgta

SEQ ID NO: 64295 - DNA, 110 bp, synthetic construct
  source 1..110: mol_type = other DNA
catcaattctgttttccatagtagctgcactgatttacattcacaccacactgtagaagggattcattttctctgcaccctttccagaatttattatttgtagatatttt

SEQ ID NO: 64296 - DNA, 110 bp, synthetic construct
  source 1..110: mol_type = other DNA
ccaatttggattttttttatgtctttttcttgctttggatagaacttccaatattacattaaataaaagtagtgagagtgggcatgatactgggaattctagacactgca

SEQ ID NO: 64297 - DNA, 110 bp, synthetic construct
  source 1..110: mol_type = other DNA
aatgtgagttttcatttaaattttctgatacagatttcttaaagtctgattaattttcttcaggttgagctcctccagaaggaaagaatgctataagagtttgagacaca

SEQ ID NO: 64298 - DNA, 110 bp, synthetic construct
  source 1..110: mol_type = other DNA
ctatgcatgaatagaaatgacagaaattctcctagcaacacacactcagaacagtttgcacccaatatatcatcctgtacatgtttgcaaaaattctctctattcacatc

SEQ ID NO: 64299 - DNA, 110 bp, synthetic construct
  source 1..110: mol_type = other DNA
gcctcacaagtaagtaaatgcaaattaaaatagcatagcttatcaattgacaaagagaaaaacaaaataacaatatctagagcctctatgagcacaggaaaattggcata

SEQ ID NO: 64300 - DNA, 110 bp, synthetic construct; identical to SEQ ID NO: 64299
  source 1..110: mol_type = other DNA

SEQ ID NO: 64301 - DNA, 110 bp, synthetic construct
  source 1..110: mol_type = other DNA
gctgctaaggatgggccctcactttaaccaactcttgggcaattcctcatcctatgtcaaatgacaatgttaaattagaaacgggcttttctcctttataagctaccctc

SEQ ID NO: 64302 - DNA, 110 bp, synthetic construct
  source 1..110: mol_type = other DNA
gtcaaatgacaatgttaaattagaaacgggcttttctcctttataagctaccctcattttagccctaaagaccagacacaggaattttccacagttcatatacaatttgt

SEQ ID NO: 64303 - DNA, 110 bp, synthetic construct
  source 1..110: mol_type = other DNA
ctgtttcatgtgtatttatactgcatccccaaataaagtgcaattttcttgggaagaaaaacatgttcttcatgaaaagttgctaatgatgtgggaaaattcttattatt

SEQ ID NO: 64304 - DNA, 110 bp, synthetic construct
  source 1..110: mol_type = other DNA
gaaaaacatgttcttcatgaaaagttgctaatgatgtgggaaaattcttattatttggtgttgaatgaaaaaaagcaggacacaaattgtatatacagtgtgacctcttc

SEQ ID NO: 64305 - DNA, 110 bp, synthetic construct
  source 1..110: mol_type = other DNA
aatactgaggatgacatggaaaaaagggaagccttatgcactgttggtgggaatgtaaattggcaaagtaattatgggaaatgtcatggatatttctttaaaaactaaaa

SEQ ID NO: 64306 - DNA, 110 bp, synthetic construct
  source 1..110: mol_type = other DNA
atgcactgttggtgggaatgtaaattggcaaagtaattatgggaaatgtcatggatatttctttaaaaactaaaaatataactaccctatgatctagcaattccaattct

SEQ ID NO: 64307 - DNA, 110 bp, synthetic construct
  source 1..110: mol_type = other DNA
aatctttatccaggtatatacccagaattggtctttctggatcatatggtaaaactattttagttttttaaggaatcttcatactgttctccctagtagctgcaccaatt

SEQ ID NO: 64308 - DNA, 110 bp, synthetic construct; identical to SEQ ID NO: 64307
  source 1..110: mol_type = other DNA

SEQ ID NO: 64309 - DNA, 110 bp, synthetic construct
  source 1..110: mol_type = other DNA
ttacaagtatagccccaaaaagacaaaaatgaaaaaaattaaaactgaattcctggtttgattaaaaggcttccaagatccacacaatctgcactccaggctctaaattc

SEQ ID NO: 64310 - DNA, 110 bp, synthetic construct
  source 1..110: mol_type = other DNA
gtttgattaaaaggcttccaagatccacacaatctgcactccaggctctaaattcaatctgaacaatcttatagagtttgttataatgatgcattgtgaggaattcagat

SEQ ID NO: 64311 - DNA, 110 bp, synthetic construct
  source 1..110: mol_type = other DNA
tttaggtcatattcaaaatggtggtgatagtttgtgcctgatgggttccagcaataaatgagtgttcaaatcctgtctccacgacttactagctgtgtgttcttgaacaa

SEQ ID NO: 64312 - DNA, 110 bp, synthetic construct
  source 1..110: mol_type = other DNA
aaatgagtgttcaaatcctgtctccacgacttactagctgtgtgttcttgaacaattctcctccatctctgaacccttttttcatgtgtgaaacgaagatgctaatagaa

SEQ ID NO: 64313 - DNA, 110 bp, synthetic construct
  source 1..110: mol_type = other DNA
aaactttccagcatcctgcagtgtctaagaacatttttcctttgtgaaaattactcttccccattggcttctgtgatattcactcattcatttaccaagcatttcttgag

SEQ ID NO: 64314 - DNA, 110 bp, synthetic construct
  source 1..110: mol_type = other DNA
cttccccattggcttctgtgatattcactcattcatttaccaagcatttcttgagtaattattattttaaaagaataatgaatacaataaaaactcctatcctcacgaac

SEQ ID NO: 64315 - DNA, 110 bp, synthetic construct
  source 1..110: mol_type = other DNA
atacaatattttcctctggttggtgccacttttatcaatatactaatctatttccttctgccaccagatttaggtttccaaggttagttcctcattcctacttctttaac

SEQ ID NO: 64316 - DNA, 110 bp, synthetic construct
  source 1..110: mol_type = other DNA
aatggtttgtaggaacaaaagaataggagagggacacccaatatggaagcgctaccttaagacacactaacgttgagacattcatatgctaacctgataatcaacgctgg

SEQ ID NO: 64317 - DNA, 110 bp, synthetic construct
  source 1..110: mol_type = other DNA
cttaagacacactaacgttgagacattcatatgctaacctgataatcaacgctggttaatattaccgtctttctaaagggtatcactcttcaaggttgcatatataattg

SEQ ID NO: 64318 - DNA, 110 bp, synthetic construct
  source 1..110: mol_type = other DNA
cagaagttgattttaccagatctagctggtatcacagtcataagaatcattcccccatctccctccatctgtccctccctcccctctctctctcagatacacactatctc

SEQ ID NO: 64319 - DNA, 110 bp, synthetic construct
  source 1..110: mol_type = other DNA
ccagatctagctggtatcacagtcataagaatcattcccccatctccctccatctgtccctccctcccctctctctctcagatacacactatctcacatacacagacaca

SEQ ID NO: 64320 - DNA, 110 bp, synthetic construct
  source 1..110: mol_type = other DNA
tgatgacagggttacgacctctagtcagctaggaaggaaggaaggaggcatgtctacaaatctctgccccaaagtggcagctgtccaaacactgatgcccactcttccaa

SEQ ID NO: 64321 - DNA, 110 bp, synthetic construct
  source 1..110: mol_type = other DNA
acaaatctctgccccaaagtggcagctgtccaaacactgatgcccactcttccaacaatgctagaagaacaggcatccaagggtgtttatagccccttggtctcggtcag

SEQ ID NO: 64322 - DNA, 110 bp, synthetic construct
  source 1..110: mol_type = other DNA
atctgcattgacaatctccaggagaaaaacatagcatgcagcttttcacaaatttatgttgactgtagattcctttttcatagatcatcttctctgagtagtttcgcacc

SEQ ID NO: 64323 - DNA, 110 bp, synthetic construct
  source 1..110: mol_type = other DNA
atgttgactgtagattcctttttcatagatcatcttctctgagtagtttcgcaccccttccccacatgccgccaccgccgcccaaacaagtcccgctcaaagagtctgac

SEQ ID NO: 64324 - DNA, 110 bp, synthetic construct
  source 1..110: mol_type = other DNA
ttcactctctggaattacccttaacgttacaaagggatccaggggagggatggtccttggcgtatgttaatctcagcatcagcaaatttcttccattaaggcctactact

SEQ ID NO: 64325 - DNA, 110 bp, synthetic construct
  source 1..110: mol_type = other DNA
cttggcgtatgttaatctcagcatcagcaaatttcttccattaaggcctactactagcagggtatgttttatcccagcagaaacacatacttaggataggaatcgatgct

SEQ ID NO: 64326 - DNA, 110 bp, synthetic construct
  source 1..110: mol_type = other DNA
ccccacacaaactttctctgtgtacttgctgaccacctcctccgtaccactttaacggcttgaaattttgaagtttgatgcaggggcaggtcggtgttccctggccttgt

SEQ ID NO: 64327 - DNA, 110 bp, synthetic construct
  source 1..110: mol_type = other DNA
cggcttgaaattttgaagtttgatgcaggggcaggtcggtgttccctggccttgtcagcactcctagagtacaacagcacagggttctcggggaacctccaatgttaaaa

SEQ ID NO: 64328 - DNA, 110 bp, synthetic construct
  source 1..110: mol_type = other DNA
tgtcaatagcccatttatgaatggtctttcctcaaaagggttatgttcttccaaatgaaccatgtgcttcctattggcacacgccgacaaacacaactgggaaatgggtt

SEQ ID NO: 64329 - DNA, 110 bp, synthetic construct
  source 1..110: mol_type = other DNA
tgaaccatgtgcttcctattggcacacgccgacaaacacaactgggaaatgggttttacctatgtgttatataggctatataagctaggtgtcatagttaagagctcggg

SEQ ID NO: 64330 - DNA, 110 bp, synthetic construct
  source 1..110: mol_type = other DNA
aaaaaaaaaaaaaaaaacaagaaaaaacaagtgttggggaggttgtggagaagagagaaccctccttcactgttggtggaaatataaattagtgcaaccagcactacaag

SEQ ID NO: 64331 - DNA, 110 bp, synthetic construct
  source 1..110: mol_type = other DNA
agaaccctccttcactgttggtggaaatataaattagtgcaaccagcactacaagagcacggaggctcctcaaaaaattaaaaatagaactaccccacaatccagcaatg

SEQ ID NO: 64332 - DNA, 110 bp, synthetic construct
  source 1..110: mol_type = other DNA
gtgcaaggaatcccgtttttatgctttgttcctaatagattatgctaagttctgtgctaagcacttaatatgcattaataacgctttataactacgctatggaaatgggt

SEQ ID NO: 64333 - DNA, 110 bp, synthetic construct
  source 1..110: mol_type = other DNA
gctaagcacttaatatgcattaataacgctttataactacgctatggaaatgggttccatcataatcccattttacagggaagaaaactgagcctcgacatttcacacac

SEQ ID NO: 64334 - DNA, 110 bp, synthetic construct
  source 1..110: mol_type = other DNA
ggatttgttaaccactgagctacgacaggaactccgaaaacacaaaattttgaattagaaaaaaatcagagagttcctgtcgaggctcagaggaagtgaacccgactagt

SEQ ID NO: 64335 - DNA, 110 bp, synthetic construct
  source 1..110: mol_type = other DNA
gaaaacacaaaattttgaattagaaaaaaatcagagagttcctgtcgaggctcagaggaagtgaacccgactagtatccaagaggatgaggattcgatccctagcctcgg

SEQ ID NO: 64336 - DNA, 110 bp, synthetic construct
  source 1..110: mol_type = other DNA
tccatttcacgacaggcagtgtcttttggatctaaatgctcttggtcctgagttatatattttctgtaagatattaccaaggcgaatgctcagggaaatggcagctggag

SEQ ID NO: 64337 - DNA, 110 bp, synthetic construct
  source 1..110: mol_type = other DNA
tatattttctgtaagatattaccaaggcgaatgctcagggaaatggcagctggagccatttgagggttactaattacagggcatcacaggtacaatttataatcctcctt

SEQ ID NO: 64338 - DNA, 110 bp, synthetic construct
  source 1..110: mol_type = other DNA
aatcacccggctagctctgcccactccccttttttagctccaggccctgcttctcaaagtgtggttgatggaccagcagtgttagcatcacctgggagtttgtaagcaat

SEQ ID NO: 64339 - DNA, 110 bp, synthetic construct
  source 1..110: mol_type = other DNA
aaagtgtggttgatggaccagcagtgttagcatcacctgggagtttgtaagcaatccagaatcccaggcccatctcaatcctgctaaatcagaatttgcagtcccttctg

SEQ ID NO: 64340 - DNA, 110 bp, synthetic construct
  source 1..110: mol_type = other DNA
ttttctcatgtggctgttgacagtattcaatttgtcaatgaccaaggacctcatccttgctggcaagttccttgccacatggactctttctagggcagctcacaatgtgg

SEQ ID NO: 64341 - DNA, 110 bp, synthetic construct
  source 1..110: mol_type = other DNA
cttgctggcaagttccttgccacatggactctttctagggcagctcacaatgtggcagccgacttcttcaactcaagcaagtgaagagaggcagagaaggagagaaggcc

SEQ ID NO: 64342 - DNA, 110 bp, synthetic construct
  source 1..110: mol_type = other DNA
ccttctgctatggagcctgtccagtggtttttgtttgtttgtttgtttgtttgtttgttttttactttcaattatattttcacttcttaaactttcatttggtgatggtt

SEQ ID NO: 64343 - DNA, 110 bp, synthetic construct; identical to SEQ ID NO: 64342
  source 1..110: mol_type = other DNA

SEQ ID NO: 64344 - DNA, 110 bp, synthetic construct
  source 1..110: mol_type = other DNA
agaggaaattatcaaatgaataccaagacaatgtcctagtcccaaaaaacatgagtctcagattaaaagtactcacaaagggtccaacacaatgagtgttaaaatgctct

SEQ ID NO: 64345 - DNA, 110 bp, synthetic construct
  source 1..110: mol_type = other DNA
tctcagattaaaagtactcacaaagggtccaacacaatgagtgttaaaatgctctaaaccagggcagagcattgaaacttcaggacatctaggaaaaagaagaatttcta

SEQ ID NO: 64346 - DNA, 110 bp, synthetic construct
  source 1..110: mol_type = other DNA
tttattaaccctcacctgaaccaatgcaatggcttccaccctcctacccacctccaggatgctgtcaaatacatttttcttagaaagcagctctcatcctgtgaatgttc

SEQ ID NO: 64347 - DNA, 110 bp, synthetic construct
  source 1..110: mol_type = other DNA
aggatgctgtcaaatacatttttcttagaaagcagctctcatcctgtgaatgttctactacagcagcagttggctagctggggcccacagtctaaacccagacctccacc

SEQ ID NO: 64348 - DNA, 110 bp, synthetic construct
  source 1..110: mol_type = other DNA
tcataatttaggggatgaatttatgactcagacagacctaaattttggtcttgcctccaatacttgctaggggtgtgatctcgggaaagttatcactttgagcttcaggc

SEQ ID NO: 64349 - DNA, 110 bp, synthetic construct
  source 1..110: mol_type = other DNA
tccaatacttgctaggggtgtgatctcgggaaagttatcactttgagcttcaggctaactcatctgtaaaatgggaataggaacacacacaaccaacaatgacattagaa

SEQ ID NO: 64350 - DNA, 110 bp, synthetic construct
  source 1..110: mol_type = other DNA
cactaaaatgcccttggtaatccctctctccacatcacagcattctccccgcactaagttagtggaccctagctctctccatcactaaggtgagcacctcataatatcgg

SEQ ID NO: 64351 - DNA, 110 bp, synthetic construct
  source 1..110: mol_type = other DNA
aagttagtggaccctagctctctccatcactaaggtgagcacctcataatatcggatacatattgtgcaagtgctctgtggtccagcaactgtgattgctgtattatcac

SEQ ID NO: 64352 - DNA, 110 bp, synthetic construct
  source 1..110: mol_type = other DNA
tgctgaccagcctggtggttaaaaaggcaggaatcattctctagagcttgagattggctcctccttttcattaaaaatgaaattcacggaatttacgagttcatgaggtt

SEQ ID NO: 64353 - DNA, 110 bp, synthetic construct
  source 1..110: mol_type = other DNA
ccttgtacataaatccacaaattcttaggaagagcatgagtcacttgaaatatgcagtttgaaacatgcatttgaaataacacaatacaataatcatgctgaagtgtgtt

SEQ ID NO: 64354 - DNA, 110 bp, synthetic construct
  source 1..110: mol_type = other DNA
aaagctatatattaaggaatttactattgaattgataaaacttgagttattggctatcagagatgaagaagaagaagggttcacaaatcaacctgaagtttcaaacttgg

SEQ ID NO: 64355 - DNA, 110 bp, synthetic construct
  source 1..110: mol_type = other DNA
ttttgtgtaggccagtaactgcctcacttattgacgtgactgttagaaaaagtaatgaaatgtgtagaaaatgtaaaccacactgggcatttcatcagggtgtgttaacc

SEQ ID NO: 64356 - DNA, 110 bp, synthetic construct
  source 1..110: mol_type = other DNA
tgaaatgtgtagaaaatgtaaaccacactgggcatttcatcagggtgtgttaaccttccactctgccttgcacataggaactcagtcaagattgttggctgattgatcaa

SEQ ID NO: 64357 - DNA, 110 bp, synthetic construct
  source 1..110: mol_type = other DNA
tgaggccagggatcgaacccgagtcctcatggatgctgatcaggtttgttaccgttgagccacaccaggaactccgacaacgacttttaatgggcatgggacataggacc

SEQ ID NO: 64358 - DNA, 110 bp, synthetic construct
  source 1..110: mol_type = other DNA
tgagccacaccaggaactccgacaacgacttttaatgggcatgggacataggacccacagcatgggtactgtgctgctttaggccagtgatcactcctgccaccacatgt

SEQ ID NO: 64359 - DNA, 110 bp, synthetic construct
  source 1..110: mol_type = other DNA
aaaaagacaaaaaaataaaaataaaaatagaataggatgtagcaggacaagggcagaaacaaagtgacccatcaggagcctccaggtggaaggtgatggtgtggccacag

SEQ ID NO: 64360 - DNA, 110 bp, synthetic construct
  source 1..110: mol_type = other DNA
gaaacaaagtgacccatcaggagcctccaggtggaaggtgatggtgtggccacagcggtcatggtgcgtgagacgtagcagaatctagatacatcccgaatgttgagggg

SEQ ID NO: 64361 - DNA, 110 bp, synthetic construct
  source 1..110: mol_type = other DNA
caccctggttcagagtcacccagaacttggctgtgtgtcacactaaaagccagtccatttcccccctggcagtcggctcccttgtgccctccacgtggaaaggccgtatg

SEQ ID NO: 64362 - DNA, 110 bp, synthetic construct
  source 1..110: mol_type = other DNA
tttcctcagggcctcacagagcacatagtgagaggatgctcacccagagcaccagcatccacttctctgctggacactgggaatgagacagaagtgcatcttatttgcat

SEQ ID NO: 64363 - DNA, 110 bp, synthetic construct
  source 1..110: mol_type = other DNA
catccacttctctgctggacactgggaatgagacagaagtgcatcttatttgcatcaatttaatgacataggccttctttagggcacttaccaccacaacaaaaaaataa

SEQ ID NO: 64364 - DNA, 110 bp, synthetic construct
  source 1..110: mol_type = other DNA
gcagccagtaggtgatgggtggcattatgagtccagttctatctgactccatgtctgggagatgttctcctgctcctcctctcccctagagacctagacagctgtccccg

SEQ ID NO: 64365 - DNA, 110 bp, synthetic construct
  source 1..110: mol_type = other DNA
tgggagatgttctcctgctcctcctctcccctagagacctagacagctgtccccgaggatggctcagcgaccttcgtccttgtaaccttgagacagagtcctgggaaagc

SEQ ID NO: 64366 - DNA, 110 bp, synthetic construct
  source 1..110: mol_type = other DNA
agaccgctctagacacggctgggccccaaaccacaggggagctgagctggaagaaaaagtctgagaaagagctgacgctcggccactgggaccctgagccacctcaggtg

SEQ ID NO: 64367 - DNA, 110 bp, synthetic construct
  source 1..110: mol_type = other DNA
aaagtctgagaaagagctgacgctcggccactgggaccctgagccacctcaggtggaggcgcccagaggctcacagaagcccgaagccccttcttctttcctgcctccca

SEQ ID NO: 64368 - DNA, 110 bp, synthetic construct
  source 1..110: mol_type = other DNA
gtagggcccgagggatcactccagggtcactgaagctggtcctcaacagtgtagccatggagaaaaggaagagcatggcagcaaacacagggatggcaggagacagctgg

SEQ ID NO: 64369 - DNA, 110 bp, synthetic construct
  source 1..110: mol_type = other DNA
catggagaaaaggaagagcatggcagcaaacacagggatggcaggagacagctggacagccaggtagcggcacctaaagaaagtaggcaattgaacagctagttattcca

SEQ ID NO: 64370 - DNA, 110 bp, synthetic construct
  source 1..110: mol_type = other DNA
agattttgttaaataaagctgggctttagagggacacaaaactaatatagtcagccctctctgtatctgtgggttctacatctgtggattcaactaatgcagattgaatt

SEQ ID NO: 64371 - DNA, 110 bp, synthetic construct
  source 1..110: mol_type = other DNA
cctctctgtatctgtgggttctacatctgtggattcaactaatgcagattgaatttttttttaattgcagaatgttccaaagtcaaaacttgaatttgccccgcatgcca

SEQ ID NO: 64372 - DNA, 110 bp, synthetic construct
  source 1..110: mol_type = other DNA
ctgcagatggattcttaacccactgcaccacagagagacctctcaagctgattttctgctttttaggactgcacctgcggcatatggaagttccagttcctgggctaggg

SEQ ID NO: 64373 - DNA, 110 bp, synthetic construct; identical to SEQ ID NO: 64372
  source 1..110: mol_type = other DNA

SEQ ID NO: 64374 - DNA, 110 bp, synthetic construct
  source 1..110: mol_type = other DNA
tttcctattgaaaacaatgattttgaggagttcctgcgggaatgcagcgggctaaggatcccacaattaccacagccgtggcgtaggtcgcagctgcggcttagattcga

SEQ ID NO: 64375 - DNA, 110 bp, synthetic construct
  source 1..110: mol_type = other DNA
aggagttcctgcgggaatgcagcgggctaaggatcccacaattaccacagccgtggcgtaggtcgcagctgcggcttagattcgatcgctggcccaggaacttccatatg

SEQ ID NO: 64376 - DNA, 110 bp, synthetic construct
  source 1..110: mol_type = other DNA
gacataatgaagactgagaccgaaacagcagagtggcgtcatgtaccatgttttctctacccttggcatatttgaaaactcctatcatgaaagctaaaaagtaatagctc

SEQ ID NO: 64377 - DNA, 110 bp, synthetic construct
  source 1..110: mol_type = other DNA
tctacccttggcatatttgaaaactcctatcatgaaagctaaaaagtaatagctcgctacaagggtttcgagacatccttatcatttggggacacgcagtgtgttcgggg

SEQ ID NO: 64378 - DNA, 110 bp, synthetic construct
  source 1..110: mol_type = other DNA
aaacagttcagaagggtgtcgagttccagtccactccaagtcctcgttcctgcgccacagagagaaccacagtttacatttcctttatattctttccaaaatgggctccg

SEQ ID NO: 64379 - DNA, 110 bp, synthetic construct
  source 1..110: mol_type = other DNA
cacagagagaaccacagtttacatttcctttatattctttccaaaatgggctccgttataggtactgggacgggggtccaaaccgagtgccatgagaccatggagatgtg

SEQ ID NO: 64380 - DNA, 110 bp, synthetic construct
  source 1..110: mol_type = other DNA
ttcccctaactgcattagcctacatgtgttgacgatgaaacccatctgttttgttttttgatgcccactcatgaaactgtgtgtgattgtcctaaagtgtactcccatca

SEQ ID NO: 64381 - DNA, 110 bp, synthetic construct
  source 1..110: mol_type = other DNA
taggttcatttcaaaattagaacaagaggagtgtccaaggagctggtattcacgtatccacctaaacgaactgtccagaatgtaactggtcaatggacaactaggtctag

SEQ ID NO: 64382 - DNA, 110 bp, synthetic construct
  source 1..110: mol_type = other DNA
atccacctaaacgaactgtccagaatgtaactggtcaatggacaactaggtctagctcttgagatgattttgcctcaaataacagatattgactatgagatagtagttaa

SEQ ID NO: 64383 - DNA, 110 bp, synthetic construct
  source 1..110: mol_type = other DNA
caccttgagaatcactggtctagaggcaagtagatgtgttcctggtctgatcaagcttttaaagacaaacagaatggtgctgttaactgttccgtatgtacttgcaaagg

SEQ ID NO: 64384 - DNA, 110 bp, synthetic construct
  source 1..110: mol_type = other DNA
cttttaaagacaaacagaatggtgctgttaactgttccgtatgtacttgcaaaggttagaaatggggaacttcctcccttgctttcacaatcacagggctcagaggtggg

SEQ ID NO: 64385 - DNA, 110 bp, synthetic construct
  source 1..110: mol_type = other DNA
ttgaccaagatgtgtggtgcttattaagccttggggagctgctccctaatgccgtaagaaagttctgttcatttatcgtcttccaagcataatctaggcttctggcaaat

SEQ ID NO: 64386 - DNA, 110 bp, synthetic construct
  source 1..110: mol_type = other DNA
accgcagcgttaattaggggatgtttctctttataaaagtattccagccaggagttcctgtcctggctcagcggaaatgaatcggactagtatccgtgaggttgtggttc

SEQ ID NO: 64387 - DNA, 110 bp, synthetic construct
  source 1..110: mol_type = other DNA
aggggatgtttctctttataaaagtattccagccaggagttcctgtcctggctcagcggaaatgaatcggactagtatccgtgaggttgtggttccatcctggcctcgct

SEQ ID NO: 64388 - DNA, 110 bp, synthetic construct
  source 1..110: mol_type = other DNA
tagtgacatttgttgacagagtcattacaggaagcagaacaggttttgtgggagacatcacaatttgggatacttagtttgaagtacatgaggaacatccagtcaatata

SEQ ID NO: 64389 - DNA, 110 bp, synthetic construct
  source 1..110: mol_type = other DNA
catcacaatttgggatacttagtttgaagtacatgaggaacatccagtcaatatacttggatgtcgtagtcttaactcaagggagagctcaagtgtgtagataagcaccc

SEQ ID NO: 64390 - DNA, 110 bp, synthetic construct
  source 1..110: mol_type = other DNA
gcaaactttccacatgctcctctgccttggcaagtctaatttcatgttcagaaatttctgttataatatcatcaattagatttgaagctgcattcacaaactcattatct

SEQ ID NO: 64391 - DNA, 110 bp, synthetic construct
  source 1..110: mol_type = other DNA
ttctgttataatatcatcaattagatttgaagctgcattcacaaactcattatctggtggcaccctttcctcacttagttccgtttcagtctcagatgaaggaaatatat

SEQ ID NO: 64392 - DNA, 110 bp, synthetic construct
  source 1..110: mol_type = other DNA
agtttgatggtttttgaggaaaaaaaaaaagcaaaggattctctccctgtttgaaagccaaatcaattgtgatattggggtgcgtgggagggggtcaggagctgggttta

SEQ ID NO: 64393 - DNA, 110 bp, synthetic construct
  source 1..110: mol_type = other DNA
agccaaatcaattgtgatattggggtgcgtgggagggggtcaggagctgggtttatttgaggggttatttgggggtggcagtattcgctgggggaacttttctcatgaag

SEQ ID NO: 64394 - DNA, 110 bp, synthetic construct
  source 1..110: mol_type = other DNA
tgctttttcctttatttccgaaagtgttcgtgtgaattattggcattatttctttaaatatttgatagtgaagccatctgggtgttaatacacagaaatctcttgcattt

SEQ ID NO: 64395 - DNA, 110 bp, synthetic construct
  source 1..110: mol_type = other DNA
gttcgtgtgaattattggcattatttctttaaatatttgatagtgaagccatctgggtgttaatacacagaaatctcttgcatttctatacaataacaatgaaagatcag

SEQ ID NO: 64396 - DNA, 110 bp, synthetic construct
  source 1..110: mol_type = other DNA
gtttttctattacctttactgtatatatgcctttacaggtgagcttttttggggggataattttcatatttctgattgtggccttttcttttccatgtagagaagttcct

SEQ ID NO: 64397 - DNA, 110 bp, synthetic construct
  source 1..110: mol_type = other DNA
tatgcctttacaggtgagcttttttggggggataattttcatatttctgattgtggccttttcttttccatgtagagaagttcctttaacatttcttgtaaagatagttt

SEQ ID NO: 64398 - DNA, 110 bp, synthetic construct
  source 1..110: mol_type = other DNA
atgcacaggcctgggtcattctgtggctctagtctagttgtttctgaagcccagagggattcctggccttttgattccttgaaatggtaatgatgatagctcacatgcac

SEQ ID NO: 64399 - DNA, 110 bp, synthetic construct
  source 1..110: mol_type = other DNA
gggattcctggccttttgattccttgaaatggtaatgatgatagctcacatgcacatcattcgccaggcactgcaagtggtttatttatgcctcataacaagtgtatgag

SEQ ID NO: 64400 - DNA, 110 bp, synthetic construct
  source 1..110: mol_type = other DNA
tagccttttgttcttccttctcacttgtcttttgcattcatttatttatattctccagaccccagccaacaccactgtactattatcttctattccttctactttcttca

SEQ ID NO: 64401 - DNA, 110 bp, synthetic construct
  source 1..110: mol_type = other DNA
tgtcttttgcattcatttatttatattctccagaccccagccaacaccactgtactattatcttctattccttctactttcttcaaccctaatttatgtaaaaatctttt

SEQ ID NO: 64402 - DNA, 110 bp, synthetic construct
  source 1..110: mol_type = other DNA
taaaggggactcaaaggcagaaatatcatcatacagaaagaaaaaaaggactccagaaggtttagggtaaaatagtgagtaaggttttaatataggcagtctgtattcat

SEQ ID NO: 64403 - DNA, 110 bp, synthetic construct
  source 1..110: mol_type = other DNA
gaaggtttagggtaaaatagtgagtaaggttttaatataggcagtctgtattcattcaggcaggagagatcagacttgtgaatgtgattcagtaccactgaccctgcaca

SEQ ID NO: 64404 - DNA, 110 bp, synthetic construct
  source 1..110: mol_type = other DNA
aatcttgtcctgccactagctgtgtgatgttaaggaagtgacttaatgtttctgttcttcatttttcatgtctgaaaaatgaggacagtaataagtaactatctcagggt

SEQ ID NO: 64405 - DNA, 110 bp, synthetic construct
  source 1..110: mol_type = other DNA
tcttcatttttcatgtctgaaaaatgaggacagtaataagtaactatctcagggttgtgggaaggattaagggagaaaatatgggaagaaagcccacttcagtgcctagc

SEQ ID NO: 64406 - DNA, 110 bp, synthetic construct
  source 1..110: mol_type = other DNA
aataagcattttcatctacccttccatccaatatcacctgacacacagcaggcatccaataattgctgaataaatatattagctcttgtttgtaattgtctactgctgaa

SEQ ID NO: 64407 - DNA, 110 bp, synthetic construct
  source 1..110: mol_type = other DNA
acctgacacacagcaggcatccaataattgctgaataaatatattagctcttgtttgtaattgtctactgctgaaaatgcttttaaactggttgtataaataggttaaat

SEQ ID NO: 64408 - DNA, 110 bp, synthetic construct
  source 1..110: mol_type = other DNA
acagcagctgccgtaggctgtcagtagcaggtgagatagcaaacagggggtctcttcctcagggcaacctgactttgcctttcctcttttctaattcagcatagcacacc

SEQ ID NO: 64409 - DNA, 110 bp, synthetic construct
  source 1..110: mol_type = other DNA
tcctcagggcaacctgactttgcctttcctcttttctaattcagcatagcacacctcaggatccagggaaaagagatgggaaaaatgaaggcaattttgtgccacgcaac

SEQ ID NO: 64410 - DNA, 110 bp, synthetic construct
  source 1..110: mol_type = other DNA
aggcagttaccaggccagggattgaatctgagctacagctatgacctatgcccacagcttcagcaatgccagatccttaacttactacacccagcgggggatcgaaccca

SEQ ID NO: 64411 - DNA, 110 bp, synthetic construct
  source 1..110: mol_type = other DNA
cagctatgacctatgcccacagcttcagcaatgccagatccttaacttactacacccagcgggggatcgaacccacacctccacagtgacctgagatgctgcagtcaggt

SEQ ID NO: 64412 - DNA, 110 bp, synthetic construct
  source 1..110: mol_type = other DNA
aggaaattgagaattgactttcccaaggtcttacaacaactttgcagcaaattctttttctgaaagaaaattttaatagggtcgggcattgaagacagacatttctgatt

SEQ ID NO: 64413 - DNA, 110 bp, synthetic construct
  source 1..110: mol_type = other DNA
ttttctgaaagaaaattttaatagggtcgggcattgaagacagacatttctgattgatttcaccaagggccagttctggagcatttcaaagccaactataacatcagatc

SEQ ID NO: 64414 - DNA, 110 bp, synthetic construct
  source 1..110: mol_type = other DNA
aatgaaatagtaactgtccctgccctcatggagctcatccatttcagttcttgaatgtgttcctctgcacggtctccttccctccccctcagccctcagaaatagccatg

SEQ ID NO: 64415 - DNA, 110 bp, synthetic construct
  source 1..110: mol_type = other DNA
ggtttactgatatcttgttaatactttctccatctatgtccctgtgggatattcacctgtacttttctttaattgtggggccattgttcagttttgatattggaataatg

SEQ ID NO: 64416 - DNA, 110 bp, synthetic construct
  source 1..110: mol_type = other DNA
cctgtacttttctttaattgtggggccattgttcagttttgatattggaataatgacagtgtaataattatacatgtttgacagtgtttcttatactttctgaaagagtt

SEQ ID NO: 64417 - DNA, 110 bp, synthetic construct
  source 1..110: mol_type = other DNA
caagtctccggacacaaaactgttcataattctattgtcagaatgatttcagctcccagtaataggaggaccacacagaagacgatgccaagagggaaaggctgagggtt

SEQ ID NO: 64418 - DNA, 110 bp, synthetic construct
  source 1..110: mol_type = other DNA
ccagtaataggaggaccacacagaagacgatgccaagagggaaaggctgagggtttctcatcgtcctttcacagcaaatccaagatgccaggaaacatacttttccccag

SEQ ID NO: 64419 - DNA, 110 bp, synthetic construct
  source 1..110: mol_type = other DNA
aggtacccacccactgtaaggctctattctcagaatgctccgtacagtggttagggggcagactggcagagagactggcttctacagcagctacggtggaccacgaggct

SEQ ID NO: 64420 - DNA, 110 bp, synthetic construct
  source 1..110: mol_type = other DNA
gggcagactggcagagagactggcttctacagcagctacggtggaccacgaggctgtctagcccttgaaagataggagtaagggtgaaaagttggagcgggagttggata

SEQ ID NO: 64421 - DNA, 110 bp, synthetic construct
  source 1..110: mol_type = other DNA
cacactatcatggatgtaaagcattagtacactgacgagagcacagtaaaatgtcattaactattagttgcatttattattagatggttattgttgctttccccttaccg

SEQ ID NO: 64422 - DNA, 110 bp, synthetic construct
  source 1..110: mol_type = other DNA
attaactattagttgcatttattattagatggttattgttgctttccccttaccgggactgccccttcatgtgtttacttctgtaggaagcaggactgcaggaaatgaat

SEQ ID NO: 64423 - DNA, 110 bp, synthetic construct
  source 1..110: mol_type = other DNA
ggatttgttaacaactgagccatgacgggaactccagttattcttgactccagaaatattttcactttgttagtgttttcagaaagtgccaagagctattagaaaactcc

SEQ ID NO: 64424 - DNA, 110 bp, synthetic construct
  source 1..110: mol_type = other DNA
atattttcactttgttagtgttttcagaaagtgccaagagctattagaaaactccactttattttcgcaggtcatatggtcctcattataccagttttctcagagctacc

SEQ ID NO: 64425 - DNA, 110 bp, synthetic construct
  source 1..110: mol_type = other DNA
acttttatgaagcaaacatttcattagttccttctggttagtaatgtcggtcccagggaatatttctatggctgtaaaatgacactatctatgctaacacctagtcagaa

SEQ ID NO: 64426 - DNA, 110 bp, synthetic construct
  source 1..110: mol_type = other DNA
gtcggtcccagggaatatttctatggctgtaaaatgacactatctatgctaacacctagtcagaactagacaggctgatacttttcttaaataacaacattatataaata

SEQ ID NO: 64427 - DNA, 110 bp, synthetic construct
  source 1..110: mol_type = other DNA
caaataatcagcaactgagacagctaaatacaccattggctattaacaggctagttggctgtataattactagaaacacccaaaagaaatacatttgtgaaattacctta

SEQ ID NO: 64428 - DNA, 110 bp, synthetic construct
  source 1..110: mol_type = other DNA
tggctgtataattactagaaacacccaaaagaaatacatttgtgaaattaccttaagccacataaaaccatgaccacacatggaaaatgtcggataggcaaacagagtgc

SEQ ID NO: 64429 - DNA, 110 bp, synthetic construct
  source 1..110: mol_type = other DNA
tctaaattaatgaaggtgttaaatatgtgaaatgcaggactttcaaaaacactgtgaatacggcttcccaagtaaaaggacattcaaaaaatcatggacatttcgttatc

SEQ ID NO: 64430 - DNA, 110 bp, synthetic construct; identical to SEQ ID NO: 64429
  source 1..110: mol_type = other DNA

SEQ ID NO: 64431 - DNA, 110 bp, synthetic construct
  source 1..110: mol_type = other DNA
agcaagggtggaccatgtaaaaaacaatacaagactgtcttcctttcaaatagattccaggttaatacaatgatgcacagaatctagtatagactgacatcagaaatcac

SEQ ID NO: 64432 - DNA, 110 bp, synthetic construct
  source 1..110: mol_type = other DNA
tccaggttaatacaatgatgcacagaatctagtatagactgacatcagaaatcaccatcaagagtaatttccccaaggattcacattacattcctgtaccaatgggtggg

SEQ ID NO: 64433 - DNA, 110 bp, synthetic construct
  source 1..110: mol_type = other DNA
tcggattccttaaccactgagccacaacgggatctccaagtcacccatttctttactcaacttcaggtaaatatatttatcagaatgatttcctcacttgacaggacaga

SEQ ID NO: 64434 - DNA, 110 bp, synthetic construct; identical to SEQ ID NO: 64433
  source 1..110: mol_type = other DNA

SEQ ID NO: 64435 - DNA, 110 bp, synthetic construct
  source 1..110: mol_type = other DNA
gtaaatcccagcccaggaggtgagaggcatacaatgagggcatgaggtaaggtattgtcaggttggacctgcatgcagtatgttgaaatccacacagctgatcgtcataa

SEQ ID NO: 64436 - DNA, 110 bp, synthetic construct
  source 1..110: mol_type = other DNA
tgtcaggttggacctgcatgcagtatgttgaaatccacacagctgatcgtcataatgacagttaaggtaatacacaggcgaagccaaaagatgctaatatatcccaacac

SEQ ID NO: 64437 - DNA, 110 bp, synthetic construct
  source 1..110: mol_type = other DNA
acatcttccatttattgggggcttcagttctgtggaaaaaaatcagagatattgttatgtacattccttgaagaggaaccagggctgccccaaggttgcactattgtctc

SEQ ID NO: 64438 - DNA, 110 bp, synthetic construct
  source 1..110: mol_type = other DNA
tgggggcttcagttctgtggaaaaaaatcagagatattgttatgtacattccttgaagaggaaccagggctgccccaaggttgcactattgtctcttgactcttccccct

SEQ ID NO: 64439 - DNA, 110 bp, synthetic construct
  source 1..110: mol_type = other DNA
atgaatcgttgtattgggtccttctaataggtcggtaaaatatttattcttagcatggttaaatatttgataaggggaacagacaagtcttgagctccaatatttttata

SEQ ID NO: 64440 - DNA, 110 bp, synthetic construct
  source 1..110: mol_type = other DNA
tggttaaatatttgataaggggaacagacaagtcttgagctccaatatttttatatgaaacccagtgcttttcctgggtatatatattggcttacctgtgatttctgtgt

SEQ ID NO: 64441 - DNA, 110 bp, synthetic construct; identical to SEQ ID NO: 64439
  source 1..110: mol_type = other DNA

SEQ ID NO: 64442 - DNA, 110 bp, synthetic construct; identical to SEQ ID NO: 64440
  source 1..110: mol_type = other DNA

SEQ ID NO: 64443 - DNA, 110 bp, synthetic construct
  source 1..110: mol_type = other DNA
tgattcctagtcagattcattaaccaccgagccacgacgggaactccaaaaatattgccacttttaaacactgatgtgaaatttagaaagtgggcatagaaaattcacat

SEQ ID NO: 64444 - DNA, 110 bp, synthetic construct; identical to SEQ ID NO: 64443
  source 1..110: mol_type = other DNA

SEQ ID NO: 64445 - DNA, 110 bp, synthetic construct
  source 1..110: mol_type = other DNA
acccacaacctcatggttctcagattcatttctgctgcgccacagcaggacctcctatttctaattattaaatgaaaaatataaaataagaaaggatttgaagttttaat

SEQ ID NO: 64446 - DNA, 110 bp, synthetic construct; identical to SEQ ID NO: 64445
  source 1..110: mol_type = other DNA

SEQ ID NO: 64447 - DNA, 110 bp, synthetic construct
  source 1..110: mol_type = other DNA
agttcaggctatcctgggctctcaccgatgcccagaaaagctccagtatctgagaaactggagggattaagctggaagaatgacttggagatttctgttctcctaaaata

SEQ ID NO: 64448 - DNA, 110 bp, synthetic construct
  source 1..110: mol_type = other DNA
aactggagggattaagctggaagaatgacttggagatttctgttctcctaaaatagtttcaaataatataaccaacgagttcttaatctcaaaatatacaaaaaactcat

SEQ ID NO: 64449 - DNA, 110 bp, synthetic construct
  source 1..110: mol_type = other DNA
tgtaaatcaactgtaccccataaaaataaacaaatcctatcatagccatcacgcaactagccattcgcatgacaaccatgaaggaatcgggagacagcgctgacaggaaa

SEQ ID NO: 64450 - DNA, 110 bp, synthetic construct
  source 1..110: mol_type = other DNA
actagccattcgcatgacaaccatgaaggaatcgggagacagcgctgacaggaaaggcacttgtgggaagtgatttagaaaatttgggctaaattgagagaaaaagacaa

SEQ ID NO: 64451 - DNA, 110 bp, synthetic construct
  source 1..110: mol_type = other DNA
gtaccaaatctaatctgagacactatgtcacactctatggagatactcagtataaaatgaggtgtctcccctcaagccgtggaagttaactctgatacaggctcatatat

SEQ ID NO: 64452 - DNA, 110 bp, synthetic construct
  source 1..110: mol_type = other DNA
aatgaggtgtctcccctcaagccgtggaagttaactctgatacaggctcatatattattagactctgggttggcattttggaggaaaaatattcaagtgttctttctggg

SEQ ID NO: 64453 - DNA, 110 bp, synthetic construct
  source 1..110: mol_type = other DNA
tctttctttttcttctcttatggtttgacaattgttctttaatgtcatgcacgtgttcctttcttttaagtttttcatcattgttgttgttgttgtctttttagagccac

SEQ ID NO: 64454 - DNA, 110 bp, synthetic construct
  source 1..110: mol_type = other DNA
tcttatggtttgacaattgttctttaatgtcatgcacgtgttcctttcttttaagtttttcatcattgttgttgttgttgtctttttagagccacacccatggcatatgg

SEQ ID NO: 64455 - DNA, 110 bp, synthetic construct
  source 1..110: mol_type = other DNA
tacagcagagaaattccatgccgttggtgttagaagagctttgctttctgaaggtgaggggtatctgtttcactaatgaccaaagtacaaaggattcctcatcattataa

SEQ ID NO: 64456 - DNA, 110 bp, synthetic construct
  source 1..110: mol_type = other DNA
agcatagaccgttcttccttatttgcccctcaactctggcttcctcaaataccagtctcagagccaatgaacggccgaactagtccgcacgtcgtggatgccctcaattg

SEQ ID NO: 64457 - DNA, 110 bp, synthetic construct
  source 1..110: mol_type = other DNA
tctcagagccaatgaacggccgaactagtccgcacgtcgtggatgccctcaattgacaaaatacagccaggtcgttgagagcagatacagtgcaatccaccagatggtga

SEQ ID NO: 64458 - DNA, 110 bp, synthetic construct
  source 1..110: mol_type = other DNA
tgtgagctgtgggtttgtcgtatatgtcctttattatgtggaggtaggttccctctatgcccactttctgggcatagagaaacgggtgctgaattttgtcagaagctttt

SEQ ID NO: 64459 - DNA, 110 bp, synthetic construct; identical to SEQ ID NO: 64458
  source 1..110: mol_type = other DNA

SEQ ID NO: 64460 - DNA, 110 bp, synthetic construct
  source 1..110: mol_type = other DNA
atccatcctcaaactagtaagagtttccagaaagaaaacagaaaatagtaggggcatgttatcagtgcaataatgcaatattacgtcttcctggctctgaaagacatgag

SEQ ID NO: 64461 - DNA, 110 bp, synthetic construct
  source 1..110: mol_type = other DNA
atgttatcagtgcaataatgcaatattacgtcttcctggctctgaaagacatgagtttccagatctaaagggcccacctatctaaagggcccagcacaagagcattgtga

SEQ ID NO: 64462 - DNA, 110 bp, synthetic construct
  source 1..110: mol_type = other DNA
gtcaccacagaataaaaggctaaattcactagaaatatatagcaattctaaacttgtttgcatatgtatatagccttgaaaactcaacaatggaagaatagaggaacaaa

SEQ ID NO: 64463 - DNA, 110 bp, synthetic construct; identical to SEQ ID NO: 64462
  source 1..110: mol_type = other DNA

SEQ ID NO: 64464 - DNA, 110 bp, synthetic construct
  source 1..110: mol_type = other DNA
aggtatctggaaagggttgtatggtttagggcagaaattttattttattttttgtctttttttttttttagggccacacctgagacatatgcagttcccaggttagggga

SEQ ID NO: 64465 - DNA, 110 bp, synthetic construct
  source 1..110: mol_type = other DNA
ttagggcagaaattttattttattttttgtctttttttttttttagggccacacctgagacatatgcagttcccaggttaggggacaaatcagagctacagctgctggcc

SEQ ID NO: 64466 - DNA, 110 bp, synthetic construct
  source 1..110: mol_type = other DNA
tatagactacctatttttgcagtgctgaagctcagaaactttgttttttcatgaaggcaaaccactgtctttgaaaacgatatctaagagtcaaagaattagtttgagac

SEQ ID NO: 64467 - DNA, 110 bp, synthetic construct
  source 1..110: mol_type = other DNA
ggcaaaccactgtctttgaaaacgatatctaagagtcaaagaattagtttgagactgaaataagtgaatcaaacataggaagcaacaattaagaaatgctcaaaaggaac

SEQ ID NO: 64468 - DNA, 110 bp, synthetic construct
  source 1..110: mol_type = other DNA
tgctggaacatcttccagctgatacctcctcttcctcactcgcaaatcattcctgcacacacttacaagagacctctgtctccaccactccatgaaaactgttgcagagt

SEQ ID NO: 64469 - DNA, 110 bp, synthetic construct
  source 1..110: mol_type = other DNA
cacacacttacaagagacctctgtctccaccactccatgaaaactgttgcagagtctagagctgcattcaagaacaatgctaatttgcatttaacattgctagaactata

SEQ ID NO: 64470 - DNA, 110 bp, synthetic construct
  source 1..110: mol_type = other DNA
ccctggttgtaatcctatcagacagcatgatttatttcgaaacagaaaaatcctgccaccttcctaaactgactgtgctagaagcaggataagagtacatttctaggaag

SEQ ID NO: 64471 - DNA, 110 bp, synthetic construct
  source 1..110: mol_type = other DNA
ccaccttcctaaactgactgtgctagaagcaggataagagtacatttctaggaaggaaactctgcatcactttaggccttttcgctctcttctttccttgccttcccttc

SEQ ID NO: 64472 - DNA, 110 bp, synthetic construct
  source 1..110: mol_type = other DNA
cattattaaactctcgctttcaacacacatccagaacaacagaagaaaaatgtccttgcaattgttctgccgccctgctgtgaaccaatgcttctcttggtggtcaatgc

SEQ ID NO: 64473 - DNA, 110 bp, synthetic construct
  source 1..110: mol_type = other DNA
ttgcaattgttctgccgccctgctgtgaaccaatgcttctcttggtggtcaatgcttctcttggtgggagagttgtggcccctcctgactgtgtaattctttggagatct

SEQ ID NO: 64474 - DNA, 110 bp, synthetic construct
  source 1..110: mol_type = other DNA
ttaattttgtgaatgaatacaattctcgccttctccactccacgattccatctctgagggcagaattgtgttatctatttctgagatgctccataggaagcccacaaaga

SEQ ID NO: 64475 - DNA, 110 bp, synthetic construct; identical to SEQ ID NO: 64474
  source 1..110: mol_type = other DNA

SEQ ID NO: 64476 - DNA, 110 bp, synthetic construct
  source 1..110: mol_type = other DNA
cccagacccaccaggcccagttcttgttcagcagagtcagtcttcgagacctcaagaaagcaaggcctttttagggctctgtgggtacaaacccgggggcaactccctgg

SEQ ID NO: 64477 - DNA, 110 bp, synthetic construct
  source 1..110: mol_type = other DNA
gaaagcaaggcctttttagggctctgtgggtacaaacccgggggcaactccctggctgttctgtttctttccttccttctctccttccttccttcttttcttctttcttt

SEQ ID NO: 64478 - DNA, 110 bp, synthetic construct
  source 1..110: mol_type = other DNA
agtcgggtgcgttaaccactgcgccacgacgggaactccgagccagaggctctttattgggctcattccctggaaaaccactgatcacgggaggtctctcgtctctcaac

SEQ ID NO: 64479 - DNA, 110 bp, synthetic construct
  source 1..110: mol_type = other DNA
attgggctcattccctggaaaaccactgatcacgggaggtctctcgtctctcaaccaagcttccgctcaatacaccaaatgcctgcacgccttgacgcacacacttgtcc

SEQ ID NO: 64480 - DNA, 110 bp, synthetic construct
  source 1..110: mol_type = other DNA
aattctttgaccctgaaagtgtagatcccaagcctggccatttcccaggccaatcatcctctccccagcatctccacttccccgtgggcacaggcagataatgaagtgcc

SEQ ID NO: 64481 - DNA, 110 bp, synthetic construct
  source 1..110: mol_type = other DNA
atcctctccccagcatctccacttccccgtgggcacaggcagataatgaagtgcctgttcttgctcatgctgctgctttacaaaggcagtttttctgtaattggtccatg

SEQ ID NO: 64482 - DNA, 110 bp, synthetic construct
  source 1..110: mol_type = other DNA
cacacaaaatcacacgctagcacctgacaatacaaactcatttacccttcataagaacgggagcaaggaggtactattattgccccagttttacagatgaaggaactgag

SEQ ID NO: 64483 - DNA, 110 bp, synthetic construct
  source 1..110: mol_type = other DNA
aacgggagcaaggaggtactattattgccccagttttacagatgaaggaactgagccacggagagttcaagggccttgcccaaggacacagagttaagaggcgatagaat

SEQ ID NO: 64484 - DNA, 110 bp, synthetic construct
  source 1..110: mol_type = other DNA
tacatttgtttgtttgtgtgccatgttcagtatattgttctctaatcactaaacagctggtgagcaagtaccattaaatatgttaagtccaactcatcatccgaatgcac

SEQ ID NO: 64485 - DNA, 110 bp, synthetic construct
  source 1..110: mol_type = other DNA
gctggtgagcaagtaccattaaatatgttaagtccaactcatcatccgaatgcacagagctgctgtgataactttgcattatcacctctaattaagtgttctgccaaact

SEQ ID NO: 64486 - DNA, 110 bp, synthetic construct
  source 1..110: mol_type = other DNA
caaattaagtccctagaaaacttgaccaaatatatgcaaaaacagtttccagacactggacaacaggcagtgcaggacggtgatcccgcagagaaggtaaatgaatcagg

SEQ ID NO: 64487 - DNA, 110 bp, synthetic construct
  source 1..110: mol_type = other DNA
ctggacaacaggcagtgcaggacggtgatcccgcagagaaggtaaatgaatcaggcaaatgcaacaactgccctagcagactgcttggagaggatttctgaggtgcagcg

SEQ ID NO: 64488 - DNA, 110 bp, synthetic construct
  source 1..110: mol_type = other DNA
tgagaacggtggctcgagacttaacatagctacagaggtgacagtaaacggggtcatcagaaacgcccacccatcctgccgacacgccaccattcccaagtggccaggag

SEQ ID NO: 64489 - DNA, 110 bp, synthetic construct
  source 1..110: mol_type = other DNA
atcagaaacgcccacccatcctgccgacacgccaccattcccaagtggccaggagccgaggcggtgagccagagttcctagggtctccgcattgcctccaccatttgcca

SEQ ID NO: 64490 - DNA, 110 bp, synthetic construct
  source 1..110: mol_type = other DNA
ataagtagcctactctgcatcattcaccccaatatgcttcatttcaatgagctttagttggcctattacactcatagaacatgctgtaccacttttggcaaaaccaatca

SEQ ID NO: 64491 - DNA, 110 bp, synthetic construct
  source 1..110: mol_type = other DNA
agttggcctattacactcatagaacatgctgtaccacttttggcaaaaccaatcacaaaaatgacaaatatgtttgcctctagcttatatggcaaataggctcaagcagt

SEQ ID NO: 64492 - DNA, 110 bp, synthetic construct
  source 1..110: mol_type = other DNA
cagccgtggtgacgccccctgtaggctggctccggaacgctcagcaaaccatgccccgtaacagctcccagactccacagccatcaagcatttcgctgaaggcgctacct

SEQ ID NO: 64493 - DNA, 110 bp, synthetic construct
  source 1..110: mol_type = other DNA
ccgtaacagctcccagactccacagccatcaagcatttcgctgaaggcgctacctgccctttctcgagggacaggctcagcatcccaacgaggcggttacttctgttgtc

SEQ ID NO: 64494 - DNA, 110 bp, synthetic construct
  source 1..110: mol_type = other DNA
ggccacagctcctggtgacccaggcgtaagctccagtagctgggaaataaggaagagatgcaaaacacgaaaaaccttgatatgactggtgttaaggcgtttggatctaa

SEQ ID NO: 64495 - DNA, 110 bp, synthetic construct
  source 1..110: mol_type = other DNA
agatgcaaaacacgaaaaaccttgatatgactggtgttaaggcgtttggatctaagattggtgtgtgcatgtcttgagcaaaaatcaggtgcatgaatgggaacgagttg

SEQ ID NO: 64496 - DNA, 110 bp, synthetic construct
  source 1..110: mol_type = other DNA
ccctacccacaactctgcaaaatgaggcttaacctcatcctttgaagagcaaataagaaatgggccctggggaagaatgccgacaaactcgagaacctagaaacccaggt

SEQ ID NO: 64497 - DNA, 110 bp, synthetic construct
  source 1..110: mol_type = other DNA
agaaatgggccctggggaagaatgccgacaaactcgagaacctagaaacccaggttattaattctgtggtaagataatttaatgaggacttgtgaggcttttggagtatt

SEQ ID NO: 64498 - DNA, 110 bp, synthetic construct
  source 1..110: mol_type = other DNA
ttcctccataatcctattgaaaatgacacacatctgccaaactctccttctcccctttctctatttctctcttgtctacagctctttttaaccctcctgtgcaccatgta

SEQ ID NO: 64499 - DNA, 110 bp, synthetic construct
  source 1..110: mol_type = other DNA
cactgctgactgggaactgccaactgtgtactgactagaaatgaatttgaccggaataaaagtataggaatgatttagaaaacgatttctataacaaaaaactttatata

SEQ ID NO: 64500 - DNA, 110 bp, synthetic construct
  source 1..110: mol_type = other DNA
tagaaatgaatttgaccggaataaaagtataggaatgatttagaaaacgatttctataacaaaaaactttatataggagttcccattgtggcgcagtggttaacgaatcc

SEQ ID NO: 64501 - DNA, 110 bp, synthetic construct
  source 1..110: mol_type = other DNA
atgaccgtgctccactggtctaagcagcaaggatttttacctctgtctttatgaacctcttgtctggcggggggcaagaccacggtatcgctaaacagctgaggactgtg

SEQ ID NO: 64502 - DNA, 110 bp, synthetic construct
  source 1..110: mol_type = other DNA
cctcttgtctggcggggggcaagaccacggtatcgctaaacagctgaggactgtgtcttttaggactttcaactaccagaaggccagaaaaggccctttttaaagaggcc

SEQ ID NO: 64503 - DNA, 110 bp, synthetic construct
  source 1..110: mol_type = other DNA
gaccagtcatgccaagcttctggagaccatcttggtggcacattctctggaggatgtgaaacgatcggttggctgggggtttccagagctaatgagtgattggggcaacg

SEQ ID NO: 64504 - DNA, 110 bp, synthetic construct
  source 1..110: mol_type = other DNA
gtgaaacgatcggttggctgggggtttccagagctaatgagtgattggggcaacgtggaagcctgatcccacgccccgcccttcctctctgcctttacctccaagctcta

SEQ ID NO: 64505 - DNA, 110 bp, synthetic construct
  source 1..110: mol_type = other DNA
tgagcctgccagctggttagaagccaagagttatccagtcagacctgagtggaaaaatctatgatttgtttatttcatagtttgagttcaaaagcaagagacaatttaaa

SEQ ID NO: 64506 - DNA, 110 bp, synthetic construct
  source 1..110: mol_type = other DNA
cagtcagacctgagtggaaaaatctatgatttgtttatttcatagtttgagttcaaaagcaagagacaatttaaataataaaaggggaacaggggaaaaaaatgcaaaga

SEQ ID NO: 64507 - DNA, 110 bp, synthetic construct
  source 1..110: mol_type = other DNA
gtcaagtacacttccagcaagaagtgactttgtcttgaagtcaagcctgctggtgctaatggcctttaaaaggcttagtgatgatcaaatcattgctcaacacataaccg

SEQ ID NO: 64508 - DNA, 110 bp, synthetic construct
  source 1..110: mol_type = other DNA
ctaatggcctttaaaaggcttagtgatgatcaaatcattgctcaacacataaccgcaacccctttcttgcagaagtagactggaaaggcagggcatccactcctgaagag

SEQ ID NO: 64509 - DNA, 110 bp, synthetic construct
  source 1..110: mol_type = other DNA
ctggtcttcatgcagtcattcagccacacacagactgggagcttccaataaatgcaatctctatgtcgccctaagggtcaacagaaaggtcaaaggcacaaaccatctcc

SEQ ID NO: 64510 - DNA, 110 bp, synthetic construct
  source 1..110: mol_type = other DNA
aatctctatgtcgccctaagggtcaacagaaaggtcaaaggcacaaaccatctccctccccacccaactgcacttgtgtctgtggtttggaacttctcatgacacacctc

SEQ ID NO: 64511 - DNA, 110 bp, synthetic construct
  source 1..110: mol_type = other DNA
ccggagacctgatgcgcacacattcaaagcatcagaccgccttccatagcctggagcaatggggaagtaggtacctgtttcacgatttccatatccaactggccttccat

SEQ ID NO: 64512 - DNA, 110 bp, synthetic construct
  source 1..110: mol_type = other DNA
gcaatggggaagtaggtacctgtttcacgatttccatatccaactggccttccatcaatctttcgggtcaggggccaactactcgctcataaagcaactgaacggggcag

SEQ ID NO: 64513 - DNA, 110 bp, synthetic construct
  source 1..110: mol_type = other DNA
cctcctcaggtgttcgttcctccagcagccaatggtttatttcactcacctgagtgttgcaagagccacagccctggcggaactgttctccgtaaatcttgggtgaatag

SEQ ID NO: 64514 - DNA, 110 bp, synthetic construct
  source 1..110: mol_type = other DNA
gttgcaagagccacagccctggcggaactgttctccgtaaatcttgggtgaataggagggctgcaaagggccttcagagcaacagtgtggacaaaagcgctcatctcgta

SEQ ID NO: 64515 - DNA, 110 bp, synthetic construct
  source 1..110: mol_type = other DNA
ccagacacaagcaagagttccgttgttacacatcagcaacagccaaaaggttgggctcgtttgggtttgatgtttacctgaacgtatacagggatcatcagaacagaagt

SEQ ID NO: 64516 - DNA, 110 bp, synthetic construct
  source 1..110: mol_type = other DNA
ctcgtttgggtttgatgtttacctgaacgtatacagggatcatcagaacagaagtagctggcattattttttcacccccccacccccccccagcatatggagttcctgag

SEQ ID NO: 64517 - DNA, 110 bp, synthetic construct
  source 1..110: mol_type = other DNA
ctttgttacactttcatgttctgtatggtaagcaacagatgtttaagcgcatggagttgaaaatgctacctttaacctgcttgtatttttagtgtgtctccctacagaaa

SEQ ID NO: 64518 - DNA, 110 bp, synthetic construct
  source 1..110: mol_type = other DNA
gttgaaaatgctacctttaacctgcttgtatttttagtgtgtctccctacagaaagtatcctgctatccttatgaagcctgtgttcttcccttgggaaagacgggcaagg

SEQ ID NO: 64519 - DNA, 110 bp, synthetic construct
  source 1..110: mol_type = other DNA
agcacattaagcaaagtccaatccctgctccccccagcccttggcaaccgctaatctgctttctgcctctagagatttgccaattctgaacatttcatataaaaggagtc

SEQ ID NO: 64520 - DNA, 110 bp, synthetic construct
  source 1..110: mol_type = other DNA
ctgctttctgcctctagagatttgccaattctgaacatttcatataaaaggagtcatgtcataggtggccttttgtgcctagcttctttcacttagcatcatggtttttt

SEQ ID NO: 64521 - DNA, 110 bp, synthetic construct
  source 1..110: mol_type = other DNA
ttctctgagcctcagttccctccccagtaaaatcaaggacaagaataccttcctgtctgcgccatcccgaggattaaagggacactgtttataaagtgtctgccacatag

SEQ ID NO: 64522 - DNA, 110 bp, synthetic construct
  source 1..110: mol_type = other DNA
tctgcgccatcccgaggattaaagggacactgtttataaagtgtctgccacatagtagcccgcgctcaggaaacctgagttcctttttggcatcctcttgaagtctttcc

SEQ ID NO: 64523 - DNA, 110 bp, synthetic construct
  source 1..110: mol_type = other DNA
tgtacagtttacactctgcccagcaatgtaaattccagttgtttcaacagttggtattatctgccttttaaaatttcagccattctggcagttatggcaacatgatcttt

SEQ ID NO: 64524 - DNA, 110 bp, synthetic construct
  source 1..110: mol_type = other DNA
gttgtcactgctgtggtgcgggttcagtccctggcctgggagcttccacatgccctaggtgcggccaaatgaaaacagtccccttctgtgtgcaggcagaaaacctgact

SEQ ID NO: 64525 - DNA, 110 bp, synthetic construct
  source 1..110: mol_type = other DNA
taggtgcggccaaatgaaaacagtccccttctgtgtgcaggcagaaaacctgactttagagtcacacattaaagccttcgggtggaataacagggacagtgattaagcaa

SEQ ID NO: 64526 - DNA, 110 bp, synthetic construct
  source 1..110: mol_type = other DNA
gacggggccaaagttttccatgtcgttgtcacctgtctacagaatgtgacagatgagcctgttaactaggacaggaacatctcgttgaccaagtccgttgaagtaggggg

SEQ ID NO: 64527 - DNA, 110 bp, synthetic construct
  source 1..110: mol_type = other DNA
agcctgttaactaggacaggaacatctcgttgaccaagtccgttgaagtagggggatggctgagaagagcaaggcatcgggctataagcatatcagaaaacgatgcgatt

SEQ ID NO: 64528 - DNA, 110 bp, synthetic construct
  source 1..110: mol_type = other DNA
atatacaaatggccaataagaacatgaaacgatgtgtaacgtcattagttaccagggaaatgcaaatccaaaccacagggagacaccacatcacacctactaagatatat

SEQ ID NO: 64529 - DNA, 110 bp, synthetic construct
  source 1..110: mol_type = other DNA
ggaaatgcaaatccaaaccacagggagacaccacatcacacctactaagatatattcaaaaagacagggagaacctttgttgggagaaccaagggtaaggaggcttaagg

SEQ ID NO: 64530 - DNA, 110 bp, synthetic construct
  source 1..110: mol_type = other DNA
aggcaggaaagcagactgcttggagctaaaagcaagagagaatggaaagaatcagggcccctctcctgacccctccccaactcgttgtccgcccctgccctccctgcccc

SEQ ID NO: 64531 - DNA, 110 bp, synthetic construct
  source 1..110: mol_type = other DNA
ggcccctctcctgacccctccccaactcgttgtccgcccctgccctccctgccccgctaataccaaagaaaacaaagcagaactagcctagatgctttcaagatgtaggt

SEQ ID NO: 64532 - DNA, 110 bp, synthetic construct
  source 1..110: mol_type = other DNA
aaagaagacgaagtggaacgggaaaatgtccagacaagagcaaataaaataacgaaaggtggacaccaaggcaaagccatatggggacagactaaaatcacgggcctcac

SEQ ID NO: 64533 - DNA, 110 bp, synthetic construct
  source 1..110: mol_type = other DNA
aaggtggacaccaaggcaaagccatatggggacagactaaaatcacgggcctcacgagtcagaaaagatggaagctcagggggaaaatgagaggaatgcctacgattgtg

SEQ ID NO: 64534 - DNA, 110 bp, synthetic construct
  source 1..110: mol_type = other DNA
aaaatgctctacaataagcataaggtgatatagaatgctatataacataatagtatatctgcaaaaaaaattcagactaaggatatgggagagttccctccttcacaaaa

SEQ ID NO: 64535 - DNA, 110 bp, synthetic construct
  source 1..110: mol_type = other DNA
gagacagactcagagacatagaaagcgaacttatggttaccaaaggagaaaggcagagaggggggatatattaggaatttggtagtaacatatacacactactatatata

SEQ ID NO: 64536 - DNA, 110 bp, synthetic construct; identical to SEQ ID NO: 64535
  source 1..110: mol_type = other DNA

SEQ ID NO: 64537 - DNA, 110 bp, synthetic construct
  source 1..110: mol_type = other DNA
aagcttttcagaatggtttggatctgagctttgaccacagaacaagttaccggtactcatatgctgccaaattatagcacattgcttctcccgggcccctttcctcctcc

SEQ ID NO: 64538 - DNA, 110 bp, synthetic construct
  source 1..110: mol_type = other DNA
ctcatatgctgccaaattatagcacattgcttctcccgggcccctttcctcctcctcctctattgcattttcagtccttccatgtgcctctcaaaaatgccaagtgaaag

SEQ ID NO: 64539 - DNA, 110 bp, synthetic construct
  source 1..110: mol_type = other DNA
gcccttgcccacgacagcaggttggctgctacggagctgaagatgctcgtagcttcccagcgcagttgaaggaagagtttaatatctatttggtgagtagcaagtaagag

SEQ ID NO: 64540 - DNA, 110 bp, synthetic construct
  source 1..110: mol_type = other DNA
cccagcgcagttgaaggaagagtttaatatctatttggtgagtagcaagtaagaggccagagtctaagaggcagaaagaccatctctgctccggctccaagagcacaatg

SEQ ID NO: 64541 - DNA, 110 bp, synthetic construct; identical to SEQ ID NO: 64539
  source 1..110: mol_type = other DNA

SEQ ID NO: 64542 - DNA, 110 bp, synthetic construct; identical to SEQ ID NO: 64540
  source 1..110: mol_type = other DNA

SEQ ID NO: 64543 - DNA, 110 bp, synthetic construct
  source 1..110: mol_type = other DNA
cttagaagatacagatgaccatggtccaggatgataaaatcatgtccttctctggagcgaagggctggtgtgcttcctgcccgttataaaagatgggagctccctcaact

SEQ ID NO: 64544 - DNA, 110 bp, synthetic construct
  source 1..110: mol_type = other DNA
agcgaagggctggtgtgcttcctgcccgttataaaagatgggagctccctcaactcggggtgcctcccctgtaattcaatccactgagggtgcagatatgacctggctgt

SEQ ID NO: 64545 - DNA, 110 bp, synthetic construct
  source 1..110: mol_type = other DNA
caataaagctgtcagcccttgctttaaaaagtgcttacagataaagggatggaaaaggggaaaggcagctcatcttgttctaagggcgggtgagcagagcggaggacgta

SEQ ID NO: 64546 - DNA, 110 bp, synthetic construct
  source 1..110: mol_type = other DNA
aggggaaaggcagctcatcttgttctaagggcgggtgagcagagcggaggacgtattttcatcccctcaccatactcggagatgctacggtagtagatgggcgatcagac

SEQ ID NO: 64547 - DNA, 110 bp, synthetic construct
  source 1..110: mol_type = other DNA
ggatggcacgtgcatggcctcctggtcaactggactataagctcccttgagagcagacattgcatctcacgtaccacccccgcggtccccagcgcagtgctcggcacttc

SEQ ID NO: 64548 - DNA, 110 bp, synthetic construct
  source 1..110: mol_type = other DNA
gacattgcatctcacgtaccacccccgcggtccccagcgcagtgctcggcacttcgcagctatcaacaaatacttgtaggagttcccactgtggctgagcggtcatgatc

SEQ ID NO: 64549 - DNA, 110 bp, synthetic construct
  source 1..110: mol_type = other DNA
gtgggtcagaaagtgccccgcagtgcccggcataccgtaggtgctcgctaaatagctgcggctgccggaaacagagaaataaagtttttgaggcatctgaccaaaaatgc

SEQ ID NO: 64550 - DNA, 110 bp, synthetic construct
  source 1..110: mol_type = other DNA
ctgcggctgccggaaacagagaaataaagtttttgaggcatctgaccaaaaatgccccccacattccagcctgtaggatgacatcaggcttcgggtcttctgcttgagac

SEQ ID NO: 64551 - DNA, 110 bp, synthetic construct
  source 1..110: mol_type = other DNA
ttcaggaagcgggggaaaaggactgctcctggcagtactgacgtgtcaagcgggacagcttcacatgtaggaatgcgtaaaatgaacccccttttcaaagggtcctttgt

SEQ ID NO: 64552 - DNA, 110 bp, synthetic construct
  source 1..110: mol_type = other DNA
cagcttcacatgtaggaatgcgtaaaatgaacccccttttcaaagggtcctttgtctaagtgtgctcgcacctacctgtgcgctggcgctgcttcgctatcctctacacg

SEQ ID NO: 64553 - DNA, 110 bp, synthetic construct
  source 1..110: mol_type = other DNA
cacttgggaaaggcttctgtcccccgtgatcttcatttctagctgagctgctctccgttcaaaattcacccttttccccttcgcaagtagagaagccgcagtgtttagct

SEQ ID NO: 64554 - DNA, 110 bp, synthetic construct
  source 1..110: mol_type = other DNA
cgttcaaaattcacccttttccccttcgcaagtagagaagccgcagtgtttagctgatagggcacaaaatgactgggaaaaaccctgtttccgcttttcatccactctgc

SEQ ID NO: 64555 - DNA, 110 bp, synthetic construct
  source 1..110: mol_type = other DNA
tttctctgcacactgtgggcatgtgcaagtatggaagggattcacaaataaaacacttaaagcattaaaagcattgaccagggagttcctgtcaaggctcaacagtaatg

SEQ ID NO: 64556 - DNA, 110 bp, synthetic construct
  source 1..110: mol_type = other DNA
caagtatggaagggattcacaaataaaacacttaaagcattaaaagcattgaccagggagttcctgtcaaggctcaacagtaatgaactcaactagtatccatgaggatg

SEQ ID NO: 64557 - DNA, 110 bp, synthetic construct
  source 1..110: mol_type = other DNA
ctcactctgatgtcctaccaaataccttgatcccacaacaccagccttgctggctccccttctagggaccaaaatcctattcctctccagactttgatacatgttcacag

SEQ ID NO: 64558 - DNA, 110 bp, synthetic construct
  source 1..110: mol_type = other DNA
ccccttctagggaccaaaatcctattcctctccagactttgatacatgttcacagtttcctactgtcagcctacctggatttctttctttcttttctttctttctttctt

SEQ ID NO: 64559 - DNA, 110 bp, synthetic construct
  source 1..110: mol_type = other DNA
ctacttaggtatggagatgttcaggcatcttccaacacaagacccgatgttcttaagcgaaagtgctatgaaattggagtacacgacaaatattcatctctgtgacacca

SEQ ID NO: 64560 - DNA, 110 bp, synthetic construct
  source 1..110: mol_type = other DNA
agcgaaagtgctatgaaattggagtacacgacaaatattcatctctgtgacaccactttctcctgctttttcttcaactctcagcttggctacacacttttttggtcaac

SEQ ID NO: 64561 - DNA, 110 bp, synthetic construct
  source 1..110: mol_type = other DNA
aaagcctagatgcggacactatctagggagacagtacacagtcaccaagtccagagggccaaggagagccaacagtttggagcgcggaaggagcacatcttttgatgctt

SEQ ID NO: 64562 - DNA, 110 bp, synthetic construct
  source 1..110: mol_type = other DNA
gggccaaggagagccaacagtttggagcgcggaaggagcacatcttttgatgcttgaatttttaaaagcagggctgcaataagcagggagaaagctgagcagttactgtt

SEQ ID NO: 64563 - DNA, 110 bp, synthetic construct
  source 1..110: mol_type = other DNA
tgtgagccctccaattttgttcttgtctttcaagtttgtttttgttattcaggggtcccttgagactccatataaattttagaataggttattctaagcccggaaaaata

SEQ ID NO: 64564 - DNA, 110 bp, synthetic construct
  source 1..110: mol_type = other DNA
tcccttgagactccatataaattttagaataggttattctaagcccggaaaaataccgttggatgttggtaaggattgcactgaatctgtagattgctttggctaatatt

SEQ ID NO: 64565 - DNA, 110 bp, synthetic construct
  source 1..110: mol_type = other DNA
ctttttccagcagcagaaatagctaacatttattgaacaccaaatatgtgctaagactacgtaccttaaatacaggatcctttttaattctcacggtcatactttgagat

SEQ ID NO: 64566 - DNA, 110 bp, synthetic construct
  source 1..110: mol_type = other DNA
aagaacactgggcctaatgcacttgactggactctgacttctcctgctttaaagaataaacaaacaggatggcattaagcgcatttagcaaattcatacaactgacagcc

SEQ ID NO: 64567 - DNA, 110 bp, synthetic construct
  source 1..110: mol_type = other DNA
ataaacaaacaggatggcattaagcgcatttagcaaattcatacaactgacagccatgcagggagaaaggcacaacgtctgtgttgtaggtcaagtaaccgaaacgctac

SEQ ID NO: 64568 - DNA, 110 bp, synthetic construct
  source 1..110: mol_type = other DNA
cccacctaacttggcacaggtgaactacaattagtcgtacttaactaaaggcctccaaaatgttcttctctcacaagatctttgggcactgtgggccgagagagagcacc

SEQ ID NO: 64569 - DNA, 110 bp, synthetic construct
  source 1..110: mol_type = other DNA
cttgcaacaatggcggccatgtcgcctgggaccctgaccctaattgctctcgatagatcaactgcatcaactacatcagacctttgactgttcccctcaatgctgccaat

SEQ ID NO: 64570 - DNA, 110 bp, synthetic construct
  source 1..110: mol_type = other DNA
ctgatcacttgtccttcaggtgcttttggcacgagctcctcctgaggaaggcctctgcacaggcctgactttggcagagctctggaatcagcaactgggagcagggtgcc

SEQ ID NO: 64571 - DNA, 110 bp, synthetic construct
  source 1..110: mol_type = other DNA
tgcacaggcctgactttggcagagctctggaatcagcaactgggagcagggtgccaatacccaggagaccaggtgtctcatgggagcatgttgtaagggcaaaaaaataa

SEQ ID NO: 64572 - DNA, 110 bp, synthetic construct
  source 1..110: mol_type = other DNA
ggccagctgctttgagggcccggggccatgggaagcctggtggatttcatgagcatggacccattgctgtacgtgcttccccatgacatgtgctcctgggatggtcagca

SEQ ID NO: 64573 - DNA, 110 bp, synthetic construct
  source 1..110: mol_type = other DNA
tggacccattgctgtacgtgcttccccatgacatgtgctcctgggatggtcagcacattgggccatgttctccatctattgtataaacttctggaagtggatccactggg

SEQ ID NO: 64574 - DNA, 110 bp, synthetic construct
  source 1..110: mol_type = other DNA
gaggaggccctgaagaggaacagggtgccaccctgaagactaaccaggaggatttggcaggggcccctaggagggaggagacaacctcccagaatccttggcattggaat

SEQ ID NO: 64575 - DNA, 110 bp, synthetic construct
  source 1..110: mol_type = other DNA
ggcaggggcccctaggagggaggagacaacctcccagaatccttggcattggaatccatcttggctgagaggtgtgaaggaaagaacctgagtcagactaaatatgggct

SEQ ID NO: 64576 - DNA, 110 bp, synthetic construct
  source 1..110: mol_type = other DNA
ggatgagcccgcccaggtcattagccctgctaatccgcggccatcccgcccctgtgaagggccactgccttccggcctgggcagcagagcacgacctcctctctggcaaa

SEQ ID NO: 64577 - DNA, 110 bp, synthetic construct
  source 1..110: mol_type = other DNA
gaagggccactgccttccggcctgggcagcagagcacgacctcctctctggcaaactaacaaaactgttcgctgttaattagggtcagcggtctggtgccccctgcagag

SEQ ID NO: 64578 - DNA, 110 bp, synthetic construct
  source 1..110: mol_type = other DNA
agggaagaaaagaaaaaaactgtcaacttgtaggcaagagcttccaaaacatacggatcttcatgagaaaggccatgcaggagagaaaccttttaaatgtcaggaatgtg

SEQ ID NO: 64579 - DNA, 110 bp, synthetic construct
  source 1..110: mol_type = other DNA
caaaccagtcattcatacggtagattggctgtatttgcacctcagtacagcagccactggccacgtgtggttactgaacccttgaatcggtggctagtttgcatccataa

SEQ ID NO: 64580 - DNA, 110 bp, synthetic construct
  source 1..110: mol_type = other DNA
ttgggttttcacataattgaaaatgatgcctttgctttacctaaaaacaccccgtacacctttctctccacccccgccccagcttatcctaacagtttcctttcgctgtt

SEQ ID NO: 64581 - DNA, 110 bp, synthetic construct
  source 1..110: mol_type = other DNA
ggtgcggggaactctttctagctggggaggtccctctcggtgctgagcaatgtcagcttcaggaatggaatgatacaggcacgatgagctgtcattccttctcctcctgt

SEQ ID NO: 64582 - DNA, 110 bp, synthetic construct
  source 1..110: mol_type = other DNA
tccaaggggtaatagcccctcagcgcctccaccctcacgtccaaacaagaagagctatcaaatggctcaccagacagatgcttgatcaccatctgcatgggtctccacct

SEQ ID NO: 64583 - DNA, 110 bp, synthetic construct
  source 1..110: mol_type = other DNA
ccctgcagcaagtaggaggggaaggcccttcggatcagaaggcagtcagtgaacatcagcagcatggcccaggaatcagcatgacaaccgcccttcgccaagtgtcaggc

SEQ ID NO: 64584 - DNA, 110 bp, synthetic construct
  source 1..110: mol_type = other DNA
gagaggaagttggctttctacaaaatcagtgaaaaccacacctaggagttcatacactggaactagagaaatctttaattccacccacatctacacagcacattggactt

SEQ ID NO: 64585 - DNA, 110 bp, synthetic construct
  source 1..110: mol_type = other DNA
ctagaatcctgaggaatctcgaaatatggccgagctactttagactccagggacaatggagggtgttgaaaaaacacacatggacacgtgtgcactagatgctttttgaa

SEQ ID NO: 64586 - DNA, 110 bp, synthetic construct
  source 1..110: mol_type = other DNA
aaaggacatgttttggtcaattaaagaataaagaattggcagtcatggatttgacacttagctccaagttgagtgcctccacctattagcacagtaggatctatttcagc

SEQ ID NO: 64587 - DNA, 110 bp, synthetic construct
  source 1..110: mol_type = other DNA
gcttgtagcttccttttttgtggtgtttttgtctggctttggtatcaagtatcgttaggctaggctcataaaatgagtttggaagtgttcccatctcttcaaatttttgg

SEQ ID NO: 64588 - DNA, 110 bp, synthetic construct
  source 1..110: mol_type = other DNA
ggctctcctcaagaacaaggctgataacatttcagaggatgtcctaacgggttaattgattctgaaataaaaccacagtatgcagtcacttaaaacttactgcagtagag

SEQ ID NO: 64589 - DNA, 110 bp, synthetic construct
  source 1..110: mol_type = other DNA
caatccaaggctagcatgcagcttcctagtcatcagagacccaggattctccgatccagttactctgccatccttagctgcctacctcatagttcagaatgactgtgtga

SEQ ID NO: 64590 - DNA, 110 bp, synthetic construct
  source 1..110: mol_type = other DNA
ccagttactctgccatccttagctgcctacctcatagttcagaatgactgtgtgaacttggatttggcaatggcttcttagatatcataccaaggccacaagccacaaaa

SEQ ID NO: 64591 - DNA, 110 bp, synthetic construct
  source 1..110: mol_type = other DNA
cagccatgcccatggtatgtggaagttcccgggccagggagcaaatctgagctgcagctgtgccctgtgccacagctgcgacaatgttggattcttaacctagtgtgccg

SEQ ID NO: 64592 - DNA, 110 bp, synthetic construct
  source 1..110: mol_type = other DNA
agctgtgccctgtgccacagctgcgacaatgttggattcttaacctagtgtgccgggccagggatggaacctgagctgtctcagagacaaagccggatccttggccctct

SEQ ID NO: 64593 - DNA, 110 bp, synthetic construct
  source 1..110: mol_type = other DNA
ctggattacacattgtgattccggaagtctggcgggtggaattcagaagctaaatttctggtgagaaggcgatgctgtttttcggtggccgcgaaggagtgcgcctgtta

SEQ ID NO: 64594 - DNA, 110 bp, synthetic construct
  source 1..110: mol_type = other DNA
tgtcatcctcactttaaagtggcaaacggcagaggttaaataactgcctgaagacatagatctgctaagtagcaatattcttcagaaaacacgatctataggggcagatg

SEQ ID NO: 64595 - DNA, 110 bp, synthetic construct
  source 1..110: mol_type = other DNA
atagatctgctaagtagcaatattcttcagaaaacacgatctataggggcagatgggaaagaaaggacattggttctgttacagaagagaaggctaagaggtgtgcgcgg

SEQ ID NO: 64596 - DNA, 110 bp, synthetic construct
  source 1..110: mol_type = other DNA
ccttttacatttaaaaaaggggtattttaaaaatatgagttttctttagcagaagggtagttctgaatgagctcatctgcaatgactggaaacaactcttatctttaaaa

SEQ ID NO: 64597 - DNA, 110 bp, synthetic construct; identical to SEQ ID NO: 64596
  source 1..110: mol_type = other DNA

SEQ ID NO: 64598 - DNA, 110 bp, synthetic construct
  source 1..110: mol_type = other DNA
gcccaggagcagatataacgtagtgggcatttatggcatatctatataacaactttccccttgcctgggacctgcctgctctttccccagacacttgattgtatcaagtc

SEQ ID NO: 64599 - DNA, 110 bp, synthetic construct
  source 1..110: mol_type = other DNA
tccccttgcctgggacctgcctgctctttccccagacacttgattgtatcaagtctctatgctgggcggatcgagttcttccctagggtattttaaagtagaatcgatag

SEQ ID NO: 64600 - DNA, 110 bp, synthetic construct
  source 1..110: mol_type = other DNA
ttgagggggtggccccacttgctttctccctgcctcagccatgattgttttttagcctattttgttaaccattcgctatgctcgtcacagatcgttggactaggcatcat

SEQ ID NO: 64601 - DNA, 110 bp, synthetic construct
  source 1..110: mol_type = other DNA
cctattttgttaaccattcgctatgctcgtcacagatcgttggactaggcatcatcataactaactgcaaggcagccagctgtgcggggcccagggatctctgctgcctt

SEQ ID NO: 64602 - DNA, 110 bp, synthetic construct
  source 1..110: mol_type = other DNA
tctttgtagaaatggcagagcacatttagcctccaagcaaggtatgcttcttgtgcatttctgccattaattacctttcttgttttcatgttcctaatcaagtttaagac

SEQ ID NO: 64603 - DNA, 110 bp, synthetic construct
  source 1..110: mol_type = other DNA
tttttaaaggtattgatgtcctatgaagaattttcagaagttggattttagttccccttttctgttgtgaaactcattaaatactgcaaaccaaacagtgcagttgtcat

SEQ ID NO: 64604 - DNA, 110 bp, synthetic construct
  source 1..110: mol_type = other DNA
cggagcgcttctgctcacgcccggccgtcgccatcttgagctggggtgtcgtcgcagccatttctcatcaggacctctgttctgaagtgcttggtgccagacctctgcca

SEQ ID NO: 64605 - DNA, 110 bp, synthetic construct
  source 1..110: mol_type = other DNA
gtgatttgtcctttttcatttcttattctgtttatttgggttttatctctcttcttcttggtgagtccagccacccaccaattttcaaccattccactgaactaagtgct

SEQ ID NO: 64606 - DNA, 110 bp, synthetic construct; identical to SEQ ID NO: 64605
  source 1..110: mol_type = other DNA

SEQ ID NO: 64607 - DNA, 110 bp, synthetic construct
  source 1..110: mol_type = other DNA
ttgttcctcctcctgatgtgcctttgtttgatatgcggttttatttggtggtgttgtttagcttaagcatttggcacttgggaaagtcaattcatcaaatcaggactggg

SEQ ID NO: 64608 - DNA, 110 bp, synthetic construct
  source 1..110: mol_type = other DNA
gggccaggggtcaaactggagcggcagctgaggcctatgccacaaccacagaaatgctagatctgactgcatccatgatctataccatgacttgtggcaatgccagatcc

SEQ ID NO: 64609 - DNA, 110 bp, synthetic construct; identical to SEQ ID NO: 64608
  source 1..110: mol_type = other DNA

SEQ ID NO: 64610 - DNA, 110 bp, synthetic construct
  source 1..110: mol_type = other DNA
taacagctatcatgagactttctttatgaagttctctgttgtgttgtcagctgtaagagccttcactaaagcagccaatattgaggaagtagagtgtgttttgcctgcaa

SEQ ID NO: 64611 - DNA, 110 bp, synthetic construct
  source 1..110: mol_type = other DNA
cagtctctactctgccatttattagctatgttctcttgggtatattgactaacctctctgattctcattttctgcaaacctaaaatgaggataatcataatatctatctt

SEQ ID NO: 64612 - DNA, 110 bp, synthetic construct
  source 1..110: mol_type = other DNA
ctgttaattggttatttcagaataactgaatgcaaccagtttacttaaaagcacaaacactgtgaaggtcaactgcttgatagaaatggcccacttcttattctttatat

SEQ ID NO: 64613 - DNA, 110 bp, synthetic construct
  source 1..110: mol_type = other DNA
tccagattcgtagccccactaaggctcccagtctgctgggccattacacccactttcaatatcaccagagtgggcaaaggaccctgtagtccccatcaagtctcactcag

SEQ ID NO: 64614 - DNA, 110 bp, synthetic construct
  source 1..110: mol_type = other DNA
ccctggactgggttgaaagctctgctgttgctgttttgaaatgcttaatatatcttttaatagttatttccacaatatagtttctttcttctactgtacagcatggtgac

SEQ ID NO: 64615 - DNA, 110 bp, synthetic construct
  source 1..110: mol_type = other DNA
aaataagtccagtcacctctatcttccatatttttgttttctagtgttagagacgcacctttttttcttatcacatcactccagaattagtcattaacatgatacatcat

SEQ ID NO: 64616 - DNA, 110 bp, synthetic construct
  source 1..110: mol_type = other DNA
catctccccactattttaagtcaaattcatcctacaaactctttgatcccattactctcctctggttccttcctccttctgaacccacttcctatgcttcctgcacttcc

SEQ ID NO: 64617 - DNA, 110 bp, synthetic construct
  source 1..110: mol_type = other DNA
gccaggaaacagagtggaagtggtgatacatgctacaatactgcttttcattaatgagaagcttaaagaatggcctctaaaaaataacacttgtcagagccttaaatggg

SEQ ID NO: 64618 - DNA, 110 bp, synthetic construct
  source 1..110: mol_type = other DNA
gagaagcttaaagaatggcctctaaaaaataacacttgtcagagccttaaatgggtactgtctaaggagtattgattgatctcgactagccaggaaattagaaagaggaa

SEQ ID NO: 64619 - DNA, 110 bp, synthetic construct
  source 1..110: mol_type = other DNA
tgtcttaatcatgtggcagggctgacattttcagccatgcgaaatgtgtgtgtgtgtatatatatataatgaaatgtttgaaagtatcactgtttgcagggagggttttt

SEQ ID NO: 64620 - DNA, 110 bp, synthetic construct
  source 1..110: mol_type = other DNA
gtgtgtgtgtgtatatatatataatgaaatgtttgaaagtatcactgtttgcagggagggttttttttggaagacagtttaatcattgatttatttcaataccaccttgt

SEQ ID NO: 64621 - DNA, 110 bp, synthetic construct
  source 1..110: mol_type = other DNA
attgcagcaatcagcaagccacagactgaatccatgtccaggaaatttccatttttagatagaagaaggcaggtatccacgatagaggaagaaaatgtcattcaggtaaa

SEQ ID NO: 64622 - DNA, 110 bp, synthetic construct
  source 1..110: mol_type = other DNA
tagatagaagaaggcaggtatccacgatagaggaagaaaatgtcattcaggtaaaaatggcacatctgatgaaagggacattttgattctgttcaaaagttgctcctgaa

SEQ ID NO: 64623 - DNA, 110 bp, synthetic construct
  source 1..110: mol_type = other DNA
gtgtcttcagcaacttcagatactttaacctactgcgccaggccagggatgcagcccacacctccgcagtgacctgagccgccgcagcccaattcttgaccctctacaac

SEQ ID NO: 64624 - DNA, 110 bp, synthetic construct
  source 1..110: mol_type = other DNA
tctcttatgggctacatgaacagcacgaggcagcgaatgtctaccctgtgccagtggtacccaaggggtctacaagtgagcacatcgcttaaatgccgacctcatttccc

SEQ ID NO: 64625 - DNA, 110 bp, synthetic construct
  source 1..110: mol_type = other DNA
catatgaaatggagataaaatacctgtattacgggatttagagacgagataaacttgacatgcatctgtgccttcacagaaacggaggccatggttattgctgctcctag

SEQ ID NO: 64626 - DNA, 110 bp, synthetic construct
  source 1..110: mol_type = other DNA
tgacatgcatctgtgccttcacagaaacggaggccatggttattgctgctcctagattaaagccaggggctgtggatggggggtaaggggagctgacacagaatgcctgc

SEQ ID NO: 64627 - DNA, 110 bp, synthetic construct
  source 1..110: mol_type = other DNA
cagctaggtttgtgtcccctggatttatgtcattgcaaaggtgtcagattgaacgtccatgccggggctctcttctgccttgccctgaggtccccaatcaaaatggcagt

SEQ ID NO: 64628 - DNA, 110 bp, synthetic construct
  source 1..110: mol_type = other DNA
acttcttatggagtggaggtgggagtgagggtgacttcaacttgcttttcctctgcctgagagaacacctcccggcaaagtcaggccacctctctcgacaggtcctctta

SEQ ID NO: 64629 - DNA, 110 bp, synthetic construct
  source 1..110: mol_type = other DNA
gcaaataaactctaactctgatatttattcataaattacataaatagctaaggaaatagagcttgtgtgcttgaaagtagctgacaatctgagctcaccaaattagagcc

SEQ ID NO: 64630 - DNA, 110 bp, synthetic construct
  source 1..110: mol_type = other DNA
atagagcttgtgtgcttgaaagtagctgacaatctgagctcaccaaattagagccaattttgtcctttcattaaacaaaataggataattcctattatgttcagagactg

SEQ ID NO: 64631 - DNA, 110 bp, synthetic construct
  source 1..110: mol_type = other DNA
agaaaagcacgtcagactttaaaaagtgtcttttccccctgcttcacgtagctcacttcgaattacccttcaagatgccctgcaaaagactctcccagcccgaccaaggg

SEQ ID NO: 64632 - DNA, 110 bp, synthetic construct
  source 1..110: mol_type = other DNA
actcaccttgcaccattcgagtccaatctgtgcccaccggcctctcaagaacggagtctcatctccatcaaaacggccaagaaagacgcacccccggtcaaatgcactct

SEQ ID NO: 64633 - DNA, 110 bp, synthetic construct
  source 1..110: mol_type = other DNA
gtctcatctccatcaaaacggccaagaaagacgcacccccggtcaaatgcactctccctggagcaacgcctctgctctcctccagccacggaaaccaagcaactcgactt

SEQ ID NO: 64634 - DNA, 110 bp, synthetic construct
  source 1..110: mol_type = other DNA
tcaaatttgggacagagagcagaaaggatctgcctcatgtgcacattttttagggaaaataaggctttatcttgggacaggttctcccctcacttcatccaccgcagagc

SEQ ID NO: 64635 - DNA, 110 bp, synthetic construct
  source 1..110: mol_type = other DNA
aggtcgcagaaggagtgaagtggcagaaccaggataagaagccgagtggcctgtcctcagttcagtggtgcgtgagctcctgcctcactcatgctgctgctgttgagtac

SEQ ID NO: 64636 - DNA, 110 bp, synthetic construct
  source 1..110: mol_type = other DNA
ctcagttcagtggtgcgtgagctcctgcctcactcatgctgctgctgttgagtacgtaccgccaacccggcaccgtgctaggtgtcagggacccatccgtgaacgaggca

SEQ ID NO: 64637 - DNA, 110 bp, synthetic construct
  source 1..110: mol_type = other DNA
cctgtggccctctgcatcaggagatggccaatgaaagccaaacctccactggacagctgattattctaagcagtctcagaacgctcctggacaggggctggaaaagtatt

SEQ ID NO: 64638 - DNA, 110 bp, synthetic construct
  source 1..110: mol_type = other DNA
gctgattattctaagcagtctcagaacgctcctggacaggggctggaaaagtatttctgttccttcgactctcaactcgctgtactcacagggctaccacagccaacagg

SEQ ID NO: 64639 - DNA, 110 bp, synthetic construct
  source 1..110: mol_type = other DNA
gctgaaggcaggcttcaaaggcgtgcagctgggggtgacgggaaagcagacttcagcggctgacaggcctgtctgagcaaagccctcaggaatcaggactctttgaatca

SEQ ID NO: 64640 - DNA, 110 bp, synthetic construct
  source 1..110: mol_type = other DNA
actttcttatcatgtatgagcaagtatttagcattcccaacaacgtgaaggactaaggtgatgacggaggaacaatgagtcatgacaattaatttcaggtatggcagagg

SEQ ID NO: 64641 - DNA, 110 bp, synthetic construct
  source 1..110: mol_type = other DNA
aggtgatgacggaggaacaatgagtcatgacaattaatttcaggtatggcagaggatgaaattgtgaccacaaaggctctgtcacccacagatgccaagtaaggctgggt

SEQ ID NO: 64642 - DNA, 110 bp, synthetic construct
  source 1..110: mol_type = other DNA
aaactgaagtctgctcaacaagcccaaggaccagtcctaaatgccagagcacaggaaacagcttctacatcattcagccccaatgataggactcaacagtacacggaggg

SEQ ID NO: 64643 - DNA, 110 bp, synthetic construct
  source 1..110: mol_type = other DNA
aaacagcttctacatcattcagccccaatgataggactcaacagtacacggagggcagaggtaccctctgcaaaggaattttacctttttcttaaaaaataaaccaaatt

SEQ ID NO: 64644 - DNA, 110 bp, synthetic construct
  source 1..110: mol_type = other DNA
ttaaagccgatcaattggagccgaaattgtggattcatccatgattcctctctttttcacaacccacatccaatctattaagaagtgttttggctctgctttcaaatata

SEQ ID NO: 64645 - DNA, 110 bp, synthetic construct; identical to SEQ ID NO: 64644
  source 1..110: mol_type = other DNA

SEQ ID NO: 64646 - DNA, 110 bp, synthetic construct
  source 1..110: mol_type = other DNA
agacagctttgtccctggatgaaaacttctggtttaaaaaggctgaggtcagctgtggcagctgaagtcacctacaaaagaaacttctgggaacactctcaagggaaaag

SEQ ID NO: 64647 - DNA, 110 bp, synthetic construct
  source 1..110: mol_type = other DNA
aagcctgctagcctttgaactggaactttcctatcagctgtccagattcttgggccttcccacttagactggaactataccattggctctccagggcctccagcttgctg

SEQ ID NO: 64648 - DNA, 110 bp, synthetic construct
  source 1..110: mol_type = other DNA
tttgtgacaaggcccccccacccctcctcctccagaacacggatacccgacccttcccaggacagcgacacctctcacattccggcccctgggcacaaggaatctaaagt

SEQ ID NO: 64649 - DNA, 110 bp, synthetic construct
  source 1..110: mol_type = other DNA
cccaggacagcgacacctctcacattccggcccctgggcacaaggaatctaaagtgccctggcatcaacttgactggtagttcattgggacccttgcggtgttccctgga

SEQ ID NO: 64650 - DNA, 110 bp, synthetic construct
  source 1..110: mol_type = other DNA
tgctaccacctctgctacttagtgtgtaacagtcacaaggttctcacttgccagtgaaagcttatcttagcctgggagtgcacgtggcaatattgtctcaaccaacagca

SEQ ID NO: 64651 - DNA, 110 bp, synthetic construct
  source 1..110: mol_type = other DNA
aagtgaaggagagatagacatttccatataaacaaaagctgagggagttcatcagcactagatttggcatacaagaaatgctgagtgacttatgtttgacaaaagaacgc

SEQ ID NO: 64652 - DNA, 110 bp, synthetic construct
  source 1..110: mol_type = other DNA
cactagatttggcatacaagaaatgctgagtgacttatgtttgacaaaagaacgctaaataacaacatgaaaacctatgaaagtataaaattcactggttagggtaatag

SEQ ID NO: 64653 - DNA, 110 bp, synthetic construct
  source 1..110: mol_type = other DNA
ttcgtccttctgctttctcagctcgtccctcacctgtgtcaccggtgccttcctggcccactgttgttgacacttgaagtggtttctgttttactgcttagaccctgact

SEQ ID NO: 64654 - DNA, 110 bp, synthetic construct
  source 1..110: mol_type = other DNA
gtcactctcttccaggttaatttgttgataggacctgtattgcttgcttactgtggtataacaaaccacttcacaatatagtggcttaagctgataatcatttatcacca

SEQ ID NO: 64655 - DNA, 110 bp, synthetic construct
  source 1..110: mol_type = other DNA
atgtgctgtagagatgcttgtagcttgagctcagtagtcattaccaccaacaatggaagttcatttcacaaaccacttattttgtgtgaaagatggaggataggcgactc

SEQ ID NO: 64656 - DNA, 110 bp, synthetic construct
  source 1..110: mol_type = other DNA
tatacatcaagtctgttgctaaggaacacaatttttttgacctggtaacagaaaattctggtaatctgacacaagattctaatgctttagaattagaggcattcttttgg

SEQ ID NO: 64657 - DNA, 110 bp, synthetic construct
  source 1..110: mol_type = other DNA
ttctggtaatctgacacaagattctaatgctttagaattagaggcattcttttggattctgttctttaatattttaagaggaaaaccatgaagaggattctggcttagta

SEQ ID NO: 64658 - DNA, 110 bp, synthetic construct
  source 1..110: mol_type = other DNA
cagatgccaaacaattgatttgattgctgagccggttgggtcattaagttgccggaaataaccttgttgcaaatgttcgttggtgattcagtctgagactgcgctcaggg

SEQ ID NO: 64659 - DNA, 110 bp, synthetic construct
  source 1..110: mol_type = other DNA
actgccattttacacaataactggtatactcacaagaaccaggatgggatttaagaaagattctgggattgctcttatacaccacatgcctcctcttccctagggaggac

SEQ ID NO: 64660 - DNA, 110 bp, synthetic construct
  source 1..110: mol_type = other DNA
atttattctatcaaaaagataaattacatttaaccttatctgtaaatgctttatagtttaactttcttttgactagccagcctactgtgtattctggatccccaaatgca

SEQ ID NO: 64661 - DNA, 110 bp, synthetic construct
  source 1..110: mol_type = other DNA
cgatttgctttttccagctgttcctgctgtttgagggctagggcatcaaagctcggcttgaatcctgccactttagccatggaaacctttatcattttaactgttctact

SEQ ID NO: 64662 - DNA, 110 bp, synthetic construct
  source 1..110: mol_type = other DNA
atcatttaatccctgaagctgagtttggaaaggtgacatttattactcaagatcactgcaaacaatctcccatttctaaagcttcaagctggaagggatgtcacaagacc

SEQ ID NO: 64663 - DNA, 110 bp, synthetic construct
  source 1..110: mol_type = other DNA
gatgcaccttgatatcctaaacttctgtgtctttgtggggggaggggaatctaagttgtttccagtatgtcacaaattatacataattctgaaatgaacaccttagagca

SEQ ID NO: 64664 - DNA, 110 bp, synthetic construct
  source 1..110: mol_type = other DNA
aactgaggcactgagagttgatgttttcaatatcataatcaaggatgcggacagcactaacactcaaaaatttggactattattccagtacttgaacataccaaagaatg

SEQ ID NO: 64665 - DNA, 110 bp, synthetic construct
  source 1..110: mol_type = other DNA
actaacactcaaaaatttggactattattccagtacttgaacataccaaagaatggatgagtcttacaatgctatgtcgttaagcaaatctactataacactatgatttc

SEQ ID NO: 64666 - DNA, 110 bp, synthetic construct
  source 1..110: mol_type = other DNA
ggattcaggcacatgagcacagaacgcctctgtatgaaacctcacatctgagagtgtgacccaatttcggaaaggaagagggacaatctttccatttctcactgaagaca

SEQ ID NO: 64667 - DNA, 110 bp, synthetic construct
  source 1..110: mol_type = other DNA
ctaactaattggcgcccagaaaatttacataaaattcacgtgacagatatgaacatactagagccaatactgtccaatgctctactagaagctacagccaatggtcttga

SEQ ID NO: 64668 - DNA, 110 bp, synthetic construct
  source 1..110: mol_type = other DNA
ccatctctccttttcttcatctcaggctgttgatttaatacctctcccagcctcccgagctccatcatatttcttttcacaggcatttccctggctaaaatcctagtaca

SEQ ID NO: 64669 - DNA, 110 bp, synthetic construct
  source 1..110: mol_type = other DNA
gcataaaaatgaaaaccaaagctaattaaaaataccaccacctaaggattgtcgctgtttccacttgaacatccaggcagagtttttggattttggcttccaagcttttg

SEQ ID NO: 64670 - DNA, 110 bp, synthetic construct
  source 1..110: mol_type = other DNA
tcttaaaaagagatgacatgttttcctctggcctctttacccggagttctacagtgtggggactagctgactccataggatcgcattcagaaacagcagtctagagagat

SEQ ID NO: 64671 - DNA, 110 bp, synthetic construct
  source 1..110: mol_type = other DNA
gtggggactagctgactccataggatcgcattcagaaacagcagtctagagagattgatttcattgaccagggtcagaaaggtagtcagcagcagagttgtgattcaaag

SEQ ID NO: 64672 - DNA, 110 bp, synthetic construct
  source 1..110: mol_type = other DNA
ccttcatctactctttgcgctactctgggcctaaacttgtacacctcccagattcatacaaacatcatacaattagtatagctgaaccactttgctgtacacctggaact

SEQ ID NO: 64673 - DNA, 110 bp, synthetic construct
  source 1..110: mol_type = other DNA
ggcatcaaaacatacagatatcaagtctacaaaagagtgcctttcaagcgtaacggaaatcatgtgtcttcaggaaaaataagctgttgcaaatattagcttcaccagta

SEQ ID NO: 64674 - DNA, 110 bp, synthetic construct
  source 1..110: mol_type = other DNA
gtgaaagtggcccatttcaaggagaggtacacaagctgagtctgggaccatgagggctccctggagaatgacctaagacttggtaaaaaagacctggagatgttggtcca

SEQ ID NO: 64675 - DNA, 110 bp, synthetic construct
  source 1..110: mol_type = other DNA
gtggccagtccgtcttttttgttgcttttgtgctcatgcttcctcagctgcagttgcatggagccacactcagggttcgccaggccttcgtgcttgacggtaggtttctt

SEQ ID NO: 64676 - DNA, 110 bp, synthetic construct
  source 1..110: mol_type = other DNA
tcagtttccataaatataccaatattcaatgacctatttgaagctgggttcaagtgaagatttcttttgacaatttcaaagcgtgctctctctgtaagtggttttagact

SEQ ID NO: 64677 - DNA, 110 bp, synthetic construct
  source 1..110: mol_type = other DNA
gaagatttcttttgacaatttcaaagcgtgctctctctgtaagtggttttagactcaagtagtctcatgaacaggctttctaggctattttggcaattgtggatgaatgg

SEQ ID NO: 64678 - DNA, 110 bp, synthetic construct
  source 1..110: mol_type = other DNA
gcatcattttgcattcccatcagctatttataagaaattggttcactttgcattctcagcagcatttagcactgtcaggccttttatttgtagcctttctagtaggcatg

SEQ ID NO: 64679 - DNA, 110 bp, synthetic construct
  source 1..110: mol_type = other DNA
aaaaaccactataggatatgtgatggaggagttcctgctgtggtacagtgggttaaggatcctgcattgtcacagctgcaatataggccagagctgcagatcagatttga

SEQ ID NO: 64680 - DNA, 110 bp, synthetic construct
  source 1..110: mol_type = other DNA
aggatcctgcattgtcacagctgcaatataggccagagctgcagatcagatttgatccctggcccaataaattccagatgtcatgggtgtgggcaaaaaaaaaagatatg

SEQ ID NO: 64681 - DNA, 110 bp, synthetic construct
  source 1..110: mol_type = other DNA
tgttttcagtgtttacactacaaatcaaaatggattaaattttcttaaaagtcagggactttgctattagaggtatgatactgtggctctgggtctccatcacccagcct

SEQ ID NO: 64682 - DNA, 110 bp, synthetic construct
  source 1..110: mol_type = other DNA
ggactttgctattagaggtatgatactgtggctctgggtctccatcacccagcctaggccttgccagatcactatcattgtgtgatactgcccggaagctcaatgtggca

SEQ ID NO: 64683 - DNA, 110 bp, synthetic construct
  source 1..110: mol_type = other DNA
aagttaggtcgaaccactgtgagaagggggctaataagatatatacggagtgttagagcctcagtcaagattgcctccattccggatagggctacagcccccaaaagaag

SEQ ID NO: 64684 - DNA, 110 bp, synthetic construct
  source 1..110: mol_type = other DNA
gagcctcagtcaagattgcctccattccggatagggctacagcccccaaaagaaggaagctgtcacattaacctggacacccagatggaaaggcctgtattcataagtag

SEQ ID NO: 64685 - DNA, 110 bp, synthetic construct
  source 1..110: mol_type = other DNA
tctgtgtggcctgatcatggctgtaattcttagtgatccaggaagagtttaattggctgagtccttcagtactcactcaaatgttctccacaataataatgacttccgtg

SEQ ID NO: 64686 - DNA, 110 bp, synthetic construct
  source 1..110: mol_type = other DNA
gctgagtccttcagtactcactcaaatgttctccacaataataatgacttccgtgatcaaaatctggagaaatacatattgtttctcacctttctcccttaatttggtct

SEQ ID NO: 64687 - DNA, 110 bp, synthetic construct
  source 1..110: mol_type = other DNA
atgcttgagtcaaatgctaccatggttaaaggtaaaacttgtaggtttagataatcttgctagaaccccaagcatttaaaagccttttagtcccctcatcaaactgaaaa

SEQ ID NO: 64688 - DNA, 110 bp, synthetic construct
  source 1..110: mol_type = other DNA
gctaccatggttaaaggtaaaacttgtaggtttagataatcttgctagaaccccaagcatttaaaagccttttagtcccctcatcaaactgaaaagcttttgcacagcac

SEQ ID NO: 64689 - DNA, 110 bp, synthetic construct
  source 1..110: mol_type = other DNA
ggaaacaaccttgctcacacagcaatttcagatctctacactccagaaccatggaatcataaattcttgttgtttaagccagtcagttcatagtgctctgttagagcagt

SEQ ID NO: 64690 - DNA, 110 bp, synthetic construct
  source 1..110: mol_type = other DNA
atcataaattcttgttgtttaagccagtcagttcatagtgctctgttagagcagtttcaggaagctacaactcagatcacttatgtaggaaaaaaaccatgagaaagagt

SEQ ID NO: 64691 - DNA, 110 bp, synthetic construct
  source 1..110: mol_type = other DNA
ttgcagtgtatgtgtggggaggattggaaagtgtcacaggcagtgacagaacctgcttagattttgtttcaaatggacaattgcattatcttttgcttttctaccactgc

SEQ ID NO: 64692 - DNA, 110 bp, synthetic construct
  source 1..110: mol_type = other DNA
cttagattttgtttcaaatggacaattgcattatcttttgcttttctaccactgcagaattacgctgatacaggatgagttcattactatatgatgaatttttcaaaaag

SEQ ID NO: 64693 - DNA, 110 bp, synthetic construct
  source 1..110: mol_type = other DNA
gagataggttatctggggattgggagcatggaaatatgttaacttcaatttcttatacaatgaatttgaagagccaagtaaatatttctaaacatgtggttagggccatt

SEQ ID NO: 64694 - DNA, 110 bp, synthetic construct
  source 1..110: mol_type = other DNA
tacaatgaatttgaagagccaagtaaatatttctaaacatgtggttagggccattggatttgagcacatgaaaccttttgaaatttgagacaaagttggggaatatatgg

SEQ ID NO: 64695 - DNA, 110 bp, synthetic construct
  source 1..110: mol_type = other DNA
ttatagctacaaatttccttcaaaacgtggttttagcagcatgctataagttttagtatgttgtatcttttttttttttttttggctgttcccacaacatgttcccagac

SEQ ID NO: 64696 - DNA, 110 bp, synthetic construct; identical to SEQ ID NO: 64695
  source 1..110: mol_type = other DNA

SEQ ID NO: 64697 - DNA, 110 bp, synthetic construct
  source 1..110: mol_type = other DNA
atcctaaattaccaggacagtttgtctgccattacttcaaagggatatttttgcagtctttctcctgagagggctgttaattacctctttaggaccctgtatccatgaaa

SEQ ID NO: 64698 - DNA, 110 bp, synthetic construct
  source 1..110: mol_type = other DNA
gtctttctcctgagagggctgttaattacctctttaggaccctgtatccatgaaacagcatagactttaagaagcagaacactccaaagtaataatgatagatctcattc

SEQ ID NO: 64699 - DNA, 110 bp, synthetic construct
  source 1..110: mol_type = other DNA
tacttcgaacaatttcacagtcactcttttcccaattccatacttataatctgacatatctttcatgttccacactatgaatttcatgtgacaccctttgaaatacctag

SEQ ID NO: 64700 - DNA, 110 bp, synthetic construct
  source 1..110: mol_type = other DNA
gcagtgtagtagtttgctccgctgccataacaaagtactaccaccaactagctggttcaaaacaatagaagaccatcctctcatggttctgagggctgaggtcagaaatc

SEQ ID NO: 64701 - DNA, 110 bp, synthetic construct
  source 1..110: mol_type = other DNA
ttcaaaacaatagaagaccatcctctcatggttctgagggctgaggtcagaaatcaacaggtgaggaagatcccactccctccaaaggctctaggtcacaaatgaagcag

SEQ ID NO: 64702 - DNA, 110 bp, synthetic construct
  source 1..110: mol_type = other DNA
ccataagaaaaggatttgactagatatttctccaaagaaatggccaattaaagatattccagatcattagccatttagatatactaatcaaaatttcagtgagttgccac

SEQ ID NO: 64703 - DNA, 110 bp, synthetic construct
  source 1..110: mol_type = other DNA
attccagatcattagccatttagatatactaatcaaaatttcagtgagttgccacttcacatttactaggatagctataatttgcttcctctctacagactatataatac

SEQ ID NO: 64704 - DNA, 110 bp, synthetic construct
  source 1..110: mol_type = other DNA
agatttgttattgaaatgaactcacatgatcatggtggtggagaaaccccacaatctgccatctgtaagctggagacccagcaaagcccgtggtgtcatcagctcagatc

SEQ ID NO: 64705 - DNA, 110 bp, synthetic construct
  source 1..110: mol_type = other DNA
tgggtaattataaataaagttgctctaaacatttacattcatgtttttgtgtagacataagttttcagttcacttgcatcaataccgaagagtgtcactgctgtttttta

SEQ ID NO: 64706 - DNA, 110 bp, synthetic construct
  source 1..110: mol_type = other DNA
cataagttttcagttcacttgcatcaataccgaagagtgtcactgctgttttttaaggcaagaatatatgcagtgttgtaagaagctgccgaaatgtcttccaaagtggc

SEQ ID NO: 64707 - DNA, 110 bp, synthetic construct
  source 1..110: mol_type = other DNA
cagcaaaggtacatgaaagggaacatctggggtcacattaaaagtcagagaaaattttagtttggctggaatatggggtacacgtgtgacaagctgtgatggaagaggag

SEQ ID NO: 64708 - DNA, 110 bp, synthetic construct
  source 1..110: mol_type = other DNA
tttagtttggctggaatatggggtacacgtgtgacaagctgtgatggaagaggagctggcaggaggagctttgtcttgggaccagcattcccatcagccttggctccctt

SEQ ID NO: 64709 - DNA, 110 bp, synthetic construct
  source 1..110: mol_type = other DNA
cctttgttgtcatttcaacaatcttcacagcatcttcactaggagtaggttcaaactcaagaaaccactttctttttctttactcatccgtaagaaataactcctcatct

SEQ ID NO: 64710 - DNA, 110 bp, synthetic construct; identical to SEQ ID NO: 64709
  source 1..110: mol_type = other DNA

SEQ ID NO: 64711 - DNA, 110 bp, synthetic construct
  source 1..110: mol_type = other DNA
ctgaattgctggtaatactagcgactcccatacttctgacatctgaaaaccagtgaagtagcaggtatatcacagtgtcattcctctgttcaaaagcttccaatcagctc

SEQ ID NO: 64712 - DNA, 110 bp, synthetic construct
  source 1..110: mol_type = other DNA
aagtagcaggtatatcacagtgtcattcctctgttcaaaagcttccaatcagctccctctcttactctttagcagccaaagaaggcatcttcccacaaaactctccatga

SEQ ID NO: 64713 - DNA, 110 bp, synthetic construct
  source 1..110: mol_type = other DNA
actccccatagtttatatgaacactcctagacgtgtattcatgttggctcacttctatttctatcctttcaggccacaaaatcgcatggtgtctgatatttgaagcattt

SEQ ID NO: 64714 - DNA, 110 bp, synthetic construct
  source 1..110: mol_type = other DNA
tatttctatcctttcaggccacaaaatcgcatggtgtctgatatttgaagcatttagttatagctccttattagcatggtagccaatataccttccataagccaagactc

SEQ ID NO: 64715 - DNA, 110 bp, synthetic construct
  source 1..110: mol_type = other DNA
taccaagaagaaaagccccggattctgctctaaatagtatgagtttatgggaatgccaggatccatcattagaattgtctccgagaagatgaacagcctcctttaccccc

SEQ ID NO: 64716 - DNA, 110 bp, synthetic construct
  source 1..110: mol_type = other DNA
ccaggatccatcattagaattgtctccgagaagatgaacagcctcctttacccccagcctccaccactgccaccacagtcaccattgtttccagttctgtctagaccagc

SEQ ID NO: 64717 - DNA, 110 bp, synthetic construct
  source 1..110: mol_type = other DNA
ctggtcagcaattactgtgttcttttggtaagtatcttagttttccacagttagaggtaggtaagggctatgcttcctttgtgtcaaacctatattaatgaaaagacaga

SEQ ID NO: 64718 - DNA, 110 bp, synthetic construct
  source 1..110: mol_type = other DNA
ggtaggtaagggctatgcttcctttgtgtcaaacctatattaatgaaaagacagatacaaaaccagttatataatgaatccttgtagttcacagaaatcctaccgtctac

SEQ ID NO: 64719 - DNA, 110 bp, synthetic construct
  source 1..110: mol_type = other DNA
ggcctggcacagtgtattaaaggattctgtgttgcagcaactgcagcataggtcgcaactgcagctcagatctgacccctggcccaggacctccatatgctgcatggtgg

SEQ ID NO: 64720 - DNA, 110 bp, synthetic construct; identical to SEQ ID NO: 64719
  source 1..110: mol_type = other DNA

SEQ ID NO: 64721 - DNA, 110 bp, synthetic construct
  source 1..110: mol_type = other DNA
taaacggtcagtattttccccatgagtattaagacacaaatggaggctttagatttacatactcttagatggtatctgttcaggtgtacacaggaaactaagatctagag

SEQ ID NO: 64722 - DNA, 110 bp, synthetic construct
  source 1..110: mol_type = other DNA
gggagattttaaatatccttctcagacacagaaatcaagcagaaaaaaaagaaggtggagatactgaaattatgaaagacaccctttcatttgttacaaaagacagcatc

SEQ ID NO: 64723 - DNA, 110 bp, synthetic construct
  source 1..110: mol_type = other DNA
ggaaaaactttgaccccagagcacatcaagactttcctcaattaccctatacctgaagtgaagtgacaatttcaggattttctagaattggtggctgctctaagatgtgg

SEQ ID NO: 64724 - DNA, 110 bp, synthetic construct
  source 1..110: mol_type = other DNA
tgcaggtgcagccgtaaaaagcaaaaaaaaaaagaaaaaaaaaatcagtggttgccaggtgccaggtagagcacacaggatttttagggcagtgaaaatacttcatatga

SEQ ID NO: 64725 - DNA, 110 bp, synthetic construct; identical to SEQ ID NO: 64724
  source 1..110: mol_type = other DNA

SEQ ID NO: 64726 - DNA, 110 bp, synthetic construct
  source 1..110: mol_type = other DNA
catttcattttagaatcccaataatgcctatgttacaccgttagttatgacctatagcttttacatgttggtgtcagatggttccaatgtctgtgtcgtgccatgtatga

SEQ ID NO: 64727 - DNA, 110 bp, synthetic construct
  source 1..110: mol_type = other DNA
gaggttaactgtattctcctggtgcactcagacaatcacagggaatcaaatatcctcatccactgcatcccatttatcccacgaatatgcttttattatattacttccaa

SEQ ID NO: 64728 - DNA, 110 bp, synthetic construct
  source 1..110: mol_type = other DNA
tacctctgctttctgcaactaaggtctcttcctggtcatggaagcccttgcttcagtgcaaagctgcaacacgaagtaagttgggctggagtgttcactctgcctcaaac

SEQ ID NO: 64729 - DNA, 110 bp, synthetic construct
  source 1..110: mol_type = other DNA
gtgcaaagctgcaacacgaagtaagttgggctggagtgttcactctgcctcaaacttgggtgtttgcaggggtggttgtgggaaaccaggcagccacaagttcagtctca

SEQ ID NO: 64730 - DNA, 110 bp, synthetic construct
  source 1..110: mol_type = other DNA
aagtgaacatgaagtatggaataaaatatcaggtcctttgaatgtctttgcaagcttactgtgctaaatatttcatctcctctgtgttttcttccaaggtttcagcatgc

SEQ ID NO: 64731 - DNA, 110 bp, synthetic construct
  source 1..110: mol_type = other DNA
gaagtacacttgcctggaagaagaacaataacactttccaaaaagaaactaaatctcattttaaaagaaaagggatttggagatttgtatcaagatgacagagtagggag

SEQ ID NO: 64732 - DNA, 110 bp, synthetic construct
  source 1..110: mol_type = other DNA
tcattttaaaagaaaagggatttggagatttgtatcaagatgacagagtagggagaccctgagctcacctcctcccatgtacacaccaaaactacaactacacagagaac

SEQ ID NO: 64733 - DNA, 110 bp, synthetic construct
  source 1..110: mol_type = other DNA
tgagccaaggaacgtaggtggcctctcgaagccggaaaaggccaagacagagattcccctctagagcctccagaaggaacgtggccctgccgacgacgtctttgtgtgtg

SEQ ID NO: 64734 - DNA, 110 bp, synthetic construct
  source 1..110: mol_type = other DNA
cccctctagagcctccagaaggaacgtggccctgccgacgacgtctttgtgtgtgtgtgtgtgtgtgtgtgtgtgtgtgtgtgcgcgcgcttcttagggccacactcatg

SEQ ID NO: 64735 - DNA, 110 bp, synthetic construct
  source 1..110: mol_type = other DNA
tattttgtttatggttttgtttctcttttttttttcttcttttgtttttccagtgggggaatgggaagaggagattatagtgaatgaagaaagagtacggaaacttttca

SEQ ID NO: 64736 - DNA, 110 bp, synthetic construct; identical to SEQ ID NO: 64735
  source 1..110: mol_type = other DNA

SEQ ID NO: 64737 - DNA, 110 bp, synthetic construct
  source 1..110: mol_type = other DNA
ttgagctccagtccttctcttccgccatcttaaccccgtctccccaagtgaaactttctaaggaggttacttaacactgtatttattgatgtacttatcaacgaacacat

SEQ ID NO: 64738 - DNA, 110 bp, synthetic construct
  source 1..110: mol_type = other DNA
ttctaaggaggttacttaacactgtatttattgatgtacttatcaacgaacacatgtaatttctaggatggtctcatgtcactaaatagtctttctttctgatgcaggtg

SEQ ID NO: 64739 - DNA, 110 bp, synthetic construct
  source 1..110: mol_type = other DNA
ttttatgagcatcatcccatttaagccctcacaagaaacacttggcagagagataatgtcattacatctgcttccaaaatttgttgtggggattaaatgagccaatatct

SEQ ID NO: 64740 - DNA, 110 bp, synthetic construct
  source 1..110: mol_type = other DNA
gctgtcaagcgagcaagtcctgaggattccagctgacatgtatcagactgctgctaaggatgtcattgttttatatcatgtcatgcagaaaagaaaaataagcagaaata

SEQ ID NO: 64741 - DNA, 110 bp, synthetic construct
  source 1..110: mol_type = other DNA
gagacgggagagaatgaaccagggaaaggcgaagaaacaaactaaggctttgttaatcggctactcagagctgcgtcaaccacggctcagtcctgtgggggatcctctga

SEQ ID NO: 64742 - DNA, 110 bp, synthetic construct
  source 1..110: mol_type = other DNA
atcggctactcagagctgcgtcaaccacggctcagtcctgtgggggatcctctgagaaaccacttagaatgtttctcagaattgtccccctgagagacaacggagaggaa

SEQ ID NO: 64743 - DNA, 110 bp, synthetic construct
  source 1..110: mol_type = other DNA
gggtttgatatctggcccaggaacttatgcatgccttgggtgtggcctgtacacacacacacacacacacgtgcacatatatataaatcctaattctctttcatgtcttt

SEQ ID NO: 64744 - DNA, 110 bp, synthetic construct
  source 1..110: mol_type = other DNA
cagctcactccagtcattaaatctgatggcttgttgggtccagggaggcagtcaaggcaggcaactgcataatcaagtactgcactgggtttgggggtcttgtttttaaa

SEQ ID NO: 64745 - DNA, 110 bp, synthetic construct
  source 1..110: mol_type = other DNA
ctctggcggcaggtggcgagaagagcgagagagaggcaagacttcctagcagcatccatctgttgtcttgtcgcttgtctgccagtcgaattgagccgggtgacttctga

SEQ ID NO: 64746 - DNA, 110 bp, synthetic construct
  source 1..110: mol_type = other DNA
ctatgggaacacttgtatttctagttccacttttgatagactttattcggggagctcagttctagttctgtaggcacacatatccctcagggattctctcaagttcatat

SEQ ID NO: 64747 - DNA, 110 bp, synthetic construct
  source 1..110: mol_type = other DNA
tcagttctagttctgtaggcacacatatccctcagggattctctcaagttcatatgcctcatacacaccttctggcttggaggtccacttcatttttgttactaggggtc

SEQ ID NO: 64748 - DNA, 110 bp, synthetic construct
  source 1..110: mol_type = other DNA
ggtattattgtgttaaattcattatcattattgcactactcacacctgcattttgatcatttcttctgatggtaaaaggtgtcgttttaagctgtcatgagccagggtta

SEQ ID NO: 64749 - DNA, 110 bp, synthetic construct
  source 1..110: mol_type = other DNA
atcatttcttctgatggtaaaaggtgtcgttttaagctgtcatgagccagggttagtggagaaaggtgcagggctaccatttgcacggtggtttatttacctatttactt

SEQ ID NO: 64750 - DNA, 110 bp, synthetic construct
  source 1..110: mol_type = other DNA
tagggtcaaagctaaagcccataaaacagtgtctaaagtgaagcacaagccacatctcccatagtcattctaccttcttctccagttctcccaccacagcccttgcccct

SEQ ID NO: 64751 - DNA, 110 bp, synthetic construct
  source 1..110: mol_type = other DNA
gatgatcccagacagacacattatcatgagggtaattgactgatatacttaaaaccattgtgtacctgtgcaaccattctgtcttttcctttcattacagtatttaacaa

SEQ ID NO: 64752 - DNA, 110 bp, synthetic construct
  source 1..110: mol_type = other DNA
acacattatcatgagggtaattgactgatatacttaaaaccattgtgtacctgtgcaaccattctgtcttttcctttcattacagtatttaacaaattacatgaattagt

SEQ ID NO: 64753 - DNA, 110 bp, synthetic construct
  source 1..110: mol_type = other DNA
gtggaagttcccaggccagggatcaaatctgcaccactgcagcaatccaagctacagcagtgaaaatacaggagccttaacccactaggccatcagagaactcccaacat

SEQ ID NO: 64754 - DNA, 110 bp, synthetic construct; identical to SEQ ID NO: 64753
  source 1..110: mol_type = other DNA

SEQ ID NO: 64755 - DNA, 110 bp, synthetic construct
  source 1..110: mol_type = other DNA
tagagaactctaaagtctccactcaaaaactgttagaactcatcagtgaattaagcaaaatttcaggatataagattaagtagcatacagttatttgttgtgtttgcata

SEQ ID NO: 64756 - DNA, 110 bp, synthetic construct; identical to SEQ ID NO: 64755
  source 1..110: mol_type = other DNA

SEQ ID NO: 64757 - DNA, 110 bp, synthetic construct
  source 1..110: mol_type = other DNA
acatttgtatcatttgatatttgatacgttatatttcagtgccattcagcggtagaagtggtccaaaactaactggcattacatcctggctatatagctttgggcaagtt

SEQ ID NO: 64758 - DNA, 110 bp, synthetic construct; identical to SEQ ID NO: 64757
  source 1..110: mol_type = other DNA

SEQ ID NO: 64759 - DNA, 110 bp, synthetic construct
  source 1..110: mol_type = other DNA
acaattaataaaattgcatgacagggctcaattccaaagtatttcatccagttgatccagcatgtgacgatattcttctagatcatgaaaatggaaacacacaaaataaa

SEQ ID NO: 64760 - DNA, 110 bp, synthetic construct
  source 1..110: mol_type = other DNA
actgcataaataaataaatgagggaggcgagacaagcctccctacataagaatcccaggtcatttatgcagctgcttgcttcatcaagttggtggaacataacttcctac

SEQ ID NO: 64761 - DNA, 110 bp, synthetic construct
  source 1..110: mol_type = other DNA
caggtcatttatgcagctgcttgcttcatcaagttggtggaacataacttcctactgttaaaattttggctacgcatagtgacttttttcaagagagtagagtattgaaa

SEQ ID NO: 64762 - DNA, 110 bp, synthetic construct; identical to SEQ ID NO: 64760
  source 1..110: mol_type = other DNA

SEQ ID NO: 64763 - DNA, 110 bp, synthetic construct; identical to SEQ ID NO: 64761
  source 1..110: mol_type = other DNA

SEQ ID NO: 64764 - DNA, 110 bp, synthetic construct
  source 1..110: mol_type = other DNA
tgaactactaccaattcgcctgggtctttaaatttagttgccctatgactctacatattcttcatttttcacttttgttagcgtcttctatttgctttgactcagccttc

SEQ ID NO: 64765 - DNA, 110 bp, synthetic construct
  source 1..110: mol_type = other DNA
tgactctacatattcttcatttttcacttttgttagcgtcttctatttgctttgactcagccttctctctctgataatattgttaagagtaataagaacaataagaacta

SEQ ID NO: 64766 - DNA, 110 bp, synthetic construct
  source 1..110: mol_type = other DNA
tctgagctgcagctgctggcctatactacagccatagtaacaccaaatccgaaccacatctgtgatatacacctcagcttgtgacgacactggatccttaacccactaag

SEQ ID NO: 64767 - DNA, 110 bp, synthetic construct; identical to SEQ ID NO: 64766
  source 1..110: mol_type = other DNA

SEQ ID NO: 64768 - DNA, 110 bp, synthetic construct
  source 1..110: mol_type = other DNA
taacatgtttattttcactttaaggcacatcaggcttatttcactcaagaacccaagacagcacttcagcaatataatgggggcccgttataaatagggaaaacacccac

SEQ ID NO: 64769 - DNA, 110 bp, synthetic construct
  source 1..110: mol_type = other DNA
agacagcacttcagcaatataatgggggcccgttataaatagggaaaacacccacaaaaaaagtgaaagctggcactaaatacactgcaaaaaaaaaaaaatacgtgttt

SEQ ID NO: 64770 - DNA, 110 bp, synthetic construct
  source 1..110: mol_type = other DNA
ttggcctgaattattctactgagtttcaacttaatatagttggtacatgaaaaactagtttgcattcccccaaagtgagttgctaagttgaaaggaccaccctattcacc

SEQ ID NO: 64771 - DNA, 110 bp, synthetic construct
  source 1..110: mol_type = other DNA
tagtttgcattcccccaaagtgagttgctaagttgaaaggaccaccctattcacccattacttctagatactgcaggccagataaagacctaattggaagagacctggat

SEQ ID NO: 64772 - DNA, 110 bp, synthetic construct
  source 1..110: mol_type = other DNA
tctggatgccctgatgatctagtgacttttgttttctcttgatttttgacaatgttttcctttgtcctgaattcttttgcaaggtgagtttggcttgaaatgtctgagaa

SEQ ID NO: 64773 - DNA, 110 bp, synthetic construct
  source 1..110: mol_type = other DNA
tttcctttgtcctgaattcttttgcaaggtgagtttggcttgaaatgtctgagaatctgattttccttctctcttaagggacgtgatatttatgcccagatgcccaaaag

SEQ ID NO: 64774 - DNA, 110 bp, synthetic construct
  source 1..110: mol_type = other DNA
acttgaggggcagttctggaccacagaacagggatagagaaatgaagctaaaatagtggtattgtttaaggaggcaaaaatcagagtttgtagaatttatagcatctaga

SEQ ID NO: 64775 - DNA, 110 bp, synthetic construct
  source 1..110: mol_type = other DNA
taacctacagattcaatgcaatccttacccaattaccaatggcattttccacagaactagagcaaaaatttttaaatttgtatggaaataataaaatacctagaatagcc

SEQ ID NO: 64776 - DNA, 110 bp, synthetic construct; identical to SEQ ID NO: 64775
  source 1..110: mol_type = other DNA

SEQ ID NO: 64777 - DNA, 110 bp, synthetic construct
  source 1..110: mol_type = other DNA
gatgttcaatactgctagtctaagatagtctaagaaatttaagttaaaagcacagtgagatactgatacccacttattagaaaagctaaaaagactgattttggcattcc

SEQ ID NO: 64778 - DNA, 110 bp, synthetic construct; identical to SEQ ID NO: 64777
  source 1..110: mol_type = other DNA

SEQ ID NO: 64779 - DNA, 110 bp, synthetic construct
  source 1..110: mol_type = other DNA
tccttcaccccaaactctgtcgccaagattgaatccagcaccagtgtacggagacctaatttctggcaacaacctcacagtcgtgcattttgagtcgggagcagaattta

SEQ ID NO: 64780 - DNA, 110 bp, synthetic construct
  source 1..110: mol_type = other DNA
gggaagccgggagcaccaaagccaagagaagaacaagaaagacaggagtctgaatcagccaccctgctagcctctgaagtgtttgcaaacagaaagccctcagcacctac

SEQ ID NO: 64781 - DNA, 110 bp, synthetic construct
  source 1..110: mol_type = other DNA
cagccaccctgctagcctctgaagtgtttgcaaacagaaagccctcagcacctacagtgaggctgagtagtagttgaaagtgtgagggggaaaaggagccagtgaaaagg

SEQ ID NO: 64782 - DNA, 110 bp, synthetic construct
  source 1..110: mol_type = other DNA
ttataaaacataatgggtaaggagatacttgaggttaggatggggaagataaagggtaaatgaagtcatatcaccgcaggaactgcagtaagtaagcaaaaaggataaca

SEQ ID NO: 64783 - DNA, 110 bp, synthetic construct
  source 1..110: mol_type = other DNA
gtaaatgaagtcatatcaccgcaggaactgcagtaagtaagcaaaaaggataacaggaaatgattagagtgccatgcttgacattggaatttcagaatcacaaacaagga

SEQ ID NO: 64784 - DNA, 110 bp, synthetic construct
  source 1..110: mol_type = other DNA
cagatgccaaagataaggctgtatcctacagagcaaatctaatcgaatgatgagacataaacattagcataaaacccccaaatcttgtcttttcgtggatagctacaatg

SEQ ID NO: 64785 - DNA, 110 bp, synthetic construct
  source 1..110: mol_type = other DNA
cataaacattagcataaaacccccaaatcttgtcttttcgtggatagctacaatggccatagcttcaaatatctagatgctgaaatgtgaaatcatctgtgtgatttaaa

SEQ ID NO: 64786 - DNA, 110 bp, synthetic construct
  source 1..110: mol_type = other DNA
ttcagagttcctaatacccaataaatacttgatgagggcacaaatgacaaaataaatggataagtaagagtaaatgtggcaagtggtccactgagttattttttgcctct

SEQ ID NO: 64787 - DNA, 110 bp, synthetic construct
  source 1..110: mol_type = other DNA
tttatcgcaatttcccttctcaagatatattagtctcactctccacacacctcgtttaacaattttggatcatcttatgaccacttctattattatccacatcattatat

SEQ ID NO: 64788 - DNA, 110 bp, synthetic construct
  source 1..110: mol_type = other DNA
agctttcttgaatttgccgaagatgtcatacaagttccaaggaacttagtaggtgagtcagagatcgatattgacacgcactgcaaaacaagttagataaacagcttatt

SEQ ID NO: 64789 - DNA, 110 bp, synthetic construct
  source 1..110: mol_type = other DNA
agtcagagatcgatattgacacgcactgcaaaacaagttagataaacagcttattcatactgatagaattccattttcactcacttgtggagtctttagctgaagcttaa

SEQ ID NO: 64790 - DNA, 110 bp, synthetic construct
  source 1..110: mol_type = other DNA
caagaacttgatcttgtttaataaggtgaaaaaatatcaacaaaatggtacaaaagtacattgtgccattacaatatgcactgagtctcttttttacaaaggctgaattc

SEQ ID NO: 64791 - DNA, 110 bp, synthetic construct
  source 1..110: mol_type = other DNA
gtacattgtgccattacaatatgcactgagtctcttttttacaaaggctgaattcagcaaggcgctaacttgcttaaatgtgaattactaacttctaaaactgtaatttg

SEQ ID NO: 64792 - DNA, 110 bp, synthetic construct
  source 1..110: mol_type = other DNA
tgtttagccatttatcgatcgatgggcatttggtttattaccacttgttggctattatgagtaatacggctctgaatatgcatgtatatgtttttgagtatattttctgt

SEQ ID NO: 64793 - DNA, 110 bp, synthetic construct
  source 1..110: mol_type = other DNA
accacagaggcaggagaggtaaagtataattatgtgatgggcaggtcagattggctggatcggtggttctccaatttgaggtgcattaagatcacctgcaagacttcgta

SEQ ID NO: 64794 - DNA, 110 bp, synthetic construct
  source 1..110: mol_type = other DNA
tggatcggtggttctccaatttgaggtgcattaagatcacctgcaagacttcgtaaaacccagattgctggattccaccactagaatttttgattcagtagttccgtggt

SEQ ID NO: 64795 - DNA, 110 bp, synthetic construct
  source 1..110: mol_type = other DNA
aatgatgtgatagaaacacaaactccaacaacagcagtaaagccttggaagaaacccggagacgttttatttttcatttcttttgcaaaaacttcttggggtgagacgaa

SEQ ID NO: 64796 - DNA, 110 bp, synthetic construct
  source 1..110: mol_type = other DNA
ctggataataaaagcaggcctaaaacttagtttattacttgcacacagcagtgatttagaaattgtatggaagtaatgaaatgccctataatctgatttcaagattaagt

SEQ ID NO: 64797 - DNA, 110 bp, synthetic construct
  source 1..110: mol_type = other DNA
ttagaaattgtatggaagtaatgaaatgccctataatctgatttcaagattaagtatgtcattaaggggaaggttgaatagaagcaggactaagatatgcccttgcttca

SEQ ID NO: 64798 - DNA, 110 bp, synthetic construct
  source 1..110: mol_type = other DNA
ggaatgcccctctagaaatgcccctccagtaccgccagagagggccatgggaccatcaactgacaccgcaatcgctgtgggaattggatcacacaaggacggtgttaggt

SEQ ID NO: 64799 - DNA, 110 bp, synthetic construct
  source 1..110: mol_type = other DNA
tcaactgacaccgcaatcgctgtgggaattggatcacacaaggacggtgttaggtgtagttagttcactttcctctcttccccggattccggctttttccccgaagaaaa

SEQ ID NO: 64800 - DNA, 110 bp, synthetic construct
  source 1..110: mol_type = other DNA
cctagtcggattcatttccactgctccacaataggaactcctgtacatttattattgataatactcctgtaaagacgatatcgcctgtctttcttatttatttatttatt

SEQ ID NO: 64801 - DNA, 110 bp, synthetic construct; identical to SEQ ID NO: 64800
  source 1..110: mol_type = other DNA

SEQ ID NO: 64802 - DNA, 110 bp, synthetic construct
  source 1..110: mol_type = other DNA
agccgattcttagggacggcactttcttctttcccccttctaattgctgatggcaggaagggagtgctgctgttttgatagcagcacagtgaatccagctttagcaatta

SEQ ID NO: 64803 - DNA, 110 bp, synthetic construct
  source 1..110: mol_type = other DNA
ggaagggagtgctgctgttttgatagcagcacagtgaatccagctttagcaattaaggcttctacctatggtagaactgaaatttaattttaattcataaatagtcagat

SEQ ID NO: 64804 - DNA, 110 bp, synthetic construct
  source 1..110: mol_type = other DNA
gtttagaaaggtataaaggccgcatggtgggaaataagctaaggaaacaggttttgttttcagtccaaactcaacatcactcttctattttttccaatgttcattttgtt

SEQ ID NO: 64805 - DNA, 110 bp, synthetic construct
  source 1..110: mol_type = other DNA
gttttcagtccaaactcaacatcactcttctattttttccaatgttcattttgttggagaaaaggaaaagaacaaacgcatcacttccatcccataaagaagaatttgtt

SEQ ID NO: 64806 - DNA, 110 bp, synthetic construct
  source 1..110: mol_type = other DNA
gcctgcctcacagggctgtcaggagcagtagctgccttcgtacacgtaaaatatctagaacacttcctgcgtcatagcgagcgctcaagaaatattagctgctatgtata

SEQ ID NO: 64807 - DNA, 110 bp, synthetic construct
  source 1..110: mol_type = other DNA
tagaacacttcctgcgtcatagcgagcgctcaagaaatattagctgctatgtataatgattatcctcaggtcatctgtgggcaggttggctgctcgtttcagctgagaga

SEQ ID NO: 64808 - DNA, 110 bp, synthetic construct
  source 1..110: mol_type = other DNA
atctggaacagatggactctcctagtttttcatgcaacatctctggaggaacaatgtcattactgttacttactaaccctaatgttggggtgatgtttcttttttatagc

SEQ ID NO: 64809 - DNA, 110 bp, synthetic construct
  source 1..110: mol_type = other DNA
gtcattactgttacttactaaccctaatgttggggtgatgtttcttttttatagcagcttgcagcatctgctgataaacatgcaagaattgtcatttgctggtattgtga

SEQ ID NO: 64810 - DNA, 110 bp, synthetic construct
  source 1..110: mol_type = other DNA
cactaaaaattgtggtggcctgctgtacacgttaaaagagttcctaaaatatatctgtgcatacatgaatgtggcatggtatcgactgtttcccacgagtcgggcagtgt

SEQ ID NO: 64811 - DNA, 110 bp, synthetic construct
  source 1..110: mol_type = other DNA
tgctgtaaggaaaaaaaaaaaaaagaaatcacactttctttccaccactggaagaatgtctttgttcctaaaggtagagactccttcagctgttctgacttagaagaagt

SEQ ID NO: 64812 - DNA, 110 bp, synthetic construct
  source 1..110: mol_type = other DNA
atgtctttgttcctaaaggtagagactccttcagctgttctgacttagaagaagttaaaatgcattagttcaatttcaggccgaaagcccgttatcagggctgacctgtt

SEQ ID NO: 64813 - DNA, 110 bp, synthetic construct
  source 1..110: mol_type = other DNA
ggcttgcattatccattccaggcccctagtcatcttctggaagtgtctttgaaagcttctgcgtcgtgcatttaattgctcgcagctctctcggttttgcccacagtgaa

SEQ ID NO: 64814 - DNA, 110 bp, synthetic construct
  source 1..110: mol_type = other DNA
cttctgcgtcgtgcatttaattgctcgcagctctctcggttttgcccacagtgaatgtgagatgctcgtaagacatcggtgtgtgttcccaatgggccagcgagccagaa

SEQ ID NO: 64815 - DNA, 110 bp, synthetic construct
  source 1..110: mol_type = other DNA
tcagggaatccatagattccctacttagaaggtggtgagaatacatgaacttaatattggggaaaggtctttgaaaatgcaacggaattccaggaacgggagatatgtac

SEQ ID NO: 64816 - DNA, 110 bp, synthetic construct
  source 1..110: mol_type = other DNA
attggggaaaggtctttgaaaatgcaacggaattccaggaacgggagatatgtacgttttctgtagtagcatagcgaagtatcatgaactgggtggcttaaagccccaga

SEQ ID NO: 64817 - DNA, 110 bp, synthetic construct
  source 1..110: mol_type = other DNA
ataaaacaagccaaatccctgccctcattaaccttattctacagagggagtgtggatgggagaagaaaacaaacgaaaaagtatgcaaaatatggaatattcaggatgac

SEQ ID NO: 64818 - DNA, 110 bp, synthetic construct
  source 1..110: mol_type = other DNA
atgggagaagaaaacaaacgaaaaagtatgcaaaatatggaatattcaggatgacggtaagtgcagtggaaagcagtcaagcaaggagggcgctggggcagggccccatg

SEQ ID NO: 64819 - DNA, 110 bp, synthetic construct
  source 1..110: mol_type = other DNA
cttaaggcgctatctgagcatttgtgcgggtcattagaatgtctgcaggattataacctccagcacgcagtgccctgcccctagcttgtgccaccccttttcaaggtgac

SEQ ID NO: 64820 - DNA, 110 bp, synthetic construct
  source 1..110: mol_type = other DNA
acctccagcacgcagtgccctgcccctagcttgtgccaccccttttcaaggtgacagcgcccaaaatggaaacatagcctttgctgatgttctaagagccctcgaatatt

SEQ ID NO: 64821 - DNA, 110 bp, synthetic construct
  source 1..110: mol_type = other DNA
gcccgttcaattacttattgtctctgatgacttttgtgcggcaagggtactgtttactgttgagtgtttgtggcagagaccatgaggcctgaaaatcggaaaatatatac

SEQ ID NO: 64822 - DNA, 110 bp, synthetic construct
  source 1..110: mol_type = other DNA
actgttgagtgtttgtggcagagaccatgaggcctgaaaatcggaaaatatatactgtagggtcttttctaggaatagtctgctgatttgtgtgtgtgtgtgtatatata

SEQ ID NO: 64823 - DNA, 110 bp, synthetic construct
  source 1..110: mol_type = other DNA
ccatgtactagaggctcagtatagggtagttcttactcacaaaagtttactgaataaatgaatgaaaaaaatgtatgactaaggcctagctgtctagtcacaactgttgg

SEQ ID NO: 64824 - DNA, 110 bp, synthetic construct
  source 1..110: mol_type = other DNA
aaatgaatgaaaaaaatgtatgactaaggcctagctgtctagtcacaactgttggccagaattaggtttttaactcctttgttaaagtggtctcttttgcattgcatttc

SEQ ID NO: 64825 - DNA, 110 bp, synthetic construct; identical to SEQ ID NO: 64823
  source 1..110: mol_type = other DNA

SEQ ID NO: 64826 - DNA, 110 bp, synthetic construct; identical to SEQ ID NO: 64824
  source 1..110: mol_type = other DNA

SEQ ID NO: 64827 - DNA, 110 bp, synthetic construct
  source 1..110: mol_type = other DNA
ttaagaccgaggtgagctggcaccatgttctgttgcccatttccccaaatatagttgtctttgtacttcaatctagcaaaatgactaggggatgaggacttaactgccct

SEQ ID NO: 64828 - DNA, 110 bp, synthetic construct
  source 1..110: mol_type = other DNA
tgtctttgtacttcaatctagcaaaatgactaggggatgaggacttaactgcccttgcaagagacccggaacacagagcctctgtggcaatgccgtctgtacagaatgaa

SEQ ID NO: 64829 - DNA, 110 bp, synthetic construct
  source 1..110: mol_type = other DNA
ggtttgaaatggtcattggaagggagaaagggggctgtaaggaatatagtgcttagctcatgacccagagaccactgattaatgggtcaagggcagcctggaggcctcag

SEQ ID NO: 64830 - DNA, 110 bp, synthetic construct
  source 1..110: mol_type = other DNA
gctcatgacccagagaccactgattaatgggtcaagggcagcctggaggcctcagagagcttgaataaattgccccagattacttaaccatacagttaccaagcagataa

SEQ ID NO: 64831 - DNA, 110 bp, synthetic construct
  source 1..110: mol_type = other DNA
gctcttaagattcatcttaatggcttcaggccagttttgcaagacctttccaaatttcaaatactcacagtttagtatcatcggcattttttttaaagtggagattccgt

SEQ ID NO: 64832 - DNA, 110 bp, synthetic construct
  source 1..110: mol_type = other DNA
ttcaaatactcacagtttagtatcatcggcattttttttaaagtggagattccgtgtgttcttaagtcattgattgagtgagataatatttctgaaagcattcctttcaa

SEQ ID NO: 64833 - DNA, 110 bp, synthetic construct
  source 1..110: mol_type = other DNA
ggaggagtttcataattgtgggctgcttgattcacatataggtacgaataactgtttctgaaatactgtaacaagcatgttgacagttttctaatcaagtagaacagaat

SEQ ID NO: 64834 - DNA, 110 bp, synthetic construct
  source 1..110: mol_type = other DNA
ttctgaaatactgtaacaagcatgttgacagttttctaatcaagtagaacagaatccctttctgaattcccattttttgggggaagcctaaggggattcatccaaataag

SEQ ID NO: 64835 - DNA, 110 bp, synthetic construct
  source 1..110: mol_type = other DNA
ataaatccaagccctgaaactttccatactccttggtcaagggcttccagtgatacctgctagttgatacctctgcatgtctctgggtgactaccagaggttttttaaaa

SEQ ID NO: 64836 - DNA, 110 bp, synthetic construct
  source 1..110: mol_type = other DNA
cctgctagttgatacctctgcatgtctctgggtgactaccagaggttttttaaaattgttccaaccaaacagcaccattgtcaggtaataggaataacagcaatagcaac

SEQ ID NO: 64837 - DNA, 110 bp, synthetic construct
  source 1..110: mol_type = other DNA
cagtaatgacatcgatatggcacacacagcaagagaggtcagcctgtcagagctatagaaacagcacatggattaggatgaaaccagtgcagaataactctgatagagtc

SEQ ID NO: 64838 - DNA, 110 bp, synthetic construct
  source 1..110: mol_type = other DNA
tagaaacagcacatggattaggatgaaaccagtgcagaataactctgatagagtcgtttaatgtaaacaggttatctgttggtgcttttcattgaactccccccccccaa

SEQ ID NO: 64839 - DNA, 110 bp, synthetic construct
  source 1..110: mol_type = other DNA
attgcacctcattcgaacataacaatattggggaaagaattgctaagtagaccaacttgtcatttttcaggcggtatttccacgtgctgagtttatgagatgaatgctaa

SEQ ID NO: 64840 - DNA, 110 bp, synthetic construct
  source 1..110: mol_type = other DNA
cttgtcatttttcaggcggtatttccacgtgctgagtttatgagatgaatgctaagatgattagggattttccttgtattccagaacatgcaaatggtatccaacatctc

SEQ ID NO: 64841 - DNA, 110 bp, synthetic construct
  source 1..110: mol_type = other DNA
tcaccaactatttacatccatcagtgtgagtatgaagagctgaagtacccctccttgttctttctatactagtttcacctaaatggtcgttgtcaacgttgactggccac

SEQ ID NO: 64842 - DNA, 110 bp, synthetic construct
  source 1..110: mol_type = other DNA
tgttctttctatactagtttcacctaaatggtcgttgtcaacgttgactggccacggggtgcttcctgagaacacagcaatagattcagctctaaaaagacttaggaaaa

SEQ ID NO: 64843 - DNA, 110 bp, synthetic construct
  source 1..110: mol_type = other DNA
tgcacttggcaggcccggatatttcgatgctacataatcaaagtccacgtgtcaacactgctgtagcaaaatgtggctgcaattgaagcttagaacactgtcacccagaa

SEQ ID NO: 64844 - DNA, 110 bp, synthetic construct
  source 1..110: mol_type = other DNA
cactgctgtagcaaaatgtggctgcaattgaagcttagaacactgtcacccagaattccacatcccttccaaaatctggagcctgcaatatcggtaaaaacgcacacttt

SEQ ID NO: 64845 - DNA, 110 bp, synthetic construct
  source 1..110: mol_type = other DNA
ttttgcctcaagcactgccacagtttaacatgaggaaaaggtgatgagcaaaatatgctggttagactccaagagcagcagaggatgtgggggccctcgatggagctgcc

SEQ ID NO: 64846 - DNA, 110 bp, synthetic construct
  source 1..110: mol_type = other DNA
tgctggttagactccaagagcagcagaggatgtgggggccctcgatggagctgccctggcctcgcccatggaaggttcaagccaaatgaatgtgctctgtccttttcgga

SEQ ID NO: 64847 - DNA, 110 bp, synthetic construct
  source 1..110: mol_type = other DNA
ttacagacgatgtggaaaggctgcatcctggaatactcacctcagaggggccggcttggggtcccacctgtgatacacattttgctggtagagcccaaccactcagaggg

SEQ ID NO: 64848 - DNA, 110 bp, synthetic construct
  source 1..110: mol_type = other DNA
ttggggtcccacctgtgatacacattttgctggtagagcccaaccactcagaggggcttcagtacaacaggcacaggggagaggtaccagctggctcgcagtggaaaggg

SEQ ID NO: 64849 - DNA, 110 bp, synthetic construct
  source 1..110: mol_type = other DNA
atgactgtagatggcagaatctcaaggcaggcaaagccataaaaatctagaacaaccttccttgggtgcaaatataaaaccttctctgggaacatctctggaggaagacg

SEQ ID NO: 64850 - DNA, 110 bp, synthetic construct
  source 1..110: mol_type = other DNA
ccttccttgggtgcaaatataaaaccttctctgggaacatctctggaggaagacgatttctatgacatggagttaaaaatctacatcaccttattcggagctatacaagg

SEQ ID NO: 64851 - DNA, 110 bp, synthetic construct
  source 1..110: mol_type = other DNA
tggatataaggcttttgtcagatgtgtgctttgcaaatatcctctgtgcctcgtcttttcattcttctaacagtgtctttgggagagctgaaaattttaactttgacaaa

SEQ ID NO: 64852 - DNA, 110 bp, synthetic construct
  source 1..110: mol_type = other DNA
ttttcattcttctaacagtgtctttgggagagctgaaaattttaactttgacaaagcccagcttatcatttggttcgtccatgccttgtgattttggcatcctttcttaa

SEQ ID NO: 64853 - DNA, 110 bp, synthetic construct
  source 1..110: mol_type = other DNA
ggccctgagctctgccttcctcctcgcaggcgctcctcctcttcagaagcctcgctctgcttctgaatctccctttttataaagccactggtcacaccggctccgggccc

SEQ ID NO: 64854 - DNA, 110 bp, synthetic construct
  source 1..110: mol_type = other DNA
tctgcttctgaatctccctttttataaagccactggtcacaccggctccgggccctcccgaacgacttcatctaaacttgacgacccccgcaaaggcgcgagttcccaat

SEQ ID NO: 64855 - DNA, 110 bp, synthetic construct
  source 1..110: mol_type = other DNA
ttaagtctagttacttttacttccacaacacacacacccccactcccaattagaggaaaaggagacaacctaattaggagactggatggcgttggggaaggtgccagaat

SEQ ID NO: 64856 - DNA, 110 bp, synthetic construct
  source 1..110: mol_type = other DNA
gaaaaggagacaacctaattaggagactggatggcgttggggaaggtgccagaattggggttcgcatcctaggcgggctgtgtaacccttaggaatcttggcacactgca

SEQ ID NO: 64857 - DNA, 110 bp, synthetic construct
  source 1..110: mol_type = other DNA
tgagaatgactagcgttcacatgacagcgccagaaaggagagcgctgcaaacaaagagaagtccagggatgttcaggggtctccctcgaatattcagaaaagtactgatc

SEQ ID NO: 64858 - DNA, 110 bp, synthetic construct
  source 1..110: mol_type = other DNA
gagaagtccagggatgttcaggggtctccctcgaatattcagaaaagtactgatcaatgcgtgcaagtgaggcaacgacccaaggccagggaaataaccagcaaaaaaag

SEQ ID NO: 64859 - DNA, 110 bp, synthetic construct
  source 1..110: mol_type = other DNA
tggatatggaaggatgatgtgaaacaggatatttccaccgtctcaaaatattttaccacaagatatttatcattcctaagggtgaaacagtaaccttacagcgaaggaag

SEQ ID NO: 64860 - DNA, 110 bp, synthetic construct
  source 1..110: mol_type = other DNA
ccacaagatatttatcattcctaagggtgaaacagtaaccttacagcgaaggaagccagcaaacaagagcaacgttaacatggtccgcgtgggtcataccaccgtcaccc

SEQ ID NO: 64861 - DNA, 110 bp, synthetic construct
  source 1..110: mol_type = other DNA
gcctggtctaaagatacaccttgaagtaacacttttgaataataccagccgcgtagaccctgcttctctggcctaattggccatcccaggtggatccgtgccagctcctc

SEQ ID NO: 64862 - DNA, 110 bp, synthetic construct
  source 1..110: mol_type = other DNA
cacacaagataatattttcctttctgccacagagggaaatattcactattccacggattaggaagtagctatctttgaggaatatcatttagcctttcacactcatcaga

SEQ ID NO: 64863 - DNA, 110 bp, synthetic construct
  source 1..110: mol_type = other DNA
ctattccacggattaggaagtagctatctttgaggaatatcatttagcctttcacactcatcagattattctaaaggttcgatgcatgtaatcccatttttttttttttt

SEQ ID NO: 64864 - DNA, 110 bp, synthetic construct
  source 1..110: mol_type = other DNA
agctctgtttctggaggttttgacggaacacgtggctggcctcctttcccatgacttcagcctccaatagccaaacggcagcatataatgtgcattgcatccacccattc

SEQ ID NO: 64865 - DNA, 110 bp, synthetic construct
  source 1..110: mol_type = other DNA
ttcagcctccaatagccaaacggcagcatataatgtgcattgcatccacccattcacttcggctgctgctccagatcacagcggccgcagtcagcatctgaaaccagaca

SEQ ID NO: 64866 - DNA, 110 bp, synthetic construct
  source 1..110: mol_type = other DNA
agtttataccaaaccagatctagctattccatcaggtttctcttttactggctcgatttattgtttttctctgggattcctataagactgtcagatgaaattatatcgga

SEQ ID NO: 64867 - DNA, 110 bp, synthetic construct
  source 1..110: mol_type = other DNA
ttattttaaacatgtaagaggcgcctctaaagtaacgtgacttatttgtgttcatcctggagtgatgggaagattgctgaatttggaggcagaaagtatatgttcaggtc

SEQ ID NO: 64868 - DNA, 110 bp, synthetic construct
  source 1..110: mol_type = other DNA
tcaagacccaagggtattaggggaccaggggcagaaagaattttccatcctttatacatggacatgatggtctacttttagaaagacaatgagccctcatgttctgactg

SEQ ID NO: 64869 - DNA, 110 bp, synthetic construct
  source 1..110: mol_type = other DNA
tgtcccccttggtcgccacccctcgagcacctggctcgtggagggtgatgctgtgggcatgggtctgtttactctcatttaacctgacgcacttttcagtgagaaaatat

SEQ ID NO: 64870 - DNA, 110 bp, synthetic construct
  source 1..110: mol_type = other DNA
gagtgtggctgtctgcttacccagggctgggtgctgggtggggggggacacacttcgcctggctgaaaccataggacggggatggcttttctgttggctagaatagagtg

SEQ ID NO: 64871 - DNA, 110 bp, synthetic construct
  source 1..110: mol_type = other DNA
aaatccacatgcatcccgcggtttggggccattcttagagttgccaattcttctaactggtacgtctgcgctacagaaaggaaaaagcacagttctagaaaatccccccg

SEQ ID NO: 64872 - DNA, 110 bp, synthetic construct
  source 1..110: mol_type = other DNA
cctccctccttctgcgtactctgcttctcttactgcagcctaatgttacattcactcttttggcgaccacatgtcactgctgacccatcctgagcagaaggacatccaaa

SEQ ID NO: 64873 - DNA, 110 bp, synthetic construct
  source 1..110: mol_type = other DNA
tgtgccaggccctgggctgggagccaaggattcagcgagaacaatttcactcacgcatggactggacctccatgtggagctcgtaatctgaagggaaggacaagaagaaa

SEQ ID NO: 64874 - DNA, 110 bp, synthetic construct
  source 1..110: mol_type = other DNA
catggactggacctccatgtggagctcgtaatctgaagggaaggacaagaagaaattttaaactactacagtgagatactgctcacacccagcaggatggctataatcaa

SEQ ID NO: 64875 - DNA, 110 bp, synthetic construct
  source 1..110: mol_type = other DNA
gatcccatgagcatctgtgggtctatgaccgagctgaagaagtctcgcttgccctcaccgtcaggcttggcccccacccgaacgttctggctcccggtcgttgcacgcac

SEQ ID NO: 64876 - DNA, 110 bp, synthetic construct
  source 1..110: mol_type = other DNA
caccgtcaggcttggcccccacccgaacgttctggctcccggtcgttgcacgcacccctttttaagaagaggatggagttcaggaggcgcgagggaacgtaagggagtgg

SEQ ID NO: 64877 - DNA, 110 bp, synthetic construct
  source 1..110: mol_type = other DNA
aggttcattactgctgagccccagtgggaactcccccatctttcttcttacaccttttctgacgggactgataaccccctaattggacgcagcatcagactcagctggtc

SEQ ID NO: 64878 - DNA, 110 bp, synthetic construct
  source 1..110: mol_type = other DNA
tttctgacgggactgataaccccctaattggacgcagcatcagactcagctggtctgtgctctgtagggccagacctaaagagacccaaccacttcattgaaaaaaccct

SEQ ID NO: 64879 - DNA, 110 bp, synthetic construct
  source 1..110: mol_type = other DNA
gcaagaaacgcagagagatcctggaattcaaaattatttttgcagtttgacttccaagagcaagtccagctctaaaacctagtcttctctgcactgctgtctcaggcacg

SEQ ID NO: 64880 - DNA, 110 bp, synthetic construct
  source 1..110: mol_type = other DNA
aagagcaagtccagctctaaaacctagtcttctctgcactgctgtctcaggcacgcatccttagaagcaaagagaaagcaaggatttgaaggcacacgatgccggctaga

SEQ ID NO: 64881 - DNA, 110 bp, synthetic construct; identical to SEQ ID NO: 64879
  source 1..110: mol_type = other DNA

SEQ ID NO: 64882 - DNA, 110 bp, synthetic construct; identical to SEQ ID NO: 64880
  source 1..110: mol_type = other DNA

SEQ ID NO: 64883 - DNA, 110 bp, synthetic construct
  source 1..110: mol_type = other DNA
tggaaggaactaactctgccagtcacttgatcttgggcctccggagctgtgagaggattaagtctgtgttgttttaagccacgtggtttgtggtgctttgttcctggagc

SEQ ID NO: 64884 - DNA, 110 bp, synthetic construct
  source 1..110: mol_type = other DNA
tgcaatgcaatcccaaccaaaatgtcagaaaatgatttggtgattgacaaaccaattcttaggtttacactgacatactgattaagtctctgtggggaggaatgagaccc

SEQ ID NO: 64885 - DNA, 110 bp, synthetic construct
  source 1..110: mol_type = other DNA
ggcgttatttagtctcccacaaccctccagtccttagcctggagcccgactcgaaggaggtgttcaaaaagatgtttgtgcgctggctgaatgaattgcagtttgaactc

SEQ ID NO: 64886 - DNA, 110 bp, synthetic construct
  source 1..110: mol_type = other DNA
tactagcggggctcgttaaccgccgagccacgacaggagctccccatttgctctgggttatacacaaggaagccaagggagagggaggttaagtgactgcctaatgacag

SEQ ID NO: 64887 - DNA, 110 bp, synthetic construct
  source 1..110: mol_type = other DNA
tatcctcttagatattcacatggagggcacgtgcaaagatgtttgttgaagcgatgcatgtgtgctagcgaagagctggaagtggtgtgaatatccacctcgatagaaat

SEQ ID NO: 64888 - DNA, 110 bp, synthetic construct
  source 1..110: mol_type = other DNA
gcatgtgtgctagcgaagagctggaagtggtgtgaatatccacctcgatagaaatgatggtacctctgcactgaaaacactgtgagtaaccaagatgaggtgcccggcat

SEQ ID NO: 64889 - DNA, 110 bp, synthetic construct
  source 1..110: mol_type = other DNA
ccatttatagaacacaggccaggtagacctagcatcatttttaagagccttagtattttcagatggcacatgtgcattggcttcaactggaagtcaccaactacattagc

SEQ ID NO: 64890 - DNA, 110 bp, synthetic construct
  source 1..110: mol_type = other DNA
tgtcactttcacccttttagagtgcatagctgtctccttgagacgtcaaagacgaacagcagctaccacttgtactacattctggacaaaatcatgaccttagaacacac

SEQ ID NO: 64891 - DNA, 110 bp, synthetic construct
  source 1..110: mol_type = other DNA
acagcagctaccacttgtactacattctggacaaaatcatgaccttagaacacactaattttatttactcttgtcccatcttttgtgctactgctgtcctatattttaac

SEQ ID NO: 64892 - DNA, 110 bp, synthetic construct
  source 1..110: mol_type = other DNA
atcacggaagactgggcagaggtctccgaggcccattttcaacttgcttggcttgatctgacccgcccacctttgctctcccacagtcaagacaagctatcaagacaagc

SEQ ID NO: 64893 - DNA, 110 bp, synthetic construct
  source 1..110: mol_type = other DNA
atctgacccgcccacctttgctctcccacagtcaagacaagctatcaagacaagctatcccagggcctctgctctacccaaggcaactcccggaggccccacatggacac

SEQ ID NO: 64894 - DNA, 110 bp, synthetic construct
  source 1..110: mol_type = other DNA
ctcaactcacgtcacctgccagggaggcctcctcatcgaaagtcccaagtcctccatcgctctgacaacacagaacgttgataggagtgatttcgtttgcatactgtcta

SEQ ID NO: 64895 - DNA, 110 bp, synthetic construct
  source 1..110: mol_type = other DNA
gatgggctatacatgtgacaagcacaacttacatatgcccgttatcattaccccgttacatgtaatctggcactgaaagaatccatttgttcaaggataaaaaagaacat

SEQ ID NO: 64896 - DNA, 110 bp, synthetic construct
  source 1..110: mol_type = other DNA
ttcatttgcaacgttattgtgacaaacattcactggagatcacacaataaagcaagtcttcaacatctacagaacctatgggaggattattggtacttaatgaaattctg

SEQ ID NO: 64897 - DNA, 110 bp, synthetic construct
  source 1..110: mol_type = other DNA
cagctctgacataccgggcacaatggtggtggctgggaaagcaggaggccatcacaggcatgatcccactagagagcatattgactcttggggagagttaggctctggag

SEQ ID NO: 64898 - DNA, 110 bp, synthetic construct
  source 1..110: mol_type = other DNA
ggtgccgcggacaaggcctggttccataggttggcaaagctctaggaagcatacaccgcaccgccacagaagcccacccagaccgtggcaagattaaggccagggtcgcc

SEQ ID NO: 64899 - DNA, 110 bp, synthetic construct
  source 1..110: mol_type = other DNA
ccgcaccgccacagaagcccacccagaccgtggcaagattaaggccagggtcgccacaaagcaagccccgccacggtccccacagatccaggcacttccagcctgtctct

SEQ ID NO: 64900 - DNA, 110 bp, synthetic construct
  source 1..110: mol_type = other DNA
cgtggacaccccttccccttcttgcgcgaggaaaggcaggggggtgtggagcaggagggcatttccctctgggacctgttctgagaggggctgggccggggccacgaagg

SEQ ID NO: 64901 - DNA, 110 bp, synthetic construct
  source 1..110: mol_type = other DNA
agggcatttccctctgggacctgttctgagaggggctgggccggggccacgaaggccacctttctggctcctgaggctgaaagcgtgagcaggcgagtctgcagacaggc

SEQ ID NO: 64902 - DNA, 110 bp, synthetic construct
  source 1..110: mol_type = other DNA
aagaaacatacaaatctcccatcagccccagctgtgtcccagggcagaggctgcctgtcccaagattattgatctccctacgaacatctgcagtggtgacttcacgcttc

SEQ ID NO: 64903 - DNA, 110 bp, synthetic construct
  source 1..110: mol_type = other DNA
tgtcccaagattattgatctccctacgaacatctgcagtggtgacttcacgcttcatctgcatggctttcctgggttactgcccacccctgcaaacactaagctatcatc

SEQ ID NO: 64904 - DNA, 110 bp, synthetic construct
  source 1..110: mol_type = other DNA
cactggcctagatggtacccaaatatgtttctgggtataaagcagtgtcctacctgtgtcctcatcagcttccagaattacttcatgatctgaggagtctctatcccttt

SEQ ID NO: 64905 - DNA, 110 bp, synthetic construct
  source 1..110: mol_type = other DNA
tctcttcacgtcttttgcatatttttctattgtgtcttttgccttttgttttgtttttaatttggttaaaacactggtgttttagagtcattaaccttagcgctaataac

SEQ ID NO: 64906 - DNA, 110 bp, synthetic construct
  source 1..110: mol_type = other DNA
tttaatttggttaaaacactggtgttttagagtcattaaccttagcgctaataactcacaactagtgtttcaaaccttctaatggtgcattgagtggatattgtagttct

SEQ ID NO: 64907 - DNA, 110 bp, synthetic construct
  source 1..110: mol_type = other DNA
gtgaacaagttacttaaaggcccaagtctgacatgaagagacacagtagtactgggggtttgggactgccgtatgcacactgaggtatattgaatgattggccaacagga

SEQ ID NO: 64908 - DNA, 110 bp, synthetic construct
  source 1..110: mol_type = other DNA
agaaagtatgactcattcacaggaaaaaataaattaatagaaactgtccttgacaaggcctagacattggacttactagatagaaacttcaaatcaactgttttagatgt

SEQ ID NO: 64909 - DNA, 110 bp, synthetic construct
  source 1..110: mol_type = other DNA
ttccaagttcccagtgaatagtgcccaataaagcttagatcctctgaaagtaagatttctccatagcatttctttaactgttggcacactcaactcctgcatcgtcatat

SEQ ID NO: 64910 - DNA, 110 bp, synthetic construct
  source 1..110: mol_type = other DNA
gaagtctaccctgattttctctccaaagtgtcccttcaaatctgggagtaagatgcatagatttaatgaaaagagcatcccacatgggtcaatagacctgattgtgaggc

SEQ ID NO: 64911 - DNA, 110 bp, synthetic construct
  source 1..110: mol_type = other DNA
ttcaagtcaggtgccgcagctactgtgtctccaaacaagaaactcacactcctccacctttctctctttcctcatattcctcatcttatattcataaaaagataagcctg

SEQ ID NO: 64912 - DNA, 110 bp, synthetic construct
  source 1..110: mol_type = other DNA
ctctgctctggggaccaataaacgaacccgcttccactgagctgcttctgagcgtaggtctcttccggcctcgtattcggctcttttgtgttctctccccctccccgctg

SEQ ID NO: 64913 - DNA, 110 bp, synthetic construct
  source 1..110: mol_type = other DNA
actctggcctcgcctgtaatctctcagtgactcagcacctgtcacccgccgggtcctgtgttgggcacagagagtctgctcactggggggtgcgtatgtttacttgtggg

SEQ ID NO: 64914 - DNA, 110 bp, synthetic construct
  source 1..110: mol_type = other DNA
ctgtgttgggcacagagagtctgctcactggggggtgcgtatgtttacttgtgggggtgcgctgcccaccctgagctttgcttgggggctctatttggaaaacacatcct

SEQ ID NO: 64915 - DNA, 110 bp, synthetic construct
  source 1..110: mol_type = other DNA
tggtcctccctgacttattttgtcccgcttggtggaagagttcttcccttgcccgtcgtgccaggctctggagctcctccccctgccttggccccaccccccagctgctc

SEQ ID NO: 64916 - DNA, 110 bp, synthetic construct
  source 1..110: mol_type = other DNA
ataccacacaattcacctatttgacgtgtacagtttgacagtttttatttagtctcttcacagaggatgcagcagcagcatcgttaatttagaatgtgtcatcgcttcaa

SEQ ID NO: 64917 - DNA, 110 bp, synthetic construct
  source 1..110: mol_type = other DNA
cttcacagaggatgcagcagcagcatcgttaatttagaatgtgtcatcgcttcaaagagaaaactcataccccttcccccggcctaaggaaacacctttttttttctttc

SEQ ID NO: 64918 - DNA, 110 bp, synthetic construct
  source 1..110: mol_type = other DNA
ctcaccatcatcttcaccctgctctttgtcggtaggttggcccagggcaccctacgctgcggccgggccctcagaccctggccccagctggcgatggaggggacagaccg

SEQ ID NO: 64919 - DNA, 110 bp, synthetic construct
  source 1..110: mol_type = other DNA
ggccggtcaagagaggtacttctcaggaccagcaaagccctgggaacgaagccaccgcctgtcacttgggcctaattgagtgcgcatcttggagcccaatgcagctggat

SEQ ID NO: 64920 - DNA, 110 bp, synthetic construct
  source 1..110: mol_type = other DNA
cgcctgtcacttgggcctaattgagtgcgcatcttggagcccaatgcagctggataaagggcgaggaagctcaccgtgtacctgccagggagtctccaggacataatgat

SEQ ID NO: 64921 - DNA, 110 bp, synthetic construct
  source 1..110: mol_type = other DNA
tcacgccgagaatgagaacgtcacttccatcacaggaagtctgcacgtgggccttggtgacggatgattcggaagattcgtccacggctgcggagaacaggccgctcagg

SEQ ID NO: 64922 - DNA, 110 bp, synthetic construct
  source 1..110: mol_type = other DNA
ggtgacggatgattcggaagattcgtccacggctgcggagaacaggccgctcaggccaggggtgccgtgaggaggctgaggtcccagtccctgagcctctggccaggtct

SEQ ID NO: 64923 - DNA, 110 bp, synthetic construct
  source 1..110: mol_type = other DNA
gcaggagggtggcgccatctgcgtgaggatttccaacttgacctcaaggtagcaggaagtccaggagggaagccatgtgatctgagggatcgctctggcccctgagtgcc

SEQ ID NO: 64924 - DNA, 110 bp, synthetic construct
  source 1..110: mol_type = other DNA
gaagtccaggagggaagccatgtgatctgagggatcgctctggcccctgagtgccggatggcctggggagagcaggtgagccagcaggaccgcactgagccgcagagctg

SEQ ID NO: 64925 - DNA, 110 bp, synthetic construct
  source 1..110: mol_type = other DNA
ctctcttgcctcctgcctgccaggcacccaggctgcccttttatggtctggacaaggagccggagtggcgcgtgcttggtgcgacagtgccatctagcgtccagttccag

SEQ ID NO: 64926 - DNA, 110 bp, synthetic construct
  source 1..110: mol_type = other DNA
ggagccggagtggcgcgtgcttggtgcgacagtgccatctagcgtccagttccagaacagccgggcccgagctgtgggaggcagcagcgaggcaaaagggaacccctccc

SEQ ID NO: 64927 - DNA, 110 bp, synthetic construct
  source 1..110: mol_type = other DNA
aactcaagccacctcacttgcctgcttcgggccttcccggggttccccgaagccctccgctggggtcccagctcttccgccctgcccccactgctgtcgtcacccagccc

SEQ ID NO: 64928 - DNA, 110 bp, synthetic construct
  source 1..110: mol_type = other DNA
tccgctggggtcccagctcttccgccctgcccccactgctgtcgtcacccagccccttcctgtccacctctgtctagcgctcggcacacagcagcagcctgcagccatcc

SEQ ID NO: 64929 - DNA, 110 bp, synthetic construct
  source 1..110: mol_type = other DNA
ttgctggtgagatgctgggcctcttcagattgcttcctggcttgccagccacttccatcagcttcaagctggtgtaagagccgatgaggaggttgggagaggccagggga

SEQ ID NO: 64930 - DNA, 110 bp, synthetic construct
  source 1..110: mol_type = other DNA
catcagcttcaagctggtgtaagagccgatgaggaggttgggagaggccaggggagaccagggagttgcacttcggcagcatgaagttctcctgaagtgagtggacatga

SEQ ID NO: 64931 - DNA, 110 bp, synthetic construct
  source 1..110: mol_type = other DNA
cgcagaagcgagtgaggccccgaagagacccagacccggccaggcagatggcccttccgcctctcggcagagctccggttgcatttcgaaccccacccttctcgtgtgat

SEQ ID NO: 64932 - DNA, 110 bp, synthetic construct
  source 1..110: mol_type = other DNA
tccgcctctcggcagagctccggttgcatttcgaaccccacccttctcgtgtgattctggaagaaatcctgctgcaaggaagcgcagaggcccgcaacctcgttccagcc

SEQ ID NO: 64933 - DNA, 110 bp, synthetic construct
  source 1..110: mol_type = other DNA
gatttaaatgtacactgtggtgcttttactactttcagaagcaagacaagttaactcctttcctgttaagccataactacatacataagtgtaactcttttgaatcttta

SEQ ID NO: 64934 - DNA, 110 bp, synthetic construct
  source 1..110: mol_type = other DNA
tcctttcctgttaagccataactacatacataagtgtaactcttttgaatctttacattataagaaaagaatagctaacaaaacaaccacctgatcataagtgttctgat

SEQ ID NO: 64935 - DNA, 110 bp, synthetic construct
  source 1..110: mol_type = other DNA
tagcctcgaagctcgattttattttctgtggttacgaaacatttaagcaccaaacaaataagcggatcctgagtgcgcaagggccagtacgggcaaaagatgaagccccc

SEQ ID NO: 64936 - DNA, 110 bp, synthetic construct
  source 1..110: mol_type = other DNA
gacacagcgggacgtggatacagtgggacaccaactccgcgggacacaaactcagcaacagcaaaggcatgagctggggcccacccagcacacgtgactctcaaaactcc

SEQ ID NO: 64937 - DNA, 110 bp, synthetic construct
  source 1..110: mol_type = other DNA
caacagcaaaggcatgagctggggcccacccagcacacgtgactctcaaaactcctacgctgagccaaaagcccagacacaagacggaatgctctgccatcatttaagtg

SEQ ID NO: 64938 - DNA, 110 bp, synthetic construct
  source 1..110: mol_type = other DNA
ggcctggtttttaatagcccctgagctaagaatggtgtttccctgcagtagcttggggggaggggctgggaggagtggaaggagcagcagcagcagcaacggtgaccctg

SEQ ID NO: 64939 - DNA, 110 bp, synthetic construct
  source 1..110: mol_type = other DNA
ctttgggccgggccacccggcgcagcctggcggtgagtcgaatgcccgtttgagcagctgctgtcagatgggaacagcgagctggcgagtcctgagccgatcagcctgtg

SEQ ID NO: 64940 - DNA, 110 bp, synthetic construct
  source 1..110: mol_type = other DNA
agctgctgtcagatgggaacagcgagctggcgagtcctgagccgatcagcctgtgtgtctgaagggctcagaaagacaagcgagccaatctggccttcacgcgatgctgt

SEQ ID NO: 64941 - DNA, 110 bp, synthetic construct
  source 1..110: mol_type = other DNA
gctcagacctggaagggatcctgaagacgtgctgcttttccggcgcaagtgacgggggtgaaacacaggcctctgacttaacttattgagaggcctcgcctaagggccga

SEQ ID NO: 64942 - DNA, 110 bp, synthetic construct
  source 1..110: mol_type = other DNA
gtcctatgaagaggggaccatgcgccctaacagcaaacacacccctcgagcgtggtttcagtcctgctccgtcttgaatcccgaaggcagataaaggtgacagtgaggat

SEQ ID NO: 64943 - DNA, 110 bp, synthetic construct
  source 1..110: mol_type = other DNA
tttcagtcctgctccgtcttgaatcccgaaggcagataaaggtgacagtgaggatgctccggtttccagcaggaggcaggacagagagcacagcagaaggccaccgctca

SEQ ID NO: 64944 - DNA, 110 bp, synthetic construct
  source 1..110: mol_type = other DNA
gtaaatgtttgtcctgagcccacctatcctgcctccgtaggataatcttttactcacaagcccaccagtaattgtcttctaatttgggccggctgatagatataaagtgc

SEQ ID NO: 64945 - DNA, 110 bp, synthetic construct
  source 1..110: mol_type = other DNA
acaagcccaccagtaattgtcttctaatttgggccggctgatagatataaagtgccatcgcagtggttttctactttgcatccctctgtagtgagattgaaaacttttgt

SEQ ID NO: 64946 - DNA, 110 bp, synthetic construct
  source 1..110: mol_type = other DNA
tgttttcattttcaggactggcgaggattggcttgtaagctgtttgaattgatccatttgtgccatgagctgtctgagctgactgaaaactgtccttgagaggaaagccc

SEQ ID NO: 64947 - DNA, 110 bp, synthetic construct
  source 1..110: mol_type = other DNA
atttgtgccatgagctgtctgagctgactgaaaactgtccttgagaggaaagccctcgaggaaatgggtcccagttacggaggcatcttagggtgacccgcttgctctta

SEQ ID NO: 64948 - DNA, 110 bp, synthetic construct
  source 1..110: mol_type = other DNA
agtccctgcatctcctcggctccccgcaccttcacagtgtaaacacatattacgtcttcatcttgcacaccttagaagaaaacgtcacattgtcaatcatacctcaataa

SEQ ID NO: 64949 - DNA, 110 bp, synthetic construct
  source 1..110: mol_type = other DNA
cttcatcttgcacaccttagaagaaaacgtcacattgtcaatcatacctcaataaagctgaaaaaggggaaagaattaaaaagttagcaaaagaggatttctcacagtgg

SEQ ID NO: 64950 - DNA, 110 bp, synthetic construct
  source 1..110: mol_type = other DNA
aattatccatcaaaaactttcagcaagtatcatcttaaatgggaaaatgttagaaatatttcctctaaatccagtaaaggaagagcagagtcgtgatcgctattcttcat

SEQ ID NO: 64951 - DNA, 110 bp, synthetic construct; identical to SEQ ID NO: 64950
  source 1..110: mol_type = other DNA

SEQ ID NO: 64952 - DNA, 110 bp, synthetic construct
  source 1..110: mol_type = other DNA
aactttctaaccatcccagttgtatgaacagtagctgcagttcccatgccaatttttctaccctttgattttttgcatttcagtgcctataaagctgctgcaacaaatgg

SEQ ID NO: 64953 - DNA, 110 bp, synthetic construct
  source 1..110: mol_type = other DNA
ttctaccctttgattttttgcatttcagtgcctataaagctgctgcaacaaatggaccatagctcactggacccatttacacggtctgattatatatatggtaagtacca

SEQ ID NO: 64954 - DNA, 110 bp, synthetic construct
  source 1..110: mol_type = other DNA
tctgtgtcattttaatatggggccactctcactttactcccacctcagctttacatcatgatagtcatgaggactgattggagaggaggaaaaacatgcccaggggaatt

SEQ ID NO: 64955 - DNA, 110 bp, synthetic construct
  source 1..110: mol_type = other DNA
aggactgctgctaaaagacacaagaattagatacagtttccctctgtaagtgaatccaaaattcactaaggaattcaaagatcgagggcacttgcttgaaatcaaggtgc

SEQ ID NO: 64956 - DNA, 110 bp, synthetic construct
  source 1..110: mol_type = other DNA
ccaaaattcactaaggaattcaaagatcgagggcacttgcttgaaatcaaggtgctccaacttagtttaagacttccagactctaactttatatatcatcatctctttta

SEQ ID NO: 64957 - DNA, 110 bp, synthetic construct
  source 1..110: mol_type = other DNA
cgtaacccagcaggatggaccgcgtcctcctgggccacctcggagatgcatgttaattgggacgtggggaactgtcattgaaacagacgtccaagtgcctttgacagatc

SEQ ID NO: 64958 - DNA, 110 bp, synthetic construct
  source 1..110: mol_type = other DNA
attgggacgtggggaactgtcattgaaacagacgtccaagtgcctttgacagatcgctataaccacacgcctttccatcaggatgttttatttacaacacctcgagccgc

SEQ ID NO: 64959 - DNA, 110 bp, synthetic construct
  source 1..110: mol_type = other DNA
atatgtttcctctgtgccacgatgggaactccttgtgctggcttcttactatgttgcagactgtgaaagaaagaaagaaaattggagttcccgtcgtgacgcagtggaaa

SEQ ID NO: 64960 - DNA, 110 bp, synthetic construct; identical to SEQ ID NO: 64959
  source 1..110: mol_type = other DNA

SEQ ID NO: 64961 - DNA, 110 bp, synthetic construct
  source 1..110: mol_type = other DNA
cctccagaaccaattcctgtctcctccaccacgtttgggacatgtcctatcatgtttgacaggtgtgttgtaacacctcttctatgttttcttttaaaaaataaaatcta

SEQ ID NO: 64962 - DNA, 110 bp, synthetic construct
  source 1..110: mol_type = other DNA
ccaccacgtttgggacatgtcctatcatgtttgacaggtgtgttgtaacacctcttctatgttttcttttaaaaaataaaatctaaacctcaagatttctccctgttgga

SEQ ID NO: 64963 - DNA, 110 bp, synthetic construct
  source 1..110: mol_type = other DNA
atacccactgaccaacatcttccaggaataaccagtttctatgttaatcagggaatctttaccgttgttttctttgtgccacacccctcaccggtcctggggagcctcga

SEQ ID NO: 64964 - DNA, 110 bp, synthetic construct
  source 1..110: mol_type = other DNA
tctttaccgttgttttctttgtgccacacccctcaccggtcctggggagcctcgagattcttggtgaaagaaatttataaataggaggagatcattctctcatgtcttgg

SEQ ID NO: 64965 - DNA, 110 bp, synthetic construct
  source 1..110: mol_type = other DNA
gacctggagattcagaccaagtgcccccacgatgagctgttaatttcctgatccgacatccaggggtggaaatgcaggcagagttttctgatcatgtggaacttgggtac

SEQ ID NO: 64966 - DNA, 110 bp, synthetic construct
  source 1..110: mol_type = other DNA
accataggacccagaaatcccactcttgggtatctatcaagacaaaactttcattgaataagatatacgcacccctatgttcactatagcactattcacaatagctaaga

SEQ ID NO: 64967 - DNA, 110 bp, synthetic construct; identical to SEQ ID NO: 64966
  source 1..110: mol_type = other DNA

SEQ ID NO: 64968 - DNA, 110 bp, synthetic construct
  source 1..110: mol_type = other DNA
cttcaaaacacagcccatttgataaactgaaacatttttagtacctgagtatttgtatttgaaagtgctttgtaagagagctactaattttcaacccattaatgttgagt

SEQ ID NO: 64969 - DNA, 110 bp, synthetic construct
  source 1..110: mol_type = other DNA
tatttgaaagtgctttgtaagagagctactaattttcaacccattaatgttgagttgaaagccttacaactgatgcttttaaaaggaactttcttgggagttctcatcat

SEQ ID NO: 64970 - DNA, 110 bp, synthetic construct
  source 1..110: mol_type = other DNA
cagagctaggtttcagagaaacacacttctccccaggtaaacagtggggacggcgggggggggagggggggctgagaaaaataaactcaataacaatggccactccaagg

SEQ ID NO: 64971 - DNA, 110 bp, synthetic construct
  source 1..110: mol_type = other DNA
cggtaagatagaaattgagaatgtcagttatatttactcatgacatggagggaggggaagggaggccacactcagtggattttccatttttgtttttgtttctttctttt

SEQ ID NO: 64972 - DNA, 110 bp, synthetic construct
  source 1..110: mol_type = other DNA
tggagggaggggaagggaggccacactcagtggattttccatttttgtttttgtttctttctttttagggtcaccctggggtatatggagttcccaggctaggggtggaa

SEQ ID NO: 64973 - DNA, 110 bp, synthetic construct
  source 1..110: mol_type = other DNA
tacgatacacatttaaatttccaaataatacccacgaccttctttgattcgtttctctcaaatacaaatgcattatattccagtatcatttcaaggagaaaattgctcct

SEQ ID NO: 64974 - DNA, 110 bp, synthetic construct
  source 1..110: mol_type = other DNA
tctcaaatacaaatgcattatattccagtatcatttcaaggagaaaattgctcctaaaacaagttctggtgcatttagctccaataacactagtgtattcatttgttcaa

SEQ ID NO: 64975 - DNA, 110 bp, synthetic construct
  source 1..110: mol_type = other DNA
ttgttttccctcccttgctccctccttccatcccttccttcttatcttttttctcatgtatccctaaataatctatagtgtttctatgtttttatatatttttttttact

SEQ ID NO: 64976 - DNA, 110 bp, synthetic construct
  source 1..110: mol_type = other DNA
caagcgaaaaccatattctggagaggaaagtgattgatgatccatgcaatgtacggagtcgggatggtatcttttctcagttactagatctctgccttttgtccagaggg

SEQ ID NO: 64977 - DNA, 110 bp, synthetic construct
  source 1..110: mol_type = other DNA
ctgtatgcatctagcaccttaggagaaactggtttgatagaaaccaactgagaggtgaagaaaaatcaggtctccctagacactggggaagaggacagtccttggggggg

SEQ ID NO: 64978 - DNA, 110 bp, synthetic construct
  source 1..110: mol_type = other DNA
tgaagaaaaatcaggtctccctagacactggggaagaggacagtccttggggggggggtgcatgtgtgtttgcacgtgtgcacgtgtgggagcacagtgtgtgcacctct

SEQ ID NO: 64979 - DNA, 110 bp, synthetic construct
  source 1..110: mol_type = other DNA
tcctggggatggatgtgagaggagccctgtctgatgcctaggaatattcagactctcccttatttaatgagcaattactaattagtgtttcatacccaggaatgtgctgg

SEQ ID NO: 64980 - DNA, 110 bp, synthetic construct
  source 1..110: mol_type = other DNA
actctcatcagcctctgttttgtagttcctcttacccccagctctctaagaatagctccaggtgtggttcttctactttgcagtaggcatcaggaaaggaggaatttttt

SEQ ID NO: 64981 - DNA, 110 bp, synthetic construct; identical to SEQ ID NO: 64980
  source 1..110: mol_type = other DNA

SEQ ID NO: 64982 - DNA, 110 bp, synthetic construct
  source 1..110: mol_type = other DNA
tgatgacacacggctttaatcaatttcatctcggctgcttgtatcctctgggtgtgagtcacactgtccctgagataatgggctttggggacattatatgagacagaagg

SEQ ID NO: 64983 - DNA, 110 bp, synthetic construct
  source 1..110: mol_type = other DNA
gagtcacactgtccctgagataatgggctttggggacattatatgagacagaagggggattcaaatgcaggcttcagacagggctttcctactatctctccacctggatc

SEQ ID NO: 64984 - DNA, 110 bp, synthetic construct
  source 1..110: mol_type = other DNA
gcttctttcttttagaatggatcattttaagaggctctgatttggatggaaatatgtccaggagaaagcattttctttttcatgtctaccttatgggatcattcactcaa

SEQ ID NO: 64985 - DNA, 110 bp, synthetic construct
  source 1..110: mol_type = other DNA
gtccaggagaaagcattttctttttcatgtctaccttatgggatcattcactcaagccaacaggacattctggaatcaacaaacaggaaagtttgtatgtacagcataga

SEQ ID NO: 64986 - DNA, 110 bp, synthetic construct
  source 1..110: mol_type = other DNA
agttccccaggattaaagggagaaaagacgtctccatacaagtcaccaaggacaaggaggcaccccaatttctattgcacatggtgaagtctgtggttttctcaatttac

SEQ ID NO: 64987 - DNA, 110 bp, synthetic construct
  source 1..110: mol_type = other DNA
ggaggcaccccaatttctattgcacatggtgaagtctgtggttttctcaatttacttcttttaagttccaggaaaatccccttctctgcttttccttctccttgtctaag

SEQ ID NO: 64988 - DNA, 110 bp, synthetic construct
  source 1..110: mol_type = other DNA
aaacttctgtttcctggggagtaggggaaacgatagggctttccatatgggatagacacctgtggttctagcaaaatgccactgagcttggagtattcaaagaggtttga

SEQ ID NO: 64989 - DNA, 110 bp, synthetic construct
  source 1..110: mol_type = other DNA
gaaaggagagaaagaaagaaagaaagaaacactgatttgggagctcttattaaagacctgaaatagctgaaaagtagagtctatgaggggtggcagagtttgagacaagc

SEQ ID NO: 64990 - DNA, 110 bp, synthetic construct
  source 1..110: mol_type = other DNA
acctgaaatagctgaaaagtagagtctatgaggggtggcagagtttgagacaagcctctgtgatctttgagacatcagacatgagtccatcagaacccaaggtactgttt

SEQ ID NO: 64991 - DNA, 110 bp, synthetic construct
  source 1..110: mol_type = other DNA
cggttgtcaaaatactggaacccaaatattgctggaatgttttacttgaaatatcctgattctgcttttctcatgttatgctgttagactttattacaccatcatagctg

SEQ ID NO: 64992 - DNA, 110 bp, synthetic construct
  source 1..110: mol_type = other DNA
ctgattctgcttttctcatgttatgctgttagactttattacaccatcatagctgagagtcaaatgatctttctttgaagtcatttcaaatttaccttttttttgggggg

SEQ ID NO: 64993 - DNA, 110 bp, synthetic construct
  source 1..110: mol_type = other DNA
tacatttttttgggaggagacagaaggctgaaaacaaggaatccgcagggagctaccttcccagcatctttcgttatctgagcgtatccacaccttagatcaaagaaatc

SEQ ID NO: 64994 - DNA, 110 bp, synthetic construct
  source 1..110: mol_type = other DNA
ccttcccagcatctttcgttatctgagcgtatccacaccttagatcaaagaaatcccttagcacttaggcagaaatggatactgttggacacccaaccagatttgctcaa

SEQ ID NO: 64995 - DNA, 110 bp, synthetic construct
  source 1..110: mol_type = other DNA
tgctgaaggtgttcaggacatgctcagccaccaccgcaaaaatgtgccgctttcgtataccgattactttgagctgcaggtatccggaaaaccataaatccatgagaagg

SEQ ID NO: 64996 - DNA, 110 bp, synthetic construct
  source 1..110: mol_type = other DNA
tataccgattactttgagctgcaggtatccggaaaaccataaatccatgagaaggctctctctgaatcccctggtctgcccaataacgggtcctccaaaaggaactcagt

SEQ ID NO: 64997 - DNA, 110 bp, synthetic construct
  source 1..110: mol_type = other DNA
cataatgctttattttgattcctcaacccaaatggactgtctttggcaagctcggcatcacagaagatactgtgtaaagactttcaaatcctgagttggtgtcttttatg

SEQ ID NO: 64998 - DNA, 110 bp, synthetic construct
  source 1..110: mol_type = other DNA
ggttcctagttgaattcatttcccctgtgccaggaggggaactccttacattttttttttccaattactgaactttcataggttccatttagatcacatcagcatctgcc

SEQ ID NO: 64999 - DNA, 110 bp, synthetic construct; identical to SEQ ID NO: 64998
  source 1..110: mol_type = other DNA

SEQ ID NO: 65000 - DNA, 110 bp, synthetic construct
  source 1..110: mol_type = other DNA
gaagcccagactggctgagtgaggtgggtaacgtcacacacctcgtaggtggcagagatgccaacagaacccaaccagtgccgcttcagctatacgagggcatgtgaatc

SEQ ID NO: 65001 - DNA, 110 bp, synthetic construct
  source 1..110: mol_type = other DNA
agatgccaacagaacccaaccagtgccgcttcagctatacgagggcatgtgaatcttgggttctccctctgtgggtgaccatgcagaaaaggtttcggggattccactca

SEQ ID NO: 65002 - DNA, 110 bp, synthetic construct
  source 1..110: mol_type = other DNA
ttctgggagaccatcaaaagctcctctgaccagaaatatcattctaatgaatccagaacagcactgacatcttctgtgtgagtcaacaaacatgtataataagcaggaga

SEQ ID NO: 65003 - DNA, 110 bp, synthetic construct
  source 1..110: mol_type = other DNA
tctggggaaatcaatgcaggggaagctttctcctctggggatcattatcttatctttatccaaatgtatctaagtgtcagcagttttattttctgaagctgattttaact

SEQ ID NO: 65004 - DNA, 110 bp, synthetic construct
  source 1..110: mol_type = other DNA
ttatccaaatgtatctaagtgtcagcagttttattttctgaagctgattttaactacacgttgcccattttcctcaaaaaacgaaactatccaacagtccgccttctggg

SEQ ID NO: 65005 - DNA, 110 bp, synthetic construct
  source 1..110: mol_type = other DNA
tgggttaaggatctggctttgctgttagccatggtgtaggtcacagatgtggctcgaatctgctgtgagatgtggcataggccggtggctgcagctccaatttggccccc

SEQ ID NO: 65006 - DNA, 110 bp, synthetic construct
  source 1..110: mol_type = other DNA
gctttgctgttagccatggtgtaggtcacagatgtggctcgaatctgctgtgagatgtggcataggccggtggctgcagctccaatttggcccccagcctgggaacttcc

SEQ ID NO: 65007 - DNA, 110 bp, synthetic construct
  source 1..110: mol_type = other DNA
gggtagaggcagagcccatcaaaagcaggtttcccagaattgggagttttcaatccacaggcacttgcgggtcttttaggtgctccgtgctgttttgaaagtgcgtggcc

SEQ ID NO: 65008 - DNA, 110 bp, synthetic construct
  source 1..110: mol_type = other DNA
gtaaggatggaggcgagagccatggttgttggcagggctttgcaatggatccactgtatctacaggaagtgacgcttcacatagtagcacgattccctacacattaacac

SEQ ID NO: 65009 - DNA, 110 bp, synthetic construct
  source 1..110: mol_type = other DNA
cacacgcttgttaaaacgtcagactccctggacttatataaagcattaccctctctagctcagtctacctaaatacaagagatgaccacatcaccacaagtccctggact

SEQ ID NO: 65010 - DNA, 110 bp, synthetic construct
  source 1..110: mol_type = other DNA
tagctcagtctacctaaatacaagagatgaccacatcaccacaagtccctggactgggcagggatgatggcgaaatggataaaaacttgatttcagcattttaaacattt

SEQ ID NO: 65011 - DNA, 110 bp, synthetic construct
  source 1..110: mol_type = other DNA
taagccatacatctctatctgggctccagacagaggcatccctccacattaaacagaaacctaataatgttcaagaaatagcaattttatattttgatgacactcagatc

SEQ ID NO: 65012 - DNA, 110 bp, synthetic construct
  source 1..110: mol_type = other DNA
gaaacctaataatgttcaagaaatagcaattttatattttgatgacactcagatctgctgccgcaggagaggaaaaaaagggaattattgctagaaacattatttaaaga

SEQ ID NO: 65013 - DNA, 110 bp, synthetic construct
  source 1..110: mol_type = other DNA
attaggagtatgggatggacaagatacccactactagtgggtaaactagatacacaaccaagcctgactgtacagctccaggaaattataccttgtatcttgtaataccc

SEQ ID NO: 65014 - DNA, 110 bp, synthetic construct
  source 1..110: mol_type = other DNA
tgaactgtcttgaagtcctttgctcagcagttaatttacatgcatacacgttaatacggacactaagagtacctcagagcatagttttcacgaataaaatgacagaattc

SEQ ID NO: 65015 - DNA, 110 bp, synthetic construct
  source 1..110: mol_type = other DNA
acggacactaagagtacctcagagcatagttttcacgaataaaatgacagaattccttaggaagcttcccacccatgtctgccggcttgttaaatcctacgtgtcttcaa

SEQ ID NO: 65016 - DNA, 110 bp, synthetic construct
  source 1..110: mol_type = other DNA
tggtgctgaggctgaaaaaccctcatcacgcactgctcagccaaacagaatgcgtcagagacacgtgttcctatgttacttcttcacatgggtgatttgaacaaagaaag

SEQ ID NO: 65017 - DNA, 110 bp, synthetic construct
  source 1..110: mol_type = other DNA
gaaaatactattctctccccatccatgtcgttccccgggctgaaggtaatctcgaagctgtccccttcttaataagtaatgtgttttcattctttacatccaaatccttg

SEQ ID NO: 65018 - DNA, 110 bp, synthetic construct
  source 1..110: mol_type = other DNA
agctgtccccttcttaataagtaatgtgttttcattctttacatccaaatccttgagtttgaaattaacaacacttgaaggagacctgttcccacaaatgaaatttgaat

SEQ ID NO: 65019 - DNA, 110 bp, synthetic construct
  source 1..110: mol_type = other DNA
taaatctgttatgaaaaattgcaaaagtcggttttatggctgattgccatctgccctgatttaatgaatgattctggtgtaaggtatcccagtattttaaaagtggtgct

SEQ ID NO: 65020 - DNA, 110 bp, synthetic construct
  source 1..110: mol_type = other DNA
ctgatttaatgaatgattctggtgtaaggtatcccagtattttaaaagtggtgctatgccagcatcacttggaagctttttggggatgcaatcctcctggaccacatcag

SEQ ID NO: 65021 - DNA, 110 bp, synthetic construct
  source 1..110: mol_type = other DNA
tcttgtcttcttcccgtcaatcctctgacaagaagcaccctcttccaaagagacgaagatgttcttagtggtgctggagtttgcgattatggagctgtagccctttgtca

SEQ ID NO: 65022 - DNA, 110 bp, synthetic construct
  source 1..110: mol_type = other DNA
aattcagcatctaattggagtgaaggttgacagagtctgagctttcattgaagtgtcgagagtccgaaaaggtcaacatctttattccttatgttctgaccagtctgggg

SEQ ID NO: 65023 - DNA, 110 bp, synthetic construct
  source 1..110: mol_type = other DNA
tcgagagtccgaaaaggtcaacatctttattccttatgttctgaccagtctggggtctcagttaccctcttccacctgagtgggggtccttagttcctgctgaactcaga

SEQ ID NO: 65024 - DNA, 110 bp, synthetic construct
  source 1..110: mol_type = other DNA
tcctcccactgctaccagcaggacatacatagtctgagttgtgtgtaatgtgttgagtggtaattcactgccgcagttaatgtgcaggtttgtggattatttttagtttg

SEQ ID NO: 65025 - DNA, 110 bp, synthetic construct
  source 1..110: mol_type = other DNA
gttttgctgagagagcagccaccttactctgcatccagggagaagcatactaagctggctatctggtgacttcgtttgggcagctgtgggtttcagacggaccctggttt

SEQ ID NO: 65026 - DNA, 110 bp, synthetic construct
  source 1..110: mol_type = other DNA
aaaaatgaaagtaattgctaagtcccctgtcacctgctttccaaagaggcaggccacttgtcaccctcaaaatgagagtgctttgagccttcttaagttcattatacttt

SEQ ID NO: 65027 - DNA, 110 bp, synthetic construct
  source 1..110: mol_type = other DNA
acttgtcaccctcaaaatgagagtgctttgagccttcttaagttcattatactttcaacacctccctttcttcctttcttccttccttcgttccttcgttccttccttcc

SEQ ID NO: 65028 - DNA, 110 bp, synthetic construct
  source 1..110: mol_type = other DNA
tttttttaaaactgaattgatcaagtttatcagcacacaggcgacttagtttctaataccgaggtggactgaaggatttggtatcaaatgatgaagagggcagcttcttc

SEQ ID NO: 65029 - DNA, 110 bp, synthetic construct
  source 1..110: mol_type = other DNA
ataccgaggtggactgaaggatttggtatcaaatgatgaagagggcagcttcttcacatgtgcaggtctgttgcacacactggaagaccttgcttcagtaaatacaagtt

SEQ ID NO: 65030 - DNA, 110 bp, synthetic construct
  source 1..110: mol_type = other DNA
tgcttgcatgcctcaagccaggatctggatggaaattttatgcagtgacctatgtgcccggggagacgcttttctcctattaagcaccgaagtcaagtgacaacatgagt

SEQ ID NO: 65031 - DNA, 110 bp, synthetic construct
  source 1..110: mol_type = other DNA
ttctgtttctttttttacattaaaaaaattgtaactgatttacagtgtcgtgccagcttctgcagtacagccaggtgaccccatcatacatatacatacattccctttct

SEQ ID NO: 65032 - DNA, 110 bp, synthetic construct
  source 1..110: mol_type = other DNA
aaattgtaactgatttacagtgtcgtgccagcttctgcagtacagccaggtgaccccatcatacatatacatacattccctttcttacgtaatcttccatcctggtctct

SEQ ID NO: 65033 - DNA, 110 bp, synthetic construct
  source 1..110: mol_type = other DNA
ctccctgtatgagagcttttgaagggataccgttgtaggccaggcttgtagttccattaagtgtatagatctgttttatctactacccaggaggttcatgtgtctgtgtg

SEQ ID NO: 65034 - DNA, 110 bp, synthetic construct
  source 1..110: mol_type = other DNA
tctgacctggtctcacaggtatttctgagcaatgcaatggactgtgttggcgcgtctgcagctgatggctgctgtgagcctgtgggtggatgatgcgtgttctctgacct

SEQ ID NO: 65035 - DNA, 110 bp, synthetic construct
  source 1..110: mol_type = other DNA
ctgcagctgatggctgctgtgagcctgtgggtggatgatgcgtgttctctgacctagatgacatcctggttccgcatatgtccttgtcaaggtgaggagggaaggtctac

SEQ ID NO: 65036 - DNA, 110 bp, synthetic construct
  source 1..110: mol_type = other DNA
cccctaaacattcaaactaagttactattggtcatctctgtggaggctaaaacaaggaaaataattcaaaggtggtaaagttttttttaaatcattttactatacacaca

SEQ ID NO: 65037 - DNA, 110 bp, synthetic construct; identical to SEQ ID NO: 65036
  source 1..110: mol_type = other DNA

SEQ ID NO: 65038 - DNA, 110 bp, synthetic construct
  source 1..110: mol_type = other DNA
tgcttcaagcttcggctgcacagatgtcctagaagcgggagctccttgtaaacggcaggtgctccctgtgcatttatcacaacaaagaggacttcagtggccgcgagagc

SEQ ID NO: 65039 - DNA, 110 bp, synthetic construct
  source 1..110: mol_type = other DNA
aaaaccgctcaaaggcaagaacaatgtagaaaactctggaagaaggcaagagataggacatcccgttgtcctttctgttgcccattgtgatgtcattcacgatttttact

SEQ ID NO: 65040 - DNA, 110 bp, synthetic construct
  source 1..110: mol_type = other DNA
tttacaattacagagacatatgtatcagggtctctatctctctttacaaaaagtccaatatgtttccttaggacacttcagctgcccccccaccccagcccataagaaat

SEQ ID NO: 65041 - DNA, 110 bp, synthetic construct
  source 1..110: mol_type = other DNA
caatatgtttccttaggacacttcagctgcccccccaccccagcccataagaaatacctttatgattttatcacaaggcaactgttttctagattttaccaacttgtttt

SEQ ID NO: 65042 - DNA, 110 bp, synthetic construct
  source 1..110: mol_type = other DNA
gcactttgcaaaaatcttgattttgaatttcgaaagaactcctcattatgttccgagtttttagaattttcagtattattttggttagttttggaaagactgctattact

SEQ ID NO: 65043 - DNA, 110 bp, synthetic construct
  source 1..110: mol_type = other DNA
ttctgcctcatttacatttcgcccccgagcccccttctctgcttgaatagctctcgatcaatagggaaaaaaatcaaatcgacgtatgccccccacaagcgtgctttttc

SEQ ID NO: 65044 - DNA, 110 bp, synthetic construct
  source 1..110: mol_type = other DNA
gatcaatagggaaaaaaatcaaatcgacgtatgccccccacaagcgtgctttttcctctctggagcagaacgtgttctatttatgtaacaacatcaactctgagaagcat

SEQ ID NO: 65045 - DNA, 110 bp, synthetic construct
  source 1..110: mol_type = other DNA
tgttcttgcctcctttgtcgaaggttaattgcccataggtatgtggatttatttccgggcactctgttctgttctgttgattccctttgtctatttttgtgccaatacca

SEQ ID NO: 65046 - DNA, 110 bp, synthetic construct
  source 1..110: mol_type = other DNA
taattgcccataggtatgtggatttatttccgggcactctgttctgttctgttgattccctttgtctatttttgtgccaataccatgttgttttgattactgtagctttg

SEQ ID NO: 65047 - DNA, 110 bp, synthetic construct
  source 1..110: mol_type = other DNA
cccagccaggctttcatctgcaaccccgcccctgcccccattcacttccctctaaggtgaccccagggcatcactgttgattttgttttcctgaggcagcacccttggtg

SEQ ID NO: 65048 - DNA, 110 bp, synthetic construct
  source 1..110: mol_type = other DNA
ctcctcaaatgcagcattgatgggtgtccttcgaaaaagggggtgatggctgtgggatgtcagaggcaccaactggaatgacacagacacaagctgcaggacgctaaggg

SEQ ID NO: 65049 - DNA, 110 bp, synthetic construct
  source 1..110: mol_type = other DNA
gatgtcagaggcaccaactggaatgacacagacacaagctgcaggacgctaagggtttctggagtccaggaagcaaagagacaggctgaaacggatgttcccgcagggcc

SEQ ID NO: 65050 - DNA, 110 bp, synthetic construct
  source 1..110: mol_type = other DNA
acagccatggacaacaggcttgtggttgccaagggggagggggcgggataattcagagactggtattagcacatccaaactgttctatataaaatcaataactggagctc

SEQ ID NO: 65051 - DNA, 110 bp, synthetic construct
  source 1..110: mol_type = other DNA
gagactggtattagcacatccaaactgttctatataaaatcaataactggagctcccttgggatgcggcagggaaagaatccagtgtggacattacaccagcttgggtca

SEQ ID NO: 65052 - DNA, 110 bp, synthetic construct
  source 1..110: mol_type = other DNA
gaacattcttcatcttgcacagcggaacctgtccccattaaaatgtgccgactccccaccgccccagccctcagccccagcagctactcttctgtctgaatctgactctc

SEQ ID NO: 65053 - DNA, 110 bp, synthetic construct
  source 1..110: mol_type = other DNA
ccaccgccccagccctcagccccagcagctactcttctgtctgaatctgactctctaaggaccgcatggaaggagaagcctgcaggatgttcctttggcgactgtgtctt

SEQ ID NO: 65054 - DNA, 110 bp, synthetic construct
  source 1..110: mol_type = other DNA
gaatatctgaatacccattgccatcataaaatacctttctgcaaaatcttatagggaaattttgcttcacagttttaagcagtgtctttttagtttgtctagctctattt

SEQ ID NO: 65055 - DNA, 110 bp, synthetic construct
  source 1..110: mol_type = other DNA
tttctgcaaaatcttatagggaaattttgcttcacagttttaagcagtgtctttttagtttgtctagctctatttaaaatacacatttttggtgcaagtaccccaaattt

SEQ ID NO: 65056 - DNA, 110 bp, synthetic construct
  source 1..110: mol_type = other DNA
tctgaagtaggttaggcagaagtgtgggggacctgggcctgtggttggtggttcggcaggtgcagtcctgggggttgggacccccatctatctcagcgttggcatcaacc

SEQ ID NO: 65057 - DNA, 110 bp, synthetic construct
  source 1..110: mol_type = other DNA
gcaggtgcagtcctgggggttgggacccccatctatctcagcgttggcatcaacccggtcctgaggtgaactgaagtagaggacacccagctggggtccgaagggacctg

SEQ ID NO: 65058 - DNA, 110 bp, synthetic construct
  source 1..110: mol_type = other DNA
gtgggttaaggacctggtatggtcactgctgtggctcaggttgtgacatgggttcggtccctggccccggtacttctgtatgctttgggcatgaccaaaaaaatgtcggt

SEQ ID NO: 65059 - DNA, 110 bp, synthetic construct
  source 1..110: mol_type = other DNA
gctgaggaatattttgggtggggggcttcagtttcaaatgatccctcagctctgctaatccgtgtgttttgttcacttacgaggctgtggaacatgttcttcctgccctt

SEQ ID NO: 65060 - DNA, 110 bp, synthetic construct
  source 1..110: mol_type = other DNA
cggagcagcagcaggaccgccgccacctgcaggccccgtcccccttggggcctcgccacctcccttctggtactggttgctgcccctcttcagccacagccccttctaag

SEQ ID NO: 65061 - DNA, 110 bp, synthetic construct
  source 1..110: mol_type = other DNA
ccacctcccttctggtactggttgctgcccctcttcagccacagccccttctaagccactctccacataaatggaggctttgggggttttgcctttttacaaatgaaaat

SEQ ID NO: 65062 - DNA, 110 bp, synthetic construct
  source 1..110: mol_type = other DNA
acagtaattgactcctaaaagcaaatgaaaatgtagttatttacacttgccatgaagttctataaaagtactgatagcgtaaggtttgcctcactttcaaactgctaaaa

SEQ ID NO: 65063 - DNA, 110 bp, synthetic construct; identical to SEQ ID NO: 65062
  source 1..110: mol_type = other DNA

SEQ ID NO: 65064 - DNA, 110 bp, synthetic construct
  source 1..110: mol_type = other DNA
caaaaatctgagcacatgtgtgtttcctagcagcagcgtgtatgtcctatatccttgccaacaataaacctagctacttaaagatttttgcaaatttgtacattttattt

SEQ ID NO: 65065 - DNA, 110 bp, synthetic construct
  source 1..110: mol_type = other DNA
tgtgttttcagaggattctgagaagacagcagagcaggaaacaacaggagctgctctctctccctgtctgggcaacactggcacctccagaatctgtctggtgtaactgc

SEQ ID NO: 65066 - DNA, 110 bp, synthetic construct
  source 1..110: mol_type = other DNA
tgggcactggatcagctcgcatgccaggtggacaggtggctgcataagctgaggctggtctgcatgctcagaaggtgattcgtagtttcatcatcgtgtttcatcagctc

SEQ ID NO: 65067 - DNA, 110 bp, synthetic construct
  source 1..110: mol_type = other DNA
cctccatgttttcaaggcttattagtgcatttccttttatcgttgaatatctcattttctgaagatatcacagtttacctatccattcatctacagacggacatcatagt

SEQ ID NO: 65068 - DNA, 110 bp, synthetic construct
  source 1..110: mol_type = other DNA
gtccggcctccaagagctggcgccaccaggagctgaacggggggcgcgggcacgtccagagccgggaggagttcagctcaaaactcggaggcgttgccttcacttcagat

SEQ ID NO: 65069 - DNA, 110 bp, synthetic construct
  source 1..110: mol_type = other DNA
cgtcatctgagttacacccagtgcctggaccttatgaaaaaagctgctgtgaacgcctgtgtacaagacatggtgtctcagagttcccactggagcaacaggactggggt

SEQ ID NO: 65070 - DNA, 110 bp, synthetic construct
  source 1..110: mol_type = other DNA
cattgctagatgagtataaaaaggaaaaaagaatggtttctgtggaagctaacaggaatgtttttgaataacctttcaaaagcaatcgtgcaaaacgaactgtccaatca

SEQ ID NO: 65071 - DNA, 110 bp, synthetic construct
  source 1..110: mol_type = other DNA
gaatgtttttgaataacctttcaaaagcaatcgtgcaaaacgaactgtccaatcaggtgtggaccaggcgcatgagcgggctctcagctctggctgttcccggggcccaa

SEQ ID NO: 65072 - DNA, 110 bp, synthetic construct
  source 1..110: mol_type = other DNA
cggccccccatcctctccggtccctgggccaggccatcccccgcgggcctgcgcagaggtcggaacacaaaattttgctcccggcgagcaggcacacacagctccacctt

SEQ ID NO: 65073 - DNA, 110 bp, synthetic construct
  source 1..110: mol_type = other DNA
gaggtcggaacacaaaattttgctcccggcgagcaggcacacacagctccaccttctcgctccagagtgggtttttctggttttcccctttgatctcatctcaggaactg

SEQ ID NO: 65074 - DNA, 110 bp, synthetic construct
  source 1..110: mol_type = other DNA
cccctgatggtgggggggggaactcagccagcaccgatggagtcccaggtttcaaagctcctgctgcattgaggagactggtccaaatggggtgtaaggaccagtgagga

SEQ ID NO: 65075 - DNA, 110 bp, synthetic construct
  source 1..110: mol_type = other DNA
caggctctgctcttcagattaagacactaatccacgctcatctccggtcctttgaggccatttttaaaggcgattcggggccaggaagctgagacacaaaaccttgggca

SEQ ID NO: 65076 - DNA, 110 bp, synthetic construct
  source 1..110: mol_type = other DNA
ggccatttttaaaggcgattcggggccaggaagctgagacacaaaaccttgggcaggaatgacctttgaccctctggaggtgctaactaagccttcaacaggtgaagcgt

SEQ ID NO: 65077 - DNA, 110 bp, synthetic construct
  source 1..110: mol_type = other DNA
ttcccggcggatcgtcggcttccgccacacacagcgcctgtcgtttctgtctcataggcttacctgtacgagaccggctccagcactttctctcgcagactcgcaggaca

SEQ ID NO: 65078 - DNA, 110 bp, synthetic construct
  source 1..110: mol_type = other DNA
agaccgtccaccaggaggcctccgcttgtggtcttgcgggttgtgcctcatgcgttttgaagctcctgggtgaggctgggatcgttacgtcattcggatgactgggtctc

SEQ ID NO: 65079 - DNA, 110 bp, synthetic construct
  source 1..110: mol_type = other DNA
tggaccctgttcagactctgtgatggcccggggctcagccatgtagatgccaacttcagatcgttgccaaaattgtcctagtaaaggacacagtcactgctccactgtca

SEQ ID NO: 65080 - DNA, 110 bp, synthetic construct
  source 1..110: mol_type = other DNA
tgcgcttaatggtctcctcttggacgccaggaccctttctggtctttcttcgcgtggctgttgtgtagctctgagtggttcattctgtgacagtgctttgtaaaccacga

SEQ ID NO: 65081 - DNA, 110 bp, synthetic construct
  source 1..110: mol_type = other DNA
atgtgcgagctgggggcctggctgcagtggcgttcggggaagaggagctgtgcgcacagagctgccgccctgtccttctctcaacagttgaaaaaaggacagtgagatcg

SEQ ID NO: 65082 - DNA, 110 bp, synthetic construct
  source 1..110: mol_type = other DNA
gccaatgataaactaagagaaaatatattacaaggaaaagaaaatgagatatgctgcacggaatcccatgcgacagctggacactcactcccgatccctgcagcccgttc

SEQ ID NO: 65083 - DNA, 110 bp, synthetic construct
  source 1..110: mol_type = other DNA
gcacggaatcccatgcgacagctggacactcactcccgatccctgcagcccgttctaccattttcctcccagaacacctgcctagagcttttcctggtttgcgtgacagg

SEQ ID NO: 65084 - DNA, 110 bp, synthetic construct
  source 1..110: mol_type = other DNA
tcccgctcgcccggagtgagaggagattaaagccggcccttggatgccagtgccgcgggaatttggagaaacgcaccgacagtaacggcggcatttaattatgtgcagct

SEQ ID NO: 65085 - DNA, 110 bp, synthetic construct
  source 1..110: mol_type = other DNA
atgagaaccctaggagtagatcgtttaaaagactgtccttcattctgcagaagcggcggccgagccctgagaggttacgtgagtttccccagctgcacagtgggcccctg

SEQ ID NO: 65086 - DNA, 110 bp, synthetic construct
  source 1..110: mol_type = other DNA
caggaatcaagccggccaagggagcctggagaaagctctgcggggctcaggcactttccgggtctgcctgcttcttgccagaccctggggacatgagagaaatgtgaact

SEQ ID NO: 65087 - DNA, 110 bp, synthetic construct
  source 1..110: mol_type = other DNA
catgtaagttccgtgaaactccgtccgagtctgaagctgccgtgtctcatcacagaggagaaaccggcttcccggaaccctggggcgctccgcgctggctgtgggcgtcc

SEQ ID NO: 65088 - DNA, 110 bp, synthetic construct
  source 1..110: mol_type = other DNA
cggattcttttcccgtctaagttacgacagacgattgagcagagttcccgggctgtccagcaggtccttctgagttttctctggtgtgggcaggagtgcgtatatcctaa

SEQ ID NO: 65089 - DNA, 110 bp, synthetic construct
  source 1..110: mol_type = other DNA
aatcaatgcaattcaccttagcaggaaaacttctctgtatgaggctatctcaatggatgccgggaaagcatctgaaaagatcgaacattcaccctgatgaaccctctcaa

SEQ ID NO: 65090 - DNA, 110 bp, synthetic construct
  source 1..110: mol_type = other DNA
gatgccgggaaagcatctgaaaagatcgaacattcaccctgatgaaccctctcaacaaactaggaacatacgaaaacgtctcgagttgacaaagggcatctacgtgagat

SEQ ID NO: 65091 - DNA, 110 bp, synthetic construct
  source 1..110: mol_type = other DNA
tctaaggcgagtccaccggctccttcagcaagaaaatgcttagtggtcaaaatcgggtttgggacgcttggcggtttccgatcttggcaggatccacaggccctttgcaa

SEQ ID NO: 65092 - DNA, 110 bp, synthetic construct
  source 1..110: mol_type = other DNA
ttattctgcgttttcattagagtgttgttagtaccctcaggttttctctgctctgtcttgtttttctgttcaccgagagctgtcctaaaatcttccactctactggtaat

SEQ ID NO: 65093 - DNA, 110 bp, synthetic construct
  source 1..110: mol_type = other DNA
cagggggaaccatcacggcaagaagagagggcggcatcttcatcctttgccgcgaattggtgcccacggtgtgtccctagagctgcgatgtttcttctgagttttgaggg

SEQ ID NO: 65094 - DNA, 110 bp, synthetic construct
  source 1..110: mol_type = other DNA
tgagaagcaggagcaagtgcagcctctcctcactggacagtgcaagggactctgcccacaaaggaagtcaagctcggaccctccctcagccccggggcctctttgacctg

SEQ ID NO: 65095 - DNA, 110 bp, synthetic construct
  source 1..110: mol_type = other DNA
gaactgaggacagacgcctcgtgtccctctttctcctccctgcgtgacgattcgtcttgtctcactctgttagctcctattctcttgacctcaatcgaattatttctgct

SEQ ID NO: 65096 - DNA, 110 bp, synthetic construct
  source 1..110: mol_type = other DNA
cacgaccgcgaccacgtctagggagacaggatggtgcgagaagccctactgacgactgaaaatgttcgggagatgaagggagtgtgttccgagcacgatgcatgagctcg

SEQ ID NO: 65097 - DNA, 110 bp, synthetic construct
  source 1..110: mol_type = other DNA
ctgaaaatgttcgggagatgaagggagtgtgttccgagcacgatgcatgagctcgccacctgccgcgggagccgcgctgtctaaggcggaagctgggcgtcggggccctg

SEQ ID NO: 65098 - DNA, 110 bp, synthetic construct
  source 1..110: mol_type = other DNA
gtgtgcccgagaaccatgtgaattaaggaccacacacacccgagaggaggagctccttccccacagagctggcgggtcctcctcccgaaggggccgcgtccgctcaggcg

SEQ ID NO: 65099 - DNA, 110 bp, synthetic construct
  source 1..110: mol_type = other DNA
ccaataattcatgaattaactctcccaggggacttctaggaaaggctgttcagcttctaagagagatgcgctgtgtgttctccgagcaccgtggtgtctggatgagatgc

SEQ ID NO: 65100 - DNA, 110 bp, synthetic construct
  source 1..110: mol_type = other DNA
tctaagagagatgcgctgtgtgttctccgagcaccgtggtgtctggatgagatgcccggatccctgaagccatcttgtgaccaggaggggagtctgcccaaggcaaaaac

SEQ ID NO: 65101 - DNA, 110 bp, synthetic construct
  source 1..110: mol_type = other DNA
tctgaaaatacaaacaggcgggaagacaggtggacagatgcaggacaaggccacagggacacggccgtaagaacagggccactgagacaggctgcagagccccaggagcc

SEQ ID NO: 65102 - DNA, 110 bp, synthetic construct
  source 1..110: mol_type = other DNA
ttcagcagaagacggggcgtcactcacctttgcagcttcctcgataggcaatttctaactgggggtctttgcacttggcgcgttgaaactcgcagcgagacaggaaggtc

SEQ ID NO: 65103 - DNA, 110 bp, synthetic construct
  source 1..110: mol_type = other DNA
taactgggggtctttgcacttggcgcgttgaaactcgcagcgagacaggaaggtcctcccgtcggaggcgcagaggggcttctgggcggagccgccacagtccaaactgc

SEQ ID NO: 65104 - DNA, 110 bp, synthetic construct
  source 1..110: mol_type = other DNA
gcttagcctttgctcagccctgtgagctcgcccttagaaaccaccttcccagccgctgctgaacgacccgagaaggtttcaggcgaaacccaggaactgtctcccagtgg

SEQ ID NO: 65105 - DNA, 110 bp, synthetic construct
  source 1..110: mol_type = other DNA
agacgaacacgctgtgcagctgttttcgattcactggtggtgcttcaaccccactgcagtgctttccaaggtaaggtttaacgttttcaaagaaggttctgtttcgtgaa

SEQ ID NO: 65106 - DNA, 110 bp, synthetic construct
  source 1..110: mol_type = other DNA
ccgctggcccttcttctgtctcttcctccctccccacccctggctgtcctaactctacagacagagagccagggaacggatatggcagaaagaacacaaagctggatcag

SEQ ID NO: 65107 - DNA, 110 bp, synthetic construct
  source 1..110: mol_type = other DNA
ttccacgcccacccgttaagtacgaatctgcttgggggcttagcttgaaaacatcgtgtttggtcttgttaagagaaaacaatggcgcaggggagctggtgtttcttcat

SEQ ID NO: 65108 - DNA, 110 bp, synthetic construct
  source 1..110: mol_type = other DNA
agccccccatcggggagcgagtaactgcggctaagaatggaatgaccgtttccgtttccctgtcacttgctgcagactgttgttaagcatccgccgggctgttagggcat

SEQ ID NO: 65109 - DNA, 110 bp, synthetic construct
  source 1..110: mol_type = other DNA
ttccctgtcacttgctgcagactgttgttaagcatccgccgggctgttagggcataaacactgaactcgactgcgtccaaccagagtagaagcagctgttgcgtgtagtc

SEQ ID NO: 65110 - DNA, 110 bp, synthetic construct
  source 1..110: mol_type = other DNA
cggggctggaggaacatggatttggaagcagaagctcggatggagatgcagagacgcccaagctggacagcagggcgcctgtggggggcgtggcagtgctgtggcagaag

SEQ ID NO: 65111 - DNA, 110 bp, synthetic construct
  source 1..110: mol_type = other DNA
tttggaaactttggggagacgcatttccctgtctccccgcacttctcgggacccgccttccctggctcctggtcgtccctccatcttcaaagccaagggcatcttatctc

SEQ ID NO: 65112 - DNA, 110 bp, synthetic construct
  source 1..110: mol_type = other DNA
gatgagtcacagataaatagttcccaagattaccaagtaaaggccagtgttgccctctctgcccaaccccgccaccactccgattattctgaggcagacggagccatcac

SEQ ID NO: 65113 - DNA, 110 bp, synthetic construct
  source 1..110: mol_type = other DNA
ccctccaacgatgcacgagcgatccgctttctctctgtcctcaccagcattcggtgttatcgctgtggcttctgtttgagccgctgatggttgtatggtgggatctcact

SEQ ID NO: 65114 - DNA, 110 bp, synthetic construct
  source 1..110: mol_type = other DNA
gttatcgctgtggcttctgtttgagccgctgatggttgtatggtgggatctcactgtggttctgcatttctctcgtggctaatgatgttcaatataccttcatgtggttg

SEQ ID NO: 65115 - DNA, 110 bp, synthetic construct
  source 1..110: mol_type = other DNA
ctgtgatataagatgtagcaccctggcgaaccccagaagatagtgcaaccatgcggccaggctggcctggaattttggaagagtgatgggtgtttctatgaaggggagca

SEQ ID NO: 65116 - DNA, 110 bp, synthetic construct
  source 1..110: mol_type = other DNA
ggtatcagcatcgcacagcggttcaggttgaacaaaactcacagcagcgatgccaaaccctcggcataacttacatcatactcatagctcagtttctgtttgttttccat

SEQ ID NO: 65117 - DNA, 110 bp, synthetic construct
  source 1..110: mol_type = other DNA
aaccctcggcataacttacatcatactcatagctcagtttctgtttgttttccatttcaattactttcacattaaaacaagcaagaatgtagttaccttttccctgcaca

SEQ ID NO: 65118 - DNA, 110 bp, synthetic construct
  source 1..110: mol_type = other DNA
taaaaagcactcggcacatagtaagcgcttactaattattacgcattgttagcgcagcaaataaaatgcagctaatgagaatacgaatatggtgtgtctcgttagaggtt

SEQ ID NO: 65119 - DNA, 110 bp, synthetic construct
  source 1..110: mol_type = other DNA
gaactcccaattcataattttttaaagagcattttcatacactaattcaattcctttggtgcggtagccacaggcacctggaggatgtaattttgtactgtctcttaagg

SEQ ID NO: 65120 - DNA, 110 bp, synthetic construct
  source 1..110: mol_type = other DNA
ttggtgcggtagccacaggcacctggaggatgtaattttgtactgtctcttaaggcttcagccccaggactcctggatgtggcagagggtgagtgaaggggaagaggtga

SEQ ID NO: 65121 - DNA, 110 bp, synthetic construct
  source 1..110: mol_type = other DNA
cttgccaaaacaaattttgcttaaattttgcttccatctgcatcgtatccagatttcatcagacgggtgcatgtcatttcccatgatgtatttgttatgctgaaataaat

SEQ ID NO: 65122 - DNA, 110 bp, synthetic construct
  source 1..110: mol_type = other DNA
tcatcagacgggtgcatgtcatttcccatgatgtatttgttatgctgaaataaatgagctcagaatgttttagtatcaaccatgactccaataatcccaccattgttctc

SEQ ID NO: 65123 - DNA, 110 bp, synthetic construct
  source 1..110: mol_type = other DNA
acctcagttgagggaataaaaacaaatacatctgaaggttttttgtgaagctctgggttccccttcgagctggcagaggcagggagcacacccaccaagggtgttctaac

SEQ ID NO: 65124 - DNA, 110 bp, synthetic construct
  source 1..110: mol_type = other DNA
ggttccccttcgagctggcagaggcagggagcacacccaccaagggtgttctaaccaccagggatacttagaaatacgctttctgtgagtttcgttttttattttcatga

SEQ ID NO: 65125 - DNA, 110 bp, synthetic construct
  source 1..110: mol_type = other DNA
acacaagattatttgctgattaattaatactgttgagtggtgccaggcccaaggttgagggaatgaaaaggacagcaggacctctgttccaaagaggcgttctgaaattc

SEQ ID NO: 65126 - DNA, 110 bp, synthetic construct
  source 1..110: mol_type = other DNA
ggctgcagatgcaaatactgtcctcacctcccctgagactctgttgagtcctcgtcggcacaggcagggggaggcctggagctcaggcaccacaggctctcccgggcaca

SEQ ID NO: 65127 - DNA, 110 bp, synthetic construct
  source 1..110: mol_type = other DNA
ctacagctgtgctgtagatcagaaccgtggctccaattcaaccccctagcccgggaacttccatatgctacaggtgcatcctgtgtacatatatatgtaaattgagaaca

SEQ ID NO: 65128 - DNA, 110 bp, synthetic construct
  source 1..110: mol_type = other DNA
cttcagattgtaatcattgtgaggtgaaaaattagtggaattaaaccccattagttccctgagcatgcccacttttaataaacgtaaacaatcattaatcataagcccag

SEQ ID NO: 65129 - DNA, 110 bp, synthetic construct
  source 1..110: mol_type = other DNA
tccctgagcatgcccacttttaataaacgtaaacaatcattaatcataagcccagtgtaaagttatgcagggtgatttcactatctgtatttcaccctggccatggctgc

SEQ ID NO: 65130 - DNA, 110 bp, synthetic construct
  source 1..110: mol_type = other DNA
actttttccttctacatgtgttgacctttatatttattttatcaatccattatgttcttgacctttaagctgccctgaatgctttgaagaagcagacaatataagaacaa

SEQ ID NO: 65131 - DNA, 110 bp, synthetic construct
  source 1..110: mol_type = other DNA
ccactgagccacgaagggaactccttgaatagttctttcaaactggatttttctcagatgttttgaagaaagagctgtgatttccccacatttttcccccatggaaactg

SEQ ID NO: 65132 - DNA, 110 bp, synthetic construct
  source 1..110: mol_type = other DNA
tgtttccgctgcgccacaatgggaactcccaaaagccaacacatttcaaacctggtttctgttctacgccatcgtcttgccaatcacgtggctgtggagaggcgtgggag

SEQ ID NO: 65133 - DNA, 110 bp, synthetic construct
  source 1..110: mol_type = other DNA
aaacaagttgtgaaatctcgatgcagactatacagtgagggctttagaatcaggcatgtctttcagcaaaatgttagctccccattttaaaacctgtgtgcctttgagca

SEQ ID NO: 65134 - DNA, 110 bp, synthetic construct
  source 1..110: mol_type = other DNA
tcttaacgagccatatttgaccctgttgggattatgttttcctttactttatggttgaaatgcctggaggacgaaatagacgtggccattagacccctggaacagtttga

SEQ ID NO: 65135 - DNA, 110 bp, synthetic construct
  source 1..110: mol_type = other DNA
ggcacacaatagaggaaaaaacccatatgataaagaaaacacatcactagttatcagggaaatgcaaaattaaaacaagatattatttcatacccttcagatctgcatcg

SEQ ID NO: 65136 - DNA, 110 bp, synthetic construct
  source 1..110: mol_type = other DNA
agggaaatgcaaaattaaaacaagatattatttcatacccttcagatctgcatcgttttcagtgtctgatatcacttaatgattaggatctgggatacagctgttggtaa

SEQ ID NO: 65137 - DNA, 110 bp, synthetic construct
  source 1..110: mol_type = other DNA
attcaccctgaaccaggaagcaaggcctcccctgacaccgcctcctggggcctcaaccacggacttcccagccttcagcactgagagaaacacacttctgtgtttatgtg

SEQ ID NO: 65138 - DNA, 110 bp, synthetic construct
  source 1..110: mol_type = other DNA
ggagcctattggatgaggtataacagaatagtggcagggggtgggagggggagagaaagtgaacatttattgtaataattcatctatgaagtaagaatcaagtagagtga

SEQ ID NO: 65139 - DNA, 110 bp, synthetic construct
  source 1..110: mol_type = other DNA
agggggagagaaagtgaacatttattgtaataattcatctatgaagtaagaatcaagtagagtgaaaatgagaaatgcttaaagcaagaatatttggttatgtaccttgt

SEQ ID NO: 65140 - DNA, 110 bp, synthetic construct
  source 1..110: mol_type = other DNA
tgtctgttcattccctaatacttgctgtgctcatctttattctaaacagtgtgctcgcaaagttttccaacgcagagataacatagccagttcttcctaggagagcacag

SEQ ID NO: 65141 - DNA, 110 bp, synthetic construct
  source 1..110: mol_type = other DNA
cgcaaagttttccaacgcagagataacatagccagttcttcctaggagagcacaggcaggtttgaggaaaaggggtgaggcgtcatgagcaagtctcagaatcagcacag

SEQ ID NO: 65142 - DNA, 110 bp, synthetic construct
  source 1..110: mol_type = other DNA
attttcttttttgttggaacaaggcaaagtgtacatcttttaagggaacttcagagatctaaaacctcaggcccagttaactctgccatcctgtccactccaaacccttt

SEQ ID NO: 65143 - DNA, 110 bp, synthetic construct
  source 1..110: mol_type = other DNA
gtgaggtccgacaaacctgggctggagtcccagtcccttcattcagcatgtgtgtggcagaagctctgtgcctcagtgtccttctccggagaaaggctgaccagcgatgc

SEQ ID NO: 65144 - DNA, 110 bp, synthetic construct
  source 1..110: mol_type = other DNA
ggcagaagctctgtgcctcagtgtccttctccggagaaaggctgaccagcgatgcttaagtcggaatcgctttcagaacgagacctcatccacacacagcccttggcact

SEQ ID NO: 65145 - DNA, 110 bp, synthetic construct
  source 1..110: mol_type = other DNA
ccacctgcctccagagggacggttctacagcacaacttaatcccgtcccctcaacaatgggtccttccccagcgtctcctttcgccgttttccacctgctctgctccagc

SEQ ID NO: 65146 - DNA, 110 bp, synthetic construct
  source 1..110: mol_type = other DNA
aatgggtccttccccagcgtctcctttcgccgttttccacctgctctgctccagcaggatgcacctgcacggctccttgacgggctccttgacggtcgagagcctttcca

SEQ ID NO: 65147 - DNA, 110 bp, synthetic construct; identical to SEQ ID NO: 65145
  source 1..110: mol_type = other DNA

SEQ ID NO: 65148 - DNA, 110 bp, synthetic construct; identical to SEQ ID NO: 65146
  source 1..110: mol_type = other DNA

SEQ ID NO: 65149 - DNA, 110 bp, synthetic construct
  source 1..110: mol_type = other DNA
ccattcactcatttaacaattatttatgaggacctactaagtgccaaaccctcagtgaagccctcacctcctacttcacaggagaaatgaagctgccagccaggggtccc

SEQ ID NO: 65150 - DNA, 110 bp, synthetic construct
  source 1..110: mol_type = other DNA
tgaagccctcacctcctacttcacaggagaaatgaagctgccagccaggggtccctcggggtccttgcaccgatgctggaacgtcactgcacaccggccctccccttcct

SEQ ID NO: 65151 - DNA, 110 bp, synthetic construct
  source 1..110: mol_type = other DNA
gtgggcactgcccaggctaagggaactctcatttacctgaactttggaacttgtcatcttcaggctaaaaagagacattggacaccttttaagaaggaacagcaaaggca

SEQ ID NO: 65152 - DNA, 110 bp, synthetic construct
  source 1..110: mol_type = other DNA
tttgggagatggactttccatggcaggtacgggatccgggaggaatgtgccaggaggaacatctggcctgtggttaaacaccagttcccagcctccaacacggaagccac

SEQ ID NO: 65153 - DNA, 110 bp, synthetic construct
  source 1..110: mol_type = other DNA
aaccaaacacttagcagcaacaaacttccggggagggcgcgagccgttaagtagaggacgcttgttgtcggcgtccggcgtctcgggcacgcaaggcagcatgtgttctc

SEQ ID NO: 65154 - DNA, 110 bp, synthetic construct
  source 1..110: mol_type = other DNA
ctgatcttccgactccaattttccttattttctaggccagtctcaggtaagctattgtgttacatgcaaccggaagcatcccgattcatccaggttgacttcctggtagc

SEQ ID NO: 65155 - DNA, 110 bp, synthetic construct
  source 1..110: mol_type = other DNA
atggtgaagtccacagtcttattggcaatactgatacacagtgtctctaagtcactatgctcaaggttaagagcgatgcatattccatctttacattttactggaatttt

SEQ ID NO: 65156 - DNA, 110 bp, synthetic construct
  source 1..110: mol_type = other DNA
tatgctcaaggttaagagcgatgcatattccatctttacattttactggaattttacatgttcaattcatgattttaaatctctaggttttcattcctccaaactgtctg

SEQ ID NO: 65157 - DNA, 110 bp, synthetic construct
  source 1..110: mol_type = other DNA
gcttaagtcctaatttcatcccaaataaaacttaacgctcaactttcaggctgtgcatttttttagttgacaaatgctaaacacacatgcattgttctcctgggaccctg

SEQ ID NO: 65158 - DNA, 110 bp, synthetic construct
  source 1..110: mol_type = other DNA
catttttttagttgacaaatgctaaacacacatgcattgttctcctgggaccctgccattcacgctggctggtggttctgagacctccatgctgtagggaagcccaaact

SEQ ID NO: 65159 - DNA, 110 bp, synthetic construct
  source 1..110: mol_type = other DNA
atttacattaccatactggttgtcaaacattttgaatagcgctgcagctctggggcaaaaccttgcaaagcccctgtgccctgagcatcagaattctctctcctctggac

SEQ ID NO: 65160 - DNA, 110 bp, synthetic construct
  source 1..110: mol_type = other DNA
ggttgtcgctgtgttttaaagtcatgtcagcattgactggaccccattccacactcagtttggtgaccaagtgctactgaacaggaagtctgaggtggcctctagtgtcc

SEQ ID NO: 65161 - DNA, 110 bp, synthetic construct
  source 1..110: mol_type = other DNA
cttagaaaagatgtccggaacctactcagaacctgttcactcttgctttgcacataattctaagacacacagctagtgggcctctggggccaccacagagtagccgagga

SEQ ID NO: 65162 - DNA, 110 bp, synthetic construct
  source 1..110: mol_type = other DNA
gagtcaagggggccgtaaccacacatgcctgcagacgtggggggcggcgtcccgttcagctgcctggtcccctaagcaattcctctaggacacggggccggccctggggg

SEQ ID NO: 65163 - DNA, 110 bp, synthetic construct
  source 1..110: mol_type = other DNA
gctgagtccagagtgagtatgtattactttcctaattcaaaggaagagacattttaatttattttttaaacaagagctgaacacaactagtgctctcgtagggtgtgggc

SEQ ID NO: 65164 - DNA, 110 bp, synthetic construct
  source 1..110: mol_type = other DNA
aatttattttttaaacaagagctgaacacaactagtgctctcgtagggtgtgggctgaaggccagagggttccgagttacagaagagaggggcacacgcgtgctctgaaa

SEQ ID NO: 65165 - DNA, 110 bp, synthetic construct
  source 1..110: mol_type = other DNA
gcagcaggcaaacaagagacggaagaaataaagtggcttctgtgtttttcagtttcctcggcacacgtcccagtcactgaagcgaggctcagcttccttcggactgaggg

SEQ ID NO: 65166 - DNA, 110 bp, synthetic construct
  source 1..110: mol_type = other DNA
cctcggcacacgtcccagtcactgaagcgaggctcagcttccttcggactgaggggccactgctgtcttgcttttctgtgacatctccctgacttaaaaaagaacctcag

SEQ ID NO: 65167 - DNA, 110 bp, synthetic construct
  source 1..110: mol_type = other DNA
gctgcagaccgggaggggatggagcagcaagagccaccagggctccccactgctggcagggacactgcggctctacccggacactgtatccagtcctgtcaggttcctct

SEQ ID NO: 65168 - DNA, 110 bp, synthetic construct
  source 1..110: mol_type = other DNA
tgtcacttgcaccccactgcaaaatgtgaaacatcctaagtccaaccaccgtagtttggggaccatctgtacctgcagtggcggccagcctggcccagggctgcacaaga

SEQ ID NO: 65169 - DNA, 110 bp, synthetic construct
  source 1..110: mol_type = other DNA
ttggggaccatctgtacctgcagtggcggccagcctggcccagggctgcacaagaggagcgggaggaagagggtgggcttcagagattgctgctgggtgggccgggggca

SEQ ID NO: 65170 - DNA, 110 bp, synthetic construct
  source 1..110: mol_type = other DNA
gtctcttaggctactctcttattctttctagggaagcgtaagcaacctcagataaaatgagcaagataatcccgaagcgccactgccacttgcagctgggtaaaaatggt

SEQ ID NO: 65171 - DNA, 110 bp, synthetic construct
  source 1..110: mol_type = other DNA
aatgagcaagataatcccgaagcgccactgccacttgcagctgggtaaaaatggttcgcctgaaacccggagctcctatcagttatccaagacagggaggaccctggact

SEQ ID NO: 65172 - DNA, 110 bp, synthetic construct
  source 1..110: mol_type = other DNA
agcaaaagggcgcttgggagacctcgctccattctcgaagagagtagcagtaagagcagacaaaactactggggagcccaacgaacagaagagaagcagctggactgcga

SEQ ID NO: 65173 - DNA, 110 bp, synthetic construct
  source 1..110: mol_type = other DNA
gcagacaaaactactggggagcccaacgaacagaagagaagcagctggactgcgaaggggttgaaaaatgggagacaggtgaatacaagcacaatggttacagatgagac

SEQ ID NO: 65174 - DNA, 110 bp, synthetic construct
  source 1..110: mol_type = other DNA
tgctctgtttcactaaaatccactcccccacccaaaaaaaaaaaaaacaaaaaaaaaaagggacaacagactgccgacccacgtggctgctatttgcactttgttaaaat

SEQ ID NO: 65175 - DNA, 110 bp, synthetic construct
  source 1..110: mol_type = other DNA
aaaagggacaacagactgccgacccacgtggctgctatttgcactttgttaaaatgagccagtcaacgatgccaaaaatgccaaggcaggtacagtggagcaggcttcgg

SEQ ID NO: 65176 - DNA, 110 bp, synthetic construct
  source 1..110: mol_type = other DNA
ttccacaggtgcaaaccttgcggcaaactacctttagtgtctggaggaggaaagggggagaggccagccttgggagtcggtgctcccaggaggcaatgtttggagcacac

SEQ ID NO: 65177 - DNA, 110 bp, synthetic construct
  source 1..110: mol_type = other DNA
actgaatgctattttaacccttttagttacagggaaagccaggcccaaaagggaaagagcggtttttggccacccaaaagtggggtggacttccctccctcgccctggga

SEQ ID NO: 65178 - DNA, 110 bp, synthetic construct
  source 1..110: mol_type = other DNA
agagcggtttttggccacccaaaagtggggtggacttccctccctcgccctgggaagtcaagcttccaggcttttctagaggagggcctggagcaagggctgccttcgga

SEQ ID NO: 65179 - DNA, 110 bp, synthetic construct
  source 1..110: mol_type = other DNA
gtctccagtgaacaaaagattctcaaaatttgaaacagcctgaaggtaaacattgaatcaagggtatggccaaaagatctttataaagatttcagaagaatttaagggag

SEQ ID NO: 65180 - DNA, 110 bp, synthetic construct
  source 1..110: mol_type = other DNA
aatcaagggtatggccaaaagatctttataaagatttcagaagaatttaagggagtgcctaagaaaccctctcagctggacaaaatggcttctcacagttctgtgcccct

SEQ ID NO: 65181 - DNA, 110 bp, synthetic construct
  source 1..110: mol_type = other DNA
aattcgctcagtttttttccctgtctaccttttggaagctgttttgatgtaaccgggaagtatagtaaacagttgactgtcgcagatatttaccggggtacctgtctggg

SEQ ID NO: 65182 - DNA, 110 bp, synthetic construct
  source 1..110: mol_type = other DNA
tgtgtcctattggtccccaccagctgcagggccaagcccagaatcaacatgggaggactacccaaaggtggcaggaagcggggccaccagatgaatagtctgctatggat

SEQ ID NO: 65183 - DNA, 110 bp, synthetic construct
  source 1..110: mol_type = other DNA
ttacaacaactttccagaatatctgtcagggcaaaagtgcccagaatcacttaggggggctcccctatgctcactttttccagctggcatcggagcccagggacccccct

SEQ ID NO: 65184 - DNA, 110 bp, synthetic construct
  source 1..110: mol_type = other DNA
tagctgctgtgcatctttctcattgtggcttcttcagtgaacaatgcccaaggctgccgtattaagcaaaaccaaaatgaacatgaatagcaaatctcattcttgttaaa

SEQ ID NO: 65185 - DNA, 110 bp, synthetic construct
  source 1..110: mol_type = other DNA
gccgtattaagcaaaaccaaaatgaacatgaatagcaaatctcattcttgttaaacgagagatgggtacacaccctggtatactttgtgctatagctgtgggatgctgtg

SEQ ID NO: 65186 - DNA, 110 bp, synthetic construct
  source 1..110: mol_type = other DNA
ctaaaatttcttttcttctttctttttcttttctttttttttttttacaaagtggggagattggacttgctgacacttcctaggagctgtcagcaaatggagcaaatgga

SEQ ID NO: 65187 - DNA, 110 bp, synthetic construct
  source 1..110: mol_type = other DNA
gagctactataatagctatcatagctgttgtaatagctgcaaatccttgcacagaagggtctgaaattcaggctagagtttggaggtaactgacactgaagctgccagtc

SEQ ID NO: 65188 - DNA, 110 bp, synthetic construct
  source 1..110: mol_type = other DNA
attctttcccagattcatggactacatgcttagttcatttactttcattatttccttttaaaaaatatagttaggccatacattaattaagccacacttggctctatttc

SEQ ID NO: 65189 - DNA, 110 bp, synthetic construct; identical to SEQ ID NO: 65188
  source 1..110: mol_type = other DNA

SEQ ID NO: 65190 - DNA, 110 bp, synthetic construct
  source 1..110: mol_type = other DNA
ggctgcccagtggatgcagaaagttgggcaacatctctggcctctctccactcaaagccactagatgccagtagcaatccctgaggtgtgagtgtcaaaaatgtctctag

SEQ ID NO: 65191 - DNA, 110 bp, synthetic construct
  source 1..110: mol_type = other DNA
gctatgaagttttaagagtaatcataaaaaagaaatggaagcaagaataatagtatgatggattacaagaaattcgaccaattgcaaatgaggtaggaaggagaaaaaag

SEQ ID NO: 65192 - DNA, 110 bp, synthetic construct; identical to SEQ ID NO: 65191
  source 1..110: mol_type = other DNA

SEQ ID NO: 65193 - DNA, 110 bp, synthetic construct
  source 1..110: mol_type = other DNA
tttattttttaaattatagcctacacatcgtgcagacctctccctgagacatattggcctggtacataaacagctgtgtgctccaggggccgtatatattttactctgga

SEQ ID NO: 65194 - DNA, 110 bp, synthetic construct
  source 1..110: mol_type = other DNA
gaattgttatgtataaaagctctttaaagctctgacttctcctttctgttgactttgaatctcccacagtacccagttaaagtagaaaatattctacagggagttaattt

SEQ ID NO: 65195 - DNA, 110 bp, synthetic construct
  source 1..110: mol_type = other DNA
cttctcctttctgttgactttgaatctcccacagtacccagttaaagtagaaaatattctacagggagttaatttgtaagtgttgaataaataattttttctgaaagtta

SEQ ID NO: 65196 - DNA, 110 bp, synthetic construct
  source 1..110: mol_type = other DNA
agaagacaaagtcgggctggaaagaatgcaagaaacaaaaggactcctatacacagtgggggctgagaacacagctgaataggccctggtagtgggcgaggacactgctt

SEQ ID NO: 65197 - DNA, 110 bp, synthetic construct
  source 1..110: mol_type = other DNA
gtgggggctgagaacacagctgaataggccctggtagtgggcgaggacactgcttcccaggggagaagctcacgctgggccccctgaggctaccattctcctgatgatgg

SEQ ID NO: 65198 - DNA, 110 bp, synthetic construct
  source 1..110: mol_type = other DNA
gatctgtggtcaaacattttattctgggtgtttctatgacagtgttttgggatgagattaacatgtagatggtagactgaatgaataaagcagactgcactcccatgctt

SEQ ID NO: 65199 - DNA, 110 bp, synthetic construct
  source 1..110: mol_type = other DNA
ctcaacagtaccttgaccaggtgggctaactggaaaaggcattcgtttgagctttagcaaaaatgactttggcccccgcttccccaccaatgagctatgtgtcttcaaac

SEQ ID NO: 65200 - DNA, 110 bp, synthetic construct
  source 1..110: mol_type = other DNA
agcaaaaatgactttggcccccgcttccccaccaatgagctatgtgtcttcaaactccttgagtcttagtttcttgatttttaaaaagagagggagtcctctctagcttt

SEQ ID NO: 65201 - DNA, 110 bp, synthetic construct
  source 1..110: mol_type = other DNA
accctggaaatgcagggtcaccccccgttttcccacagctcctaagaaagcccttccctacatgaaacccagaggggtttccctccacttctactcattggtcctggctc

SEQ ID NO: 65202 - DNA, 110 bp, synthetic construct
  source 1..110: mol_type = other DNA
ccctacatgaaacccagaggggtttccctccacttctactcattggtcctggctctttcctcaaaaactgaataagtgggcctcatctcccctgttcccttcacacagga

SEQ ID NO: 65203 - DNA, 110 bp, synthetic construct
  source 1..110: mol_type = other DNA
aacgaagtggttcccatccaccagctttaccgtgagaagagcggaaggtgctctgctcagaggggagaacaacatatgttttgtgatgggtgaaaacattttgaaatcat

SEQ ID NO: 65204 - DNA, 110 bp, synthetic construct
  source 1..110: mol_type = other DNA
taactctaaaacaaggacgagaataactctgtacataggttgctataaggattgtaatgaaatcatttatgtcaggtataaaccacccagcaccacatgcctacacacac

SEQ ID NO: 65205 - DNA, 110 bp, synthetic construct
  source 1..110: mol_type = other DNA
catttgggtacgtcgaagagcaggggctgcagcgtttaaacactcttagtgggtacatcgaaagcaagttttcctcttctgtgtgcagttgtaactacgtaatgcaagag

SEQ ID NO: 65206 - DNA, 110 bp, synthetic construct
  source 1..110: mol_type = other DNA
catcgaaagcaagttttcctcttctgtgtgcagttgtaactacgtaatgcaagagcaaacatcttttaaatggaactcttggagttcccgtcctggctcagtggttaacg

SEQ ID NO: 65207 - DNA, 110 bp, synthetic construct
  source 1..110: mol_type = other DNA
ggtggaagaacgctccagtttgacggtgtttcccagtttgggcagcacccttgttcgtgcttgcacgagcttctcggggggcaagtgcttcttttgtttttgtttgcctg

SEQ ID NO: 65208 - DNA, 110 bp, synthetic construct
  source 1..110: mol_type = other DNA
cgtgcttgcacgagcttctcggggggcaagtgcttcttttgtttttgtttgcctggttgatgcaagtcagtgcatgagcccagtgaactgggctgttccctgatgagaga

SEQ ID NO: 65209 - DNA, 110 bp, synthetic construct
  source 1..110: mol_type = other DNA
aaatagtcttgcttactagctcctgaattttggaggctatagaacttcctggaaatactcagtttctttaagggggacctggaataatatcttctaaatgtgtccaattt

SEQ ID NO: 65210 - DNA, 110 bp, synthetic construct
  source 1..110: mol_type = other DNA
ttcctggaaatactcagtttctttaagggggacctggaataatatcttctaaatgtgtccaatttatttaaataagatagtgcatacaacaagtctactagtataatgtc

SEQ ID NO: 65211 - DNA, 110 bp, synthetic construct
  source 1..110: mol_type = other DNA
catactaagaataatcagcctattaaccctaggatactgggctggatcccttgcgaacaatgttaacatatattacccttagagatggtgattgataccagacagactgg

SEQ ID NO: 65212 - DNA, 110 bp, synthetic construct
  source 1..110: mol_type = other DNA
tgaggtctccctgtgtctccaactcctcagccctggagccaccattctgcttttggtttctaagagttacacttttttaaattccatgtataagttatatcatgtgctgt

SEQ ID NO: 65213 - DNA, 110 bp, synthetic construct
  source 1..110: mol_type = other DNA
ggaaatcagaccttcaattgacattaagtattgccaaaaaggatgtcagcctcatgtcaaagagctgtccccaaaagtaagtcttttccataggaagttaaaagaaaaaa

SEQ ID NO: 65214 - DNA, 110 bp, synthetic construct
  source 1..110: mol_type = other DNA
aagtaccgcagtttgcctttgtctgttctgactgacatttggatttattgatccaagctactggtctgaggtggtggcctgggtgggcaatgattagaattagttttgtg

SEQ ID NO: 65215 - DNA, 110 bp, synthetic construct
  source 1..110: mol_type = other DNA
aaggcgaaacccaggaaggggaacagcttttaaagggatggtgattcattctgctgtggagaggtcgaatttgagtcatgtgtgagccactccagtgtagaaatctgaaa

SEQ ID NO: 65216 - DNA, 110 bp, synthetic construct
  source 1..110: mol_type = other DNA
acagaattttttgaaaggttcagaagagttaaagaaaccaaacacaataccaggatatacacaccctcttcactcccacccgatcccatcacataagacaaattttccag

SEQ ID NO: 65217 - DNA, 110 bp, synthetic construct
  source 1..110: mol_type = other DNA
tatacacaccctcttcactcccacccgatcccatcacataagacaaattttccagttttgaatgatagagtactttagacatcagcaagtattttattcctattggaaaa

SEQ ID NO: 65218 - DNA, 110 bp, synthetic construct
  source 1..110: mol_type = other DNA
ctcaatacatgagtgtcagtgagaaagaaacatttaaaactcaaatgatgccctgtagtcttgtataggagtactggaactacaagtgctagtgtaggaggagtatacta

SEQ ID NO: 65219 - DNA, 110 bp, synthetic construct
  source 1..110: mol_type = other DNA
ctgagaacgtggctggcccacatcgagtcagagctggccaagccgatagtctacgattcctgcaactccgaagaaatacagcgaaagctgaatgagcagcaggtaaaata

SEQ ID NO: 65220 - DNA, 110 bp, synthetic construct
  source 1..110: mol_type = other DNA
atctccttctagacaccttggtccttcccttatagccaccaagaaacagaatctttttcattcatagggtcctggagtacacccaaggtcatacacactttatcacacag

SEQ ID NO: 65221 - DNA, 110 bp, synthetic construct
  source 1..110: mol_type = other DNA
aaaaaaataaatacccatttctccagaaatcttctggacggctggataaaaattcttctccttattttctctgtaaaaggtcattttagagagatcaattttaacaatac

SEQ ID NO: 65222 - DNA, 110 bp, synthetic construct
  source 1..110: mol_type = other DNA
ccatatacaacttgtagataacaagttcatagcttaagcaagttgaactcagactgtaaaaatacttttcctttggcatagttccctggataaaaagagatacccagtca

SEQ ID NO: 65223 - DNA, 110 bp, synthetic construct
  source 1..110: mol_type = other DNA
atcctctctcatctccaaaggcctaggagccctacattcatcttgctctccaaacagcagaaacagtagagctgcagtatttacagggctgctaagacgcttcaaccccc

SEQ ID NO: 65224 - DNA, 110 bp, synthetic construct
  source 1..110: mol_type = other DNA
gtgatgtatgtgccaaggctacatcttcatgctacccaatgagagatcaatgatattaatattggcctaaaaaccataactaagaagtgtagatagtaacataggagcct

SEQ ID NO: 65225 - DNA, 110 bp, synthetic construct
  source 1..110: mol_type = other DNA
ccttgtttgaacctttgaggtgttttgaagaaaactcacatgctggctttgcattcggagtcctccctgtagggcgacaagcatcacaggcatttgagccccttgtaacc

SEQ ID NO: 65226 - DNA, 110 bp, synthetic construct
  source 1..110: mol_type = other DNA
gagaaaaggcacctgtcaacgaaggaaggacgggggccagccagagctgttgggccatcctaagggacatccagaaatgcccccttctatgtgggggaaaaaaaccccaa

SEQ ID NO: 65227 - DNA, 110 bp, synthetic construct
  source 1..110: mol_type = other DNA
cccgagcgtaggaaacgacagagcttgatactttccccccttttcaacatcccagtagcactgaaacagtgcaattctagatagaaattatcttgcagactattattttc

SEQ ID NO: 65228 - DNA, 110 bp, synthetic construct
  source 1..110: mol_type = other DNA
tagcactgaaacagtgcaattctagatagaaattatcttgcagactattattttcccagggccactaaacaaagtaacacaaattggaaggcgttgaataacgaaattta

SEQ ID NO: 65229 - DNA, 110 bp, synthetic construct
  source 1..110: mol_type = other DNA
tctcgggcctccatcacctcctagccttgcaagtcctaggtaagctagtggggcgagtgaggaaagtttgaagaggacaaggtcactggtgccaccccgggggggggggg

SEQ ID NO: 65230 - DNA, 110 bp, synthetic construct
  source 1..110: mol_type = other DNA
agtgaggaaagtttgaagaggacaaggtcactggtgccaccccggggggggggggggctggcttcatggctctgtaacctgcaactttcaccatggtcatctgtctgaga

SEQ ID NO: 65231 - DNA, 110 bp, synthetic construct
  source 1..110: mol_type = other DNA
cagcattagacacttttgctgttataacaaaggtcgggcagatgggagttggtagatttggtggcaggaagtcggctggtacgttctcaggtgagtgctattttctctgg

SEQ ID NO: 65232 - DNA, 110 bp, synthetic construct
  source 1..110: mol_type = other DNA
atttggtggcaggaagtcggctggtacgttctcaggtgagtgctattttctctgggaagtgagacaagatggtcttctgaacatgctgggcaagaatgagcactgggaag

SEQ ID NO: 65233 - DNA, 110 bp, synthetic construct
  source 1..110: mol_type = other DNA
aaatgttccagtctcctactctcctctctccactctgcctcttctttctagcaccctctcaagctctctctctggcacatctctctctgctgctctgcctgtggctctgt

SEQ ID NO: 65234 - DNA, 110 bp, synthetic construct
  source 1..110: mol_type = other DNA
cctggctctctgctgggacaccccccccccttcctcaggagcagcccctacaggctctccacccccccgcccaggacccgggttggattctgctccaggcctttcctccc

SEQ ID NO: 65235 - DNA, 110 bp, synthetic construct
  source 1..110: mol_type = other DNA
tctccacccccccgcccaggacccgggttggattctgctccaggcctttcctcccatagccgacatggcacgttcctagaaaggttaggtgctggctctcgctgggtgct

SEQ ID NO: 65236 - DNA, 110 bp, synthetic construct
  source 1..110: mol_type = other DNA
aaggtgaggtctgcctatgacatcctgaaggagacaaagcatctctggctgcatatttggtaggaaaggtaaagagccttatagggcggggcagaggctgaagatgatgg

SEQ ID NO: 65237 - DNA, 110 bp, synthetic construct
  source 1..110: mol_type = other DNA
aatcggagcagatgtccctgcttccgttcctgggtggatgtcgcatccagggcgtcaggacaatgtctgggacacagctggagtgcgtgttactttagagccggccttcg

SEQ ID NO: 65238 - DNA, 110 bp, synthetic construct
  source 1..110: mol_type = other DNA
tccaaaacactcttggatttgggaaatgtgctaatgactaacgctgtacattgattgattgattggttgctttttagggccacacccacggcatgtggaagttcccaggc

SEQ ID NO: 65239 - DNA, 110 bp, synthetic construct
  source 1..110: mol_type = other DNA
ggaggattgaggaagagagacacgtaacaaattgtagctagacactgtgccaggtatactagaaataatgtttatagggtacattgggatcagcaaaaaggggatctctg

SEQ ID NO: 65240 - DNA, 110 bp, synthetic construct
  source 1..110: mol_type = other DNA
tgttttaggcactttataactttagtaaaaggatgcatataacaaggaacaagtttctttaaacattctggagctacttgaaacttggtttcttgtcctggcgtttcctg

SEQ ID NO: 65241 - DNA, 110 bp, synthetic construct
  source 1..110: mol_type = other DNA
ttgcagagaacatttataaactctattccatccgtttcagctgaccacagaaccctctcccgcccttttatttatctccctcttccatcatgctgctatatatttttgga

SEQ ID NO: 65242 - DNA, 110 bp, synthetic construct
  source 1..110: mol_type = other DNA
tcaaattagactgccagttttcacaagtaaataaagaaaggctaatggcctgtgtttgcagagagaaaaagtatatgttttgctgtgtatttaagagacaaggttatagc

SEQ ID NO: 65243 - DNA, 110 bp, synthetic construct; identical to SEQ ID NO: 65242
  source 1..110: mol_type = other DNA

SEQ ID NO: 65244 - DNA, 110 bp, synthetic construct
  source 1..110: mol_type = other DNA
gtctctgggttctacgccaccgggaaccacacctgcttaaatgttctggctctcccttgagatgctaagctaccagttctctctgccaaaactcatctcaggcaagatgc

SEQ ID NO: 65245 - DNA, 110 bp, synthetic construct
  source 1..110: mol_type = other DNA
gaatgatgtgatcaagtatgaccttttcttaatatcgctgcctccttggagcttgctaacaggacaaagacagggtgacactattcagcaaaaactatcctgtaggaaag

SEQ ID NO: 65246 - DNA, 110 bp, synthetic construct
  source 1..110: mol_type = other DNA
acctgaaagcaatgaaattcttatccaccctccatgggtccagaggccaccctaaccccccacaccccacttctacagatttggaaatgccgtggcttacatatccctac

SEQ ID NO: 65247 - DNA, 110 bp, synthetic construct
  source 1..110: mol_type = other DNA
aaacgtaaattttatataactgatgtcttgagcctccttctcactggtatgggggttctagggttggaggatgaagagtaggggaactactgactttccaaataagtgag

SEQ ID NO: 65248 - DNA, 110 bp, synthetic construct; identical to SEQ ID NO: 65247
  source 1..110: mol_type = other DNA

SEQ ID NO: 65249 - DNA, 110 bp, synthetic construct
  source 1..110: mol_type = other DNA
ccctgccctatgtcctcccagcctagtcctcagctcctctcctggggaataagcaaaccgtagtgctactaacttatctctgcgcccctctctggccaggactggacttg

SEQ ID NO: 65250 - DNA, 110 bp, synthetic construct
  source 1..110: mol_type = other DNA
aaccgtagtgctactaacttatctctgcgcccctctctggccaggactggacttgtgccctcacctgtacccaggtgctcacactctcttagctgaagcccatcgcactt

SEQ ID NO: 65251 - DNA, 110 bp, synthetic construct
  source 1..110: mol_type = other DNA
tgtaaaggaattgctggcgtgaattatctgtagggaaaacacttctggcttctggaaaagaaaggaaaaggttaccaaagaagaaaacttaccataatccatactcacat

SEQ ID NO: 65252 - DNA, 110 bp, synthetic construct
  source 1..110: mol_type = other DNA
cttttgggagttggaggggccaggaggggagagcgtgtacccctatatctcagtgcacacaccctctctgcctgcatttcaaacttctctactaagcgcctcgacatggg

SEQ ID NO: 65253 - DNA, 110 bp, synthetic construct
  source 1..110: mol_type = other DNA
cacacaccctctctgcctgcatttcaaacttctctactaagcgcctcgacatgggcttgtggcttcaggatgacaacgttaacagtttctcacaccttctaatacaactc

SEQ ID NO: 65254 - DNA, 110 bp, synthetic construct; identical to SEQ ID NO: 65252
  source 1..110: mol_type = other DNA

SEQ ID NO: 65255 - DNA, 110 bp, synthetic construct; identical to SEQ ID NO: 65253
  source 1..110: mol_type = other DNA

SEQ ID NO: 65256 - DNA, 110 bp, synthetic construct
  source 1..110: mol_type = other DNA
gcttacttaagcctcaatgtacacagtttttcttggaggtcagtcatgtaggcatgtagctcttataaccctaatcagctactcggtctccaacttcccaaagtacaaat

SEQ ID NO: 65257 - DNA, 110 bp, synthetic construct
  source 1..110: mol_type = other DNA
tgggcgatgccaacaaactgaaagcatcacatgcagttctcatggtaagaccaagtttttaaaagacattttagggttacatagtatgttcagtctatggacaatggttt

SEQ ID NO: 65258 - DNA, 110 bp, synthetic construct
  source 1..110: mol_type = other DNA
cttaaccattaggccactagggaactcctcctcttgacagttagaattacctgtccatccttgaaatgtttgttgtgtgcaggcaaataaggactcttgactgatctggc

SEQ ID NO: 65259 - DNA, 110 bp, synthetic construct
  source 1..110: mol_type = other DNA
tttaacagttcacttgatttttttttttcttttttggttcaccctgaaagctcgtttttgtgtggtgacatagggaaaatagcacctcacgccatccgatcacatttaca

SEQ ID NO: 65260 - DNA, 110 bp, synthetic construct
  source 1..110: mol_type = other DNA
tcaagtgtagacgtgggggaggaaaatggcgagaggttggatggagcagtgagcagagtcctccagggcacctctggcttgatgtggagaatagatagtaataatgtagc

SEQ ID NO: 65261 - DNA, 110 bp, synthetic construct
  source 1..110: mol_type = other DNA
gagtcctccagggcacctctggcttgatgtggagaatagatagtaataatgtagcaaactatattctaatttttaactccacactccctctacattttaccacgtgactg

SEQ ID NO: 65262 - DNA, 110 bp, synthetic construct
  source 1..110: mol_type = other DNA
ttagaaagaagaaaacagggcttgcccaaactttgatacccatcggaatctaaattgagcttttaaaatatagaggcctgggacttctgcctgaaatatggaatcccagt

SEQ ID NO: 65263 - DNA, 110 bp, synthetic construct
  source 1..110: mol_type = other DNA
tgagcttttaaaatatagaggcctgggacttctgcctgaaatatggaatcccagttggcgtagacccaaagcctctgcatttttaagatccacaagagatacatgcagac

SEQ ID NO: 65264 - DNA, 110 bp, synthetic construct
  source 1..110: mol_type = other DNA
tcatttttccaaaggtagtgctacctgggcaatgacctatcaggaattcagcatccctccaagcttaggaactgactgagacttgaatgtggaaaaagggcttcaatgtc

SEQ ID NO: 65265 - DNA, 110 bp, synthetic construct
  source 1..110: mol_type = other DNA
gagaaaaactgactgtcttagggattcagatcactataagaaaaattgcaactcagaaaagtaagttggctacaattctgatgttaaaatagccagttttgtccaaaatt

SEQ ID NO: 65266 - DNA, 110 bp, synthetic construct
  source 1..110: mol_type = other DNA
ttgcaactcagaaaagtaagttggctacaattctgatgttaaaatagccagttttgtccaaaattttcaaagagagcaatatgtcataaggagatctgacacttgaaaat

SEQ ID NO: 65267 - DNA, 110 bp, synthetic construct
  source 1..110: mol_type = other DNA
tccactgacattaccgtcaagaacatcatccagttcttagctgccctgctcctttgcaagagggagtgttgtcacccctcctatcgtgaattccgtcaatattctacagt

SEQ ID NO: 65268 - DNA, 110 bp, synthetic construct
  source 1..110: mol_type = other DNA
gcaagagggagtgttgtcacccctcctatcgtgaattccgtcaatattctacagtcttgattttactctcactcctctgatggattgtcgaagtgtccttcaccagctcg

SEQ ID NO: 65269 - DNA, 110 bp, synthetic construct
  source 1..110: mol_type = other DNA
ttaacccaccgaatgaggccagggattgaatccgcgtcctcacagagacaacattgggtccctaacctgcttagccaccatgagacttccaaggacagctttcaatccag

SEQ ID NO: 65270 - DNA, 110 bp, synthetic construct
  source 1..110: mol_type = other DNA
gggtccctaacctgcttagccaccatgagacttccaaggacagctttcaatccagggatccagtgttcaattccatgctgaactagctatgggaaccactaaattcccca

SEQ ID NO: 65271 - DNA, 110 bp, synthetic construct
  source 1..110: mol_type = other DNA
tgctgtgagggagcaggtttgaggagatgatgagctcagtttggacacgttgcgtttgaggtctgtaagatatccaagtggagatatcctgaaggtagttacatgggttt

SEQ ID NO: 65272 - DNA, 110 bp, synthetic construct
  source 1..110: mol_type = other DNA
ctgtgtcgaaaaacttgagacttgagcatcataacatttttacatgaaggaaaggtaagagttacaatttgcatgttttaaaaacagctttatttccccctctattaatt

SEQ ID NO: 65273 - DNA, 110 bp, synthetic construct
  source 1..110: mol_type = other DNA
cttagggaggcctgtaccactcacgtacacttcagttaatcagcagttgagccctctgccaccatgcagagcacgttttctcatggacttgtatgacgatcttaccatta

SEQ ID NO: 65274 - DNA, 110 bp, synthetic construct
  source 1..110: mol_type = other DNA
ctgccaccatgcagagcacgttttctcatggacttgtatgacgatcttaccattatttaaagatagtgatcgcatgctccgtaggtattcttttcttcaggcctaatatt

SEQ ID NO: 65275 - DNA, 110 bp, synthetic construct
  source 1..110: mol_type = other DNA
tattctctgttgaattacctgtcgctgaataatatatggcacttgctacagaaatcagactcctccaccccaaatcatagctggaaggtgaaacaggacaaagaggttat

SEQ ID NO: 65276 - DNA, 110 bp, synthetic construct
  source 1..110: mol_type = other DNA
ttgattctctaactagacactaggctctcaaatctcagcctgctttcttatctgcagaagaaaccacacacagtttgatctgtttcatttactatggacattgctcccat

SEQ ID NO: 65277 - DNA, 110 bp, synthetic construct
  source 1..110: mol_type = other DNA
agaagaaaccacacacagtttgatctgtttcatttactatggacattgctcccatgaatgaaattccacagcagtggccagagagatacttggaggtgagttcatctgaa

SEQ ID NO: 65278 - DNA, 110 bp, synthetic construct
  source 1..110: mol_type = other DNA
atattatatctacatttttccaaggagagtgatgctactcttttccctctggtcacagaagtctttcctttgtagagaccataattctgttattctcattagtagaaaag

SEQ ID NO: 65279 - DNA, 110 bp, synthetic construct
  source 1..110: mol_type = other DNA
cagaagtctttcctttgtagagaccataattctgttattctcattagtagaaaagcttttcttatcttcatgctatctttatggatatttcagtaattctacccattctg

SEQ ID NO: 65280 - DNA, 110 bp, synthetic construct
  source 1..110: mol_type = other DNA
agatacctcaggattttattccgtccatgttttttattctctctgtttatttctagaaggctttttaaacttaatattccagttcaataagatagcacttttggctgtat

SEQ ID NO: 65281 - DNA, 110 bp, synthetic construct; identical to SEQ ID NO: 65280
  source 1..110: mol_type = other DNA

SEQ ID NO: 65282 - DNA, 110 bp, synthetic construct
  source 1..110: mol_type = other DNA
gcattgcctatccaaatgttacaaattacagaaataaaaatagttttatagatcaaagatgaaggcccttactttcttaacagtactcttatgtaattttggagagagct

SEQ ID NO: 65283 - DNA, 110 bp, synthetic construct
  source 1..110: mol_type = other DNA
tattactgttaacaaaggcaaaccttatgataaaatctcaaacaatatagagcgtgtaaagcataagggtaaaatgtttcccatgtctatcctttttcttaattgtatgg

SEQ ID NO: 65284 - DNA, 110 bp, synthetic construct; identical to SEQ ID NO: 65283
  source 1..110: mol_type = other DNA

SEQ ID NO: 65285 - DNA, 110 bp, synthetic construct; identical to SEQ ID NO: 65283
  source 1..110: mol_type = other DNA

SEQ ID NO: 65286 - DNA, 110 bp, synthetic construct; identical to SEQ ID NO: 65283
  source 1..110: mol_type = other DNA

SEQ ID NO: 65287 - DNA, 110 bp, synthetic construct
  source 1..110: mol_type = other DNA
tttaatctcctctcatgtcccttgaagaatctcaacttgtgggcagatatactccatattgtattgtcaattttcagaatagcaaatgcaaaagcctttttacttttaca

SEQ ID NO: 65288 - DNA, 110 bp, synthetic construct
  source 1..110: mol_type = other DNA
atattgtattgtcaattttcagaatagcaaatgcaaaagcctttttacttttacacttcctctactgggacacatgcatagaaaggggttccctgacttcataacatatt

SEQ ID NO: 65289 - DNA, 110 bp, synthetic construct
  source 1..110: mol_type = other DNA
cttcctgagagaaggaaagacttgaacaagaagaaagataagacaggagggcaatggaaaggcctgcaattctagatgaaggcgtctagcatgcaaagaatggaaaaaca

SEQ ID NO: 65290 - DNA, 110 bp, synthetic construct
  source 1..110: mol_type = other DNA
atgcctcataggtgataataactgtactgactcaccttccaggcacagttttacttttccttctagtggaggtggatatgcaatggtttttgcccacattttctctctgt

SEQ ID NO: 65291 - DNA, 110 bp, synthetic construct
  source 1..110: mol_type = other DNA
tttttagtaatgacttagaggatggtagagaatatggttattaagttcaggataacatcaaaccgggtgtggtacattccgctttggaaaactagataaaagtgcaaacg

SEQ ID NO: 65292 - DNA, 110 bp, synthetic construct
  source 1..110: mol_type = other DNA
atggctccttttagaagagcttaaaataacttctggctggacagcaggtgccgtgtctttctccaagttcaggggaaacacaagttatatatagatgagtgtgcccaaca

SEQ ID NO: 65293 - DNA, 110 bp, synthetic construct
  source 1..110: mol_type = other DNA
tagtcacataaaaaaaaaaaagaaagaaaatcaatatatgaggagcagagaacgaggatagtttgcaataatgacattgtggctcattgcattttagttaatgttgcaaa

SEQ ID NO: 65294 - DNA, 110 bp, synthetic construct
  source 1..110: mol_type = other DNA
taatgtaatcacgtgagcctttaagagcagagctgctggccaaggggaagagggagagattccatgggctgatgctgccttgaagatggagggagcccctaggaaacctg

SEQ ID NO: 65295 - DNA, 110 bp, synthetic construct
  source 1..110: mol_type = other DNA
acttttccaaaaccaaaccctcctttagcaagctggatatttaaaggatatcctctgggaatccttttgcaagacaaatgctcctctgaggtgtctgggtaataggagag

SEQ ID NO: 65296 - DNA, 110 bp, synthetic construct
  source 1..110: mol_type = other DNA
gcctggggttgagaggactgggcttcgatttagccttgcctctgaattaattaacctggtagccctgggccagggactccattctctgagccccaagtccctcagtaaaa

SEQ ID NO: 65297 - DNA, 110 bp, synthetic construct
  source 1..110: mol_type = other DNA
aacgtgtgccttcccctcccccgaccaagagccccagtgatttcaacatccacacttagcatcaaggcctcagactaactgcgacactttggtgcacagaagctacagct

SEQ ID NO: 65298 - DNA, 110 bp, synthetic construct
  source 1..110: mol_type = other DNA
ttagcatcaaggcctcagactaactgcgacactttggtgcacagaagctacagctgagcacggccacgcatttaaggtcagctgagtgctccatctgtattatcctaaac

SEQ ID NO: 65299 - DNA, 110 bp, synthetic construct
  source 1..110: mol_type = other DNA
atccaggaataccaaattggctttcctttagagctacctaaaggccaccccgagttaacacagggagggcttccacagtgcttctcacttgctggagcccttcctccccc

SEQ ID NO: 65300 - DNA, 110 bp, synthetic construct
  source 1..110: mol_type = other DNA
cacatctggaattctaacccaccggcctcggtacccattgtaaagtttccttcagcgagacgagctctgatttagagctgctcactagtgtgtcttaaactgcatcaaga

SEQ ID NO: 65301 - DNA, 110 bp, synthetic construct
  source 1..110: mol_type = other DNA
cccactggtgggcagataagccccagtgctaatagcctggagggaggactccaaagtggtaattaaactgggaccagttccttatggtagagtgagctcccagaaatgcc

SEQ ID NO: 65302 - DNA, 110 bp, synthetic construct
  source 1..110: mol_type = other DNA
gtggtaattaaactgggaccagttccttatggtagagtgagctcccagaaatgcctgtcaccagcgtctgtgtccccactgggagtcctagttgcctcttgcctttctgg

SEQ ID NO: 65303 - DNA, 110 bp, synthetic construct
  source 1..110: mol_type = other DNA
tcctgtttaattttcacgtggtagctacagtgatctttctaaaactaaaaaactatcatgactttgctttgttcaagaggatttattcaagagttcctgttgtggctcag

SEQ ID NO: 65304 - DNA, 110 bp, synthetic construct
  source 1..110: mol_type = other DNA
gcactgtttggaagatgcacacgctttgataggtaaaggccaacatatttatcttaagaagtcgtctcaggagttcccactgtggcacagcagaaacaaatccgactagt

SEQ ID NO: 65305 - DNA, 110 bp, synthetic construct
  source 1..110: mol_type = other DNA
tgattcaaaggcggagtttgcctcactttgtttctcttacctaaaagtacaatagtgattagcttcctactttatgccttcgaattgaaatctgtctgtggttttgtaaa

SEQ ID NO: 65306 - DNA, 110 bp, synthetic construct
  source 1..110: mol_type = other DNA
tgattagcttcctactttatgccttcgaattgaaatctgtctgtggttttgtaaaagagaatccaaaattctgagtggctgtcacatctcttgtcattctaagcatgtca

SEQ ID NO: 65307 - DNA, 110 bp, synthetic construct
  source 1..110: mol_type = other DNA
cagctagtggcttctaaccctaggcgggctgggtgccgggcaaagaacgcctcgcgttcgacccgcaattgaaggtttcttgcttcacctgctcccatctcgctcacttc

SEQ ID NO: 65308 - DNA, 110 bp, synthetic construct
  source 1..110: mol_type = other DNA
caattttcctgtgttcaaatcttagctttgttgcttactagctttgagattgtgggcaagttagttatcttctctgtgaatcagtttccttgtgtgtaacatggcatctt

SEQ ID NO: 65309 - DNA, 110 bp, synthetic construct
  source 1..110: mol_type = other DNA
acttggcaagagagagctgaagagagagaattggagctgacagctctgcccacaagccctcttagtgagcacatgccttacaatgagcaagagaagcaaggtgaccatcc

SEQ ID NO: 65310 - DNA, 110 bp, synthetic construct
  source 1..110: mol_type = other DNA
aactagtgacactggaagctaaagaaagtagtcctgaaagtgcttggtagcaagaggggttgcaggagacactgctgcccctgcatgctacaaaagcaatcctgtcaact

SEQ ID NO: 65311 - DNA, 110 bp, synthetic construct
  source 1..110: mol_type = other DNA
tccctgtttttgctcttgatggatatttttgtgataacaggaatgcaaatattcacacttaattgacaaagccaagatgttttctgagatcgaggtaccaagatacactc

SEQ ID NO: 65312 - DNA, 110 bp, synthetic construct
  source 1..110: mol_type = other DNA
actacatgtcatcgttggtgtagctgtccatgcccactagactgggagcttctagagggcaggaaacagaaattcaatgtttttgcatccctaccctggcactaaatatg

SEQ ID NO: 65313 - DNA, 110 bp, synthetic construct
  source 1..110: mol_type = other DNA
gctgtggctgtgcaataggagaatcagccacaagtcttacacttcacagacttcgagtgattcccctagatagtcagtccagctgttctgctggcctcgcttccatcccc

SEQ ID NO: 65314 - DNA, 110 bp, synthetic construct
  source 1..110: mol_type = other DNA
ttaaggtaggttcattccaatcttggttcattcattctttcattcatcaaatatgtataccgataacttttttcctttttggccaccttgtagcatatggaattcccagg

SEQ ID NO: 65315 - DNA, 110 bp, synthetic construct
  source 1..110: mol_type = other DNA
atgtctgtaacttcccctcctcctccagctgctctcagatctcaaaggaagacgtgccctcctttcaatggctgacctttccacttgtatttttggtcattttccccgcc

SEQ ID NO: 65316 - DNA, 110 bp, synthetic construct
  source 1..110: mol_type = other DNA
ggcaacaaggaattttaggagtttttagacactgggagttattttaaagcatcgctccttgggagttcccgttgtggctcagtggcaacgagacacaggttccacgatcc

SEQ ID NO: 65317 - DNA, 110 bp, synthetic construct
  source 1..110: mol_type = other DNA
tgagatattaacaggagaaaaatcaaacaaaatttaatactccctatacatgagagaccctggagaaccagttggctaaaatggctgaaacactcaccttaaatacctct

SEQ ID NO: 65318 - DNA, 110 bp, synthetic construct
  source 1..110: mol_type = other DNA
gtgggcactaaattcctctgatggtacttattttgacagtgatcacccaggtgatcctacatttgatcacatctattattttattacctttagaaatgaaaacccaaaac

SEQ ID NO: 65319 - DNA, 110 bp, synthetic construct
  source 1..110: mol_type = other DNA
gggttcctgcctggagaactgggtaggcgcccatatttcatgtgtctattcatcctgggagtctccagcagcttggaggagagcttcatacctaacaccttttttttttt

SEQ ID NO: 65320 - DNA, 110 bp, synthetic construct
  source 1..110: mol_type = other DNA
tccttaaccactgagtcatggcgggaatcctgctgctaattttaaaaagcaatattcacagcagagcttctccattgtaatacagctcattgatacttgagatatatata

SEQ ID NO: 65321 - DNA, 110 bp, synthetic construct
  source 1..110: mol_type = other DNA
ttgagttgtagggcgagctgagatggtgatatcaacaaatgggttagggagttcctgttgtggctcagtgggttaaaaatccaactatatccctgaggatgcagcctcgc

SEQ ID NO: 65322 - DNA, 110 bp, synthetic construct
  source 1..110: mol_type = other DNA
tgttgtggctcagtgggttaaaaatccaactatatccctgaggatgcagcctcgctcagagggttaaggatctggtgttgccataagcagtggcatagtttgcagaggca

SEQ ID NO: 65323 - DNA, 110 bp, synthetic construct
  source 1..110: mol_type = other DNA
ctctttgttcttccctcactccttaggatctgttgattttatgttactgctgttttccctcaagttttagccagttcgttttccctcaaagcttttgaccctatatcttt

SEQ ID NO: 65324 - DNA, 110 bp, synthetic construct
  source 1..110: mol_type = other DNA
tccctcaagttttagccagttcgttttccctcaaagcttttgaccctatatcttttggcctctgacagtagtcatcctgataagtctgtgaacaaatatttgatgcattt

SEQ ID NO: 65325 - DNA, 110 bp, synthetic construct
  source 1..110: mol_type = other DNA
catatcctgtattgacccctctcagaagcttttggaggcaacattaatcaggcgttcatcaaaggccttgggaactgaactgacgatttcattgatcccctgtggctaca

SEQ ID NO: 65326 - DNA, 110 bp, synthetic construct
  source 1..110: mol_type = other DNA
cattggccacatacactgctgtgattccccttctcctgccacatggtctttcctgctgaagtcagccatgagtcctcagtaacgctttcctactccaccaaaagaacttt

SEQ ID NO: 65327 - DNA, 110 bp, synthetic construct
  source 1..110: mol_type = other DNA
ctgaagtcagccatgagtcctcagtaacgctttcctactccaccaaaagaactttctttgtggtggttagtcttttttcgctaccacagatggcactcatgaaatgctgt

SEQ ID NO: 65328 - DNA, 110 bp, synthetic construct
  source 1..110: mol_type = other DNA
tcttggaacatattcagcctcaacctggcttccagggcctgccctcttccatgacattagcaaggatgtatagctttagaaccagaaccctgggattgaatctcacctcc

SEQ ID NO: 65329 - DNA, 110 bp, synthetic construct
  source 1..110: mol_type = other DNA
gattccacatataagtgataccatgtgatgtttgtttttcattaacttcctgctaagctgcaatgttctggtaggttaggtgtattatgcacttctgatttatgatattt

SEQ ID NO: 65330 - DNA, 110 bp, synthetic construct; identical to SEQ ID NO: 65329
  source 1..110: mol_type = other DNA

SEQ ID NO: 65331 - DNA, 110 bp, synthetic construct
  source 1..110: mol_type = other DNA
ccttgaaggggttcagaacacaccaccccaaaatatgccactttgacatattgattattttgatctggagtcacttgagacacagcaggtgcgggaagggctctatgatc

SEQ ID NO: 65332 - DNA, 110 bp, synthetic construct
  source 1..110: mol_type = other DNA
tattttgatctggagtcacttgagacacagcaggtgcgggaagggctctatgatctccccctttctacctaaaagcataaaatttcccacaagggaggtgccctccctgc

SEQ ID NO: 65333 - DNA, 110 bp, synthetic construct
  source 1..110: mol_type = other DNA
gctagctggatttggttcatgggtcgtagcttgccgacctctgtccctggatagatggaacatctgtgagtttggaaggcccgtgcaaattggtctttaaccatctggaa

SEQ ID NO: 65334 - DNA, 110 bp, synthetic construct
  source 1..110: mol_type = other DNA
tggaacatctgtgagtttggaaggcccgtgcaaattggtctttaaccatctggaaggaaatccccaaacttccatttaattaaaatattttttaaatcagtgcctggttt

SEQ ID NO: 65335 - DNA, 110 bp, synthetic construct
  source 1..110: mol_type = other DNA
caagaaatggcaaaaagacaaaaaaaaaaaaaagagttatatgtgcaactttgcttccttagaagtaaatcaattgcccttggtttcttccctagatctggaatgcagaa

SEQ ID NO: 65336 - DNA, 110 bp, synthetic construct
  source 1..110: mol_type = other DNA
tccttagaagtaaatcaattgcccttggtttcttccctagatctggaatgcagaagtggagctagagaacaatctttaaccatgtgggtgaggacaaacattaggggatg

SEQ ID NO: 65337 - DNA, 110 bp, synthetic construct
  source 1..110: mol_type = other DNA
cgggcactggatgatctgtggaggcagggtgaccctgagggaagaaacccaggtggcctgtgacacagtgaattcctggagggatgtccttattcatctgtgcttcctca

SEQ ID NO: 65338 - DNA, 110 bp, synthetic construct
  source 1..110: mol_type = other DNA
gcctgtgacacagtgaattcctggagggatgtccttattcatctgtgcttcctcaccatacacacacacatgcacgcatgcacacatgcatgcatgcatgcacgcacaag

SEQ ID NO: 65339 - DNA, 110 bp, synthetic construct
  source 1..110: mol_type = other DNA
tttgggatgctctgggctattcctgcttcagtctttatcaatgtcactttcatttgatcatatcacttctgagaatcctgaattagagctcaggcccatcaggcaggacc

SEQ ID NO: 65340 - DNA, 110 bp, synthetic construct
  source 1..110: mol_type = other DNA
aaattaaaagtgactaagcccctttgggtcctgtgtgatgctccctttagctggagggttaacggggtaggagagagtagggtcagttctgagcagtccatcagaacagg

SEQ ID NO: 65341 - DNA, 110 bp, synthetic construct
  source 1..110: mol_type = other DNA
cacttgaggaagttctaagttaaaaggtcacatgggtttatggaggctcagctgggtcatgcttggcactgggctctcagaagttcagcctctcaatctccttcccactt

SEQ ID NO: 65342 - DNA, 110 bp, synthetic construct
  source 1..110: mol_type = other DNA
ttcttctcaagtagccggaaaactcaaaacaccgtagatttgtagcattgttgttatgggagagtgtgttctgagctcccagcaataggtttcgaaatacacttttcaaa

SEQ ID NO: 65343 - DNA, 110 bp, synthetic construct
  source 1..110: mol_type = other DNA
aaaatgcatttcagcatgattgattgtatagattgtggtcatcactggaaacttaaggagcccagagcctcaattccgtagtagcaaatatctgcttaattgtcattctg

SEQ ID NO: 65344 - DNA, 110 bp, synthetic construct
  source 1..110: mol_type = other DNA
tcatctgcagtcttcctcggaaatcttgacgagagccgacctactgggaggccatcaggggctgaatttagcgaaaacacctctaaacactcagctctgaaaactgaggg

SEQ ID NO: 65345 - DNA, 110 bp, synthetic construct
  source 1..110: mol_type = other DNA
caggggctgaatttagcgaaaacacctctaaacactcagctctgaaaactgagggactgaaaaggtcagtggaggtggagcgattagggaactcaaatgcgttgcctaaa

SEQ ID NO: 65346 - DNA, 110 bp, synthetic construct
  source 1..110: mol_type = other DNA
aggaagactggtgtgttaaccaggaaatgctttagccattttattagttacagaataccagctatggatcctactttaatagacacaaaatattctcggtcccttaaaat

SEQ ID NO: 65347 - DNA, 110 bp, synthetic construct
  source 1..110: mol_type = other DNA
taccagctatggatcctactttaatagacacaaaatattctcggtcccttaaaatccaccaggtctttgtgttctgctgctttcaacttcaccattttctgcttggttga

SEQ ID NO: 65348 - DNA, 110 bp, synthetic construct
  source 1..110: mol_type = other DNA
tgtgattgattaggatccctgttggaggctggtgagctcagggcctcttcattcactgagatgtatcaggcactttgtcccagttctttcatgttaattcggttaagttc

SEQ ID NO: 65349 - DNA, 110 bp, synthetic construct
  source 1..110: mol_type = other DNA
ctgagatgtatcaggcactttgtcccagttctttcatgttaattcggttaagttcaccaagcatttaatgcatgtccattttgtgccaggctagagatgtttagccgaga

SEQ ID NO: 65350 - DNA, 110 bp, synthetic construct
  source 1..110: mol_type = other DNA
aagcaccattggagtttcctctgtagcaaagtgggttaaggatctggtaatgctgcagctgtggcatatgtcccagctgaggctcagatctcaatacctggtccaagaac

SEQ ID NO: 65351 - DNA, 110 bp, synthetic construct
  source 1..110: mol_type = other DNA
cagctgtggcatatgtcccagctgaggctcagatctcaatacctggtccaagaacttccatatgctgcaggcatggccaaaaaaggaaaagaaaaagaaaaagaaaaaaa

SEQ ID NO: 65352 - DNA, 110 bp, synthetic construct
  source 1..110: mol_type = other DNA
ctgtaggtagatagatagacagatagttagatagcagacaatagatacagaaaaatggtgaaaaaccctatcaaaattagaaggaaaagaagtgaaaaaatatgattcat

SEQ ID NO: 65353 - DNA, 110 bp, synthetic construct
  source 1..110: mol_type = other DNA
ctgcgccacgacgggaactccatcagcttatttattctttagataaacccagaattggcctgtgattgtgaaaggtgttgatttaattcttttgtgtattcccatcctga

SEQ ID NO: 65354 - DNA, 110 bp, synthetic construct
  source 1..110: mol_type = other DNA
tagcatcacatagaaagaacaacatgaaaagagaattttaaattggtctttggccatgtagtttgcttatcttaggaagaagtgagagtttcaagttcagaatcatttca

SEQ ID NO: 65355 - DNA, 110 bp, synthetic construct
  source 1..110: mol_type = other DNA
ttctctcattgcaccccaccttggtgaagctcatcaagcacgggagatgatcatctctggattcctgtcttgggcagcaaagctcttgaaaaggaaaaaggaaggagttc

SEQ ID NO: 65356 - DNA, 110 bp, synthetic construct
  source 1..110: mol_type = other DNA
gttacttttaagataaaaatttacatttgaaacccaagacaaatactgtgaaagcaccacagtatttaaaaggcagaaaaaaggaaggctacaaaaaagaccaagctggg

SEQ ID NO: 65357 - DNA, 110 bp, synthetic construct
  source 1..110: mol_type = other DNA
taatcatacatcacgtactatatatgtaagagattatactgtaagatgtttgttgctgacttcattaacatgagagtacaattaaggtgatacaaggatgcccaaattac

SEQ ID NO: 65358 - DNA, 110 bp, synthetic construct
  source 1..110: mol_type = other DNA
ctgacttcattaacatgagagtacaattaaggtgatacaaggatgcccaaattaccaaagctctgaagcactttactgacagcaaaacctaggctctcatgtaagcaccc

SEQ ID NO: 65359 - DNA, 110 bp, synthetic construct
  source 1..110: mol_type = other DNA
tctagacttttttgttagtttacttaacactatccaataagaagaatgttaaaatctcaagctttcattttggatttgtctgctttgtctttggtgtaccagaaatcagg

SEQ ID NO: 65360 - DNA, 110 bp, synthetic construct
  source 1..110: mol_type = other DNA
aggattcaaccaaagattgaaaatacttggggaaaaaattccagaaagtttcaaaaggcagaacctgaatttgtcacatgccggcaactatttacatagcatttacattg

SEQ ID NO: 65361 - DNA, 110 bp, synthetic construct; identical to SEQ ID NO: 65360
  source 1..110: mol_type = other DNA

SEQ ID NO: 65362 - DNA, 110 bp, synthetic construct
  source 1..110: mol_type = other DNA
ttcctaatgccgacatatttatttttatgtgttgtgaaaagttccaaattctcatgtcatgaatgggccagtcaagctggatgaactttgatcttttaataacattcgat

SEQ ID NO: 65363 - DNA, 110 bp, synthetic construct
  source 1..110: mol_type = other DNA
ctggtagctacagctcccatttgactcctagcctgggaactttcatgtacctcgaatgaggcccttaaaaaaaaattccaccatagaagcagtttcataatgtatctatt

SEQ ID NO: 65364 - DNA, 110 bp, synthetic construct
  source 1..110: mol_type = other DNA
acatctcaacctttcactggactttgagtgtaacttcaggatagagatagtactctattcagttgtgaatcctcagggcttgccactatgtgtgcccatcaagtaataat

SEQ ID NO: 65365 - DNA, 110 bp, synthetic construct
  source 1..110: mol_type = other DNA
ttggaccagcaatagccaatgaagaaataaaagctatgttatataaaaaagaaaaattgtaacttgattctaatcagcagaaatcaatcctgttggtctgcagaaaccag

SEQ ID NO: 65366 - DNA, 110 bp, synthetic construct; identical to SEQ ID NO: 65365
  source 1..110: mol_type = other DNA

SEQ ID NO: 65367 - DNA, 110 bp, synthetic construct
  source 1..110: mol_type = other DNA
ttaatctctatttgtgggagtaatgtgaccatggaagagtttctgaagctcctggagagaagaggtaatcaggttaagccaagatttagcccatgagaaattcagtggcc

SEQ ID NO: 65368 - DNA, 110 bp, synthetic construct
  source 1..110: mol_type = other DNA
agctggcagatttgaatatacagctaggtttatttagttcctcaattgtaaaatgtaccattgagtcaataaaaatgctttcatgagaagattgatcggttataagattt

SEQ ID NO: 65369 - DNA, 110 bp, synthetic construct
  source 1..110: mol_type = other DNA
caatggcactatctttctctaccactctttttgcatctcttctccttttggcttctatttcatattttccagctttgctacataagaactttccctcttcttttagctct

SEQ ID NO: 65370 - DNA, 110 bp, synthetic construct
  source 1..110: mol_type = other DNA
tatttcatattttccagctttgctacataagaactttccctcttcttttagctctagtgtgaaaatttggggagtgagaaaacaggcatagcccagttaggtgcctgttg

SEQ ID NO: 65371 - DNA, 110 bp, synthetic construct
  source 1..110: mol_type = other DNA
aagaggttgtgtggacagcccctgtgtgggcttttcttctattttccagcagtaacagtttctctgacactgcctgctgttttgctcattcctgattctgcctcctcatc

SEQ ID NO: 65372 - DNA, 110 bp, synthetic construct
  source 1..110: mol_type = other DNA
aaggtacacactcccctaggtataattaatagagccatcctccatttcagttacaggcccatgtgcgatgtgtttctaacttcctgtgatatgttcctgattgctggtcc

SEQ ID NO: 65373 - DNA, 110 bp, synthetic construct
  source 1..110: mol_type = other DNA
ggcccatgtgcgatgtgtttctaacttcctgtgatatgttcctgattgctggtcctctctacgtttcaataacatttggctcatgaatgcctctcttccaggtacttcag

SEQ ID NO: 65374 - DNA, 110 bp, synthetic construct
  source 1..110: mol_type = other DNA
gcctttgtgtgccatcctagaaagtttggttttatcctctagctaacagggagacactgaagtgtttcaagcaggtaaatgaccttctacgatttgcccttttagaaaga

SEQ ID NO: 65375 - DNA, 110 bp, synthetic construct
  source 1..110: mol_type = other DNA
gccatcaggtgatggtggaaaacaaggcagaaggaaactgagtttctgaattaccgctaggagcagagctgtgccaatgacctgggctgctcccttcaagaatattacat

SEQ ID NO: 65376 - DNA, 110 bp, synthetic construct
  source 1..110: mol_type = other DNA
ttcgtgtcaattttaagcaaccaaagagcttgtaactatgaatgctgcagaaactcacgatcgacaccactgaaatactccataattaggatgaaattgtttttacttgg

SEQ ID NO: 65377 - DNA, 110 bp, synthetic construct
  source 1..110: mol_type = other DNA
aaaaaaaaaaaaaaaaaaaaagatcagtggcagaaccacaccacagctcttagagcttttgccagaacgtggcaacatcatttccaaagcaagtcacatggccaaactaa

SEQ ID NO: 65378 - DNA, 110 bp, synthetic construct
  source 1..110: mol_type = other DNA
tgctgtgggtgtggccctaaaagaaaaaaaaatcacaaattctgaaaagctgacaggcagatatcacataaacttgatcaatcagagtttaaacatctccatcttcttta

SEQ ID NO: 65379 - DNA, 110 bp, synthetic construct
  source 1..110: mol_type = other DNA
atcccaatcctttttttcccccatactttacctcctcttaatagatgaaggtctatagaaaataactacctaagattttaaatttatgtttagttttcctaaagcctgat

SEQ ID NO: 65380 - DNA, 110 bp, synthetic construct
  source 1..110: mol_type = other DNA
tgtattagtgagtttgccaaaacaagaattgcaagactttagagagaacattataatgagccccaaaatatgtgatatttgaaaagctggtatcatttagcaactggaat

SEQ ID NO: 65381 - DNA, 110 bp, synthetic construct
  source 1..110: mol_type = other DNA
acttattgctcaggaaactggaaactacaatgggcagatcataaagccctaactaaagcttgatctcactggaaaaaaggacaaggaaaggtgcatattagcaacacaca

SEQ ID NO: 65382 - DNA, 110 bp, synthetic construct
  source 1..110: mol_type = other DNA
aagcttgatctcactggaaaaaaggacaaggaaaggtgcatattagcaacacacataattcttgtgcataactattctattccagccaaacaccaaaagaaaaggaaaaa

SEQ ID NO: 65383 - DNA, 110 bp, synthetic construct
  source 1..110: mol_type = other DNA
actgcagtaacatcaaatcctttgcttcttttcaattttatttaaagttgcatatttggaacatgaaaatagcctggtttgggccagacccaatcaacgtcctactgaag

SEQ ID NO: 65384 - DNA, 110 bp, synthetic construct
  source 1..110: mol_type = other DNA
taagtggcaattgtgcttaccctctaaaaccttttctggacttaggtaaaatacgaattaatgaaaggagtgaacaaatgagtgaatgccaagcaaataaataaaactgc

SEQ ID NO: 65385 - DNA, 110 bp, synthetic construct
  source 1..110: mol_type = other DNA
actatcttgtgcttatgcctcaggtagctggtcaccatcccccatgatgtccccattgagaggagtggctacccctgctatccggccttgcccagaatctttcttctgag

SEQ ID NO: 65386 - DNA, 110 bp, synthetic construct
  source 1..110: mol_type = other DNA
actggctgcctttccacattctaaacaatcttagctttcacaatctgagatgttctgtccttcctctcccctacatttgtttcatcctagtcacattgttttaaaggcga

SEQ ID NO: 65387 - DNA, 110 bp, synthetic construct
  source 1..110: mol_type = other DNA
tgtccttcctctcccctacatttgtttcatcctagtcacattgttttaaaggcgactgcctggttttgtactgcatcttgagaaagctcaaatgactagggtctttttca

SEQ ID NO: 65388 - DNA, 110 bp, synthetic construct
  source 1..110: mol_type = other DNA
gtatcaagtccttactgaataccaagcaacaaaaggctaaatgccctatgaatgttattttatttaaacagtataacagtgccaagcattggtcctgctttatagataaa

SEQ ID NO: 65389 - DNA, 110 bp, synthetic construct
  source 1..110: mol_type = other DNA
ttacattattattttaaacctgtggttcaccctgggaatataaatatgcttcaaaggaaaaaaacacacacaaattaatgactttctaaaggtgtaacatctgggtagga

SEQ ID NO: 65390 - DNA, 110 bp, synthetic construct; identical to SEQ ID NO: 65389
  source 1..110: mol_type = other DNA

SEQ ID NO: 65391 - DNA, 110 bp, synthetic construct
  source 1..110: mol_type = other DNA
tgtgctgtgtcacctgaactttttttaatcacttcctaaatgttctgttttctagtccttttaaaatgcagcatctgtgctgagctttagatgaatggtatagttagagc

SEQ ID NO: 65392 - DNA, 110 bp, synthetic construct
  source 1..110: mol_type = other DNA
ttagccttctctgattgcaccaggaaaattacacacattcttctaagtgtgccttagcaacttgagcttgtccctagaaaaggacgttattacaatgcattacaattatg

SEQ ID NO: 65393 - DNA, 110 bp, synthetic construct
  source 1..110: mol_type = other DNA
aagtggccatcattttaaaccccatttggtcaagacagtctcatcattccctattggtttactgtgtcactttctggatctaatcaaattcccaccttcacagaagctac

SEQ ID NO: 65394 - DNA, 110 bp, synthetic construct
  source 1..110: mol_type = other DNA
ggtttactgtgtcactttctggatctaatcaaattcccaccttcacagaagctacatacaagcagctgaacactattggacctcgtcacattattttcacttaaaattca

SEQ ID NO: 65395 - DNA, 110 bp, synthetic construct
  source 1..110: mol_type = other DNA
agagtaattcaagccttcactttagttttgctttcaatattactttctacttacactcgcatgttttaaaaaataatcatttagtcatagtcagcatttatgtgcagaga

SEQ ID NO: 65396 - DNA, 110 bp, synthetic construct
  source 1..110: mol_type = other DNA
ctgctgtcagtgacccaagagaatgatccatccagctccaaactgccttctgatggttaaattcagcaggtaaattgcgtcatatgcatacagtgaattagccccctttt

SEQ ID NO: 65397 - DNA, 110 bp, synthetic construct
  source 1..110: mol_type = other DNA
gttaaattcagcaggtaaattgcgtcatatgcatacagtgaattagcccccttttccttaatcccatcctctcatccccagcctgtaatattctgaggaatccactggag

SEQ ID NO: 65398 - DNA, 110 bp, synthetic construct
  source 1..110: mol_type = other DNA
tgtcgccctttgagtcaggcaccaggccctggatcagccagctgggggccagcaacccaaatcacactgtcaatctatggacatttcatgtaagactccacagcaggggc

SEQ ID NO: 65399 - DNA, 110 bp, synthetic construct
  source 1..110: mol_type = other DNA
tttatcaccctccttggtgctacctagtgggttctgatagcacccccacttgcgtgcacagctgtgacaactaaaatgtctccagttgttatcagatgttctggggcaga

SEQ ID NO: 65400 - DNA, 110 bp, synthetic construct
  source 1..110: mol_type = other DNA
atatgtgggtgatgtgttttgggtacaggagaagggaacgaaaacacaagagagatgaggagaagagatgaagaatttggcccgggtaggaaaatagaatgtgaggtagg

SEQ ID NO: 65401 - DNA, 110 bp, synthetic construct
  source 1..110: mol_type = other DNA
gcaccatttctttcttccttctcatttaagtgtgcacttatctctgtccataaccatccaagttgaatgaactggctcttcacctgtggcttcagaaaaatttactcatc

SEQ ID NO: 65402 - DNA, 110 bp, synthetic construct
  source 1..110: mol_type = other DNA
atccaagttgaatgaactggctcttcacctgtggcttcagaaaaatttactcatcatggaatatactagagggttttgttgttgttgttgtttgctttttagagccgcat

SEQ ID NO: 65403 - DNA, 110 bp, synthetic construct
  source 1..110: mol_type = other DNA
agagttcgagcataaatcacacagctggaggtaaccgcagaacttgcaaatggacagtagaactgctgacaccaacctctgagagcacagaaagtgaaagacgtagagaa

SEQ ID NO: 65404 - DNA, 110 bp, synthetic construct
  source 1..110: mol_type = other DNA
caaaaacgtttaacaccaatgtttcaataagaacagtgagactgattggtttcttcatgacttctgactctagctgtcaactccagcgcccctcccatgcccctccagca

SEQ ID NO: 65405 - DNA, 110 bp, synthetic construct
  source 1..110: mol_type = other DNA
gcctctgttttcaggtcaaaacagaacctgccttgttggcatactggaacattcgtatgagctatctatacacgaaatctggaagagctgtatctcgcactaagaaaaca

SEQ ID NO: 65406 - DNA, 110 bp, synthetic construct
  source 1..110: mol_type = other DNA
ttacagatacaaaggcagtctgtattgacaggacacacagacattgtgactcatgtgaagctgttggtgaatgacatggtggtcgactcagttggtggatatctctattg

SEQ ID NO: 65407 - DNA, 110 bp, synthetic construct
  source 1..110: mol_type = other DNA
gcctgccatgctgcaggtaacacagtccccgagtggtgacctaggacacatcatgcatcttctctcagcacccctgaagctgtggcaggttaacttactacttgcattca

SEQ ID NO: 65408 - DNA, 110 bp, synthetic construct
  source 1..110: mol_type = other DNA
gagatttcatttgatcatgaaatctgccctagtatagcagcagatgcacaaccaatacgtaacagatataaaagtagctttatttccaagggaaaatgtcatcccatcca

SEQ ID NO: 65409 - DNA, 110 bp, synthetic construct
  source 1..110: mol_type = other DNA
tacgtaacagatataaaagtagctttatttccaagggaaaatgtcatcccatccactggacttcctctcagcacctcttacattaatacacgttctctgccaatttttgt

SEQ ID NO: 65410 - DNA, 110 bp, synthetic construct
  source 1..110: mol_type = other DNA
cagctgtgtgacttcttgaaaggacagcgttcttttccagctctgtagggagtcatggtaactccctgcctgctctgtacttggttacctggactgtgtgtccttggtga

SEQ ID NO: 65411 - DNA, 110 bp, synthetic construct
  source 1..110: mol_type = other DNA
tggtaactccctgcctgctctgtacttggttacctggactgtgtgtccttggtgaaccttatgtaaagtatgagtacgtcattttaatggatgatcctttgtcctgaaaa

SEQ ID NO: 65412 - DNA, 110 bp, synthetic construct
  source 1..110: mol_type = other DNA
attattgtttgtgtcttttgttcaatggtttgttttgttttgtttcccctgccgtgcactattacccccaaatttcatggttgtttaccaccacttacgtttctcatata

SEQ ID NO: 65413 - DNA, 110 bp, synthetic construct
  source 1..110: mol_type = other DNA
tccaccagacctctccaccacgctagcccagtagcctccaagaccctgtcctttgaaccccatcaccccataacatcaattccgtgccactttaaaaatgctaatgtcta

SEQ ID NO: 65414 - DNA, 110 bp, synthetic construct
  source 1..110: mol_type = other DNA
aaccccatcaccccataacatcaattccgtgccactttaaaaatgctaatgtctaacatttcctgaactctcatttggtatgagaactttgtgaagaactatttttacac

SEQ ID NO: 65415 - DNA, 110 bp, synthetic construct
  source 1..110: mol_type = other DNA
gagtgggataagtgagttatattttgatgtgcaaagtaatggttctttgttatggactggatatacctataagtgagatgtcggactcacataattctctcacatttgtg

SEQ ID NO: 65416 - DNA, 110 bp, synthetic construct
  source 1..110: mol_type = other DNA
actggatatacctataagtgagatgtcggactcacataattctctcacatttgtggctggaatgggtgatagaagatcttactgaagtgggggtagaaattaggcaaaat

SEQ ID NO: 65417 - DNA, 110 bp, synthetic construct
  source 1..110: mol_type = other DNA
ttccataataagtgactagatatgggggagggtgaggaagtgggatggactgattttgatttttttaaattcaaactcagtatgtgatgatttccagaaattctaagaca

SEQ ID NO: 65418 - DNA, 110 bp, synthetic construct
  source 1..110: mol_type = other DNA
ttgatttttttaaattcaaactcagtatgtgatgatttccagaaattctaagacagctggatgtaaaatcaggagtcaaagacattgggtttttcttatagtcctaacca

SEQ ID NO: 65419 - DNA, 110 bp, synthetic construct
  source 1..110: mol_type = other DNA
attcagcctgtcctttgaagccaggcattgactttttctctttaactgtgaaaatcctagatgacatcttcttcaaatttaaagttgcttcatctgtattgaaaatctgt

SEQ ID NO: 65420 - DNA, 110 bp, synthetic construct
  source 1..110: mol_type = other DNA
cctttttttcactccagaaaatgctttattgcagtttgagtattctgtcaaaataggagtagaagctgagggtacaagacagcatgcttagtttccttgcatattcattt

SEQ ID NO: 65421 - DNA, 110 bp, synthetic construct
  source 1..110: mol_type = other DNA
tttcacaatgatcaaatgcatgttagctcagtatactccataggtatataaattacttcaactcacagttgatacttatgttccccaagttgaaatttctccagaaatgt

SEQ ID NO: 65422 - DNA, 110 bp, synthetic construct
  source 1..110: mol_type = other DNA
gagctgtgaacttatgattgcataattcactaatgaaacttgtaaaatttgattaacattttttggatgtgatgttaaactttgcatgtgattagcagatacacttgccc

SEQ ID NO: 65423 - DNA, 110 bp, synthetic construct
  source 1..110: mol_type = other DNA
gaggaagaggggtggagtttctttctctatgcatgtgccagcgctcaggcagcggggtgcttcttgcacaggctatgggcagcaggagcaaacaactgcaggcatctcaa

SEQ ID NO: 65424 - DNA, 110 bp, synthetic construct
  source 1..110: mol_type = other DNA
agagtcaaacttagtaaaattccacactcaatatttttaaagttttatttggtgctttgcatcagcctgaatgacctcccagtgcctcctgcactttaccaaaccatata

SEQ ID NO: 65425 - DNA, 110 bp, synthetic construct
  source 1..110: mol_type = other DNA
cagcaggtgtcttgtgttttctatagctgtgacaatttgcttaatttacaggcattatttatatgtctaaatttatctgattcaggaacagactgttgccttgttataag

SEQ ID NO: 65426 - DNA, 110 bp, synthetic construct
  source 1..110: mol_type = other DNA
tgcagtgactcatgctttactccatgtagaggccaatggcaagtgttaaactttagataacagttcttctccatggtcataaatttgaccatagttttgggaggcatatc

SEQ ID NO: 65427 - DNA, 110 bp, synthetic construct
  source 1..110: mol_type = other DNA
tggcaactatcaatttttgaataaatactatgtgccaggcactttaaaacataatcttattcgatcctctcaaaaactctgcaagataagcattattcatatattagcag

SEQ ID NO: 65428 - DNA, 110 bp, synthetic construct; identical to SEQ ID NO: 65427
  source 1..110: mol_type = other DNA

SEQ ID NO: 65429 - DNA, 110 bp, synthetic construct
  source 1..110: mol_type = other DNA
ttggaccgctcacaactgagtccgactgtgggaaaagtttcttgtctatgccacatccattcttttcttccttaataacaaaacattgattctgttaggatggaacagtg

SEQ ID NO: 65430 - DNA, 110 bp, synthetic construct
  source 1..110: mol_type = other DNA
tccattcttttcttccttaataacaaaacattgattctgttaggatggaacagtgcccagttacaaaatcctacatttctaccttacttagcatgagccagttgtggcca

SEQ ID NO: 65431 - DNA, 110 bp, synthetic construct
  source 1..110: mol_type = other DNA
tattaatcattgaataggcaactctatcaggaaatgtaatagttctctaattactgcatatttcttcctttcgaataatcagagacagctgttttcaccttgttgatttt

SEQ ID NO: 65432 - DNA, 110 bp, synthetic construct
  source 1..110: mol_type = other DNA
gcatatttcttcctttcgaataatcagagacagctgttttcaccttgttgatttttgaggatgacagttacagaggaaaagtaaaaatccttttgtaatttcagtttaat

SEQ ID NO: 65433 - DNA, 110 bp, synthetic construct; identical to SEQ ID NO: 65431
  source 1..110: mol_type = other DNA

SEQ ID NO: 65434 - DNA, 110 bp, synthetic construct; identical to SEQ ID NO: 65432
  source 1..110: mol_type = other DNA

SEQ ID NO: 65435 - DNA, 110 bp, synthetic construct
  source 1..110: mol_type = other DNA
gaagttgttacctggtgagttttgtttcctggagcttagtcaatttaaaagcgaaatgaaataagtcagaaagacaaagacaaataccatatgatgtcacttataactgg

SEQ ID NO: 65436 - DNA, 110 bp, synthetic construct
  source 1..110: mol_type = other DNA
ctaacacactcccaactgatgttgaagtgggtagtcatcagaccaaatttaagcaacaaggttttatgcagcatctaagcttgaagaggcattatgagtttcctccattt

SEQ ID NO: 65437 - DNA, 110 bp, synthetic construct
  source 1..110: mol_type = other DNA
ggaggttatattatctgtaaatcaactcaggaaatatgcaccagatacttcagagaggagatacagcagaagatatggaggaggggtctgccccaggatggctccagagg

SEQ ID NO: 65438 - DNA, 110 bp, synthetic construct
  source 1..110: mol_type = other DNA
gtttccatgatcccaagtcagaggggatggaattggttgagggacagagcttgcagggctgcatgggcagatggttagtggcaattctagggacaatggggaccaggaga

SEQ ID NO: 65439 - DNA, 110 bp, synthetic construct
  source 1..110: mol_type = other DNA
tgctgaaacttggactttagtggacagaccctggggtaggatttggtctagctgtgtagagacagcctggtgcacctagagtgtagtctgggcctaacctcaggactcat

SEQ ID NO: 65440 - DNA, 110 bp, synthetic construct
  source 1..110: mol_type = other DNA
tatctgcccttggattcaatgtagaagtcgagtccaggtcactcagttaattatttcttacctgaatgcttccactgacacccaaaatgtagtcagctgtgtatacagtt

SEQ ID NO: 65441 - DNA, 110 bp, synthetic construct
  source 1..110: mol_type = other DNA
tcttacctgaatgcttccactgacacccaaaatgtagtcagctgtgtatacagttctccaacaaattaggctctcaaaaggagaaatcctttctttgcaggtttttcttg

SEQ ID NO: 65442 - DNA, 110 bp, synthetic construct; identical to SEQ ID NO: 65440
  source 1..110: mol_type = other DNA

SEQ ID NO: 65443 - DNA, 110 bp, synthetic construct; identical to SEQ ID NO: 65441
  source 1..110: mol_type = other DNA

SEQ ID NO: 65444 - DNA, 110 bp, synthetic construct
  source 1..110: mol_type = other DNA
acagttatatgggctgtatatcatatgatatattacagtttacataattcagatctaaccgtcattgtggcccctcaaaagatcaagaaagactgttctttcacagagtt

SEQ ID NO: 65445 - DNA, 110 bp, synthetic construct
  source 1..110: mol_type = other DNA
tgatatattacagtttacataattcagatctaaccgtcattgtggcccctcaaaagatcaagaaagactgttctttcacagagttgtcccattaatgctaagagaatgtt

SEQ ID NO: 65446 - DNA, 110 bp, synthetic construct
  source 1..110: mol_type = other DNA
taactccattctgtcatgtggacaggaagctgatggctgcctccaagccaaacgcacttgatttatgttactgcagagtgaggctctcagggccaccaagagaaagcacg

SEQ ID NO: 65447 - DNA, 110 bp, synthetic construct
  source 1..110: mol_type = other DNA
ttttcaggtagggtaactcctgtatacagaacctaaagatgaaagatgtccaggagtgactttctttttttttttttttttgtccttttagggccacacccgtggcatat

SEQ ID NO: 65448 - DNA, 110 bp, synthetic construct
  source 1..110: mol_type = other DNA
gagtacatggacataaaatagagacaagctcttgacccatcagaggactcacataaggaccctggagccctgcaaggaggtgcatcaagttaaagaagatgtgctgctag

SEQ ID NO: 65449 - DNA, 110 bp, synthetic construct
  source 1..110: mol_type = other DNA
atttttatttacttgaaagatgacctgtctgcttcggtgttgtcatacaagagaaaagctggttgagcagactggatgtggagctgtgcatacggcggtggagatctgtg

SEQ ID NO: 65450 - DNA, 110 bp, synthetic construct
  source 1..110: mol_type = other DNA
aaatgggaaccaaaaggctcactgaagagggtctgcaggagggcaaaacacctaccagctgacagtataattcaggaaggctcagatgaccattcacctaagtagtaagg

SEQ ID NO: 65451 - DNA, 110 bp, synthetic construct
  source 1..110: mol_type = other DNA
ctcagaatgcacagccaccttcttgaagctagaacagcatcgctgataaatgtcgtatgcctcagaacccttctaaatgcagtactccaggccataaactaacgagagtt

SEQ ID NO: 65452 - DNA, 110 bp, synthetic construct
  source 1..110: mol_type = other DNA
tcagaattattaactcttttctgggcctgtgtaatattatatacatctatgaaaacattctgttccacttagtcctgtgtttgtgtgttccacttattgtgctccttgag

SEQ ID NO: 65453 - DNA, 110 bp, synthetic construct
  source 1..110: mol_type = other DNA
cctctaagtaacttgatggtccaggtgcagacttgccggtcactaggcaaccacgagctgcccatcatcggctacgcagcctcctgatggccgcctggagggcttgctgt

SEQ ID NO: 65454 - DNA, 110 bp, synthetic construct
  source 1..110: mol_type = other DNA
taaagtgccgtctgccttacacagagatagtatctgttctagaattttcatacgtgtaggcctcattaacaagtgttaaatgaactgaagaatagatgaatgagtaaatt

SEQ ID NO: 65455 - DNA, 110 bp, synthetic construct
  source 1..110: mol_type = other DNA
gatgaggtaagggcaatgtgggaacatcaaacactgtgtgtcctgcctgtcacttttcatggtactgtgtctcacactcaactataagctctttatggcattaggaacaa

SEQ ID NO: 65456 - DNA, 110 bp, synthetic construct
  source 1..110: mol_type = other DNA
aactgacgttaagagaagtcataaaggtagtgccctggtcagactggatttgtatccttataagaagaggcatcagagagctctttttctactcccccttcaccacccca

SEQ ID NO: 65457 - DNA, 110 bp, synthetic construct
  source 1..110: mol_type = other DNA
ttttaggctttgttaggtgggaaaagaatagcattattctttagtattagtctagagctaatttttacccatactgaagttatatctttctgaataatctacctgaatcc

SEQ ID NO: 65458 - DNA, 110 bp, synthetic construct
  source 1..110: mol_type = other DNA
agggaaccttcttatactgttggtgggaatgtaaagaaatatactttttaaaaggcaaaatattatatcaggaaagcattatgtgtgtcatacaatgatctttattgttg

SEQ ID NO: 65459 - DNA, 110 bp, synthetic construct
  source 1..110: mol_type = other DNA
ttcatattggttggtatccctcagctgtatcacagagaaaatattcataatttgtggtttttaatatctgccacacacccctaacctggcaataatgctgggttcaggat

SEQ ID NO: 65460 - DNA, 110 bp, synthetic construct
  source 1..110: mol_type = other DNA
aagtacacagcgtccttgacagagacaagacctgggactgaatcacagctttgtagcccgcctgctctgtgagcctcaatcactgctcagatgctttggaaacattcaag

SEQ ID NO: 65461 - DNA, 110 bp, synthetic construct
  source 1..110: mol_type = other DNA
agcaggaactgcaagacagggattctggctctttcttgactcgtactcccaggaactccaaacacacatggaacctctctggtgatgtcagaagggaaacagcaaagcag

SEQ ID NO: 65462 - DNA, 110 bp, synthetic construct
  source 1..110: mol_type = other DNA
ctccaaacacacatggaacctctctggtgatgtcagaagggaaacagcaaagcagcttccaagagtgtgatgacattcctgtgcctttctggacatggacttggaaagac

SEQ ID NO: 65463 - DNA, 110 bp, synthetic construct
  source 1..110: mol_type = other DNA
ttgccgctgcagggatcaaacccgcaccacagcagcaacccaagccgctgtagtgacaccagacacttttaagcagctgtgcccaagggaacactgtattcaacttttat

SEQ ID NO: 65464 - DNA, 110 bp, synthetic construct
  source 1..110: mol_type = other DNA
gaatgccttgtggaccagactgccttggttcaaatccaagtccattacttacagctctgtggccttgggcaagtttgacctacgtgtgtcagtttcctcatttcaaactg

SEQ ID NO: 65465 - DNA, 110 bp, synthetic construct
  source 1..110: mol_type = other DNA
tctgtggccttgggcaagtttgacctacgtgtgtcagtttcctcatttcaaactgggaaacagagtactcaactcacagggatgcaatgagtaaggagaaatgtgtgctg

SEQ ID NO: 65466 - DNA, 110 bp, synthetic construct
  source 1..110: mol_type = other DNA
taagatccttgcagagaaaattgtgtggaataaatgttattttccaccactgaggattttaaacgcataaatgaaaccttgaggatttttccttgagtatttgctgtaac

SEQ ID NO: 65467 - DNA, 110 bp, synthetic construct
  source 1..110: mol_type = other DNA
tgtctacacttctctaagtcacccgttaccactcccctgatggttcctgcattttccaagtaaactatatccactccatccttgcctcagagtatagcttctatgggagc

SEQ ID NO: 65468 - DNA, 110 bp, synthetic construct
  source 1..110: mol_type = other DNA
ccaagtaaactatatccactccatccttgcctcagagtatagcttctatgggagctcaatcaacataataaacaagtgccaatttagaaaaaaaaatttttttaattaat

SEQ ID NO: 65469 - DNA, 110 bp, synthetic construct; identical to SEQ ID NO: 65467
  source 1..110: mol_type = other DNA

SEQ ID NO: 65470 - DNA, 110 bp, synthetic construct; identical to SEQ ID NO: 65468
  source 1..110: mol_type = other DNA

SEQ ID NO: 65471 - DNA, 110 bp, synthetic construct
  source 1..110: mol_type = other DNA
gtttccttgagtgacagctacttatgtgttcatttcctttttaccaaatacactttctataagagaaatctatagctcataaaacaatgttagcagtcttgaaattgaaa

SEQ ID NO: 65472 - DNA, 110 bp, synthetic construct; identical to SEQ ID NO: 65471
  source 1..110: mol_type = other DNA

SEQ ID NO: 65473 - DNA, 110 bp, synthetic construct
  source 1..110: mol_type = other DNA
atagtaatcctctccaggttaacacagcctggatcagtactttgctaaacacagagctagtgaaaataaaacaagatcaattagataactatctctgaaggtcatgttaa

SEQ ID NO: 65474 - DNA, 110 bp, synthetic construct
  source 1..110: mol_type = other DNA
ggccaacccctattgcaaacatgctaagctattgtcagctagtgagaatgtgtacaagtctcaggttcaaaaaatgagtcctagtaactctgtgggagggcaaggatcgc

SEQ ID NO: 65475 - DNA, 110 bp, synthetic construct
  source 1..110: mol_type = other DNA
aattatcataaaagacacagtcaaaaaacccacagctgggagctattggtcatagtgcagtggaaatgaatcggactagtatccatgaggatgtgcgtttgatctctggc

SEQ ID NO: 65476 - DNA, 110 bp, synthetic construct
  source 1..110: mol_type = other DNA
ttttagctttattaggcatcacggcagctgatcaggcttttcttttctgttttaaacctcagttccccaagctagttttaaatttctcaggcttttcattatgaaaacct

SEQ ID NO: 65477 - DNA, 110 bp, synthetic construct
  source 1..110: mol_type = other DNA
cttgttttttgccctcaaggagctgtattaccttagtgtgtgtgttaatgtgaagtgttgccgtggcacaacgtagtggaaagaaattggtcaccaagaagtctgtaagt

SEQ ID NO: 65478 - DNA, 110 bp, synthetic construct
  source 1..110: mol_type = other DNA
ttcaaaagaggagcctttgtaggcagctgcattatatgagaaaataacagggcagaactgaggttggaataagagcaagaaactactgtatatgcaatagactgtccctt

SEQ ID NO: 65479 - DNA, 110 bp, synthetic construct
  source 1..110: mol_type = other DNA
ctggctgtacagcaaagcccatttactgacactgggttgcagcgcagggtgcccagtgaggagtaccagcagctcatgctcaggaacctgatctccccagtggtttgagg

SEQ ID NO: 65480 - DNA, 110 bp, synthetic construct
  source 1..110: mol_type = other DNA
tcccctggctttggttttcattcccatccttgcatctgagacaaaagtcacatgttggttacatgtttaatcatccttagaagcagacttggcagcacttttggtccttt

SEQ ID NO: 65481 - DNA, 110 bp, synthetic construct
  source 1..110: mol_type = other DNA
ttctgttaaatggttccatcaccattcaaatttagattatcagttaaatgctctattatttttcctcaaagagtggttcctgtagctgtattttttctatacccaaaagt

SEQ ID NO: 65482 - DNA, 110 bp, synthetic construct
  source 1..110: mol_type = other DNA
tgcaccttaggtcccggccagccctcaactttctagatggtcatttggccaagatgggatataatgaccatttcagaagaagctacatggtcactatttaccttatttgg

SEQ ID NO: 65483 - DNA, 110 bp, synthetic construct
  source 1..110: mol_type = other DNA
tcacagcagccaaaagagaccgaccatctgtggaccagacggatttcccagtcctcaaccagagtagccagcatgctctctcaaagtagcccaagctgcacggacaaatt

SEQ ID NO: 65484 - DNA, 110 bp, synthetic construct
  source 1..110: mol_type = other DNA
caaccagagtagccagcatgctctctcaaagtagcccaagctgcacggacaaattcgatgtctccatctcccctgacatatgagaaggtccggtaccaatttcatcaggt

SEQ ID NO: 65485 - DNA, 110 bp, synthetic construct
  source 1..110: mol_type = other DNA
agtgatcacccaggactcccttaccagggcctactgccctcccctggtgcccaggaccagaacctgctgctgcccaccccacgtcaccagcagctctcaccactggacat

SEQ ID NO: 65486 - DNA, 110 bp, synthetic construct
  source 1..110: mol_type = other DNA
accagaacctgctgctgcccaccccacgtcaccagcagctctcaccactggacatcctgatgggaggatttcataacactggtcccccactggagcattaacattccagg

SEQ ID NO: 65487 - DNA, 110 bp, synthetic construct
  source 1..110: mol_type = other DNA
aaggaaatctttcccatgcttctgtgctagcttctggtagtgtgctggcagtcgttggtatgcctggcttgtaggtacatcacccttgtctgccttcatcatcacagaca

SEQ ID NO: 65488 - DNA, 110 bp, synthetic construct
  source 1..110: mol_type = other DNA
tagtagctccttaatcacaaaggaaacagagggaaagactggaattaatttgtagaagctgatctccaccaaaactaattcatagtccatcatctttcatggttgtactt

SEQ ID NO: 65489 - DNA, 110 bp, synthetic construct
  source 1..110: mol_type = other DNA
aagctgatctccaccaaaactaattcatagtccatcatctttcatggttgtactttttttttacttggggcctcttttgggggggagggggtgtttctcataaatgtttg

SEQ ID NO: 65490 - DNA, 110 bp, synthetic construct
  source 1..110: mol_type = other DNA
ctgtatacttcattcagctaagcttctattaactccaaacaggactcgttcaattacatcaaccttccctgccttcctccgccacattctacatagctaggtatgcaaac

SEQ ID NO: 65491 - DNA, 110 bp, synthetic construct
  source 1..110: mol_type = other DNA
acatcaaccttccctgccttcctccgccacattctacatagctaggtatgcaaactgcaaaaagtaggagtccatcaaggcagatgaaaacacaagccatttatagctcc

SEQ ID NO: 65492 - DNA, 110 bp, synthetic construct
  source 1..110: mol_type = other DNA
agacccaggcaaaatcaggcaaagagctctactgaagcccctgtcctgagcccacctctgtgcccacgaggcccacgatgtccttcttcagggggccccaaacagatctg

SEQ ID NO: 65493 - DNA, 110 bp, synthetic construct
  source 1..110: mol_type = other DNA
ctaaaggcaagcatggccatgtggtccctgctctcagaaagctcacattacaatgtttttcttttaggccgaaatcttgtccccttactttgggcccatgtgttctatgt

SEQ ID NO: 65494 - DNA, 110 bp, synthetic construct
  source 1..110: mol_type = other DNA
tctccctttactccactgtggtatgtgtgatatgtaatagggaaatgtatgctacttcccaggagctcagggagcaagttgccccgcctagagatggggtggagagtgat

SEQ ID NO: 65495 - DNA, 110 bp, synthetic construct
  source 1..110: mol_type = other DNA
aagaaaggagttgatcagatttacgagccaatgtctgggaagttgcatggtgagtaaaagaattatggaagtgctacatctgttcctagaaagtcatctgtgagtacttc

SEQ ID NO: 65496 - DNA, 110 bp, synthetic construct
  source 1..110: mol_type = other DNA
aaaagaattatggaagtgctacatctgttcctagaaagtcatctgtgagtacttcctaattttttaatgccagagtgtgtgttgtatgaattacaatgaagcacatccct

SEQ ID NO: 65497 - DNA, 110 bp, synthetic construct
  source 1..110: mol_type = other DNA
ctttacacatttcatggtaattcacagaaaactcccctgatgcttcttcaaagtctgcctaacactgaatttttttttcttttaaatactccttttattttcattgttca

SEQ ID NO: 65498 - DNA, 110 bp, synthetic construct; identical to SEQ ID NO: 65497
  source 1..110: mol_type = other DNA

SEQ ID NO: 65499 - DNA, 110 bp, synthetic construct
  source 1..110: mol_type = other DNA
tttgatgtgccattctccttttcttcatatcctgctgacatgggggtacttcactgagctctcagccttcagattagttccagaatctccaagaaaactcacagcctgtt

SEQ ID NO: 65500 - DNA, 110 bp, synthetic construct
  source 1..110: mol_type = other DNA
tactatctaaaacaattgaggcactgtcttatctttcaaatgatcttacatcaatattatgtatttcagttgaactttgttaggtactggcaagctctgaattcaagatt

SEQ ID NO: 65501 - DNA, 110 bp, synthetic construct
  source 1..110: mol_type = other DNA
attatgtatttcagttgaactttgttaggtactggcaagctctgaattcaagattatactgagaacaagaatctagagtctaggtagtctgtgttgccatatggttcaaa

SEQ ID NO: 65502 - DNA, 110 bp, synthetic construct
  source 1..110: mol_type = other DNA
taaaggtatcagagaacttcagccacaaagactaaaaagatttaagattctagataggggataaatttatggaggagagctaaggacctgagccttgcaagcctttgttg

SEQ ID NO: 65503 - DNA, 110 bp, synthetic construct
  source 1..110: mol_type = other DNA
tttacttttcgtgtttcacagaatgtaattctgagcattattaccaaaaggtcttatttgtgttagcttgagtccgaacatttttttcagctagttattttaaactcttg

SEQ ID NO: 65504 - DNA, 110 bp, synthetic construct
  source 1..110: mol_type = other DNA
aaagctcttccttcctctcattttctttcttctatctctttttccttgcatttcttccttccttcttgaatgattcagtctatacttaattagcttgggccactcaaggt

SEQ ID NO: 65505 - DNA, 110 bp, synthetic construct
  source 1..110: mol_type = other DNA
tccttccttcttgaatgattcagtctatacttaattagcttgggccactcaaggtaggttttctcattcaggaaggaatggcagaccagcatgggtactagatacaagga

SEQ ID NO: 65506 - DNA, 110 bp, synthetic construct
  source 1..110: mol_type = other DNA
acgtagtgcagttgtgtctttagaccaccttgggtcaatactatgtctatttttaaattgaaaaaaattgaagttttgttttagttctgtctctatactagaaagctaac

SEQ ID NO: 65507 - DNA, 110 bp, synthetic construct; identical to SEQ ID NO: 65506
  source 1..110: mol_type = other DNA

SEQ ID NO: 65508 - DNA, 110 bp, synthetic construct
  source 1..110: mol_type = other DNA
tttagatacccatgtggggacattgagtaggcaattaggtataggagtttgaatctcagaggggcagtctaagctggatatagttattttgtaagttatagtgtatcact

SEQ ID NO: 65509 - DNA, 110 bp, synthetic construct
  source 1..110: mol_type = other DNA
agtttgaatctcagaggggcagtctaagctggatatagttattttgtaagttatagtgtatcacttacatttaaagccacaatatttacataatcaatcaaggtttaagt

SEQ ID NO: 65510 - DNA, 110 bp, synthetic construct
  source 1..110: mol_type = other DNA
gagccctccgagtacctaaggccctttccatctctccagagctaatagccctctcagagattactggtcatgacaatctcctgagatcaggcattagatgatacatgagt

SEQ ID NO: 65511 - DNA, 110 bp, synthetic construct
  source 1..110: mol_type = other DNA
caaacccaacatagccaaatcataacccatcgactgttgaactgctgcatcaacttctttgcctaaataaatatctcttaagaaatgaattacttgataatttagagttc

SEQ ID NO: 65512 - DNA, 110 bp, synthetic construct
  source 1..110: mol_type = other DNA
cccatcgactgttgaactgctgcatcaacttctttgcctaaataaatatctcttaagaaatgaattacttgataatttagagttcattgttgtatttagggccaaatgta

SEQ ID NO: 65513 - DNA, 110 bp, synthetic construct
  source 1..110: mol_type = other DNA
agaggtaatgacctgaattatacttctatagcactacatcataaagaataagaccatgctttaggagctgtacacataggacactcttcattcattgctaaaatgatact

SEQ ID NO: 65514 - DNA, 110 bp, synthetic construct
  source 1..110: mol_type = other DNA
aacctccctagtgaaagcatcttgcatacactaacttgccaggctttcttatttcacttctattgtcacatgaacaaatatttaaactatttttcttagctatttattta

SEQ ID NO: 65515 - DNA, 110 bp, synthetic construct
  source 1..110: mol_type = other DNA
ggataagacaaatcatgtctcctttacagatatatgggaaagaccagtaaaatgaaatagttgaaaagatgttgggaagaaagacaacataatacaactacatacccact

SEQ ID NO: 65516 - DNA, 110 bp, synthetic construct
  source 1..110: mol_type = other DNA
ctgctgtactcactcatggctctgctttaaagacttggctgttagacatttatacatccattaattagcagctaggcatgatttaaaggataatgttcctggcattcagt

SEQ ID NO: 65517 - DNA, 110 bp, synthetic construct
  source 1..110: mol_type = other DNA
tttgtcactgccctccaataagtgccactggttttcaaaccagctaaaggaacgtgtcttcctggcattgaccccagggctggggtactcaatatatggctcaaacctct

SEQ ID NO: 65518 - DNA, 110 bp, synthetic construct
  source 1..110: mol_type = other DNA
ttaaaccatgtataagacttctgacttcaccatacctcagtactgcagatttttccatcatttttccttttgattgcaaatctttcaacagaaagtactgacaatcaaag

SEQ ID NO: 65519 - DNA, 110 bp, synthetic construct
  source 1..110: mol_type = other DNA
ggtaccaagagtgggtatcctgatgcattatgtcatcaaagtatacaatgtcatagggaaaaatggatgactttcaacaaagggccattatgttaagcaatgtaggtact

SEQ ID NO: 65520 - DNA, 110 bp, synthetic construct
  source 1..110: mol_type = other DNA
cgcccggatggcgctttcctcccaggaccggtgagtagcctggagagcgcagggggtcggcgcccaggccgggagcggagaggacctctaccactctacggttaggggta

SEQ ID NO: 65521 - DNA, 110 bp, synthetic construct
  source 1..110: mol_type = other DNA
gtcggcgcccaggccgggagcggagaggacctctaccactctacggttaggggtacccccaaaccacctgctgtgattctccaatcttcaggcagggggtctcgggagga

SEQ ID NO: 65522 - DNA, 110 bp, synthetic construct
  source 1..110: mol_type = other DNA
tttttatttttggaaaaaaaattgtttcttctgagttaaatgtcagtaacatatgagatagtagactatggtgatttaacacacccccgaggtttactttgcagccccca

SEQ ID NO: 65523 - DNA, 110 bp, synthetic construct
  source 1..110: mol_type = other DNA
agatagtagactatggtgatttaacacacccccgaggtttactttgcagcccccaaactatggattgggtgatcatttttaagctgcagagaaactcccattgcagctgg

SEQ ID NO: 65524 - DNA, 110 bp, synthetic construct
  source 1..110: mol_type = other DNA
gtaaggcagagagtgaatgtatgactatcttaatagtcttagattatgagctgctagatgacaggaaacatggcttttctaggctttatactgcatttaccatttgtaag

SEQ ID NO: 65525 - DNA, 110 bp, synthetic construct
  source 1..110: mol_type = other DNA
cttcaagtgtctgtgtgtggttcatttcctcttgttatttgctgtttaatattaagagctcatcttctatagagcgaaaacatttcctgggtatctttcacatatataag

SEQ ID NO: 65526 - DNA, 110 bp, synthetic construct
  source 1..110: mol_type = other DNA
taagttaaataataagctgctgtggtttaattgatagtcttttgcatgaaatggtcactggcagccctttttatgctttatcaacatttgctcagttttgttttatttgt

SEQ ID NO: 65527 - DNA, 110 bp, synthetic construct; identical to SEQ ID NO: 65526
  source 1..110: mol_type = other DNA

SEQ ID NO: 65528 - DNA, 110 bp, synthetic construct
  source 1..110: mol_type = other DNA
ccagacaagactccctggacaatgacctcagctgatgtattttgtcttctaaacatgtattcagctggggaggggatgtcacaaatggcatgaaatcctggctctttctt

SEQ ID NO: 65529 - DNA, 110 bp, synthetic construct
  source 1..110: mol_type = other DNA
ataataaaacagttatatccagcatttactgaggacagagaaaacaaatcaaatagccctgacagctaacaattaggctgtgatgttccctaccgaaattaaaccgttgt

SEQ ID NO: 65530 - DNA, 110 bp, synthetic construct
  source 1..110: mol_type = other DNA
agctgttggcctactccacagccacaataacatgagatctgagctgcatctacaacctacacctcagctttcagcaaactggtgccttaacccactgagcgaggccaggc

SEQ ID NO: 65531 - DNA, 110 bp, synthetic construct
  source 1..110: mol_type = other DNA
cctacacctcagctttcagcaaactggtgccttaacccactgagcgaggccaggcatcaaaccttcatcctcatagacactgtgtcgggttcttaacccactgatcccct

SEQ ID NO: 65532 - DNA, 110 bp, synthetic construct
  source 1..110: mol_type = other DNA
gagcaggaaagaggtgaggaaattccctgaaaagggtggggagaccaggagtatctgtcccagctttgcactctgactggacgcgctagggcccactacaggacatgcgg

SEQ ID NO: 65533 - DNA, 110 bp, synthetic construct
  source 1..110: mol_type = other DNA
tgtcccagctttgcactctgactggacgcgctagggcccactacaggacatgcggacttgatttcttcaaaagtaagtggaggaattcccttagtggctcagcagttcat

SEQ ID NO: 65534 - DNA, 110 bp, synthetic construct; identical to SEQ ID NO: 65532
  source 1..110: mol_type = other DNA

SEQ ID NO: 65535 - DNA, 110 bp, synthetic construct; identical to SEQ ID NO: 65533
  source 1..110: mol_type = other DNA

SEQ ID NO: 65536 - DNA, 110 bp, synthetic construct
  source 1..110: mol_type = other DNA
ggtcagaatcattgagacctggctactctaagagtgggcttcagaccagtaaacgacagctttgcctggcaactattagaaactcaggatctagagccctaacactggcc

SEQ ID NO: 65537 - DNA, 110 bp, synthetic construct
  source 1..110: mol_type = other DNA
gcttcttctcgatgaccagcgaggcaaagacctctgccctccagacatcccctatgtgtccagtctcctgtgtaggcaagctagcaactgagcagcatctactcacttaa

SEQ ID NO: 65538 - DNA, 110 bp, synthetic construct
  source 1..110: mol_type = other DNA
aggtaggtaacattcctttgtttcccttttgacctttattccctaccccgaacaatctgatgtacagcaagagctgagaaccacagaacttaaaccaactcatcctattt

SEQ ID NO: 65539 - DNA, 110 bp, synthetic construct
  source 1..110: mol_type = other DNA
catcgcgcttgcctttggctcaaggttccgactcaactggcatcctacaagtctttgattttccttttgcttgaagaggcagcggttgtcttgacagcggagctaaagct

SEQ ID NO: 65540 - DNA, 110 bp, synthetic construct
  source 1..110: mol_type = other DNA
tgattttccttttgcttgaagaggcagcggttgtcttgacagcggagctaaagctctgtccttgtactttgatgcacattgtagtacaatctaataatcaaagtcatttg

SEQ ID NO: 65541 - DNA, 110 bp, synthetic construct
  source 1..110: mol_type = other DNA
ttttctaaggttttttttctacccaaagctcacatttatcaacagctttgcagttcagtgaggtcaatggactagttccatccagttagatgtgagcagaagtgcaacgc

SEQ ID NO: 65542 - DNA, 110 bp, synthetic construct
  source 1..110: mol_type = other DNA
ttccttcttgcttatcatccctcattcaattttctgctgactcaccttctccttcttctctccccagcctcattaagctagatttcccggagggcaatcttcagactgcc

SEQ ID NO: 65543 - DNA, 110 bp, synthetic construct
  source 1..110: mol_type = other DNA
ttcaaaaagagcacggacaattctagctgcgttctgaagaatgaaaagggggattggtggttaggtccaatgtaatttttttttttaggtctaacgcaattttaaatttg

SEQ ID NO: 65544 - DNA, 110 bp, synthetic construct
  source 1..110: mol_type = other DNA
agggaacccaattatacttcttaattgaagtggtgataacatgctgctatatccggcagctagtattcttattttggatatagcatgtatatatactgacagtatataaa

SEQ ID NO: 65545 - DNA, 110 bp, synthetic construct
  source 1..110: mol_type = other DNA
ccaattccctttattctgatcccaagctaattttaagtcaacttcaaattactgtatggtttctcatgtaaattgagaatgctggggccatgcaattcaagttttgccat

SEQ ID NO: 65546 - DNA, 110 bp, synthetic construct
  source 1..110: mol_type = other DNA
ctccgcatccattactacagtcctagccagggaaccttcccctagacatgtacatgggagccccaacaagcctctcaagctacacaatccataccatgtctatatttaaa

SEQ ID NO: 65547 - DNA, 110 bp, synthetic construct
  source 1..110: mol_type = other DNA
tgaaccataaattttggttccaaaaatttttggttaatgaaaatgtgatctctcagttctaattattaccctctcatctagtagataatacccaaagaggcaagtttcca

SEQ ID NO: 65548 - DNA, 110 bp, synthetic construct
  source 1..110: mol_type = other DNA
gtgtcttggctatagtgactagtgttgcaattcccatcatggctcagcttttaaggaacccaactagtatccatgaaataaaaatttagagccatactcatagcagccat

SEQ ID NO: 65549 - DNA, 110 bp, synthetic construct
  source 1..110: mol_type = other DNA
acaaagtttcttcaccagaaaatttagctggacattttacatgccagatgtgattggttttaatgaagatgaattagttaatcttaagatctatgcacaatgtttcctta

SEQ ID NO: 65550 - DNA, 110 bp, synthetic construct
  source 1..110: mol_type = other DNA
tccctggagtttgaaaaatgaataaccaagtgccctacctgtaaggcctaaccgctaggacactttgctgccgaaagcagatgcagcagctttttaagttcaacagctca

SEQ ID NO: 65551 - DNA, 110 bp, synthetic construct
  source 1..110: mol_type = other DNA
gattttaatctgtttcctgttgctgcaaaaaaaaaccataatcacgagtattgtagcttatctgaattcttcaagtcccagcaaattatcaaaactaaaagtggtcttgg

SEQ ID NO: 65552 - DNA, 110 bp, synthetic construct
  source 1..110: mol_type = other DNA
gttcctaacacaggtttacaggaatggttttgattgtgactctaagtatactaatgttttcagcagctatgtgtatgttggaatttaatttattaaacactgagatgcat

SEQ ID NO: 65553 - DNA, 110 bp, synthetic construct
  source 1..110: mol_type = other DNA
cttacctaaacaaaacaattgaagttgaaatggtatgtgtttatcagggcacaagagcacaattccaaaagactagtattcgcgcaagaatgaaactcagcttatccaga

SEQ ID NO: 65554 - DNA, 110 bp, synthetic construct
  source 1..110: mol_type = other DNA
agcacaattccaaaagactagtattcgcgcaagaatgaaactcagcttatccagagaaaaggtaaagctgatattaaaaataaatagatagaactctaagaaaaagaaaa

SEQ ID NO: 65555 - DNA, 110 bp, synthetic construct
  source 1..110: mol_type = other DNA
gatcgaatccacatcctcatggatactggtaggttccttactggtgagccacaacaggaatttcctgcagcttctctttacctctctggcctcccatttggaaactttat

SEQ ID NO: 65556 - DNA, 110 bp, synthetic construct
  source 1..110: mol_type = other DNA
aggaatttcctgcagcttctctttacctctctggcctcccatttggaaactttattgatgctttcatcttttttccaaggcatttttatgtagttctttcctttattcat

SEQ ID NO: 65557 - DNA, 110 bp, synthetic construct
  source 1..110: mol_type = other DNA
agaagacacccccatgtggatgtaaatgggaactcgtagatctcatagcacaaaccaggtaagggggattggccccaaagcaggctcagcaagaagttcagggctcagaa

SEQ ID NO: 65558 - DNA, 110 bp, synthetic construct
  source 1..110: mol_type = other DNA
caggtgaaattgagatgttctgctacatttttactatttgttcacaggtagtctttttactcagtaattaatacatagctttgtttcccatgaaatgcctcttttaaagt

SEQ ID NO: 65559 - DNA, 110 bp, synthetic construct
  source 1..110: mol_type = other DNA
attaggctaagattggggaccactgctccctacttggcttcgtcagtgatcagtgttgagaaagcagagtggcctgaaataccggtgaggatgtgacacagaacaggtga

SEQ ID NO: 65560 - DNA, 110 bp, synthetic construct
  source 1..110: mol_type = other DNA
ttgagaaagcagagtggcctgaaataccggtgaggatgtgacacagaacaggtgaaaaccctcatgccctcccagacgtggtttccgcctagctctccttcgtacacatc

SEQ ID NO: 65561 - DNA, 110 bp, synthetic construct
  source 1..110: mol_type = other DNA
aaaactgaatcctgagttggagtttggaaatgatgtgcagagtaaggggagggaataaactggagaacaagggagttgggaaagagaagtgggaaagaagagtgcgccaa

SEQ ID NO: 65562 - DNA, 110 bp, synthetic construct
  source 1..110: mol_type = other DNA
aagactgatcaatcttgttacatccaccatcaatttctctttaaaatttttcctttttggcagttcccatcatggcccagtagaaacaaatctgactagcatccctgagg

SEQ ID NO: 65563 - DNA, 110 bp, synthetic construct; identical to SEQ ID NO: 65562
  source 1..110: mol_type = other DNA

SEQ ID NO: 65564 - DNA, 110 bp, synthetic construct
  source 1..110: mol_type = other DNA
tagttgtcttctgcagacatcatctttcttctctgctattttttgtccactctttccagaagcacctttactaggaacctgtacactttacacttgatgtagcttccgtg

SEQ ID NO: 65565 - DNA, 110 bp, synthetic construct
  source 1..110: mol_type = other DNA
ccagaagcacctttactaggaacctgtacactttacacttgatgtagcttccgtgacctcatatttctttggtatctctgaacacagcttgttaataagtgtctctaaga

SEQ ID NO: 65566 - DNA, 110 bp, synthetic construct
  source 1..110: mol_type = other DNA
gccagcataaagaagtttttgaggaactcagtctaggaatgcagaatgaaaaccctactctgaactcaaagactgtcccctccttccaagggacatccctatcattctct

SEQ ID NO: 65567 - DNA, 110 bp, synthetic construct
  source 1..110: mol_type = other DNA
ctggattcaaaaaacccattttggtagtggcaagatacctggcttcagcatgacttacaattcaggaagccaaacgcagatttgtaagcctttctttaggagaagaaaag

SEQ ID NO: 65568 - DNA, 110 bp, synthetic construct
  source 1..110: mol_type = other DNA
aactgggggcaatcctggcattcacaggaaggagctggttccgtttggagcccgggagcagagaatcgtgcaagactgttaaaaggtgattgaatgaggcattgcaggga

SEQ ID NO: 65569 - DNA, 110 bp, synthetic construct
  source 1..110: mol_type = other DNA
catgtccttgcccatgaccctgtagacaccttcagtggaacctggaccctgaaatgtcagctggacttgcacccaaggcctggatgtccaggggtatggattttccagat

SEQ ID NO: 65570 - DNA, 110 bp, synthetic construct
  source 1..110: mol_type = other DNA
gtcagctggacttgcacccaaggcctggatgtccaggggtatggattttccagattttcacctcaattccatgacttgccaaactgggtgaacatgccactttgcacacc

SEQ ID NO: 65571 - DNA, 110 bp, synthetic construct
  source 1..110: mol_type = other DNA
gctacagcttaccatggcaggtcactcagccctgacttcctctccaaactttagtccttctccacagccctgcatgctgtaggagactctgatgccaacactctgcctaa

SEQ ID NO: 65572 - DNA, 110 bp, synthetic construct
  source 1..110: mol_type = other DNA
ccttctccacagccctgcatgctgtaggagactctgatgccaacactctgcctaagctctctctatcctcctggtatttccttctcttttccagtgtctgcatctttcct

SEQ ID NO: 65573 - DNA, 110 bp, synthetic construct
  source 1..110: mol_type = other DNA
agatacaatgtgggacattacttattcctttggcccagacagctttgtacatcagagttcccatctcctttgtgggaaatttctgagtttctctgagcatccaaggaggg

SEQ ID NO: 65574 - DNA, 110 bp, synthetic construct
  source 1..110: mol_type = other DNA
aaagccctgcaggacacttgctgtagcttatgtttgatttctagaactggttcatcacagttggatgtgagccagccacccactccaagctcgtgtccctggggctctgc

SEQ ID NO: 65575 - DNA, 110 bp, synthetic construct
  source 1..110: mol_type = other DNA
aggctagaggatactgaagagtgaggccctggagagcagctagctgagagctgaagttaggatggggttgccatggtctgtgctctgtgcctgggacttggggtacattt

SEQ ID NO: 65576 - DNA, 110 bp, synthetic construct
  source 1..110: mol_type = other DNA
gtcattttaatttttttttttctttttttgagtctgtgtattctcctcattcctggtggtggtgaagtcatactggaggaatttttacaggggcagacgttgttgtgtct

SEQ ID NO: 65577 - DNA, 110 bp, synthetic construct
  source 1..110: mol_type = other DNA
tcccatttagctacacaattccaagctcttctcagggttctcctctctgggacccaaatgaacaagaaatgtaatataaagtgagcaagaaaaactataatcaaaaagag

SEQ ID NO: 65578 - DNA, 110 bp, synthetic construct
  source 1..110: mol_type = other DNA
atcatttgatcgatagtttaaaatttgacccatgagcctgtcctttttatttcttttaagcccaaacagctactcttgagtggccaccaggccgaagagtttgtggaggg

SEQ ID NO: 65579 - DNA, 110 bp, synthetic construct
  source 1..110: mol_type = other DNA
tttaaaaaccagtagaatctcttccccttacatggtggccatccattttcagctttttctgtctcccctgtcagcctccagaaatgacccatcttgtgaggcctctctcc

SEQ ID NO: 65580 - DNA, 110 bp, synthetic construct
  source 1..110: mol_type = other DNA
tgtggattctagaaccagttgccttcatatgtcaagagtcagtcactcattcagcaagtatttatagatctatttttttttttccaggcactgtgttaaagatacgaagg

SEQ ID NO: 65581 - DNA, 110 bp, synthetic construct
  source 1..110: mol_type = other DNA
aagtatttatagatctatttttttttttccaggcactgtgttaaagatacgaaggccaaaggtagagttgctgccatcaaagagctaatgggaaaagttaggtgggccag

SEQ ID NO: 65582 - DNA, 110 bp, synthetic construct
  source 1..110: mol_type = other DNA
gagagccgtgctccctcagaagactccaggggagtatccaacttggctcctagcttctggtgatccttggcttgcaactgcagcactttaatttctacctctcatgtcac

SEQ ID NO: 65583 - DNA, 110 bp, synthetic construct
  source 1..110: mol_type = other DNA
tctggtgatccttggcttgcaactgcagcactttaatttctacctctcatgtcactacattgttctctgttctgtcttggtagcattcttctccctgtgtgtgtgtgtgc

SEQ ID NO: 65584 - DNA, 110 bp, synthetic construct
  source 1..110: mol_type = other DNA
tgtgtttcaagagaaaatacttcacctcacctttatttgtattgtctctgcctttaggtcacagtaaagctgttagggacatctgctttaatactgcaggaacacagttc

SEQ ID NO: 65585 - DNA, 110 bp, synthetic construct
  source 1..110: mol_type = other DNA
tatcaggatgtcgaaataagttttgatcaattcacagaatctgtcaccagcaaagccccataacgatacccaggaaataaaaatagaatacaggtaataaaatcaagtct

SEQ ID NO: 65586 - DNA, 110 bp, synthetic construct
  source 1..110: mol_type = other DNA
aaaaaaatctcatctactttgactcagtctttaatgtcaccccctcaggtcctgtccagcccttctatttaaaattataatcacccctctgcatttaattattaccaccc

SEQ ID NO: 65587 - DNA, 110 bp, synthetic construct
  source 1..110: mol_type = other DNA
aaacaggtaaggtagactagacaagagtagggacacagactccttgtcattgttccattcccagtacctggcatgcgcttggtactcaaatactttttgcccacttgcag

SEQ ID NO: 65588 - DNA, 110 bp, synthetic construct
  source 1..110: mol_type = other DNA
cattcccagtacctggcatgcgcttggtactcaaatactttttgcccacttgcaggttgagctcatgagttggatgaattgcttgaataccaggtttactaatcgcccta

SEQ ID NO: 65589 - DNA, 110 bp, synthetic construct
  source 1..110: mol_type = other DNA
acacaaaaagtttgaaacacactgacttaagagtggttgacaacttaaaggggtagtgtttgggcatcctcagtggaagtccagttttcctggtgcctgctttcttcttg

SEQ ID NO: 65590 - DNA, 110 bp, synthetic construct
  source 1..110: mol_type = other DNA
gtgtttgggcatcctcagtggaagtccagttttcctggtgcctgctttcttcttggcggttactgggaatctgggatagtccactctgggaacttagattagcccccgag

SEQ ID NO: 65591 - DNA, 110 bp, synthetic construct
  source 1..110: mol_type = other DNA
tagccgacttcctggggtagctttgacactgactgtgtccacaaaccctcccctagcctgaggtcaggagcacgaggggcagagaggatgcaactgcccctgagcagacg

SEQ ID NO: 65592 - DNA, 110 bp, synthetic construct
  source 1..110: mol_type = other DNA
cagtgatgtgctcagagcccctggagggttggctggctacgatatgaaagtcccagaatccgggggctgaatggaatgttaacatctagtttggaagtctttaagctgtt

SEQ ID NO: 65593 - DNA, 110 bp, synthetic construct
  source 1..110: mol_type = other DNA
gaaagtcccagaatccgggggctgaatggaatgttaacatctagtttggaagtctttaagctgtttttttttttttttaattattattattttagtgcaagaaccataca

SEQ ID NO: 65594 - DNA, 110 bp, synthetic construct
  source 1..110: mol_type = other DNA
gtatcaggtctagtttaaaaagatgaataagcaaacttctgtttcttgctcatccaagtttgtgagttgatcgacacatactgcttctacattgaatgaaagtttcttgc

SEQ ID NO: 65595 - DNA, 110 bp, synthetic construct
  source 1..110: mol_type = other DNA
catgtggtatgaggtaccattgaattaactgaggatgctcaatttggaaaaattattcagtgtgtgaatgtgtgttgggtacagcaagttccattctctaaaaagctcct

SEQ ID NO: 65596 - DNA, 110 bp, synthetic construct
  source 1..110: mol_type = other DNA
cttattacatttcccaacacttccttgggatatattttcctttccttacagcctattcaagtttgttgttgataaaacatggtctcataatgaccttcatggcttaaaat

SEQ ID NO: 65597 - DNA, 110 bp, synthetic construct
  source 1..110: mol_type = other DNA
ttcaagtttgttgttgataaaacatggtctcataatgaccttcatggcttaaaatacttttcgcttgttctgtatgtccttgctttgttaccttcaaaacactggttaaa

SEQ ID NO: 65598 - DNA, 110 bp, synthetic construct
  source 1..110: mol_type = other DNA
aaatcatgggaatttagcccatgtcgctcagatcttggcatcctcagaactaatattttctagcaaatgggatttctggtcattctttaaataactctcttccaagcaat

SEQ ID NO: 65599 - DNA, 110 bp, synthetic construct
  source 1..110: mol_type = other DNA
ttttctagcaaatgggatttctggtcattctttaaataactctcttccaagcaatgatctcacttgtagggtctgctcctctttcatctacagttcctactgctcaagtt

SEQ ID NO: 65600 - DNA, 110 bp, synthetic construct
  source 1..110: mol_type = other DNA
cactggtaacctctgtaaggctgttcctgtctctgtctgcttagacccacctgcaccccttctccaggtacatgctgtcttttcaagctgtacatgggaaggacaacaac

SEQ ID NO: 65601 - DNA, 110 bp, synthetic construct
  source 1..110: mol_type = other DNA
ccccttctccaggtacatgctgtcttttcaagctgtacatgggaaggacaacaacacaggtctcctccattctgagtgtataaacctgccctgggttcatcaaagcagta

SEQ ID NO: 65602 - DNA, 110 bp, synthetic construct; identical to SEQ ID NO: 65600
  source 1..110: mol_type = other DNA

SEQ ID NO: 65603 - DNA, 110 bp, synthetic construct; identical to SEQ ID NO: 65601
  source 1..110: mol_type = other DNA

SEQ ID NO: 65604 - DNA, 110 bp, synthetic construct
  source 1..110: mol_type = other DNA
aagtaaagactggggatagtgcttggcccatacatagcaagtattcaatagatgctagctattattatcataaagaacatgttttataaggataaaaaaaaatcggatga

SEQ ID NO: 65605 - DNA, 110 bp, synthetic construct
  source 1..110: mol_type = other DNA
ttagcaagaaatctgttcatattgtgaaaggtatgttcatggctttactgaaacgagtctaagcaatctttaaagcataaaaggcactatgaaaacttccccaaagcata

SEQ ID NO: 65606 - DNA, 110 bp, synthetic construct
  source 1..110: mol_type = other DNA
cactgcgttacccataaaggacacaaagctgggtgtgggcaataatggcagatcgccaagttttaattgtgctaaggtctatctgcaatgcccaggaaagaaagttgcta

SEQ ID NO: 65607 - DNA, 110 bp, synthetic construct
  source 1..110: mol_type = other DNA
tacttagacaaatgaagtggggaaaataaagcagggtgaaggcaataggaaatgccaaagttcaggggtaaggtcagaatggatgtcactattagataggatggtcactg

SEQ ID NO: 65608 - DNA, 110 bp, synthetic construct
  source 1..110: mol_type = other DNA
tgacagaaactccagaagaggttttgaaacactgatgcttacttgtcagctctagagattctactttattgatctggtgaggggccccactaaaatgtatttttatcaaa

SEQ ID NO: 65609 - DNA, 110 bp, synthetic construct; identical to SEQ ID NO: 65608
  source 1..110: mol_type = other DNA

SEQ ID NO: 65610 - DNA, 110 bp, synthetic construct
  source 1..110: mol_type = other DNA
tgttttcccaaatacggatttgcaccgaacgttagggccctccacatatcaaggttgaattaccccaaatttcggaaatacattttcaactcaactgtattatctgagct

SEQ ID NO: 65611 - DNA, 110 bp, synthetic construct
  source 1..110: mol_type = other DNA
tgaattaccccaaatttcggaaatacattttcaactcaactgtattatctgagctttaaccatcagctgtgctctgcttcttttgctaaaggaatgggagtttccaatat

SEQ ID NO: 65612 - DNA, 110 bp, synthetic construct
  source 1..110: mol_type = other DNA
cctgctgctctctctatagagactgttttaaacagctgttggcaactgcttctccttagtgcccctactcctacttaatccaaacaggacagaggttgagaaccaggaga

SEQ ID NO: 65613 - DNA, 110 bp, synthetic construct
  source 1..110: mol_type = other DNA
caggatttttgaaggaactgccaagggagcaaatgagcaaattgtggcctgcaaatgagagccagctcagtgtcattttgaacaaaaccaagccccaaactctccagcag

SEQ ID NO: 65614 - DNA, 110 bp, synthetic construct
  source 1..110: mol_type = other DNA
ctgaatacccctggtgtggttatgagcaaatggaggactcagtattactcagcacattctacagttgttgtagcttcaagaaaggcagacttagcacaccactccctgct

SEQ ID NO: 65615 - DNA, 110 bp, synthetic construct
  source 1..110: mol_type = other DNA
attctacagttgttgtagcttcaagaaaggcagacttagcacaccactccctgcttttacagttcttccctgacttcctaatgccatgagaacaaaaatctaagctcctt

SEQ ID NO: 65616 - DNA, 110 bp, synthetic construct
  source 1..110: mol_type = other DNA
atgttaatatttgaaaactttcagaagttaaaaacaaacaaaaaacagctaaatgccctgcagattattggaaactggcagaagtttgaacagaaaaagatgaccactgg

SEQ ID NO: 65617 - DNA, 110 bp, synthetic construct
  source 1..110: mol_type = other DNA
gctgtttcaatgtcaaattgtatcagagggtttagactccttttaggctgcaacagtcgcctcctagctgtgttctctttcctttggtcaaatggactttcatttaaaag

SEQ ID NO: 65618 - DNA, 110 bp, synthetic construct
  source 1..110: mol_type = other DNA
caacaccttttggttgaaagggtgtctttgtagttgaaatctgagctaaaagccgattccttgctcccagtagggtagcaatacggaagccatagcagctcctgtccctc

SEQ ID NO: 65619 - DNA, 110 bp, synthetic construct
  source 1..110: mol_type = other DNA
gttactgctctgaggtattgtttgaatagtaagttctttaaagttgagctggtgtactttagagaacatattaatctagaatttttttcttttttacccagacaactaaa

SEQ ID NO: 65620 - DNA, 110 bp, synthetic construct
  source 1..110: mol_type = other DNA
aatagccaaaaaacgtaaaatcctttgaaaatgaaccccccaaaaaaaccccgaatgtggtatataaatgtgacttttaaaacgataccacaaaataccatacttaaatt

SEQ ID NO: 65621 - DNA, 110 bp, synthetic construct
  source 1..110: mol_type = other DNA
ccccccaaaaaaaccccgaatgtggtatataaatgtgacttttaaaacgataccacaaaataccatacttaaattacatatgaatacagttggaattggtgaaactgttg

SEQ ID NO: 65622 - DNA, 110 bp, synthetic construct
  source 1..110: mol_type = other DNA
aatgaagggagaggaacaaagtttaacctaatttacattacaatcttggcttacgtcagctttgtgaagtgctgatctaatattatgtgcactaagtaggagccaaccct

SEQ ID NO: 65623 - DNA, 110 bp, synthetic construct
  source 1..110: mol_type = other DNA
tcagctttgtgaagtgctgatctaatattatgtgcactaagtaggagccaaccctgaaacaaaccttgacaattacttccagtcctcagatagatttaacaaaataagtc

SEQ ID NO: 65624 - DNA, 110 bp, synthetic construct; identical to SEQ ID NO: 65622
  source 1..110: mol_type = other DNA

SEQ ID NO: 65625 - DNA, 110 bp, synthetic construct; identical to SEQ ID NO: 65623
  source 1..110: mol_type = other DNA

SEQ ID NO: 65626 - DNA, 110 bp, synthetic construct
  source 1..110: mol_type = other DNA
aaagacagagaatactctaaacaaattgatataaacctatgtatgttagcagtcttcagctcaggcttctctctagaaattcacaaatgcaaaacccaattcttcctcat

SEQ ID NO: 65627 - DNA, 110 bp, synthetic construct
  source 1..110: mol_type = other DNA
tcagctcaggcttctctctagaaattcacaaatgcaaaacccaattcttcctcatcaactacacttaaaaatatgtccttcttattggctgtggctgtggcctacgccgg

SEQ ID NO: 65628 - DNA, 110 bp, synthetic construct
  source 1..110: mol_type = other DNA
tgatgccaagaaactgtggcataagcctggttcttaggcactccagagacctctgagctattcacgatccttcagttaatctcttctgctaatattggctaggtgatctc

SEQ ID NO: 65629 - DNA, 110 bp, synthetic construct
  source 1..110: mol_type = other DNA
agctattcacgatccttcagttaatctcttctgctaatattggctaggtgatctcatcccttgaaaactaactgattcacaatctttctgatatttataatagttcaata

SEQ ID NO: 65630 - DNA, 110 bp, synthetic construct; identical to SEQ ID NO: 65628
  source 1..110: mol_type = other DNA

SEQ ID NO: 65631 - DNA, 110 bp, synthetic construct; identical to SEQ ID NO: 65629
  source 1..110: mol_type = other DNA

SEQ ID NO: 65632 - DNA, 110 bp, synthetic construct
  source 1..110: mol_type = other DNA
aaagaaactgaagacacaaataaacaaaaagctactctgtgctcatggattgggagaatattaaattgtccatactacctaaagcaatctaaaaattcaatgtgattccc

SEQ ID NO: 65633 - DNA, 110 bp, synthetic construct
  source 1..110: mol_type = other DNA
taccactgagccacaatgggaactccaggaaataacttttaaatgtcaatgttggaagagaacctgacacacagaggcaaagtaattgaatgagcagtgtttgctaatga

SEQ ID NO: 65634 - DNA, 110 bp, synthetic construct
  source 1..110: mol_type = other DNA
cttttaaggtgtcccccacataatgttctctgctgtttctcctgaagcgaagcatgcttgtcaggaagctctgctcacatgtacatggtttgctctgctgttcttcctga

SEQ ID NO: 65635 - DNA, 110 bp, synthetic construct
  source 1..110: mol_type = other DNA
catggaagcctgagacatggaggagagtgaggtgtaaagaggtaagggttacagtttctagtagacaggtcagctgctgtatcaaagccagaaagcatgaggagtttagg

SEQ ID NO: 65636 - DNA, 110 bp, synthetic construct
  source 1..110: mol_type = other DNA
agctggcaaagtcactgtgtctgcacagaaagctcagaaggccaaatgaacattatccccaatacctgccatcccagtccaggcataatcactggtggaaaaaccattgg

SEQ ID NO: 65637 - DNA, 110 bp, synthetic construct
  source 1..110: mol_type = other DNA
gataggaaagccctatggggcgtgtggggcgcagcacctagagaaatccccaggcaggagggaagctagttgttgaaggcaggaaaactaaagcgcctcagatgcagtct

SEQ ID NO: 65638 - DNA, 110 bp, synthetic construct
  source 1..110: mol_type = other DNA
aggagggaagctagttgttgaaggcaggaaaactaaagcgcctcagatgcagtctgtcagacttgacttgacatcctggctgtgtgctaactaggtaatttcataatgcc

SEQ ID NO: 65639 - DNA, 110 bp, synthetic construct
  source 1..110: mol_type = other DNA
aatcttgtctgagattgaactagaaagctattgcatagaacagaaagagcacctttctgacaatactatgcagtgactacgtagggataggtagactaaaagcaagttaa

SEQ ID NO: 65640 - DNA, 110 bp, synthetic construct
  source 1..110: mol_type = other DNA
gctgtgttagacctggagccacaacggttagcaagacaagtccatctctggtttcatagagctatcagctgactgccaagcattgccttctgaaacaccctctgttcagt

SEQ ID NO: 65641 - DNA, 110 bp, synthetic construct
  source 1..110: mol_type = other DNA
atagagctatcagctgactgccaagcattgccttctgaaacaccctctgttcagtaaaggaatctcagaagtactgtgggtcagacattggcaaactgtggtgcacaagc

SEQ ID NO: 65642 - DNA, 110 bp, synthetic construct
  source 1..110: mol_type = other DNA
acctaacacagaacatttggcttatttcttctggaaatttctcaaggccttcatccatattaggactagctagccaaaccatgtaggctacacaacatcagagacagaaa

SEQ ID NO: 65643 - DNA, 110 bp, synthetic construct
  source 1..110: mol_type = other DNA
cccaaaagctgaaagtatttattatctggcttttgtaggaagtttgtcaatcccctctttaaacctagctacaatttgattttttttatcactatgtgtgatagaagtat

SEQ ID NO: 65644 - DNA, 110 bp, synthetic construct
  source 1..110: mol_type = other DNA
cagaaactttatcagataaattaggaaggccacattttatgtagcctatagaaacctaaaggtatttggattttcaaaagggaaggaattcaccaagaagtttaaaataa

SEQ ID NO: 65645 - DNA, 110 bp, synthetic construct
  source 1..110: mol_type = other DNA
tttatgtagcctatagaaacctaaaggtatttggattttcaaaagggaaggaattcaccaagaagtttaaaataaaaatctccaagacaagcccttgacatgactttcct

SEQ ID NO: 65646 - DNA, 110 bp, synthetic construct
  source 1..110: mol_type = other DNA
gtataaaacaaaataaaatgcatgtccttgaggggcttgcattctaatcgagaaaggtataaaataagctacacatggtatccgtacataagaagatggtgaatactgtg

SEQ ID NO: 65647 - DNA, 110 bp, synthetic construct
  source 1..110: mol_type = other DNA
ggtataaaataagctacacatggtatccgtacataagaagatggtgaatactgtggagaaaataaaacatggaagaagagaaagtgtactgggtagagaataaatatgga

SEQ ID NO: 65648 - DNA, 110 bp, synthetic construct
  source 1..110: mol_type = other DNA
gccactgtagctatcttagactcctaaggcaggtgtggctctctgccattaaattcctgaaagcaggcactgcctgcagccccagtcacctcaggactccctgccaagga

SEQ ID NO: 65649 - DNA, 110 bp, synthetic construct
  source 1..110: mol_type = other DNA
taggtgcaaaatacaaggagcccaaggacgtctctgcaaagtactatgagggggagaaaaatctcatcagctctgctgcagatataaggatgaaaaaacaataaactgta

SEQ ID NO: 65650 - DNA, 110 bp, synthetic construct
  source 1..110: mol_type = other DNA
aatggagaaatgcaagactctagagctgatgcagagaagatacaaagaaatcaggatcacctggttctatcataaagtaaataaccaaagaataacagggatatgtaaaa

SEQ ID NO: 65651 - DNA, 110 bp, synthetic construct
  source 1..110: mol_type = other DNA
acatcatgactttagcatcactccagatcagcagcagaaacctgtagcgccttggcttgagtcctgtgctctagtaactacactcttgctataggtgctctttgagctca

SEQ ID NO: 65652 - DNA, 110 bp, synthetic construct
  source 1..110: mol_type = other DNA
cttgagtcctgtgctctagtaactacactcttgctataggtgctctttgagctcacagagaccttcaggccctcattcttcccttttcacctagtctttcaagctcttct

SEQ ID NO: 65653 - DNA, 110 bp, synthetic construct
  source 1..110: mol_type = other DNA
ggagttctgacatttaaaagactttgcaatgtcattgcgaaaatttctaatttgtaggtattggtttttatcaattcaaatgatcagtttttgccttgcgcatcccaggc

SEQ ID NO: 65654 - DNA, 110 bp, synthetic construct
  source 1..110: mol_type = other DNA
aggtattggtttttatcaattcaaatgatcagtttttgccttgcgcatcccaggcctgaagaaaataagattgaaacgccttctttattttgttatttttatggtcttta

SEQ ID NO: 65655 - DNA, 110 bp, synthetic construct
  source 1..110: mol_type = other DNA
tgtaggtcacagatatagctcagatctggcactgctacagatatagctcagataaggcatctagcgtggctatggcatctagcattactgtggatctagcattggtagaa

SEQ ID NO: 65656 - DNA, 110 bp, synthetic construct
  source 1..110: mol_type = other DNA
atttatcatgtcagtagtgttttcttttcactattctactagaaaaacaggtgatactaacagctaactttaaaacctgaggaaggagttcctgtcttggctcagtggtt

SEQ ID NO: 65657 - DNA, 110 bp, synthetic construct
  source 1..110: mol_type = other DNA
aacaggtgatactaacagctaactttaaaacctgaggaaggagttcctgtcttggctcagtggttaatgagcccagccagtatccatgaggatgtggattcgatccctag

SEQ ID NO: 65658 - DNA, 110 bp, synthetic construct; identical to SEQ ID NO: 65656
  source 1..110: mol_type = other DNA

SEQ ID NO: 65659 - DNA, 110 bp, synthetic construct
  source 1..110: mol_type = other DNA
ctactagaaaaacaggtgatactaacagctaactttaaaacctgaggaaggagttcctgtcttggctcagtggttaatgagcccagccagtatccatgaggatgtggatt

SEQ ID NO: 65660 - DNA, 110 bp, synthetic construct
  source 1..110: mol_type = other DNA
ctctggtttctctttaagtcttcatcaacaaccagaaccttctttcttctccaggactgtttctcgtcaccctttctcttctatagacataaattcctctgaagttacgt

SEQ ID NO: 65661 - DNA, 110 bp, synthetic construct
  source 1..110: mol_type = other DNA
actgtttctcgtcaccctttctcttctatagacataaattcctctgaagttacgtatctttaaaaatctgatatctacataccagagaagaactataatttggttaaagc

SEQ ID NO: 65662 - DNA, 110 bp, synthetic construct
  source 1..110: mol_type = other DNA
gcgatctcacaaataccttacagcaagagtatggaagcttcctcatttgctaagtagattcaagtcagagaatgaacaccagaacaaataggtgttggcccaggaaagcc

SEQ ID NO: 65663 - DNA, 110 bp, synthetic construct
  source 1..110: mol_type = other DNA
agattcaagtcagagaatgaacaccagaacaaataggtgttggcccaggaaagccactctggactttttccacctaggcctcttctataccaagggcaaatagcccaatg

SEQ ID NO: 65664 - DNA, 110 bp, synthetic construct
  source 1..110: mol_type = other DNA
gcaggcttgctgctttaagatccccagaacctacagccacaccaagacaagacactttccatcagatattacagaactcagatttgcacacctttgagccagcactagcc

SEQ ID NO: 65665 - DNA, 110 bp, synthetic construct
  source 1..110: mol_type = other DNA
tttccatcagatattacagaactcagatttgcacacctttgagccagcactagccctgtgaaaagacacatccgccagtgggtaaagacttgcctcaagatccctgggac

SEQ ID NO: 65666 - DNA, 110 bp, synthetic construct
  source 1..110: mol_type = other DNA
aacttcacccactcaccactattgtatcactatcacaatgaattataacacctctttgcatatttatctcctcaataggactcttaaaagaaactgagggcttctatttc

SEQ ID NO: 65667 - DNA, 110 bp, synthetic construct
  source 1..110: mol_type = other DNA
gtgatgggaatgtgaattgttaacaaccacacttctagagctaaacatgtacacccagttcacaaaaaaatagcagttgttaagttaaatcagtaaattcacatttatat

SEQ ID NO: 65668 - DNA, 110 bp, synthetic construct
  source 1..110: mol_type = other DNA
tctttgacaacatcttgaccggaagcctcacaccaaggccctgaggccagattcatccatcccaccaacatctcttttttgacccaagcaatgttttaccaaaatttgcc

SEQ ID NO: 65669 - DNA, 110 bp, synthetic construct
  source 1..110: mol_type = other DNA
aattgcactgtagtccgggtcctacctctagaatgttgacttaattggcctgggtcagattccagctatggtttgctttccgaagcttcttagatgaccctaacgtgcag

SEQ ID NO: 65670 - DNA, 110 bp, synthetic construct
  source 1..110: mol_type = other DNA
caggcaaaggggtcctgggcaaaggcagggtgtagatgtaggtaagcccaggaatttggtcatctagtcctgagaggagtggccaaattcaagggctaggtttgccctaa

SEQ ID NO: 65671 - DNA, 110 bp, synthetic construct
  source 1..110: mol_type = other DNA
tccaagagtttcctgaggatctaggaaccagggcctagtgctggagatactattacctccaaagtcagatatgctctctgccctcacagattttgcagtcccatcagggg

SEQ ID NO: 65672 - DNA, 110 bp, synthetic construct
  source 1..110: mol_type = other DNA
cctccaaagtcagatatgctctctgccctcacagattttgcagtcccatcaggggagacagatattagccaagtaatgtctgagataatatatttataaatgacaccaaa

SEQ ID NO: 65673 - DNA, 110 bp, synthetic construct
  source 1..110: mol_type = other DNA
cttccttctctcttctcaccagccttgtctgccatgtgcagctgggccaaacattgtgacaggcctcatgtgccccctctgccctttgtcaatctcatctcttccttctc

SEQ ID NO: 65674 - DNA, 110 bp, synthetic construct
  source 1..110: mol_type = other DNA
tgggaagaagaaagaagaaaagggggaaaggaaagggaatatataattgacttaagtgacctccagaaaattactgacagagttgctgagtggcctgttcgtctgtctac

SEQ ID NO: 65675 - DNA, 110 bp, synthetic construct
  source 1..110: mol_type = other DNA
gtgacctccagaaaattactgacagagttgctgagtggcctgttcgtctgtctacccacaatcagactgtaccctgaaaactggaagccacaatctgtgtaaccaaggag

SEQ ID NO: 65676 - DNA, 110 bp, synthetic construct
  source 1..110: mol_type = other DNA
atggcacaaaacaagcccacattggggtctgtgctattgctgtgattctctcaagtgttaagcttcatgagtttgggtatcttgtctctctccagtgtctaaaaccggta

SEQ ID NO: 65677 - DNA, 110 bp, synthetic construct
  source 1..110: mol_type = other DNA
caagggccaaggtttccacagcttccctgcagacttctcctgtggccggtcctgacttcttttggggagcgagctggcaggaagctgaccccatactgaagcatgcactg

SEQ ID NO: 65678 - DNA, 110 bp, synthetic construct
  source 1..110: mol_type = other DNA
cttcttttggggagcgagctggcaggaagctgaccccatactgaagcatgcactgtatgctcactgagttaaagtgtgagtttaaaaaaataacatatacatttacatat

SEQ ID NO: 65679 - DNA, 110 bp, synthetic construct
  source 1..110: mol_type = other DNA
gtgatgattaaatacaagtctttcagaaccaaaaagcttcaggtacagatctgcaccccactgtcactggtagggttgtctctgagtggacacttgcacgtgatgttctt

SEQ ID NO: 65680 - DNA, 110 bp, synthetic construct
  source 1..110: mol_type = other DNA
taacactatcttagttttgaaatcacctctcctctagcttatttcaacaactttctaaacatcccctctgcttcgattttgctccccatttctagttccaaatctattcc

SEQ ID NO: 65681 - DNA, 110 bp, synthetic construct
  source 1..110: mol_type = other DNA
ttactctgggtaatttcctgataactactaagaagcatcagaaatcactgcaccgaatggaaaatatgacccttgataattctacctggataaactggaaaagtactttt

SEQ ID NO: 65682 - DNA, 110 bp, synthetic construct
  source 1..110: mol_type = other DNA
tgttaaaagtgacagacactgcaaactgttcaggctgagggacttgagggttgggcctgaggaccctaagaagcaggaatgcagggtgggggaccactgtgtgattgggg

SEQ ID NO: 65683 - DNA, 110 bp, synthetic construct
  source 1..110: mol_type = other DNA
ctcctctacataaaatgtcttgctgtgctcttaggaccttaaagaggagaatgtgaatgagcaaaaggaatgcatgatttttttttttttttggctgaacccatggcatt

SEQ ID NO: 65684 - DNA, 110 bp, synthetic construct
  source 1..110: mol_type = other DNA
ccatctccccaaaacttagcttgacaaccacctccaacatggactttcgcccatgcccatgcccaagcctctgcaagcttggaagaagcaccaggatgctaggacaccag

SEQ ID NO: 65685 - DNA, 110 bp, synthetic construct
  source 1..110: mol_type = other DNA
cccatgcccaagcctctgcaagcttggaagaagcaccaggatgctaggacaccagtggctctctgtaactgggccagggctttcagcctcccactcccgtgcagggacca

SEQ ID NO: 65686 - DNA, 110 bp, synthetic construct; identical to SEQ ID NO: 65684
  source 1..110: mol_type = other DNA

SEQ ID NO: 65687 - DNA, 110 bp, synthetic construct; identical to SEQ ID NO: 65685
  source 1..110: mol_type = other DNA

SEQ ID NO: 65688 - DNA, 110 bp, synthetic construct
  source 1..110: mol_type = other DNA
ctgctgatctccagcctcccacccccatccttctcctcagccagtccctggacaatggtttcagtttgtcaggtctgccttcagcgcccagcaacagctcacctttctca

SEQ ID NO: 65689 - DNA, 110 bp, synthetic construct
  source 1..110: mol_type = other DNA
tggtttcagtttgtcaggtctgccttcagcgcccagcaacagctcacctttctcagtggtgtacagccttcccatgtcctgaaaggcagccgccagctttccttactcaa

SEQ ID NO: 65690 - DNA, 110 bp, synthetic construct
  source 1..110: mol_type = other DNA
accttctgaaatagatgctaagtcacaatgacacaggtttggaggactcttttgggattggtgacagccttaagagcttaggacccaggagaggagcaggaagcagaagc

SEQ ID NO: 65691 - DNA, 110 bp, synthetic construct
  source 1..110: mol_type = other DNA
gatcctaaaggatgaatgggagaaggcaagtttggaaagggatgatattcgaagtctttaccaactgctaaggcccaagcccagccaaataagaacagatattgggcttg

SEQ ID NO: 65692 - DNA, 110 bp, synthetic construct
  source 1..110: mol_type = other DNA
tccctggacagagtttagggtacaccaccttctgtggttgactgttttctttgttttcagtgcaggccaatccttgcagagtgacacaatcttcctagaatagctctgtg

SEQ ID NO: 65693 - DNA, 110 bp, synthetic construct
  source 1..110: mol_type = other DNA
gcgaagccattgtagcacctccactagttaagcaagcctgccttgttctgagggctttcctgaacttccagtggcctctcagcatcccccagctttccctctttatccgt

SEQ ID NO: 65694 - DNA, 110 bp, synthetic construct
  source 1..110: mol_type = other DNA
tttcctgaacttccagtggcctctcagcatcccccagctttccctctttatccgtgatcccctattggtgcttctacaaccacctgtgcttactccatccctatcagagg

SEQ ID NO: 65695 - DNA, 110 bp, synthetic construct
  source 1..110: mol_type = other DNA
aaaaagcaaattattccacttcctttgattccataggctattcttaaagatctatatttgtccaaaatagaggaactaaccccccagagttaaatatgccaacttgtgtt

SEQ ID NO: 65696 - DNA, 110 bp, synthetic construct
  source 1..110: mol_type = other DNA
atttgtccaaaatagaggaactaaccccccagagttaaatatgccaacttgtgtttttgtagtcttcagaaaaaagctgggtgactacaaggtgcaccctttcttgtgca

SEQ ID NO: 65697 - DNA, 110 bp, synthetic construct
  source 1..110: mol_type = other DNA
ctatggagtctctgcttttccctgagatccagtgcacatgaacgtctgtgtgcacctctcaagaatggggtctctgtttcacccatcccatggagctcctgcacacaagc

SEQ ID NO: 65698 - DNA, 110 bp, synthetic construct; identical to SEQ ID NO: 65697
  source 1..110: mol_type = other DNA

SEQ ID NO: 65699 - DNA, 110 bp, synthetic construct
  source 1..110: mol_type = other DNA
cccaagctgtttaccccctccctccacaactagacctctggacctctggcctcacccacaggtgtcactggtcctgcaatgtggtcccaccagtgggattagatacacag

SEQ ID NO: 65700 - DNA, 110 bp, synthetic construct
  source 1..110: mol_type = other DNA
cttttagcacatgtgatcacaagtgacctgcacacacgtgaaaatttggaaagcactgggctagcacatagagaacacaaagtcatgcagagaaattcttactccagctg

SEQ ID NO: 65701 - DNA, 110 bp, synthetic construct
  source 1..110: mol_type = other DNA
ctgggctagcacatagagaacacaaagtcatgcagagaaattcttactccagctgctgggaaagaagccacctgaagaagagccactctttcctttccttgctcaggctc

SEQ ID NO: 65702 - DNA, 110 bp, synthetic construct
  source 1..110: mol_type = other DNA
ctcccactctatctaccattcagccagaaggaagaaaaaaggatgagaagcagggcatgcccctctttttaaagggtctaaccctgaagttgcacacaccagttctgccc

SEQ ID NO: 65703 - DNA, 110 bp, synthetic construct
  source 1..110: mol_type = other DNA
gtgggtttgatcggtggcctcgatcagtgggtctggttgtggtgtaggctgaagatacggctcagatctggcattgctgtggttgtgatgtaggcaggcaggtgctgctc

SEQ ID NO: 65704 - DNA, 110 bp, synthetic construct; identical to SEQ ID NO: 65703
  source 1..110: mol_type = other DNA

SEQ ID NO: 65705 - DNA, 110 bp, synthetic construct
  source 1..110: mol_type = other DNA
atctgacaccaattaagtgggaaaggctttggggatttgagagggagtggggatacttcaggtttagcttgcttcatctgtgaagcagggggccatccaggaggatgggg

SEQ ID NO: 65706 - DNA, 110 bp, synthetic construct
  source 1..110: mol_type = other DNA
aaaggttgagaaacactagacttcctcctcaggattaggaagatgaaggcagcaaaatcacggagtcatggtcaagtgatcgctaatgtgtaaactgactgagaaattaa

SEQ ID NO: 65707 - DNA, 110 bp, synthetic construct
  source 1..110: mol_type = other DNA
tgatattttgttctctctatgcatcagtttccaattgaatggaatattgtttgtttggaagatattctctcacacatacctgtgttttattggtattatacttgggttag

SEQ ID NO: 65708 - DNA, 110 bp, synthetic construct
  source 1..110: mol_type = other DNA
tggaagatattctctcacacatacctgtgttttattggtattatacttgggttaggattatccctttttcatgtggtaaagtaacagcaataacaaccacacacatttct

SEQ ID NO: 65709 - DNA, 110 bp, synthetic construct
  source 1..110: mol_type = other DNA
agagtgtgtagacagacctcttcttcacatcttcatatgtttaatattgcatgaaattcttagggtttgggggctctctttgatttaaaaaaagggttaggagctttaat

SEQ ID NO: 65710 - DNA, 110 bp, synthetic construct
  source 1..110: mol_type = other DNA
attcttagggtttgggggctctctttgatttaaaaaaagggttaggagctttaattttgagtgtagggattactcacaaaccaccatggtttgtccttgtgatatatgtg

SEQ ID NO: 65711 - DNA, 110 bp, synthetic construct; identical to SEQ ID NO: 65709
  source 1..110: mol_type = other DNA

SEQ ID NO: 65712 - DNA, 110 bp, synthetic construct; identical to SEQ ID NO: 65710
  source 1..110: mol_type = other DNA

SEQ ID NO: 65713 - DNA, 110 bp, synthetic construct
  source 1..110: mol_type = other DNA
ctcttgtccctactggcaacatagctgtctggaaaaacttgacctgaaagaggctgaggattttgtattgggctgttgtgggaaaaatatcaccatcttctatatgattc

SEQ ID NO: 65714 - DNA, 110 bp, synthetic construct
  source 1..110: mol_type = other DNA
tttgagcccagttctgatcagatactttaggtctttaacacacttgcctggaaaggataatgtggcccttggggaaattaaactgaatgaggtggtaaataccttttgct

SEQ ID NO: 65715 - DNA, 110 bp, synthetic construct
  source 1..110: mol_type = other DNA
aatactacctcctggcagtaaccccaggactgagcttcatctaccagtgtgggtgaggggaacagcccgcagtcttctggacctgactctgccaccagtgagccagcatt

SEQ ID NO: 65716 - DNA, 110 bp, synthetic construct
  source 1..110: mol_type = other DNA
ataggatgcagccctagacactagtttgtgtggctataaataaatgcccactggaatagttcataaattttataatctactccaagatcatattatcatcacatattaaa

SEQ ID NO: 65717 - DNA, 110 bp, synthetic construct
  source 1..110: mol_type = other DNA
ttgccacatgagcctgggttacttctataatcaagaaaaaaaaatcagtattttttaaaactctgaaaaagtgtataacttaagctctaccctaatcacactgcaaaaca

SEQ ID NO: 65718 - DNA, 110 bp, synthetic construct
  source 1..110: mol_type = other DNA
ctcataccttctctgacctcatggctcccgctcttgctcctcctggtcactccactccagccacgtcagcttctgggccaagcctcaactccattggtgcgcttctgaat

SEQ ID NO: 65719 - DNA, 110 bp, synthetic construct
  source 1..110: mol_type = other DNA
gtttccactttctggccaggcctcattgtcctcaattttatattggggccaagatgggttatgaaagaaaaagagatttttttttgtttttgttttaaagaatctggaga

SEQ ID NO: 65720 - DNA, 110 bp, synthetic construct
  source 1..110: mol_type = other DNA
ccttcttaaggcctgtggacatattttgtggataactggccagggttagaggcttggtctgtaagtttgagaaaccactggctccattcacaacttcagtctgaatcacc

SEQ ID NO: 65721 - DNA, 110 bp, synthetic construct
  source 1..110: mol_type = other DNA
actgtctaagcactggggataaatcacaatacagcataagcttcatttatggactgtgcaaaaaaaaaaaaaaaacaaaacgaacaaataaactagtagggtagggtaga

SEQ ID NO: 65722 - DNA, 110 bp, synthetic construct
  source 1..110: mol_type = other DNA
tacctgaaattcctttagatggatttgatggtgaattttaaaaaacaacagattcaagaatgatcaattaacaagtatagtgtccaaggcttaaagttggaacattctag

SEQ ID NO: 65723 - DNA, 110 bp, synthetic construct
  source 1..110: mol_type = other DNA
gcaggacttctcagagcctttatttgccagtgtgccctggaagcttaaaaaaaagagataatatgtatattaatttaaaaatgtatatgatgtagaagcactttttcctt

SEQ ID NO: 65724 - DNA, 110 bp, synthetic construct
  source 1..110: mol_type = other DNA
gccagtgtgccctggaagcttaaaaaaaagagataatatgtatattaatttaaaaatgtatatgatgtagaagcactttttcctttcattgaggattctcttgtgtgaat

SEQ ID NO: 65725 - DNA, 110 bp, synthetic construct; identical to SEQ ID NO: 65723
  source 1..110: mol_type = other DNA

SEQ ID NO: 65726 - DNA, 110 bp, synthetic construct; identical to SEQ ID NO: 65724
  source 1..110: mol_type = other DNA

SEQ ID NO: 65727 - DNA, 110 bp, synthetic construct
  source 1..110: mol_type = other DNA
tccatagtagctgtaccaatttacgttcctaccaacagtgtacgagagttcctttttctccacatccttgccaacatgtgctatttatcttctgttttgatgatggccac

SEQ ID NO: 65728 - DNA, 110 bp, synthetic construct
  source 1..110: mol_type = other DNA
ttctccacatccttgccaacatgtgctatttatcttctgttttgatgatggccactctgacagtgtgtggtgatatcccatgtggttatgagtgcatttccctgatgatt

SEQ ID NO: 65729 - DNA, 110 bp, synthetic construct
  source 1..110: mol_type = other DNA
tggattcattaaccactgcgccacgacgggaactcccgatttttttttatttctaacctaacaaatactgaagtagcacttatcttgtgaatgactctgttgtaagcact

SEQ ID NO: 65730 - DNA, 110 bp, synthetic construct
  source 1..110: mol_type = other DNA
acctaacaaatactgaagtagcacttatcttgtgaatgactctgttgtaagcactttacagatattatctccttagtgctcttaaccctttaaagtaggtacttttatta

SEQ ID NO: 65731 - DNA, 110 bp, synthetic construct
  source 1..110: mol_type = other DNA
ctttgtcttccctctcctaaggttctttctagtttctgtatttttaaatggaaaaattggttttgttctcagcattttgtgataattccacatctcttgtaataatgtac

SEQ ID NO: 65732 - DNA, 110 bp, synthetic construct
  source 1..110: mol_type = other DNA
ggcatctacgttagccaacaaaaccacacaaaaagttttaaattatccacttttcttcaggagctcataacccaattagaggttaaggtgcatacttaatatgcttaaat

SEQ ID NO: 65733 - DNA, 110 bp, synthetic construct
  source 1..110: mol_type = other DNA
cctgcagacccactctcttcaacctgggttctgtgggtcagccagactgaatgcgacctgcttcttcttctaccactggctcggccggcttcctctcgggctccggcact

SEQ ID NO: 65734 - DNA, 110 bp, synthetic construct
  source 1..110: mol_type = other DNA
acctgcttcttcttctaccactggctcggccggcttcctctcgggctccggcactcagtgggggcatctgaggtgagagtaaagatcctgctcaggggtggcccagcctc

SEQ ID NO: 65735 - DNA, 110 bp, synthetic construct
  source 1..110: mol_type = other DNA
catattatttcttcagcctgaaaagtgtttcctttgggtatcccagggcaagagaaatgtcaaaagaaaaaataagtatatcatttcctaacactaaaaacacaaggaca

SEQ ID NO: 65736 - DNA, 110 bp, synthetic construct
  source 1..110: mol_type = other DNA
actttttagtctgtgccattaatgggccccagctactcacccaggtgcttgtcgtccagcttctgctcctgctgcccgactggcccacacactgagcacgtctggggaga

SEQ ID NO: 65737 - DNA, 110 bp, synthetic construct
  source 1..110: mol_type = other DNA
ctgcagctctgatttgactcccagtccgggaactttcgtgtgtctcaggtgtggcccttaaaaaaaagaaagaaatcacagtgagatactgctttatacatatacactga

SEQ ID NO: 65738 - DNA, 110 bp, synthetic construct; identical to SEQ ID NO: 65737
  source 1..110: mol_type = other DNA

SEQ ID NO: 65739 - DNA, 110 bp, synthetic construct
  source 1..110: mol_type = other DNA
caccagcagcaataatcaggaaacgacaaccatcccgggatgtgcctgtaatcatgcttttaataagtctctgtgtcctggggcatcaacgatggtcacatagtacttgc

SEQ ID NO: 65740 - DNA, 110 bp, synthetic construct
  source 1..110: mol_type = other DNA
gcttttaataagtctctgtgtcctggggcatcaacgatggtcacatagtacttgctggtctttaatttctacagggagatatcaatggaaataacacactcaggttcaac

SEQ ID NO: 65741 - DNA, 110 bp, synthetic construct
  source 1..110: mol_type = other DNA
aaaaagacaaaagacaaaaaaaaaaaaaaaaaaaagaaaagtaatttaacctccctgaacctcggttttcttagctacaaaatgggagcagtgatagcatctacctcagt

SEQ ID NO: 65742 - DNA, 110 bp, synthetic construct
  source 1..110: mol_type = other DNA
tataaacagctatgtgaagacctaccatccactgtttggggtccgtggaagtgtcagctcgaaccctacctgcccaaacccactttgtgaccaagccattgtgtgaagtc

SEQ ID NO: 65743 - DNA, 110 bp, synthetic construct
  source 1..110: mol_type = other DNA
agctcgaaccctacctgcccaaacccactttgtgaccaagccattgtgtgaagtcttcagatccaagtccttacccccctactagaccacagggatgacatccatccaac

SEQ ID NO: 65744 - DNA, 110 bp, synthetic construct
  source 1..110: mol_type = other DNA
tgtaaaccctgaaaactattattttctgtcctccaaaacactggagagaaagcaaaccagccccaggagtccaaatgcaagagggaaggctaagtgcaaacagcagcaca

SEQ ID NO: 65745 - DNA, 110 bp, synthetic construct
  source 1..110: mol_type = other DNA
accagccccaggagtccaaatgcaagagggaaggctaagtgcaaacagcagcacagcaaatgcagagaaagcacagttcagtgccagcctggcttactcagggcaaatgg

SEQ ID NO: 65746 - DNA, 110 bp, synthetic construct
  source 1..110: mol_type = other DNA
gctcgttgttggcaggaggcctcagttccgtccatcatggacctctgcatgagtgtcctttggcagttggcttgccccagagggagtgactccagacagcaagacagaag

SEQ ID NO: 65747 - DNA, 110 bp, synthetic construct
  source 1..110: mol_type = other DNA
tggtcccatctttcttgttctcagcccgggaagattccttccactaggcatgtcccttggagaattctaaaacagcagacttcccaccaaaagggaagcaaatttcctct

SEQ ID NO: 65748 - DNA, 110 bp, synthetic construct
  source 1..110: mol_type = other DNA
agctttggaaggcatgtctctatgccctgtctcctgagccctctgggaaattgcactctagtgaatgcctatccttggcctctctccttggctctggctgcaaatgccta

SEQ ID NO: 65749 - DNA, 110 bp, synthetic construct
  source 1..110: mol_type = other DNA
ggtgggtgcaggagagagactggcagagggcagggttaggggaggggattttaaaagatgagaaatattagcttgctcctcaaagatgatgaggacttgactggaagagt

SEQ ID NO: 65750 - DNA, 110 bp, synthetic construct
  source 1..110: mol_type = other DNA
cagagaggcggggagaccaaggacttgagagttgcatgcagtgccccttccccgctttccatgtaatctcaggaaccagagatgctagggacacgtctccctctcataat

SEQ ID NO: 65751 - DNA, 110 bp, synthetic construct
  source 1..110: mol_type = other DNA
tttccatgtaatctcaggaaccagagatgctagggacacgtctccctctcataattacttgggaaggagtgtcattgcctcaagcataattaacagcattttaattcatt

SEQ ID NO: 65752 - DNA, 110 bp, synthetic construct
  source 1..110: mol_type = other DNA
aaggatccagcaataccttgagctgcagtgtaagttgcagaggcggcttggatactgtgttgctgtgactggggtgtaggctggcagttgcagctcctagacccctggcc

SEQ ID NO: 65753 - DNA, 110 bp, synthetic construct; identical to SEQ ID NO: 65752
  source 1..110: mol_type = other DNA

SEQ ID NO: 65754 - DNA, 110 bp, synthetic construct
  source 1..110: mol_type = other DNA
ttctgagtcctgggccttattccacacctgctgagtcagaggccctagagttttggcccagcagcctgtgttttagcaaaccctccaggtgactctggtccttgccgaag

SEQ ID NO: 65755 - DNA, 110 bp, synthetic construct
  source 1..110: mol_type = other DNA
gcccagcagcctgtgttttagcaaaccctccaggtgactctggtccttgccgaagttggagaacattggtcttttgagggcaggtggaatggggagctttaggagctcct

SEQ ID NO: 65756 - DNA, 110 bp, synthetic construct
  source 1..110: mol_type = other DNA
agatttgtttcctctgagatacatttggaactcctgaatttgtttttatttcgcctttggttttggaggataaatatttcattgtttgctagcttttttgtttctgttga

SEQ ID NO: 65757 - DNA, 110 bp, synthetic construct
  source 1..110: mol_type = other DNA
tttggttttggaggataaatatttcattgtttgctagcttttttgtttctgttgaaaagtcagctgttaatctaatttttgctccttttgcaagtaacatgtgtcttttc

SEQ ID NO: 65758 - DNA, 110 bp, synthetic construct
  source 1..110: mol_type = other DNA
gcattgttcattgctatatctccatgacaaagatagtgcctggtacataatagtagctccagaaaaaaatttttcattgaattgagaactgtaacagggtttatggggtt

SEQ ID NO: 65759 - DNA, 110 bp, synthetic construct
  source 1..110: mol_type = other DNA
attgtggggggaaaagttaattttcccagttaatcaatgaacctgtcttgacatttgggttcctgcatgttgcaggttcataacaagaaacaccttatccctacaggaat

SEQ ID NO: 65760 - DNA, 110 bp, synthetic construct
  source 1..110: mol_type = other DNA
tgggttcctgcatgttgcaggttcataacaagaaacaccttatccctacaggaatctccacaacctttagcaacgactatccattgccatttgataaggagagccccctg

SEQ ID NO: 65761 - DNA, 110 bp, synthetic construct
  source 1..110: mol_type = other DNA
gaactctcctgaagtgtttggtgtttctgtcctctgcagctgcataaatgaactaccactgagggggtaaaatggcattgccatggtgatgctcacagaagtgaacagta

SEQ ID NO: 65762 - DNA, 110 bp, synthetic construct
  source 1..110: mol_type = other DNA
gagccccagggacccacaatggtgactgtcttattaaagcacacattattgctatttttccttttcttatcttttcaaagtaaataaatagatattttaaacatttcaga

SEQ ID NO: 65763 - DNA, 110 bp, synthetic construct
  source 1..110: mol_type = other DNA
atttaggagaaaagatgctattggttgaccgacacattctcccaagagagcggtttggcagtttccagctttttttaaaggctgcacctgcagcatattcgaccgggcta

SEQ ID NO: 65764 - DNA, 110 bp, synthetic construct
  source 1..110: mol_type = other DNA
tggcagtttccagctttttttaaaggctgcacctgcagcatattcgaccgggctaggggtcgagtcagagctgcatctgcaacctaaccccagatccttaacccactgag

SEQ ID NO: 65765 - DNA, 110 bp, synthetic construct; identical to SEQ ID NO: 65763
  source 1..110: mol_type = other DNA

SEQ ID NO: 65766 - DNA, 110 bp, synthetic construct; identical to SEQ ID NO: 65764
  source 1..110: mol_type = other DNA

SEQ ID NO: 65767 - DNA, 110 bp, synthetic construct
  source 1..110: mol_type = other DNA
gagctgcagctgctagcctacaccacaggtgtaggatctgagccgcacctgcgaccagaaccaatgcttgtggcaacaccagaaccttaacccactgagcaaaggcaaga

SEQ ID NO: 65768 - DNA, 110 bp, synthetic construct; identical to SEQ ID NO: 65767
  source 1..110: mol_type = other DNA

SEQ ID NO: 65769 - DNA, 110 bp, synthetic construct
  source 1..110: mol_type = other DNA
tagctgaagagagatctgcatctcacagagttccaggaatgatggatgacaaaaagactcttgggtgtactatacatcagagctgcaagattagagaaaagtcttacatg

SEQ ID NO: 65770 - DNA, 110 bp, synthetic construct
  source 1..110: mol_type = other DNA
gactcttgggtgtactatacatcagagctgcaagattagagaaaagtcttacatgtttccatagagaaaaacaagttactcctaaaggaaaaagaatcatctgagcattg

SEQ ID NO: 65771 - DNA, 110 bp, synthetic construct
  source 1..110: mol_type = other DNA
gtagtatagaatggcagtaggggcactagttcacactgaacaatgaaggaattgttagtgtgtccccaagaataatgatatctcttcccttttgatcagtagctattttt

SEQ ID NO: 65772 - DNA, 110 bp, synthetic construct
  source 1..110: mol_type = other DNA
tagtgtgtccccaagaataatgatatctcttcccttttgatcagtagctatttttaacactagggtttctcagcagtggcactattctggaccatataattcttggttgt

SEQ ID NO: 65773 - DNA, 110 bp, synthetic construct
  source 1..110: mol_type = other DNA
ctacctggagcatggctgccattatcacagttacctcatgatccaaggtagctactggatttcagccattgtgtccatgttccaagtaataggtaagacagagaaaaagc

SEQ ID NO: 65774 - DNA, 110 bp, synthetic construct
  source 1..110: mol_type = other DNA
gatagaggggtatttacataactagaagctgactcacactcaatatccagaatatagtttctgcccagagcagggacagcagactactaaactaaaatcaaatttaaaga

SEQ ID NO: 65775 - DNA, 110 bp, synthetic construct
  source 1..110: mol_type = other DNA
aaaatacagttttaaaatagatcctctccaactattttattttagtactattagttccctgatccagacatttatttacatcaagatgcctttgttaccctcatcagtgg

SEQ ID NO: 65776 - DNA, 110 bp, synthetic construct
  source 1..110: mol_type = other DNA
tgtggttccaaatgtactttccttgttatgtttgtgattggctgagtagttggatgggcctaagcttcaatgtgaaggccctgtttccccaggagagtaggcagcagctg

SEQ ID NO: 65777 - DNA, 110 bp, synthetic construct
  source 1..110: mol_type = other DNA
gggcctaagcttcaatgtgaaggccctgtttccccaggagagtaggcagcagctgatatagttggagtattgggaccagaatctagcctcccaatctttctatgtttatt

SEQ ID NO: 65778 - DNA, 110 bp, synthetic construct; identical to SEQ ID NO: 65776
  source 1..110: mol_type = other DNA

SEQ ID NO: 65779 - DNA, 110 bp, synthetic construct; identical to SEQ ID NO: 65777
  source 1..110: mol_type = other DNA

SEQ ID NO: 65780 - DNA, 110 bp, synthetic construct
  source 1..110: mol_type = other DNA
acatgtaggacagaaaatgtgcttagtgagcatgtggatctggccaaaggaaacttccaagtagaatgccaaaggagtaatttgcttcttttagctgcctatcacaaaat

SEQ ID NO: 65781 - DNA, 110 bp, synthetic construct
  source 1..110: mol_type = other DNA
atcttattctggggatctgaattcaaaaatgagcctcaggagttcaaaatccattttaagcaaagagcaattaaaagccaagatgagagctaactcccaacaattcaagg

SEQ ID NO: 65782 - DNA, 110 bp, synthetic construct
  source 1..110: mol_type = other DNA
ttaagcaaagagcaattaaaagccaagatgagagctaactcccaacaattcaaggccctgcaacaaacaggagtttctactgtgactgggaaaagtgtaaaaatggacct

SEQ ID NO: 65783 - DNA, 110 bp, synthetic construct
  source 1..110: mol_type = other DNA
ctgaggttttcagcctgagatgtcttctcaaaatctttttccatgcttgcttgtccttatggcatttggaaggtttttgatgtattttgtttgaggttgacttagctagt

SEQ ID NO: 65784 - DNA, 110 bp, synthetic construct
  source 1..110: mol_type = other DNA
cttatggcatttggaaggtttttgatgtattttgtttgaggttgacttagctagtttcattaagtattgtttccatttgcgcttcttattatacttgtatcgagtagaaa

SEQ ID NO: 65785 - DNA, 110 bp, synthetic construct
  source 1..110: mol_type = other DNA
tttgattggcttctttacttggcataatgtttttaaggtttatccatgtcgtggcatgtattagggctttattccttcttatagcccaataatctattgtgtggataacc

SEQ ID NO: 65786 - DNA, 110 bp, synthetic construct
  source 1..110: mol_type = other DNA
ttagtccactgagccactacaggaactccgatatttgttttaaacatagagtattttgatctttggcaggaattgtgactgttagctgtttcaagctatatattgttgtt

SEQ ID NO: 65787 - DNA, 110 bp, synthetic construct
  source 1..110: mol_type = other DNA
ttcagattttctggttatccattctccccaatgtaaaccctagctctgaagaattgactgttcatgggaaatgcattgtttacttacgtccctacaatgaaagtgaagca

SEQ ID NO: 65788 - DNA, 110 bp, synthetic construct
  source 1..110: mol_type = other DNA
ctacttaaatttagatgaaactaaaacaaatgaaatttggatcctcaattgctgtagtcacaggagctataatatgttgaagtatctgattttccctctaggaattttta

SEQ ID NO: 65789 - DNA, 110 bp, synthetic construct
  source 1..110: mol_type = other DNA
gctacttttttccttacctctccctccctgagttcaacaaaatattatttaatccaaaactatgaagaaaaccagagtgtctgaagtcccttacttggcaagttggcttc

SEQ ID NO: 65790 - DNA, 110 bp, synthetic construct
  source 1..110: mol_type = other DNA
tggccctcaagtcatgccactgtggtttctgatatagcatctgcaacccctgttcaggagcaaaggcacaaacagaaatatagaagtataaagcaaaaagggtgaaccta

SEQ ID NO: 65791 - DNA, 110 bp, synthetic construct
  source 1..110: mol_type = other DNA
aggagcaaaggcacaaacagaaatatagaagtataaagcaaaaagggtgaacctatttatgatcccaattcacttattactaacctgtaagtgaagagaagaacagctat

SEQ ID NO: 65792 - DNA, 110 bp, synthetic construct
  source 1..110: mol_type = other DNA
gttttatatcacctatgatgtaagtagctggggagcacggactagatagttttgtctttgcatcccagttcattgcaagtcatgaaatatttgatgactgaataaatggt

SEQ ID NO: 65793 - DNA, 110 bp, synthetic construct
  source 1..110: mol_type = other DNA
ggattcgttaaccactgcaccacgatgggaactccagatttcttatttttaacagtattaatttatgatggttctctaaatacaggcaaagagctgatgcgttccataga

SEQ ID NO: 65794 - DNA, 110 bp, synthetic construct
  source 1..110: mol_type = other DNA
tattaatttatgatggttctctaaatacaggcaaagagctgatgcgttccatagaaggtgactaactataaatgtatcatacatgactggaaagtaatggcaagcaagac

SEQ ID NO: 65795 - DNA, 110 bp, synthetic construct; identical to SEQ ID NO: 65793
  source 1..110: mol_type = other DNA

SEQ ID NO: 65796 - DNA, 110 bp, synthetic construct; identical to SEQ ID NO: 65794
  source 1..110: mol_type = other DNA

SEQ ID NO: 65797 - DNA, 110 bp, synthetic construct
  source 1..110: mol_type = other DNA
atgaaatgcagtggaagaatttccgtgaaggcaggggacggtcagggatgagagtaattttaccaagcccaggtagatagctttctggtgacaccctggggcagagagag

SEQ ID NO: 65798 - DNA, 110 bp, synthetic construct
  source 1..110: mol_type = other DNA
agggatgcttctgtcagctctggagactggatttgattgacttaggtggggcacggcttgagcaagtccaaaaatttcccaggtgattctttttttttgctgtgcctgcc

SEQ ID NO: 65799 - DNA, 110 bp, synthetic construct
  source 1..110: mol_type = other DNA
cagagtaatttattccatatggagttgtagatctgttgtatccgtgggtggaggtaggttcaggatcttcctatgcctctgttttgaacactctcctgggccttcctctt

SEQ ID NO: 65800 - DNA, 110 bp, synthetic construct
  source 1..110: mol_type = other DNA
aggttcaggatcttcctatgcctctgttttgaacactctcctgggccttcctcttttaaactttaacctaccaagcttctaatgcctttttccatccaatatggcttaat

SEQ ID NO: 65801 - DNA, 110 bp, synthetic construct
  source 1..110: mol_type = other DNA
tttgaagagggctgggttaggcagccctggttatttatttatttatttattcatttaaatgattttttttttccccatcatagctgttttacagtgccctgacttaatta

SEQ ID NO: 65802 - DNA, 110 bp, synthetic construct
  source 1..110: mol_type = other DNA
aaggagtgtgctggagttgggggcaagggctacccttcccaggaaggagtgagaggtggccatgggctgacagtgtaaagaggccttcagttggaacagacaagccaact

SEQ ID NO: 65803 - DNA, 110 bp, synthetic construct
  source 1..110: mol_type = other DNA
agagtgactctcgcctcttaagcaaatttctaggaggaccccagtaatgttgggaagtctgattgttttagatcaatcaagataggagcatggcgttttgccagtcctgg

SEQ ID NO: 65804 - DNA, 110 bp, synthetic construct
  source 1..110: mol_type = other DNA
tcttaagcaaatttctaggaggaccccagtaatgttgggaagtctgattgttttagatcaatcaagataggagcatggcgttttgccagtcctggtgggtttccttcagc

SEQ ID NO: 65805 - DNA, 110 bp, synthetic construct
  source 1..110: mol_type = other DNA
tttgaaagtctttctcatttgagtctgcttttattactctattctgttctccgcttagaagaccagtgaggcatagcaggctatcctaagtggaaagtgtttgtttgttt

SEQ ID NO: 65806 - DNA, 110 bp, synthetic construct
  source 1..110: mol_type = other DNA
tagaagaccagtgaggcatagcaggctatcctaagtggaaagtgtttgtttgtttgtttgttttaaaaaggctagtcagatggatgaccttgtgaaaaattatgaggtag

SEQ ID NO: 65807 - DNA, 110 bp, synthetic construct
  source 1..110: mol_type = other DNA
gcatttgatcactctccccttctcactctcaggactcttgatacacactttattacagtgggtgttatttactgggcctgctatgtggcaccctcctccattagacacta

SEQ ID NO: 65808 - DNA, 110 bp, synthetic construct
  source 1..110: mol_type = other DNA
cagtgggtgttatttactgggcctgctatgtggcaccctcctccattagacactaggtcactataaggtggagatcatgtcctgcctatctctgtatcccattatccagc

SEQ ID NO: 65809 - DNA, 110 bp, synthetic construct
  source 1..110: mol_type = other DNA
tgacagatgcttcttcctgtttagacacacacatgcggagcacatgctacggtggatacaagagaggccagtgtgtcaaacccttgtttggtgctgttaccaaatctgaa

SEQ ID NO: 65810 - DNA, 110 bp, synthetic construct
  source 1..110: mol_type = other DNA
atacaagagaggccagtgtgtcaaacccttgtttggtgctgttaccaaatctgaatgctgttgtgccagcaccgagtatgcctttggggaaccttgccaaccatgtcctt

SEQ ID NO: 65811 - DNA, 110 bp, synthetic construct; identical to SEQ ID NO: 65809
  source 1..110: mol_type = other DNA

SEQ ID NO: 65812 - DNA, 110 bp, synthetic construct; identical to SEQ ID NO: 65810
  source 1..110: mol_type = other DNA

SEQ ID NO: 65813 - DNA, 110 bp, synthetic construct
  source 1..110: mol_type = other DNA
tattagatttggcttggtctcacagaggtctcaggtaactgatagtgggcaaggccctttttggcctagttcccttgggagctcctcagcaagcatgagtgtacctgtgt

SEQ ID NO: 65814 - DNA, 110 bp, synthetic construct
  source 1..110: mol_type = other DNA
gttgcagcactttcatacctgcagaactcactggggttatgctagaacaagagctgagctacagactcctgttcctattttcgttttgtgtcctactgagccctccctgt

SEQ ID NO: 65815 - DNA, 110 bp, synthetic construct
  source 1..110: mol_type = other DNA
tttcactaacttcttctgtgtgtgacaaaatcaggaactcccagctctcactgatattcattctagaccgaggttggcagtcggctcacatttagagtgtcttacttttt

SEQ ID NO: 65816 - DNA, 110 bp, synthetic construct
  source 1..110: mol_type = other DNA
tagcaatatataagacccatttctcttcattccttggctctgtatgtggcctgtgtctttttcttcctctatcccttcttttcgctttagctaactgaaatacagacatg

SEQ ID NO: 65817 - DNA, 110 bp, synthetic construct
  source 1..110: mol_type = other DNA
tctttttcttcctctatcccttcttttcgctttagctaactgaaatacagacatgaatttcaggggcttgccagccctcatggactatgagtcaaagccattagatggct

SEQ ID NO: 65818 - DNA, 110 bp, synthetic construct
  source 1..110: mol_type = other DNA
ttagggtttatcaatgtagagacatgcctagctagcaagtagaggttagagttgctgtgcgtccttgcattgaggcagacaggcctaaacaagaaagaactgtttaatcc

SEQ ID NO: 65819 - DNA, 110 bp, synthetic construct
  source 1..110: mol_type = other DNA
tcactttcctgaggacactgccacatagggaacagaggcactttggggaatggagtggcatcacagttagttaaatagtcacatgtgttggtggaggatgatgtgctagt

SEQ ID NO: 65820 - DNA, 110 bp, synthetic construct
  source 1..110: mol_type = other DNA
tggcatcacagttagttaaatagtcacatgtgttggtggaggatgatgtgctagtggatagaaaggtgtgggacaatcaaaagacccagtgttaaagtaccgtgttttat

SEQ ID NO: 65821 - DNA, 110 bp, synthetic construct
  source 1..110: mol_type = other DNA
tctctgtaataccccttctttttgtatcccctcctaggagcacaggtcccaacatggtcacttctcattctttcctatccaactctggatggacctttctttacagcttt

SEQ ID NO: 65822 - DNA, 110 bp, synthetic construct
  source 1..110: mol_type = other DNA
ggtcacttctcattctttcctatccaactctggatggacctttctttacagctttggttgtaagagaaactttctgctaatctctagtctgttttcagtgagaattgctc

SEQ ID NO: 65823 - DNA, 110 bp, synthetic construct
  source 1..110: mol_type = other DNA
ttcttggccctgcaatcaacctttctctgatccagactccagtgtttcagtttggcctcactgtgcattcggcacatgaacttgtgttcctaacaatgggatgacagtga

SEQ ID NO: 65824 - DNA, 110 bp, synthetic construct
  source 1..110: mol_type = other DNA
cctcactgtgcattcggcacatgaacttgtgttcctaacaatgggatgacagtgaactttagacatttcaggcaaaaaatccactgcatgttacatataagaccccccag

SEQ ID NO: 65825 - DNA, 110 bp, synthetic construct
  source 1..110: mol_type = other DNA
aaaaggagccatacagtccacataagaagcactcctagagtgtacagctctggtgaccagaagagaatgtgatgctgggatgcagagaattatctcctacaaagggctac

SEQ ID NO: 65826 - DNA, 110 bp, synthetic construct
  source 1..110: mol_type = other DNA
gggtcttccctgcctgggcttaatatagccattttctcttggaagattacctcttggaatagtgattctttgaagctcctattggacaaatattagagtttctcattcta

SEQ ID NO: 65827 - DNA, 110 bp, synthetic construct
  source 1..110: mol_type = other DNA
ggaatagtgattctttgaagctcctattggacaaatattagagtttctcattctagtctccatttctcttagtttccttctcctattcgctaactctgtagttctttgtc

SEQ ID NO: 65828 - DNA, 110 bp, synthetic construct
  source 1..110: mol_type = other DNA
aaagacactgggaacctccaaaaaggtgtgaggtttccatccaatatctcctaaccttttggctctttccttccctgcagctgtttgtctgtagggcttaagatctgtat

SEQ ID NO: 65829 - DNA, 110 bp, synthetic construct
  source 1..110: mol_type = other DNA
cttttggctctttccttccctgcagctgtttgtctgtagggcttaagatctgtatcttctcctgccctttcaaaggcagcaaaataagaactacaacagtgattcatgtc

SEQ ID NO: 65830 - DNA, 110 bp, synthetic construct
  source 1..110: mol_type = other DNA
taagctgggtcagcaggtgggggtggaagctgaggcaacatggctttagcaaggacattccgggagctccagggctgtgaagataaaggggagaagagggagaaacagat

SEQ ID NO: 65831 - DNA, 110 bp, synthetic construct
  source 1..110: mol_type = other DNA
cttccacgtgacacaggcgtgtccaaaaatacaaaaaccaaaaaatgtttattacagtatttactacactgttaagtaattacctctatgtatctgtcactctcaagaac

SEQ ID NO: 65832 - DNA, 110 bp, synthetic construct
  source 1..110: mol_type = other DNA
agtatttactacactgttaagtaattacctctatgtatctgtcactctcaagaactgtttttcatggaaaagtacaatgtccagttcttattggttatttccagtgccta

SEQ ID NO: 65833 - DNA, 110 bp, synthetic construct; identical to SEQ ID NO: 65831
  source 1..110: mol_type = other DNA

SEQ ID NO: 65834 - DNA, 110 bp, synthetic construct; identical to SEQ ID NO: 65832
  source 1..110: mol_type = other DNA

SEQ ID NO: 65835 - DNA, 110 bp, synthetic construct
  source 1..110: mol_type = other DNA
atggctgaagagtacgttgaccctgtcacccacctcccaaaggtctaaaagagtccgtccatacccccgccccagagagatgagaggtgtgagaagctaagaaggccacc

SEQ ID NO: 65836 - DNA, 110 bp, synthetic construct
  source 1..110: mol_type = other DNA
agagccctgcttttgcctcccttgacctcctgcaacctcaggtcgggggaatggtagtggccccacccccacccctgactactgccccattcagggaagcccagtaacct

SEQ ID NO: 65837 - DNA, 110 bp, synthetic construct
  source 1..110: mol_type = other DNA
agtggccccacccccacccctgactactgccccattcagggaagcccagtaacctcaccttctgagcagtgcggaagtagatgctcttgtctgctccacagctgatcatg

SEQ ID NO: 65838 - DNA, 110 bp, synthetic construct; identical to SEQ ID NO: 65836
  source 1..110: mol_type = other DNA

SEQ ID NO: 65839 - DNA, 110 bp, synthetic construct; identical to SEQ ID NO: 65837
  source 1..110: mol_type = other DNA

SEQ ID NO: 65840 - DNA, 110 bp, synthetic construct
  source 1..110: mol_type = other DNA
cccagtgtagtaaagccaatctactgacactgggtcgtggtgaaggcaagtgcagcatttattgcaggcaccaagagtccagtacagccagtgcttaaaagttcagaact

SEQ ID NO: 65841 - DNA, 110 bp, synthetic construct
  source 1..110: mol_type = other DNA
catttattgcaggcaccaagagtccagtacagccagtgcttaaaagttcagaactcctagaaggctttcaggggaaggttttaactcctggaaggctttcagggtatgtg

SEQ ID NO: 65842 - DNA, 110 bp, synthetic construct
  source 1..110: mol_type = other DNA
tggcagaaccagcctgatttctagggaattgtgctcttcttggctctgcgccctgcttagcaacaggtggtgctcttgtccagtgcagctttggtagtgcttaaaaattg

SEQ ID NO: 65843 - DNA, 110 bp, synthetic construct
  source 1..110: mol_type = other DNA
cttagcaacaggtggtgctcttgtccagtgcagctttggtagtgcttaaaaattgtgtatggatgccagcccggaggtaccagtgtgtgcagtgaaagaaacctcttttt

SEQ ID NO: 65844 - DNA, 110 bp, synthetic construct
  source 1..110: mol_type = other DNA
aattgatctacagattcaatataatctgcctaagactcctagctggatattttcctagaaactgacaggctaattcaagattcatatggaaattccagggacccagagtt

SEQ ID NO: 65845 - DNA, 110 bp, synthetic construct
  source 1..110: mol_type = other DNA
cgagctctctgatctttggatgagtggacatggggatggtggggacaagccatgtggagggaatgaggaaggggctttgctccctttctcctgtcaaggcccctgtggag

SEQ ID NO: 65846 - DNA, 110 bp, synthetic construct
  source 1..110: mol_type = other DNA
aaggcagaaaacttgctagcaactatatttctgtccctagccagggtctgatagaaaatggttgaataaatgaaatgccccacttatatatttacaaaaacaatcagtac

SEQ ID NO: 65847 - DNA, 110 bp, synthetic construct
  source 1..110: mol_type = other DNA
cctagccagggtctgatagaaaatggttgaataaatgaaatgccccacttatatatttacaaaaacaatcagtactttattgaattttttctgcttatccaaattagtca

SEQ ID NO: 65848 - DNA, 110 bp, synthetic construct
  source 1..110: mol_type = other DNA
ccttaggatggaaagataatgtccttttgctgacactgggagcacagaggagctggtaaagcttcttgggggaggcaagaggaaaatggccatcattcctcagccacttc

SEQ ID NO: 65849 - DNA, 110 bp, synthetic construct
  source 1..110: mol_type = other DNA
gtaaagcttcttgggggaggcaagaggaaaatggccatcattcctcagccacttcttctctctaattgggaaagcctacacagctgggtgcagagtcaagaccctttgaa

SEQ ID NO: 65850 - DNA, 110 bp, synthetic construct
  source 1..110: mol_type = other DNA
agcggtaatagctattcaatgcccagatcaggggagaccctagcctctatgcagggcaggcctatctgtaacatttatccctctaggataattctttttagttggggcaa

SEQ ID NO: 65851 - DNA, 110 bp, synthetic construct
  source 1..110: mol_type = other DNA
gcaggcctatctgtaacatttatccctctaggataattctttttagttggggcaataacaatctagggcatctccagaagagtgtagaagtccattaagactaagaacag

SEQ ID NO: 65852 - DNA, 110 bp, synthetic construct
  source 1..110: mol_type = other DNA
ctcatgaagtttttggagattgcccaagtactatcatgttgtaactcaaatctcttgccttgacctgggcagttgcatcatccagctgtttacttctttctaagccacta

SEQ ID NO: 65853 - DNA, 110 bp, synthetic construct
  source 1..110: mol_type = other DNA
tgccttgacctgggcagttgcatcatccagctgtttacttctttctaagccactaagacttctgtcattctggtggcttctctgctggtctttggcccttatataactag

SEQ ID NO: 65854 - DNA, 110 bp, synthetic construct; identical to SEQ ID NO: 65852
  source 1..110: mol_type = other DNA

SEQ ID NO: 65855 - DNA, 110 bp, synthetic construct; identical to SEQ ID NO: 65853
  source 1..110: mol_type = other DNA

SEQ ID NO: 65856 - DNA, 110 bp, synthetic construct
  source 1..110: mol_type = other DNA
cctagtcggatttgttaaccactgagctatgacgggaactccaacattagagcgttttaaatctcagtgttctattcggcttccttcaaaattaggctattcagaattag

SEQ ID NO: 65857 - DNA, 110 bp, synthetic construct
  source 1..110: mol_type = other DNA
gtgagaacctgatgcctctttgtcttttcagctctgaaaaacctcaggaattacatctgcccagcagaggattaatcttggctcattagcctcacactccatggaacttc

SEQ ID NO: 65858 - DNA, 110 bp, synthetic construct
  source 1..110: mol_type = other DNA
tatcagtgtacggggctgagcatgagctaagttgtccactagctaaaatccttaaaaatggtacatattggtaactaaacaaagaaagaaatcatgtccaagtgttttca

SEQ ID NO: 65859 - DNA, 110 bp, synthetic construct
  source 1..110: mol_type = other DNA
aaccgaggctctatttccttggcgggctaaagtggctaggggcttctcagacccgatctgagggagtcctgagccgaaggaaagggcccggtcgttcccccccaccccct

SEQ ID NO: 65860 - DNA, 110 bp, synthetic construct
  source 1..110: mol_type = other DNA
agcaggaggtaaggaaaacaaaagttgagaaatcagtcttgactagggagggtcgcttacctactactggctccacacaccagctttctgcatcgccctcatccccagcc

SEQ ID NO: 65861 - DNA, 110 bp, synthetic construct
  source 1..110: mol_type = other DNA
atttgtgacatgaatccttccttcttcctctgagtcattcaaataattgaatgattatttattgaatgccttatatggctgtagtattaggctggtcactgaggattcag

SEQ ID NO: 65862 - DNA, 110 bp, synthetic construct
  source 1..110: mol_type = other DNA
tatttattgaatgccttatatggctgtagtattaggctggtcactgaggattcagtggtatcccaggggaaagtacagtagtagagataatagcaatgactccttctatt

SEQ ID NO: 65863 - DNA, 110 bp, synthetic construct
  source 1..110: mol_type = other DNA
agcacttcctgaagccagtttcaagtaatgggcagtgacttgggacactgctcaaaagatgcataagtacgtgtagcagggataaggcccagaaagctagatggagggac

SEQ ID NO: 65864 - DNA, 110 bp, synthetic construct
  source 1..110: mol_type = other DNA
aagatgcataagtacgtgtagcagggataaggcccagaaagctagatggagggacgccaccttggccaagccttcaggaagttcagaagtgctcattgtggtccagcctg

SEQ ID NO: 65865 - DNA, 110 bp, synthetic construct
  source 1..110: mol_type = other DNA
gcggttttttgaagtgacctgacctcataccttggcaacctagaatcagggaagagagactcagactcagaccagacttaaccagctactcttttgacgttgtactaggg

SEQ ID NO: 65866 - DNA, 110 bp, synthetic construct
  source 1..110: mol_type = other DNA
gagactcagactcagaccagacttaaccagctactcttttgacgttgtactaggggtaggcctaacacagcaatgtaagggaacgtgggatccagatttgactgcagaga

SEQ ID NO: 65867 - DNA, 110 bp, synthetic construct; identical to SEQ ID NO: 65865
  source 1..110: mol_type = other DNA

SEQ ID NO: 65868 - DNA, 110 bp, synthetic construct; identical to SEQ ID NO: 65866
  source 1..110: mol_type = other DNA

SEQ ID NO: 65869 - DNA, 110 bp, synthetic construct
  source 1..110: mol_type = other DNA
gaaatgagccaaaatttgtttctttaggaagaaaattttattccaatgattcatttagctacagtggtgaggttttggtaaaaacaagtagaaaatgaaggataaggaag

SEQ ID NO: 65870 - DNA, 110 bp, synthetic construct
  source 1..110: mol_type = other DNA
tagctacagtggtgaggttttggtaaaaacaagtagaaaatgaaggataaggaagcacggagtaagtaagcatatcgattttcatcatcatttgctttcgctccgatgat

SEQ ID NO: 65871 - DNA, 110 bp, synthetic construct
  source 1..110: mol_type = other DNA
agcttcatattaactctgtctctggcttggttttaaatttttggcctgagctttgtttcctcaccctgtttaaacccctgtctaaggagcaacaactctagaacagtttc

SEQ ID NO: 65872 - DNA, 110 bp, synthetic construct
  source 1..110: mol_type = other DNA
tttcctcaccctgtttaaacccctgtctaaggagcaacaactctagaacagtttcttttgcacaaggcttagggtaatgacatggagttgggttctaattctattcctgg

SEQ ID NO: 65873 - DNA, 110 bp, synthetic construct
  source 1..110: mol_type = other DNA
ttattctagaagcagctggaaatctgtccacattttaaactatttatccctaattcaatctttaaaatgctgtgtttgccaacaagacacttctctgggtgagatcagga

SEQ ID NO: 65874 - DNA, 110 bp, synthetic construct
  source 1..110: mol_type = other DNA
caatctttaaaatgctgtgtttgccaacaagacacttctctgggtgagatcaggagtaagagctgccgatttcctatcaagagctatgagactattaaactacttttcag

SEQ ID NO: 65875 - DNA, 110 bp, synthetic construct
  source 1..110: mol_type = other DNA
ttttcatcttttctggacatatgccctagatgggactgcagaatcatatggtagctctaattttagctttttaaggaatctttatactgtcctccatactggttgcacca

SEQ ID NO: 65876 - DNA, 110 bp, synthetic construct
  source 1..110: mol_type = other DNA
gacatatgccctagatgggactgcagaatcatatggtagctctaattttagctttttaaggaatctttatactgtcctccatactggttgcaccaatttacattcccacc

SEQ ID NO: 65877 - DNA, 110 bp, synthetic construct
  source 1..110: mol_type = other DNA
acggtcgagaaatgaggtggtttagaaaatgaagatcaggggagaagggggcccaatgtcatcagtgaacactttgaatgttcaccacacagttcatctgatgtttttca

SEQ ID NO: 65878 - DNA, 110 bp, synthetic construct
  source 1..110: mol_type = other DNA
acccttggaagagtttttccatatttcatctaccctcctcaggggagaaatgaggaagggggagcaaagtggagactcccaggggtgggtggcccctgggccaggacagc

SEQ ID NO: 65879 - DNA, 110 bp, synthetic construct
  source 1..110: mol_type = other DNA
aagggggagcaaagtggagactcccaggggtgggtggcccctgggccaggacagctctgccctcctcttccccatcccggctctttagacacctaaactctgcctgctgg

SEQ ID NO: 65880 - DNA, 110 bp, synthetic construct
  source 1..110: mol_type = other DNA
gaagtctctgcccttccctggtaccttgtacccatgaaaacctgtgtaagcccttcaggagtggaatctgtttcccccagtcctgtggagctcctgcacacaatccttgc

SEQ ID NO: 65881 - DNA, 110 bp, synthetic construct
  source 1..110: mol_type = other DNA
ccctggtaccttgtacccatgaaaacctgtgtaagcccttcaggagtggaatctgtttcccccagtcctgtggagctcctgcacacaatccttgctggccttcaatgcca

SEQ ID NO: 65882 - DNA, 110 bp, synthetic construct
  source 1..110: mol_type = other DNA
accacaacttctcatttttttagagatgaatttaagacttagagacccaaaggacttgcccgagtgtgcatggcaggatagcggtagctttgaggcactgtggaaaatga

SEQ ID NO: 65883 - DNA, 110 bp, synthetic construct
  source 1..110: mol_type = other DNA
ttgcccgagtgtgcatggcaggatagcggtagctttgaggcactgtggaaaatgaacggagtcctctgccagttctgcatgtatcagctgtgcagcttgatctttctgta

SEQ ID NO: 65884 - DNA, 110 bp, synthetic construct
  source 1..110: mol_type = other DNA
tgctctaagttaacatgacacttggtccagatggcttcccccagccccagcaacggcagtggacaaatctggggccacccagcaagtgtctggcagggccaggagcagtc

SEQ ID NO: 65885 - DNA, 110 bp, synthetic construct
  source 1..110: mol_type = other DNA
tgagtggtccagtcattacagaacctccctgtgcccatctgagccctgggagacacacgggagctctgagctccaccttgagcctagggctggcactgggcccctgatca

SEQ ID NO: 65886 - DNA, 110 bp, synthetic construct
  source 1..110: mol_type = other DNA
cctacccaaagggggtgctggttccccagaggctagcttacagttgccttggcagggggtggggatacagtctaatgctgccagatctcccaatttttcagaagccaaaa

SEQ ID NO: 65887 - DNA, 110 bp, synthetic construct
  source 1..110: mol_type = other DNA
cctgccaggcacagaaacacttgcacctgcctgagctggaaaaactcaggaattgaaaccaccagtccttctgccagcattagatcaccttctctgcgtgttttcttccc

SEQ ID NO: 65888 - DNA, 110 bp, synthetic construct
  source 1..110: mol_type = other DNA
ttattttaaccccactctcagccttcttatcagtaaaaaaatgttgataacaatagtagctccttcacagagtactagaaggactgaatgattgattcagtgtgtgcaaa

SEQ ID NO: 65889 - DNA, 110 bp, synthetic construct
  source 1..110: mol_type = other DNA
ctaagacgcggcagctggttgcacgtgggtgagctctacggccacctacacacaccctctctgataagcagtttctagcagatgattacagaaggtgtcttacgttccta

SEQ ID NO: 65890 - DNA, 110 bp, synthetic construct
  source 1..110: mol_type = other DNA
catggtggcactagagctaactgctgtgttatcccttgttctaagctccctggacagtctgcctaaaactacctggaaaaaaaaaagtctaggccttgggaaaactgtga

SEQ ID NO: 65891 - DNA, 110 bp, synthetic construct
  source 1..110: mol_type = other DNA
acccttctggtcccactatccttccctcttcatgagccattttcatctcttcctggagcatttctgagctcccattagctggctgatgtcccaggaagaaggttaagggt

SEQ ID NO: 65892 - DNA, 110 bp, synthetic construct
  source 1..110: mol_type = other DNA
gagcatttctgagctcccattagctggctgatgtcccaggaagaaggttaagggtattcacggtgaggtaatttcttacagttactaccaagaaatcttattaccagtgt

SEQ ID NO: 65893 - DNA, 110 bp, synthetic construct
  source 1..110: mol_type = other DNA
aggtatatatatttggcttgtctcaagccctctggctctctcctgggatttcgaagctcctttgctggatatcaagttgtaagcagatttgccaggctttgctgacatat

SEQ ID NO: 65894 - DNA, 110 bp, synthetic construct
  source 1..110: mol_type = other DNA
gctcctttgctggatatcaagttgtaagcagatttgccaggctttgctgacatatcctgcatgctcactgtgatcgcctgagacaggtttcctctggagtgccagccctc

SEQ ID NO: 65895 - DNA, 110 bp, synthetic construct
  source 1..110: mol_type = other DNA
ggatcaaacctgcattctcacagagacaacatcaggtccttagtctcctgggctaccatgggaactcccattctaagttcctattttccagatggaatctgtgtctctga

SEQ ID NO: 65896 - DNA, 110 bp, synthetic construct
  source 1..110: mol_type = other DNA
ccatgggaactcccattctaagttcctattttccagatggaatctgtgtctctgaatctgtagagaaagttggaaggtgctggtctgtcttaagaaactcactcatccct

SEQ ID NO: 65897 - DNA, 110 bp, synthetic construct
  source 1..110: mol_type = other DNA
tttaaaagacttttggaacaacgtcaagcatactaacactcacattataggggcccaagaaaaagaagagaaagaaaaaggagcagagaacttatttgaataaataatag

SEQ ID NO: 65898 - DNA, 110 bp, synthetic construct
  source 1..110: mol_type = other DNA
tgccttaagtaggtgcaatcttgtattccagtactaataagtgtatactgcagtcgttgaataactagttcaattatagaagtgaaggcttgtgaaaaatatttagctac

SEQ ID NO: 65899 - DNA, 110 bp, synthetic construct
  source 1..110: mol_type = other DNA
gttgaataactagttcaattatagaagtgaaggcttgtgaaaaatatttagctaccttttttgcagcagggtttcattcctcaatgtccaattccaatttttttttctca

SEQ ID NO: 65900 - DNA, 110 bp, synthetic construct
  source 1..110: mol_type = other DNA
aatataattaaattctcatccattcttttggaacatggcttccggagaaaaaagtctcatatttcactggaaaactgctctccaagcacacagctctgagctggccacac

SEQ ID NO: 65901 - DNA, 110 bp, synthetic construct
  source 1..110: mol_type = other DNA
ctcatatttcactggaaaactgctctccaagcacacagctctgagctggccacacaatgcctgtgactatgtctgaactattcagaagctctttgtaagctataagtgat

SEQ ID NO: 65902 - DNA, 110 bp, synthetic construct; identical to SEQ ID NO: 65900
  source 1..110: mol_type = other DNA

SEQ ID NO: 65903 - DNA, 110 bp, synthetic construct; identical to SEQ ID NO: 65901
  source 1..110: mol_type = other DNA

SEQ ID NO: 65904 - DNA, 110 bp, synthetic construct
  source 1..110: mol_type = other DNA
gcttagttgggctctgggtacctgcgggccctgccctcccctatgccaacagtggagagatgctgggatctctgaagtgttctctttgttcctaaatttagcctggccaa

SEQ ID NO: 65905 - DNA, 110 bp, synthetic construct
  source 1..110: mol_type = other DNA
agagatgctgggatctctgaagtgttctctttgttcctaaatttagcctggccaagctaacaccaaccccccagagagaaccccacttctctcctttcccatccagcccc

SEQ ID NO: 65906 - DNA, 110 bp, synthetic construct; identical to SEQ ID NO: 65904
  source 1..110: mol_type = other DNA

SEQ ID NO: 65907 - DNA, 110 bp, synthetic construct; identical to SEQ ID NO: 65905
  source 1..110: mol_type = other DNA

SEQ ID NO: 65908 - DNA, 110 bp, synthetic construct
  source 1..110: mol_type = other DNA
cttctacagccagaagagcaccctttgcggccacgggttccctgggcactagcctggctctgacttttccagtgagcacgggcaaagtgactgtaaaaccccccttgtaa

SEQ ID NO: 65909 - DNA, 110 bp, synthetic construct
  source 1..110: mol_type = other DNA
tagccaaggacattccctccacagttgctccccaggagcctgtacctacctcgacagggccaagagctcgaaaaggccagttagaacagaggtccttgacccttcgggcc

SEQ ID NO: 65910 - DNA, 110 bp, synthetic construct
  source 1..110: mol_type = other DNA
gtgtcctcctctcttgggtcacatgtcttagggaatcacaggcaagggaatggatggggaataccccaggccttccacagctcccaagagggccagagatggggaccagg

SEQ ID NO: 65911 - DNA, 110 bp, synthetic construct
  source 1..110: mol_type = other DNA
tgagagagtcaggttggtggagaagtgttgtctaagtctgcatcataaatacaattggctggtggcactggtgtggccacgatgtcctgccccacaggccctctttgttt

SEQ ID NO: 65912 - DNA, 110 bp, synthetic construct
  source 1..110: mol_type = other DNA
tgtcacatcacattctgtgcccagaccaagagttctgagtatgactgtgcacgtcagccatcagtcaccaccctcaccactcgaaaaatcagcaagtaaaatctggaaca

SEQ ID NO: 65913 - DNA, 110 bp, synthetic construct
  source 1..110: mol_type = other DNA
tgtgcacgtcagccatcagtcaccaccctcaccactcgaaaaatcagcaagtaaaatctggaacaagacaaggatgcgatgcccactctcaccacttcttttcaacatag

SEQ ID NO: 65914 - DNA, 110 bp, synthetic construct; identical to SEQ ID NO: 65912
  source 1..110: mol_type = other DNA

SEQ ID NO: 65915 - DNA, 110 bp, synthetic construct; identical to SEQ ID NO: 65913
  source 1..110: mol_type = other DNA

SEQ ID NO: 65916 - DNA, 110 bp, synthetic construct
  source 1..110: mol_type = other DNA
cctcacatacccattacccagccttgacaatccacatggtcagttgtgtttcatttataccctcttccctccagattattttcagcaaatactagaatagtacaatttca

SEQ ID NO: 65917 - DNA, 110 bp, synthetic construct
  source 1..110: mol_type = other DNA
atggtcagttgtgtttcatttataccctcttccctccagattattttcagcaaatactagaatagtacaatttcatccttagatatttcagtgcatatttctaaaatgat

SEQ ID NO: 65918 - DNA, 110 bp, synthetic construct
  source 1..110: mol_type = other DNA
tccaggtttatcttcaacctacatgctccagccctggaatcagccccttctccaggaaccctggttcctttagtgagcaatggcatcagcgatcaaaaccttgacactag

SEQ ID NO: 65919 - DNA, 110 bp, synthetic construct
  source 1..110: mol_type = other DNA
gaaccctggttcctttagtgagcaatggcatcagcgatcaaaaccttgacactaggtgtgttcattgctgctgggtatatttgcttcttgaccccgtcagcatacagatt

SEQ ID NO: 65920 - DNA, 110 bp, synthetic construct
  source 1..110: mol_type = other DNA
gaagtagaaaaaccttctactgacatctgagtgaagcacagaacagccccatccagctggctgcttgcactgcagcagcaagtaaaccaggagaagtggctgcccacgcc

SEQ ID NO: 65921 - DNA, 110 bp, synthetic construct
  source 1..110: mol_type = other DNA
ctttgtatacacccgctgctcttgtccggccctcccttaaaggtagccagtcctcctatggtcgttgaagggccctgggtccggcactaaaatactgtgaatccccactg

SEQ ID NO: 65922 - DNA, 110 bp, synthetic construct
  source 1..110: mol_type = other DNA
ctatggtcgttgaagggccctgggtccggcactaaaatactgtgaatccccactgcagggtctgcccagcagctgagtaggtttcagcttctccatgtcaagtggtgttt

SEQ ID NO: 65923 - DNA, 110 bp, synthetic construct
  source 1..110: mol_type = other DNA
ttcattctgtcctcaaagcagccagaccgtgcaggagccttgactgttccacagcagaggggacagaggtgcaggaaggttggctggccagcccagggctaggatcatgg

SEQ ID NO: 65924 - DNA, 110 bp, synthetic construct
  source 1..110: mol_type = other DNA
agaggggacagaggtgcaggaaggttggctggccagcccagggctaggatcatggcttggaagggcagaggcaggtttggctgaagaggccactccagcacctgtgcctt

SEQ ID NO: 65925 - DNA, 110 bp, synthetic construct
  source 1..110: mol_type = other DNA
ggagggatttagatacacaattgtgtggttgccctactcaggccaatcctgtctgggagagttgctattactgtccatggtgttcgtgggctgactcacagctgaagaga

SEQ ID NO: 65926 - DNA, 110 bp, synthetic construct
  source 1..110: mol_type = other DNA
atctatccccaaattgtgggaagttctattccttggctgaagtcttgcttattgctctgattaagcttgggtaaccttagaaaaaaatttatatctatggccatgatcag

SEQ ID NO: 65927 - DNA, 110 bp, synthetic construct
  source 1..110: mol_type = other DNA
tctgattaagcttgggtaaccttagaaaaaaatttatatctatggccatgatcagagcaggtatttatacttcaggagacagttttttatttacctaataagggtccaga

SEQ ID NO: 65928 - DNA, 110 bp, synthetic construct
  source 1..110: mol_type = other DNA
aggactgattcaggaacctggagatcacagcctcttctgctggaaaaggttaatccttcaaaaaaaaaaaaaataaatttgcctctttaagctagaatttcataaatact

SEQ ID NO: 65929 - DNA, 110 bp, synthetic construct
  source 1..110: mol_type = other DNA
cttcaaaaaaaaaaaaaataaatttgcctctttaagctagaatttcataaatactgatgcaacttgcagatcagcctgagggtttctgaggctctgctgggccgtcatct

SEQ ID NO: 65930 - DNA, 110 bp, synthetic construct
  source 1..110: mol_type = other DNA
acgctaaaggcacgcacacacactcattcgccaacacacacagccgcagcttcagatgcatagaccctcccatccctacccctcaggcacacccccagcggcccttaggg

SEQ ID NO: 65931 - DNA, 110 bp, synthetic construct
  source 1..110: mol_type = other DNA
atgcatagaccctcccatccctacccctcaggcacacccccagcggcccttagggcagaggggaggccggggctctcaactcggtatcaggcgcaagagcccctgaggag

SEQ ID NO: 65932 - DNA, 110 bp, synthetic construct
  source 1..110: mol_type = other DNA
acaggccagtccccttgccttgtggtgattgtgagaagcaggtccagaaaggccggcaagattcaggcccaattacagccattcctgaaccatctgggcagtgctgcagc

SEQ ID NO: 65933 - DNA, 110 bp, synthetic construct
  source 1..110: mol_type = other DNA
actttcatatggaggaagctcagaaatgagggtgatctcaacactttaaagaacgggtcagagaagaaggaaggcacgatgagcacacacctggtggtgacaaacagaac

SEQ ID NO: 65934 - DNA, 110 bp, synthetic construct
  source 1..110: mol_type = other DNA
gtgaggccagagccaggactttaagtctgcaggccttatccaggcccagcaaatgcaggacactcttagtccctgggctgggctcatctaggcacaatggcacatgtgcg

SEQ ID NO: 65935 - DNA, 110 bp, synthetic construct
  source 1..110: mol_type = other DNA
caggacactcttagtccctgggctgggctcatctaggcacaatggcacatgtgcgggacctttttagtccctaggctctgggtggctgctcaagccaggcggtctagctc

SEQ ID NO: 65936 - DNA, 110 bp, synthetic construct
  source 1..110: mol_type = other DNA
tggttaggacagggccccaagagcctggagggcagcctgcggccacggatggggtcaacatacagccaaggacactcgcttaacacaaatactttcctttcccaccttct

SEQ ID NO: 65937 - DNA, 110 bp, synthetic construct
  source 1..110: mol_type = other DNA
caacatacagccaaggacactcgcttaacacaaatactttcctttcccaccttctgtgagggggacttggccttctctgctgtggcagccatgtaatcacctacagtgct

SEQ ID NO: 65938 - DNA, 110 bp, synthetic construct
  source 1..110: mol_type = other DNA
tcctgctgacattttactgaaagtcacaggttgatccgggactttgaatttgcactgcatccgactgctggatgagaatgcatccacacatgtcaaccgaaaatactttc

SEQ ID NO: 65939 - DNA, 110 bp, synthetic construct
  source 1..110: mol_type = other DNA
gcagctcctggatggctcaggcttcagggatgatgctgggatgggggcttgggtgtcatcctctgtgaagggactgggcagcacctgagcttggggtgcaaagctcaagc

SEQ ID NO: 65940 - DNA, 110 bp, synthetic construct
  source 1..110: mol_type = other DNA
tcatcctctgtgaagggactgggcagcacctgagcttggggtgcaaagctcaagccccaggtgataagcaggtggtaggaacagactgccaaggcgatgctgtgggaaga

SEQ ID NO: 65941 - DNA, 110 bp, synthetic construct
  source 1..110: mol_type = other DNA
cagtgtttgaaagagatttccctgcatgtgaggagaaagggaggagggaggaaggaaaggaaggagagaaaggaagagaggaagaaaaagggggaagggaagagcacgag

SEQ ID NO: 65942 - DNA, 110 bp, synthetic construct
  source 1..110: mol_type = other DNA
aaaggaaggagagaaaggaagagaggaagaaaaagggggaagggaagagcacgagaggatagaaagaaaaaagcagagcctctcctggcctttgcagatgaggctctgtg

SEQ ID NO: 65943 - DNA, 110 bp, synthetic construct
  source 1..110: mol_type = other DNA
gaggggtggagatgggtctggggccctggtgaggatggattcagggtctggaccgggtagtggatcctggctgggaaattgggcttcagtttggttagaagggagcacgg

SEQ ID NO: 65944 - DNA, 110 bp, synthetic construct
  source 1..110: mol_type = other DNA
ggtagtggatcctggctgggaaattgggcttcagtttggttagaagggagcacgggggaggctgtgcaaactgttcagactttctcagtgctgtttgtacagcttctgtc

SEQ ID NO: 65945 - DNA, 110 bp, synthetic construct
  source 1..110: mol_type = other DNA
gaaccagaaaaacacacaggaaaaaaatacatacctagatggagcgctagctaggtacccaggtacctgttctcgggttgttagaatcatccttggtggtgtatcttcat

SEQ ID NO: 65946 - DNA, 110 bp, synthetic construct
  source 1..110: mol_type = other DNA
tacccaggtacctgttctcgggttgttagaatcatccttggtggtgtatcttcatttaaacactggatgctttgaaaacattaggttgtaaagaacgaagtcatcttttt

SEQ ID NO: 65947 - DNA, 110 bp, synthetic construct
  source 1..110: mol_type = other DNA
agcacaggatgcttcaggcttagccagttaccccttcaggttcctcccccagcccaagcgccacctgcacctcagagcaaaggacagctcttaccgtccctgtggcatgt

SEQ ID NO: 65948 - DNA, 110 bp, synthetic construct
  source 1..110: mol_type = other DNA
aagcgccacctgcacctcagagcaaaggacagctcttaccgtccctgtggcatgtcctgttatgcagggcagtctttgcccaccttccctggaggtctcccaccccttcc

SEQ ID NO: 65949 - DNA, 110 bp, synthetic construct
  source 1..110: mol_type = other DNA
attaaggcatctaaaaatgcaagagggtttctggcaagttaacagcaataaatggctttctgggttttataagccccatgtcgccagcctccagtcatcacatgcatggg

SEQ ID NO: 65950 - DNA, 110 bp, synthetic construct
  source 1..110: mol_type = other DNA
ctttctgggttttataagccccatgtcgccagcctccagtcatcacatgcatgggcctgatgagagatgtaaatgcacccaagacaagtcaccactgtgacaagctccct

SEQ ID NO: 65951 - DNA, 110 bp, synthetic construct
  source 1..110: mol_type = other DNA
gactgagcacagaaaagatgcccccccccccagggatccctgggatggtagataccggggggtcatagaaacactggagaatctgaaagtagaggcagattagactggct

SEQ ID NO: 65952 - DNA, 110 bp, synthetic construct
  source 1..110: mol_type = other DNA
cggggggtcatagaaacactggagaatctgaaagtagaggcagattagactggctctcctaagggtgacagtgagtatgtaaggttgagggtaagctcggggtccttgga

SEQ ID NO: 65953 - DNA, 110 bp, synthetic construct
  source 1..110: mol_type = other DNA
gtttagaaaactcagatgtggaagacaagttgtccagaaggtagctggtgtgagataatgaagagcatctgagcatctggacagcctggtcctggcgagtaccctcctgg

SEQ ID NO: 65954 - DNA, 110 bp, synthetic construct
  source 1..110: mol_type = other DNA
tcccaggatttaaaccagagctggtatgctgatgtctctaccacatttatctctaccttcaagctttcctctaaacttcaaatgtaattatccagctgcctatttgacag

SEQ ID NO: 65955 - DNA, 110 bp, synthetic construct
  source 1..110: mol_type = other DNA
ttgctataatatttcatggaattgatataccatagtttagccattcacttatcataggaagtgttggttgtatccagttttgagctcttgcaaataaaactgctctgaac

SEQ ID NO: 65956 - DNA, 110 bp, synthetic construct
  source 1..110: mol_type = other DNA
tgttcaggctcccggcctcgggggcagagaggataatcagcctgcagagacaggagggtctgaccaggaaggacccggatgatgcacagagataaggtttggccacccag

SEQ ID NO: 65957 - DNA, 110 bp, synthetic construct
  source 1..110: mol_type = other DNA
gggtctgaccaggaaggacccggatgatgcacagagataaggtttggccacccagctgcagaggcaggctggcccacagctgatgtctggctgcattttgaggggtaaaa

SEQ ID NO: 65958 - DNA, 110 bp, synthetic construct
  source 1..110: mol_type = other DNA
tcaaaaaaatcactttcacaatgatggcaggtttcgcttttatttgacggataatatgtgatctttatactgcatagagctaaaaaaaaaaaaatcagctcaatctcttc

SEQ ID NO: 65959 - DNA, 110 bp, synthetic construct
  source 1..110: mol_type = other DNA
ctttacttacctgcgatgctacatagctgaaacagagtgccacaaagagaaacacgatttgaaatatttaccaaggcagtaaaaatcagatctttacaaagatgacattt

SEQ ID NO: 65960 - DNA, 110 bp, synthetic construct
  source 1..110: mol_type = other DNA
cctgaggtccatgtgacatggcctcagtgactgactttggggagcatcatttggaggctccgtctgaagcagctgtttctctcgccatgttcagatctgacttccctctc

SEQ ID NO: 65961 - DNA, 110 bp, synthetic construct
  source 1..110: mol_type = other DNA
ggctccgtctgaagcagctgtttctctcgccatgttcagatctgacttccctctctaccctctccattctgcatttgccgatgggagccccctacagtcccgtggctccc

SEQ ID NO: 65962 - DNA, 110 bp, synthetic construct; identical to SEQ ID NO: 65960
  source 1..110: mol_type = other DNA

SEQ ID NO: 65963 - DNA, 110 bp, synthetic construct; identical to SEQ ID NO: 65961
  source 1..110: mol_type = other DNA

SEQ ID NO: 65964 - DNA, 110 bp, synthetic construct
  source 1..110: mol_type = other DNA
cactaattaagaggcttttctaacagtctcatttttatctggcagagagctgtgtgtgtgtgtgatctgcctgggtggaatattaaaagtgtgagatgtatttcacgggc

SEQ ID NO: 65965 - DNA, 110 bp, synthetic construct
  source 1..110: mol_type = other DNA
ataacgtgggtcatggcctccttcaggatggccttgaactgctagagagacagcccttagctctcagcacattcttaaaataatctccaaaggtggaaggagtcaccgct

SEQ ID NO: 65966 - DNA, 110 bp, synthetic construct
  source 1..110: mol_type = other DNA
aatgaagactgtaattccataaggacaagaaaatcacgttctctctggtatgtactcttcctgaagctgggtcacgtggaagccgggttatattagatagttacttggtg

SEQ ID NO: 65967 - DNA, 110 bp, synthetic construct
  source 1..110: mol_type = other DNA
caaaagcaagcaaaacaaacataaccaaaacagacactggatttcatctcctaaactgtaccttctcaggtctgtatcatttgtccctttattcagctctttttcctgtc

SEQ ID NO: 65968 - DNA, 110 bp, synthetic construct
  source 1..110: mol_type = other DNA
ctgtaccttctcaggtctgtatcatttgtccctttattcagctctttttcctgtcatatgtactgagttcctactctgtgccaagcagggatctagagagatacaaacct

SEQ ID NO: 65969 - DNA, 110 bp, synthetic construct; identical to SEQ ID NO: 65967
  source 1..110: mol_type = other DNA

SEQ ID NO: 65970 - DNA, 110 bp, synthetic construct; identical to SEQ ID NO: 65968
  source 1..110: mol_type = other DNA

SEQ ID NO: 65971 - DNA, 110 bp, synthetic construct
  source 1..110: mol_type = other DNA
tccaaactctttgaaaccatgtctttgaaatcattgttgaaggattcagagtaagatatcatttcttttaaagaaaaaaagtagttttgtagacctaatagcagtccagc

SEQ ID NO: 65972 - DNA, 110 bp, synthetic construct; identical to SEQ ID NO: 65971
  source 1..110: mol_type = other DNA

SEQ ID NO: 65973 - DNA, 110 bp, synthetic construct
  source 1..110: mol_type = other DNA
tctcaggaacagacataattaatagagctttattacagttttcctgacatatttactgaggaactcttgaaagggttgtgcttaggggccattatatgtttaactgataa

SEQ ID NO: 65974 - DNA, 110 bp, synthetic construct; identical to SEQ ID NO: 65973
  source 1..110: mol_type = other DNA

SEQ ID NO: 65975 - DNA, 110 bp, synthetic construct; identical to SEQ ID NO: 65973
  source 1..110: mol_type = other DNA

SEQ ID NO: 65976 - DNA, 110 bp, synthetic construct; identical to SEQ ID NO: 65973
  source 1..110: mol_type = other DNA

SEQ ID NO: 65977 - DNA, 110 bp, synthetic construct
  source 1..110: mol_type = other DNA
gattgctaattcattatcttgcattttgactggcagacattgctttctccagaaatcatcaaaccgttcaatagaaatggtaaaatgaaaataacacattttgagctgac

SEQ ID NO: 65978 - DNA, 110 bp, synthetic construct
  source 1..110: mol_type = other DNA
tcatcaaaccgttcaatagaaatggtaaaatgaaaataacacattttgagctgacataaccagagtgcactgctctataaaggaccaccaacagaaccctgctcccttca

SEQ ID NO: 65979 - DNA, 110 bp, synthetic construct
  source 1..110: mol_type = other DNA
cctgagcgtgtgacacttttcgagatatttttcatgcaatgatagaggtgcattcctccttacacttttattttgtttttccatacagcttatagccagtgcctcagctc

SEQ ID NO: 65980 - DNA, 110 bp, synthetic construct
  source 1..110: mol_type = other DNA
ctccttacacttttattttgtttttccatacagcttatagccagtgcctcagctcacatatcaaagcttctgcaatggactgttctttggataacaccaccgttattcta

SEQ ID NO: 65981 - DNA, 110 bp, synthetic construct; identical to SEQ ID NO: 65979
  source 1..110: mol_type = other DNA

SEQ ID NO: 65982 - DNA, 110 bp, synthetic construct; identical to SEQ ID NO: 65980
  source 1..110: mol_type = other DNA

SEQ ID NO: 65983 - DNA, 110 bp, synthetic construct
  source 1..110: mol_type = other DNA
tggcagggcaaacatctcattactagacatctgctcttcctattgtcctgcatcctgtgagtcacacctttctccccttggatgcccaggcccctataccttccttttgc

SEQ ID NO: 65984 - DNA, 110 bp, synthetic construct
  source 1..110: mol_type = other DNA
tgtgagtcacacctttctccccttggatgcccaggcccctataccttccttttgctcaggatgccttctaagcctcagcttccagacttgcctttgtgtggcatggactc

SEQ ID NO: 65985 - DNA, 110 bp, synthetic construct
  source 1..110: mol_type = other DNA
gagaggtctgtggattaggaagtgacaaagtctgggcatgcaagtaacgaattgtgccaatcatgtatgtatgtgtgtgtgtcccaggcagcatatatgcacacatccac

SEQ ID NO: 65986 - DNA, 110 bp, synthetic construct
  source 1..110: mol_type = other DNA
tcattaataaccacacactcacactgccacagatgttctgaggactgatttttatgactcttcttcttcattactcacttccatggaatcttcacaggtgcttttggtac

SEQ ID NO: 65987 - DNA, 110 bp, synthetic construct
  source 1..110: mol_type = other DNA
gactcttcttcttcattactcacttccatggaatcttcacaggtgcttttggtacttagtttcaaacagagatctttattgcttttctaatctaaaagaaagagagaaaa

SEQ ID NO: 65988 - DNA, 110 bp, synthetic construct
  source 1..110: mol_type = other DNA
caaagaaagtttaaacagtacttaccttttccctaaagttagcccaattattttttgcatactaggtttatctaacttggaagttcggtttgttttgttgctagttcatc

SEQ ID NO: 65989 - DNA, 110 bp, synthetic construct; identical to SEQ ID NO: 65988
  source 1..110: mol_type = other DNA

SEQ ID NO: 65990 - DNA, 110 bp, synthetic construct
  source 1..110: mol_type = other DNA
ttctggatgtccagagcctggcttcccaggccagaaaagcagctacaaggaaggccagttgactccaactacttactgattaaaggaaaaagaggcttaaagaacatatc

SEQ ID NO: 65991 - DNA, 110 bp, synthetic construct
  source 1..110: mol_type = other DNA
gcaaatgccatcagtttagttattcttctagtaagagttggtaaagaacagaacagacatcagggttttttttcagaattgaactcctgtgcttaaataattctctctgc

SEQ ID NO: 65992 - DNA, 110 bp, synthetic construct
  source 1..110: mol_type = other DNA
caggacgggaactcccaattatatattttatcatactctttgaacatacagaaaataatctgtgtgaagagcttagcattttatctgatatatagctggagcttgatctg

SEQ ID NO: 65993 - DNA, 110 bp, synthetic construct
  source 1..110: mol_type = other DNA
ccaggccattgacctactctctgtccctaacacactcctgacattctggctttatgaatttttagcttttcctgaaattccattcccttagaagtgcattcccttgcttt

SEQ ID NO: 65994 - DNA, 110 bp, synthetic construct
  source 1..110: mol_type = other DNA
tgctataactcctttctctattatgatgatgattagttagctagcattattgttagctttccttgctgaacttttcatataccacgtcatatacatacactatatatcag

SEQ ID NO: 65995 - DNA, 110 bp, synthetic construct; identical to SEQ ID NO: 65994
  source 1..110: mol_type = other DNA

SEQ ID NO: 65996 - DNA, 110 bp, synthetic construct
  source 1..110: mol_type = other DNA
cttttgcaaagtcaactgataatattcatctgttgaattaaaaaacaaactatcataaactgtggaatcagttccgccttgtctttttttagctttctcaatagtaaagc

SEQ ID NO: 65997 - DNA, 110 bp, synthetic construct
  source 1..110: mol_type = other DNA
atacttttaatttatccttattctgcttatcagttaaggacacgtcctcttacaaagtatgcacttttgccccacccagtggtcgcctcataaatagccattgttcccag

SEQ ID NO: 65998 - DNA, 110 bp, synthetic construct
  source 1..110: mol_type = other DNA
agtatgcacttttgccccacccagtggtcgcctcataaatagccattgttcccaggagtaagagaattccctccccagggaggtttggtattagaaacactagggcagta

SEQ ID NO: 65999 - DNA, 110 bp, synthetic construct
  source 1..110: mol_type = other DNA
ctgtccactgagaaaggctacacacaatgacactcagtaataatgaacatgcccagcactcagctcttggtttctaaacacagttttccaggaagtgtagccaaggtcct

SEQ ID NO: 66000 - DNA, 110 bp, synthetic construct
  source 1..110: mol_type = other DNA
gcactcagctcttggtttctaaacacagttttccaggaagtgtagccaaggtcctttaagaaaatggctgattctagcctgaggctggacaaatacaagaagatttggga

SEQ ID NO: 66001 - DNA, 110 bp, synthetic construct; identical to SEQ ID NO: 65999
  source 1..110: mol_type = other DNA

SEQ ID NO: 66002 - DNA, 110 bp, synthetic construct; identical to SEQ ID NO: 66000
  source 1..110: mol_type = other DNA

SEQ ID NO: 66003 - DNA, 110 bp, synthetic construct
  source 1..110: mol_type = other DNA
taacactgcttaaaaacctccagatggtctccactagagaagagtggccaaagtgctcagcaaggcacacgggtacttttccatcctgttctgctttgcattcacctttc

SEQ ID NO: 66004 - DNA, 110 bp, synthetic construct
  source 1..110: mol_type = other DNA
caaaataaaaaatagcatctttttttacctactctccacatgtagtatttgtgtccaccgtgtcttagaccccactatttgcaccctgaagcattttcccctatacctct

SEQ ID NO: 66005 - DNA, 110 bp, synthetic construct
  source 1..110: mol_type = other DNA
caccgtgtcttagaccccactatttgcaccctgaagcattttcccctatacctcttttgggcctgtttgccctgaaaaaaacctattccctaccctgactttctgtaaat

SEQ ID NO: 66006 - DNA, 110 bp, synthetic construct
  source 1..110: mol_type = other DNA
cctaaacaggttttggacatactgtgaaatgctaccctgagatgtggactgtaaattatgaaacagctaatatcatatatcttgtgttccattctttgctgttggagttt

SEQ ID NO: 66007 - DNA, 110 bp, synthetic construct
  source 1..110: mol_type = other DNA
ttatgaaacagctaatatcatatatcttgtgttccattctttgctgttggagtttccctggtcctatgctaattaacaaccaccagcgctgtggggctaccgagcaccag

SEQ ID NO: 66008 - DNA, 110 bp, synthetic construct
  source 1..110: mol_type = other DNA
ccctgcattaatgaccctaaattcagaaccacagcgctgaccttgccggggtatgcacgtccccaccctcacagctgtggccgcagaggagactctgcattttcttgtga

SEQ ID NO: 66009 - DNA, 110 bp, synthetic construct
  source 1..110: mol_type = other DNA
cacgtccccaccctcacagctgtggccgcagaggagactctgcattttcttgtgatggagaggtctgctctcttccctggacacaggaagactgatgcggaaggaagagg

SEQ ID NO: 66010 - DNA, 110 bp, synthetic construct
  source 1..110: mol_type = other DNA
ttatctgggaaataatcactttaggttttgcctctccatcctgtccatgaagggcagcactttgggatcttcttttaccttgctggaaaactctgaagtcggttataggc

SEQ ID NO: 66011 - DNA, 110 bp, synthetic construct
  source 1..110: mol_type = other DNA
cgcatcttttaaaagcaattatttatgataagtgagttgttgaagagtacagcactccaagacattagttctgggtctcttactagcctagacctaaataacacaaggct

SEQ ID NO: 66012 - DNA, 110 bp, synthetic construct
  source 1..110: mol_type = other DNA
tccaagacattagttctgggtctcttactagcctagacctaaataacacaaggctgaacgagtccattctgaaaagcactccagagaaagcatctctggcctcccctaag

SEQ ID NO: 66013 - DNA, 110 bp, synthetic construct
  source 1..110: mol_type = other DNA
agatgctcaataagtatttgaactaaatacattcactcacttgcataaaccagactttccatttcttcccataaagaatataattcttattccagtaagctctagaaact

SEQ ID NO: 66014 - DNA, 110 bp, synthetic construct
  source 1..110: mol_type = other DNA
attgtgggagagaaagtttgttgggaagcagattgtggagaagctattgctgctctaaacactttgggttttgtcctctagacaattaaatgaatgcttgtaagttggta

SEQ ID NO: 66015 - DNA, 110 bp, synthetic construct
  source 1..110: mol_type = other DNA
agtagggatggatgaatcagtggcagaaaagaacagaagctctaaatcctaggggcctgaaatcagagtcgtgcaaagacgatgactttttaatgtctgctgccttgaga

SEQ ID NO: 66016 - DNA, 110 bp, synthetic construct
  source 1..110: mol_type = other DNA
aaccactccaaatgcaagagttttcatctgctaactccagattcccaatccatcccactccttcccttccccctgccaaatatatgtctgtcctacatgtccataatctt

SEQ ID NO: 66017 - DNA, 110 bp, synthetic construct
  source 1..110: mol_type = other DNA
aagagttttcatctgctaactccagattcccaatccatcccactccttcccttccccctgccaaatatatgtctgtcctacatgtccataatcttttctgttttgtagat

SEQ ID NO: 66018 - DNA, 110 bp, synthetic construct
  source 1..110: mol_type = other DNA
tctcactccagtctccacctctctctccatccatcttacccatttgtgattcctctaaaatgccacatccttgcttctctatcccatcacacatgctgcttctaccaagc

SEQ ID NO: 66019 - DNA, 110 bp, synthetic construct
  source 1..110: mol_type = other DNA
taaaatgccacatccttgcttctctatcccatcacacatgctgcttctaccaagcaagaatgtccttttcaccttttttattttcctaattaatacagcaatcttctaca

SEQ ID NO: 66020 - DNA, 110 bp, synthetic construct
  source 1..110: mol_type = other DNA
cacgttagtttactagtgttgcctaaacaaactaccatagactcggaagcgcaaatagatttcttgtgattctggaggcttataggtctgagaacaccatggtggcagga

SEQ ID NO: 66021 - DNA, 110 bp, synthetic construct
  source 1..110: mol_type = other DNA
tagatttcttgtgattctggaggcttataggtctgagaacaccatggtggcaggatcgatccctctgaggcctctccttggcttgcagacacctgtcttctccctggggt

SEQ ID NO: 66022 - DNA, 110 bp, synthetic construct
  source 1..110: mol_type = other DNA
agctaggtcctgtggcctccacgaccacccccaggcccaggatctgctgcgagacagggccaagcatttcgcattccctctatccttcctcaacagacctttatctccct

SEQ ID NO: 66023 - DNA, 110 bp, synthetic construct
  source 1..110: mol_type = other DNA
agggccaagcatttcgcattccctctatccttcctcaacagacctttatctccctgccgctttcagaatttctttgtcttcaagtggttgctccatcttcgtgtttattt

SEQ ID NO: 66024 - DNA, 110 bp, synthetic construct
  source 1..110: mol_type = other DNA
agccatcccgtactagattaaattccagggatggtcaggtatgatcttaataatcattggtctcatgactttctgggcttcgctgtcgtaagaacattctttggttccct

SEQ ID NO: 66025 - DNA, 110 bp, synthetic construct
  source 1..110: mol_type = other DNA
attggtctcatgactttctgggcttcgctgtcgtaagaacattctttggttcccttctcatcccaacttttcactagaaattgctgcccattgctcttctggccccagaa

SEQ ID NO: 66026 - DNA, 110 bp, synthetic construct; identical to SEQ ID NO: 66024
  source 1..110: mol_type = other DNA

SEQ ID NO: 66027 - DNA, 110 bp, synthetic construct; identical to SEQ ID NO: 66025
  source 1..110: mol_type = other DNA

SEQ ID NO: 66028 - DNA, 110 bp, synthetic construct
  source 1..110: mol_type = other DNA
tgagtgcaaggctactgtttctgctgtttgtagtttcaccttttcctgctcatggcagaccttctcttccagccccacgttgggtgccactctgccacgtccagcactgc

SEQ ID NO: 66029 - DNA, 110 bp, synthetic construct; identical to SEQ ID NO: 66028
  source 1..110: mol_type = other DNA

SEQ ID NO: 66030 - DNA, 110 bp, synthetic construct
  source 1..110: mol_type = other DNA
tcagcctcttttctgctcctgctccacacttgctataccagagccagagcagagtcttctctcccaggattatcattcccattactcctctcagctccatcccatgagct

SEQ ID NO: 66031 - DNA, 110 bp, synthetic construct
  source 1..110: mol_type = other DNA
cttctctcccaggattatcattcccattactcctctcagctccatcccatgagctgcaacagtccagacccaggcacaagggacctcacaaaaggactgtaggctaagcc

SEQ ID NO: 66032 - DNA, 110 bp, synthetic construct; identical to SEQ ID NO: 66030
  source 1..110: mol_type = other DNA

SEQ ID NO: 66033 - DNA, 110 bp, synthetic construct; identical to SEQ ID NO: 66031
  source 1..110: mol_type = other DNA

SEQ ID NO: 66034 - DNA, 110 bp, synthetic construct
  source 1..110: mol_type = other DNA
cttactaaacctacctagccatgtcatcctacttcttcgtaatccacctaaaacaaatactcccctaccaagctttcctgacaccatctcagccagaagttacctttccc

SEQ ID NO: 66035 - DNA, 110 bp, synthetic construct
  source 1..110: mol_type = other DNA
tcctcttctttgtccatggaatccattcaccatggatttttccacaacagcttttgagttttctggcttttctagtcccttcgctatgccccattatttttataccagtt

SEQ ID NO: 66036 - DNA, 110 bp, synthetic construct
  source 1..110: mol_type = other DNA
gagttttctggcttttctagtcccttcgctatgccccattatttttataccagttttgtgcctagttaattacaacagctttctaactgattgttgtacctccagtcttt

SEQ ID NO: 66037 - DNA, 110 bp, synthetic construct; identical to SEQ ID NO: 66035
  source 1..110: mol_type = other DNA

SEQ ID NO: 66038 - DNA, 110 bp, synthetic construct; identical to SEQ ID NO: 66036
  source 1..110: mol_type = other DNA

SEQ ID NO: 66039 - DNA, 110 bp, synthetic construct
  source 1..110: mol_type = other DNA
tcctctcttatgatccattgataggatattgtgtcgtaccagcaggggcggttgaagcaacagtctttaaaatcttgattatgcgtggtagctgactccttcctatggtc

SEQ ID NO: 66040 - DNA, 110 bp, synthetic construct
  source 1..110: mol_type = other DNA
agcaacagtctttaaaatcttgattatgcgtggtagctgactccttcctatggtcatctggccaggtctggattctccaagaatggctttctgtcttgcttttacaggac

SEQ ID NO: 66041 - DNA, 110 bp, synthetic construct; identical to SEQ ID NO: 66039
  source 1..110: mol_type = other DNA

SEQ ID NO: 66042 - DNA, 110 bp, synthetic construct; identical to SEQ ID NO: 66040
  source 1..110: mol_type = other DNA

SEQ ID NO: 66043 - DNA, 110 bp, synthetic construct
  source 1..110: mol_type = other DNA
ttaggggatgacctgaacagggagaaggagagcaggcgggaagggagtgaaaagccttcctttcctggcgcaggtcaggcagtcaggaagctcggggcctggatgggagc

SEQ ID NO: 66044 - DNA, 110 bp, synthetic construct
  source 1..110: mol_type = other DNA
ccatgcttcattgcaaataaatttgctcttgtgctatctgagcttccagggtcatctggacctttcctgcgagtaaatacatcctagagttggttattcttagagcaggt

SEQ ID NO: 66045 - DNA, 110 bp, synthetic construct
  source 1..110: mol_type = other DNA
gactaacagtgctgaaaacgtgaagtttggctttattaaggtatccggcaactgttaaatcactcaatagctattcctgaggtaactcagaaatgtattcagaggctttt

SEQ ID NO: 66046 - DNA, 110 bp, synthetic construct
  source 1..110: mol_type = other DNA
cggcaactgttaaatcactcaatagctattcctgaggtaactcagaaatgtattcagaggcttttgcctttatagagattagaaataataatgtacttacttgttataaa

SEQ ID NO: 66047 - DNA, 110 bp, synthetic construct
  source 1..110: mol_type = other DNA
agatgttgatggattggattgttaagagaaggaaggaagctggtatatactcattttaaatgattcaaataattcaggagagtagaaagaagataatttcaaattctttg

SEQ ID NO: 66048 - DNA, 110 bp, synthetic construct
  source 1..110: mol_type = other DNA
tttctgtccattttttgccttaggaggaaatgcatcatttgtactcaagagtccactgggtgttgtaaaaggtgacagctgtcctgagaccagccatccagaacatcata

SEQ ID NO: 66049 - DNA, 110 bp, synthetic construct
  source 1..110: mol_type = other DNA
accaatggaagcagtagtggcagtaacagcagcctggtatcctccaacagcttaagggagagccatagccacaccgttgcaaacaggagcagcacagacacggcatccat

SEQ ID NO: 66050 - DNA, 110 bp, synthetic construct
  source 1..110: mol_type = other DNA
attaccgaaatgcgaaagtcaatcatgtagtctcttaaaacacaccaggatcataaaaacagccccctgtgctcaaggtgctggtttcaaatatgggcatctggccttgc

SEQ ID NO: 66051 - DNA, 110 bp, synthetic construct
  source 1..110: mol_type = other DNA
aaaacagccccctgtgctcaaggtgctggtttcaaatatgggcatctggccttgccccatgtgatgcctatcaccctacaggacagcagggagtaggcacgtggactcat

SEQ ID NO: 66052 - DNA, 110 bp, synthetic construct
  source 1..110: mol_type = other DNA
ccccattgtggcacacaggaaaaatgacaatgtttgtttgccacctctgggagaacaaacgaagctgcttgagcacagaggtacccacctgggagtgcctattgctctga

SEQ ID NO: 66053 - DNA, 110 bp, synthetic construct
  source 1..110: mol_type = other DNA
caaacgaagctgcttgagcacagaggtacccacctgggagtgcctattgctctgagagctggtgggatcaacatctcaaaaacctgtcccactgtaggctcagagctatg

SEQ ID NO: 66054 - DNA, 110 bp, synthetic construct
  source 1..110: mol_type = other DNA
caacagtccaaagtggagttcgttacagcacccccacccagtgcctcatcttagccaatgagccatattccagttgatcccgttgcctacccatctggacgcctcggtgt

SEQ ID NO: 66055 - DNA, 110 bp, synthetic construct
  source 1..110: mol_type = other DNA
caatgagccatattccagttgatcccgttgcctacccatctggacgcctcggtgtttctaaggctgaacctccttctctagtccttctccttttcccaaggccaggcctc

SEQ ID NO: 66056 - DNA, 110 bp, synthetic construct
  source 1..110: mol_type = other DNA
ctagtccagcttgggcagctgctcagtagctttgctgtgtaacagccaccgtgatgcatttttttttctagggctccagctggtctatccgagggtggctggtcagggtt

SEQ ID NO: 66057 - DNA, 110 bp, synthetic construct
  source 1..110: mol_type = other DNA
ttggcagactttccaggcagagagcaacaacaaagacggtagagtcatttggtggagagctgggaccgccctgggagaccatgcccttgatgctgtggggtttatgaggt

SEQ ID NO: 66058 - DNA, 110 bp, synthetic construct
  source 1..110: mol_type = other DNA
atgaacttgggcgataatatgcccatgtgggttcatcagctattctggtgtggaatggtgagggtaggatgggctaggggacatctctgtaccttccactcaggtttgct

SEQ ID NO: 66059 - DNA, 110 bp, synthetic construct
  source 1..110: mol_type = other DNA
gtgaactgatttagtggctgttcagcagctgcaaattcttgctcctctgggagctgggcttaaagaagtgagaaggtacatcttccatccttgtgttcattctctagcca

SEQ ID NO: 66060 - DNA, 110 bp, synthetic construct
  source 1..110: mol_type = other DNA
gcccggccatggccttctgagttagaaccgaatgtgttcttggtttaaaagcattcaagcaaaaacgaactgacaccaaacatcttccctcagacaatgactgtgtacac

SEQ ID NO: 66061 - DNA, 110 bp, synthetic construct
  source 1..110: mol_type = other DNA
gaacagtggatgatcagcacaccctcacccctgatgatgcttgaagttccacgctataggcatccttttcacaactaaactatcctccggccccactaaccagaaattca

SEQ ID NO: 66062 - DNA, 110 bp, synthetic construct
  source 1..110: mol_type = other DNA
ataggcatccttttcacaactaaactatcctccggccccactaaccagaaattcaagcaccttggtggaacactcgacaccccacagtggtgagctgggaagcaccaggg

SEQ ID NO: 66063 - DNA, 110 bp, synthetic construct
  source 1..110: mol_type = other DNA
tggttgacctctgtgtatcaaggggggcattgggagctgggtttataccatccagttctgcccatggttaaatgatttcaaccttgtgacttgtttcattgaagagcaac

SEQ ID NO: 66064 - DNA, 110 bp, synthetic construct
  source 1..110: mol_type = other DNA
cactcttgtttgttccatatggaatctttgggatcttttcatctccattttgccctgattcacccagcaagcaaatgcaagagctggtgtgctgggagcacatggcctag

SEQ ID NO: 66065 - DNA, 110 bp, synthetic construct
  source 1..110: mol_type = other DNA
aaaaaaaaaaaaatttaaatggctgctggtaccatgtgtcatccctccagcctggactcagcacccactgttactggggtgagagtcgaaaaggttaacaaccagcttcg

SEQ ID NO: 66066 - DNA, 110 bp, synthetic construct; identical to SEQ ID NO: 66065
  source 1..110: mol_type = other DNA

SEQ ID NO: 66067 - DNA, 110 bp, synthetic construct
  source 1..110: mol_type = other DNA
cctatgccacagcttgtgacaaggctggatccttaaaccacagattgaggccagggaactcgcatccttatgcatactatgtcgggtccttaacctgctgagccagaacg

SEQ ID NO: 66068 - DNA, 110 bp, synthetic construct
  source 1..110: mol_type = other DNA
gaactcgcatccttatgcatactatgtcgggtccttaacctgctgagccagaacgggaactcctggtggacattttggaaaaaagttttttggtacctatatttccattc

SEQ ID NO: 66069 - DNA, 110 bp, synthetic construct
  source 1..110: mol_type = other DNA
ggccaactgtaaagttatatgtagagtttgtggagttttgactgagtgatcagatggcaccccaaccctcatgttcaagggttaactgtatttttgattttttaaaaaaa

SEQ ID NO: 66070 - DNA, 110 bp, synthetic construct
  source 1..110: mol_type = other DNA
ggcaccccaaccctcatgttcaagggttaactgtatttttgattttttaaaaaaattgtgatttatttttattttttgttttatagggccatgcctgcagcacatggggg

SEQ ID NO: 66071 - DNA, 110 bp, synthetic construct
  source 1..110: mol_type = other DNA
gtggaggcagccactgttggtgcttactcaggcgacacatcaaaagtatcccagatctctgatggtagccattctaccacccgatacacacggagaggccacacaggttg

SEQ ID NO: 66072 - DNA, 110 bp, synthetic construct
  source 1..110: mol_type = other DNA
tctctgatggtagccattctaccacccgatacacacggagaggccacacaggttgttccagctctttactgaggctctgaaacagggtggaggcagtggaggctgatggc

SEQ ID NO: 66073 - DNA, 110 bp, synthetic construct
  source 1..110: mol_type = other DNA
tccatgcccactaatttccttacccaaccccccatgctatggtgcataaggggcacatttggatcctctgattggtttcaggctaggatgccttatttgcatgggaagaa

SEQ ID NO: 66074 - DNA, 110 bp, synthetic construct
  source 1..110: mol_type = other DNA
catttggatcctctgattggtttcaggctaggatgccttatttgcatgggaagaaggttatggggagatgctccaaggagcattcttctggtatctgcaggtatcttcat

SEQ ID NO: 66075 - DNA, 110 bp, synthetic construct
  source 1..110: mol_type = other DNA
atcgttactcccagtttcaaaactattttaaatggattgttattttcaaacattaatcttgacactcacttgaatatagaaataattgggcgcagtggaaacaaatcttg

SEQ ID NO: 66076 - DNA, 110 bp, synthetic construct
  source 1..110: mol_type = other DNA
gatgcctcccattcttcagattgttctcatagatagttgctctgtaaatggtcttggttttgttgtgcccctgcaaggaggtgagctcagattctccctaccctgacatc

SEQ ID NO: 66077 - DNA, 110 bp, synthetic construct
  source 1..110: mol_type = other DNA
ggttttgttgtgcccctgcaaggaggtgagctcagattctccctaccctgacatcttggccacaatcccctacaaacattgttacatcagtgtttgaatttaactacact

SEQ ID NO: 66078 - DNA, 110 bp, synthetic construct; identical to SEQ ID NO: 66076
  source 1..110: mol_type = other DNA

SEQ ID NO: 66079 - DNA, 110 bp, synthetic construct; identical to SEQ ID NO: 66077
  source 1..110: mol_type = other DNA

SEQ ID NO: 66080 - DNA, 110 bp, synthetic construct
  source 1..110: mol_type = other DNA
tgctctctgttcagagattactagactcctttcttcagataactcactaatttctggtactttgctccgtaaattcaagctatcctagaactctgtctctgcactgcagt

SEQ ID NO: 66081 - DNA, 110 bp, synthetic construct
  source 1..110: mol_type = other DNA
ggtactttgctccgtaaattcaagctatcctagaactctgtctctgcactgcagtctcgatcttcttcaattgaataaaactattcctgctttgcctttttttcccctcc

SEQ ID NO: 66082 - DNA, 110 bp, synthetic construct
  source 1..110: mol_type = other DNA
tgggttctctgctccagttgattggagagtttcaatgcaggcaccagaagctctgctcagagtttgagttgatcttgccagcggcctctgctaccctgagtctgttgtgg

SEQ ID NO: 66083 - DNA, 110 bp, synthetic construct
  source 1..110: mol_type = other DNA
ctcagagtttgagttgatcttgccagcggcctctgctaccctgagtctgttgtggaatctctctgcagagcaggtaggacagatatggcttcttgacaagtgttgggggg

SEQ ID NO: 66084 - DNA, 110 bp, synthetic construct; identical to SEQ ID NO: 66082
  source 1..110: mol_type = other DNA

SEQ ID NO: 66085 - DNA, 110 bp, synthetic construct; identical to SEQ ID NO: 66083
  source 1..110: mol_type = other DNA

SEQ ID NO: 66086 - DNA, 110 bp, synthetic construct
  source 1..110: mol_type = other DNA
ttttagaagaaaacctgcagaaggaaactataaaggtttatgaccttgatcagacaaaaattatattacctatgcctccaaagccacaattcctaaaggaaaaataattg

SEQ ID NO: 66087 - DNA, 110 bp, synthetic construct
  source 1..110: mol_type = other DNA
ctgttgctttgtttttattttcattactttctgaggtgggttaaaagaaacactgctgcaatttaagtcacagagtgttttgactttattttcctctaagagcttcatag

SEQ ID NO: 66088 - DNA, 110 bp, synthetic construct
  source 1..110: mol_type = other DNA
gtgggttaaaagaaacactgctgcaatttaagtcacagagtgttttgactttattttcctctaagagcttcatagtttatatgtcatatttaggtctttaattcattttg

SEQ ID NO: 66089 - DNA, 110 bp, synthetic construct
  source 1..110: mol_type = other DNA
gtcgctttgcttgaattccatcctttccctctttttaaggtcacactgataaactcaaattgaggcctgtcttttggccttacttccataaatattactagacaggaatg

SEQ ID NO: 66090 - DNA, 110 bp, synthetic construct
  source 1..110: mol_type = other DNA
ggccccaacccaagccagccatgttgggtagccaaggccctcacaactccatgcattgcccagtgagcatggatgtgagcagtcatctcacacttctctccagggtccaa

SEQ ID NO: 66091 - DNA, 110 bp, synthetic construct
  source 1..110: mol_type = other DNA
taacatagtatcctcctgggtcacttctttatcatctctgtgggctttggaggaaaaagggaaaataatggtaacttgaagctctgctacctgttatgccatgagcaata

SEQ ID NO: 66092 - DNA, 110 bp, synthetic construct
  source 1..110: mol_type = other DNA
cttcaagcttaaaaccttagcttgtatacaaaacagtatagatgaaagcagtatgaatttcttaacagggaggtcattagtaaggagaaccatgcactctctccccacat

SEQ ID NO: 66093 - DNA, 110 bp, synthetic construct
  source 1..110: mol_type = other DNA
ctcttctgcattctacccactaccccatgcttactcagagctctcactcctcacagatgtcagccttcactacagcaaagatccatctcaattcacctcagtccccacag

SEQ ID NO: 66094 - DNA, 110 bp, synthetic construct
  source 1..110: mol_type = other DNA
gatgtcagccttcactacagcaaagatccatctcaattcacctcagtccccacagtatcctaacatcttggcaatttcctgtgaagtgagggggaagaaacttcctgtta

SEQ ID NO: 66095 - DNA, 110 bp, synthetic construct
  source 1..110: mol_type = other DNA
aatgtacatggaatatataaatagtgactagacagcaacacacacatgcacacgcacaatatttttgcaaatattggctgttcattgtgtcccagttgatttagctatta

SEQ ID NO: 66096 - DNA, 110 bp, synthetic construct
  source 1..110: mol_type = other DNA
acaatatttttgcaaatattggctgttcattgtgtcccagttgatttagctattaaagcctgaaaactccatgacactgaaaaaataaaacttatcctcctcttacattt

SEQ ID NO: 66097 - DNA, 110 bp, synthetic construct; identical to SEQ ID NO: 66095
  source 1..110: mol_type = other DNA

SEQ ID NO: 66098 - DNA, 110 bp, synthetic construct; identical to SEQ ID NO: 66096
  source 1..110: mol_type = other DNA

SEQ ID NO: 66099 - DNA, 110 bp, synthetic construct
  source 1..110: mol_type = other DNA
agtgatgttctccctcacatatctaagctagacttccattgttataactgatgctgatagtggtactgtcaagaggaagctacgagattgtctaggaggagattaaataa

SEQ ID NO: 66100 - DNA, 110 bp, synthetic construct
  source 1..110: mol_type = other DNA
ggcagcatttaagtaattaatgaacgtaaggtaagctaatcaaagttacatttataagaacgtctgatagccaaggttaaaaagggattcaaattaaggtatagtttgtt

SEQ ID NO: 66101 - DNA, 110 bp, synthetic construct; identical to SEQ ID NO: 66100
  source 1..110: mol_type = other DNA

SEQ ID NO: 66102 - DNA, 110 bp, synthetic construct
  source 1..110: mol_type = other DNA
tagaggctaatggcaagtgccaaacttcagttcacattacctaggaaacttatgtgcaatcagggtgacttttgtttaccaagcacttcctcctctctccttcctgtgaa

SEQ ID NO: 66103 - DNA, 110 bp, synthetic construct
  source 1..110: mol_type = other DNA
gcaatcagggtgacttttgtttaccaagcacttcctcctctctccttcctgtgaattatcttcctcttctttgtatcccagacccccatgcttttccttagcccaagaag

SEQ ID NO: 66104 - DNA, 110 bp, synthetic construct
  source 1..110: mol_type = other DNA
gtctttatctttctctgttaaatcctgaaatgtatgaactccacgtttttgtttactctcaactccgcagcaatattaatacgggccttttttctgctttgcaatcttcc

SEQ ID NO: 66105 - DNA, 110 bp, synthetic construct
  source 1..110: mol_type = other DNA
ctctcaactccgcagcaatattaatacgggccttttttctgctttgcaatcttcctcttcagttcagactttaccccatacaacaacagaccttcctcgactctcctcca

SEQ ID NO: 66106 - DNA, 110 bp, synthetic construct
  source 1..110: mol_type = other DNA
atcagaacattagaggaaaaagaagatatttgtggttcattcccccctaaaaaaagctgtttgcattttgcctgttctttaaactagaaaatatattctatatgcgttct

SEQ ID NO: 66107 - DNA, 110 bp, synthetic construct
  source 1..110: mol_type = other DNA
ccaagtgtcattgaagcggtgactctgtttcccagaaggaaaactctgcctagggttcttatgtctaatgttatcaaactggctttaaagaaaaaatttgtgttgtagtt

SEQ ID NO: 66108 - DNA, 110 bp, synthetic construct
  source 1..110: mol_type = other DNA
ttcttatgtctaatgttatcaaactggctttaaagaaaaaatttgtgttgtagttgtggccactttataattacccaacttaatatttctcctcaaacactttcgatctc

SEQ ID NO: 66109 - DNA, 110 bp, synthetic construct
  source 1..110: mol_type = other DNA
attttgtggtgggagcagggcatgagtatgtgtggggatggagttggcgtaaattatttggtatggctaatccacaggacaggtatttcaagttcattctttaaccacat

SEQ ID NO: 66110 - DNA, 110 bp, synthetic construct
  source 1..110: mol_type = other DNA
atttggtatggctaatccacaggacaggtatttcaagttcattctttaaccacatgagcttctttttaacactttaacacacattttcaccataaaattgaagcaatgaa

SEQ ID NO: 66111 - DNA, 110 bp, synthetic construct
  source 1..110: mol_type = other DNA
ctgaagtgattggaaatgcaggtggtgcctattcagggacccctagtaggagtgggccaagatcatctctagagtcagttctaactgtggtggtttgtccctgccacctg

SEQ ID NO: 66112 - DNA, 110 bp, synthetic construct
  source 1..110: mol_type = other DNA
gccaagatcatctctagagtcagttctaactgtggtggtttgtccctgccacctgttgcatgaagcaacctgtctcatttagttcacatcagaggtgctgtgcaggctgc

SEQ ID NO: 66113 - DNA, 110 bp, synthetic construct
  source 1..110: mol_type = other DNA
tgtgtttaggtttaatatgcatgtatgaaagtacacaaatcataaatttatagcccttaggttttcatgaaatagacaaactggtgtaaccactctaggtcaagagattg

SEQ ID NO: 66114 - DNA, 110 bp, synthetic construct
  source 1..110: mol_type = other DNA
tggtaaccaaatttctccttttatctctggtccttttggctgggagagtttcctgccctgcccatagaaaaagaagatctctgttgcattagatttgaaatctgggctca

SEQ ID NO: 66115 - DNA, 110 bp, synthetic construct
  source 1..110: mol_type = other DNA
ccctgcccatagaaaaagaagatctctgttgcattagatttgaaatctgggctcaagagcttttccaacccctccctcagaaatcatgtttttttatattctctattctt

SEQ ID NO: 66116 - DNA, 110 bp, synthetic construct; identical to SEQ ID NO: 66114
  source 1..110: mol_type = other DNA

SEQ ID NO: 66117 - DNA, 110 bp, synthetic construct; identical to SEQ ID NO: 66115
  source 1..110: mol_type = other DNA

SEQ ID NO: 66118 - DNA, 110 bp, synthetic construct
  source 1..110: mol_type = other DNA
gaatcactgaaaaacagaagtatggccaccaagttcaacatgttaaaggaattcttagaaggtatattccaaacaaagaaaacaacttggggaaaagcatgaagataggt

SEQ ID NO: 66119 - DNA, 110 bp, synthetic construct
  source 1..110: mol_type = other DNA
tagaaggtatattccaaacaaagaaaacaacttggggaaaagcatgaagataggtagggaaaaaaagtgtacagaggaaaagtacacagatatcctatttagatagtgtc

SEQ ID NO: 66120 - DNA, 110 bp, synthetic construct
  source 1..110: mol_type = other DNA
tcagggtgaacacgctcctctccacctggttctaactgcaacaagaagctgtttcccctgcaattctgctttccctgtcccttgggtgattcactttaccgaaatggatt

SEQ ID NO: 66121 - DNA, 110 bp, synthetic construct
  source 1..110: mol_type = other DNA
ccctgcaattctgctttccctgtcccttgggtgattcactttaccgaaatggatttccagatcaggcaaagatatgaattcccactcttacccgagagcatgtctccctt

SEQ ID NO: 66122 - DNA, 110 bp, synthetic construct
  source 1..110: mol_type = other DNA
aagatcatgctatactttcttacctataaatttaaactatgtgaaaacacactgtcattaataaaaatatatggggagatgacatgtcaaatgctaaatctgccacacca

SEQ ID NO: 66123 - DNA, 110 bp, synthetic construct; identical to SEQ ID NO: 66122
  source 1..110: mol_type = other DNA

SEQ ID NO: 66124 - DNA, 110 bp, synthetic construct
  source 1..110: mol_type = other DNA
tctccatcctacttcagtgggcagattcttcactgactcctttttgccttggttgaaactagatctttccaaggataccacctttccctgtggccctcccacaattctca

SEQ ID NO: 66125 - DNA, 110 bp, synthetic construct
  source 1..110: mol_type = other DNA
aaactagatctttccaaggataccacctttccctgtggccctcccacaattctcaagtggaaacttcctgtgcctcttcccactgctactcctgccagcttactggggaa

SEQ ID NO: 66126 - DNA, 110 bp, synthetic construct
  source 1..110: mol_type = other DNA
ccctagtcctctccccagaactgacttccggaacctgagtctcagtgcccagccctcttccgagtgtctcaggctgtggtatcgagggtggtagtactgatggtctgtgc

SEQ ID NO: 66127 - DNA, 110 bp, synthetic construct
  source 1..110: mol_type = other DNA
cagaactgacttccggaacctgagtctcagtgcccagccctcttccgagtgtctcaggctgtggtatcgagggtggtagtactgatggtctgtgcagctctctctctgct

SEQ ID NO: 66128 - DNA, 110 bp, synthetic construct
  source 1..110: mol_type = other DNA
aagacaagttgaaacagagccaacaaccatcccaagggtttcagcagaactaggcaggctcagaagatggatccaaacagctgggccacagacctcgatttttactgggg

SEQ ID NO: 66129 - DNA, 110 bp, synthetic construct
  source 1..110: mol_type = other DNA
atcctagaaagcattagggagacagctcctgtggagttcaaataagaggatgccggagagcgtactttctcagtgctctgagcacctgtgtgtggggagtgctggaactt

SEQ ID NO: 66130 - DNA, 110 bp, synthetic construct
  source 1..110: mol_type = other DNA
agcagaaatctacctccttcctctaaccttccttttgcaagcttccccagaaactgtgaccagctagaatttgagagaagttatatctagatggagtgaacttaatgtgg

SEQ ID NO: 66131 - DNA, 110 bp, synthetic construct
  source 1..110: mol_type = other DNA
atttcaaaggagtcaccacctaatacaatgcagctgtcccatttacagccagcaatacacctaacttccctaccccaaagtagacaccccagagtttagccctgttgcct

SEQ ID NO: 66132 - DNA, 110 bp, synthetic construct
  source 1..110: mol_type = other DNA
tgtctcctacatttgctttatcaactccaatgacttcttgaagacttaatcatcatatcatttaagaagctttctcagtccttcattgtaggattggattttggctaatt

SEQ ID NO: 66133 - DNA, 110 bp, synthetic construct
  source 1..110: mol_type = other DNA
gttcattcctattccatttctaccattaaaactgagctccagggagttcccgctttgactcattgaagatgaatctgacttgcatccatgaggacacaggtttgatcctt

SEQ ID NO: 66134 - DNA, 110 bp, synthetic construct
  source 1..110: mol_type = other DNA
tggaaacacataggcctttggatatttgttaaggattacattgccttattgtcctaataacaaaaggaatatagtctgagataaaatgacaatggcaatattgtctcctc

SEQ ID NO: 66135 - DNA, 110 bp, synthetic construct
  source 1..110: mol_type = other DNA
gttttactgattggtgcattctcacaacttcagaatatccatctcgtttttacccttacacatacaaaagaatatgcgaagacgtaaacaacagtaaacaccgctaatct

SEQ ID NO: 66136 - DNA, 110 bp, synthetic construct; identical to SEQ ID NO: 66135
  source 1..110: mol_type = other DNA

SEQ ID NO: 66137 - DNA, 110 bp, synthetic construct; identical to SEQ ID NO: 66135
  source 1..110: mol_type = other DNA

SEQ ID NO: 66138 - DNA, 110 bp, synthetic construct; identical to SEQ ID NO: 66135
  source 1..110: mol_type = other DNA

SEQ ID NO: 66139 - DNA, 110 bp, synthetic construct
  source 1..110: mol_type = other DNA
ggtcatttatttttttaaaaacaggtcatacaaacatggttcaaaattgaaaaaatagcaatagagtgtgcagtgaaaactcgacttttaacaaggtccactcctcagtt

SEQ ID NO: 66140 - DNA, 110 bp, synthetic construct
  source 1..110: mol_type = other DNA
tagcaatagagtgtgcagtgaaaactcgacttttaacaaggtccactcctcagttcctcttttcagaagcaagtaatattactggtttcttgtgtatctttccccaagta

SEQ ID NO: 66141 - DNA, 110 bp, synthetic construct
  source 1..110: mol_type = other DNA
tactacagtcccttgactccatggccaaacctgctggccttgtctaagatcaatagctgcagcaattaaactagtggaggtttctgtggacttggttgcagtgtctcctt

SEQ ID NO: 66142 - DNA, 110 bp, synthetic construct
  source 1..110: mol_type = other DNA
tcttcctgaatttttctaatccactgccaatctcatttttatatctgatttcagaaatgacatccagatctgaacaagataaactgcccagttagagctgagctcagctg

SEQ ID NO: 66143 - DNA, 110 bp, synthetic construct
  source 1..110: mol_type = other DNA
aatgacatccagatctgaacaagataaactgcccagttagagctgagctcagctgaacaatgtgtagcttggtctgttttctcatcacacgttgtggtcctatagtccca

SEQ ID NO: 66144 - DNA, 110 bp, synthetic construct
  source 1..110: mol_type = other DNA
aattttactttctccttccaacattttttaaccttccagatgaaactcaaaaaaatgacaatggtgtctcttctcaaagtcagctcataggcacaaataagctttttctg

SEQ ID NO: 66145 - DNA, 110 bp, synthetic construct
  source 1..110: mol_type = other DNA
ttctcttgaaaattccaatgtgctccaggcacgttgcattaagacatatcacatcacagaagcctttcaaaatgagaagtcctgcacacaaccatttccaccacatgtcc

SEQ ID NO: 66146 - DNA, 110 bp, synthetic construct
  source 1..110: mol_type = other DNA
gtgtccagaggagagatggggggatgatttccccttaaggagcttacacttgagtcgtgcatgtaaaacaatgtatacatagaggacccctgacttgaagtggtttgaat

SEQ ID NO: 66147 - DNA, 110 bp, synthetic construct
  source 1..110: mol_type = other DNA
tatagataatcaaacagaagctaagtgagttaaggaaacttgtacctaagtttcacagaaggttgtacagctggttttgagctcagatctgtcaagcaataaattgcagg

SEQ ID NO: 66148 - DNA, 110 bp, synthetic construct
  source 1..110: mol_type = other DNA
aatgacgcatttgatacctcattattatcaatgaataactgtatgtcctccatgagcccaatttcaagctatttttgctttttaggccataccttcggcatatagaggtt

SEQ ID NO: 66149 - DNA, 110 bp, synthetic construct
  source 1..110: mol_type = other DNA
ggcaggctgggagaagcaccaaaggagctgaggcagttgagaggaggagaagcgtttgctattgaaataagttacacggagttcccgtcgtggcacagtggttaatgaat

SEQ ID NO: 66150 - DNA, 110 bp, synthetic construct
  source 1..110: mol_type = other DNA
tttctggagttagccctcatcagaggtatctagttgcaggggcgagaatatgcctccaagcttgttttcttctacatggttgggaaaataaatttgatggcttccatagg

SEQ ID NO: 66151 - DNA, 110 bp, synthetic construct
  source 1..110: mol_type = other DNA
ccaagcttgttttcttctacatggttgggaaaataaatttgatggcttccatagggatctagctatgtggagttgcctgtaaagactccaggtagctgcttcttatgggg

SEQ ID NO: 66152 - DNA, 110 bp, synthetic construct
  source 1..110: mol_type = other DNA
tcctttgccattgctgttaagaattcaaggaaatataacttcattatgtagaattacatgatctatttaaaccattagcgaacatttaggttatttgcagtcctttgcca

SEQ ID NO: 66153 - DNA, 110 bp, synthetic construct; identical to SEQ ID NO: 66152
  source 1..110: mol_type = other DNA

SEQ ID NO: 66154 - DNA, 110 bp, synthetic construct; identical to SEQ ID NO: 66152
  source 1..110: mol_type = other DNA

SEQ ID NO: 66155 - DNA, 110 bp, synthetic construct; identical to SEQ ID NO: 66152
  source 1..110: mol_type = other DNA

SEQ ID NO: 66156 - DNA, 110 bp, synthetic construct
  source 1..110: mol_type = other DNA
tggaggtctgatctgaagagcagtggggtaatgtatgaggaaatattaataccaaacggaatctaggcagagtggccagggcggggaggagaggtcaaactgagacaacc

SEQ ID NO: 66157 - DNA, 110 bp, synthetic construct
  source 1..110: mol_type = other DNA
acggaatctaggcagagtggccagggcggggaggagaggtcaaactgagacaaccaaggatacccaagaaagaggagagcctttccttgaccacaggtgtccagatactt

SEQ ID NO: 66158 - DNA, 110 bp, synthetic construct; identical to SEQ ID NO: 66156
  source 1..110: mol_type = other DNA

SEQ ID NO: 66159 - DNA, 110 bp, synthetic construct; identical to SEQ ID NO: 66157
  source 1..110: mol_type = other DNA

SEQ ID NO: 66160 - DNA, 110 bp, synthetic construct
  source 1..110: mol_type = other DNA
tttttttcagacaatgtgggctcagccctgaccaaagcacaaccatggcagtactggcttgtgaggcctgaggtttcaatagcttttctctcccctccaccccgaaccac

SEQ ID NO: 66161 - DNA, 110 bp, synthetic construct
  source 1..110: mol_type = other DNA
ggaactccacccttagtttttctttaacatgcctgttttctcaccctgctttaaaggaatctctctcaaattcaccccagcatgctccatcctctccccactccttgctg

SEQ ID NO: 66162 - DNA, 110 bp, synthetic construct
  source 1..110: mol_type = other DNA
ggaatctctctcaaattcaccccagcatgctccatcctctccccactccttgctgagggggttcatgatgggttcctttgcatctgtggccacatctctgctcttcctat

SEQ ID NO: 66163 - DNA, 110 bp, synthetic construct
  source 1..110: mol_type = other DNA
ccagatgcattaagtgtccttttgatcccatttctttccttagattgcctggggcattcagtggggtgaattcccttacctgtagctcttcccgttacccacatgtgatg

SEQ ID NO: 66164 - DNA, 110 bp, synthetic construct
  source 1..110: mol_type = other DNA
attcagtggggtgaattcccttacctgtagctcttcccgttacccacatgtgatggtgatgccttaattggatactgatctcctggaggaattctccttgcttcacctgt

SEQ ID NO: 66165 - DNA, 110 bp, synthetic construct
  source 1..110: mol_type = other DNA
tcctgggctggaagctcatgttcaagtaaggcttggggtagtttcctaaacatccttagcctcttcttcctcttcttccatctaagccccagctacgtctcattccttct

SEQ ID NO: 66166 - DNA, 110 bp, synthetic construct
  source 1..110: mol_type = other DNA
ttagcctcttcttcctcttcttccatctaagccccagctacgtctcattccttctggacctgcacctctttccaaagtagcagctaaatactgttactgtttccaaagta

SEQ ID NO: 66167 - DNA, 110 bp, synthetic construct
  source 1..110: mol_type = other DNA
tgctgcctcctaatcaggtcattctgttcattgatgcccagtccagtgtgtgcacattcaagctcaatgcctttgagctctaaaagcaaggatgatcctagcaagccatc

SEQ ID NO: 66168 - DNA, 110 bp, synthetic construct
  source 1..110: mol_type = other DNA
ctttttggaggtacagcatgacataagcctgccgttaaatcagacttttatattatgtgcatgttttattcctggcaaatgattgtacccatagtttgtccaaatccaat

SEQ ID NO: 66169 - DNA, 110 bp, synthetic construct
  source 1..110: mol_type = other DNA
tgtgcatgttttattcctggcaaatgattgtacccatagtttgtccaaatccaatagtgtaatgatctatcttataccattttatacttatctcacttgtcagttctgcc

SEQ ID NO: 66170 - DNA, 110 bp, synthetic construct
  source 1..110: mol_type = other DNA
cctgcatcacccttcctggcaaccacctgtttgttctctgaatctatgagtctgtttccgttttgctatgttagttcattcactttgttttttaaagattccacatataa

SEQ ID NO: 66171 - DNA, 110 bp, synthetic construct
  source 1..110: mol_type = other DNA
cctgtttgttctctgaatctatgagtctgtttccgttttgctatgttagttcattcactttgttttttaaagattccacatataagcaaaatcacatggtatttgatttt

SEQ ID NO: 66172 - DNA, 110 bp, synthetic construct
  source 1..110: mol_type = other DNA
ggcaatctgctctccatattctgtgatgtgtaccaattcccatctcccaccttcatgcccttccttgaggcactacttctagcagtgccccctgtcctgccactgtgcgg

SEQ ID NO: 66173 - DNA, 110 bp, synthetic construct
  source 1..110: mol_type = other DNA
tgcccttccttgaggcactacttctagcagtgccccctgtcctgccactgtgcggtcatttgtgctacctgtccttagagagaaacatgaagtacctccatgtacttctc

SEQ ID NO: 66174 - DNA, 110 bp, synthetic construct
  source 1..110: mol_type = other DNA
tccagttaccattctgggcaaaggtccactccaagccagcatttggcaataatattgatcactgtacctgagctttctgggacatgaggctgcacaagttagcagtttgg

SEQ ID NO: 66175 - DNA, 110 bp, synthetic construct
  source 1..110: mol_type = other DNA
actccacttagaaagagcaacttcagggtacaactctttgaagatcctactgtcgacaaggaagttgagattcggaaaaaagtgctaaagatgtaagtataaatgtttgc

SEQ ID NO: 66176 - DNA, 110 bp, synthetic construct
  source 1..110: mol_type = other DNA
ttgttcttggccggttctcagttccccgaggccttctccctccctgtcctttctggcgcgcacacacacacacacacccctggtattatgctccctcctggggtctccta

SEQ ID NO: 66177 - DNA, 110 bp, synthetic construct
  source 1..110: mol_type = other DNA
gcgcgcacacacacacacacacccctggtattatgctccctcctggggtctcctaagagagtggctgctcagacaaggatcagactaaactgtgaggggatttgcctgct

SEQ ID NO: 66178 - DNA, 110 bp, synthetic construct
  source 1..110: mol_type = other DNA
taaaaattaccatagtactcatccccaaatgtacgagaggactgtatttcttgcccttttgtctcgtttctcattgcctccatcagatatatgttaaatgctcacatgtg

SEQ ID NO: 66179 - DNA, 110 bp, synthetic construct
  source 1..110: mol_type = other DNA
aaagtcagactaatctcatactacttgagtagaattccataagctgtaattttagcttggtacctttggtttagtaggcccaatgaagctttttgcttgactgagctttc

SEQ ID NO: 66180 - DNA, 110 bp, synthetic construct
  source 1..110: mol_type = other DNA
cttggtacctttggtttagtaggcccaatgaagctttttgcttgactgagctttctcatgtttcataatagaaatgggccagatctcttgggagaagtgaacctcctgag

SEQ ID NO: 66181 - DNA, 110 bp, synthetic construct
  source 1..110: mol_type = other DNA
gcaacccctacagaagcaaaaatgggattcccactacaccagaacttttattaaagctcctgcaaaaccacctagcctacacacttgcttgtaccttcaccattctccct

SEQ ID NO: 66182 - DNA, 110 bp, synthetic construct
  source 1..110: mol_type = other DNA
actgtaagagtttccttatcagtcccggatatgagtaaccttccacctgacaggcatattgagttcagaggggcctctgtgcagccatagaaacctgttcctaggtggga

SEQ ID NO: 66183 - DNA, 110 bp, synthetic construct
  source 1..110: mol_type = other DNA
gaatcctgtagtggaatatggggtgaggggaaaggatataatgtagggagggaatagcttacatcatgcatccgtgcatttcattccactaaccatctagggttaaaatt

SEQ ID NO: 66184 - DNA, 110 bp, synthetic construct
  source 1..110: mol_type = other DNA
ggcaaaaaagactccccacaccatccctagagacagcagggggctgtattgttggtggtagtacctattagctttctctttctagaagcccttttccagaagaaaatggt

SEQ ID NO: 66185 - DNA, 110 bp, synthetic construct
  source 1..110: mol_type = other DNA
aggctgaaccctcaaaggctggacacagtgaaagtttatttcttgtttacctaagtcatagtggctgggcaacactctagaagcttccctgcttcaagcagtgacagaga

SEQ ID NO: 66186 - DNA, 110 bp, synthetic construct
  source 1..110: mol_type = other DNA
gatatagacaagatttagaaaatgacctttcaattccaactggaagtgtgatggttgtcatttagcttgactgctctaggttgcatgttcctcagatctaaaatgagaag

SEQ ID NO: 66187 - DNA, 110 bp, synthetic construct
  source 1..110: mol_type = other DNA
tgtcatttagcttgactgctctaggttgcatgttcctcagatctaaaatgagaagacatatcaattatccattgccacaataatgctgtatcacaaaccaacccaaactc

SEQ ID NO: 66188 - DNA, 110 bp, synthetic construct
  source 1..110: mol_type = other DNA
cggttccctttaggtaagactatattcctgcctcactgaactgatggattttgacgtgtttttaatttcatattccacttttttatttatattttagcttctcatctagt

SEQ ID NO: 66189 - DNA, 110 bp, synthetic construct
  source 1..110: mol_type = other DNA
tcacgggaatattgttctcagccattgactccgaaatccaaacagttgtcagattgcaggaaacatcaattctgtcaaatgacactagcccaaattcctgtcaaagggtc

SEQ ID NO: 66190 - DNA, 110 bp, synthetic construct
  source 1..110: mol_type = other DNA
gtccccttaaattgtccttctggctgcagctagagtgatcttctcaaggacatatgaatagggtaccctcacatgctacctcaatgcccatttttgctcttggataaaaa

SEQ ID NO: 66191 - DNA, 110 bp, synthetic construct
  source 1..110: mol_type = other DNA
gccctaagagaccacgatctcccttttctatgatcctgttcttcggccaccattcctgagcctgagctctaccaagcccattagcccttcacctggtcatgtcttctctg

SEQ ID NO: 66192 - DNA, 110 bp, synthetic construct
  source 1..110: mol_type = other DNA
ctgagcctgagctctaccaagcccattagcccttcacctggtcatgtcttctctgttggaaaagaaatgctttgaggaagctaaacagtacttaagggaggtccaccttc

SEQ ID NO: 66193 - DNA, 110 bp, synthetic construct
  source 1..110: mol_type = other DNA
gcaatgaaactatggtgatttttattttctctttatactttaatgcatttttagatgttataaaattagcacattcggagttcctgttgaggctctgcagaaaggaaccc

SEQ ID NO: 66194 - DNA, 110 bp, synthetic construct; identical to SEQ ID NO: 66193
  source 1..110: mol_type = other DNA

SEQ ID NO: 66195 - DNA, 110 bp, synthetic construct; identical to SEQ ID NO: 66193
  source 1..110: mol_type = other DNA

SEQ ID NO: 66196 - DNA, 110 bp, synthetic construct; identical to SEQ ID NO: 66193
  source 1..110: mol_type = other DNA

SEQ ID NO: 66197 - DNA, 110 bp, synthetic construct
  source 1..110: mol_type = other DNA
ctgaagacccaggcagctcctggggagtcagcctagctcccagccctctaaagactcccccatccagagggctgctgtgatttctctatgtgatctgcctgtcaggaact

SEQ ID NO: 66198 - DNA, 110 bp, synthetic construct
  source 1..110: mol_type = other DNA
tcatccttctgtcttggaatttgattgctctaggtctctcatgtaagtagaatcataaaatgtttgtctctttcgtgaccggcttattcgcttagcataatggcctcaag

SEQ ID NO: 66199 - DNA, 110 bp, synthetic construct
  source 1..110: mol_type = other DNA
taaaatgtttgtctctttcgtgaccggcttattcgcttagcataatggcctcaaggttcatcgatattgtagtatgtgtcaggatttctttttgagactgaataatattc

SEQ ID NO: 66200 - DNA, 110 bp, synthetic construct
  source 1..110: mol_type = other DNA
tattttttgatcctttgattgcagacgtcagcccatctcccgttaacttttgcaatgattttagtcttgagctgattctgagctatggaccacatattattaagtcaatc

SEQ ID NO: 66201 - DNA, 110 bp, synthetic construct
  source 1..110: mol_type = other DNA
atggcagttggaaagaatgaactatatggggctgttgtgggtaatgctaggagaggcttgaaagtataaatgtgcattggaggaagctcaaaggcttggatccttctttt

SEQ ID NO: 66202 - DNA, 110 bp, synthetic construct
  source 1..110: mol_type = other DNA
gcttgaaagtataaatgtgcattggaggaagctcaaaggcttggatccttcttttcagtccctacagcttttgattctgaccttctgtcttaactccagcccctaggatc

SEQ ID NO: 66203 - DNA, 110 bp, synthetic construct; identical to SEQ ID NO: 66201
  source 1..110: mol_type = other DNA

SEQ ID NO: 66204 - DNA, 110 bp, synthetic construct; identical to SEQ ID NO: 66202
  source 1..110: mol_type = other DNA

SEQ ID NO: 66205 - DNA, 110 bp, synthetic construct
  source 1..110: mol_type = other DNA
tcagatgatctgtttggctctcactctacctatcagatctcagacctactgctgcacttttcttggcatctggagatccttctgactaggttgatctttctgtccattag

SEQ ID NO: 66206 - DNA, 110 bp, synthetic construct
  source 1..110: mol_type = other DNA
ctactgctgcacttttcttggcatctggagatccttctgactaggttgatctttctgtccattaggtgactttccagggtgtggtttccctttctccttcacagttccct

SEQ ID NO: 66207 - DNA, 110 bp, synthetic construct
  source 1..110: mol_type = other DNA
gctttttcggaaattgcagtcagtgttttcagacaggacgtggggaccccagagaagcttcccctgagcacttggatggacaatgatggaaagactagctagtttctctc

SEQ ID NO: 66208 - DNA, 110 bp, synthetic construct
  source 1..110: mol_type = other DNA
agcttcccctgagcacttggatggacaatgatggaaagactagctagtttctctctggatgcccccagcagcttttctcaggtcttccggtaatgatctggtctggcaga

SEQ ID NO: 66209 - DNA, 110 bp, synthetic construct; identical to SEQ ID NO: 66207
  source 1..110: mol_type = other DNA

SEQ ID NO: 66210 - DNA, 110 bp, synthetic construct; identical to SEQ ID NO: 66208
  source 1..110: mol_type = other DNA

SEQ ID NO: 66211 - DNA, 110 bp, synthetic construct
  source 1..110: mol_type = other DNA
actcttagagaaaaacatagaacactctttgacataaatcacagaaatttttttggggggtccgtcctttaaagtaatggagataaaaataaaaataaacaaatgggacc

SEQ ID NO: 66212 - DNA, 110 bp, synthetic construct; identical to SEQ ID NO: 66211
  source 1..110: mol_type = other DNA

SEQ ID NO: 66213 - DNA, 110 bp, synthetic construct
  source 1..110: mol_type = other DNA
aagtagaataagccattgtaattcttagtcacctatccatcttgaaatcttcttaaatttacatcattccatctgattatgcgcctcatgatcttcacccttccatctac

SEQ ID NO: 66214 - DNA, 110 bp, synthetic construct
  source 1..110: mol_type = other DNA
aatttacatcattccatctgattatgcgcctcatgatcttcacccttccatctactgaaaaattaatgttctcaaatagcctctgggcacatgaaacatagtctcagata

SEQ ID NO: 66215 - DNA, 110 bp, synthetic construct
  source 1..110: mol_type = other DNA
taccataattattttacccttttccatgttgatggacatatgggctggttcctattttagcttttacaaataaagctggtattttaggtgtgcatttccttcagcccttt

SEQ ID NO: 66216 - DNA, 110 bp, synthetic construct
  source 1..110: mol_type = other DNA
ccagtattcattatggtaactaaaaagctgtaggtgagccctgaagtttccctttccatgtaaatgagttatgctgagaatcttgtaaaataatttaatttagtaaattt

SEQ ID NO: 66217 - DNA, 110 bp, synthetic construct
  source 1..110: mol_type = other DNA
tggaaccctgagttttacccagtctctcatttcaacccaacccctcaagcttattcaacttgctggctgccaagtcttttattattgagaaacaaaatattgtctgccac

SEQ ID NO: 66218 - DNA, 110 bp, synthetic construct
  source 1..110: mol_type = other DNA
tattgaagactgataggccatgatacagctgaatattttaaggcaacttcatatagattcccaactacagttttcgggtcacaactctcttagtgagcacaactcacttt

SEQ ID NO: 66219 - DNA, 110 bp, synthetic construct
  source 1..110: mol_type = other DNA
tatggtctgtgtctagtactattagcgttttatttttacacttcccctccaaggttggtctgttgtaatagtttctaccctcatttttataattatcatttaggaagtat

SEQ ID NO: 66220 - DNA, 110 bp, synthetic construct
  source 1..110: mol_type = other DNA
tctctttattttccttttggcttttggtgaatcaggtgaccatgttgggggaacccatgcaccaaggatttatagctgagttcctagctaggctttctagctgactgata

SEQ ID NO: 66221 - DNA, 110 bp, synthetic construct
  source 1..110: mol_type = other DNA
atttcaggatttaggatatgggcgtcttaagctggttttacctctccttcaaaccttggctcaaagctcaccttctcagtgaggcctccaatttagtactagaaactgtc

SEQ ID NO: 66222 - DNA, 110 bp, synthetic construct
  source 1..110: mol_type = other DNA
ttggctcaaagctcaccttctcagtgaggcctccaatttagtactagaaactgtccattctccatttccacattctcaactctcttcctctgctcaaaattttcttttat

SEQ ID NO: 66223 - DNA, 110 bp, synthetic construct; identical to SEQ ID NO: 66221
  source 1..110: mol_type = other DNA

SEQ ID NO: 66224 - DNA, 110 bp, synthetic construct; identical to SEQ ID NO: 66222
  source 1..110: mol_type = other DNA

SEQ ID NO: 66225 - DNA, 110 bp, synthetic construct
  source 1..110: mol_type = other DNA
agaactcatttatgaaaggaagagtcaactaatgaagcaatattcattgctgtcttatttaaagaaatttccacagccactgaaacctccagcaactaccaccctgatca

SEQ ID NO: 66226 - DNA, 110 bp, synthetic construct
  source 1..110: mol_type = other DNA
tatttaaagaaatttccacagccactgaaacctccagcaactaccaccctgatcagtcagcagccatcaacatgggagacaagaccttccatcagcaaacagtttaagac

SEQ ID NO: 66227 - DNA, 110 bp, synthetic construct
  source 1..110: mol_type = other DNA
gaggtcttacattttattttattttatttttttctatcagggctgcttttggtttggatgcttgctctttcctcattgtgtgaaggttgttatccacttgatattgtgtg

SEQ ID NO: 66228 - DNA, 110 bp, synthetic construct
  source 1..110: mol_type = other DNA
ggatgcttgctctttcctcattgtgtgaaggttgttatccacttgatattgtgtgttctggtgtatggcctgtgcatgctttcaggaagatggaggcaatgggcagggtt

SEQ ID NO: 66229 - DNA, 110 bp, synthetic construct
  source 1..110: mol_type = other DNA
gttcactccgctgagccacaatgggaacttctattttttaaatctacttccctcccaacccaacaaccctctgagtcaggtattatcatcatagtcccaattgttagatg

SEQ ID NO: 66230 - DNA, 110 bp, synthetic construct
  source 1..110: mol_type = other DNA
tctcaccttcacggctgcagcagcggcacttaaggccatgtctgtgcgaggaagaagcagtagccttgcggggattgcaggagcggagcgggttccggagctcagcgcgg

SEQ ID NO: 66231 - DNA, 110 bp, synthetic construct
  source 1..110: mol_type = other DNA
gcgaggaagaagcagtagccttgcggggattgcaggagcggagcgggttccggagctcagcgcgggactgagcagcgagggcccgggggcggctctggctcctcctcttc

SEQ ID NO: 66232 - DNA, 110 bp, synthetic construct
  source 1..110: mol_type = other DNA
gtatatattaccacttctcagaaacaacatgcggaactttgccacttctactacagtagctgcttataattcaccaaaaatgtgagcctaattgatgaagacattctatt

SEQ ID NO: 66233 - DNA, 110 bp, synthetic construct
  source 1..110: mol_type = other DNA
tagtcggattcgttaagcactgcgccatgacgggaactcctaaatcagtctttagggtgaggatttgctaagaatttgacctcgtttccttctagtcattggctctattt

SEQ ID NO: 66234 - DNA, 110 bp, synthetic construct; identical to SEQ ID NO: 66233
  source 1..110: mol_type = other DNA

SEQ ID NO: 66235 - DNA, 110 bp, synthetic construct
  source 1..110: mol_type = other DNA
agatgacttgaagcttatgaggaccttgaccttttaagcctgagacagagaagaagagcctgaaaagggcacagagatggagcagtcagtgcagttaggagtcaaccagg

SEQ ID NO: 66236 - DNA, 110 bp, synthetic construct
  source 1..110: mol_type = other DNA
gagcctgaaaagggcacagagatggagcagtcagtgcagttaggagtcaaccagggaagaacaactttcagaaagaactaaaaacaaaggaatgggacttcctgttgtgg

SEQ ID NO: 66237 - DNA, 110 bp, synthetic construct
  source 1..110: mol_type = other DNA
aataatatgactgagttaggtacttggagggtgaaggataaaaaagatacagactagctatggaatgataaccattaaggaagagatatctataacaatttactacatct

SEQ ID NO: 66238 - DNA, 110 bp, synthetic construct
  source 1..110: mol_type = other DNA
ccagcactgataaaaggtgatttatttaaataaatgtaagatcaagcaggcagccttatttattcagttgtttctcagagtcgaggttaatttcatgtcaaatttggtgt

SEQ ID NO: 66239 - DNA, 110 bp, synthetic construct
  source 1..110: mol_type = other DNA
ttatttattcagttgtttctcagagtcgaggttaatttcatgtcaaatttggtgttttcttctttctgtttctttggctcccattccctcctgctctcttcccccatcaa

SEQ ID NO: 66240 - DNA, 110 bp, synthetic construct
  source 1..110: mol_type = other DNA
gcaaaagaatagtattctgatcttgaatatattttatatccaatttaaacctatgtaggcctgagttctgcccccagtggcgaattagaattaagatacttcctgggctg

SEQ ID NO: 66241 - DNA, 110 bp, synthetic construct
  source 1..110: mol_type = other DNA
taggcctgagttctgcccccagtggcgaattagaattaagatacttcctgggctgtggcagtggcaatgccaggagtaaaggacactagggtgtgcttttgtgcccttca

SEQ ID NO: 66242 - DNA, 110 bp, synthetic construct
  source 1..110: mol_type = other DNA
cttcaatcaagaggacagcagaattgatctttgtgtggcttcaaaggttaggtgacaaatgacaaaggacatgactcttaatgtgtggccaggtggtaagaaagataaga

SEQ ID NO: 66243 - DNA, 110 bp, synthetic construct
  source 1..110: mol_type = other DNA
cagggatgaaaacagagttgtgcaaaagcagctgaagccccaggagtacttcccagggaaacctgcaagaattaggaaggggtaggtactactacggcacacattgtcat

SEQ ID NO: 66244 - DNA, 110 bp, synthetic construct
  source 1..110: mol_type = other DNA
aaggatttgatggacatgtactgctctgcctcaaacacaaagggccaaaaaatccctactccaatgcctggaatgaatacacagcactcccctcaaacatactattttct

SEQ ID NO: 66245 - DNA, 110 bp, synthetic construct
  source 1..110: mol_type = other DNA
ctactccaatgcctggaatgaatacacagcactcccctcaaacatactattttctgattacctgtaccaggattcttggtctttgtggtgaaggaaaagggatgttttgc

SEQ ID NO: 66246 - DNA, 110 bp, synthetic construct
  source 1..110: mol_type = other DNA
cctgtggcgtgtagacattccaggccagggatcaaacctgagccacagcagtgacaatcctggatccttaacctgctgcaccgctggggaattcccaagctgtgttttat

SEQ ID NO: 66247 - DNA, 110 bp, synthetic construct
  source 1..110: mol_type = other DNA
aatcctggatccttaacctgctgcaccgctggggaattcccaagctgtgttttatagtgaaatgatttcttcctttggtgtttcataccacacgggtttacttttctcca

SEQ ID NO: 66248 - DNA, 110 bp, synthetic construct; identical to SEQ ID NO: 66247
  source 1..110: mol_type = other DNA

SEQ ID NO: 66249 - DNA, 110 bp, synthetic construct; identical to SEQ ID NO: 66247
  source 1..110: mol_type = other DNA

SEQ ID NO: 66250 - DNA, 110 bp, synthetic construct
  source 1..110: mol_type = other DNA
ataccccagactccctgaaatattaagagaacaaaatgagagaaggtgagtaccatgactcctataggccctgtagaaccctcttctctttaatctaccccccactgcct

SEQ ID NO: 66251 - DNA, 110 bp, synthetic construct
  source 1..110: mol_type = other DNA
tgactcctataggccctgtagaaccctcttctctttaatctaccccccactgccttttatcaccacttttatggagctgtaggtctaagccaatgatcattcattatgaa

SEQ ID NO: 66252 - DNA, 110 bp, synthetic construct
  source 1..110: mol_type = other DNA
gcttctctcaagccagaaattgtgctggactattttgcaattcacatgctcacagctgacaacatgcaagctaagcctaaaagatgttttctaaaggaaaatggcaccag

SEQ ID NO: 66253 - DNA, 110 bp, synthetic construct
  source 1..110: mol_type = other DNA
aaaatgtgacataactttagaaaataaataggccttctgcagtctataacagaccacaggctcagcatctgacagagggtgcagggatggggataagccatactcaagat

SEQ ID NO: 66254 - DNA, 110 bp, synthetic construct
  source 1..110: mol_type = other DNA
tcttttaaatacaagtgtgcactgagaaatctacattggaaagtatatacaaaaaaaaatccaattattttcatgaatgccattcaagtgcctaaggggctaaatgaatg

SEQ ID NO: 66255 - DNA, 110 bp, synthetic construct; identical to SEQ ID NO: 66254
  source 1..110: mol_type = other DNA

SEQ ID NO: 66256 - DNA, 110 bp, synthetic construct; identical to SEQ ID NO: 66254
  source 1..110: mol_type = other DNA

SEQ ID NO: 66257 - DNA, 110 bp, synthetic construct; identical to SEQ ID NO: 66254
  source 1..110: mol_type = other DNA

SEQ ID NO: 66258 - DNA, 110 bp, synthetic construct
  source 1..110: mol_type = other DNA
tgagaatagtatcaagctgttttcccccctcccttcacccccagaatattaggttaacttgtttgcttgtaaaactttggggaaaaaaaccaacctcacgtgattttaaa

SEQ ID NO: 66259 - DNA, 110 bp, synthetic construct
  source 1..110: mol_type = other DNA
aacttgtttgcttgtaaaactttggggaaaaaaaccaacctcacgtgattttaaaaaagtaaataggaagaaaatattaatagctggcatacattcccaatacatgactt

SEQ ID NO: 66260 - DNA, 110 bp, synthetic construct; identical to SEQ ID NO: 66258
  source 1..110: mol_type = other DNA

SEQ ID NO: 66261 - DNA, 110 bp, synthetic construct; identical to SEQ ID NO: 66259
  source 1..110: mol_type = other DNA

SEQ ID NO: 66262 - DNA, 110 bp, synthetic construct
  source 1..110: mol_type = other DNA
catgaggatatgggttcaaaatctggcctcactcagtaggttaagggtccagccttgtcctgagctacagtgtagtctgcagatgtgacttggatcctttgttgctgtgg

SEQ ID NO: 66263 - DNA, 110 bp, synthetic construct; identical to SEQ ID NO: 66262
  source 1..110: mol_type = other DNA

SEQ ID NO: 66264 - DNA, 110 bp, synthetic construct
  source 1..110: mol_type = other DNA
cccgcgattatggtgatgtgcccttttgagataggcagccggctccctctcccactgtgctcatcaccgatgcttgagtttctctttggggacaacctgaaatcgcaagg

SEQ ID NO: 66265 - DNA, 110 bp, synthetic construct
  source 1..110: mol_type = other DNA
gcacgtgagcttgtttcccccctcctcaaaagctttgggtggcgccccattgtttaggtaataaaatccaagttctttggcattaaatgtccaaaccctataccagctac

SEQ ID NO: 66266 - DNA, 110 bp, synthetic construct
  source 1..110: mol_type = other DNA
aggtaataaaatccaagttctttggcattaaatgtccaaaccctataccagctactgtattccacacctattcccccatctagaaccccacactccaatcaaaattatcc

SEQ ID NO: 66267 - DNA, 110 bp, synthetic construct
  source 1..110: mol_type = other DNA
cacacagccactcaggatccaagccacatccaagaactacgccacagctcacagcaaggcaggatcattaacccactgagtgcggccaggtatcaaacaagtgtcctcat

SEQ ID NO: 66268 - DNA, 110 bp, synthetic construct
  source 1..110: mol_type = other DNA
acatccaagaactacgccacagctcacagcaaggcaggatcattaacccactgagtgcggccaggtatcaaacaagtgtcctcatggctattagttgggtttgttactac

SEQ ID NO: 66269 - DNA, 110 bp, synthetic construct
  source 1..110: mol_type = other DNA
cacgggatgaaaaacaccagagtaattgcagctcatttaaagttagctggtgatggataagcaatgagatcctgctgtatagcacaaggaactaagtctagtcacttatg

SEQ ID NO: 66270 - DNA, 110 bp, synthetic construct
  source 1..110: mol_type = other DNA
ttggagtaagtcaagatagtcaagctgacagaatgcttagcttggtgcctgtgcggggtgagatcttcataaacggcagcatagcctcccggcactcccaccttgggaga

SEQ ID NO: 66271 - DNA, 110 bp, synthetic construct
  source 1..110: mol_type = other DNA
attgtatcatagctttaaggtgggcaacccagaaatgttgtttcattctggagtttgtaagagtagatgtaaagcttatctttcggtaccctgcccccactcccctttaa

SEQ ID NO: 66272 - DNA, 110 bp, synthetic construct
  source 1..110: mol_type = other DNA
tgtaagagtagatgtaaagcttatctttcggtaccctgcccccactcccctttaaagttgtggcttgagggttaagggtctggggttgtcactgctatggctctggttac

SEQ ID NO: 66273 - DNA, 110 bp, synthetic construct; identical to SEQ ID NO: 66271
  source 1..110: mol_type = other DNA

SEQ ID NO: 66274 - DNA, 110 bp, synthetic construct; identical to SEQ ID NO: 66272
  source 1..110: mol_type = other DNA

SEQ ID NO: 66275 - DNA, 110 bp, synthetic construct
  source 1..110: mol_type = other DNA
caaggtgttgcaggcctgggggttggcctctttaggtgggggaaagtgagattcaaggaagatagacaaaattcaaggccttcggaaggtgagttaggagttcatctagc

SEQ ID NO: 66276 - DNA, 110 bp, synthetic construct
  source 1..110: mol_type = other DNA
aggaagatagacaaaattcaaggccttcggaaggtgagttaggagttcatctagctgtgaaaaaagggatatttctgagatagaatctgtgcgggcaaaggcatagagcc

SEQ ID NO: 66277 - DNA, 110 bp, synthetic construct; identical to SEQ ID NO: 66275
  source 1..110: mol_type = other DNA

SEQ ID NO: 66278 - DNA, 110 bp, synthetic construct; identical to SEQ ID NO: 66276
  source 1..110: mol_type = other DNA

SEQ ID NO: 66279 - DNA, 110 bp, synthetic construct
  source 1..110: mol_type = other DNA
ggtacatctggaaggatcaaggacacaacaaaaatgatagttcgtggtttaaagggactctcagttaagtggattgtgcttgggcttgtcagattccaaggtccagggtt

SEQ ID NO: 66280 - DNA, 110 bp, synthetic construct
  source 1..110: mol_type = other DNA
aacatcaagatggcagaataaaaaagctctagctacttgaaaatccttgtaccctccatgtaatatccttgtaacattttacttaagattcagacttcaaggaaagagaa

SEQ ID NO: 66281 - DNA, 110 bp, synthetic construct
  source 1..110: mol_type = other DNA
gtaacttcaaacatgcacaatgacacacacaaaagcatatataaactcagacagtttttagaagtgatttctgcaggaaattcatgaaacagacaattgcaatcttttac

SEQ ID NO: 66282 - DNA, 110 bp, synthetic construct
  source 1..110: mol_type = other DNA
agagtcagggcgagttggagatggttgtaaattatttgtatacattcttccttttcaccctttcccctgcacatacataaacctcttcccatagttacaatagtttcact

SEQ ID NO: 66283 - DNA, 110 bp, synthetic construct
  source 1..110: mol_type = other DNA
agtggcttcccttggcccctccttttccctgacagtcaggtttgtagctgagtgtcctgtaagacactttcttatgaaaatctaaaatgattacaggggatcttgattta

SEQ ID NO: 66284 - DNA, 110 bp, synthetic construct
  source 1..110: mol_type = other DNA
gaacccacttcatcttcttcttttttggccaccccactgccaagttgagttaattgatattacagagaggaggaaattgcaagtactatagaccaaaaagagagggaaat

SEQ ID NO: 66285 - DNA, 110 bp, synthetic construct
  source 1..110: mol_type = other DNA
ctctctctctctcttgccatgtgagattgtagcaagaatgcagccatctgcaaggcagaaagagagctctcactggaagtggaacttaactgtgctgccatcctgatctc

SEQ ID NO: 66286 - DNA, 110 bp, synthetic construct
  source 1..110: mol_type = other DNA
atgatagccattctgacaggtgtgaggtgatagttcattgtggttctcatttgcgtatctgtgataattagattagcaatgttgagcatcttctcctgtgattgttggga

SEQ ID NO: 66287 - DNA, 110 bp, synthetic construct
  source 1..110: mol_type = other DNA
cattgtggttctcatttgcgtatctgtgataattagattagcaatgttgagcatcttctcctgtgattgttgggaatctgtatgtcttctttgggaaaacatctcttcat

SEQ ID NO: 66288 - DNA, 110 bp, synthetic construct
  source 1..110: mol_type = other DNA
ggaactccagatataactgcttcttatcaaagggttatgttctaacttgaatgattttctgccgccttgtctatcagcttattggatacctcattccataattaacacat

SEQ ID NO: 66289 - DNA, 110 bp, synthetic construct
  source 1..110: mol_type = other DNA
ttgctaagtcattttaaccataattccccatcctccatatctgatcactctgggttattaatcaggttcttcattttccactgtcccctaggtgatgtctaatcaccttg

SEQ ID NO: 66290 - DNA, 110 bp, synthetic construct
  source 1..110: mol_type = other DNA
tattaatcaggttcttcattttccactgtcccctaggtgatgtctaatcaccttggcctgcctgcagccagattttggttagtctggtttagccagcatcacctcttttc

SEQ ID NO: 66291 - DNA, 110 bp, synthetic construct
  source 1..110: mol_type = other DNA
ataaaagggaataaaagctttttgctaaatttctttcatcctgcccactctcttcctcagctccagcccctttttttaagctttgctcaagagctctaagttcctcttcc

SEQ ID NO: 66292 - DNA, 110 bp, synthetic construct
  source 1..110: mol_type = other DNA
ctcagctccagcccctttttttaagctttgctcaagagctctaagttcctcttccttgtttcctgagtctgtgttacaccaccttagtggcattagccactctccagtgg

SEQ ID NO: 66293 - DNA, 110 bp, synthetic construct
  source 1..110: mol_type = other DNA
gttgtctggttagcttagcatttaaggtctcttctcttagctttctgattttgcctcttatgttgtccccatatgacttcttcgccacagctacatgggcaagttcacta

SEQ ID NO: 66294 - DNA, 110 bp, synthetic construct
  source 1..110: mol_type = other DNA
tcttatgttgtccccatatgacttcttcgccacagctacatgggcaagttcactatttctattacctgtccgacaaatgcaccaaccctcacgactccacaactttaaca

SEQ ID NO: 66295 - DNA, 110 bp, synthetic construct; identical to SEQ ID NO: 66293
  source 1..110: mol_type = other DNA

SEQ ID NO: 66296 - DNA, 110 bp, synthetic construct; identical to SEQ ID NO: 66294
  source 1..110: mol_type = other DNA

SEQ ID NO: 66297 - DNA, 110 bp, synthetic construct
  source 1..110: mol_type = other DNA
ttgtatgaactcctatttttctgtcaccattcaaattgtagtgtttgtatatccgtaattctcttagattgtgagttagctgatggaagaaaccatatcttattcatttt

SEQ ID NO: 66298 - DNA, 110 bp, synthetic construct
  source 1..110: mol_type = other DNA
caataattagaaggacaactcttgccaggctgctataccaaggcaaagtataggcagcagagtaaaacacaaccccaaatggcctatttacttagcctgaggagtaaatt

SEQ ID NO: 66299 - DNA, 110 bp, synthetic construct
  source 1..110: mol_type = other DNA
agcagagtaaaacacaaccccaaatggcctatttacttagcctgaggagtaaattaggttgcccatacatcacggcgacaacatcctagtgcaccttcttgaccttgtta

SEQ ID NO: 66300 - DNA, 110 bp, synthetic construct
  source 1..110: mol_type = other DNA
cgtgtaagccttacattcatatatgattttagatcataaaatttcacacatttgtattgagtgcttcctgtggccatgatgaaaatttcctcacagcagagacctcagca

SEQ ID NO: 66301 - DNA, 110 bp, synthetic construct
  source 1..110: mol_type = other DNA
attgagtgcttcctgtggccatgatgaaaatttcctcacagcagagacctcagcagaatgtgatgttactgtccatgacctcagaggtttagagccacctatggtcacct

SEQ ID NO: 66302 - DNA, 110 bp, synthetic construct; identical to SEQ ID NO: 66300
  source 1..110: mol_type = other DNA

SEQ ID NO: 66303 - DNA, 110 bp, synthetic construct; identical to SEQ ID NO: 66301
  source 1..110: mol_type = other DNA

SEQ ID NO: 66304 - DNA, 110 bp, synthetic construct
  source 1..110: mol_type = other DNA
ccccacctccactgcccttgatctctaccccatgccctctcccatgcttaaacacatgcatacagcccttgtgcattaattacggatggctgtgatgtctgcctctccag

SEQ ID NO: 66305 - DNA, 110 bp, synthetic construct
  source 1..110: mol_type = other DNA
atgcatacagcccttgtgcattaattacggatggctgtgatgtctgcctctccagcttgtctcaacctctactcaacatattttaaattcctccagtacaaaggctgtgt

SEQ ID NO: 66306 - DNA, 110 bp, synthetic construct
  source 1..110: mol_type = other DNA
caagttaatagggggaaaatagaaacaggaagggataagaacaaagagaaaccacaggccctccagttacagagcagcagtttagtcctcctctagtacaacagctttgg

SEQ ID NO: 66307 - DNA, 110 bp, synthetic construct
  source 1..110: mol_type = other DNA
tttaaccattaaatcattaatgtttctgtccctggattcaggctctttcttctgtcttgaagctgggcaagtgcaggtctggcaggcctgtgtggtgcagcccaacatgg

SEQ ID NO: 66308 - DNA, 110 bp, synthetic construct
  source 1..110: mol_type = other DNA
ctaaaccttagatcaattcctctcctggcagccttaagatagccttgctatccccaaagctacaggatgctcttctcactttcctgttttactttgctggctttaaaact

SEQ ID NO: 66309 - DNA, 110 bp, synthetic construct
  source 1..110: mol_type = other DNA
tggagtggtggggaaccactgattcagtttttgcctataactactcctgtcttatttctctaaggtatgttagtttaaaaggacaacagagacaatcatactagatgcta

SEQ ID NO: 66310 - DNA, 110 bp, synthetic construct
  source 1..110: mol_type = other DNA
gacctcaaagaagcaaaatacttcactccccactccttaattgtaggctgcatatagtgacttcctattaaagaattcactatgtaggagttccctgatggctcagtggg

SEQ ID NO: 66311 - DNA, 110 bp, synthetic construct
  source 1..110: mol_type = other DNA
ctccccactccttaattgtaggctgcatatagtgacttcctattaaagaattcactatgtaggagttccctgatggctcagtgggttaagtatctagcattgtcactgct

SEQ ID NO: 66312 - DNA, 110 bp, synthetic construct
  source 1..110: mol_type = other DNA
cagcctctcaatctgggggtagaagctctaaggacagaagcaccctcacccttataccagacatatagcctagctctccacctgctcctccctctcactgtctactggag

SEQ ID NO: 66313 - DNA, 110 bp, synthetic construct
  source 1..110: mol_type = other DNA
tcaaactctcacctctagtgtttatatttggccttatacattaatgagagttacttccttaaaagtatatgaaggtaactggaaggcaaataatagagctcagacttcaa

SEQ ID NO: 66314 - DNA, 110 bp, synthetic construct
  source 1..110: mol_type = other DNA
ggtgcctactttaaccataaaaaattaatccagggaactcagcatttttcatgtgttcttggagggcaagagaaagatggggagtagggaagaaaagtctaacgtggata

SEQ ID NO: 66315 - DNA, 110 bp, synthetic construct
  source 1..110: mol_type = other DNA
aaaggggaggtttcagaggaaaagccagtggtgaattttctggactaactagatacttgggtgatttaaaagaagagtgagttgaagatgaaatcaaagttttcattcct

SEQ ID NO: 66316 - DNA, 110 bp, synthetic construct
  source 1..110: mol_type = other DNA
agcaggagatgaagcagtctgggaaagagaaaggaggctggcatacaacacagagtatgggccagctctgcttcctaagtacagactgtgattttataagcctctggctt

SEQ ID NO: 66317 - DNA, 110 bp, synthetic construct
  source 1..110: mol_type = other DNA
ttgatgtctaattctctttcttcttggttctctcctttgccccatgcttctctctgatgctcactggacccccctcctccactgatttccctctttatttctttaagtga

SEQ ID NO: 66318 - DNA, 110 bp, synthetic construct
  source 1..110: mol_type = other DNA
gatgctcactggacccccctcctccactgatttccctctttatttctttaagtgaaagttggctccaatctcaggctgctgctatgtccccctccaacgaaggtgttgtg

SEQ ID NO: 66319 - DNA, 110 bp, synthetic construct
  source 1..110: mol_type = other DNA
aagattggcacacatctctaaaataaagcaactgtagcatgggatttaaaagctggtaattccaaaggaacaattaattaaaaagggaggttaattcacagtttacagag

SEQ ID NO: 66320 - DNA, 110 bp, synthetic construct
  source 1..110: mol_type = other DNA
gaagattattaggcatcctataggaggagttttccatactgctggagctaccactgggctttgtagacatccagaaagtgatggggccatgcaagaagattcacacagtt

SEQ ID NO: 66321 - DNA, 110 bp, synthetic construct
  source 1..110: mol_type = other DNA
gctacccccttcccacaaatggccagcattaagctggtcttgctgcttgtgctttctgctgagaagtccgaggagggctgcaggatccagggccatggccatgagttgta

SEQ ID NO: 66322 - DNA, 110 bp, synthetic construct
  source 1..110: mol_type = other DNA
atcatcttattctcttgttctcaccaacaccttccttactcccttctgactcagaggccctcctgcttctccttgtccatcatacccttgtggattcccaggtggttttg

SEQ ID NO: 66323 - DNA, 110 bp, synthetic construct
  source 1..110: mol_type = other DNA
ggccctcctgcttctccttgtccatcatacccttgtggattcccaggtggttttgcccagcatggatcccaagccctgtcattttttgatgccaccctttctaggacact

SEQ ID NO: 66324 - DNA, 110 bp, synthetic construct
  source 1..110: mol_type = other DNA
gctttgcaggtggcaagcagtacttgttgcttgtctcccatgaccaggaggctactgacttctccttggggacatgatggaaattattgggaccaggtctttcaaaattg

SEQ ID NO: 66325 - DNA, 110 bp, synthetic construct
  source 1..110: mol_type = other DNA
aacccgcctctgccctccctcctcacagactcacaatgagctggaaggggtggcggctgccctgagcatgtcacatgcttatatgctccagacctcctgcatgctgtaac

SEQ ID NO: 66326 - DNA, 110 bp, synthetic construct
  source 1..110: mol_type = other DNA
tttcaccttggtcttcattcttcagcattcgtgctttcactcctcttcaggaacccactgcacgtttctcagtcttatcccagtcatcatcattgtcatgtagctaaaaa

SEQ ID NO: 66327 - DNA, 110 bp, synthetic construct
  source 1..110: mol_type = other DNA
cactgcacgtttctcagtcttatcccagtcatcatcattgtcatgtagctaaaaaccttcaccatctactcttgcagatctagttccttgtgccctatgtgagcctaaag

SEQ ID NO: 66328 - DNA, 110 bp, synthetic construct; identical to SEQ ID NO: 66326
  source 1..110: mol_type = other DNA

SEQ ID NO: 66329 - DNA, 110 bp, synthetic construct; identical to SEQ ID NO: 66327
  source 1..110: mol_type = other DNA

SEQ ID NO: 66330 - DNA, 110 bp, synthetic construct
  source 1..110: mol_type = other DNA
ctaatattggaatttagcaagaagtcagctctggtttcatgaggctacactaagaatttgggagcattgtgctactaaagttcgtgatgaatgactctaggaagaaaggg

SEQ ID NO: 66331 - DNA, 110 bp, synthetic construct
  source 1..110: mol_type = other DNA
atttgggagcattgtgctactaaagttcgtgatgaatgactctaggaagaaagggctgcaatttctaatgtcatcttttccagtgtcagcttcatgccattggtaatggg

SEQ ID NO: 66332 - DNA, 110 bp, synthetic construct; identical to SEQ ID NO: 66330
  source 1..110: mol_type = other DNA

SEQ ID NO: 66333 - DNA, 110 bp, synthetic construct; identical to SEQ ID NO: 66331
  source 1..110: mol_type = other DNA

SEQ ID NO: 66334 - DNA, 110 bp, synthetic construct
  source 1..110: mol_type = other DNA
aattataggtgaaacaaaatgaggatgtgagaaaaatggagctatgattccttgtcatgttgtgatagcacctctaaaaacccatattctcttgtttctgccagcaaatg

SEQ ID NO: 66335 - DNA, 110 bp, synthetic construct
  source 1..110: mol_type = other DNA
catcctcattgtactggtgaaaaccaaaagcccctaggcctgggcccagggaatataagaaagggttgtggggtaagggtgggagaagggtcacccagaaagaaactaaa

SEQ ID NO: 66336 - DNA, 110 bp, synthetic construct
  source 1..110: mol_type = other DNA
taagaaagggttgtggggtaagggtgggagaagggtcacccagaaagaaactaaagcaaatccaatatatagaataaagtggtaaacaacatttagtgtaaaaaaataaa

SEQ ID NO: 66337 - DNA, 110 bp, synthetic construct
  source 1..110: mol_type = other DNA
ggaaagatgaacatatccaagactcttcaaagtggcacccatgaccttgggcttaaggcctcagggacattttcctgtgctttgacccttgaaggagagatagctgcagg

SEQ ID NO: 66338 - DNA, 110 bp, synthetic construct
  source 1..110: mol_type = other DNA
actactgggtttatctggtttggtctgagggaggctatagcatcttgctagagatgatgtctgcagctgggattgctgaaaatggaaaaagtcatgcatggatgggtgag

SEQ ID NO: 66339 - DNA, 110 bp, synthetic construct
  source 1..110: mol_type = other DNA
gatgtctgcagctgggattgctgaaaatggaaaaagtcatgcatggatgggtgagcccacgacagaggtttgttttcagctgctgttgttatacagtttacgcagcacat

SEQ ID NO: 66340 - DNA, 110 bp, synthetic construct
  source 1..110: mol_type = other DNA
gaattcttccaatatgctcagaataagacaggaaagatgttactgtaattgctcacatatccaagatcaaacaactcataagcggccagaaccacagctcatgtgccctc

SEQ ID NO: 66341 - DNA, 110 bp, synthetic construct
  source 1..110: mol_type = other DNA
catatccaagatcaaacaactcataagcggccagaaccacagctcatgtgccctcatatttgtagggattcacacagcagactgactagtttagcactgagtttgtagga

SEQ ID NO: 66342 - DNA, 110 bp, synthetic construct
  source 1..110: mol_type = other DNA
tacaacatgtggactcttttgaaaagaagaaaggacttaccttgaatccactatgaactagttatatatttaagtaccttaagctctgtgggatacccctgttttgtttt

SEQ ID NO: 66343 - DNA, 110 bp, synthetic construct
  source 1..110: mol_type = other DNA
aagtatttttaaagggatacagggtccaatggatacatccatggtccagagctattaaggatgcagggaagttaaaacctaatgttgatttagaatatcctcatctagcc

SEQ ID NO: 66344 - DNA, 110 bp, synthetic construct
  source 1..110: mol_type = other DNA
acctacaactcaaacccagaatgaaaagagtgggtgggaaaaacaaagataatgtcagtgaccagctgtgccagccagagtccttttcttctcacctgagtacattcaaa

SEQ ID NO: 66345 - DNA, 110 bp, synthetic construct
  source 1..110: mol_type = other DNA
gttgcccgctaaccagctcaggtgtgctacagaagcagagggctactgaatgtcatagctatttcctttaagaaaacttgtaaatagtagaaaccagtgccttcctcata

SEQ ID NO: 66346 - DNA, 110 bp, synthetic construct
  source 1..110: mol_type = other DNA
tagctatttcctttaagaaaacttgtaaatagtagaaaccagtgccttcctcatattacttagacagtgaatgagtagtgtatccatttgttatgttatggaaaagaaaa

SEQ ID NO: 66347 - DNA, 110 bp, synthetic construct
  source 1..110: mol_type = other DNA
gctgaggccggtcctcagctgtcagctggttatttgtggggctctaagggacacgaatacagggcagggtcagttagcgggggaagcgcaggaagggtcagcctggacag

SEQ ID NO: 66348 - DNA, 110 bp, synthetic construct
  source 1..110: mol_type = other DNA
ctaaaaatacactcctcaatgaaaagatggcaacagtctcctttctgaaagctgttaagtttgatgttagatcaaccatcaactaaatatttatcaagcacctatgatga

SEQ ID NO: 66349 - DNA, 110 bp, synthetic construct
  source 1..110: mol_type = other DNA
taaattcatgtttgaatttgcattttgtcaatgaatttctttgaaacaagagagaatatgctggggacttgaagcttcaactcaggcagagtcccaccccctgcctcctc

SEQ ID NO: 66350 - DNA, 110 bp, synthetic construct
  source 1..110: mol_type = other DNA
atatgctggggacttgaagcttcaactcaggcagagtcccaccccctgcctcctcttacttccccaggaggtatccatagacagctggcccttctttgcctgacacctag

SEQ ID NO: 66351 - DNA, 110 bp, synthetic construct
  source 1..110: mol_type = other DNA
gagagacttgagaggtaggtgagaaaagatttggctccagtggcccgaggtatagcatggtagctggtaggcgtctggaggcgctgccccgctgtacgtggagtgtgtag

SEQ ID NO: 66352 - DNA, 110 bp, synthetic construct
  source 1..110: mol_type = other DNA
catggtagctggtaggcgtctggaggcgctgccccgctgtacgtggagtgtgtagtctcctgctaaccacaaccccctatacatgtcagggtcattaatttatgttactt

SEQ ID NO: 66353 - DNA, 110 bp, synthetic construct; identical to SEQ ID NO: 66351
  source 1..110: mol_type = other DNA

SEQ ID NO: 66354 - DNA, 110 bp, synthetic construct; identical to SEQ ID NO: 66352
  source 1..110: mol_type = other DNA

SEQ ID NO: 66355 - DNA, 110 bp, synthetic construct
  source 1..110: mol_type = other DNA
agttttcagacagaacccataacgtggctttagtggcaagagatgtgctcaggatttacctgacatatatattgtttcttttctggcccctcctcatttttttgttagct

SEQ ID NO: 66356 - DNA, 110 bp, synthetic construct
  source 1..110: mol_type = other DNA
ttacctgacatatatattgtttcttttctggcccctcctcatttttttgttagctatataggctataaattcctactgtccatctacactcaccattttcacacctgcca

SEQ ID NO: 66357 - DNA, 110 bp, synthetic construct
  source 1..110: mol_type = other DNA
tcccaagttaattctttctctctgctctgccagcctcagtgagtggggccctcaacctcatcctctgcctgtggcctcaagacgggaactctacctccatcctcatctca

SEQ ID NO: 66358 - DNA, 110 bp, synthetic construct
  source 1..110: mol_type = other DNA
cctcatcctctgcctgtggcctcaagacgggaactctacctccatcctcatctcaatctgccaatcaaaaagcagaacaggaagggacaagaagaaagaggaggcagcac

SEQ ID NO: 66359 - DNA, 110 bp, synthetic construct
  source 1..110: mol_type = other DNA
tgcacgcactgtgccatatgcctggaaatcctctctttacttaacggttcaccctctccttgcaagttctgaaagagtaagagctccttcggaacttgcaaaacccaaat

SEQ ID NO: 66360 - DNA, 110 bp, synthetic construct
  source 1..110: mol_type = other DNA
aagcaaggaaagcaatataatgagtgaaatgcacaatgaatcccataatggaagcaatgacggaacaagctttgcctattaacaggttcaaaatagtatctggtaaatgt

SEQ ID NO: 66361 - DNA, 110 bp, synthetic construct
  source 1..110: mol_type = other DNA
aatgacggaacaagctttgcctattaacaggttcaaaatagtatctggtaaatgtcagtcattctttctaaattcattcattcatccagcttatagtaagaatctcattg

SEQ ID NO: 66362 - DNA, 110 bp, synthetic construct
  source 1..110: mol_type = other DNA
ttgcatgtgctctcctgcaagcaggcagccattactgaactgtcccttacaaaaggtaacagtcattttctccacacgagccgctatattgtgacattccatctccacca

SEQ ID NO: 66363 - DNA, 110 bp, synthetic construct
  source 1..110: mol_type = other DNA
gtaacagtcattttctccacacgagccgctatattgtgacattccatctccaccataagatatgattggccaagtatttgtatttgatccaaactagactaacccaatga

SEQ ID NO: 66364 - DNA, 110 bp, synthetic construct
  source 1..110: mol_type = other DNA
aggaaagagcctcccactgctgactcccagattgtctcagcagctagaacctcggtgaatgaggagagcctgatgtcaatgcttgtttggcctttccagggccccctgaa

SEQ ID NO: 66365 - DNA, 110 bp, synthetic construct
  source 1..110: mol_type = other DNA
taggagttcatctgctcctattgcatattcctgtcctaaataagcacacttcagtgcagttttgcttgctgccttcaacattttgacaggaccccctcctctctttcact

SEQ ID NO: 66366 - DNA, 110 bp, synthetic construct
  source 1..110: mol_type = other DNA
ttttcttgcccttttgaaagtcttcattctgtgtgaatgattccacttgtagatgtatttttaaagtttttgtgggcagagtggagctccatgtcctattcttccttcag

SEQ ID NO: 66367 - DNA, 110 bp, synthetic construct
  source 1..110: mol_type = other DNA
tatttttaaagtttttgtgggcagagtggagctccatgtcctattcttccttcaggctgttgggtggggaaaggtctttgtgtaaaatggacatctcttggagaactccc

SEQ ID NO: 66368 - DNA, 110 bp, synthetic construct; identical to SEQ ID NO: 66366
  source 1..110: mol_type = other DNA

SEQ ID NO: 66369 - DNA, 110 bp, synthetic construct; identical to SEQ ID NO: 66367
  source 1..110: mol_type = other DNA

SEQ ID NO: 66370 - DNA, 110 bp, synthetic construct
  source 1..110: mol_type = other DNA
agccaatacccagtgggtaactgaggcctgcaagaaacaatctatgaggaaccatgtgaatgagcttggaaacagattgtttcctgtcaagcataaagatgattgcagat

SEQ ID NO: 66371 - DNA, 110 bp, synthetic construct
  source 1..110: mol_type = other DNA
caggaaatgagagagcatcactaattcctttcttcatttgctaagtgtatgtataatcttcatgaggaagcagcaaaagcagacgaggttggaaatggatgggagaatat

SEQ ID NO: 66372 - DNA, 110 bp, synthetic construct
  source 1..110: mol_type = other DNA
atcttcatgaggaagcagcaaaagcagacgaggttggaaatggatgggagaatattttagctcacattgacatcagagttccagactaagggggacacatgctgtctgct

SEQ ID NO: 66373 - DNA, 110 bp, synthetic construct; identical to SEQ ID NO: 66371
  source 1..110: mol_type = other DNA

SEQ ID NO: 66374 - DNA, 110 bp, synthetic construct; identical to SEQ ID NO: 66372
  source 1..110: mol_type = other DNA

SEQ ID NO: 66375 - DNA, 110 bp, synthetic construct
  source 1..110: mol_type = other DNA
ttggcaagggagaaggggagttttaaaaaaaggaaaaaaatcaggaaatgggcaccttgccagattttcatagactgaaaaatcggagcccctgagagaaacaaatgttt

SEQ ID NO: 66376 - DNA, 110 bp, synthetic construct
  source 1..110: mol_type = other DNA
tccggcatggcactcaccagttcttcagtctgcttttgactgggtggtaacattattcatctgccttcccacaaagattataagcaacaacagctctgttttatgagttc

SEQ ID NO: 66377 - DNA, 110 bp, synthetic construct
  source 1..110: mol_type = other DNA
ttcatctgccttcccacaaagattataagcaacaacagctctgttttatgagttctggtatctaataggattgtctgctgccactttaaataactcatagtgttggaaag

SEQ ID NO: 66378 - DNA, 110 bp, synthetic construct; identical to SEQ ID NO: 66376
  source 1..110: mol_type = other DNA

SEQ ID NO: 66379 - DNA, 110 bp, synthetic construct; identical to SEQ ID NO: 66377
  source 1..110: mol_type = other DNA

SEQ ID NO: 66380 - DNA, 110 bp, synthetic construct
  source 1..110: mol_type = other DNA
aggatgtggacagggctttgagatcatgtgtaggtgcatttgcttgatttcttctagctagggattaaagcagaaactactttttgaaaaagaaggcaaagttttgttgg

SEQ ID NO: 66381 - DNA, 110 bp, synthetic construct
  source 1..110: mol_type = other DNA
catatgaaactgtggagcaccatgttcttactgaaaggtgatgctgctgagctaccaggagctgcacatgcagtttgatattcctcgccacctccccacaccgcaagatt

SEQ ID NO: 66382 - DNA, 110 bp, synthetic construct
  source 1..110: mol_type = other DNA
caggagctgcacatgcagtttgatattcctcgccacctccccacaccgcaagattagagaacggtttgcagtcacccggagcttcttgcctaggactccatatccagcag

SEQ ID NO: 66383 - DNA, 110 bp, synthetic construct
  source 1..110: mol_type = other DNA
ctaagtatatttttcattttatttccttgcctgcaacctagctgctatacttcggtgcatttgatggatgctagctttaaaaaaaaatttttgttatagttgatttacaa

SEQ ID NO: 66384 - DNA, 110 bp, synthetic construct
  source 1..110: mol_type = other DNA
taatttctttgtgtgtttcccagccagatcagaagttataggccatctgttacggaatgctatctaggcacttatgttgatgggattgggggaatcttagctgggtgttc

SEQ ID NO: 66385 - DNA, 110 bp, synthetic construct
  source 1..110: mol_type = other DNA
gtggcgagggttcagcccctggcctgggaacttccacatgctgtgggtgcagttaaaaaaaataaatacataaaactacatattatgaaaaactcattcctttcttttgt

SEQ ID NO: 66386 - DNA, 110 bp, synthetic construct
  source 1..110: mol_type = other DNA
ggtgcagttaaaaaaaataaatacataaaactacatattatgaaaaactcattcctttcttttgtgtagagctctgacagataaatcactaagaaaaaggccagcaatcc

SEQ ID NO: 66387 - DNA, 110 bp, synthetic construct; identical to SEQ ID NO: 66385
  source 1..110: mol_type = other DNA

SEQ ID NO: 66388 - DNA, 110 bp, synthetic construct; identical to SEQ ID NO: 66386
  source 1..110: mol_type = other DNA

SEQ ID NO: 66389 - DNA, 110 bp, synthetic construct
  source 1..110: mol_type = other DNA
cagatatcaaagtttcctcagaatatgattatcaaataaaaataggggacagcatttgagtttcagatacacagctgatacgctttaagtctaagtatgcccatgtattt

SEQ ID NO: 66390 - DNA, 110 bp, synthetic construct
  source 1..110: mol_type = other DNA
cattttacctccataaacttcagtttccatgtctgtgagatgtgggcaacttacagtggccacactgaagaattgcttaggataaaaggataaatcttcaaataagtctg

SEQ ID NO: 66391 - DNA, 110 bp, synthetic construct
  source 1..110: mol_type = other DNA
cgagtctcactccaggtgggcccatcacaaatacagttccccagaaggctccccttttacaaacaacatcactggttccccagcgaatcccaatactgtgcttagctctg

SEQ ID NO: 66392 - DNA, 110 bp, synthetic construct
  source 1..110: mol_type = other DNA
tttacaaacaacatcactggttccccagcgaatcccaatactgtgcttagctctgcagcatttgctgctctgtgtcagtactaaggactctactggtcccattggctcta

SEQ ID NO: 66393 - DNA, 110 bp, synthetic construct
  source 1..110: mol_type = other DNA
ccccctgcgggcccagaaggaggagtgcacacctcgctctaccattggggttttcctacctgctgggtttgctgcttgtcattgaatgatagcttagtgacttgtcttct

SEQ ID NO: 66394 - DNA, 110 bp, synthetic construct
  source 1..110: mol_type = other DNA
ctacctgctgggtttgctgcttgtcattgaatgatagcttagtgacttgtcttctgcacagttatgtactcccagcacatgtctttttgatctgtacactttttatgggg

SEQ ID NO: 66395 - DNA, 110 bp, synthetic construct
  source 1..110: mol_type = other DNA
tggtacagcaaagctgtagaacgtgagcagaaaagggtcaaaagtttaccaaaatctctatgttcaagctcacacaggctttttgaggagcccatatttgaaaaccagct

SEQ ID NO: 66396 - DNA, 110 bp, synthetic construct
  source 1..110: mol_type = other DNA
ctaatgtcagtgttacggttcactggtgtgtttctgtttttttaaatatatgtacttgattttaatgccaagtcagaaagatatccctactgcctaaggcatatttgctc

SEQ ID NO: 66397 - DNA, 110 bp, synthetic construct
  source 1..110: mol_type = other DNA
tggaaacatgcctgttgttctttaaaatatgcttaatgctagattagagagcaaattttttttctgtttatgcaagctcatttctaaagcatttaaaataaagagcttgg

SEQ ID NO: 66398 - DNA, 110 bp, synthetic construct
  source 1..110: mol_type = other DNA
ttgtcatacatcagttgactgtaggtgcatggtctctgttgcttttaatattttctctttgtctttaatttttttttcagtttgattaatatgtgtcttggcattttcct

SEQ ID NO: 66399 - DNA, 110 bp, synthetic construct; identical to SEQ ID NO: 66398
  source 1..110: mol_type = other DNA

SEQ ID NO: 66400 - DNA, 110 bp, synthetic construct
  source 1..110: mol_type = other DNA
ttcctttcctctttaacagctccctcttgggagtgctagtcccatcccattctccctctctctctctcttttttcttttattctacccagttatatagagggtttcttgc

SEQ ID NO: 66401 - DNA, 110 bp, synthetic construct; identical to SEQ ID NO: 66400
  source 1..110: mol_type = other DNA

SEQ ID NO: 66402 - DNA, 110 bp, synthetic construct
  source 1..110: mol_type = other DNA
gccctgtggttaccaacattatcttaaattatgattcaacttggctaaccacacgcttgctaagtagcttggtatccaacaaatcttttacagtgcataagatctaatta

SEQ ID NO: 66403 - DNA, 110 bp, synthetic construct
  source 1..110: mol_type = other DNA
gcttttggagacaaagcctccagcattaaagaagcatcagatatgcaaaagaagaattctaacccctcattaaggggcaaatgtcagagtgggctaagggaatacccagg

SEQ ID NO: 66404 - DNA, 110 bp, synthetic construct
  source 1..110: mol_type = other DNA
ctcaaagggtctatggagagttgaccacttaccaacctatggcattacttgttatcaaaattcaaggctacggaaaagccactttccctgagtggcattcatctagaata

SEQ ID NO: 66405 - DNA, 110 bp, synthetic construct
  source 1..110: mol_type = other DNA
caaaattcaaggctacggaaaagccactttccctgagtggcattcatctagaataggaccaacgtccgggagtgaagccattgttaccttgagatttattcatgcccaaa

SEQ ID NO: 66406 - DNA, 110 bp, synthetic construct
  source 1..110: mol_type = other DNA
atctagacagtggaaaggaaatgttgaccatgggacagtggttccctgattttaaagcatgctacagctgatgacccccacacatgcatgacggctgccactgttcttct

SEQ ID NO: 66407 - DNA, 110 bp, synthetic construct
  source 1..110: mol_type = other DNA
caaaggggtcttccatgtccttgcctccctgctacagtcgctgcagacatcccagctccatccagacagccctaggtctctgcacagcatgcaaaaccccgttttgtaaa

SEQ ID NO: 66408 - DNA, 110 bp, synthetic construct
  source 1..110: mol_type = other DNA
ctccatccagacagccctaggtctctgcacagcatgcaaaaccccgttttgtaaaaataacttctttgatttctcccagcagtggatcctgcttagttaggggcgctgac

SEQ ID NO: 66409 - DNA, 110 bp, synthetic construct
  source 1..110: mol_type = other DNA
cactagctcatagttagaaaacaaggtaatgggaataaaaacagtaatgcctcaacaaactaatgctgaactggataaacttcttctagacattaaaaacttacatgata

SEQ ID NO: 66410 - DNA, 110 bp, synthetic construct
  source 1..110: mol_type = other DNA
caaactaatgctgaactggataaacttcttctagacattaaaaacttacatgataggaatgtgtgcatccaccaactatgcctctacctaatttcctaaaagagaattct

SEQ ID NO: 66411 - DNA, 110 bp, synthetic construct
  source 1..110: mol_type = other DNA
ccaccaccactaggggtctgtgaataggcaccacctatggccctagtcatctccggagtcgcagcagtggagaacatgcaatcgagtaccatccactgcccttactcccc

SEQ ID NO: 66412 - DNA, 110 bp, synthetic construct
  source 1..110: mol_type = other DNA
ggtggagtgaggggagggagtccgggtcagtcttgcttcctagcgatggcgccgcgttgccgcgcccagtacccggcttggttgttggtattcactgctatcaggagcca

SEQ ID NO: 66413 - DNA, 110 bp, synthetic construct
  source 1..110: mol_type = other DNA
gttgccgcgcccagtacccggcttggttgttggtattcactgctatcaggagccagctccgatggtgaaaattggagcgggtccaaaggagtggtgggaagctgcctgcg

SEQ ID NO: 66414 - DNA, 110 bp, synthetic construct
  source 1..110: mol_type = other DNA
atcagtaagttggcacagtcctgggcgttcaatcctgggggcctaggctagtctaggagccacgagcctcaatgatcggtgaagtaagaagaaaaattcaagggtggtaa

SEQ ID NO: 66415 - DNA, 110 bp, synthetic construct
  source 1..110: mol_type = other DNA
ttcttcccaagtcagacaatctcctgctgctggtacctgggtgggcagtggccatcatctctccatgccagaaagggacattgtcacatgagatggaaatcaacatgtat

SEQ ID NO: 66416 - DNA, 110 bp, synthetic construct
  source 1..110: mol_type = other DNA
catctctccatgccagaaagggacattgtcacatgagatggaaatcaacatgtataaaatccccaccttatatggaagttgttgccctttgcagctcggccttgtacata

SEQ ID NO: 66417 - DNA, 110 bp, synthetic construct
  source 1..110: mol_type = other DNA
tggccatgccatcctgaacgcatccaatctcgtctaaagtatcctttggtaagtgaacagataaataaactatcctatgcccgcacaatggactattattctgcacttca

SEQ ID NO: 66418 - DNA, 110 bp, synthetic construct
  source 1..110: mol_type = other DNA
aacagataaataaactatcctatgcccgcacaatggactattattctgcacttcaagctatgaaaatagatgaagggaacttaaatgcatactactaaatgaaaagagga

SEQ ID NO: 66419 - DNA, 110 bp, synthetic construct
  source 1..110: mol_type = other DNA
atcattgctaaacatatgtgtcttgaaagcaggggtcatattcatcatgttcccccctcacatcctggtcgctagaacagtgtccggctcagggaaaggaataaaagtca

SEQ ID NO: 66420 - DNA, 110 bp, synthetic construct
  source 1..110: mol_type = other DNA
ttatgctcctaccatttcaaaaccgtgaagtgaagatgctttgatgcattaactaaggggtacttttttggctttttttctccgctaggctttggtagatttctatgggg

SEQ ID NO: 66421 - DNA, 110 bp, synthetic construct
  source 1..110: mol_type = other DNA
aggggtacttttttggctttttttctccgctaggctttggtagatttctatggggatgttattattcttcatcttctcccttaacctcagacatagtctctctcttgacc

SEQ ID NO: 66422 - DNA, 110 bp, synthetic construct; identical to SEQ ID NO: 66420
  source 1..110: mol_type = other DNA

SEQ ID NO: 66423 - DNA, 110 bp, synthetic construct; identical to SEQ ID NO: 66421
  source 1..110: mol_type = other DNA

SEQ ID NO: 66424 - DNA, 110 bp, synthetic construct
  source 1..110: mol_type = other DNA
ccttcccatctttagtctaccaccttccctgtagctgcccagctttcagccaagtgtccatatttattctgttggtccttggtgtcctaacatcagctagcattgttgtg

SEQ ID NO: 66425 - DNA, 110 bp, synthetic construct
  source 1..110: mol_type = other DNA
gtccatatttattctgttggtccttggtgtcctaacatcagctagcattgttgtggccctaaggtaagtgggcagagtctttaataccctgctaaaagtgacagccatga

SEQ ID NO: 66426 - DNA, 110 bp, synthetic construct
  source 1..110: mol_type = other DNA
cacggcctgcagcccccttaggctccctgtgagtcccctggagcttgctgtcaactcccccttctgagcttgacactgagccactgaggaactgcacccatgttgatgtc

SEQ ID NO: 66427 - DNA, 110 bp, synthetic construct
  source 1..110: mol_type = other DNA
gtctcattacatcggctatgaaggaacagctaaggaaatggagagtcaaccttccagcagggagtccagactccttatcaacacagaaactgtaacaccaaataaatctg

SEQ ID NO: 66428 - DNA, 110 bp, synthetic construct
  source 1..110: mol_type = other DNA
ccaaccctggatggagggtccctgatccaggtcccatggcctgggtgtgtgcaagagctatgattaggtgcataggtgcccaaatggcagatgattgctttaaggactta

SEQ ID NO: 66429 - DNA, 110 bp, synthetic construct
  source 1..110: mol_type = other DNA
cagcatgacctcctcaactcgggggccaggagggcagtgtgggctcttagaagaagggagtaggagagtacgctgggcacaccgagctttttggttaccacccctacttc

SEQ ID NO: 66430 - DNA, 110 bp, synthetic construct
  source 1..110: mol_type = other DNA
gggagtaggagagtacgctgggcacaccgagctttttggttaccacccctacttcccagactagctgctgcatgtattcattcagtgagatgagcaccaacactttgtgc

SEQ ID NO: 66431 - DNA, 110 bp, synthetic construct
  source 1..110: mol_type = other DNA
atccgcatctctccaataatcagtgaaaatgagcacccccttcatttgcccatcggccattgtatatcctccaaggagaaatgtccatccaggtctcctgcccatccttc

SEQ ID NO: 66432 - DNA, 110 bp, synthetic construct
  source 1..110: mol_type = other DNA
attttaagatacacttgaataacataccccctggccaacatatgtatttgtattttatctgattatagaacagcaacaatagtcagtaataatttgtgtgctcaccgtgt

SEQ ID NO: 66433 - DNA, 110 bp, synthetic construct; identical to SEQ ID NO: 66432
  source 1..110: mol_type = other DNA

SEQ ID NO: 66434 - DNA, 110 bp, synthetic construct
  source 1..110: mol_type = other DNA
ttacctcctttctcttatcttggccaacatgtgttcctcgctctccccccacacgtccctctgttgtcttctcccagaacaccctgaaccttcgctttccaagcctcagc

SEQ ID NO: 66435 - DNA, 110 bp, synthetic construct
  source 1..110: mol_type = other DNA
tgaactgcggctcaccagccttgttccatctggtaccagctctattgctttgagcaagaaatgtaccctgtctgccataacgtggcaatgctaacaacactgacactcca

SEQ ID NO: 66436 - DNA, 110 bp, synthetic construct
  source 1..110: mol_type = other DNA
aatcagctcatcagggctaatgcagcttatatcagggagccaagcagacactttgtggttatgagtaagggcctcttggacaggatgcctttggtctgtagacttaagac

SEQ ID NO: 66437 - DNA, 110 bp, synthetic construct
  source 1..110: mol_type = other DNA
tgagacaaaaagagcaagagattagaatgatgtggccatgagccaaggaataccagcagcctctagaagctgaaagagacaaagggaacagattcttccctggagtctca

SEQ ID NO: 66438 - DNA, 110 bp, synthetic construct
  source 1..110: mol_type = other DNA
gttctttaaagtgccttaagatctgggatttggattttagcaatgtgtgtagaacagtattaaaatactcggctaagggctctgtggctccctctgagaagaaatacaac

SEQ ID NO: 66439 - DNA, 110 bp, synthetic construct
  source 1..110: mol_type = other DNA
atagtgcagtgaaacgggcagaagctttagaggcagaaagaccagagcctgaaccctggcttagcacccaggaggcctgggcaggcagaacctctcagaacctctgattc

SEQ ID NO: 66440 - DNA, 110 bp, synthetic construct
  source 1..110: mol_type = other DNA
tccgagagcgccttctctgatcacgtcaggccacgtcctccatcccgcagatacactcaagcacagaactcaaccctagctgaggtccactgacaggccaggggagggga

SEQ ID NO: 66441 - DNA, 110 bp, synthetic construct
  source 1..110: mol_type = other DNA
gcgctgcccagaccctccctttcggggcgcagacacctgtttccccagctaccaggagtgctggctgctaacctcacaaccgaaccctcttcaggacagcccttcgccac

SEQ ID NO: 66442 - DNA, 110 bp, synthetic construct
  source 1..110: mol_type = other DNA
ttgcctgccctggctgaattcacacacgatcatctgctgggacgccccaggccgttcccagggcagcttgattttgcccagggtgtaacatgccaagtgctgagaggctg

SEQ ID NO: 66443 - DNA, 110 bp, synthetic construct
  source 1..110: mol_type = other DNA
tacacacccaccccctgatactccccttctccatgtaggctccagagaacctcaccatggaaggagaggccactctgtctagtgcaagcatttcacatggtctctggagg

SEQ ID NO: 66444 - DNA, 110 bp, synthetic construct
  source 1..110: mol_type = other DNA
catggaaggagaggccactctgtctagtgcaagcatttcacatggtctctggaggggatgaatagagcatcaaaaaatcttgcctttcactcttcctggtttggcacaca

SEQ ID NO: 66445 - DNA, 110 bp, synthetic construct
  source 1..110: mol_type = other DNA
ccctcttccacttctaaggacaattattattgtattgggccaactagaacaacccaagatagcctctcttttttaaggacagctgattagtagacgtcccattgtggctc

SEQ ID NO: 66446 - DNA, 110 bp, synthetic construct
  source 1..110: mol_type = other DNA
gattcaagagagggatatcaagacagccagacttaaggttcacacatctttcctctcagtttaaaggatttatggatagttgatcataatatgtgttacaataaatttaa

SEQ ID NO: 66447 - DNA, 110 bp, synthetic construct
  source 1..110: mol_type = other DNA
aaccaggcagcatcattctgattctactacagcttatattggcctgtccatggcctcaatgaatataaatctctccaaatcattcttgccttgtttataccacctcccaa

SEQ ID NO: 66448 - DNA, 110 bp, synthetic construct
  source 1..110: mol_type = other DNA
ccagttactctggtccttgcatttttccaggtaagagagtaacgcctgaccttcagctgtaacagagctctgaatgggataaacttaaatgtgggttgtgatggggagca

SEQ ID NO: 66449 - DNA, 110 bp, synthetic construct
  source 1..110: mol_type = other DNA
ctctttctctatggaattgaccatatgctcatggggtatagtccaaacccatgtcctaaacagacactctgctgcccttcccctcccattgccctcgcccctccttcatg

SEQ ID NO: 66450 - DNA, 110 bp, synthetic construct
  source 1..110: mol_type = other DNA
ctaaacagacactctgctgcccttcccctcccattgccctcgcccctccttcatgcagtagctccttcctttgttttccttctgtcagtacccatcctaccactttacca

SEQ ID NO: 66451 - DNA, 110 bp, synthetic construct
  source 1..110: mol_type = other DNA
cctttcttggaaatgctcatgagtaaacaagccacccaggaagaatattggaagcatctaaaaatcccttggactgaaacctctgaaggtatatagacattaatattgag

SEQ ID NO: 66452 - DNA, 110 bp, synthetic construct
  source 1..110: mol_type = other DNA
gaccagatttcagtccctgctctgccctattagcagtgagctcttagaggagctgctactgtcgaagcctcagtgtctttatctgtaaagtggtgataagaatcgtctgc

SEQ ID NO: 66453 - DNA, 110 bp, synthetic construct
  source 1..110: mol_type = other DNA
tgcactcaatgccctaactgatctggctctgcctgttcttctaagctccccaccccatctgcgaggtctcaaagctctgctgctcaacccttgtatttggtgttccttct

SEQ ID NO: 66454 - DNA, 110 bp, synthetic construct
  source 1..110: mol_type = other DNA
catctgcgaggtctcaaagctctgctgctcaacccttgtatttggtgttccttctttttcatgaaaagtgacaacactcttcccccatgtggatggttctttctcaacat

SEQ ID NO: 66455 - DNA, 110 bp, synthetic construct
  source 1..110: mol_type = other DNA
atctgtactgaaataatcatgactatctcagaacaagttcattgaccagagttcaattaaatacacacatgaccactacaagtgttaaagaagtaagagttttaatatgg

SEQ ID NO: 66456 - DNA, 110 bp, synthetic construct
  source 1..110: mol_type = other DNA
ccagagttcaattaaatacacacatgaccactacaagtgttaaagaagtaagagttttaatatggaatttaaaatgtgaataaatgagtaactggggatattaaggatgc

SEQ ID NO: 66457 - DNA, 110 bp, synthetic construct
  source 1..110: mol_type = other DNA
tgagcctggggatagcaatctatgtaggattcttaagtttcttttatctcaatacgatcttcagatccccccagttttataattttgttttttcccactccttcacaaga

SEQ ID NO: 66458 - DNA, 110 bp, synthetic construct
  source 1..110: mol_type = other DNA
gatcttcagatccccccagttttataattttgttttttcccactccttcacaagaataattctccaatgatttgtggacatattatgtcattgttcagtgtcagtcaatc

SEQ ID NO: 66459 - DNA, 110 bp, synthetic construct
  source 1..110: mol_type = other DNA
accaatctgagagcaagtcagttgatagtcactattttcatagtgcctaaaacggattggcaacaggatggacagaacctaatacatcacatataacagttttaatactt

SEQ ID NO: 66460 - DNA, 110 bp, synthetic construct
  source 1..110: mol_type = other DNA
caatgaatatatgagtacaaaaacctgctacattttaaagataaggatgaggtgagcatctaattccagaaacaccaaaaagtgaggctcatgtcctcattttttgcaat

SEQ ID NO: 66461 - DNA, 110 bp, synthetic construct
  source 1..110: mol_type = other DNA
gcatctaattccagaaacaccaaaaagtgaggctcatgtcctcattttttgcaatagacacaggatgagcaaagaatttatattcaagaatctgaagaaagagaaaccat

SEQ ID NO: 66462 - DNA, 110 bp, synthetic construct
  source 1..110: mol_type = other DNA
taaagcaataaagataaggacactaaaagactaaatttaaaaactggacagacgagtgtaaacagagctgagattagaattctcacaaatacctttttatatattagtcc

SEQ ID NO: 66463 - DNA, 110 bp, synthetic construct
  source 1..110: mol_type = other DNA
aaacttccaaaagacaacatcaggccaaaatgtgatgtttccctattattcaatctatcatttttagacctttcattcctatggtccgtaatgacgaagcaggtattgag

SEQ ID NO: 66464 - DNA, 110 bp, synthetic construct
  source 1..110: mol_type = other DNA
agtgtagtgttgacaaagcctcagaaccacagcttccaagagttttaaatccaatgctttttccaccaattcacagagtctcagaaacagctaaaggaggtaaacagctg

SEQ ID NO: 66465 - DNA, 110 bp, synthetic construct
  source 1..110: mol_type = other DNA
tttccaaagaagtctcatctagtctcctagagcatattaatctggatgctggcgtcctgggacataagcaggaaaagaacattgaagtgggagttggtcttggtatttaa

SEQ ID NO: 66466 - DNA, 110 bp, synthetic construct
  source 1..110: mol_type = other DNA
agataagtactactcatgatacttggctctgaggagttaaacagtgataatctatcttcattcatcactttaatgaaaagataacagaaccttagcctcttaatgaccaa

SEQ ID NO: 66467 - DNA, 110 bp, synthetic construct
  source 1..110: mol_type = other DNA
tccacataaaacagcacaacaatctgatgcctttatatgtgtgtgtagcttttgaatcaatcctgaaatggtaataatgcatcactgatattcacagtgatgaacctgag

SEQ ID NO: 66468 - DNA, 110 bp, synthetic construct
  source 1..110: mol_type = other DNA
tgtctgcctatacagaaactatcacagtaaactcacattttacttggaagtagtttagatgtccagaattaagggaatgttgagccatggtatggtgcatccattcaaca

SEQ ID NO: 66469 - DNA, 110 bp, synthetic construct; identical to SEQ ID NO: 66468
  source 1..110: mol_type = other DNA

SEQ ID NO: 66470 - DNA, 110 bp, synthetic construct; identical to SEQ ID NO: 66468
  source 1..110: mol_type = other DNA

SEQ ID NO: 66471 - DNA, 110 bp, synthetic construct; identical to SEQ ID NO: 66468
  source 1..110: mol_type = other DNA

SEQ ID NO: 66472 - DNA, 110 bp, synthetic construct
  source 1..110: mol_type = other DNA
cctggagaaatgcaggctttagggccagcctccaactccacccctgccttggggagcagagcaggtaaaggccaagggccaatcttgccgatcctgccggcccactttgc

SEQ ID NO: 66473 - DNA, 110 bp, synthetic construct
  source 1..110: mol_type = other DNA
agacatccaaaatcaaggtgttggcaggggcttgctctgtcttaaggctctaaagaaagaatccttccttgctttttcctggctttcagcagctgcctgtaatccttatc

SEQ ID NO: 66474 - DNA, 110 bp, synthetic construct
  source 1..110: mol_type = other DNA
aaagaatccttccttgctttttcctggctttcagcagctgcctgtaatccttatcattccttgtagctgtatcacttcagtctctgcctctgtcctcacctggccttctt

SEQ ID NO: 66475 - DNA, 110 bp, synthetic construct
  source 1..110: mol_type = other DNA
agaggcacaaagtcaagaccttggcctgttccaggaacctcaagttcagagtggtgggaacaaagaggagtcagtctaagggagggggtggatcctgacaggatgacagt

SEQ ID NO: 66476 - DNA, 110 bp, synthetic construct
  source 1..110: mol_type = other DNA
agggcttccatccaagactggtttgggcccagggatttctcacttccctttctttctgagcaaacgcatcagatccatttggtttcttttagctggatgcccgcatacgc

SEQ ID NO: 66477 - DNA, 110 bp, synthetic construct
  source 1..110: mol_type = other DNA
ctgagcaaacgcatcagatccatttggtttcttttagctggatgcccgcatacgcacacagagaagagagaaaccatgacctaccagcaccttccatagcagctagggca

SEQ ID NO: 66478 - DNA, 110 bp, synthetic construct
  source 1..110: mol_type = other DNA
cccaagttctgactctggcacttacaagcttggtgatttttggcaagttactatgctttcccaagcctctgtgttctcatctgtggaatgggagacatattgatatcaac

SEQ ID NO: 66479 - DNA, 110 bp, synthetic construct
  source 1..110: mol_type = other DNA
tgtactagaggaggaaatgctaattgggttaacagatcactgaaatatagaccctaaactggaaaaaatgtgcgtcacagttaaacttactaaggttgatcactgtactg

SEQ ID NO: 66480 - DNA, 110 bp, synthetic construct
  source 1..110: mol_type = other DNA
taagctgctgtaataaggagaccccaaaatacaataaactacagtttatttctcattcatgtaacacttcaggtataggagagttgtttgagacaggtgagcagctctgc

SEQ ID NO: 66481 - DNA, 110 bp, synthetic construct
  source 1..110: mol_type = other DNA
ttcatgtaacacttcaggtataggagagttgtttgagacaggtgagcagctctgctccacaagatcatctagggactcacgctggcagggtacctctgccatccccaaca

SEQ ID NO: 66482 - DNA, 110 bp, synthetic construct
  source 1..110: mol_type = other DNA
tcaggattttctgtgttctcagtttcagcttcccacttcacaccaacccagacgcaaccccatagtcatattcacccaagagagtccactttcacataaaagcactagtg

SEQ ID NO: 66483 - DNA, 110 bp, synthetic construct
  source 1..110: mol_type = other DNA
aagttccaacagtcacttatgtctcaataccagttcttaccaaaccattatggcgcctggctgctgaaacaaacccaggatattatgcaaaatatgtgtatctttaaggg

SEQ ID NO: 66484 - DNA, 110 bp, synthetic construct
  source 1..110: mol_type = other DNA
aacctttcttgctttgggctgcagaacacaaagagctcatctgtgttttcatcgttgtcttcggctttgtctctgctggcccttccctgcccaccttcctctcatctcct

SEQ ID NO: 66485 - DNA, 110 bp, synthetic construct
  source 1..110: mol_type = other DNA
actcagcacatgttagggtagaggataaactaaaaggaaggagactggcctagtagttaggagactcagaaactaaaggagtagcagtgaggagggaaacaagaaaatgc

SEQ ID NO: 66486 - DNA, 110 bp, synthetic construct
  source 1..110: mol_type = other DNA
atagccaaggcccgggccagcttcccagagaaggcccgctcctggacatgagatggtctgggctgaagaatctgaacgagacggtgcgaactatccccaggaacagaaat

SEQ ID NO: 66487 - DNA, 110 bp, synthetic construct
  source 1..110: mol_type = other DNA
tcaccagcgtgtcctcatttttccttccccaacacctgaaaagcactaatttatcttctatttccatctctatgagtttcgcctattccaggcatttcatgtgaatggaa

SEQ ID NO: 66488 - DNA, 110 bp, synthetic construct
  source 1..110: mol_type = other DNA
gactccctaagtttttttcttgaagagctccccacttcccaatcactatggcacatccccaagcctgtccccagtgtgaggcataaaggactgcaaaacctgcctcatgt

SEQ ID NO: 66489 - DNA, 110 bp, synthetic construct
  source 1..110: mol_type = other DNA
gcagagaaatgtactattgcagaaggaagtagttttggagacaggccagaaacaggaaaagagattaagttatcttagaaacaaaagccctgtgtgtaactgactcatcc

SEQ ID NO: 66490 - DNA, 110 bp, synthetic construct
  source 1..110: mol_type = other DNA
cagggatgatcacagcccaggtcttggggaattcactgggatgggccccaagtgagcatccttagcttcaatcaggaaaaattcaggagtgagccacagtaaatttattt

SEQ ID NO: 66491 - DNA, 110 bp, synthetic construct
  source 1..110: mol_type = other DNA
ctcttcaaggtcagccagttttcctccccagctccctcctgctctgagtgccgtctggggacctgcaagtattagttagcatcgctctggggcttgtcgaaacttgtgaa

SEQ ID NO: 66492 - DNA, 110 bp, synthetic construct
  source 1..110: mol_type = other DNA
gaccagccatcagtggttttaacaagccctctgggtgactctgatgcccatcaacatttgagaagcacaccctggagctggctgagagacagatgccgttttgtcagaat

SEQ ID NO: 66493 - DNA, 110 bp, synthetic construct
  source 1..110: mol_type = other DNA
aactaaagctctgatgaaccctaggtagccaacatataactcttagttttccatattcttaaactcagtgaactttaaaccagtcactataatttcattctccaatattt

SEQ ID NO: 66494 - DNA, 110 bp, synthetic construct
  source 1..110: mol_type = other DNA
ggatggtataagagaggaagatgatacagatatggaggtcatcaatactcagctgtgaattcaagcacatcacccaacccctctcccccttgggacttccaatgaatctt

SEQ ID NO: 66495 - DNA, 110 bp, synthetic construct
  source 1..110: mol_type = other DNA
tgaattcaagcacatcacccaacccctctcccccttgggacttccaatgaatcttacagattccagaaaggacctgatgccacaggagggggtgaagttgaagtcagaac

SEQ ID NO: 66496 - DNA, 110 bp, synthetic construct
  source 1..110: mol_type = other DNA
tattaattgtaattctacaacccaatagaatgtgctgggcagctgtctttatctcagagttggaatgatgatgactaataagcactaacataaactaacctctcaattat

SEQ ID NO: 66497 - DNA, 110 bp, synthetic construct
  source 1..110: mol_type = other DNA
caaatgagcaacaggcccagctgcttctggtgttgctccatttgctgtcccaagaattgcacgtgcagaaacacgacttcagttggaccaaaaggggcctcatcacttac

SEQ ID NO: 66498 - DNA, 110 bp, synthetic construct
  source 1..110: mol_type = other DNA
attgcacgtgcagaaacacgacttcagttggaccaaaaggggcctcatcacttacaaaagacagaagcaccaatgaacatttttttgccttcatcttgttccttagattt

SEQ ID NO: 66499 - DNA, 110 bp, synthetic construct
  source 1..110: mol_type = other DNA
aggacatggggaaccatagttaggtatctgtgaaaataaagattaatttttcccatcatggaccctaggaataaaaccctaaaaaactacctgaagagatctagtgtccc

SEQ ID NO: 66500 - DNA, 110 bp, synthetic construct
  source 1..110: mol_type = other DNA
aactctgagagaaagcgtgaggaaccagccatgaagagagtccaaagaaagaaatctgggccagcatccagaggtacaacgccaagcaagaagaaagcggcaagaagcca

SEQ ID NO: 66501 - DNA, 110 bp, synthetic construct
  source 1..110: mol_type = other DNA
cctctttcgttttgatacatatgtatcaacttggaaataatgacacactgatttgctttgtatgctgaacctaagaacttcaaaacctatggcttttccactctcatgga

SEQ ID NO: 66502 - DNA, 110 bp, synthetic construct
  source 1..110: mol_type = other DNA
aagctaaacccatctttaatatcactcttccccttgaacctaatcctgtttcctaatttctgttgtaggcatctgatctcccttattttctgcttcagaagcctgtgccc

SEQ ID NO: 66503 - DNA, 110 bp, synthetic construct
  source 1..110: mol_type = other DNA
atttctgttgtaggcatctgatctcccttattttctgcttcagaagcctgtgcccaccttcctttgcatttcacacccacaatgaagtcctactgatttagtcttttgag

SEQ ID NO: 66504 - DNA, 110 bp, synthetic construct
  source 1..110: mol_type = other DNA
cccagaactgagccccgagtcttccctgcagctgcacaggtaagatctgcttccggcttcctcatcccaccacctggctgatggaacgttctgattgccgggtcactact

SEQ ID NO: 66505 - DNA, 110 bp, synthetic construct
  source 1..110: mol_type = other DNA
gaccccaaagggtacaactaccaaaaatatggaagatggaatctgggaaacatcagactcaaagcaacagtatttcaccaattagccaaaaagttcaataggcaatttgt

SEQ ID NO: 66506 - DNA, 110 bp, synthetic construct
  source 1..110: mol_type = other DNA
gagtagttaatatttcaatagctactataataattagctgtgagatggtggaatgacaccttcacgcaccaccattataaagctgcccaaacttttttttttcctagggc

SEQ ID NO: 66507 - DNA, 110 bp, synthetic construct
  source 1..110: mol_type = other DNA
ctgaaagctgagctaccgtgtcacttgtagctcctccagtttgctgggattgccaagaagcaagagttaatggttttccgtggtctcactgccagaggcgtcttaccctc

SEQ ID NO: 66508 - DNA, 110 bp, synthetic construct
  source 1..110: mol_type = other DNA
cagccctcatgtactcatcacccagtttcagcatttatcagcttgtgaactgttttgtttcatctctgtccctagtcactccctatgcccataccaggtgtttttttgtt

SEQ ID NO: 66509 - DNA, 110 bp, synthetic construct
  source 1..110: mol_type = other DNA
tctgcattagggaaaaagccaacgaaaagtcatcctctcctctgatccagctcgtttatgaggccctccagctcccgtgctctgggtctggacataagattacgactgta

SEQ ID NO: 66510 - DNA, 110 bp, synthetic construct
  source 1..110: mol_type = other DNA
ctcttgatttccaattgagtggtctttgtactacagcatgctgctagttaaaccagctatcttaaagaagtggtattcaagacgctatttttctcctatttctcaatagt

SEQ ID NO: 66511 - DNA, 110 bp, synthetic construct
  source 1..110: mol_type = other DNA
gctatcttaaagaagtggtattcaagacgctatttttctcctatttctcaatagtccaggaaagtgtccagactgcctcatgatactgctataaagttcagaactgggaa

SEQ ID NO: 66512 - DNA, 110 bp, synthetic construct
  source 1..110: mol_type = other DNA
ttctactaaactccctgccctggggaatgctcctgtgctgcaaatctagaataacttgtaggcggtcctccttgtggctgctctggttctaagctcatagggagagacag

SEQ ID NO: 66513 - DNA, 110 bp, synthetic construct
  source 1..110: mol_type = other DNA
ttgtaggcggtcctccttgtggctgctctggttctaagctcatagggagagacagatgcacattatgttggctagtcaatcaaatatagaaataaacgcttgctctgtcc

SEQ ID NO: 66514 - DNA, 110 bp, synthetic construct
  source 1..110: mol_type = other DNA
aatggtacaactggctagtcattttggggagaaaaaatgatgccaacttaacgtacatcgtacaccaatgtaaatctcagtatcgttaaagatttaagtatcaatgagat

SEQ ID NO: 66515 - DNA, 110 bp, synthetic construct
  source 1..110: mol_type = other DNA
ggggagaaaaaatgatgccaacttaacgtacatcgtacaccaatgtaaatctcagtatcgttaaagatttaagtatcaatgagatattaagagcaattagacaaaaataa

SEQ ID NO: 66516 - DNA, 110 bp, synthetic construct
  source 1..110: mol_type = other DNA
ttttttttccctgtaagttttagaagacactgtcgtttttaacactttatggctccgctcggcagatgggcacaggatcccatctttcctcaatggtcacgttctcacat

SEQ ID NO: 66517 - DNA, 110 bp, synthetic construct
  source 1..110: mol_type = other DNA
gtgagccctccctatgccacctgaggtggccactgtcggagaatctgtaccaaaatgagagggcgggggagcatctggggatgttttgcggggagcgtgactgagataat

SEQ ID NO: 66518 - DNA, 110 bp, synthetic construct
  source 1..110: mol_type = other DNA
cgcaaaatcaggacttgcctccatgctctcagatgaaacctggtcttgaacccatgacaattcccagcgggatagcagctattctaaggcaggggctgaatccagatgtg

SEQ ID NO: 66519 - DNA, 110 bp, synthetic construct
  source 1..110: mol_type = other DNA
gacgttgactaaggcgccctctctcatgagggcacagtacccacctgtacaacaggagctcagattggatgcttgcctgatgctcttccggctctgactctctgtcctat

SEQ ID NO: 66520 - DNA, 110 bp, synthetic construct
  source 1..110: mol_type = other DNA
tttggtagtaagcacaggtgcttcaattcagttcagcatttattgagctcttactataagccagatactgtggtaggctcttggccatgctcttagtaataagaatagaa

SEQ ID NO: 66521 - DNA, 110 bp, synthetic construct
  source 1..110: mol_type = other DNA
gcactgcattcagctgaagggcactcccgacgaagacgactgattttgccgtcctcgtccaccttatagtgtttcaggacagccagcttaaccttctttctcttatgctt

SEQ ID NO: 66522 - DNA, 110 bp, synthetic construct
  source 1..110: mol_type = other DNA
cgtccaccttatagtgtttcaggacagccagcttaaccttctttctcttatgcttgttcttcttgggagtgtgtaagacttcttcttccttttcttagcaccaccaccaa

SEQ ID NO: 66523 - DNA, 110 bp, synthetic construct; identical to SEQ ID NO: 66521
  source 1..110: mol_type = other DNA

SEQ ID NO: 66524 - DNA, 110 bp, synthetic construct
  source 1..110: mol_type = other DNA
ttgccgtcctcgtccaccttatagtgtttcaggacagccagcttaaccttctttctcttatgcttgttcttcttgggagtgtgtaagacttcttcttccttttcttagca

SEQ ID NO: 66525 - DNA, 110 bp, synthetic construct
  source 1..110: mol_type = other DNA
gcattagtttcacagagagcatgcaaggctgtgggttccaaaggagctgggcatgaaatatctcacaacccaaaacaaaaacttccaactatctcccttctctttctaat

SEQ ID NO: 66526 - DNA, 110 bp, synthetic construct
  source 1..110: mol_type = other DNA
ctttccctatgtgttacagttttcagagtaagttgatgcctataaaggcagaaaataagagtttgggatttttgtttaaaatatatatatttttgagctcgtggattata

SEQ ID NO: 66527 - DNA, 110 bp, synthetic construct
  source 1..110: mol_type = other DNA
aaaatgtactcatactacatatgggatacaattagcttgggctaccctaacaatacaccattggttgggtgacttaaacaatggaaatgtattgtctcacatttctggac

SEQ ID NO: 66528 - DNA, 110 bp, synthetic construct
  source 1..110: mol_type = other DNA
attataaatgtgctatataaatgcctccccactccagaatattagctttatgactccttcatccctgtgccccaaagaattaaaaaaaatacccaccttactagatgtgc

SEQ ID NO: 66529 - DNA, 110 bp, synthetic construct
  source 1..110: mol_type = other DNA
gaggtgcaattgtggaggactcctcataggtgttgattcaccacccagcatccttcaggagagctggtccaggtctcagctcagactccagaacctaggctgcagctttg

SEQ ID NO: 66530 - DNA, 110 bp, synthetic construct
  source 1..110: mol_type = other DNA
ggggtatttgaagaaccagtagattagccacagagacaaaggggacaaagggaacaaggtgaggtctgagaattgtatgcagatcatgcaaggccttgaagtccttgtct

SEQ ID NO: 66531 - DNA, 110 bp, synthetic construct
  source 1..110: mol_type = other DNA
gtggcccctaacttaagtcccagtctctctgaggtgtaaacactacactacactgattctcccctcctcatgattatcttaggtctgcttaaagccaaaaacaagtattt

SEQ ID NO: 66532 - DNA, 110 bp, synthetic construct
  source 1..110: mol_type = other DNA
gcattcagacagacaacagttctataatgtatctttttcctatggtccaacacagcagatctgatgggtagtggtctttgttttctgctttttacaaagacagcacacag

SEQ ID NO: 66533 - DNA, 110 bp, synthetic construct
  source 1..110: mol_type = other DNA
agagctgtagccaggacggcagtcctcagcagatgcccacaatgtttgctccatgtttagctaccattttatgtactgactggatgcaaggtgtctcacccatattctca

SEQ ID NO: 66534 - DNA, 110 bp, synthetic construct
  source 1..110: mol_type = other DNA
tttagctaccattttatgtactgactggatgcaaggtgtctcacccatattctcattttgctccccccaaaacccatgcaagggaatgactatttctcacctaacacata

SEQ ID NO: 66535 - DNA, 110 bp, synthetic construct; identical to SEQ ID NO: 66533
  source 1..110: mol_type = other DNA

SEQ ID NO: 66536 - DNA, 110 bp, synthetic construct; identical to SEQ ID NO: 66534
  source 1..110: mol_type = other DNA

SEQ ID NO: 66537 - DNA, 110 bp, synthetic construct
  source 1..110: mol_type = other DNA
agcatctctgtatggaagcagagcctggcctggagctcaagctggtctgactccgatgatcttaaccactaatgagatgatgcagataggaggaggaataaaagatggat

SEQ ID NO: 66538 - DNA, 110 bp, synthetic construct
  source 1..110: mol_type = other DNA
ggaactggaactgcaggaagcaatgtcatttatggcatctctggtagaatctcgtgtagctgcttgtgacacgctgggcgataggtatacagagaccagccaggaactgt

SEQ ID NO: 66539 - DNA, 110 bp, synthetic construct
  source 1..110: mol_type = other DNA
tttgttctacagaattttgctttgttattatactcttctcgaaatggactttgacctatattcaagacagaatgaagctagaagttggagtcaggatttgcaaaagacca

SEQ ID NO: 66540 - DNA, 110 bp, synthetic construct
  source 1..110: mol_type = other DNA
ctatattcaagacagaatgaagctagaagttggagtcaggatttgcaaaagaccaacggcaataaaggagaggggtgtgaagaagagaagggaaacagtgagaaaatcat

SEQ ID NO: 66541 - DNA, 110 bp, synthetic construct
  source 1..110: mol_type = other DNA
ttccagtggtatgattggaatacagaccaaatctcgctacctcctactggaaggcgtgtggatgaggagcaagatgaaatagatggaatatgagagtcagaagacctggg

SEQ ID NO: 66542 - DNA, 110 bp, synthetic construct
  source 1..110: mol_type = other DNA
ggtggaaaagaggaacagctaagagataattttgaaagtcaccataataatataactagaaatactgataacaatagtattccggatactttgaaggtagagccaatcta

SEQ ID NO: 66543 - DNA, 110 bp, synthetic construct
  source 1..110: mol_type = other DNA
ctagaaatactgataacaatagtattccggatactttgaaggtagagccaatctagttttaaggttgccaacaaaatgagtgtgtaatattagaggagattcaagatatc

SEQ ID NO: 66544 - DNA, 110 bp, synthetic construct
  source 1..110: mol_type = other DNA
atgttaggacaagagtgttgctttataggccactagatggcgccagaattcctctctgcctctcttcctcactgttgccagctttccagctcccttccatgccacttttg

SEQ ID NO: 66545 - DNA, 110 bp, synthetic construct
  source 1..110: mol_type = other DNA
gtttatgttcttccctcctttttagttatgttttcccatatgctaccctttcttttctggctgaggaactacctttaatagttcttatggaatatgtttgctggtagcaa

SEQ ID NO: 66546 - DNA, 110 bp, synthetic construct; identical to SEQ ID NO: 66545
  source 1..110: mol_type = other DNA

SEQ ID NO: 66547 - DNA, 110 bp, synthetic construct
  source 1..110: mol_type = other DNA
tttcatccagtagggaaggaaaccatccccgcctcttctcttcgctccatgcagtcttgtctcctaagctaaatgtcccaagtcctacttcttatttataggccagagtt

SEQ ID NO: 66548 - DNA, 110 bp, synthetic construct
  source 1..110: mol_type = other DNA
tttttatgtaagggcacatgacatgagtcaatgcagctcacagagtgttattgccctaatgtccatatctgcaagtgtccagagcagtggtgggtgactgccccagattc

SEQ ID NO: 66549 - DNA, 110 bp, synthetic construct
  source 1..110: mol_type = other DNA
gtctcagaattagaaaggatatcagatggccttaaattaccctgtactcacatgttctgcacctctttcaactctgagacattatgaccatagttcgtccatgatatcag

SEQ ID NO: 66550 - DNA, 110 bp, synthetic construct
  source 1..110: mol_type = other DNA
tctgcacctctttcaactctgagacattatgaccatagttcgtccatgatatcagctgctgcttctcagagtatctgtacctccaggggtacaccaaggatcaatttgac

SEQ ID NO: 66551 - DNA, 110 bp, synthetic construct
  source 1..110: mol_type = other DNA
ccaggagttgaactggagctgcagctaaggcctataccacagctacaacaaagtgtatccaagccacgtgatctatgccacaccttggggcaacagtggatccttagccc

SEQ ID NO: 66552 - DNA, 110 bp, synthetic construct
  source 1..110: mol_type = other DNA
aacagtcatcttcaagggcaactacctggtcttggttgcaaaaactctcatctgttctggctccacccttagctcttaggagcagactctcagatctgtccagggcataa

SEQ ID NO: 66553 - DNA, 110 bp, synthetic construct
  source 1..110: mol_type = other DNA
aagttgctagcatcacacaaacactgtctcacacactcagctaccatgtcagccgagacacagggcgtcagagtgacaggaggctgtcatgagggtggaatgttttctct

SEQ ID NO: 66554 - DNA, 110 bp, synthetic construct
  source 1..110: mol_type = other DNA
attctcctttcctcatatcagttgtatagtcaccagtgctgctcaccaagtagttctggtcctcctttttcacagccacttgcgaagctcccaataaagccagctccctc

SEQ ID NO: 66555 - DNA, 110 bp, synthetic construct
  source 1..110: mol_type = other DNA
ctggtcctcctttttcacagccacttgcgaagctcccaataaagccagctccctcaacctgggaatgatttgaaacagaactcttatgctaactaatgatgagcatgtag

SEQ ID NO: 66556 - DNA, 110 bp, synthetic construct
  source 1..110: mol_type = other DNA
atgaattacttaattgagctaagagcttctgacctggcctctcagctttcagccgtgtccccactaatcatcctccagattgtgacaacagtgaccgctccaagttacaa

SEQ ID NO: 66557 - DNA, 110 bp, synthetic construct
  source 1..110: mol_type = other DNA
aaaaacaagtgtcccacaatccccagaagacaacaaagctgcaattaactcacgcagcagaatgcctgagttcacctcagtatcctgaggatgtcgggagggtcacagcc

SEQ ID NO: 66558 - DNA, 110 bp, synthetic construct
  source 1..110: mol_type = other DNA
cattaagaaggaaaacattttttttacagcactccctaataatttcttgttcatacatttgcagaggcccaattccacttgtttcacagtcccggacgtttaaagcagga

SEQ ID NO: 66559 - DNA, 110 bp, synthetic construct
  source 1..110: mol_type = other DNA
catttgcagaggcccaattccacttgtttcacagtcccggacgtttaaagcaggattaccaagaacactcagaccacaggctttcctttgtcactgctctggcgctagtt

SEQ ID NO: 66560 - DNA, 110 bp, synthetic construct
  source 1..110: mol_type = other DNA
ctggccccaggatttccccacagatggagctgtgctaatgagaggagcacggacaggaatcagttgttccatacagagaatcttcagtgtcgatagcaacaagttaacgg

SEQ ID NO: 66561 - DNA, 110 bp, synthetic construct
  source 1..110: mol_type = other DNA
cttatagtgaccctgccagatgcctgccatgtttacagaggaaagtgccagaaatcccagctagcctgaaaggggctccctctgagaatcaatcttccatgtggagaata

SEQ ID NO: 66562 - DNA, 110 bp, synthetic construct
  source 1..110: mol_type = other DNA
ggtggttggcaatgcccattccatcccaaagcccccaatgcaaaagcttcttcttttttattagctgacccaccaggcagatagggtgggagtctgcaacttctcctgta

SEQ ID NO: 66563 - DNA, 110 bp, synthetic construct
  source 1..110: mol_type = other DNA
acatcatttgcctgaagggagtatgtctcagaagccagggatggggaccaaggggcagtggtctcttcccgccgtggttccctcactctcctctagatccaggtgcctgc

SEQ ID NO: 66564 - DNA, 110 bp, synthetic construct
  source 1..110: mol_type = other DNA
ccctaggaagcaggtattattattattctcatcttacagatacagaaaccaagacacaaagatacaaacgaattgattgtggatccaggatgcagacccaggcaggcagg

SEQ ID NO: 66565 - DNA, 110 bp, synthetic construct
  source 1..110: mol_type = other DNA
aaaactctcccaagctgatgcaagaatctcagagctcttcaggggcaccaacgaatcacagaacaatctaaaaccagtttgcagaatcatcattcaaacaaaaagtcaga

SEQ ID NO: 66566 - DNA, 110 bp, synthetic construct
  source 1..110: mol_type = other DNA
catccaattttcccattctaagactatagttaatcaaaatttttatctgctccgagttgggagggctaagttccaaaggaagaacacagcattactaatgaagtgatggt

SEQ ID NO: 66567 - DNA, 110 bp, synthetic construct
  source 1..110: mol_type = other DNA
gaggattgcatgaggtcaggcgtgccgagtgcacgtgtgtgcccggcatgtggaggtgcttcctgataccaggtcgccgtgttcgttgcccagactcagcctcccccagt

SEQ ID NO: 66568 - DNA, 110 bp, synthetic construct
  source 1..110: mol_type = other DNA
catggcccagaggtgaggctgaggtagcccggagtgggtggaggtggaggtggaggttgtcacctggggtgacactagagctcttgacttggatgttttcacttgggtcc

SEQ ID NO: 66569 - DNA, 110 bp, synthetic construct
  source 1..110: mol_type = other DNA
aatggatttgagtgagtgggtccttttcctttttagtgaagtttttggctattatcacttcaaatatttttttctgtccctttctctatgttctccttctggcaccccta

SEQ ID NO: 66570 - DNA, 110 bp, synthetic construct; identical to SEQ ID NO: 66569
  source 1..110: mol_type = other DNA

SEQ ID NO: 66571 - DNA, 110 bp, synthetic construct
  source 1..110: mol_type = other DNA
gtctgaagttccgtcctgtgacaacaaccgggcaggacaggaacggtctctctcaaggctgccccccgggaacacgtgatgcattgcttcatcaggtctccacctcagtg

SEQ ID NO: 66572 - DNA, 110 bp, synthetic construct
  source 1..110: mol_type = other DNA
aggctgccccccgggaacacgtgatgcattgcttcatcaggtctccacctcagtgtgaggaaatgccgtgagcagtgggcacattgccctgaagctgcttccctctcctg

SEQ ID NO: 66573 - DNA, 110 bp, synthetic construct
  source 1..110: mol_type = other DNA
gacatgtgcaagtggctctggccgaagctacgaagtacctgccggggccataacgatgctgggattataaaatgcctcttgggcaccttcctagcgaaaacctttttctg

SEQ ID NO: 66574 - DNA, 110 bp, synthetic construct
  source 1..110: mol_type = other DNA
cataatatgaaaagctcactgatcaagtttcagactccattaagaaactaccacttgtcatattttggcataacagcaaaaaagacgacccaaaattatctcaaaaggct

SEQ ID NO: 66575 - DNA, 110 bp, synthetic construct
  source 1..110: mol_type = other DNA
gagaggaagtggcagcctttgttcttataaccttgtgatccccgtgggactcagcggccacccttgttggctgttttctgcgacttctgcggggctggtggtggtggggg

SEQ ID NO: 66576 - DNA, 110 bp, synthetic construct
  source 1..110: mol_type = other DNA
ctgttggattccacagccaacaaaaaaatcttacctctaaatctttaggcactgggaagttaaggaaggacttgttgtttttcgttttttaaattatgttcattgatgaa

SEQ ID NO: 66577 - DNA, 110 bp, synthetic construct
  source 1..110: mol_type = other DNA
gaagttaaggaaggacttgttgtttttcgttttttaaattatgttcattgatgaaatggttttcagtaggatggaatctttattttagaaagggcctctgatacatgaat

SEQ ID NO: 66578 - DNA, 110 bp, synthetic construct
  source 1..110: mol_type = other DNA
caattgactcctaggcaccagggcttaacagatactctatttggttaaggacatgtccaggagtctaggcggccccagtctgcagcttttggtttttgtcagatatttgg

SEQ ID NO: 66579 - DNA, 110 bp, synthetic construct
  source 1..110: mol_type = other DNA
ttgcacgtattaattcattttatttgactttggtgactgaacaaaagctgttttggtggaggtgggggttaaatcctaaaacaaggcagaggagaggaattagatcataa

SEQ ID NO: 66580 - DNA, 110 bp, synthetic construct
  source 1..110: mol_type = other DNA
tgaaaatagaaaaccattacaaatttgaaaagctccccccttctcttgctagtagttcagttcaaagatattaaacaagcccaggcaaagtgggtgggtgggtgtgtgcg

SEQ ID NO: 66581 - DNA, 110 bp, synthetic construct
  source 1..110: mol_type = other DNA
ttaggaaatttatgatccctgagaaaattaggatggcactacaaggaccagaacacaagtaggaagtacttaaactccttactaacttctaggaggaacgagattagggc

SEQ ID NO: 66582 - DNA, 110 bp, synthetic construct
  source 1..110: mol_type = other DNA
caagtaggaagtacttaaactccttactaacttctaggaggaacgagattagggcacaaactacactcagagtcaattcaaatgtaaatgctctgcttcctttcaaacaa

SEQ ID NO: 66583 - DNA, 110 bp, synthetic construct
  source 1..110: mol_type = other DNA
agcaacattctttaacctggattgaggaaaggctggggctaaatacttgggagtttatgaaatggactgagaggtcctgggtatgctccatatggggcgatccgtaccca

SEQ ID NO: 66584 - DNA, 110 bp, synthetic construct
  source 1..110: mol_type = other DNA
tgctcagagtggcaggttctggcaactggcaaccttgtgaattacacaggaccctcgagcctgcagatggctgaaaagctggcattatgtccaacagctgcacccccacc

SEQ ID NO: 66585 - DNA, 110 bp, synthetic construct
  source 1..110: mol_type = other DNA
ctgcgcaaagggtcatcacctgcaggacggtgtgtgcagctgggtaaactgagttcgcggcccgcgtgtccccgcaggcgctcacaccactgcggcgctgaggttcggtg

SEQ ID NO: 66586 - DNA, 110 bp, synthetic construct
  source 1..110: mol_type = other DNA
gttccatgtgccatgggtgtggccattagggggaaaaaaaaaaggggaggcacatggaagccagggttggacacaagaaacagaggagggatccagggaggcggatgaag

SEQ ID NO: 66587 - DNA, 110 bp, synthetic construct
  source 1..110: mol_type = other DNA
ggaagccagggttggacacaagaaacagaggagggatccagggaggcggatgaagctcctccagtgcctactacacaccttgtaggggtgatgaggattaagtgaagtga

SEQ ID NO: 66588 - DNA, 110 bp, synthetic construct
  source 1..110: mol_type = other DNA
cacaggctgcgagttattgacccagaatccggcaacaccttgtacatcctcacccacaagagcatcctcaagttcctcaagctgtttatcactgagttccccaaggtcga

SEQ ID NO: 66589 - DNA, 110 bp, synthetic construct
  source 1..110: mol_type = other DNA
gtttccagtgtaactgatgagtaaagttaagaccttagagtgtagtcttactcgttctctgaatcacgggaaatgtcagggccatgtgctagcctggttttttcaacaaa

SEQ ID NO: 66590 - DNA, 110 bp, synthetic construct
  source 1..110: mol_type = other DNA
ttctggttctatttcttggtttaatcttcttgacattctgctgccaaattgcttttgtagtagatcttcctgtgatactgtatatgtcatgctaatcaaatctttaatta

SEQ ID NO: 66591 - DNA, 110 bp, synthetic construct
  source 1..110: mol_type = other DNA
tctgtaaggatttgcctagtctgaacatttcatatacatggaatcatactctgtgtggtcttttggcactgggttcttatacgcagcacagcattttcaaggttcatccc

SEQ ID NO: 66592 - DNA, 110 bp, synthetic construct
  source 1..110: mol_type = other DNA
tggtcttttggcactgggttcttatacgcagcacagcattttcaaggttcatccctgttttaacatgtgtcactacttcattccttttcatggctgaataatgttctctg

SEQ ID NO: 66593 - DNA, 110 bp, synthetic construct
  source 1..110: mol_type = other DNA
gtaaattaactatactttcgtaaacctttaaaaagtgaaaaaaaaaaagccttctggcaaagaaacctcaagtagtgggttaatgggaacaaggagggacttgctttaat

SEQ ID NO: 66594 - DNA, 110 bp, synthetic construct; identical to SEQ ID NO: 66593
  source 1..110: mol_type = other DNA

SEQ ID NO: 66595 - DNA, 110 bp, synthetic construct
  source 1..110: mol_type = other DNA
gggactgcatttccccccacctcccactgcagctcttcttagaatgggcctggcccctttgcatctttgcacgcacagctccggatctggagtgtcctcactttgcctcc

SEQ ID NO: 66596 - DNA, 110 bp, synthetic construct
  source 1..110: mol_type = other DNA
cctttgcatctttgcacgcacagctccggatctggagtgtcctcactttgcctcctggcacactcttacccatggaagccaatcctgggtgcatatgcacagacacccca

SEQ ID NO: 66597 - DNA, 110 bp, synthetic construct
  source 1..110: mol_type = other DNA
ccatcacggcagcttgctctgtcaaagggtacaagccgagaaggcaatggagagaggctaccggcaagacaagtcacattcctcgtaacctaatcacaggtgtgacatct

SEQ ID NO: 66598 - DNA, 110 bp, synthetic construct
  source 1..110: mol_type = other DNA
ggctaccggcaagacaagtcacattcctcgtaacctaatcacaggtgtgacatctcatcactttgccacgttctcttcctcagaagcaagtcttggagtttccgtcgttg

SEQ ID NO: 66599 - DNA, 110 bp, synthetic construct
  source 1..110: mol_type = other DNA
agccatgacaggacccccatataaccatctttcttttgatcagtgttagcatgtgctgtggtctgaatgtaccttccaaagttgtatgttgaaatctaaattctcaaggt

SEQ ID NO: 66600 - DNA, 110 bp, synthetic construct
  source 1..110: mol_type = other DNA
ctgtggtctgaatgtaccttccaaagttgtatgttgaaatctaaattctcaaggtgatagaattagaacatggggtttttggcagagccctcattattgggattagtgcc

SEQ ID NO: 66601 - DNA, 110 bp, synthetic construct
  source 1..110: mol_type = other DNA
tgcatgaggcggttggtgttctctggcttcaccaggtagatggagctggtgtcgtggccgtcctccagggcctgcaggcagtctctccaggggcctggggacacaggtgt

SEQ ID NO: 66602 - DNA, 110 bp, synthetic construct
  source 1..110: mol_type = other DNA
gttctcactgctggtcagaacgccagcacatgctctccgaccccacgaccccaaggctccaggagaacctttgcaaacagtaggttatcccaggtcagccatccccaggg

SEQ ID NO: 66603 - DNA, 110 bp, synthetic construct
  source 1..110: mol_type = other DNA
atcacaagagtcccccagacgtggctctaaggcacttggctctcccagcagggactcaaggccaagcattgtgagttaagtgctaagtgtgggtttgtccctcaagctgc

SEQ ID NO: 66604 - DNA, 110 bp, synthetic construct
  source 1..110: mol_type = other DNA
gacttgaaccttgtttcacattaatctgggatcaaagtctcatatgaaagttacgttccttggttgtcccattagtggttctaaaccccagctgtaaaccggaatgggta

SEQ ID NO: 66605 - DNA, 110 bp, synthetic construct
  source 1..110: mol_type = other DNA
ttccttggttgtcccattagtggttctaaaccccagctgtaaaccggaatgggtagcaaagcctgggcaggggcctcccaccaactcgtttgggatgaagagcttcttgc

SEQ ID NO: 66606 - DNA, 110 bp, synthetic construct
  source 1..110: mol_type = other DNA
gttctgctccagtattcggggatccaagtcacctgacacagtgaagccagccactggccctatggtgagagttgcctggacagatcctgtccaaggcaggagccactggg

SEQ ID NO: 66607 - DNA, 110 bp, synthetic construct
  source 1..110: mol_type = other DNA
gccactggcagaaccaaggcgtctgagcttgttaatcaggagccctcccttcccgccccttggccaaaggcttctgtctgtgaatgtaggtgttttcataagaataaaaa

SEQ ID NO: 66608 - DNA, 110 bp, synthetic construct
  source 1..110: mol_type = other DNA
gtctgggaacttccatatgctgcaggtgcggctaaaaagaaaaaaagagtgagaggttatctgccttttcactttcattctctcaggattgcacattagcattttccaga

SEQ ID NO: 66609 - DNA, 110 bp, synthetic construct
  source 1..110: mol_type = other DNA
ttgaggtgcctctacactgagcagccacactcatgcttccctccacgggcgcaaagccactccctcgggaatgactctctcttctggatggtagcaccacgaaagcagaa

SEQ ID NO: 66610 - DNA, 110 bp, synthetic construct
  source 1..110: mol_type = other DNA
gccactccctcgggaatgactctctcttctggatggtagcaccacgaaagcagaaagtctttttttgtttgtttttgacattgcatctggcacctgaaagtgcctgataa

SEQ ID NO: 66611 - DNA, 110 bp, synthetic construct
  source 1..110: mol_type = other DNA
ctcaggacctttgcacttgtcacatcctctgcctggacttgtctattcacatgaccagctctacttgtcattcagctcaaatatcctcagaaaggccctcgccgggtcct

SEQ ID NO: 66612 - DNA, 110 bp, synthetic construct
  source 1..110: mol_type = other DNA
ttggcgttaggctcatctgtctactcgccagtcctgtctcagatcactctccctacacccagcacacggccacggggcagggagcagggttcccaggtggctctttgcag

SEQ ID NO: 66613 - DNA, 110 bp, synthetic construct
  source 1..110: mol_type = other DNA
cacccagcacacggccacggggcagggagcagggttcccaggtggctctttgcagatgctgttccttctgcctgaaatcctttcccatcagacttcatttgcttcatttt

SEQ ID NO: 66614 - DNA, 110 bp, synthetic construct
  source 1..110: mol_type = other DNA
agaccaatgtcaaagccatgctgtaccggatccaagcctaacctttgagaggactgaccgtttgcacttgttctcagagccccagccaccatgctgtgagggagcccaag

SEQ ID NO: 66615 - DNA, 110 bp, synthetic construct; identical to SEQ ID NO: 66614
  source 1..110: mol_type = other DNA

SEQ ID NO: 66616 - DNA, 110 bp, synthetic construct
  source 1..110: mol_type = other DNA
gaaagagatttaaatagtcagaaaaaagttctgtccacccacataatcaccgtttctagctcctcattgctttcattccgttctttatccggcatcattttccttctgtc

SEQ ID NO: 66617 - DNA, 110 bp, synthetic construct
  source 1..110: mol_type = other DNA
catcctgcggaaactggtccagtggaacctgagccttgtttatctgcccctgggggttcacgccccccaaaatcaatgccatagagcttccccacccccaggacccagtc

SEQ ID NO: 66618 - DNA, 110 bp, synthetic construct
  source 1..110: mol_type = other DNA
gttcacgccccccaaaatcaatgccatagagcttccccacccccaggacccagtccccaccctcaggacagcccaccctccaagtgagggagtagtgtggctagtgggga

SEQ ID NO: 66619 - DNA, 110 bp, synthetic construct
  source 1..110: mol_type = other DNA
cccgtggtggccccgatgctggactcccagacctactactccaatttctggtgcgggatcaccccccaggtaaggccagggacggaggcgtcaggcggtttgaggtcggg

SEQ ID NO: 66620 - DNA, 110 bp, synthetic construct
  source 1..110: mol_type = other DNA
ggatcaccccccaggtaaggccagggacggaggcgtcaggcggtttgaggtcgggaaggagggacgcggagggcagagagcctgaaggccttggggtggggtctgtgggc

SEQ ID NO: 66621 - DNA, 110 bp, synthetic construct
  source 1..110: mol_type = other DNA
actcaccctcacggcttaaatcatggctggcgctggttggcacagatcttaaatatggagcccctgtcggatgtgacggccaccctcctctttgacttcttagaggtacg

SEQ ID NO: 66622 - DNA, 110 bp, synthetic construct
  source 1..110: mol_type = other DNA
gctgctttagaggacaaggtgggttttgaagctgactctctgaatgagtctgcaggggtcaagagggcagcactgaaaaggtgtatctccaggtcaaagccctgtgcgca

SEQ ID NO: 66623 - DNA, 110 bp, synthetic construct
  source 1..110: mol_type = other DNA
aaaatttagtacatgtccacagacaaatgaagtggatttttaaaatgtggtatatataggtgaaaccccaagtcttcctgggagccaaagtgtgggatattatttagcct

SEQ ID NO: 66624 - DNA, 110 bp, synthetic construct
  source 1..110: mol_type = other DNA
tggctttcatccttatggcacaaaatggctgcttcacctccagctactgtgacggcattccaggtaggacaggtagggtgaagattagggaaacgcgaagggcaaaggac

SEQ ID NO: 66625 - DNA, 110 bp, synthetic construct
  source 1..110: mol_type = other DNA
ctgcagttctggtgaagtgtcaccccagctcatgatgacccagtagctccaatggcccttatgaagcagctcctttccttggctttgaaggctccagacgctgggttcct

SEQ ID NO: 66626 - DNA, 110 bp, synthetic construct
  source 1..110: mol_type = other DNA
cccttatgaagcagctcctttccttggctttgaaggctccagacgctgggttcctggccaccttctgactcccagcctgaacctcggctccaaccagatcagcaactttc

SEQ ID NO: 66627 - DNA, 110 bp, synthetic construct
  source 1..110: mol_type = other DNA
gcggtacccacctcaccccgttgggcctctttctcaagttctgtacctctcgagtctcctccagttttaatctgaaagaaaagcaatattcaggctgaggaaccctccgc

SEQ ID NO: 66628 - DNA, 110 bp, synthetic construct
  source 1..110: mol_type = other DNA
ctcctccagttttaatctgaaagaaaagcaatattcaggctgaggaaccctccgcggaacttaagagtcaaaagatagcttcagtggacatcccctacacctctgtcaag

SEQ ID NO: 66629 - DNA, 110 bp, synthetic construct; identical to SEQ ID NO: 66627
  source 1..110: mol_type = other DNA

SEQ ID NO: 66630 - DNA, 110 bp, synthetic construct; identical to SEQ ID NO: 66628
  source 1..110: mol_type = other DNA

SEQ ID NO: 66631 - DNA, 110 bp, synthetic construct
  source 1..110: mol_type = other DNA
gatccctggcccgggaacttccacatgctgtgggcgtggccaaaaaaaatagaataaaacaaggtgttcctgtggtggtgcagaggaaacaaatccgattaggaactatg

SEQ ID NO: 66632 - DNA, 110 bp, synthetic construct
  source 1..110: mol_type = other DNA
tgctgtgggcgtggccaaaaaaaatagaataaaacaaggtgttcctgtggtggtgcagaggaaacaaatccgattaggaactatgagattttgggttcgatccctggcct

SEQ ID NO: 66633 - DNA, 110 bp, synthetic construct
  source 1..110: mol_type = other DNA
cgaccaggtggaactggggccggccagggcgcatggccagtcagtggcaccaggggcctttcccactgtcccagccaactccgatgtattattaatgaagcacaagcctc

SEQ ID NO: 66634 - DNA, 110 bp, synthetic construct
  source 1..110: mol_type = other DNA
gcctttcccactgtcccagccaactccgatgtattattaatgaagcacaagcctcggtggggggcgggggtagggagagctgaagtgccttgagaactgccttcaagtgc

SEQ ID NO: 66635 - DNA, 110 bp, synthetic construct
  source 1..110: mol_type = other DNA
ccaataaccccttgcctgttactatgtgagcaggaaggtttgagggagaaagccgtgtgtggaaccctctccttctctgccctcgctctgcaggccgagtgttgctgacc

SEQ ID NO: 66636 - DNA, 110 bp, synthetic construct
  source 1..110: mol_type = other DNA
gtatcagacgccagttcagttaaggggaatcagtgggctttttttgatggagactttagtccctgcttcaaagctccaaattaatcttcgtaattagatcacctaataac

SEQ ID NO: 66637 - DNA, 110 bp, synthetic construct
  source 1..110: mol_type = other DNA
tttcgcagtctcaggactgctcagcctttgaagctgctcagactgcctgtgcatggcctcacttgaaaatgccattctagagacttgctgttaagggccctagcaattgt

SEQ ID NO: 66638 - DNA, 110 bp, synthetic construct
  source 1..110: mol_type = other DNA
aaaaatggccttttcaaaaaaaggtcctgggaaggttggattctccatgtggaggaggtggggggagaatcttctgcctgtaatcctgtctagaatcagttttaggtaga

SEQ ID NO: 66639 - DNA, 110 bp, synthetic construct
  source 1..110: mol_type = other DNA
cagcatcattcctaacgcagtagtccgggttggcgggtttcagtctgccctgcgggagggccccacaggcagcccctggagcaggggtggtgagggcctggtgggcaggg

SEQ ID NO: 66640 - DNA, 110 bp, synthetic construct
  source 1..110: mol_type = other DNA
ttctccctgctcttcctctgcccctgttctagaatcagccatttctccaaggagccgagtgcttattagtgagagtgatcccacgtgatctagcggtgaaggactcagct

SEQ ID NO: 66641 - DNA, 110 bp, synthetic construct
  source 1..110: mol_type = other DNA
cgagtgcttattagtgagagtgatcccacgtgatctagcggtgaaggactcagctttgtcactgctgcagtgtgggttcgatcccctttggatgccgcgggtgcagccaa

SEQ ID NO: 66642 - DNA, 110 bp, synthetic construct
  source 1..110: mol_type = other DNA
gtttctcctggaaagcgcttcttgacctgccagcacctcgtgtgtgccccttttgctttccacatctttccacgggcagtgaacttgtgtctcaagggcaaggactgggt

SEQ ID NO: 66643 - DNA, 110 bp, synthetic construct
  source 1..110: mol_type = other DNA
tggtgctccctgtgctctggtgagatcaaggattcacagtattcatcctcatcaccgctcattgagccctgaccctgtgctaagcccttgtcgtgcatggaccccaggaa

SEQ ID NO: 66644 - DNA, 110 bp, synthetic construct
  source 1..110: mol_type = other DNA
ccctaagaaggagtggaaacccggaagatgctgacgggggtaggcaccccaaatacacacttcctccagggccggacccgactttcaggcacttttgccttgctgacccc

SEQ ID NO: 66645 - DNA, 110 bp, synthetic construct
  source 1..110: mol_type = other DNA
aggagctcgccaggaaggacaggtgttctgggcaggctgcagaagcaggagcatgtctcctcagcatgctgctgtctggctgcacccttctgaggggcaattgcatgcac

SEQ ID NO: 66646 - DNA, 110 bp, synthetic construct
  source 1..110: mol_type = other DNA
actagttggatttgtttctgtttgcgccacaactggaactcctgatccgtcttctaatgaatgaagacgttattattatgtatgcgtgttagtttccttttcatgatggg

SEQ ID NO: 66647 - DNA, 110 bp, synthetic construct
  source 1..110: mol_type = other DNA
aatgaatgaagacgttattattatgtatgcgtgttagtttccttttcatgatgggggagcttttagagaccccggctttatgcaggcgcccaggtcctgctcctgcctcc

SEQ ID NO: 66648 - DNA, 110 bp, synthetic construct
  source 1..110: mol_type = other DNA
tttcctgcgtgtgtgaggttcagccgtcgacccggggtttaggtggatgcgacaagcagattggggtctgtgggtccctcccttccagaattcccctcctaactttctgg

SEQ ID NO: 66649 - DNA, 110 bp, synthetic construct
  source 1..110: mol_type = other DNA
ggggacagtctggcttctggaataagtggcctcagagccagggccgggaggagtagggtggggaacagggcaagagcacgtgccctccgcagagctgttgcagggcaggt

SEQ ID NO: 66650 - DNA, 110 bp, synthetic construct
  source 1..110: mol_type = other DNA
atgatcggattaatccttatccttacattaaaaacaaaaaatcagcccagtgaactcgttctttctaccaagttttattttcaagctaaaataaagaatcaggttaagca

SEQ ID NO: 66651 - DNA, 110 bp, synthetic construct
  source 1..110: mol_type = other DNA
tcgttctttctaccaagttttattttcaagctaaaataaagaatcaggttaagcaaaactccatcaatattgtgcctgaagacttcaagtaggcatggacatccacaaag

SEQ ID NO: 66652 - DNA, 110 bp, synthetic construct
  source 1..110: mol_type = other DNA
tcaacgaaaccactggtattgacctaacaagaaggtctctgcctcttaaattttaataggtgaaatttaattgccctccacgggggccgagctgttagccacccagaaag

SEQ ID NO: 66653 - DNA, 110 bp, synthetic construct
  source 1..110: mol_type = other DNA
tccaatcaattctcccaaactcgtaaaggaaagccacccctaatccaagctcacaaaatgtggaaagccagaaaactagaatacttgctctcgccagtttggttttgaaa

SEQ ID NO: 66654 - DNA, 110 bp, synthetic construct
  source 1..110: mol_type = other DNA
ccttccagagcagaggtctttctctgaggccatgaggcacctgcagtcacatcatcctaatggacacacatggggcaactagaaggaaccagggaggaaacaatacagcg

SEQ ID NO: 66655 - DNA, 110 bp, synthetic construct
  source 1..110: mol_type = other DNA
acttcggaaatttcaagcgtttggggagctgggagccaggaactggggatgaagaccaaatgggaatgaaggccaaatacgcctgagaaatctactttggtcatcagaat

SEQ ID NO: 66656 - DNA, 110 bp, synthetic construct
  source 1..110: mol_type = other DNA
cttacgtgaactgaactacagtaaacagaatgggtcaaggcgtatcactggaacgccgacacctcagccaaggtcaccctgcctttgaattaaagggaatgaaggagact

SEQ ID NO: 66657 - DNA, 110 bp, synthetic construct
  source 1..110: mol_type = other DNA
gcagttaggacaaaaatcatacatgtcctaaatttcatttctccccagctaccttttgagtcttcagtgactttaggacaatcgcaggaatctaaattcctttttagcag

SEQ ID NO: 66658 - DNA, 110 bp, synthetic construct
  source 1..110: mol_type = other DNA
ttgagtcttcagtgactttaggacaatcgcaggaatctaaattcctttttagcagtgtgtgatagacactgttgactagccacacagtttcagttcctccttactaacta

SEQ ID NO: 66659 - DNA, 110 bp, synthetic construct
  source 1..110: mol_type = other DNA
ttgatcttattatccttacggtgcgaatgagggaataaggtgagagaagttaaaagactcgtcccgggtgtatgtctgtttacggtggagcccagacccaagctagtctc

SEQ ID NO: 66660 - DNA, 110 bp, synthetic construct
  source 1..110: mol_type = other DNA
gactcgtcccgggtgtatgtctgtttacggtggagcccagacccaagctagtctctggtcacaagaccgtcgtcttggaagatagctggacaccttaaaaccatcgtcca

SEQ ID NO: 66661 - DNA, 110 bp, synthetic construct
  source 1..110: mol_type = other DNA
ggcattaggccaatcatctgtcttgtgcagcctcctcatcccgacacagggcaccgtgtgctcagagtggaagatgccaacgtgggtctcttgcatgtttgctgacagtt

SEQ ID NO: 66662 - DNA, 110 bp, synthetic construct
  source 1..110: mol_type = other DNA
gtgtgctcagagtggaagatgccaacgtgggtctcttgcatgtttgctgacagttttagttgcctgcttacatatatgggcggagcaagctacagttattttgatgcctg

SEQ ID NO: 66663 - DNA, 110 bp, synthetic construct
  source 1..110: mol_type = other DNA
cccagccgtcccaagggacttagcggatcaagactgcaggatgttttcctaaggaagctccgcagcctgtcctgattcatgagctttttactttgggttctccagctgca

SEQ ID NO: 66664 - DNA, 110 bp, synthetic construct
  source 1..110: mol_type = other DNA
aaacagtttggaggaaagaaaacccctcaccaggaacatgccccttgtaggtggaaaaggaggcttctactgggaggggacagttttgtaattggaatttgttacaatag

SEQ ID NO: 66665 - DNA, 110 bp, synthetic construct
  source 1..110: mol_type = other DNA
aaaggaggcttctactgggaggggacagttttgtaattggaatttgttacaatagcttgcttcttatagtactttacctactataactgatgattaacttagtaactaaa

SEQ ID NO: 66666 - DNA, 110 bp, synthetic construct
  source 1..110: mol_type = other DNA
agagaataacagtccattaaaaagtctcatcttcaagagcagctacttccttatctccacccctgttgctttcttgttctctgcagcgcttagaccacccatcttggtgc

SEQ ID NO: 66667 - DNA, 110 bp, synthetic construct
  source 1..110: mol_type = other DNA
ggtgtgaggtggtatttgtagtgttgatagtagtatttccattatgattagtgatgttgagcatctattagtatgtttggtggtcatttgtgtatctctttggagacatg

SEQ ID NO: 66668 - DNA, 110 bp, synthetic construct
  source 1..110: mol_type = other DNA
ttccaaccactgtgcagtttaggggaggggtgggagtgctgggtgaggcaacaatagcacagctggtcaatagaggcagtgataaacttaagaaggagaagcatgttcaa

SEQ ID NO: 66669 - DNA, 110 bp, synthetic construct
  source 1..110: mol_type = other DNA
agcatatacttggtaaaatgttcttcattgactcagtgattgatcagaagcatattgattggggcaacgatttaagctgcttactctatgatacacaagcaccaggcagg

SEQ ID NO: 66670 - DNA, 110 bp, synthetic construct
  source 1..110: mol_type = other DNA
tgattggggcaacgatttaagctgcttactctatgatacacaagcaccaggcagggtgctgagtagtctactgaaaacaaagggtccagatcactcttgtggaaggcctc

SEQ ID NO: 66671 - DNA, 110 bp, synthetic construct
  source 1..110: mol_type = other DNA
tagttataacacagttgttttggttgtggtggttgttttcttctcttacctaaagtcaacctcttcacctgtccaggatggaacgtgctctggggatttggagctgtttc

SEQ ID NO: 66672 - DNA, 110 bp, synthetic construct
  source 1..110: mol_type = other DNA
tcaacctcttcacctgtccaggatggaacgtgctctggggatttggagctgtttcccctcactaaggccttgctttttggaagtatgacttccagatatttcctgtgctg

SEQ ID NO: 66673 - DNA, 110 bp, synthetic construct; identical to SEQ ID NO: 66671
  source 1..110: mol_type = other DNA

SEQ ID NO: 66674 - DNA, 110 bp, synthetic construct; identical to SEQ ID NO: 66672
  source 1..110: mol_type = other DNA

SEQ ID NO: 66675 - DNA, 110 bp, synthetic construct
  source 1..110: mol_type = other DNA
gctgaagtagccagagaaaaagatgctacctcaacaaagtgaaaagtagtagttgcaacagcataccgttagcatacagcatctgccattgtcaccctttaaataacaat

SEQ ID NO: 66676 - DNA, 110 bp, synthetic construct
  source 1..110: mol_type = other DNA
caacagcataccgttagcatacagcatctgccattgtcaccctttaaataacaattaccagtgaaccatgagaagacagctttacccaaagggatttcctgcaaatcctt

SEQ ID NO: 66677 - DNA, 110 bp, synthetic construct
  source 1..110: mol_type = other DNA
aaactttttctccattttataatcttgcgtcctttgtcctaaattaactgatcctaggggcacaggtttatttctatcctgttccactaatctatgtgtctgcttttgtg

SEQ ID NO: 66678 - DNA, 110 bp, synthetic construct; identical to SEQ ID NO: 66677
  source 1..110: mol_type = other DNA

SEQ ID NO: 66679 - DNA, 110 bp, synthetic construct
  source 1..110: mol_type = other DNA
ttattcttcgaaaatggagcccagttttctttccttcaaagtcagcattccaggaaagcaatggatattgataagtagaacattcatgtaatagctatggtaaaaccaca

SEQ ID NO: 66680 - DNA, 110 bp, synthetic construct
  source 1..110: mol_type = other DNA
ttcagcttgtgatttttattttcccagaagagaggaaactctctcttccattcctaagaattgttcactttaatatgattgggccaaattaagtcctaggtaactgccct

SEQ ID NO: 66681 - DNA, 110 bp, synthetic construct
  source 1..110: mol_type = other DNA
ggtgggcaaacagctggtgtgtttggggcctctacaaactcctgcacggcgagtatcacaggactcaatgagaagtcaagggtgttgcttcttgagaatcaaaattactc

SEQ ID NO: 66682 - DNA, 110 bp, synthetic construct
  source 1..110: mol_type = other DNA
tatggcataagagaataaaaatgtattcagagtatttaaaaaatgggactctaggacccaaatttagaagaatgctttcctccgagagaaagatttaggaaacaggttga

SEQ ID NO: 66683 - DNA, 110 bp, synthetic construct
  source 1..110: mol_type = other DNA
acccaaatttagaagaatgctttcctccgagagaaagatttaggaaacaggttgatattggccttcaattttctatgcttatttcttacccaaaaagatctgagataact

SEQ ID NO: 66684 - DNA, 110 bp, synthetic construct
  source 1..110: mol_type = other DNA
ggtattttttacagctagcattagcagtatgcagttattgcctagaattcacaattgtgattcaagatgtatcaattttgtaatggtttataagtttttaaaacccagag

SEQ ID NO: 66685 - DNA, 110 bp, synthetic construct
  source 1..110: mol_type = other DNA
accttgagctttaatccagttttctcttcctgtgtcctgccttacttttagcttttgttacccacatcctcaaggcgatagcaaattgttcttcaggttggtcactgttt

SEQ ID NO: 66686 - DNA, 110 bp, synthetic construct
  source 1..110: mol_type = other DNA
tgttacccacatcctcaaggcgatagcaaattgttcttcaggttggtcactgtttcaattttgggggaatggacacttgatttataattccctctaagaaagagtaatct

SEQ ID NO: 66687 - DNA, 110 bp, synthetic construct
  source 1..110: mol_type = other DNA
tgaattcatttctactgtgccatgacgggaactcctgaaatagttatttgacgatttcagaggttttgagaaattgtagccaatcctttttcttactgacactgggagat

SEQ ID NO: 66688 - DNA, 110 bp, synthetic construct
  source 1..110: mol_type = other DNA
ttcagaggttttgagaaattgtagccaatcctttttcttactgacactgggagattcacccctaatctcgttggtcctggatggttgtctagtattgttgcagatggtga

SEQ ID NO: 66689 - DNA, 110 bp, synthetic construct
  source 1..110: mol_type = other DNA
ctttcctgcctttgtgatttatgcacatcgcttttgagttttgtgtgtttatgcacctctgtaaatctgggattgttactttcatgtgtagacctggcaaggccagcata

SEQ ID NO: 66690 - DNA, 110 bp, synthetic construct
  source 1..110: mol_type = other DNA
gtttataaccctctgagccaaaataggaactccataaccatctttatcttaaagtctatttttcctgagataactagtcaggatttcttctgatgtccatttacatgaaa

SEQ ID NO: 66691 - DNA, 110 bp, synthetic construct
  source 1..110: mol_type = other DNA
ctatttttcctgagataactagtcaggatttcttctgatgtccatttacatgaaatacctttttccattccctcactttcagtctgtatatgtccctagatctgaagtta

SEQ ID NO: 66692 - DNA, 110 bp, synthetic construct
  source 1..110: mol_type = other DNA
tcttgcaaacctcttcacactttcttcatcatatttttcacatgtagctaatacagcagaattgtatgaggggatccaaagtttgattcctttttctctttgttgtagtt

SEQ ID NO: 66693 - DNA, 110 bp, synthetic construct
  source 1..110: mol_type = other DNA
ctatatacaatggttacacaatgtcacatatacataatgaaatgaacatacatcaaaagcactatgtaactaagcttttgccgctgttatgatcttgacctttctcccca

SEQ ID NO: 66694 - DNA, 110 bp, synthetic construct
  source 1..110: mol_type = other DNA
aaagcactatgtaactaagcttttgccgctgttatgatcttgacctttctccccagggtcacggcattgtcctgatgggtctgttacagcttcaccaccactgggctgta

SEQ ID NO: 66695 - DNA, 110 bp, synthetic construct
  source 1..110: mol_type = other DNA
taaacgtgtgaaaagaggaaacatctctgtcaggacaaatagttaatcccttccctagggccgtctgagcatacagtttatagctacccatagtattgatggtttgcttt

SEQ ID NO: 66696 - DNA, 110 bp, synthetic construct
  source 1..110: mol_type = other DNA
ggaggatataggacagagcaataccaggtaggggataaggggtacaaactcgtgggtctaagatagactacaaggatgtattgtacaacaagagggtgctagccaatatt

SEQ ID NO: 66697 - DNA, 110 bp, synthetic construct
  source 1..110: mol_type = other DNA
aaactcgtgggtctaagatagactacaaggatgtattgtacaacaagagggtgctagccaatattttttaataactgtcaatggagtataacctttaaaaattgtataaa

SEQ ID NO: 66698 - DNA, 110 bp, synthetic construct
  source 1..110: mol_type = other DNA
ccataacacatgcatgatattaaatcactaaaaatctatgaatgtgtgctggcctgtataaccaagggttcaattatatgagaacaaaaattagcttaatggagtcagct

SEQ ID NO: 66699 - DNA, 110 bp, synthetic construct
  source 1..110: mol_type = other DNA
gtgctggcctgtataaccaagggttcaattatatgagaacaaaaattagcttaatggagtcagctagcctatatacatattttttgtatcatttcatatctttctcttgc

SEQ ID NO: 66700 - DNA, 110 bp, synthetic construct
  source 1..110: mol_type = other DNA
tgtgcaaactcctgtcggtctttgtgtatgtgctacctttccacgggttcctctgcacccctggctaatgctcaatcatcaattcatttgcacaagtatcaaaacatacg

SEQ ID NO: 66701 - DNA, 110 bp, synthetic construct
  source 1..110: mol_type = other DNA
tctagttccgtgggaggggggccaaatgctgactttccacacagaggtggccccgccacctgctctgactggacatctctgagaagagtgctgaagtgtacatttcaagc

SEQ ID NO: 66702 - DNA, 110 bp, synthetic construct
  source 1..110: mol_type = other DNA
gtcacaagagctggctgattctccctgattcttttcagctctgtaaacctaaacggataatcccgacttcctccttaaaataaatagaataataagactgaactcaaagt

SEQ ID NO: 66703 - DNA, 110 bp, synthetic construct
  source 1..110: mol_type = other DNA
aaggcctgctcctaggtgggcaaaagaggccttctctgcaaacactatccccacggcttccctcccatcacgtctcagggcttatgggttacagacctgaagcatgggta

SEQ ID NO: 66704 - DNA, 110 bp, synthetic construct
  source 1..110: mol_type = other DNA
aaattgaaggactgggagagggatgagaagggcaaagtggtcctagcttacttcagtattgctcagaggagggaactgcttgtaagcagccctccaccctgcaaaaggcg

SEQ ID NO: 66705 - DNA, 110 bp, synthetic construct
  source 1..110: mol_type = other DNA
gtattgctcagaggagggaactgcttgtaagcagccctccaccctgcaaaaggcgcggggacaaagcagttacacaaaaacattaatgcagatgcgattattacaaaaaa

SEQ ID NO: 66706 - DNA, 110 bp, synthetic construct
  source 1..110: mol_type = other DNA
ccagagtacatatttctccttctgtcagcgccaggaaaccattaaaatttatgtatgagtaatcattaataggatttctgtggctctttctctgggtgcaagttttgggg

SEQ ID NO: 66707 - DNA, 110 bp, synthetic construct
  source 1..110: mol_type = other DNA
gaaacgcagcagccattcgggcatctaggtagaatagaaaacggttccttgcttctaccatctgagttttgtcttttacatttgagtcccaggtagaggaggtgtttcac

SEQ ID NO: 66708 - DNA, 110 bp, synthetic construct
  source 1..110: mol_type = other DNA
taccatctgagttttgtcttttacatttgagtcccaggtagaggaggtgtttcacgttcaagccgttagtctgtgcttctctgcagagggccaggaccaagcctctcact

SEQ ID NO: 66709 - DNA, 110 bp, synthetic construct
  source 1..110: mol_type = other DNA
gttacgtcttgatttttcagtcttaggtttgtctggtgactttcccttatggatgaaggtttaactctatctcctttcatcacacacaggaccctgacagcctccgtctt

SEQ ID NO: 66710 - DNA, 110 bp, synthetic construct
  source 1..110: mol_type = other DNA
tctctggggctccgattctctcagctcggggagcatggacctctctttggagatatcaacgtaaaggtatgtaaaagataagcacttttgcaaggcccgacaggtagtgc

SEQ ID NO: 66711 - DNA, 110 bp, synthetic construct
  source 1..110: mol_type = other DNA
aggagtctgttttgctattctggtttgtttcattttttagatggtcactacccataaaatgtaacagaggctcttctgcggtttccttatcctgcctcaaatgcgctttt

SEQ ID NO: 66712 - DNA, 110 bp, synthetic construct
  source 1..110: mol_type = other DNA
aaaatgtaacagaggctcttctgcggtttccttatcctgcctcaaatgcgcttttgacctggaggcagaaatgctatgaataacaacatctagtcacccacgctcgctct

SEQ ID NO: 66713 - DNA, 110 bp, synthetic construct; identical to SEQ ID NO: 66711
  source 1..110: mol_type = other DNA

SEQ ID NO: 66714 - DNA, 110 bp, synthetic construct; identical to SEQ ID NO: 66712
  source 1..110: mol_type = other DNA

SEQ ID NO: 66715 - DNA, 110 bp, synthetic construct
  source 1..110: mol_type = other DNA
accccgccgtctcatctgccaggaccaactactgcagagaacactccccacttatttccagtctgagctgcttcttcctccgagggctgggacctcgatttgctacatag

SEQ ID NO: 66716 - DNA, 110 bp, synthetic construct
  source 1..110: mol_type = other DNA
ttccagtctgagctgcttcttcctccgagggctgggacctcgatttgctacataggcctttgtgcttgaccacagtccttgtcagtagcagagcagaagaaatggactgg

SEQ ID NO: 66717 - DNA, 110 bp, synthetic construct
  source 1..110: mol_type = other DNA
cctgtgacgacagaaggaaggcttcaagcaacaaaactccacggtactgtaacatcatttcagacctctgggaaggggtcacgctccctcgaaaatcattgtcctttcca

SEQ ID NO: 66718 - DNA, 110 bp, synthetic construct
  source 1..110: mol_type = other DNA
catttcagacctctgggaaggggtcacgctccctcgaaaatcattgtcctttccagattcttgccattagaattcggagcaggttcagtgtctctggcttggccttggac

SEQ ID NO: 66719 - DNA, 110 bp, synthetic construct
  source 1..110: mol_type = other DNA
cttattacatcacaatcagactagcttccttttcttggcacactagctgctacgtgtggaaaaaccctttacaacgattgctaattcaggaacacctcaaatagaaaaca

SEQ ID NO: 66720 - DNA, 110 bp, synthetic construct
  source 1..110: mol_type = other DNA
ccgtgtaaccagcccgcctccatcgactgaggcggctcggtcaacagacggctcttggtgcggttaatgaccttgtcatttttaccctgtggctttctctgtctccctca

SEQ ID NO: 66721 - DNA, 110 bp, synthetic construct
  source 1..110: mol_type = other DNA
tggtgcggttaatgaccttgtcatttttaccctgtggctttctctgtctccctcacccgtccagttaatgaaattgccatcagtctcttccccaccgggtgaagattaat

SEQ ID NO: 66722 - DNA, 110 bp, synthetic construct
  source 1..110: mol_type = other DNA
tagaggagaccccaaggtccttagctggtaaacggcagggctgagattggaatccaggtctgttagattctaaatctgccactattttccactcagtcctacgtacacat

SEQ ID NO: 66723 - DNA, 110 bp, synthetic construct
  source 1..110: mol_type = other DNA
actgcaccagccccatctgctcccccttctccttccgcctcccctccctctcttctaaacactcgggaagaaaacaagccggagctttacctggaatacctgtgctgctt

SEQ ID NO: 66724 - DNA, 110 bp, synthetic construct
  source 1..110: mol_type = other DNA
atttatccagtgtctggctcattatttggaggaggttaacaggaattagaaaactggcactgatcagcttgaaaagctgggaagttggggctgatatgtggccccggctc

SEQ ID NO: 66725 - DNA, 110 bp, synthetic construct
  source 1..110: mol_type = other DNA
tgcattcccggggggcatagctctgtacttcaaggacatttatgagaacaaaatgccaagtgagaacagcagggacagtccctgaactgcctgtaaacaaaaaggctcat

SEQ ID NO: 66726 - DNA, 110 bp, synthetic construct
  source 1..110: mol_type = other DNA
acctgaaaaacatgtagcgttttattagccgtcaggcaacacttggtgaatgtgggcaataaagttcactcgcctgcgttcctgctcatctttcttctttccactgctcg

SEQ ID NO: 66727 - DNA, 110 bp, synthetic construct
  source 1..110: mol_type = other DNA
gcaataaagttcactcgcctgcgttcctgctcatctttcttctttccactgctcgctcttatccccccttctctttagttctctgactttcccgcttctttttctttctt

SEQ ID NO: 66728 - DNA, 110 bp, synthetic construct
  source 1..110: mol_type = other DNA
acggtgacagatggcatttgatgctgctcacagaggaagaaaaccaccattgcgtgaactttgccaaaagagaatgaagacaacttagtaagtcgacatataaaggcagg

SEQ ID NO: 66729 - DNA, 110 bp, synthetic construct
  source 1..110: mol_type = other DNA
aatagataatcatcagctttcttcatacatagcttaaaatgtggctttgatgattctgctctactaggagaaaaatcggtaacaaaatctgtgatcctaaaaaaccttgt

SEQ ID NO: 66730 - DNA, 110 bp, synthetic construct
  source 1..110: mol_type = other DNA
aacaggatcaaaatcatgtgtccatcatcgcatttaattcactagtggaagatacttataagctcatcattaaattcaatgtagaagttctctgtgttcattgaaactat

SEQ ID NO: 66731 - DNA, 110 bp, synthetic construct
  source 1..110: mol_type = other DNA
cctctttcatgcctggtacctcactcctcttcccattattctgcatttaagcagcctccgtgcctggctgtgcgtgcgtgtgcgtgtgtgcgtgcgcgtgcacatgtgtg

SEQ ID NO: 66732 - DNA, 110 bp, synthetic construct
  source 1..110: mol_type = other DNA
ctccgtgcctggctgtgcgtgcgtgtgcgtgtgtgcgtgcgcgtgcacatgtgtgttgaggaggacgtggtctgtcttgctagccacgtggacgctaatttgtcctgacg

SEQ ID NO: 66733 - DNA, 110 bp, synthetic construct
  source 1..110: mol_type = other DNA
acctcagtgatataaacttagaatcagaaatgagatattctgactgaaaagtatatcctgtgatgacagtgaatagattagctcttaaatgccagaatttccatcagtct

SEQ ID NO: 66734 - DNA, 110 bp, synthetic construct
  source 1..110: mol_type = other DNA
tcctgtgatgacagtgaatagattagctcttaaatgccagaatttccatcagtctcaccaatattcaataaaaagaccagcattactagacctattactgtatccttttt

SEQ ID NO: 66735 - DNA, 110 bp, synthetic construct
  source 1..110: mol_type = other DNA
agcagtcgaacacagaggttacaaacccagactctgcccaagttcaacacccagcccttccatttttgagctgtgaaagcttgggcaggtggcccctctgtgtgtcagct

SEQ ID NO: 66736 - DNA, 110 bp, synthetic construct
  source 1..110: mol_type = other DNA
tcctttagccatttgcttatgcaaacatcttctgagagcctgttacaaatttccagggccagacaccaaatgagctaagttctgagacctacatggaattagtgtagccc

SEQ ID NO: 66737 - DNA, 110 bp, synthetic construct
  source 1..110: mol_type = other DNA
gggccagacaccaaatgagctaagttctgagacctacatggaattagtgtagccctaccgccaagcaccttaccacctaaaaggtgcataggtttctgtaagtgccatgg

SEQ ID NO: 66738 - DNA, 110 bp, synthetic construct; identical to SEQ ID NO: 66736
  source 1..110: mol_type = other DNA

SEQ ID NO: 66739 - DNA, 110 bp, synthetic construct; identical to SEQ ID NO: 66737
  source 1..110: mol_type = other DNA

SEQ ID NO: 66740 - DNA, 110 bp, synthetic construct
  source 1..110: mol_type = other DNA
caatgtgcctggcctggacatcggccccaatctcgtccaggatgaaggggatgatgtgtggcttcacggccaggaacaggacatcgctgtgcctcactgtctccttgttg

SEQ ID NO: 66741 - DNA, 110 bp, synthetic construct
  source 1..110: mol_type = other DNA
gtgtggcttcacggccaggaacaggacatcgctgtgcctcactgtctccttgttgctccgggtcaggttcacccccatcttctgcaagaggagactgctgggctcagggt

SEQ ID NO: 66742 - DNA, 110 bp, synthetic construct
  source 1..110: mol_type = other DNA
tgacttcagagtcatcacaggctaaactcgtccttggcttcctcctcctttaatgtcttgggatatatttattcagaacaggatggcttctttctatccttgtttcttgc

SEQ ID NO: 66743 - DNA, 110 bp, synthetic construct
  source 1..110: mol_type = other DNA
tcctttaatgtcttgggatatatttattcagaacaggatggcttctttctatccttgtttcttgcttgagtttttcttcttaattgtcagttttgaaataatgaatctgt

SEQ ID NO: 66744 - DNA, 110 bp, synthetic construct
  source 1..110: mol_type = other DNA
atccagagcactctggcagtgtcagaacagccaacgatgcccgcaagcaccatctaaaatacaataaaaagctgtagagtctgagagaaacgtccgagcatagcgcctcc

SEQ ID NO: 66745 - DNA, 110 bp, synthetic construct
  source 1..110: mol_type = other DNA
gagaggggtcccccaggtgtggagtagcagcttgggcccgggatgatgtggtcctggatgccttacgtcttccctctactgcggggacagaaggtcccctctgcccaccc

SEQ ID NO: 66746 - DNA, 110 bp, synthetic construct
  source 1..110: mol_type = other DNA
ggatgccttacgtcttccctctactgcggggacagaaggtcccctctgcccacccttcattatttttcttccatgaacttgatgcttagaaagatttaagccatgataat

SEQ ID NO: 66747 - DNA, 110 bp, synthetic construct; identical to SEQ ID NO: 66745
  source 1..110: mol_type = other DNA

SEQ ID NO: 66748 - DNA, 110 bp, synthetic construct; identical to SEQ ID NO: 66746
  source 1..110: mol_type = other DNA

SEQ ID NO: 66749 - DNA, 110 bp, synthetic construct
  source 1..110: mol_type = other DNA
tgcctgaatcttagacacattcacaacctgtgacattcctttcttttgaggcttttcttttggattcctgacaccacactctcctggtttcttctacctcactagccact

SEQ ID NO: 66750 - DNA, 110 bp, synthetic construct
  source 1..110: mol_type = other DNA
tcttttggattcctgacaccacactctcctggtttcttctacctcactagccactctccatttctgcctcctccactgttcaagctctaaattttggatgccacaagatt

SEQ ID NO: 66751 - DNA, 110 bp, synthetic construct
  source 1..110: mol_type = other DNA
tttcatactgagtgtcacttcccttaagaacctctcttttctctgtcataccatgcaaatctttcatttctgtccagaccatattggttttgtcttattgaactcttggg

SEQ ID NO: 66752 - DNA, 110 bp, synthetic construct
  source 1..110: mol_type = other DNA
tgggtccttaactaggactcttcaatcagttctttgtgcaatcaagatggctatcaaaggctacataaggagtctccctgggaggcagaggcatctgggctggtgacctc

SEQ ID NO: 66753 - DNA, 110 bp, synthetic construct
  source 1..110: mol_type = other DNA
aaaggctacataaggagtctccctgggaggcagaggcatctgggctggtgacctcaccttactaaccaaggcccaagggcctatgggaggggctggggttttgcctgcag

SEQ ID NO: 66754 - DNA, 110 bp, synthetic construct
  source 1..110: mol_type = other DNA
acctttccccatttatatgcgagagtcacatataattttactatttttaaccctgggaactgaggtcataagctctgctgtatacctatgtggggactccctaaagtaga

SEQ ID NO: 66755 - DNA, 110 bp, synthetic construct
  source 1..110: mol_type = other DNA
ttccaccctaaggcaagtgagcgtccacagctcagtttcccaacatacactgaacattatcagccactacccctgggtgtctgcatgtacctaaagtcctccaaattatt

SEQ ID NO: 66756 - DNA, 110 bp, synthetic construct
  source 1..110: mol_type = other DNA
gtacagcatgatatttctacttctgtatagcatgctgctcaccaccaaaaatttagcttcaatctgtcatcatgcgattgacctttttacccgtgttggctccctccccc

SEQ ID NO: 66757 - DNA, 110 bp, synthetic construct
  source 1..110: mol_type = other DNA
tttctgccttgaaaaatactttttttgcatttttcagcgttacacaagatatcggagctaaactgtgatttctgtttttactcaaccaacaacaaaaaatcactagcaac

SEQ ID NO: 66758 - DNA, 110 bp, synthetic construct
  source 1..110: mol_type = other DNA
tcctgctgttgaactgctacttgtcccacaaggaacattggatctgtttctgaattgagtcccaacatgcatgtcataagctgtttcatgcatatcttaagcttgagtat

SEQ ID NO: 66759 - DNA, 110 bp, synthetic construct
  source 1..110: mol_type = other DNA
tgagtcccaacatgcatgtcataagctgtttcatgcatatcttaagcttgagtatcctctgtctatgtgtgaaaatcatgtccagatacatggaagaaaatgtggtagag

SEQ ID NO: 66760 - DNA, 110 bp, synthetic construct
  source 1..110: mol_type = other DNA
ttgtccttagatctcaccttgccagttctccagctccctcctagacagcaaatatatctatgtcattataaaaaatactcacttcaccttactacacactccacctgcaa

SEQ ID NO: 66761 - DNA, 110 bp, synthetic construct
  source 1..110: mol_type = other DNA
acccccaagccagggaaataagtgctcaacaaaaaaactctctccaaatagctgacttataaaaatctgttaggataaaaagttcagagaaacttaaaactgacaatgaa

SEQ ID NO: 66762 - DNA, 110 bp, synthetic construct
  source 1..110: mol_type = other DNA
cttataaaaatctgttaggataaaaagttcagagaaacttaaaactgacaatgaaagagaccgcagtctttgaaggtgaatcaaaaaggaaaaaagctgtaaatactgag

SEQ ID NO: 66763 - DNA, 110 bp, synthetic construct
  source 1..110: mol_type = other DNA
gatgcttccggaggccggagctgctgccccaggccctgcaggttcccacaagccctggtcgaggctaagggctttatgctgcattcggaggatgaacctccttggaggtt

SEQ ID NO: 66764 - DNA, 110 bp, synthetic construct
  source 1..110: mol_type = other DNA
gtgcaaggccatgggtcacagctctttgtgtgcccttgacctgcacttcctcccggttgctgaatggttcatctggcctcttggtgaaggtcatggcgaccttgacctgc

SEQ ID NO: 66765 - DNA, 110 bp, synthetic construct
  source 1..110: mol_type = other DNA
aggcagttcatagcctctgccgtctccagaactggctgaggccacatgaatgaaaagcacaggtcttaaacgtttgaatccaagctctatcactgacagcatcatcttgg

SEQ ID NO: 66766 - DNA, 110 bp, synthetic construct
  source 1..110: mol_type = other DNA
taattacatcttcgaatacatcgtgttctcttacctctgaaagtgtctgtatatcttattccttctgtctagaaaactatgtgtatctttaaacccctgcagcagtattt

SEQ ID NO: 66767 - DNA, 110 bp, synthetic construct
  source 1..110: mol_type = other DNA
ttattccttctgtctagaaaactatgtgtatctttaaacccctgcagcagtatttccttcttgccaaaaccttccctagttctcttggattctggtcctctttctgctcc

SEQ ID NO: 66768 - DNA, 110 bp, synthetic construct
  source 1..110: mol_type = other DNA
aattcttattacctcatcagaaatctacaggcagccctttctgattaaatcattaaataagcattaacagcacaatgcctagtaagtatttatggacagtccagcacaga

SEQ ID NO: 66769 - DNA, 110 bp, synthetic construct
  source 1..110: mol_type = other DNA
aataagcattaacagcacaatgcctagtaagtatttatggacagtccagcacagataagcagctcatcatttttcatgccaataaaaaagcgaagctggagttttgctcc

SEQ ID NO: 66770 - DNA, 110 bp, synthetic construct
  source 1..110: mol_type = other DNA
cctctttctcaagatgggctcttctcggtggtttgtattcttttttcattctctgtgatttgactctgcttgctaggtcctctctgaacacttaggccatttacaattct

SEQ ID NO: 66771 - DNA, 110 bp, synthetic construct
  source 1..110: mol_type = other DNA
tgatttgactctgcttgctaggtcctctctgaacacttaggccatttacaattctgcctcaggcttcacttcctgcttgcactgagtttgttcatccagtagggaaagtt

SEQ ID NO: 66772 - DNA, 110 bp, synthetic construct
  source 1..110: mol_type = other DNA
aggaccattctggtctgtaaggcttccccagggaccaccaaagccccctcccccaggccggcactggcttggttgccttttccattcacctggctgaagggactcgtgtc

SEQ ID NO: 66773 - DNA, 110 bp, synthetic construct
  source 1..110: mol_type = other DNA
ggccggcactggcttggttgccttttccattcacctggctgaagggactcgtgtcaggcctgggaggaatcttagaccctgtcaacctggctgtgacagatgaggtcatg

SEQ ID NO: 66774 - DNA, 110 bp, synthetic construct
  source 1..110: mol_type = other DNA
aatagattagcaacaaggtcctgctgtacagggaactgaatatccagtctcttgtgatggaacatgatggaagatggtgtgagataaagaatgtatatatgtaggacccg

SEQ ID NO: 66775 - DNA, 110 bp, synthetic construct
  source 1..110: mol_type = other DNA
gatggaacatgatggaagatggtgtgagataaagaatgtatatatgtaggacccggtcactttgccgaagagcagaaatggacagaacaatgtaaagcaactataatttt

SEQ ID NO: 66776 - DNA, 110 bp, synthetic construct
  source 1..110: mol_type = other DNA
tgcgggtgcgtctgtgccacagtggggccacctgcttgaattttacccaatgtgtgtccatcttctctctcatttgatatgcatggctcacgtttttacagctgagggtt

SEQ ID NO: 66777 - DNA, 110 bp, synthetic construct
  source 1..110: mol_type = other DNA
gtccatcttctctctcatttgatatgcatggctcacgtttttacagctgagggttctgagtttcagagaagcttaggtaacgtggccaaggtccgccagctggaaggcag

SEQ ID NO: 66778 - DNA, 110 bp, synthetic construct
  source 1..110: mol_type = other DNA
ccactgctgctgtttaagtgaataaatggccaacttctaagtcagctaattcatctcaacatctagacttcttgcttctcttaaaaatcaaagggattgacaataccagt

SEQ ID NO: 66779 - DNA, 110 bp, synthetic construct
  source 1..110: mol_type = other DNA
accatgggcatggcaaaaaaaaaaaaaaaagaatgtaactatgcccaaataaatacggcaggaataccattcaacctaacaacgtaagaagaccacagtatctcaagtgt

SEQ ID NO: 66780 - DNA, 110 bp, synthetic construct
  source 1..110: mol_type = other DNA
cggcaggaataccattcaacctaacaacgtaagaagaccacagtatctcaagtgtttctcaacactatcttgaatgctttttagcttgaataaaaaaaactctttactgt

SEQ ID NO: 66781 - DNA, 110 bp, synthetic construct
  source 1..110: mol_type = other DNA
cctttgccggataagcccaagctggttataaacaaacctggggtattttgatcactttctggcatcttaacagttgtggcgatcatgctcaaagatcccgactagtttga

SEQ ID NO: 66782 - DNA, 110 bp, synthetic construct
  source 1..110: mol_type = other DNA
tttctggcatcttaacagttgtggcgatcatgctcaaagatcccgactagtttgacaggtgcatcacgtgggggcctcctcgggggcctaaagtccacctgatctccaag

SEQ ID NO: 66783 - DNA, 110 bp, synthetic construct
  source 1..110: mol_type = other DNA
ggaggtcagatctagagagggactggggctggctgagatgagacaacctgagggagctaggtgggctgcactgtaacagaggagactaggaagaagcctgggcccacaaa

SEQ ID NO: 66784 - DNA, 110 bp, synthetic construct
  source 1..110: mol_type = other DNA
gctaggtgggctgcactgtaacagaggagactaggaagaagcctgggcccacaaaagaggcacagcaccattgttggagggcacaagaagggaggtgtggggccactgga

SEQ ID NO: 66785 - DNA, 110 bp, synthetic construct
  source 1..110: mol_type = other DNA
cattataccatgctcagaagttttctcatgtatttataataatttctgctgagctcttgtgtcttccctgttgcttactttctgaattaaaagtctgaaaaataaagttg

SEQ ID NO: 66786 - DNA, 110 bp, synthetic construct
  source 1..110: mol_type = other DNA
tcggattcattaaccactgagccacaatgggaactccctcttttgctggtcattctgacctctaagcacgttacctcattctagaaacaatgctctgtttggctgtcccc

SEQ ID NO: 66787 - DNA, 110 bp, synthetic construct; identical to SEQ ID NO: 66786
  source 1..110: mol_type = other DNA

SEQ ID NO: 66788 - DNA, 110 bp, synthetic construct
  source 1..110: mol_type = other DNA
ctcccaagtctttggaacatagaccaatcggtgcagtgggaagcaagcaggacgttatgttcagggcgggcataggtgggtgcagtgtgtgatgcacgacagccccaggg

SEQ ID NO: 66789 - DNA, 110 bp, synthetic construct
  source 1..110: mol_type = other DNA
cctgctactgcaacaactgagtttccaacaccctccagatagagagtagaagaataagtgatgacatgtaaaaagattgaggtttaagaagggtgttcagagaggtaatt

SEQ ID NO: 66790 - DNA, 110 bp, synthetic construct
  source 1..110: mol_type = other DNA
agatgtgtacttactgccactttgtaaactgacttttttgtatttcttcactgttctttttcttgtagtttcctcccttgtagttcgattatttcctttaatcgtataat

SEQ ID NO: 66791 - DNA, 110 bp, synthetic construct
  source 1..110: mol_type = other DNA
tctctcttacttctctgtagttcccataagtacatgcatgagctaatatgaaagtatgctcatactaccctgctggagagaaataagaactttaagaaggaaaaccaatt

SEQ ID NO: 66792 - DNA, 110 bp, synthetic construct
  source 1..110: mol_type = other DNA
ccagctgtggctccagttctaaaatatggtgagcctcctggggccgagacaaaaccccttttacttatcaagacatgaccacacttggcttggagtcaagagggcttcct

SEQ ID NO: 66793 - DNA, 110 bp, synthetic construct
  source 1..110: mol_type = other DNA
cccttttacttatcaagacatgaccacacttggcttggagtcaagagggcttcctggggaaagtcgttgccatctgaaggctgggtagaagtgaaaataaaacaatgccc

SEQ ID NO: 66794 - DNA, 110 bp, synthetic construct
  source 1..110: mol_type = other DNA
taatgtcgaggctctcgagcatgccaagcttcagaaggacggcaaagacttcgcttccccctttttctaaataatgcaagacagccgctttaccattcctatgtattttc

SEQ ID NO: 66795 - DNA, 110 bp, synthetic construct
  source 1..110: mol_type = other DNA
gcagaatgcctgggctctcctactcaggcccggggcagtgtctttaactttcttggtctgtacacggactttcacgaccgacgtgaacatcggaggctcaactcctgaag

SEQ ID NO: 66796 - DNA, 110 bp, synthetic construct
  source 1..110: mol_type = other DNA
ccagtgctgccacttcaccctggaagacatgctctacgccgcttcctccatcaaggtgccaagtcattcccgcagcctcccctgtgcttcacgcttgttgcagaaacata

SEQ ID NO: 66797 - DNA, 110 bp, synthetic construct
  source 1..110: mol_type = other DNA
gtgccaagtcattcccgcagcctcccctgtgcttcacgcttgttgcagaaacatataacttgatgcgtaaacagtctagcagcttgaagttaacagaattaactaatttc

SEQ ID NO: 66798 - DNA, 110 bp, synthetic construct
  source 1..110: mol_type = other DNA
aagcaggtgcacagtagagacatttaaatctttcacgcaaattcctgagcacgagggtttgggctgatcccacttaggagcttctatcagtggagggtccttgctcagct

SEQ ID NO: 66799 - DNA, 110 bp, synthetic construct
  source 1..110: mol_type = other DNA
ggtttgggctgatcccacttaggagcttctatcagtggagggtccttgctcagctgagagggaggggtggggacagaccatgtgtcccccatccttccacccagccacct

SEQ ID NO: 66800 - DNA, 110 bp, synthetic construct
  source 1..110: mol_type = other DNA
agtgccagcggctcaggggaactagtccagtaaagagcgtactcagagatcttcattgttcagatgcggggggcacctaacacgggccccagcatctctgtcccctactg

SEQ ID NO: 66801 - DNA, 110 bp, synthetic construct
  source 1..110: mol_type = other DNA
ttgttcagatgcggggggcacctaacacgggccccagcatctctgtcccctactgtgacacctttgtgtgcatcttggagggtttatcccccgccatccgtgtgtttctg

SEQ ID NO: 66802 - DNA, 110 bp, synthetic construct
  source 1..110: mol_type = other DNA
agtagtaaacccatcacaagaaaagaacccacacagcccacatagggggcatcccatatcatatagctctggtgaccagaggggaccacactgctgggatgcacaggaca

SEQ ID NO: 66803 - DNA, 110 bp, synthetic construct
  source 1..110: mol_type = other DNA
aaaaaaaaaacaaaaaaaaccagcagcttttgttctgctgtagcaaaacaaccttgcacagccagcagcagagttctaagtccaagtgtcaaaccaggctctcctaaacc

SEQ ID NO: 66804 - DNA, 110 bp, synthetic construct
  source 1..110: mol_type = other DNA
tctcagaacagcctgtgtagtgttctctctgcattgtttctcatggatgaagtagcatcacatgtgttcacaggttatccaaacagaagagcaaattcttattttgagtc

SEQ ID NO: 66805 - DNA, 110 bp, synthetic construct
  source 1..110: mol_type = other DNA
tgcttatgatcagttgatctatgaccaaggaggcaagagtataaaatagaaaaaagacagtgccttcaaaagtagtcctgggaaaattggacagctacctgggaaagaat

SEQ ID NO: 66806 - DNA, 110 bp, synthetic construct
  source 1..110: mol_type = other DNA
caaggaggcaagagtataaaatagaaaaaagacagtgccttcaaaagtagtcctgggaaaattggacagctacctgggaaagaataaattagaacattctctaataccat

SEQ ID NO: 66807 - DNA, 110 bp, synthetic construct
  source 1..110: mol_type = other DNA
cttttcattcttttttttttttctttcctaactgttctagctagaacttccagtactatattgaataatagtatgagagtaggtatcccagtcttgctcctgatattaga

SEQ ID NO: 66808 - DNA, 110 bp, synthetic construct
  source 1..110: mol_type = other DNA
ctatattgaataatagtatgagagtaggtatcccagtcttgctcctgatattagatgaaaagcttttcaatttgccatatatggcctttgttatattgaggtatattctt

SEQ ID NO: 66809 - DNA, 110 bp, synthetic construct
  source 1..110: mol_type = other DNA
atttacaagatcaacacagaaaatacatatctgttttctctacacacacacatgtgtgtgtatctaaacctaaaaccctatacaaactttaagtcaaaatggatcataga

SEQ ID NO: 66810 - DNA, 110 bp, synthetic construct
  source 1..110: mol_type = other DNA
aaatattttaagcatctttctgctacttttttaggggaaaaatgtagccaaataatttggggggggggtgggtgctgcactcagagcatgcagaagttcctgggctgatt

SEQ ID NO: 66811 - DNA, 110 bp, synthetic construct
  source 1..110: mol_type = other DNA
ccatcttctcctgtgtcttcacatgatctaccctctgtgcaagtgtctgattcctaatctccaattcttagaaaaacatcagttgtattggattagagctccctctcctt

SEQ ID NO: 66812 - DNA, 110 bp, synthetic construct
  source 1..110: mol_type = other DNA
aatctccaattcttagaaaaacatcagttgtattggattagagctccctctccttgatctcattttattttttttgacctctttaaagatcccatctcccaatacagcca

SEQ ID NO: 66813 - DNA, 110 bp, synthetic construct
  source 1..110: mol_type = other DNA
attatatcaatctcttgtgaggaaacacgatggagggtaatatgagaaaaaaatgtatataaatatatacctaggtcactttgctgtactgcagacattgacagaatctc

SEQ ID NO: 66814 - DNA, 110 bp, synthetic construct
  source 1..110: mol_type = other DNA
cacgatggagggtaatatgagaaaaaaatgtatataaatatatacctaggtcactttgctgtactgcagacattgacagaatctcgtaaatcaaccataataatgctttt

SEQ ID NO: 66815 - DNA, 110 bp, synthetic construct
  source 1..110: mol_type = other DNA
aattaagactatttgtttcatcgagatcattccatttacagatactccaggctctaggcattatacataataggcacattcttcatttttaagacctttttctctttctg

SEQ ID NO: 66816 - DNA, 110 bp, synthetic construct
  source 1..110: mol_type = other DNA
tgagcagaaaggaggcaaatcatgggaggggctgggtacagaggccttggtaacagggattccagatctcagacaagctggggagagctgccacaacagggctagtcttg

SEQ ID NO: 66817 - DNA, 110 bp, synthetic construct
  source 1..110: mol_type = other DNA
ggagcacacttgtgtgcctcttaggtgcattctcctcccttctggctctgaaaatgggaaatagctgcgcatctggggaagcggcgagtgaatatccaaaggcctatact

SEQ ID NO: 66818 - DNA, 110 bp, synthetic construct
  source 1..110: mol_type = other DNA
gggaaatagctgcgcatctggggaagcggcgagtgaatatccaaaggcctatactatacttttttaaaactgatattctctgatccaccctgaagacgaagaaattgcta

SEQ ID NO: 66819 - DNA, 110 bp, synthetic construct
  source 1..110: mol_type = other DNA
aaatagctggtcactcttactcataggacttagagctgtagcaaagttggtaaggccacacaaactgctcgaatctgtattattgtgtgaggtgtgtatgttttgtgatg

SEQ ID NO: 66820 - DNA, 110 bp, synthetic construct
  source 1..110: mol_type = other DNA
ggccagccttgcatacaatggccacgtcaaagtattcaaatgagggccaggaggtccctaaagctgctttttattcatttaaagactcctggaaggaaagccaaggtctt

SEQ ID NO: 66821 - DNA, 110 bp, synthetic construct
  source 1..110: mol_type = other DNA
ctgggaggagcaggggacccacacctggagggggaggagcttggcttctattatgctgttagccctgagtgcaggactggcttccataggtttctgtgggtgagtctgag

SEQ ID NO: 66822 - DNA, 110 bp, synthetic construct
  source 1..110: mol_type = other DNA
ctccctcacccctcccaagaggttctggggaggggtgctggggggatttaacagggggtgtcagtaaagcctgagctgggaaagggcaacagcaaatgtcactttccctc

SEQ ID NO: 66823 - DNA, 110 bp, synthetic construct
  source 1..110: mol_type = other DNA
tgactgaacataaccccatccacatgaacacctgctgtcatacaattccttgttaaggaacttcatctatggtaggatctttgcagcttggagcacttgatatgtggagt

SEQ ID NO: 66824 - DNA, 110 bp, synthetic construct
  source 1..110: mol_type = other DNA
tacgtattacacacattcaccaggatgacttaaagaagtcaccaggaagcttgcccacaaaactgggactagggatatttgaaataacatccagtaatttcagagttatt

SEQ ID NO: 66825 - DNA, 110 bp, synthetic construct
  source 1..110: mol_type = other DNA
ttctgatgaagctcaaccatcccagaggaaaagaaatcaccctcctcatagtttccggtggctgtaacggatcatcacacgctggatgggttgaaacaataaaaagttac

SEQ ID NO: 66826 - DNA, 110 bp, synthetic construct
  source 1..110: mol_type = other DNA
ttaaattgtctgactttacaaggagctgttgttctacaagcattgaggaaccatcagttttaagcaataggttcttgtttcattgctaagaaggttgtctagtatatagt

SEQ ID NO: 66827 - DNA, 110 bp, synthetic construct
  source 1..110: mol_type = other DNA
tgtggctgtggagaaagctttaacatctgactcctcaggactgctcgggccgttggccccaggagagctgcggatgctctggggcttattggagaaatcatgtgactgtc

SEQ ID NO: 66828 - DNA, 110 bp, synthetic construct
  source 1..110: mol_type = other DNA
agttccccagctagaggtggaatcggagctgtagctccaggcctacgccacaacctcagcacttgagatctctgccacatctgcaacctacaccacagcttcaagcaatg

SEQ ID NO: 66829 - DNA, 110 bp, synthetic construct; identical to SEQ ID NO: 66828
  source 1..110: mol_type = other DNA

SEQ ID NO: 66830 - DNA, 110 bp, synthetic construct
  source 1..110: mol_type = other DNA
tacactgttggtgggaaggtagacagatgcagccactaggaaaaatagtatggcagtttcttaaaaaattaaaaataggactatgatgtgatatagcaatcagacttctg

SEQ ID NO: 66831 - DNA, 110 bp, synthetic construct
  source 1..110: mol_type = other DNA
tgtaaaagatcataagagactactatgtcagctgtgtgccaataaaatggacagtttagaagatatagggacaattttggaaatgtacagtctcccaaaaccgaaccagg

SEQ ID NO: 66832 - DNA, 110 bp, synthetic construct
  source 1..110: mol_type = other DNA
gggcatggcaagtaccccacttccgagcccatggtccgtgttcatggtcctagcagtggagtcgggaagcctcagggccagagtctgtcttgagcagctgcctcagggtc

SEQ ID NO: 66833 - DNA, 110 bp, synthetic construct
  source 1..110: mol_type = other DNA
ggtcctagcagtggagtcgggaagcctcagggccagagtctgtcttgagcagctgcctcagggtcccattatttgcctctggagtggataaacaatgagatcctgctgca

SEQ ID NO: 66834 - DNA, 110 bp, synthetic construct; identical to SEQ ID NO: 66832
  source 1..110: mol_type = other DNA

SEQ ID NO: 66835 - DNA, 110 bp, synthetic construct; identical to SEQ ID NO: 66833
  source 1..110: mol_type = other DNA

SEQ ID NO: 66836 - DNA, 110 bp, synthetic construct
  source 1..110: mol_type = other DNA
aagccctgagtgagcggaggaaaccccctatggacctcttgacagctctccattgaaatacttctcaaagatcagcaaacaggtgctctgtggtttttgtcctggaatct

SEQ ID NO: 66837 - DNA, 110 bp, synthetic construct
  source 1..110: mol_type = other DNA
gacagataattaactgaaaagttctcccagctgaagtcacaacccattaagaaatcagtttagtgggttgtgatgaggatatttctagtgaaagagactcaactgtacta

SEQ ID NO: 66838 - DNA, 110 bp, synthetic construct
  source 1..110: mol_type = other DNA
agcccaccctctctggagaagccagacagtctgggaaggcttatctctactcctggctccatcacaggacaggttcagagacagacacacacatccctggacctgggtcc

SEQ ID NO: 66839 - DNA, 110 bp, synthetic construct
  source 1..110: mol_type = other DNA
actaaagtctaactccataacaaatccatttccatttccctaccactcacagtggttctggtcccctgactgaactctgacttatgtgctatggccaaggaggctgatgg

SEQ ID NO: 66840 - DNA, 110 bp, synthetic construct
  source 1..110: mol_type = other DNA
ttctggtcccctgactgaactctgacttatgtgctatggccaaggaggctgatggagaacagtgacagaaagacccaataagcacaactctaggtctcagtttggtaatg

SEQ ID NO: 66841 - DNA, 110 bp, synthetic construct; identical to SEQ ID NO: 66839
  source 1..110: mol_type = other DNA

SEQ ID NO: 66842 - DNA, 110 bp, synthetic construct; identical to SEQ ID NO: 66840
  source 1..110: mol_type = other DNA

SEQ ID NO: 66843 - DNA, 110 bp, synthetic construct
  source 1..110: mol_type = other DNA
tcccccagcatagttgtacagagtcctctgaattttcttctgccctccatttcacctccggaggctcttttccaggtgtccaattgcagctgttattgcttccattaaat

SEQ ID NO: 66844 - DNA, 110 bp, synthetic construct
  source 1..110: mol_type = other DNA
ctccggaggctcttttccaggtgtccaattgcagctgttattgcttccattaaatttggcttcaaaaaggatactctgctatccttagcttttgacatagggggagcaaa

SEQ ID NO: 66845 - DNA, 110 bp, synthetic construct
  source 1..110: mol_type = other DNA
caaagagacacagcttcaattgttttctgttcctgtgtttggttcctagatcaggattcagcaaactttttctgtcctaggccgtttatgaaacatcttaggctttgcag

SEQ ID NO: 66846 - DNA, 110 bp, synthetic construct
  source 1..110: mol_type = other DNA
attcagcaaactttttctgtcctaggccgtttatgaaacatcttaggctttgcagagcatacagtttctgctgcaactactcattttgccatcatagcatgaaagcatcc

SEQ ID NO: 66847 - DNA, 110 bp, synthetic construct
  source 1..110: mol_type = other DNA
gagaaagtctccccttctccccatacccttcctgaccttgactcctcttgcccatgtagcatttatcccattgtttcagtagtgtttttaaaaatctattataacagcct

SEQ ID NO: 66848 - DNA, 110 bp, synthetic construct
  source 1..110: mol_type = other DNA
gtagcatttatcccattgtttcagtagtgtttttaaaaatctattataacagccttactgaggtataatggacaagcaataaaccgtacatactcaaagtgtagactatg

SEQ ID NO: 66849 - DNA, 110 bp, synthetic construct; identical to SEQ ID NO: 66847
  source 1..110: mol_type = other DNA

SEQ ID NO: 66850 - DNA, 110 bp, synthetic construct; identical to SEQ ID NO: 66848
  source 1..110: mol_type = other DNA

SEQ ID NO: 66851 - DNA, 110 bp, synthetic construct
  source 1..110: mol_type = other DNA
atactggatccttaacctgctaagctaagagagctccctctttggtcattcttacctcgtcaacctaacttcccatgcctatgctgttctgaggtgattgcaacaatttt

SEQ ID NO: 66852 - DNA, 110 bp, synthetic construct
  source 1..110: mol_type = other DNA
agaggggtcctctcgatacttctagaagctgggaagggactgtggactggggtgaggggatgggggatttggtgctcgtacctcagttctgtgaagctatccagagcttg

SEQ ID NO: 66853 - DNA, 110 bp, synthetic construct
  source 1..110: mol_type = other DNA
caggccagcctgttgacccctgcctgcagtcggccttccctgggctcctgtgctgacccgaccagcctgggcctgctgtggtttctcctttcgtgtgtgggcagaagtgt

SEQ ID NO: 66854 - DNA, 110 bp, synthetic construct
  source 1..110: mol_type = other DNA
acccgaccagcctgggcctgctgtggtttctcctttcgtgtgtgggcagaagtgtgtacctgagagcttggggggctgaccttgggcattaggctgtgttcttgtgcggg

SEQ ID NO: 66855 - DNA, 110 bp, synthetic construct
  source 1..110: mol_type = other DNA
aagggggtagttcctttagcctcctatctcccatccatgtttgcggcttagaggtagacttaactcccccagcttagaccctccacttacagaagctctcacattgagac

SEQ ID NO: 66856 - DNA, 110 bp, synthetic construct
  source 1..110: mol_type = other DNA
ctagggtgtggtgaatccatgaccttatcctggttaatttaacagaggagtgagtgtcgagcagcacctcatatggtcctgtccatttagcagcaagttgatgttaaggc

SEQ ID NO: 66857 - DNA, 110 bp, synthetic construct
  source 1..110: mol_type = other DNA
gtcgagcagcacctcatatggtcctgtccatttagcagcaagttgatgttaaggccctcgtttattccaggttttaagaaggactccatccttaggctggaaggggtgta

SEQ ID NO: 66858 - DNA, 110 bp, synthetic construct; identical to SEQ ID NO: 66856
  source 1..110: mol_type = other DNA

SEQ ID NO: 66859 - DNA, 110 bp, synthetic construct; identical to SEQ ID NO: 66857
  source 1..110: mol_type = other DNA

SEQ ID NO: 66860 - DNA, 110 bp, synthetic construct
  source 1..110: mol_type = other DNA
cagatgcctgctacctcctgtttgcatacatgttaggatgactttcggagctagtgatttcagtgaccgaagctttacacacgcagtagacaggtgcattcaacccgtga

SEQ ID NO: 66861 - DNA, 110 bp, synthetic construct
  source 1..110: mol_type = other DNA
gatttcagtgaccgaagctttacacacgcagtagacaggtgcattcaacccgtgacagctgctccctcctttttgtagccacccctggtggcctctattctccattccac

SEQ ID NO: 66862 - DNA, 110 bp, synthetic construct
  source 1..110: mol_type = other DNA
ttagagataggttggcctgacagctgtttaagcatattttgtcacacgggtagctgataccactaaatgctttgcatttccattttatccatctaactctacataattcc

SEQ ID NO: 66863 - DNA, 110 bp, synthetic construct
  source 1..110: mol_type = other DNA
aggtcctaggtgatgggaatgcagcttggacccttccacacagccccagcctttgaggcattttcagtttggccaatggtagtcccaaaggtaggtaagtgatagtcatg

SEQ ID NO: 66864 - DNA, 110 bp, synthetic construct
  source 1..110: mol_type = other DNA
cggcagcctgaatgttcctaccttgctaaatggcaggcaggtgggaggagaatgcctctcttcttactcacctcacactctgtggtgcattagctgtgcaagaacttgta

SEQ ID NO: 66865 - DNA, 110 bp, synthetic construct
  source 1..110: mol_type = other DNA
ctctcttcttactcacctcacactctgtggtgcattagctgtgcaagaacttgtaccaattgtctacacttgacctctgataggctttgtccggtacaacctgctgcttc

SEQ ID NO: 66866 - DNA, 110 bp, synthetic construct
  source 1..110: mol_type = other DNA
acaaaagaaaccctaatcaaatctttgtcacaagtacatcaagacagtgacagactgtagaatataaattgttcaggtctgaaaactactttttcaggagttatattggc

SEQ ID NO: 66867 - DNA, 110 bp, synthetic construct
  source 1..110: mol_type = other DNA
tgtagaatataaattgttcaggtctgaaaactactttttcaggagttatattggcttctgatatctccagccctactactgtgtggtagacactgccaggaaagaagcca

SEQ ID NO: 66868 - DNA, 110 bp, synthetic construct; identical to SEQ ID NO: 66866
  source 1..110: mol_type = other DNA

SEQ ID NO: 66869 - DNA, 110 bp, synthetic construct; identical to SEQ ID NO: 66867
  source 1..110: mol_type = other DNA

SEQ ID NO: 66870 - DNA, 110 bp, synthetic construct
  source 1..110: mol_type = other DNA
attcttagaatgagtttggctattgatgaaagctatgtaataacccatttgaggtcagaatttaattgtaccaagaatacttattcctccagagtcatggagatgcaaca

SEQ ID NO: 66871 - DNA, 110 bp, synthetic construct
  source 1..110: mol_type = other DNA
acccatctcaggtgcaggagcactcattttccaacagcactgaatttataaggccatcagagaggtgtaaatccacaatccatatagttgggaggagagatttcagcttt

SEQ ID NO: 66872 - DNA, 110 bp, synthetic construct
  source 1..110: mol_type = other DNA
atcagagaggtgtaaatccacaatccatatagttgggaggagagatttcagctttcctccttaactgaagagttgcttttagtatgggtgcctgtgctctttcctcatca

SEQ ID NO: 66873 - DNA, 110 bp, synthetic construct
  source 1..110: mol_type = other DNA
cctttgtctgtaaaaaaggtgaaaagtatttactccataacatttgtgaggattttatggtaaaagatgtaagttttcgtatggtatatgccaacgtgctaaactaaatt

SEQ ID NO: 66874 - DNA, 110 bp, synthetic construct
  source 1..110: mol_type = other DNA
tatggtaaaagatgtaagttttcgtatggtatatgccaacgtgctaaactaaattatagcacagtatatgcaagtgttctaatgtgggctagaaaagataataagtaatt

SEQ ID NO: 66875 - DNA, 110 bp, synthetic construct
  source 1..110: mol_type = other DNA
atgaggcttacagtcaagaccagaaaggaagtttaaagttcaattgagtacctttgcaagtattgagcgttctgtactttgcaatgtgaaaaatgtgccttggtcactat

SEQ ID NO: 66876 - DNA, 110 bp, synthetic construct
  source 1..110: mol_type = other DNA
gcaagtattgagcgttctgtactttgcaatgtgaaaaatgtgccttggtcactatcattgatttcttgaacaatgaagggtgtaaagagtgtcttgttgataccttataa

SEQ ID NO: 66877 - DNA, 110 bp, synthetic construct
  source 1..110: mol_type = other DNA
gcttgagcagggaaaacataaacaaatacaggcatctcagttccgcccagagaatttgcagaagctcgtgccaacaaagccataccagaaaagctgctggctgcagtgcc

SEQ ID NO: 66878 - DNA, 110 bp, synthetic construct
  source 1..110: mol_type = other DNA
ttgcagaagctcgtgccaacaaagccataccagaaaagctgctggctgcagtgcccattccctcaagagggctactggtgcctgcttggtaattggagttgtagtctgcc

SEQ ID NO: 66879 - DNA, 110 bp, synthetic construct; identical to SEQ ID NO: 66877
  source 1..110: mol_type = other DNA

SEQ ID NO: 66880 - DNA, 110 bp, synthetic construct
  source 1..110: mol_type = other DNA
acataaacaaatacaggcatctcagttccgcccagagaatttgcagaagctcgtgccaacaaagccataccagaaaagctgctggctgcagtgcccattccctcaagagg

SEQ ID NO: 66881 - DNA, 110 bp, synthetic construct
  source 1..110: mol_type = other DNA
gtagcaaaggctgtgctcactgattagcagtatcagagtttcacactgtcatgaatgtggtagatagacttcactaacatagccagcctggagttcccattgtggctcag

SEQ ID NO: 66882 - DNA, 110 bp, synthetic construct
  source 1..110: mol_type = other DNA
tgtggtagatagacttcactaacatagccagcctggagttcccattgtggctcagtggattaaggaactgacattgcaggtcagttgtgaggatgtaggttcaatccctg

SEQ ID NO: 66883 - DNA, 110 bp, synthetic construct
  source 1..110: mol_type = other DNA
gcttcatgtatgtttttggtgtatcacttgtagattttggcttttcttccttcttttacaaaagctcatttctaagaccagtgtcaaagagcttcctccctacatttttt

SEQ ID NO: 66884 - DNA, 110 bp, synthetic construct
  source 1..110: mol_type = other DNA
aaaggaaaaatgtgcctttttctagaatctgtgtctgacagatatattaagaactctcatatcaagggattatctgtgattggaaaccataatttactctttttctcttc

SEQ ID NO: 66885 - DNA, 110 bp, synthetic construct
  source 1..110: mol_type = other DNA
ctcatatcaagggattatctgtgattggaaaccataatttactctttttctcttcctgtccttacaaaagcagctcaaggttgctctaactggaattcttaggacgtgtg

SEQ ID NO: 66886 - DNA, 110 bp, synthetic construct
  source 1..110: mol_type = other DNA
gcctgaaaagaagcaccaagctcttaaataaagaacactggggtggttatctcgatgtcattaatttaaactttgaagcatctcacctcacccctcttacttcttacact

SEQ ID NO: 66887 - DNA, 110 bp, synthetic construct
  source 1..110: mol_type = other DNA
ccctcccttgctctgttgaatctctctcccactacagttttcagttccctttggctaaatggttaggtgcaggaaaaaagcaatattttctttcatgctatgggatacta

SEQ ID NO: 66888 - DNA, 110 bp, synthetic construct
  source 1..110: mol_type = other DNA
tccctttggctaaatggttaggtgcaggaaaaaagcaatattttctttcatgctatgggatactagagacacctgtttggtttttttttttgctttatattttatgtctg

SEQ ID NO: 66889 - DNA, 110 bp, synthetic construct
  source 1..110: mol_type = other DNA
taaaagtgtcagcttattaagatttttaggcctaaagcatcaattaccccaaatacaacatctgagggagcagttttctagaatgttgtaatctgcacacaaatgcctgt

SEQ ID NO: 66890 - DNA, 110 bp, synthetic construct
  source 1..110: mol_type = other DNA
caacatctgagggagcagttttctagaatgttgtaatctgcacacaaatgcctgtgacattataccagtgatataagatcacatgcctttttggcagttgaaagtctttt

SEQ ID NO: 66891 - DNA, 110 bp, synthetic construct
  source 1..110: mol_type = other DNA
aaagctatgtttactaagctatattccctcatatgaaacactctgtccttgtcttttatcaactctaaaggagtctatgatcgtggcctactggagctgtgctgatgtct

SEQ ID NO: 66892 - DNA, 110 bp, synthetic construct
  source 1..110: mol_type = other DNA
ttatcaactctaaaggagtctatgatcgtggcctactggagctgtgctgatgtctgaggctggagtttgaatttctacatcactcatgtcctgtttagtgtacatttgac

SEQ ID NO: 66893 - DNA, 110 bp, synthetic construct
  source 1..110: mol_type = other DNA
gtacctggaaggaaaaaggaaatgctttgataaacaatttgtgagtctctacctgaggcatagagggttgggagaggatgagagagacgagtagaaaaattccagacaga

SEQ ID NO: 66894 - DNA, 110 bp, synthetic construct
  source 1..110: mol_type = other DNA
gaacccaactaggatctgtgagggtgcgggggtgatccctggcctcactctgggtaagatccagtgttgctgcaggctgtggtgtaggttgcaggtgcagcttggatctg

SEQ ID NO: 66895 - DNA, 110 bp, synthetic construct
  source 1..110: mol_type = other DNA
tccctggcctcactctgggtaagatccagtgttgctgcaggctgtggtgtaggttgcaggtgcagcttggatctggggttgctggggttgtggcgtgggctggcagctgc

SEQ ID NO: 66896 - DNA, 110 bp, synthetic construct
  source 1..110: mol_type = other DNA
cataggtcacaactgcagctcagatctgattcctggcccagggtctccaggaataaacggtatggtcccatcagatatggctttatcatgacatctactcctctctgagc

SEQ ID NO: 66897 - DNA, 110 bp, synthetic construct
  source 1..110: mol_type = other DNA
aaaaaacaaaacaaaagaaaaaacccaaaaggttttggtccttgagattgagagcaagggatgagatctgagacagcaaggtgtatctttaaacatgtgagctatggatt

SEQ ID NO: 66898 - DNA, 110 bp, synthetic construct
  source 1..110: mol_type = other DNA
aagggatgagatctgagacagcaaggtgtatctttaaacatgtgagctatggattttggtgagcccctttctggatgtatgtatttccattatacaataaatttgtgctg

SEQ ID NO: 66899 - DNA, 110 bp, synthetic construct
  source 1..110: mol_type = other DNA
agttgcttctctaacctcccaatccccagtctagattagctagcacatctcttatcccgtaaaacactttatttatggtgcttaaattgtgcgtgtatattttatactga

SEQ ID NO: 66900 - DNA, 110 bp, synthetic construct
  source 1..110: mol_type = other DNA
cagggatgttctcactgcaggctctgggattcatggcagctccagtagggtggcttcagcacccaagtgacaggctgtgacatctgttggtaaaaagagacattctcttt

SEQ ID NO: 66901 - DNA, 110 bp, synthetic construct
  source 1..110: mol_type = other DNA
gagaaaaccaggcatccttgagaaaaaattctaagaggagttgaaatgaatttcacttaaatttctttgctttagtaatggttcttctctatcctccttctccttccttt

SEQ ID NO: 66902 - DNA, 110 bp, synthetic construct
  source 1..110: mol_type = other DNA
cttaaatttctttgctttagtaatggttcttctctatcctccttctccttccttttatgagagagcctcgcaagctgatagttactctcagccccgaccgcaaaaggctg

SEQ ID NO: 66903 - DNA, 110 bp, synthetic construct
  source 1..110: mol_type = other DNA
aacaactggaatggataagggagatgctgggaacagaagccactgatgcctcgatcctgtcttcccatcgctgccccatagccggtgatggaagacagaggattctggag

SEQ ID NO: 66904 - DNA, 110 bp, synthetic construct
  source 1..110: mol_type = other DNA
cctgtcttcccatcgctgccccatagccggtgatggaagacagaggattctggagggcagggaagggagaacaagatgagtggggggtgccaaatggagagggggattaa

SEQ ID NO: 66905 - DNA, 110 bp, synthetic construct
  source 1..110: mol_type = other DNA
atttgatcttaaaatttgtatctcttctgatacatttggatcctgtctgagcatagcagttaaggtgcttggccgttgagattatagggatttacattctgcccttggct

SEQ ID NO: 66906 - DNA, 110 bp, synthetic construct
  source 1..110: mol_type = other DNA
gccctctttagtattgaaagcttttctgagatttactcacatgtgtagccagacaatttgctgaagcataacgcctcctcctctgagagcaaagcatcagtactcagggt

SEQ ID NO: 66907 - DNA, 110 bp, synthetic construct
  source 1..110: mol_type = other DNA
tccttgcaaagccagacctgaagatgggtctttgttgatcgttcttggtgtgttgataaatgctgtacatctctagaagctttccaagaccaccccccatcatttttact

SEQ ID NO: 66908 - DNA, 110 bp, synthetic construct
  source 1..110: mol_type = other DNA
taaacgccacaagtccacagaccttgcattagtgttatttccataacttaatccccagtcatagagcttttttttttttttttttttttgatctggttgtagtctggttg

SEQ ID NO: 66909 - DNA, 110 bp, synthetic construct
  source 1..110: mol_type = other DNA
ctctctgtcctttgacccctgtctgccctgctagactgatcctgggccggcctccttggtaagctttccttcttgtcctgtccggtttatacctgagggtcaagctgacc

SEQ ID NO: 66910 - DNA, 110 bp, synthetic construct
  source 1..110: mol_type = other DNA
ttggtaagctttccttcttgtcctgtccggtttatacctgagggtcaagctgacctcagactcttcctcttactcatcttcaaaggctaaaaatcattagatagtatgaa

SEQ ID NO: 66911 - DNA, 110 bp, synthetic construct
  source 1..110: mol_type = other DNA
ggtgcatcccttagatagacagatagataaatagatcgatcaattgatcagccgtagggaacgtctgaggactcccttagccatatttattattgatagtaacagtacag

SEQ ID NO: 66912 - DNA, 110 bp, synthetic construct
  source 1..110: mol_type = other DNA
gaggaaacgtggaggctcagggatggtcccgctgcgcctgcgtgatgctggcggagttccgcccacccctccagctctcgagcgggggctcctctcttactggaacaaga

SEQ ID NO: 66913 - DNA, 110 bp, synthetic construct
  source 1..110: mol_type = other DNA
gttccgcccacccctccagctctcgagcgggggctcctctcttactggaacaagacccccttctgagtggtgaggacacaaccagtatcggacaaacaacttactgccac

SEQ ID NO: 66914 - DNA, 110 bp, synthetic construct
  source 1..110: mol_type = other DNA
ttttttttttttttttttcagcattgtgccgcctccaaagcatatgagtcttgaagaaacaacctacattggcagtgatactgtgagtgactggggtttctactggagac

SEQ ID NO: 66915 - DNA, 110 bp, synthetic construct
  source 1..110: mol_type = other DNA
cctatgtaccgtttagtatatggttttgaaattgccacttttcctggccagctccccaaccaggcagtaccatccacaaaggcagagactgggttatgtctacaggagca

SEQ ID NO: 66916 - DNA, 110 bp, synthetic construct
  source 1..110: mol_type = other DNA
gtcagctcctccctgatgacttccctgtgtccccatctgtgggcaggtctccacctgcctcagccctgccctctcctctgccgcgtacctgagtgcctgtatttccactc

SEQ ID NO: 66917 - DNA, 110 bp, synthetic construct
  source 1..110: mol_type = other DNA
tgcctcagccctgccctctcctctgccgcgtacctgagtgcctgtatttccactctccagagttggaagagcccaacaatctggtttttgttttgttttgtttttattgg

SEQ ID NO: 66918 - DNA, 110 bp, synthetic construct
  source 1..110: mol_type = other DNA
acgggaactcccagtgcaacatttgtaaagaaaatgttgtggaagatctggctgagctcacattagaattctttgctggaaggtcccatcatggcttagtggtaataggc

SEQ ID NO: 66919 - DNA, 110 bp, synthetic construct
  source 1..110: mol_type = other DNA
gctcacattagaattctttgctggaaggtcccatcatggcttagtggtaataggcccaactagtgtccatggctacacggattcaacccctggcctgtctcagtgtgtta

SEQ ID NO: 66920 - DNA, 110 bp, synthetic construct
  source 1..110: mol_type = other DNA
tgcggattgaacccgcgccaacaagggacaacacgggatccttaacccgctgcaccacagcaggaactcttctggttagcttttcaaagaaccaccaaattagtttccag

SEQ ID NO: 66921 - DNA, 110 bp, synthetic construct
  source 1..110: mol_type = other DNA
ccctttctggaggtttaagtcctcctgccagcgttcagttgatgttctgtgctagtcgtttttcctgtagatgtgtttttttgatgtgtttgtgggagaaggtgcacctg

SEQ ID NO: 66922 - DNA, 110 bp, synthetic construct; identical to SEQ ID NO: 66921
  source 1..110: mol_type = other DNA

SEQ ID NO: 66923 - DNA, 110 bp, synthetic construct
  source 1..110: mol_type = other DNA
aagaataaacttaaccaagaaggtgaaagacttgtgcactggtaactacacaccactgatgaaagaaatgaaagaaaattaagaaatggagatgcatgctgtgttcatgg

SEQ ID NO: 66924 - DNA, 110 bp, synthetic construct
  source 1..110: mol_type = other DNA
ctacacaccactgatgaaagaaatgaaagaaaattaagaaatggagatgcatgctgtgttcatggactgaagacttaatattgtttaaaatgtctatgctacataaaact

SEQ ID NO: 66925 - DNA, 110 bp, synthetic construct
  source 1..110: mol_type = other DNA
atatgcagtacttagtattaactcttggcataatgctttgcagcggatctttggaacttacccctctggtataactagctttatacccactgcacacctactccccatac

SEQ ID NO: 66926 - DNA, 110 bp, synthetic construct
  source 1..110: mol_type = other DNA
ccagaaacacctctaagtccacgtggctgagagggtaaggcagacagcgggtaggaggcacagggagaaagtaaccagcacaacacatatgctaaaacatttcttgtttc

SEQ ID NO: 66927 - DNA, 110 bp, synthetic construct
  source 1..110: mol_type = other DNA
aggcacagggagaaagtaaccagcacaacacatatgctaaaacatttcttgtttccctgtctccaccctggaaaatgccagcccctaaatcacctttcatggtccctcgc

SEQ ID NO: 66928 - DNA, 110 bp, synthetic construct
  source 1..110: mol_type = other DNA
aagatggccctcaggagagcagactgtgttcatgacagggcgtgagactgaagatctgagatggtccctggcctttctgaagagtgttcagcttttctgagttcctacaa

SEQ ID NO: 66929 - DNA, 110 bp, synthetic construct
  source 1..110: mol_type = other DNA
ctgagatggtccctggcctttctgaagagtgttcagcttttctgagttcctacaaatgtgcatcttttaattaaggccccaaggaattcctgctgcggcagagtggttta

SEQ ID NO: 66930 - DNA, 110 bp, synthetic construct; identical to SEQ ID NO: 66928
  source 1..110: mol_type = other DNA

SEQ ID NO: 66931 - DNA, 110 bp, synthetic construct; identical to SEQ ID NO: 66929
  source 1..110: mol_type = other DNA

SEQ ID NO: 66932 - DNA, 110 bp, synthetic construct
  source 1..110: mol_type = other DNA
aaaattgctctgctttttaagcaactgtttttgaggttaagctttaaaaggctacattgttgccatttgggaaagttattaagatgattatgatgaagattctgtgatca

SEQ ID NO: 66933 - DNA, 110 bp, synthetic construct
  source 1..110: mol_type = other DNA
ggaaccatgctagccttctctgtatcgccccaatgttagtgtctatgctgctgaagcaagcacttgtttcattattttgactggaactgtgttttggtctgaaagtcagt

SEQ ID NO: 66934 - DNA, 110 bp, synthetic construct
  source 1..110: mol_type = other DNA
gcaagcacttgtttcattattttgactggaactgtgttttggtctgaaagtcagtgttggttgtgtctggttttgcagcccatgatggtacatttctatgtgcgttcgct

SEQ ID NO: 66935 - DNA, 110 bp, synthetic construct
  source 1..110: mol_type = other DNA
tccatgtttcatagagcaggattttctctgtttgggaggcttgaataatattctgacagacccttaggttgtttctctccctcggctactgaaaatgatacctctgtgaa

SEQ ID NO: 66936 - DNA, 110 bp, synthetic construct
  source 1..110: mol_type = other DNA
acagacccttaggttgtttctctccctcggctactgaaaatgatacctctgtgaatgtggagatacaatatctttttgaataagtgtttttgttttctttggttaaacac

SEQ ID NO: 66937 - DNA, 110 bp, synthetic construct
  source 1..110: mol_type = other DNA
agaagctcttggtatttgcaagaatgaggcacctcctaggacagcagctatgatgatatgttgacatacccttctgaacaaggaggaagagcaatggaatgcagttttgc

SEQ ID NO: 66938 - DNA, 110 bp, synthetic construct
  source 1..110: mol_type = other DNA
tgttgaatgagagtggtgagggttggaattcttgcctcattcttgatgttaggggaaaagcattcaatctcccctcatgagtctaggccctgatgttagctgtaggcttt

SEQ ID NO: 66939 - DNA, 110 bp, synthetic construct
  source 1..110: mol_type = other DNA
aaaagcattcaatctcccctcatgagtctaggccctgatgttagctgtaggctttttgtagatgcttcctaacaacttgagaaaatccccaacttggtgagagttcttat

SEQ ID NO: 66940 - DNA, 110 bp, synthetic construct
  source 1..110: mol_type = other DNA
tgcagcttgcgatcttacactatatagctcatggcaacaccggatccttagcccactgcaccaggccagggattgaacccacacctcagcaatgacctcagccactgcag

SEQ ID NO: 66941 - DNA, 110 bp, synthetic construct
  source 1..110: mol_type = other DNA
ctgcaccaggccagggattgaacccacacctcagcaatgacctcagccactgcagagacaatgccggatccttaacctgctgctccatatcaggaactccgattttcatc

SEQ ID NO: 66942 - DNA, 110 bp, synthetic construct
  source 1..110: mol_type = other DNA
aggcatttgaagatcctgaacttcgtggagtcccctggagacgggtgcaggaaggagctcgaccaggtgctggaagcagacagctgccagtgtgagctgaacaggaaacg

SEQ ID NO: 66943 - DNA, 110 bp, synthetic construct
  source 1..110: mol_type = other DNA
acttgattgtaaatttccggtatcaaattgctgatggggaaaccacttggttctgatgacagaggaggaccctttggaagggcatttgaaagcactcggtattgatgccc

SEQ ID NO: 66944 - DNA, 110 bp, synthetic construct
  source 1..110: mol_type = other DNA
atgacagaggaggaccctttggaagggcatttgaaagcactcggtattgatgcccttgtgcccctttttacatggagtattgcgagaacgctgctgtgctttcttagcgc

SEQ ID NO: 66945 - DNA, 110 bp, synthetic construct
  source 1..110: mol_type = other DNA
atccataccacatttccttatccatccgtccatcattggacacttaggttattaatgtattgtggctactgtaaataatgctgcagtgaatgtgggggtgcagatatctt

SEQ ID NO: 66946 - DNA, 110 bp, synthetic construct
  source 1..110: mol_type = other DNA
cattattaactttccgttccaatccattccccccacttctgtgatcatccccccagagggtctcattaatatagttttaatgcctcccatgcacaaaccactggagcttt

SEQ ID NO: 66947 - DNA, 110 bp, synthetic construct
  source 1..110: mol_type = other DNA
gagggtctcattaatatagttttaatgcctcccatgcacaaaccactggagcttttgcacaagccccatcattccaaacaccttttttctctaccaagcatttaacatct

SEQ ID NO: 66948 - DNA, 110 bp, synthetic construct; identical to SEQ ID NO: 66946
  source 1..110: mol_type = other DNA

SEQ ID NO: 66949 - DNA, 110 bp, synthetic construct; identical to SEQ ID NO: 66947
  source 1..110: mol_type = other DNA

SEQ ID NO: 66950 - DNA, 110 bp, synthetic construct
  source 1..110: mol_type = other DNA
ccactgttcagaaccacctccatgtcccactcccccactccctccccagtggcagcgagccccaggctgccctggtccttactggggactcctgattttttgtgtgctgc

SEQ ID NO: 66951 - DNA, 110 bp, synthetic construct
  source 1..110: mol_type = other DNA
cgagccccaggctgccctggtccttactggggactcctgattttttgtgtgctgcagaaagcagcagaggcttgacaggctcctattgttatcttgagctgcctgccccc

SEQ ID NO: 66952 - DNA, 110 bp, synthetic construct
  source 1..110: mol_type = other DNA
cctccctctacaacccttcaaagggaattcacccccgccttggtaccagaaaataaggctcttaaagaagtgagttgaggagttcccgttgtggctcagtggttgatgaa

SEQ ID NO: 66953 - DNA, 110 bp, synthetic construct
  source 1..110: mol_type = other DNA
cttcaaagggaattcacccccgccttggtaccagaaaataaggctcttaaagaagtgagttgaggagttcccgttgtggctcagtggttgatgaatctgactaggaacca

SEQ ID NO: 66954 - DNA, 110 bp, synthetic construct
  source 1..110: mol_type = other DNA
aaagaataaagcagaataaactcaggcccttaccctggtgtggcagattctccaaatttgctgattaagtattcacaggctcaactcccacatggataaattagttttaa

SEQ ID NO: 66955 - DNA, 110 bp, synthetic construct
  source 1..110: mol_type = other DNA
tgattcctttttgagatctttcaatatcaaagatctatttctcagtgcgattcctcctacctggaggtttgtgctaattacaattgatgctgactttgctggcttctagg

SEQ ID NO: 66956 - DNA, 110 bp, synthetic construct
  source 1..110: mol_type = other DNA
cctacctggaggtttgtgctaattacaattgatgctgactttgctggcttctagggaatgtcatcttattatgtccctttctttgtatttataaacactggtttgctcag

SEQ ID NO: 66957 - DNA, 110 bp, synthetic construct
  source 1..110: mol_type = other DNA
cctcatctgagatgttttcagggccttgtgccagactgctggagagagttctggtgtggggatgtgggtgtctccagggacaaggacttttttagggattaatgaaccat

SEQ ID NO: 66958 - DNA, 110 bp, synthetic construct
  source 1..110: mol_type = other DNA
caggtttaagggaaggagaacaagcgagagaccaggaggatatggtttctgggcagccatccaagaggacactgtgcatatagaaggccacctaaagggggcagtgctgg

SEQ ID NO: 66959 - DNA, 110 bp, synthetic construct
  source 1..110: mol_type = other DNA
gagtgatttacattttcccaaattaagtgattgtggggtcccaaaactgattagaaattaccttatgttttagcagattaatctgaatatccatttcaatttgattggtt

SEQ ID NO: 66960 - DNA, 110 bp, synthetic construct
  source 1..110: mol_type = other DNA
tcagataaccagccccagtttctacagggtagtgcagagagccaggatgatgcttgcatacacaactgggtgcctagaggaaaagaactcccagcttaggggaccagatt

SEQ ID NO: 66961 - DNA, 110 bp, synthetic construct
  source 1..110: mol_type = other DNA
tggcttttgcattgttacatatcaaggatccccaacagggaaatcttgaagcctaacctatgacagagctggaatctgcttctttgacccctcccccgccaccctcactg

SEQ ID NO: 66962 - DNA, 110 bp, synthetic construct
  source 1..110: mol_type = other DNA
agaaggtggctttccccaccgcgggcccccaaagcgcttggccgcctccgcttcccgcccctctggtctggcactcaccgcaaagcttgtttccgatgccgcccgtgaac

SEQ ID NO: 66963 - DNA, 110 bp, synthetic construct
  source 1..110: mol_type = other DNA
cgcccctctggtctggcactcaccgcaaagcttgtttccgatgccgcccgtgaacttctgggccacctgacaccaagctctcgctggaaggaaagacaggcaggaagata

SEQ ID NO: 66964 - DNA, 110 bp, synthetic construct
  source 1..110: mol_type = other DNA
gctgggttttcttggccaccactggatggaattgagggagcttattctcaaaagcccccatgcccttagctttcccctcttccctccatgttcttgcttctgtcatgctt

SEQ ID NO: 66965 - DNA, 110 bp, synthetic construct
  source 1..110: mol_type = other DNA
ccccatgcccttagctttcccctcttccctccatgttcttgcttctgtcatgctttttgactcaacgtgtagtaaaacaccagaatattcaaactggcttactctcaggt

SEQ ID NO: 66966 - DNA, 110 bp, synthetic construct
  source 1..110: mol_type = other DNA
tcagatttactgatggatttgatattatatttcaagagtgactccaaggttttgggccccagtagcagtaagaacagacttgccacttaaaaaatgaggaagggaagttc

SEQ ID NO: 66967 - DNA, 110 bp, synthetic construct
  source 1..110: mol_type = other DNA
atccatgaggatgcgggttccatccctggcctccctccctcagggttaaagatacagtgttgatgcaagctacagcgtaaggcgcagatgtgactcagatgcaacattgc

SEQ ID NO: 66968 - DNA, 110 bp, synthetic construct
  source 1..110: mol_type = other DNA
ggttccatccctggcctccctccctcagggttaaagatacagtgttgatgcaagctacagcgtaaggcgcagatgtgactcagatgcaacattgctgtggctgtggtgta

SEQ ID NO: 66969 - DNA, 110 bp, synthetic construct
  source 1..110: mol_type = other DNA
taggttgcagatgtggcttggatcctgcattgctctggctgtggcataggtctgtggctgcagctctgatatgacccctcattcaataacttccatatgctgcaattgag

SEQ ID NO: 66970 - DNA, 110 bp, synthetic construct
  source 1..110: mol_type = other DNA
ggctgcagctctgatatgacccctcattcaataacttccatatgctgcaattgagggcccccctccaaaaaaaaccccttggaaagtagagactagaatccaatgcaatt

SEQ ID NO: 66971 - DNA, 110 bp, synthetic construct; identical to SEQ ID NO: 66970
  source 1..110: mol_type = other DNA

SEQ ID NO: 66972 - DNA, 110 bp, synthetic construct; identical to SEQ ID NO: 66970
  source 1..110: mol_type = other DNA

SEQ ID NO: 66973 - DNA, 110 bp, synthetic construct
  source 1..110: mol_type = other DNA
ctaaccattctctcagccctcggaagctgacccaaatgggctacatcagcagacgcccatgacctctggcttccagttgggttcaggagatggaagctctagaggagaca

SEQ ID NO: 66974 - DNA, 110 bp, synthetic construct
  source 1..110: mol_type = other DNA
gccctaatgaatactgtgaacttgaataataaccatcccctgcaacaaatggatcccattaatgcatgatgttgataacagaggagactgcttggggggggggtgatgag

SEQ ID NO: 66975 - DNA, 110 bp, synthetic construct
  source 1..110: mol_type = other DNA
ggttggaaatttttgaaacattacttcaaatgtctgctttttgatggtccttatctagatccgttggtttatgaggggctgcaaaatcacgatacaaagcgatatctttc

SEQ ID NO: 66976 - DNA, 110 bp, synthetic construct
  source 1..110: mol_type = other DNA
cagtaggcgcccaatagatgtgtctgaacaaacgagtggagccactgagggctccagggctgtgccgggagcccgtccacccggaactgtacagtgagctttatttgtgc

SEQ ID NO: 66977 - DNA, 110 bp, synthetic construct
  source 1..110: mol_type = other DNA
agggctgtgccgggagcccgtccacccggaactgtacagtgagctttatttgtgcttggattgagcagagcgtttagagcattttgctgagcggtttgtgcaacccctgg

SEQ ID NO: 66978 - DNA, 110 bp, synthetic construct; identical to SEQ ID NO: 66976
  source 1..110: mol_type = other DNA

SEQ ID NO: 66979 - DNA, 110 bp, synthetic construct; identical to SEQ ID NO: 66977
  source 1..110: mol_type = other DNA

SEQ ID NO: 66980 - DNA, 110 bp, synthetic construct
  source 1..110: mol_type = other DNA
cacaaaaagcctttctttcttttctttttttttttttttagccgtgggtctttcgaccccagtcaccctcgcccccgccttaccttgcaagccgcgcagtgcgctcctgt

SEQ ID NO: 66981 - DNA, 110 bp, synthetic construct
  source 1..110: mol_type = other DNA
accccagtcaccctcgcccccgccttaccttgcaagccgcgcagtgcgctcctgtcttggactttgaatgtcttccactcttgggggcacataggaagcctaagactgga

SEQ ID NO: 66982 - DNA, 110 bp, synthetic construct
  source 1..110: mol_type = other DNA
aggaaggcattctctatacacttcggaaaggttccaaaggcttccatcccaagttaggaaatgacctagattatacgtgtatagcatactcatgagttttaaattggtgt

SEQ ID NO: 66983 - DNA, 110 bp, synthetic construct
  source 1..110: mol_type = other DNA
gtgggtacatacctccctaatctttccttagtccttatgatttgtgtgtgtatgttcttcctagctgcttttttctctcttattcattgatttaagtgtatgggtatgta

SEQ ID NO: 66984 - DNA, 110 bp, synthetic construct
  source 1..110: mol_type = other DNA
tcttcctagctgcttttttctctcttattcattgatttaagtgtatgggtatgtacacctggttctgctcatctgtacttcattctttctcacctctcttctcattcatt

SEQ ID NO: 66985 - DNA, 110 bp, synthetic construct
  source 1..110: mol_type = other DNA
aagatttcagcagagggagttcctgctggtgcagtggattaaaaatctgactgcatcagcgagggtcactgtggaggtgcgggtatgatccttggcctggtacagtgggt

SEQ ID NO: 66986 - DNA, 110 bp, synthetic construct
  source 1..110: mol_type = other DNA
tcagcgagggtcactgtggaggtgcgggtatgatccttggcctggtacagtgggttaaagggtccagtgtttctgtagctgcggcatagactgcagatgtggctcagatt

SEQ ID NO: 66987 - DNA, 110 bp, synthetic construct
  source 1..110: mol_type = other DNA
tattctgagcagtatcatcacttagagatggcaatgccagtgactggccagttactatactgtcaccaaacatcaagttactttaggtcgaggggaagaactagttcatg

SEQ ID NO: 66988 - DNA, 110 bp, synthetic construct
  source 1..110: mol_type = other DNA
tatactgtcaccaaacatcaagttactttaggtcgaggggaagaactagttcatggtgcaatcaccaagtggaacgttgtcggtaatttccccaaatcatcacttttgca

SEQ ID NO: 66989 - DNA, 110 bp, synthetic construct
  source 1..110: mol_type = other DNA
atttatttaactcaagtttatataatttaatttttaaaaatgcctctatttagcagcttggccacacaagtccagaaaattgaactcctggctctcaagctagcatgaac

SEQ ID NO: 66990 - DNA, 110 bp, synthetic construct
  source 1..110: mol_type = other DNA
gcttggccacacaagtccagaaaattgaactcctggctctcaagctagcatgaactggctccagaacacagaccactagcgggtcagacctgtgttagatttctgtgtcc

SEQ ID NO: 66991 - DNA, 110 bp, synthetic construct
  source 1..110: mol_type = other DNA
tagtcctagctatttttcaccttttctgtatgggagtaactagaataactacctattagcatccttttaggaaatgtcttagttcttttaagctcgcttcttttgtggtt

SEQ ID NO: 66992 - DNA, 110 bp, synthetic construct
  source 1..110: mol_type = other DNA
gcatggtcagttctgataagggcccttttcacggttgcaggctgccatcttttccttgtgccctcacatgatggaaggagagtgagccagctttctggtctcttctcata

SEQ ID NO: 66993 - DNA, 110 bp, synthetic construct
  source 1..110: mol_type = other DNA
ttgtgccctcacatgatggaaggagagtgagccagctttctggtctcttctcataaggacacttaccccattcatgcgggttccacccttatgacctaaaagccccacct

SEQ ID NO: 66994 - DNA, 110 bp, synthetic construct
  source 1..110: mol_type = other DNA
tgtctctctccagaaacctattgccttttggatgaaggccagtctttgtaggctttctcatgatccgttgagctcctctgttttgcattttcgtccagacatgccttttt

SEQ ID NO: 66995 - DNA, 110 bp, synthetic construct
  source 1..110: mol_type = other DNA
ccagcaatcatagagttcccatcgtggcttagcagaaatgaatctgaccatgagttgcgggttcgatctctggcccccctcaatgggttaaggatctggggttgccatga

SEQ ID NO: 66996 - DNA, 110 bp, synthetic construct
  source 1..110: mol_type = other DNA
ttcccatcgtggcttagcagaaatgaatctgaccatgagttgcgggttcgatctctggcccccctcaatgggttaaggatctggggttgccatgaactgtggtgtagatc

SEQ ID NO: 66997 - DNA, 110 bp, synthetic construct
  source 1..110: mol_type = other DNA
acaagaaacctggtgggcttatacaatctacagtggattctgtcttgtactgtctcagtttttctaccaagatcacttgtattccatccaatatactttttttggtggaa

SEQ ID NO: 66998 - DNA, 110 bp, synthetic construct
  source 1..110: mol_type = other DNA
cagtttttctaccaagatcacttgtattccatccaatatactttttttggtggaaattatgtgtgtggatttgtagtgaccatccataaattgtccatgcatcactgctc

SEQ ID NO: 66999 - DNA, 110 bp, synthetic construct
  source 1..110: mol_type = other DNA
acctccatatgccacgggagcgtccctagaaaaagacaaaaagacaggggaaaaaaaaaaaaaagaaatgatgcgatttttctaatctcagtctccaattattcattgca

SEQ ID NO: 67000 - DNA, 110 bp, synthetic construct
  source 1..110: mol_type = other DNA
aggggaaaaaaaaaaaaaagaaatgatgcgatttttctaatctcagtctccaattattcattgcaatcatgcacagttgattttatgctgaccttgtatactgctattat

SEQ ID NO: 67001 - DNA, 110 bp, synthetic construct
  source 1..110: mol_type = other DNA
caagactttttatgaactatcattggaagaataatgtaacttctgttgtattttattgatcaagcactaaagtcagaaccaagtcaagagaactggaaatcagactccac

SEQ ID NO: 67002 - DNA, 110 bp, synthetic construct
  source 1..110: mol_type = other DNA
ttgatcaagcactaaagtcagaaccaagtcaagagaactggaaatcagactccacatgtcaatagaagtggtagcaaaaataaatacgcacagccaatatttagcccatc

SEQ ID NO: 67003 - DNA, 110 bp, synthetic construct
  source 1..110: mol_type = other DNA
atgctgctaatatttcttctcttcaaaagttgactgttgtgtctgtatagtaagtgctatccaagaaattaatgctacttattgtcattttcttgttagctacttttact

SEQ ID NO: 67004 - DNA, 110 bp, synthetic construct
  source 1..110: mol_type = other DNA
agcaaattttgaaaagccctggaaagaagtttttcctgaaagaccatgctctttctcatcaagagtctttaatattcttgtccctcttttcaaatgggagcaaatgtaag

SEQ ID NO: 67005 - DNA, 110 bp, synthetic construct
  source 1..110: mol_type = other DNA
aaaaaaacctaacccaaaatggaccaaaaagcagctactcccacagtccttatatctcaataaatggcaatctcctctgaccagctgctcaggagagaaggcctctccct

SEQ ID NO: 67006 - DNA, 110 bp, synthetic construct
  source 1..110: mol_type = other DNA
ctcaataaatggcaatctcctctgaccagctgctcaggagagaaggcctctcccttattctgtccatcagaagacctatcagatcatctttctaaatagatcctgaatct

SEQ ID NO: 67007 - DNA, 110 bp, synthetic construct
  source 1..110: mol_type = other DNA
actgactgaaaataatctcagtgtaggcattctaaaaagtcacatttgtgagaagtatcagagttcaatacattcacttttggaaaggtgactatagcttaatgtcttat

SEQ ID NO: 67008 - DNA, 110 bp, synthetic construct
  source 1..110: mol_type = other DNA
tatcagagttcaatacattcacttttggaaaggtgactatagcttaatgtcttataaattccactggagagaggtccaacaatccccactatattccaactgttttattc

SEQ ID NO: 67009 - DNA, 110 bp, synthetic construct
  source 1..110: mol_type = other DNA
gttatttttctttctagtgtgcccctgtaaatgaaaatgaagagacctgcaaatgcctcttcattcttcaatgcccaggtctaacatggtcctcattgtgaagcctccag

SEQ ID NO: 67010 - DNA, 110 bp, synthetic construct; identical to SEQ ID NO: 67009
  source 1..110: mol_type = other DNA

SEQ ID NO: 67011 - DNA, 110 bp, synthetic construct
  source 1..110: mol_type = other DNA
taacccactgcatcgcagcgggagctcagagtccctatttagctcagtcaggcctacaactgacttctctccagaacgtaaaatcctctacaagtctcttctcaccccag

SEQ ID NO: 67012 - DNA, 110 bp, synthetic construct
  source 1..110: mol_type = other DNA
tatcatgcagtttataacttaggtagatacaatacaaataacatgtaacctgtgtggttataaaagactaggggaaactaggggaggagagagtgcaaatatacagtttc

SEQ ID NO: 67013 - DNA, 110 bp, synthetic construct
  source 1..110: mol_type = other DNA
tgggagacttctgcagtaatccacaagagatgatggtggttcagggtagtgattacagtggagttggtaagctttgagattttgggcataaattttgaagatagagtcag

SEQ ID NO: 67014 - DNA, 110 bp, synthetic construct
  source 1..110: mol_type = other DNA
cagtggagttggtaagctttgagattttgggcataaattttgaagatagagtcagtaaactttcctgaagggctgaatgtttcatatgagaggaagaaaagagccaagaa

SEQ ID NO: 67015 - DNA, 110 bp, synthetic construct
  source 1..110: mol_type = other DNA
atgctttatttatattacattctttcttttattcctgaaaaaaaacgtgttgttaaaaattatcaaatagggagttcccgtcatagctcagcagttaacgaacccgacta

SEQ ID NO: 67016 - DNA, 110 bp, synthetic construct
  source 1..110: mol_type = other DNA
tgaaaaaaaacgtgttgttaaaaattatcaaatagggagttcccgtcatagctcagcagttaacgaacccgactaggatccatgacctagcaggttcgatacctgacctc

SEQ ID NO: 67017 - DNA, 110 bp, synthetic construct
  source 1..110: mol_type = other DNA
ttaagtgcttcgggcataaacaatatcttctagtaaactacctttagatagtttaagtatcgttgcctcctctaagactccaaaaagtgccttaattaatttataacctt

SEQ ID NO: 67018 - DNA, 110 bp, synthetic construct; identical to SEQ ID NO: 67017
  source 1..110: mol_type = other DNA

SEQ ID NO: 67019 - DNA, 110 bp, synthetic construct
  source 1..110: mol_type = other DNA
acctcaccttacctttaaaatactttactgaaacactttggggagctcgaggttttggggggagcatgagccctcatttattcacattgcattgcatggcatggcaataa

SEQ ID NO: 67020 - DNA, 110 bp, synthetic construct
  source 1..110: mol_type = other DNA
tatttctgtgactatttgctcagccagaccatgagcaaggagtttgtttgcttttctgctggtataatcagactttaatatagcctggcacatcattggtctctgtcaat

SEQ ID NO: 67021 - DNA, 110 bp, synthetic construct
  source 1..110: mol_type = other DNA
ctgctggtataatcagactttaatatagcctggcacatcattggtctctgtcaatggcgatggatgaatgattgagttgagcccgagctttgggacccaggtcttcttct

SEQ ID NO: 67022 - DNA, 110 bp, synthetic construct
  source 1..110: mol_type = other DNA
taggaagttttagtagcttgctcaagatcacacaagccagtaagtgtcagagctggattcaaacccaggcagttgggccccagagtctctggtttcaaccactgtttgag

SEQ ID NO: 67023 - DNA, 110 bp, synthetic construct
  source 1..110: mol_type = other DNA
actgtttattcacagatgaacagctgtgtctgcttaatttaactttgaaggaaatctggttatgactctctagattgtgctttgagttcttttaaagaaatctcacttga

SEQ ID NO: 67024 - DNA, 110 bp, synthetic construct
  source 1..110: mol_type = other DNA
ctggttatgactctctagattgtgctttgagttcttttaaagaaatctcacttgaagcccaattagactcttagctcagtattgcttatagatatatagatatagataga

SEQ ID NO: 67025 - DNA, 110 bp, synthetic construct; identical to SEQ ID NO: 67023
  source 1..110: mol_type = other DNA

SEQ ID NO: 67026 - DNA, 110 bp, synthetic construct; identical to SEQ ID NO: 67024
  source 1..110: mol_type = other DNA

SEQ ID NO: 67027 - DNA, 110 bp, synthetic construct
  source 1..110: mol_type = other DNA
atgccacctggaggtgcaattatagggcagaaagaagaggaatctagaagagaagcacgcgtgcccgtgacaacagacctgcacacccagctatggcagaatccttcaag

SEQ ID NO: 67028 - DNA, 110 bp, synthetic construct
  source 1..110: mol_type = other DNA
cacgcgtgcccgtgacaacagacctgcacacccagctatggcagaatccttcaagctgcttccccttaacacagaggcttgagttcacggcctaagtcacaccttgtctt

SEQ ID NO: 67029 - DNA, 110 bp, synthetic construct
  source 1..110: mol_type = other DNA
acagggtcccggagtcctcatggcgggcagcttcctatgggtttctgcagactaggactcagctctagtccctgctgtgctgataactagctgctcgagctcgggcaatt

SEQ ID NO: 67030 - DNA, 110 bp, synthetic construct
  source 1..110: mol_type = other DNA
gactcagctctagtccctgctgtgctgataactagctgctcgagctcgggcaattccaaggcctggcctttcccatctgtaatcacagagaggcggcaccagaccaaggg

SEQ ID NO: 67031 - DNA, 110 bp, synthetic construct
  source 1..110: mol_type = other DNA
tgcatttaattttgaaccttttttcacttaacccagcataacctttgttcactttgctataaagcctttatatccatttcatggccacatatgatttcttctaatggaca

SEQ ID NO: 67032 - DNA, 110 bp, synthetic construct
  source 1..110: mol_type = other DNA
agagtgccccttgcagaggagagagcaaggaggcaatgtgtttggagcaagagaagggcaggggctgccagcgggggtggggggacccagagactggggagaccttcaga

SEQ ID NO: 67033 - DNA, 110 bp, synthetic construct
  source 1..110: mol_type = other DNA
gggcaggggctgccagcgggggtggggggacccagagactggggagaccttcagacccctggagaaaacccatgattgcaagagacgagttggaatcatctttcccaatc

SEQ ID NO: 67034 - DNA, 110 bp, synthetic construct
  source 1..110: mol_type = other DNA
ctgcaaacaagttcatctgcatccttttttttagagtccacatatgaggggtattatatttttaaaagttgctcatttcgcctccccggctgccatcatttaccccctac

SEQ ID NO: 67035 - DNA, 110 bp, synthetic construct
  source 1..110: mol_type = other DNA
tagttactttccaattcctaaagggtttctgccaaatgtcctggatacccattctctccactgatattcatttcctttcgaatgttggactaaaccatccttctcagctt

SEQ ID NO: 67036 - DNA, 110 bp, synthetic construct
  source 1..110: mol_type = other DNA
ctccactgatattcatttcctttcgaatgttggactaaaccatccttctcagcttctattgcatctcatgggtcctgctatctctctaggtccctaaacctttatgtgat

SEQ ID NO: 67037 - DNA, 110 bp, synthetic construct; identical to SEQ ID NO: 67035
  source 1..110: mol_type = other DNA

SEQ ID NO: 67038 - DNA, 110 bp, synthetic construct; identical to SEQ ID NO: 67036
  source 1..110: mol_type = other DNA

SEQ ID NO: 67039 - DNA, 110 bp, synthetic construct
  source 1..110: mol_type = other DNA
catcctcatggatcctagtcggatttgcttccactgcgccacaacaggaactccccaggataatttcttagcttccctttactgcatctctgatgcaggtggggtattta

SEQ ID NO: 67040 - DNA, 110 bp, synthetic construct
  source 1..110: mol_type = other DNA
atattatacaaaggggggagaagcacactctccttaatttatagaagcaagctcatacgcactgtacagaaagccaacgttttcaaaaacattcgagaaaatcgttatga

SEQ ID NO: 67041 - DNA, 110 bp, synthetic construct
  source 1..110: mol_type = other DNA
agaattgtgtcatttttaactatttcttttctggttgcaaagtgaatatcatacgtaatatttgtgtgtttgctaagtggaagaacagtgtttgataggatgacctgtgt

SEQ ID NO: 67042 - DNA, 110 bp, synthetic construct
  source 1..110: mol_type = other DNA
tttcatttgtttttgttagtacaaataagaaacagttgggacaagtctcatttctgattcagattacttactacatgggcctttggtgtacaaagtagttaaggatttca

SEQ ID NO: 67043 - DNA, 110 bp, synthetic construct
  source 1..110: mol_type = other DNA
ctgtggggtcttggtcctcaggccctggacgtcgtatgtgttgccatctccagtgtttgtcttctcagctctgtgagactgttattgccttttctgcctcttagtggttt

SEQ ID NO: 67044 - DNA, 110 bp, synthetic construct
  source 1..110: mol_type = other DNA
tttgtcttctcagctctgtgagactgttattgccttttctgcctcttagtggtttttgtctgggacgggtagtgttgtcactctttcacctgaacacttctccttcctct

SEQ ID NO: 67045 - DNA, 110 bp, synthetic construct
  source 1..110: mol_type = other DNA
aaccgtctgggttttctccacgaaaaagtcaggaaagaaaacttaaaaagctgcaatgattcaaagaaaaacaaaacaaaacaaaacaaaacactccttacagccgtatt

SEQ ID NO: 67046 - DNA, 110 bp, synthetic construct
  source 1..110: mol_type = other DNA
acaataaacactggctgtaggtctcgcagttccagggcctgctctcactctactagagcagagaggaagcttcgggactcagagcgtcctgccagattctgaaagaagga

SEQ ID NO: 67047 - DNA, 110 bp, synthetic construct
  source 1..110: mol_type = other DNA
gagcagagaggaagcttcgggactcagagcgtcctgccagattctgaaagaaggaccgttagctttgggggctcttcccctttcttttcatcctcttcaccggccctgtt

SEQ ID NO: 67048 - DNA, 110 bp, synthetic construct
  source 1..110: mol_type = other DNA
ctgccctggggggtcctggggctctcctcttgttttccaacgtgtttaaaaggcagagcagtgaaatgacactgcaaaacggtggacagggcacttccagaccggaggcc

SEQ ID NO: 67049 - DNA, 110 bp, synthetic construct
  source 1..110: mol_type = other DNA
gagcagtgaaatgacactgcaaaacggtggacagggcacttccagaccggaggccctgtgtcacagtgttggccggttattccgttccacgtgcttgctctggagagcct

SEQ ID NO: 67050 - DNA, 110 bp, synthetic construct
  source 1..110: mol_type = other DNA
tcgttcgtccttctttaggaagagttcctctctgctttcctaaggtatagttacatatagtaaattgagtttacttaaagctaggatttagtaatatttgagagagtcaa

SEQ ID NO: 67051 - DNA, 110 bp, synthetic construct
  source 1..110: mol_type = other DNA
tgccttgcaagaacgggcagatgaaagaccacaggccagacatagcctttgccttcacagagtttatgttatgaggacttcagcttttagataaaaatttagcctgtgtg

SEQ ID NO: 67052 - DNA, 110 bp, synthetic construct
  source 1..110: mol_type = other DNA
cacagagtttatgttatgaggacttcagcttttagataaaaatttagcctgtgtgtgtgtgtgtgtgtgtgtgtgtgtaagggtcaaggtgaataccaataggccaacag

SEQ ID NO: 67053 - DNA, 110 bp, synthetic construct
  source 1..110: mol_type = other DNA
caagtagtcatgattttgaagttgatgttgcagaaagcattgctagttagacatttatctaagacgacataaagggagtcttaattaaacggaaggacatgaaattttaa

SEQ ID NO: 67054 - DNA, 110 bp, synthetic construct
  source 1..110: mol_type = other DNA
tgatttacccctttttttggggggggtgtcagtggggcctttaaaaaaaaagggcttcatttcttttttttgtctttttgctgtttcttgggccgctcctgcagtatatg

SEQ ID NO: 67055 - DNA, 110 bp, synthetic construct; identical to SEQ ID NO: 67054
  source 1..110: mol_type = other DNA

SEQ ID NO: 67056 - DNA, 110 bp, synthetic construct
  source 1..110: mol_type = other DNA
tggaaatacgaaactggtgagacaattcttcaaagagcttttagggggtaccttgaaacataaaataaagcccgcaggtgcactggttaaagatgtaattgcacaataac

SEQ ID NO: 67057 - DNA, 110 bp, synthetic construct
  source 1..110: mol_type = other DNA
gggtaccttgaaacataaaataaagcccgcaggtgcactggttaaagatgtaattgcacaataacagaactttaataaatcaaatgttttgtctagtttaagaaaatgag

SEQ ID NO: 67058 - DNA, 110 bp, synthetic construct
  source 1..110: mol_type = other DNA
agagaaggcacaattagaaattgtgtaacagatcaaaaggaccatggtttcaacttgaaaccatacccagccatgtgaatggacctatcagcaccatctgctcttccaag

SEQ ID NO: 67059 - DNA, 110 bp, synthetic construct
  source 1..110: mol_type = other DNA
tatttccaccttgtgctaccttcctgtatctgtgttctctccacagattggaacgcttttggttataatacagaaactcaattcaaagtttatataaacaataaagacta

SEQ ID NO: 67060 - DNA, 110 bp, synthetic construct
  source 1..110: mol_type = other DNA
ttgcatctcgaggcatgaagaagaaagctgagaataaactcagttaagacgaattggaaaggagttccctcgacgtctttagggaccttgaccttgattctgttttctcc

SEQ ID NO: 67061 - DNA, 110 bp, synthetic construct
  source 1..110: mol_type = other DNA
ggaaaggagttccctcgacgtctttagggaccttgaccttgattctgttttctcctcggcctgcagagcagaaacgtggttttcctcttcctcccgtgagtgtgttttct

SEQ ID NO: 67062 - DNA, 110 bp, synthetic construct
  source 1..110: mol_type = other DNA
ccaagagagaccatggcctctccagggctcagaaatgacagaggtgagtctcccggggagactgaggatgtgccatattgggaagcatcttcttaacagagcaggaatcg

SEQ ID NO: 67063 - DNA, 110 bp, synthetic construct
  source 1..110: mol_type = other DNA
agttctgtaagatgctgaggcttcaaaaatgaatgcgctgcactttcgggtacctgcagccacggctggccggtgaaagttcagaagagcaggatgcttggtgactgggc

SEQ ID NO: 67064 - DNA, 110 bp, synthetic construct
  source 1..110: mol_type = other DNA
gcagccacggctggccggtgaaagttcagaagagcaggatgcttggtgactgggctctgggcttgcttgccactctctggccctctgtgatcaccttacagacattggag

SEQ ID NO: 67065 - DNA, 110 bp, synthetic construct
  source 1..110: mol_type = other DNA
cactcttcttgttagagaaacaaaaaactcttcctgcctttacaaaggtttgtgcttaacaattgcagaggaagcatttacacttgcagccacgccgccacgcctcgccc

SEQ ID NO: 67066 - DNA, 110 bp, synthetic construct
  source 1..110: mol_type = other DNA
gaccacgcagatttgcgcagccatttcttcaccgttgggatgaagctcgaagcggtgaatatgagtgagccctcgcacgtctgtcctgcatcagtgaccaaggtgaggct

SEQ ID NO: 67067 - DNA, 110 bp, synthetic construct
  source 1..110: mol_type = other DNA
aggatacacttgttggtttgttgggggcatatatacccctatagggccagagtaaggagtgggccacacgcctttcctagtagatggcaggaaggagggggacaagtggc

SEQ ID NO: 67068 - DNA, 110 bp, synthetic construct
  source 1..110: mol_type = other DNA
agtcagccgtgtttgtgtgacatcaaggaggaagaccaagatgaggcagtggatctggaaactgggcagagcaagggcagcaaagtggtgggcagcagaagccaagtggc

SEQ ID NO: 67069 - DNA, 110 bp, synthetic construct
  source 1..110: mol_type = other DNA
tggaaactgggcagagcaagggcagcaaagtggtgggcagcagaagccaagtggcagaggatagagaagctgatggaaggtggggaagggaagcttcctggggaaggaga

SEQ ID NO: 67070 - DNA, 110 bp, synthetic construct
  source 1..110: mol_type = other DNA
gcaaccgcccccttcgccccagagagaggagccagaacaagccacggcaggctgcgggcaatcagagttgctaattagactcaaagtgtcgtcactcgcgccggtgaacc

SEQ ID NO: 67071 - DNA, 110 bp, synthetic construct
  source 1..110: mol_type = other DNA
actgtaaagatctgaggtcacttctgctctgaattttaattctgcaggaaatatggctgggccaaaaaatagctgcacacatggccagtttcctgtttctgctctgccgt

SEQ ID NO: 67072 - DNA, 110 bp, synthetic construct
  source 1..110: mol_type = other DNA
gtaggattgaaaagccaccaatgtaattccaaagcttttgcacagagcgtttttattgtcacgttttaaagtgttcttgaggcatgcttgtgacagtttctgctgtgcaa

SEQ ID NO: 67073 - DNA, 110 bp, synthetic construct
  source 1..110: mol_type = other DNA
ttgtcacgttttaaagtgttcttgaggcatgcttgtgacagtttctgctgtgcaaccaagtgattcagttgtacgtgtacacacacccatccgcgttcagattcttttcc

SEQ ID NO: 67074 - DNA, 110 bp, synthetic construct; identical to SEQ ID NO: 67072
  source 1..110: mol_type = other DNA

SEQ ID NO: 67075 - DNA, 110 bp, synthetic construct
  source 1..110: mol_type = other DNA
agcgtttttattgtcacgttttaaagtgttcttgaggcatgcttgtgacagtttctgctgtgcaaccaagtgattcagttgtacgtgtacacacacccatccgcgttcag

SEQ ID NO: 67076 - DNA, 110 bp, synthetic construct
  source 1..110: mol_type = other DNA
taacccttcaggactcatgctgagcaaataacctaagattaacattttaattcatattataatcgaaacgtgaattttgcagaatgagtctcactgggctaagacacact

SEQ ID NO: 67077 - DNA, 110 bp, synthetic construct
  source 1..110: mol_type = other DNA
ctgctcgtttctccttgtcaggtgctggttttacctcgaccgccttcggtggtcggggacctgtccgcccggcgtgtgtatttcctgtcatggcctctctgtagttgcga

SEQ ID NO: 67078 - DNA, 110 bp, synthetic construct
  source 1..110: mol_type = other DNA
gggacctgtccgcccggcgtgtgtatttcctgtcatggcctctctgtagttgcgactgagtgaattgggtcttgggttcttttggcaacactgggccttgctgaacgagt

SEQ ID NO: 67079 - DNA, 110 bp, synthetic construct
  source 1..110: mol_type = other DNA
aggtgtatgacgcaatgataacaagtaagcactataaaattatctataggcatgtgtttccttatttgggtacatgaaggtgtcatatacagatttcttgaccaaaactt

SEQ ID NO: 67080 - DNA, 110 bp, synthetic construct
  source 1..110: mol_type = other DNA
gtgatgggacaatatccggtaggttgacggtttctcccaccagcttctgttcgtgcccggcccagccctctgtccccacagctggtgtttgtcttcaccgtgtcaggaag

SEQ ID NO: 67081 - DNA, 110 bp, synthetic construct
  source 1..110: mol_type = other DNA
cccggcccagccctctgtccccacagctggtgtttgtcttcaccgtgtcaggaagcagatgatacaggagcagcccagagagaaagaacgcggcagattcttagctcgcg

SEQ ID NO: 67082 - DNA, 110 bp, synthetic construct
  source 1..110: mol_type = other DNA
accctgtaaacatgaccggagaacatgatacaagtgacatcggatgaggagggaagccagtggaagggcccacagtggcatttagctggagtttccccagaggggctcta

SEQ ID NO: 67083 - DNA, 110 bp, synthetic construct
  source 1..110: mol_type = other DNA
atgaggctgggacagagggggctcagaagaggccgcctggagctgtgggaggggccctgaaagtgctgtttttcaggtcttctgactcctaaagttctcccgctagtcca

SEQ ID NO: 67084 - DNA, 110 bp, synthetic construct
  source 1..110: mol_type = other DNA
cctgaaagtgctgtttttcaggtcttctgactcctaaagttctcccgctagtccacaccacttcaccgtcagatttttacttgttttaaaaataatgagtttactgtgga

SEQ ID NO: 67085 - DNA, 110 bp, synthetic construct
  source 1..110: mol_type = other DNA
tgaccagaatattctctagagcaaatttcaagacccgccaagagatctgcacgtctctgtgtctgtctccggtactaacgagctctcttgacgtcgcttcaagtaagcac

SEQ ID NO: 67086 - DNA, 110 bp, synthetic construct
  source 1..110: mol_type = other DNA
gccggacgggaggccaggctgacctgggttgggcgtcaggtgagctggcacctgggaacacaggcctgggaggtgtctgctcattaaacgcaccctcccagcctgggaga

SEQ ID NO: 67087 - DNA, 110 bp, synthetic construct
  source 1..110: mol_type = other DNA
gaacacaggcctgggaggtgtctgctcattaaacgcaccctcccagcctgggagaggagggtcctgtgggaggtgatgggatttgctgccagtccttgacctcagccagc

SEQ ID NO: 67088 - DNA, 110 bp, synthetic construct
  source 1..110: mol_type = other DNA
agcatggctggctggactcagcccaagggccatagcttgctgaacccatttaaatagtcttaggactaactagataatagtacagacaactagttaactgtacagcctct

SEQ ID NO: 67089 - DNA, 110 bp, synthetic construct
  source 1..110: mol_type = other DNA
ccctgttctttccactttctttaccagaattttcagacctctctggacatacagcaatacagcgaagctcagtatatgtccattttgagctggaacagttgccaccctcc

SEQ ID NO: 67090 - DNA, 110 bp, synthetic construct
  source 1..110: mol_type = other DNA
gcccctccagatggacaggacgctctactccctccggttggaggctcctgtggactggcccttgttactgctgttgccactgctgccccatagaattgcttcgaggttgg

SEQ ID NO: 67091 - DNA, 110 bp, synthetic construct
  source 1..110: mol_type = other DNA
ctctggctgcgcctttggcctgggagcctgagtgatgcgcgtgctgaatccagtgaggcatctgccttgggacctgaggtggcacagggatgtccaaatgctggagtggc

SEQ ID NO: 67092 - DNA, 110 bp, synthetic construct
  source 1..110: mol_type = other DNA
gtggaacggacagtccaccgaatgccgtccaaaacaggcttgtagggctttgccgtgggggagcctaggctgagccccgtcctccgtctgagctctttgactggtggagg

SEQ ID NO: 67093 - DNA, 110 bp, synthetic construct
  source 1..110: mol_type = other DNA
tgtttttcctgaggactgagacacggagaggctggaactaaagcagcaagtcggtggaaaccaagcggtggccacggctcccctctgagtgaagacagcgctcgccggaa

SEQ ID NO: 67094 - DNA, 110 bp, synthetic construct
  source 1..110: mol_type = other DNA
ttccagtttggataccttttatctcttttcttgcctaattgctctggctaggacttccagtactgtgttgagtaaatgtggcacaagtgggcatccttgttcctgaatct

SEQ ID NO: 67095 - DNA, 110 bp, synthetic construct
  source 1..110: mol_type = other DNA
tccagtactgtgttgagtaaatgtggcacaagtgggcatccttgttcctgaatcttagaggaaaagctgctagcttttcactgttgagtatgttgttaactttgagtttt

SEQ ID NO: 67096 - DNA, 110 bp, synthetic construct
  source 1..110: mol_type = other DNA
aacagtacagcaggaggtctttgcatcagtcataagagttaataccaagaagcatatttaaaattcatcgaggttttaggggaagcgtcaaagcccttgcggataagcag

SEQ ID NO: 67097 - DNA, 110 bp, synthetic construct
  source 1..110: mol_type = other DNA
gttactactctgagtgttcattaacagagggcctcagaccgggtacctttaaatagcaggactctgtcctcacagttctcagtctagaagtccggagtgcaggcccgggc

SEQ ID NO: 67098 - DNA, 110 bp, synthetic construct
  source 1..110: mol_type = other DNA
cgggacctgcaaaccagctctacaacaactgctaaaggaactgctctaggcagaaaagaaaaaaaccttctctgtaatcgctttcagaggatagaagcacatacaaccat

SEQ ID NO: 67099 - DNA, 110 bp, synthetic construct
  source 1..110: mol_type = other DNA
atgggaagtttatgtccttctagaagtagcagtctagctaaaaaagaaatggtgaaattagtttatcactattttgcaatccctaatgaagtactggatctagcctctgt

SEQ ID NO: 67100 - DNA, 110 bp, synthetic construct
  source 1..110: mol_type = other DNA
tcccatcgtctagaatcccatccatttatttatccatttatgttgagggacatcttggttatttctccattttgacaattacgactaaagctgctataaacatccttgtg

SEQ ID NO: 67101 - DNA, 110 bp, synthetic construct
  source 1..110: mol_type = other DNA
tggttatttctccattttgacaattacgactaaagctgctataaacatccttgtgtaggtttctgtgtgtcagtaagtaactaccactgcagttcagtctaaactactga

SEQ ID NO: 67102 - DNA, 110 bp, synthetic construct
  source 1..110: mol_type = other DNA
tcagactttaatgttatacagatcacattctctttaaaaaaaaatatattcctagttcatccacttcttattaaagaaaatatgcaggtgacttgagtggtgggggtgtg

SEQ ID NO: 67103 - DNA, 110 bp, synthetic construct
  source 1..110: mol_type = other DNA
ttcatccacttcttattaaagaaaatatgcaggtgacttgagtggtgggggtgtgctacaaggaagtgggaccttccataattgaaaggaggtctgctacgctttgagat

SEQ ID NO: 67104 - DNA, 110 bp, synthetic construct
  source 1..110: mol_type = other DNA
tagacaagttgctcattggtggctttttccacattttttgacatttttgagtggcattgtgacagcagtatatcggagcagcgtaggggcaaatacataaaatgcaggcg

SEQ ID NO: 67105 - DNA, 110 bp, synthetic construct
  source 1..110: mol_type = other DNA
gggcgaggcacccccacagttccagtttctccctccaggcctgttcccgcctcagcccagagcaagaagcctgctggctcacgtgctcagggcgggtgcaggtttttaat

SEQ ID NO: 67106 - DNA, 110 bp, synthetic construct
  source 1..110: mol_type = other DNA
cccagagcaagaagcctgctggctcacgtgctcagggcgggtgcaggtttttaattcaagttcagaaaagggtcagccacttcccatccagtcttgacatggtttcttcc

SEQ ID NO: 67107 - DNA, 110 bp, synthetic construct
  source 1..110: mol_type = other DNA
ttggttccagtccccacaggtctggcccagacctcgctccttcctggcggcttccttgagatagaagtaacggcttgccagattttagctgataagattggactctgagc

SEQ ID NO: 67108 - DNA, 110 bp, synthetic construct
  source 1..110: mol_type = other DNA
gatgggagaccggacattcatgcaatgtcacggtagcactacatgaattacttggtgggaaaaacataactgtacgacgaaggcatcagaatcaccaccccaccccacgc

SEQ ID NO: 67109 - DNA, 110 bp, synthetic construct
  source 1..110: mol_type = other DNA
ccttcctacaatctgatgtgtctaaaacactgcatgacctacagcaagacgtcagctccattagcttcgtagtaaagttcacctaggggtcaggggtgtgatggcagcga

SEQ ID NO: 67110 - DNA, 110 bp, synthetic construct
  source 1..110: mol_type = other DNA
aggaatacaggacctgagagacaggcaccaggttacaagaatgtacaatttacatgttgttcgcatatagtaaagtcgagctaccaaaaaaaagcctgtgcgctggtttg

SEQ ID NO: 67111 - DNA, 110 bp, synthetic construct
  source 1..110: mol_type = other DNA
cagatacattacctgaatctcccagctacccccaataaatcatagatgaaagcggatttcatctggtcccaagtagctattactagcagtttttgtttccaagcaaatga

SEQ ID NO: 67112 - DNA, 110 bp, synthetic construct
  source 1..110: mol_type = other DNA
cagtaagaccgacctctgcatggtgttgcgttatttacccaatgcttttaatagctgccattgcttcctgacccacagggaacgggcgggaggtgagagcggagctgaga

SEQ ID NO: 67113 - DNA, 110 bp, synthetic construct
  source 1..110: mol_type = other DNA
tgccattgcttcctgacccacagggaacgggcgggaggtgagagcggagctgagagaaggagaggggcgcccacaggggcctgggagcccactggggtctgagttctggg

SEQ ID NO: 67114 - DNA, 110 bp, synthetic construct
  source 1..110: mol_type = other DNA
gtaacagaaacacatcctcagacagggctgcgtgagtgccagggagcaaatggacactggaaccctgcagcactgcagctgggcgggtacaacgggctccctgatcctca

SEQ ID NO: 67115 - DNA, 110 bp, synthetic construct
  source 1..110: mol_type = other DNA
tgactattcctttattttgtgcatactagtaatagcatatatcacctaaattctggagactttaagggtttcaaatcattacacaaaaagaaacataacactgtgacggt

SEQ ID NO: 67116 - DNA, 110 bp, synthetic construct; identical to SEQ ID NO: 67115
  source 1..110: mol_type = other DNA

SEQ ID NO: 67117 - DNA, 110 bp, synthetic construct
  source 1..110: mol_type = other DNA
tcggatttgttaaccactgcgccacgacgagaactccaaacttatgtactcttaccataggctccagcagtcaatcatacacttgctgttacccaaaggagttgaaaatg

SEQ ID NO: 67118 - DNA, 110 bp, synthetic construct; identical to SEQ ID NO: 67117
  source 1..110: mol_type = other DNA

SEQ ID NO: 67119 - DNA, 110 bp, synthetic construct
  source 1..110: mol_type = other DNA
tatcttgaaatatactagcacatgatgtgagttcaattttaacagaagagggattttacagaatcactaggtttacagtccaaatgaaaccagaaatgtctgaatcgttt

SEQ ID NO: 67120 - DNA, 110 bp, synthetic construct
  source 1..110: mol_type = other DNA
cctggactggcgggaagctgggactcgggggccatagaccgcacctaccctacttttcgctgcaaaaagataagcactgacttttttactaaagccctgaagtcctgggc

SEQ ID NO: 67121 - DNA, 110 bp, synthetic construct
  source 1..110: mol_type = other DNA
gctgcaggagctggtcttggttggcaccagtcgagcttctccttcccaccttctccaaacagacagtcggtaagggcctccctgggctttgaagccgcgctctccctggt

SEQ ID NO: 67122 - DNA, 110 bp, synthetic construct
  source 1..110: mol_type = other DNA
caaacagacagtcggtaagggcctccctgggctttgaagccgcgctctccctggtgaacgcccacccctccgtccaagctggtgtgttcagacgggagagaagggaggat

SEQ ID NO: 67123 - DNA, 110 bp, synthetic construct
  source 1..110: mol_type = other DNA
ccacacagcgctgaggacccggcagtgactgcaacgcctcctggagcaaacgcggcacgttgcaggccaagatgggacgagtcgtctctgcacgtctcaggcacgatccc

SEQ ID NO: 67124 - DNA, 110 bp, synthetic construct
  source 1..110: mol_type = other DNA
cacgttgcaggccaagatgggacgagtcgtctctgcacgtctcaggcacgatcccctgaacagacaagcaaaaactggacaacgcgaccgataatcaggataatggacct

SEQ ID NO: 67125 - DNA, 110 bp, synthetic construct
  source 1..110: mol_type = other DNA
ggctttggctggactgtggtttagagcgagacgagaagctttaccagctattagacgcctctgttccacacgagaagacacagatctccaacaacatcccaaagggtttt

SEQ ID NO: 67126 - DNA, 110 bp, synthetic construct
  source 1..110: mol_type = other DNA
cgcctctgttccacacgagaagacacagatctccaacaacatcccaaagggttttcgatcgcagatgaagccatacacctaggctgtgttttaggatcaaaggcagcacc

SEQ ID NO: 67127 - DNA, 110 bp, synthetic construct
  source 1..110: mol_type = other DNA
acttccacatgcctcatctgtggccctaaaaagcaaaaaagaaacagacactgcgcaaaatcggaagtagaaagtaaggctccacctgcctctccccgcctaacggttgt

SEQ ID NO: 67128 - DNA, 110 bp, synthetic construct
  source 1..110: mol_type = other DNA
tcccgggaggacctggtggagcctgggtcagctccggcctgagtctgactccaccctcccgggagctgaaaaggcagttccacttgggaagcagaaatggaccggaaaag

SEQ ID NO: 67129 - DNA, 110 bp, synthetic construct
  source 1..110: mol_type = other DNA
tgcagtgtctagaagaggcccatccagagagacagaaggacttggtggcggccggggaccagaggtgccatagaggaatgagtgcaccggggcacagggtttcttgtcag

SEQ ID NO: 67130 - DNA, 110 bp, synthetic construct
  source 1..110: mol_type = other DNA
ttgagcctacgcgcagccctcttccacggccgtgacctgcaggggtttccttcgtaggcggcggagaccttaaaaatgttcgagaagaaggacagccgggtgaagagcgc

SEQ ID NO: 67131 - DNA, 110 bp, synthetic construct
  source 1..110: mol_type = other DNA
ggtgtgtgccaggtgcgttagccacaaaccacgtgaccgacacccccgggcgcccctcagagtcacatagtgtctcgtgacttcagcagagcgtaggagtcacactgagt

SEQ ID NO: 67132 - DNA, 110 bp, synthetic construct
  source 1..110: mol_type = other DNA
cgggacagggcacatggagggatgccacgcttatactcagctttacactgtacggagcgcctagaaacacggaggcggccttggaggaaaaagaagtcacttccaaaacc

SEQ ID NO: 67133 - DNA, 110 bp, synthetic construct
  source 1..110: mol_type = other DNA
gagtaccaccctgcacaacagagagctacccggccccaaatgtcactgacgctaggatgccaggggagagaccctgctttagagagaagggcaggcgaatgaccgtggac

SEQ ID NO: 67134 - DNA, 110 bp, synthetic construct
  source 1..110: mol_type = other DNA
gaggagagagagagaggagagagagaggagagagagagagagagaggagagagagagaggagagagagagaggagagagagcgcgagtgcacgcacgcttatgtctcatg

SEQ ID NO: 67135 - DNA, 110 bp, synthetic construct
  source 1..110: mol_type = other DNA
agaggagagagagagaggagagagagcgcgagtgcacgcacgcttatgtctcatgaccagcgtttcaaataccgaaagagcctctctaataggagcccctctgattggag

SEQ ID NO: 67136 - DNA, 110 bp, synthetic construct
  source 1..110: mol_type = other DNA
gacagggtcactttgctgtactgcagaaataggcacaattttttgtttgtttgttttgcttttcaggaccttacctgaagcatatggacgttcccaggctaggggtcaaa

SEQ ID NO: 67137 - DNA, 110 bp, synthetic construct
  source 1..110: mol_type = other DNA
gagtaaaaaaaaagactgagctacaagctgttttgagatgacatgcaaacaaacggcacttgtttgaagaaattacctttatactgtcttaccttggtcttagtcaattg

SEQ ID NO: 67138 - DNA, 110 bp, synthetic construct
  source 1..110: mol_type = other DNA
ccagagtcaccacgaggccttttaaacacgtcacgtgattctcctgtctcccgtcgggtgaggcacatgagtatgttgtatattcactacaaatgtcacacaaaagatgg

SEQ ID NO: 67139 - DNA, 110 bp, synthetic construct
  source 1..110: mol_type = other DNA
ttggtagaatcccaagctgcttttcataaaccagctggtgatcagtaagcagcaataaaccacccacgctgcttctttggagacaagtagatttgctaatgtttgttcac

SEQ ID NO: 67140 - DNA, 110 bp, synthetic construct
  source 1..110: mol_type = other DNA
ccaggcgtattgggaaagatcaagtctcatgcccacgagcgttaatacaattccagaggattttcgtgctgtgtttccgcgctgctcagtgattgctatgttttgcagag

SEQ ID NO: 67141 - DNA, 110 bp, synthetic construct
  source 1..110: mol_type = other DNA
gaggattttcgtgctgtgtttccgcgctgctcagtgattgctatgttttgcagagtgcggtaactgcgttgggaggtccctggtgtggaccctttcgaaggactcgtgat

SEQ ID NO: 67142 - DNA, 110 bp, synthetic construct
  source 1..110: mol_type = other DNA
atgctgtctccggagggtgtaattcctacaaaggaaatgaagggtcattggttcggtaatctacttgacggcaggcgtgctctggaagtgggtggcagtgaacagatgcc

SEQ ID NO: 67143 - DNA, 110 bp, synthetic construct
  source 1..110: mol_type = other DNA
ctggagaggtaaagtggtgtgacttggttcagtttccacccggagtgagagacaggttgcctttgaagaccagccgtctaatcttcaccttctgggtcagtaccaatgac

SEQ ID NO: 67144 - DNA, 110 bp, synthetic construct
  source 1..110: mol_type = other DNA
gaggaactttgcaatagtgtgcgttctttcctcactttctgatgttcacgctgttgttatcacatatttacgttataaactctgtaatacattgttagtattttgtctga

SEQ ID NO: 67145 - DNA, 110 bp, synthetic construct
  source 1..110: mol_type = other DNA
tcacgctgttgttatcacatatttacgttataaactctgtaatacattgttagtattttgtctgaaacaatcattttttacggaagcgtttaaacacgagaagaatgtca

SEQ ID NO: 67146 - DNA, 110 bp, synthetic construct
  source 1..110: mol_type = other DNA
taggctgggagggggaatttgagctttgaagacgtggttagactgcgtgattccttccctggtcgcgggagtgtagggattgccttaggtactctctccatgagggcagc

SEQ ID NO: 67147 - DNA, 110 bp, synthetic construct
  source 1..110: mol_type = other DNA
ccctggtccctggcaggccagcccccgctccccacctcggtcctcatatgtcatctaactaccgggaggaacgccgcgcctggaacaaaacccactttggcacttagggc

SEQ ID NO: 67148 - DNA, 110 bp, synthetic construct
  source 1..110: mol_type = other DNA
tccaccctccttcctccagccctgccggcccccggccccgcctctgctccccgaggaggcgatggctttctctgggagtttctttgtttcggactgtaattgacctgcgg

SEQ ID NO: 67149 - DNA, 110 bp, synthetic construct
  source 1..110: mol_type = other DNA
caccaggaggtggacgcatccgcggacgtgttgggggccctctctgacctcacggcgtggtctcttcacgtaactgcttgggttttcatcactgtcatcatgagggtagc

SEQ ID NO: 67150 - DNA, 110 bp, synthetic construct
  source 1..110: mol_type = other DNA
tgagggccgaggcacggtttaaggggagtatcatggtgttgggttcgagtctctccttggcgtttttaacgctctcactctccttctgctccaaggagctcattaggtgt

SEQ ID NO: 67151 - DNA, 110 bp, synthetic construct
  source 1..110: mol_type = other DNA
cttggcgtttttaacgctctcactctccttctgctccaaggagctcattaggtgtgttgatgaaatggccaattggtgaggtgtggggtctgaaggcagagcagggaggc

SEQ ID NO: 67152 - DNA, 110 bp, synthetic construct
  source 1..110: mol_type = other DNA
ccgacaggcctccaggaaggaatgtcctcaccagaactgtctctggctccctgttctgtttgtgacctggggactcctgtttgtcctgatttctcccagaaggattattt

SEQ ID NO: 67153 - DNA, 110 bp, synthetic construct
  source 1..110: mol_type = other DNA
tgtgtccctgacgccaggaggaaggggttggagtggctggagaggcggcagccatagcacaggatggattttaaggtgttcgaagggcatccttccttcagagtgagagg

SEQ ID NO: 67154 - DNA, 110 bp, synthetic construct
  source 1..110: mol_type = other DNA
aaataaataaaaaaaaattaaaaaatggggagaaagagattaccgcaaactggtcaaaaaaccagaaaaagaacacggcatctggctgtacattccttaatgattttgtt

SEQ ID NO: 67155 - DNA, 110 bp, synthetic construct
  source 1..110: mol_type = other DNA
aaaaaaccagaaaaagaacacggcatctggctgtacattccttaatgattttgttttattcactcggttggggtttgctctgttgattggtctcgtgaagtctaaggctc

SEQ ID NO: 67156 - DNA, 110 bp, synthetic construct
  source 1..110: mol_type = other DNA
acgtgccgggtaacagttcccgagagctccgaggtcagggcgcggcggacaaatgatagcaatgtcaccccctctgcagtttagtaattcctttccgcgtgtgcttacac

SEQ ID NO: 67157 - DNA, 110 bp, synthetic construct
  source 1..110: mol_type = other DNA
ggaggtagggcggctgtcctgctgctcacttacaagcctgagccgtcagcctgcaacagacgccccagcggcccgtgcggcgctcggtgaggctctcgggctgctggtct

SEQ ID NO: 67158 - DNA, 110 bp, synthetic construct
  source 1..110: mol_type = other DNA
gccgacacatgtttgcctgacccccaggctcctggccgagaaactcacacacacggctcaaattggaatgttggccacgctttaaaagcgggccgaccttgctgctgagt

SEQ ID NO: 67159 - DNA, 110 bp, synthetic construct
  source 1..110: mol_type = other DNA
cgctccggccgggccagggcccgcggcaacggcaacgacagggcgccaacaccagcgctcaggcagcacttagcttgttaaacgatggtttaaaacctgtcgctttcacc

SEQ ID NO: 67160 - DNA, 110 bp, synthetic construct
  source 1..110: mol_type = other DNA
tcctcataaagttgaaaacagaatagccgtatgatccagtgttccgcttccgggtatttatctaaaggaagtgaaaatacttacccagacaggtatctggacccccatct

SEQ ID NO: 67161 - DNA, 110 bp, synthetic construct
  source 1..110: mol_type = other DNA
ggggtggaagattgaagacaggacaggtctaaaagaataagtggtgatgacctctctccggctggtggtgtcggtgtccttgctgccagagtcactcagagagacgtcga

SEQ ID NO: 67162 - DNA, 110 bp, synthetic construct
  source 1..110: mol_type = other DNA
tgtgttagagcgaatgagtcgagccatgtgtgctgctcttgctgacgtgtcccttgaaccaagtaaagctctaccgtcagtgtcacccttgccatcttcccctcgggcgc

SEQ ID NO: 67163 - DNA, 110 bp, synthetic construct
  source 1..110: mol_type = other DNA
tctcctcttcctccgttcagctctaagtgacctgacactcacatggatcaaaggtccccggcgaccggtcgtgctgctgcagccttgtctctctcacatacgcacacact

SEQ ID NO: 67164 - DNA, 110 bp, synthetic construct
  source 1..110: mol_type = other DNA
ccccggcgaccggtcgtgctgctgcagccttgtctctctcacatacgcacacactctcacacactgctctttctctctggggctctctgaccccacatgtcccactgctt

SEQ ID NO: 67165 - DNA, 110 bp, synthetic construct
  source 1..110: mol_type = other DNA
tccctcctggtcctctagctattcagattctttccgcagcggcagctgctgcgatcaggctctgctcatcttcccacgtgtatgtcagaactcaggctgaatattgctgg

SEQ ID NO: 67166 - DNA, 110 bp, synthetic construct
  source 1..110: mol_type = other DNA
cttgtttcaagacagaatccaaacaaagacgtgaaaaccaagagcttacactaggggagtgtgttttggggggacgagtgacctcgccagcactgttaagtacaaaagag

SEQ ID NO: 67167 - DNA, 110 bp, synthetic construct
  source 1..110: mol_type = other DNA
ctgcaggttctgacatgtgggaatgggccagagctcccttgcgttaaagagagcgcaatgcaccgagcacttactcaccctcttcagggtggatttcctagtgattgggc

SEQ ID NO: 67168 - DNA, 110 bp, synthetic construct
  source 1..110: mol_type = other DNA
ggggaaggcagtaagtagacagttagggaactacaaggtggaaatgcaacattctacactaggaggtaaggctgaggaatactgactccaagactcacaatagtaacact

SEQ ID NO: 67169 - DNA, 110 bp, synthetic construct
  source 1..110: mol_type = other DNA
catcccaggagatgccatcggggaaccatgacgacactccggatagcaggactttttcacggcttcgcccctgcagggcactgactattgccaacagggagctggcaggt

SEQ ID NO: 67170 - DNA, 110 bp, synthetic construct
  source 1..110: mol_type = other DNA
ttcacggcttcgcccctgcagggcactgactattgccaacagggagctggcaggtgacggtggctctccttgaccctggcaccaaggtggtgtctgcagggtggggggcc

SEQ ID NO: 67171 - DNA, 110 bp, synthetic construct
  source 1..110: mol_type = other DNA
accagagttctttgtcagaactgcagcactgcgcctgcctcacagttcacacgtgttcaggccaaattcgcatcgtgtttgtcagtctgcagtgaaaggttttcttcaaa

SEQ ID NO: 67172 - DNA, 110 bp, synthetic construct
  source 1..110: mol_type = other DNA
ctccatacagcacccattaaggaccacacagctgtcgatgctgtgaaccctaacggcctgagctgaagagaccccctggactcagtgcaaccacacacccctgtacttgg

SEQ ID NO: 67173 - DNA, 110 bp, synthetic construct
  source 1..110: mol_type = other DNA
gtaaacaaggacctgcaagtcgccggtgcggctgcagcagagcagacggggaatcgaggtagggtgaggcggccagggttgcggagtcctgttgcgatgctggctttcac

SEQ ID NO: 67174 - DNA, 110 bp, synthetic construct
  source 1..110: mol_type = other DNA
gaggtagggtgaggcggccagggttgcggagtcctgttgcgatgctggctttcactctgaacttggggggagccacaggcaggagtcgttacaagaaggacatgattcga

SEQ ID NO: 67175 - DNA, 110 bp, synthetic construct
  source 1..110: mol_type = other DNA
gagctgcctctagatgcagacagggaagggtttcagtgggtctttattattacagattttccagccgctattacattagaactcggcgactccgacggccacagcgccga

SEQ ID NO: 67176 - DNA, 110 bp, synthetic construct
  source 1..110: mol_type = other DNA
aaaatggagatggaatttcactaacctgtgagcctttgctcaggtaccgcctctgtctggagtgtttggtcctttctccatcgggaagggcaggctcttcgctcaaggtc

SEQ ID NO: 67177 - DNA, 110 bp, synthetic construct
  source 1..110: mol_type = other DNA
tctggagtgtttggtcctttctccatcgggaagggcaggctcttcgctcaaggtcagctcagacgtcctcttccccaggctgccatcgctgacccccgaggaggactatg

SEQ ID NO: 67178 - DNA, 110 bp, synthetic construct
  source 1..110: mol_type = other DNA
gagacggcggcttgaggagggtggcgactggctgtggaaacgccgattcggagacactaaaggagctccagggcaagctcacggcagctgccattccatcagcatttact

SEQ ID NO: 67179 - DNA, 110 bp, synthetic construct
  source 1..110: mol_type = other DNA
tgtctgcagcaagaatcccctacccttgatggctcctcttactaatccaccgaccccctcactctgctcatgggttacgcatccccagctgtcttagaggttaggctaga

SEQ ID NO: 67180 - DNA, 110 bp, synthetic construct
  source 1..110: mol_type = other DNA
ttataaaccgtattccttaaacagtcttctcagctttttctccttgcgcaaaaatgcgtgattatccctttactctaccacccgactttgtgagtccgttttattttgca

SEQ ID NO: 67181 - DNA, 110 bp, synthetic construct
  source 1..110: mol_type = other DNA
caggggagctgtctggattttaactctgcggtgcggactggggtacaaacccgactgtctgtaaggcccgcagtcccttgctgaggagtttaaagtcagagcagatggtc

SEQ ID NO: 67182 - DNA, 110 bp, synthetic construct
  source 1..110: mol_type = other DNA
gcacagactccagagacgagcaggaggcaccagatcctcatggctcagatgacggagctgggctgaaagaggggaacagaccaaagggagaaacgttgtcactggggccg

SEQ ID NO: 67183 - DNA, 110 bp, synthetic construct
  source 1..110: mol_type = other DNA
tccctagcatccgggtccacaggtaactgatccaccaggttctgagaaaagacttgcagaggctaatttagtgaacgctcttccccgctcaataccagctggaaaacttg

SEQ ID NO: 67184 - DNA, 110 bp, synthetic construct
  source 1..110: mol_type = other DNA
ctgtattccgcacgctgtgcatttcgtggcggtgacacactcaactctgcacccgagagctgctacctctgcatctccctcctccatttgtttcctctgcccacctccct

SEQ ID NO: 67185 - DNA, 110 bp, synthetic construct
  source 1..110: mol_type = other DNA
tagtgctttcccggggtaggggaagagttagtggaagtgtctgtgggttggctcggaaaaaagtgggtagacgcaaactactctatttaaagccttgtatgaccgtatga

SEQ ID NO: 67186 - DNA, 110 bp, synthetic construct
  source 1..110: mol_type = other DNA
aacgtcataggatcatattgtgaggatgaacgtgagttaaaatagacacattccttaaacgaaagacagcatgctgtaagcaccgtgtgtgtcgcccatcttgactcgct

SEQ ID NO: 67187 - DNA, 110 bp, synthetic construct
  source 1..110: mol_type = other DNA
agtgggtcactgaatgcccacgagagggattacgggaggcaagtccaaggcggcaggaaagatggcagactacatctttgttgggctgcagaggctaacagtacgttcaa

SEQ ID NO: 67188 - DNA, 110 bp, synthetic construct
  source 1..110: mol_type = other DNA
ggaaagatggcagactacatctttgttgggctgcagaggctaacagtacgttcaactcgagggcttgctactgtacaaagagaggtttaggaccaactgggtttgtctgt

SEQ ID NO: 67189 - DNA, 110 bp, synthetic construct
  source 1..110: mol_type = other DNA
gggacagcctgatgggctggccctgggccccctgatgttcctgcatcagggtctggttcacagtacagaaacgacgaagaccaaaaagggatgacactaaaaattggaga

SEQ ID NO: 67190 - DNA, 110 bp, synthetic construct
  source 1..110: mol_type = other DNA
ttctcctagacgggacctccagaggactgaggttgaccgtgaggaaaggtcctataacataagaagtcagactttgacctttttatgattaatgtgggggaaaaaatgtt

SEQ ID NO: 67191 - DNA, 110 bp, synthetic construct
  source 1..110: mol_type = other DNA
tcactcgttggttctgtgaggagcagagtgacacaggctggtattacagtggcagagttatggatgaggagcaagctcactaggctgcaaggttctttttggaagacaaa

SEQ ID NO: 67192 - DNA, 110 bp, synthetic construct
  source 1..110: mol_type = other DNA
ccaggaatcataaccagggagggaaagtttccagaaggagtggtggcgataccgtagcacccacagaggaccggggagtggttcccggctgcatcactgaagctaaaccc

SEQ ID NO: 67193 - DNA, 110 bp, synthetic construct
  source 1..110: mol_type = other DNA
gcgcgtgtcctgagtcacacgcggcaggtgctctttgcgtggcatttcgctgaatccttccggtagctgccaggtcaacaccgtagtttactagttagtcctcgctttac

SEQ ID NO: 67194 - DNA, 110 bp, synthetic construct
  source 1..110: mol_type = other DNA
tggttttgtcccagtccctgctgttgtatctctgtagctttgtagtatagtctaaagtctggggaggtgatagctccagcttgacgaaatgttagagaaatgcaagtcag

SEQ ID NO: 67195 - DNA, 110 bp, synthetic construct
  source 1..110: mol_type = other DNA
cctggaggcggagaacgctctcgaagcagcttgactctgaggcagacagggagagatgctgctaactgccccgtgagaaaaggtcagttacgtgcccccaaaaccgaaga

SEQ ID NO: 67196 - DNA, 110 bp, synthetic construct
  source 1..110: mol_type = other DNA
atctccacagcaacccagggagctaagtctttttgttgctgtttctctgttacacgttttttaaaaaccaacactgacagaagctagactcagaggcactcactggttac

SEQ ID NO: 67197 - DNA, 110 bp, synthetic construct
  source 1..110: mol_type = other DNA
gttttttaaaaaccaacactgacagaagctagactcagaggcactcactggttacagcagagctgggattcacacccaggtcgccccaatgtcagtgcccacacctttcc

SEQ ID NO: 67198 - DNA, 110 bp, synthetic construct
  source 1..110: mol_type = other DNA
aaaaagagaattgctgaaaccaggtactgcagatggaaggccaagaggggtccgtgcttattcggttacaaaagcattattactggagagaggggcggtggaatgagccc

SEQ ID NO: 67199 - DNA, 110 bp, synthetic construct
  source 1..110: mol_type = other DNA
tctctaaaaccaatttttgctttctaagaagtgtttttacatcttcttcaggaatgtcactgtctgctggatcttccccgctgcattcccctaagatcactccacacact

SEQ ID NO: 67200 - DNA, 110 bp, synthetic construct
  source 1..110: mol_type = other DNA
gtcactgtctgctggatcttccccgctgcattcccctaagatcactccacacacttcccctgctcccaggagaagaagtcacactccaaatccagcaagttacatggtgc

SEQ ID NO: 67201 - DNA, 110 bp, synthetic construct
  source 1..110: mol_type = other DNA
tatggtgtgttctgacccctaatacttcagaacaagaccctctgggtcaaagagggtcactgccaatacagtgacttcagccaagcagagtgggcccctcacccaacatg

SEQ ID NO: 67202 - DNA, 110 bp, synthetic construct
  source 1..110: mol_type = other DNA
gtcactgccaatacagtgacttcagccaagcagagtgggcccctcacccaacatgccttgtgtcccgaaagaactggccacgtgagaacagaggcagggggagaaggccg

SEQ ID NO: 67203 - DNA, 110 bp, synthetic construct; identical to SEQ ID NO: 67201
  source 1..110: mol_type = other DNA

SEQ ID NO: 67204 - DNA, 110 bp, synthetic construct; identical to SEQ ID NO: 67202
  source 1..110: mol_type = other DNA

SEQ ID NO: 67205 - DNA, 110 bp, synthetic construct
  source 1..110: mol_type = other DNA
gctgcagggcacagcacctcctctgccaccatctctcagtcttcctgcctgagcctctcctcatacagcatcgcagctgcagaagctgtaaaagggcatctgcggagact

SEQ ID NO: 67206 - DNA, 110 bp, synthetic construct
  source 1..110: mol_type = other DNA
gggataattttgtacaccgcaattagataacactaattcctacagcaattaacgcagcaatacggaaacactaggaaaggtgtgaaaaaagtcacttcaaatcttagaat

SEQ ID NO: 67207 - DNA, 110 bp, synthetic construct
  source 1..110: mol_type = other DNA
atgcccagagtccagcccctgcaatcctccactgcaatttgtttccaacactgttggctgcagctctgtaaacactgacacgcaatctctgctagaaaaagccctcccca

SEQ ID NO: 67208 - DNA, 110 bp, synthetic construct
  source 1..110: mol_type = other DNA
ggctgcagctctgtaaacactgacacgcaatctctgctagaaaaagccctccccagataaggctactggacggaggatgccaaaacaggaaggaagagcctcattttcac

SEQ ID NO: 67209 - DNA, 110 bp, synthetic construct
  source 1..110: mol_type = other DNA
ccccaagcccttcagtgtcccatctacagagcaggtgtgttcggagttccccctgactatgtgcactgtgcagagctttcaccggtacgtcctgggtgacaacttgcccg

SEQ ID NO: 67210 - DNA, 110 bp, synthetic construct
  source 1..110: mol_type = other DNA
aaaggtcgtctcttggtcacggaggcctcgcccttccttctcagcgctcttgcacacctgcggcctggagcggggagaaggcgggagctctctctcctcctggaggcctg

SEQ ID NO: 67211 - DNA, 110 bp, synthetic construct
  source 1..110: mol_type = other DNA
acctgcggcctggagcggggagaaggcgggagctctctctcctcctggaggcctgaatttcctggtctgtggtcttggcttgtcaaccccaatgcatttagtagtcaggt

SEQ ID NO: 67212 - DNA, 110 bp, synthetic construct
  source 1..110: mol_type = other DNA
aatgcagtgatgttccatatccaccctgggctgtgggctcattaagggaggagtgaactggtttctctcaatgactcaggtttattcatcttatcatctaatcttgcttt

SEQ ID NO: 67213 - DNA, 110 bp, synthetic construct
  source 1..110: mol_type = other DNA
agagctgctgtaaattcaacggcgttttagccttaactgcagctactgtacctgatatacttaaggttattgctctgaaccacttaacaagtgagtgtggcccagaggag

SEQ ID NO: 67214 - DNA, 110 bp, synthetic construct
  source 1..110: mol_type = other DNA
aagaaaagataccctaaaaaatctatgtggcacctcagacaagaggataaagactgtggcttatctgtactggattatagccaagcttttctacctcactttgttttagt

SEQ ID NO: 67215 - DNA, 110 bp, synthetic construct
  source 1..110: mol_type = other DNA
ccctgggctccttggagcctctggtcgagtgcagcctcctaagaggcctttccctgagcacctttagtaaaagagctgtacttcctctactccccagcccagctctttct

SEQ ID NO: 67216 - DNA, 110 bp, synthetic construct
  source 1..110: mol_type = other DNA
gagcacctttagtaaaagagctgtacttcctctactccccagcccagctctttctcccctttgctcagctttatttttcttcctgtcacccaccagcacctaacagcatt

SEQ ID NO: 67217 - DNA, 110 bp, synthetic construct
  source 1..110: mol_type = other DNA
aatggttttagaacttcctctctccgtggcttttcttgcattcccttctggaactcccaagctcttcatccttgaaatcaatgaatgaaagtggttttccaagtttccca

SEQ ID NO: 67218 - DNA, 110 bp, synthetic construct
  source 1..110: mol_type = other DNA
tctgctttgctgctgctgcgtcacccagcttttagatgagcacccggcactcaggggacattcaagaaataattactaaattcatttctattaggccacgttgattttgc

SEQ ID NO: 67219 - DNA, 110 bp, synthetic construct
  source 1..110: mol_type = other DNA
ggacattcaagaaataattactaaattcatttctattaggccacgttgattttgcctcaacttcaatttggaattcagacagcattaggcagtggttttaatggtagcga

SEQ ID NO: 67220 - DNA, 110 bp, synthetic construct
  source 1..110: mol_type = other DNA
gaacctggtgattctttaaaatgcgctgtgccctgccagggcactgcctgacgcctcagtagctcagatgctcagggaggcacctgggtggagaggatgggggtggtatg

SEQ ID NO: 67221 - DNA, 110 bp, synthetic construct
  source 1..110: mol_type = other DNA
ataacaatgagtaaaatactgtagtatttgacaaacaagctcgatgcatctttcccccctttttaaaaaagatgccctgtgttattaatgcaggagtgatgtgattagca

SEQ ID NO: 67222 - DNA, 110 bp, synthetic construct
  source 1..110: mol_type = other DNA
atctgatactgtacatgccaacctatttatttacagatcttaagcaaatgtctatgaggtcaatacaccattgtaccaaagctttatatacacaataagccctaaaggga

SEQ ID NO: 67223 - DNA, 110 bp, synthetic construct
  source 1..110: mol_type = other DNA
gccattgtggacctggaggaaggtcctgagcatctgcagactggcgtgtggaaagactgcagaactaagattcagaagaaccagaataaaatcttaatattgctcactgg

SEQ ID NO: 67224 - DNA, 110 bp, synthetic construct
  source 1..110: mol_type = other DNA
tgacttaggcgtcacaaagcagcggggcggtggtcatgctggcttagtctgagttggcgccagtagctcttgatggagtaagtccaagtgtaggaaaaggtggtcattag

SEQ ID NO: 67225 - DNA, 110 bp, synthetic construct
  source 1..110: mol_type = other DNA
ggcgccagtagctcttgatggagtaagtccaagtgtaggaaaaggtggtcattagcatctcttgacagtgctttgctagaggctcagatgagatcagcatgttatgggca

SEQ ID NO: 67226 - DNA, 110 bp, synthetic construct
  source 1..110: mol_type = other DNA
catgcacttggctgagaccagagcccaggacagttttcctcaaagtcaagtctaataactattaatgttggccatactttgagtgctgggataaaatgtagattcctaag

SEQ ID NO: 67227 - DNA, 110 bp, synthetic construct
  source 1..110: mol_type = other DNA
ctgctctaaaattaaggcaaaattattgtaccccattaaatttgtaatctcctattaatgaagtttaaaaagacagcacatttatcgcagggaactaagggaaaggaagg

SEQ ID NO: 67228 - DNA, 110 bp, synthetic construct
  source 1..110: mol_type = other DNA
cttccacacattctaggaaatgtgactggaccatcacaagccctattgaagttttgcacaaactcctgggatcaatctcccttgtagcttgcaagacagctctgattcag

SEQ ID NO: 67229 - DNA, 110 bp, synthetic construct
  source 1..110: mol_type = other DNA
gcacaaactcctgggatcaatctcccttgtagcttgcaagacagctctgattcagacactttgaatagaagatacccactgactgtcctcacaggtcttctcagacccta

SEQ ID NO: 67230 - DNA, 110 bp, synthetic construct
  source 1..110: mol_type = other DNA
ctaatcttcagtaaatgaaagtaacagtctgggaggctggtagaatattccaaatgggaagaggaacaaggtggtattcccagcttcggcaagaaccttaaaggaatctc

SEQ ID NO: 67231 - DNA, 110 bp, synthetic construct
  source 1..110: mol_type = other DNA
ataaacagccctttaattaaactgttcaagctgcagatgtctgttggatatgagggcctcgtgaacactgcacagggcatgtctccccagcccttgccatcattttcaac

SEQ ID NO: 67232 - DNA, 110 bp, synthetic construct
  source 1..110: mol_type = other DNA
ttttttagagtttgaaaaacaaaataatgtagctattaggtatcacataaatgggttccatatgctgttaaaccaaaatcagacaaaaacttaacgtaaggcagtttgct

SEQ ID NO: 67233 - DNA, 110 bp, synthetic construct
  source 1..110: mol_type = other DNA
tgtgtctttattcatagaaaagtgagaactttcttgagagggaaagcaagaaggaaaaaaaagctattaagaaagaggcacagtaggtcaaaggaataaggcatatgtca

SEQ ID NO: 67234 - DNA, 110 bp, synthetic construct
  source 1..110: mol_type = other DNA
gatctggttggttcatacctctgtttactggtctggatcctccttgaccacttggcagcacctgaagcagctgtcactagacttttcctccagggtccctcctcttgtgg

SEQ ID NO: 67235 - DNA, 110 bp, synthetic construct
  source 1..110: mol_type = other DNA
cagcacctgaagcagctgtcactagacttttcctccagggtccctcctcttgtggattatagaggatctcctgtctctgaattctccctatctctgttgataagcccact

SEQ ID NO: 67236 - DNA, 110 bp, synthetic construct
  source 1..110: mol_type = other DNA
taacttcttgttacactggaaagaaacaaacaaaactgaaacaaacaacataccctagcagtctgaagtgtttccttttttttttttttttcgtcttttgtcttttaggg

SEQ ID NO: 67237 - DNA, 110 bp, synthetic construct
  source 1..110: mol_type = other DNA
ctggaaagaaacaaacaaaactgaaacaaacaacataccctagcagtctgaagtgtttccttttttttttttttttcgtcttttgtcttttagggccgcacctgcggcat

SEQ ID NO: 67238 - DNA, 110 bp, synthetic construct
  source 1..110: mol_type = other DNA
tcatcgaaagtaaagaagacgcagaccctgtcttccatagctcacagtctggcgggggtgggaggaggggaaggaaaaagaagcaaacccaagcggaggctctgctgtgg

SEQ ID NO: 67239 - DNA, 110 bp, synthetic construct
  source 1..110: mol_type = other DNA
ctcagaataatcagtgagcaagtgcaagacagtgttcactgtggttggggcctggctttagcgacttttcctcacgtgcccgtggctgctagtgaccgacctgatccctt

SEQ ID NO: 67240 - DNA, 110 bp, synthetic construct
  source 1..110: mol_type = other DNA
ctttagcgacttttcctcacgtgcccgtggctgctagtgaccgacctgatcccttctttctgataactggaaccctgagaaaaaacatttcccagtcctccttgggactg

SEQ ID NO: 67241 - DNA, 110 bp, synthetic construct
  source 1..110: mol_type = other DNA
atggtttgctctttataatccaggcatagtcccatatatggaattaaagattacctgtaatgattcgttcttccctcgtctctttttcagttatttccacaggcactcca

SEQ ID NO: 67242 - DNA, 110 bp, synthetic construct
  source 1..110: mol_type = other DNA
tgtaatgattcgttcttccctcgtctctttttcagttatttccacaggcactccatcaatgattttggtgtattttttaataattggctctgagataggggaagaaaaat

SEQ ID NO: 67243 - DNA, 110 bp, synthetic construct
  source 1..110: mol_type = other DNA
agaagaatctaaagaaaaacagaacagtcttaccggggtaaaagaatgtgaaataaacaaaagcttgccttacctttcaaacccacgtaggcatatgcgaacatctattt

SEQ ID NO: 67244 - DNA, 110 bp, synthetic construct
  source 1..110: mol_type = other DNA
gtctgggcccttggggaaaagccctcatttacagcgttccgtggattctaatcgaccctgtgacgtcactgaacttggagtccggaagagttgcaccctagtggcctccg

SEQ ID NO: 67245 - DNA, 110 bp, synthetic construct
  source 1..110: mol_type = other DNA
ccctgtgacgtcactgaacttggagtccggaagagttgcaccctagtggcctccgaaagctgggacgggggttcccgtcgtggtgcagtgcaaatgaatctgactactat

SEQ ID NO: 67246 - DNA, 110 bp, synthetic construct
  source 1..110: mol_type = other DNA
agggatgtcctggttgctaaatctggtcaacacccagtagtctctctctctctctttttaaaaaacttctttattaaagtgtagttgatttacaatgttgtaccaatttc

SEQ ID NO: 67247 - DNA, 110 bp, synthetic construct
  source 1..110: mol_type = other DNA
ggagaaacacttaagtcctgaactgggtgtgcaaagaagcagctggatcccccactggactgaatttggaggtgatggttgggttatccttgctctcctcggccactggg

SEQ ID NO: 67248 - DNA, 110 bp, synthetic construct
  source 1..110: mol_type = other DNA
agtcccctagttgtcacagagctgctttctcctcaggaacacttactgcctccgcccctgtggggttgcctccaggcttctccaggtggcatattcgatgggtcgagtca

SEQ ID NO: 67249 - DNA, 110 bp, synthetic construct
  source 1..110: mol_type = other DNA
agcgtatagttcctgcgtctttattgctgggaggctttttcacaagcatttccattgcctctttgtcttctcctctcctccttcaagacctcacttgatagctgcctttt

SEQ ID NO: 67250 - DNA, 110 bp, synthetic construct
  source 1..110: mol_type = other DNA
tgcctctttgtcttctcctctcctccttcaagacctcacttgatagctgcctttttagtgttcactttcactgaaaaaagcctctgcattctctggggctcagaccttag

SEQ ID NO: 67251 - DNA, 110 bp, synthetic construct
  source 1..110: mol_type = other DNA
gttggggttaaatatcagccaccatgggcttgcccagcccccttgcccggtaatcttagctgcataaacatcaatattgtgcgttctccccttggaaaaatgaaggcgaa

SEQ ID NO: 67252 - DNA, 110 bp, synthetic construct
  source 1..110: mol_type = other DNA
ttagctgcataaacatcaatattgtgcgttctccccttggaaaaatgaaggcgaacaatgggaaaagatgtaacacgtgatttgcagccttattggaaatactttatgaa

SEQ ID NO: 67253 - DNA, 110 bp, synthetic construct
  source 1..110: mol_type = other DNA
ttttgacacacattaaccacaggaatgacagtgtacgtaaaacaacctttgtgcaacaaatgcgcagcaaagaaaaatctttattatgctgtacagtcccgaggaggagt

SEQ ID NO: 67254 - DNA, 110 bp, synthetic construct
  source 1..110: mol_type = other DNA
ttcttatgtcataatgctttggcctcatgctggttgtgtttattctctgaatcgtaaaacatttattaaatatggagtgtgagctcctaggttctgggggaataaaagat

SEQ ID NO: 67255 - DNA, 110 bp, synthetic construct
  source 1..110: mol_type = other DNA
catggatactagtagggtttgttactgctgagccacagtgggaattcctggctctggccttcaagtgactcttaacctctctaagtcccagctccgtctgtaaaacagtg

SEQ ID NO: 67256 - DNA, 110 bp, synthetic construct
  source 1..110: mol_type = other DNA
ggccttcaagtgactcttaacctctctaagtcccagctccgtctgtaaaacagtgttattagttcttcccaggattattgtggggagcaaatgtgagaagatgtatgtgg

SEQ ID NO: 67257 - DNA, 110 bp, synthetic construct
  source 1..110: mol_type = other DNA
ccaggcggggggtctgagccctctccccagagcccccaagacactgccaatcccgctgttgtgccacatcgggagctccgaggccagtgtcttgacagactctttttttt

SEQ ID NO: 67258 - DNA, 110 bp, synthetic construct
  source 1..110: mol_type = other DNA
ctgttgtgccacatcgggagctccgaggccagtgtcttgacagactcttttttttggcttcgcctgtgccacacagaagttcctgggccagggattgaacccatgcaaga

SEQ ID NO: 67259 - DNA, 110 bp, synthetic construct
  source 1..110: mol_type = other DNA
tcactccggctcttttggtttccgggaactcaagctaataaagaaaaaaggatttactcgaaagagacagaggccatgatggggcagcactggtcactgaggctacactg

SEQ ID NO: 67260 - DNA, 110 bp, synthetic construct
  source 1..110: mol_type = other DNA
actcgaaagagacagaggccatgatggggcagcactggtcactgaggctacactggccaccttctgtctctcttgcaggctcggggcctctctcccgttatttctaatgc

SEQ ID NO: 67261 - DNA, 110 bp, synthetic construct
  source 1..110: mol_type = other DNA
taggataagtagttagaagctgaattgctgattatctgagggggtatgacatgagtttaaagtctttcttcctcaaattctaatttggcgaaactaactttggtttcact

SEQ ID NO: 67262 - DNA, 110 bp, synthetic construct
  source 1..110: mol_type = other DNA
tttaaagtctttcttcctcaaattctaatttggcgaaactaactttggtttcacttccagcatatcccactctgtttgtcagacacagggctggatactcatcccttgct

SEQ ID NO: 67263 - DNA, 110 bp, synthetic construct; identical to SEQ ID NO: 67261
  source 1..110: mol_type = other DNA

SEQ ID NO: 67264 - DNA, 110 bp, synthetic construct; identical to SEQ ID NO: 67262
  source 1..110: mol_type = other DNA

SEQ ID NO: 67265 - DNA, 110 bp, synthetic construct
  source 1..110: mol_type = other DNA
ttcatgacccagtgagtcacagtgggaactctaggctggcttattacatagggactttccaagagaaatgattcactgtaacagactgtaacttggtccctacagttaga

SEQ ID NO: 67266 - DNA, 110 bp, synthetic construct
  source 1..110: mol_type = other DNA
aactccctctcacttttttcttactctcatgggaagagaaaagaaaacttgctactccatcagcaagttcctccttaattttcatcatatttctaggagctttggttttc

SEQ ID NO: 67267 - DNA, 110 bp, synthetic construct
  source 1..110: mol_type = other DNA
aaatgctccaacaggaaatggatgcctggaaatactccttataagacttcggtctttttttttttttttttaaataaagtccatgtatcattcaagagctagcatgataa

SEQ ID NO: 67268 - DNA, 110 bp, synthetic construct
  source 1..110: mol_type = other DNA
ttttttttttttttttaaataaagtccatgtatcattcaagagctagcatgataaccaccaagtataccaatcagctaagttcaaccttcaggccaaggggtactatgtc

SEQ ID NO: 67269 - DNA, 110 bp, synthetic construct
  source 1..110: mol_type = other DNA
tagtatccatgaggatgtaggtttgatccctggctctgctcagtaggttaaaggacctgagttgtggtataggtttcagatgaggctcggatctggtgttgctgtggtgt

SEQ ID NO: 67270 - DNA, 110 bp, synthetic construct
  source 1..110: mol_type = other DNA
tgtaggtttgatccctggctctgctcagtaggttaaaggacctgagttgtggtataggtttcagatgaggctcggatctggtgttgctgtggtgtaggccagcaactgta

SEQ ID NO: 67271 - DNA, 110 bp, synthetic construct
  source 1..110: mol_type = other DNA
ggtatgtgcacgtatgcagctgataaacatctacaggccaacgctttgctttctttctctctcttgatcctacagccctctctccgtatcagtggaggattgcttccagg

SEQ ID NO: 67272 - DNA, 110 bp, synthetic construct
  source 1..110: mol_type = other DNA
acaggagtagtgctttttctttagtaatcatatgaagaatattttattttagcttattgcaatgcccagagccttcagctatgtattcagtccactgggaatctcttatt

SEQ ID NO: 67273 - DNA, 110 bp, synthetic construct
  source 1..110: mol_type = other DNA
attgcaatgcccagagccttcagctatgtattcagtccactgggaatctcttattaaaaaacatggatccaggagttcccatcatggcgcagtgtttaacaaatctgact

SEQ ID NO: 67274 - DNA, 110 bp, synthetic construct
  source 1..110: mol_type = other DNA
aagtcctgaagaatacagctgcagattgggaaacaaaaaaacaaacccagagtatgcacaaaggcctgctgaaagctgcaggtcaggaaatggtagggtgttccccaccc

SEQ ID NO: 67275 - DNA, 110 bp, synthetic construct
  source 1..110: mol_type = other DNA
caccacttactgagtgctttataggtgccaggtctggtttaaagtgctttatatgcatattagttaaccctcacaatggtcctaagaggtgtgctcttattattcacagg

SEQ ID NO: 67276 - DNA, 110 bp, synthetic construct
  source 1..110: mol_type = other DNA
ctccctctagtgatgtctcatggcaaagtctgataggcagccagctggcaaagtagaaatgcggtttgtagggtactggcatggacaccacagagcagagaatggaaggg

SEQ ID NO: 67277 - DNA, 110 bp, synthetic construct
  source 1..110: mol_type = other DNA
agttataagctttaagatgtctcgagtcagtaattctgtttctggtaaacagtcttgaggaaatagtgagagagatggcattcttgtaaaagtgaaaaattgggaaaaac

SEQ ID NO: 67278 - DNA, 110 bp, synthetic construct
  source 1..110: mol_type = other DNA
taaacagtcttgaggaaatagtgagagagatggcattcttgtaaaagtgaaaaattgggaaaaactcaaagccccaactttagggagatagttaaatacattattgttta

SEQ ID NO: 67279 - DNA, 110 bp, synthetic construct
  source 1..110: mol_type = other DNA
aaattaacataaaatctgcctttcaatgacttccaaaatgtttcatttccttcttgctttggatgatgagatgcatttactgtttccatctccttcccagcaggcatccc

SEQ ID NO: 67280 - DNA, 110 bp, synthetic construct
  source 1..110: mol_type = other DNA
aactcccatttccagtttttaactattacagaacattgctataaacattcatgcacagctgttcatttcatttgccccagagcacaatgctagaccatatggttattgca

SEQ ID NO: 67281 - DNA, 110 bp, synthetic construct
  source 1..110: mol_type = other DNA
aggtgagatcgagatcatcccactcccctgccctcactaaaaagcccaaacaagtaagtggctatagggcattggattggaatggaaggggattaaagcctggggggtag

SEQ ID NO: 67282 - DNA, 110 bp, synthetic construct
  source 1..110: mol_type = other DNA
aaaagttactctaaccactatgatgcattaggagaaacagagcagttataatgttagttgctataaaacagagtgtagtggtgaagaacacacctccctggggcatgtga

SEQ ID NO: 67283 - DNA, 110 bp, synthetic construct
  source 1..110: mol_type = other DNA
agttgctataaaacagagtgtagtggtgaagaacacacctccctggggcatgtgatctgcgacagatgacctagtttgtgaataggaatagtaattgtacctatagtggc

SEQ ID NO: 67284 - DNA, 110 bp, synthetic construct
  source 1..110: mol_type = other DNA
tcagttttttgctttgcttggatgaggtataaaatgtgctgcaggaattccaaattttattttccatacttttattttttaaaaaagagatgtttaagtggcctgtttgt

SEQ ID NO: 67285 - DNA, 110 bp, synthetic construct
  source 1..110: mol_type = other DNA
ttagaccaagcgaatccttcgagtgagaaaggcagcatcaggagtggggaagatttgattcacccccttcccagcattcctacgtgttttcttgaccccctgagctatgg

SEQ ID NO: 67286 - DNA, 110 bp, synthetic construct
  source 1..110: mol_type = other DNA
tgattcacccccttcccagcattcctacgtgttttcttgaccccctgagctatggtctgttaaggtggatgtggagctcttgagagagcagctgtctgggtggtttcatt

SEQ ID NO: 67287 - DNA, 110 bp, synthetic construct; identical to SEQ ID NO: 67285
  source 1..110: mol_type = other DNA

SEQ ID NO: 67288 - DNA, 110 bp, synthetic construct; identical to SEQ ID NO: 67286
  source 1..110: mol_type = other DNA

SEQ ID NO: 67289 - DNA, 110 bp, synthetic construct
  source 1..110: mol_type = other DNA
gaactgtgctggatgatgtcactatccctagaccccagggagagttaagcctgctgtcacagcatacctcctcggttctcagctcgatgatgaccagcgctctccgattt

SEQ ID NO: 67290 - DNA, 110 bp, synthetic construct
  source 1..110: mol_type = other DNA
tcacagatgcagaatgcatggatagaggaccaagtgtatctgtgacattgcctgtatttggcttagaggacaggggttatagcttttactttcaggttgttgaacagctg

SEQ ID NO: 67291 - DNA, 110 bp, synthetic construct
  source 1..110: mol_type = other DNA
cccaattttccttatatatttagatctttctttagctactctttcatgcatctcattctgcgtatcaacctctcttccaaacagtctcctccctcagcatctccccgccc

SEQ ID NO: 67292 - DNA, 110 bp, synthetic construct
  source 1..110: mol_type = other DNA
ttctgcgtatcaacctctcttccaaacagtctcctccctcagcatctccccgcccaggtctgttgcttcttttttgcagactcctttttctcttactccttatatggtag

SEQ ID NO: 67293 - DNA, 110 bp, synthetic construct
  source 1..110: mol_type = other DNA
ctgttggggttcaaggctcaggctcacaagtttaaggagctgggttgtggtaatagtcatgataccgcagtcccgggagcggctctaggttgctttagcagcatatttgt

SEQ ID NO: 67294 - DNA, 110 bp, synthetic construct
  source 1..110: mol_type = other DNA
ttttaaagttttaaaatgaaaagtgagagattggtttattatttatagtaacgtgcactattgtttttgtcttttgttttgtctttttgcctcttctagggccgctccca

SEQ ID NO: 67295 - DNA, 110 bp, synthetic construct
  source 1..110: mol_type = other DNA
caagagaagggtgggagaaggaacctgaatggggcgccccctgcaggccaggcgagatggggctgctgtgtttatgcctcatttactgccccccaacaacaaggcaaagc

SEQ ID NO: 67296 - DNA, 110 bp, synthetic construct
  source 1..110: mol_type = other DNA
gtatctgcagaaggaaaagtttctggaaggggaagaggttctgtatgaaaggtatctgccagagggtgagtgctggagcaggacggtgcctagatggcaggtctagttca

SEQ ID NO: 67297 - DNA, 110 bp, synthetic construct
  source 1..110: mol_type = other DNA
ctgccagagggtgagtgctggagcaggacggtgcctagatggcaggtctagttcaccgcgatgcccggggaaaaagaagggccttgagagagagtctaggtgccaatcac

SEQ ID NO: 67298 - DNA, 110 bp, synthetic construct
  source 1..110: mol_type = other DNA
gggaaaaggaaacaaccattacccatggagggaagacaagaaacaacccaagaaccagaatatcagaagtctcctcctgccaaagagagcagaatcaggaagaaacttca

SEQ ID NO: 67299 - DNA, 110 bp, synthetic construct
  source 1..110: mol_type = other DNA
caggatggtgatgtcaataggctgggtttaaattaaacaagctaaagcaaaactataaactaaaatgcagtacacatcagatgtccaaaggtataaaaataatccaggta

SEQ ID NO: 67300 - DNA, 110 bp, synthetic construct
  source 1..110: mol_type = other DNA
aggaaggggcctgagctgaccctggctcatgtccttctcctcgttcacatgactgtagacaacaagggtcttccgtgtgccctctcaacacatccctccaggcattggca

SEQ ID NO: 67301 - DNA, 110 bp, synthetic construct
  source 1..110: mol_type = other DNA
tagacaacaagggtcttccgtgtgccctctcaacacatccctccaggcattggcatctgctagtccctctcccagaatccttcccccggtcattatccccacctcggttt

SEQ ID NO: 67302 - DNA, 110 bp, synthetic construct
  source 1..110: mol_type = other DNA
gcagtgccacagccatgagcagaaagcttagggcgcctgcaggaaccaccgagtgggtccagacaatgagacagcctaaagaaggccgggccgagacgagaatctttgtg

SEQ ID NO: 67303 - DNA, 110 bp, synthetic construct
  source 1..110: mol_type = other DNA
cctgcctcccaggagcgccgccttgtacgtgtgggctttcagcatagctaagtcgccgccgagagtggcacatgtggatttcctggttggacactgtatctttttggcca

SEQ ID NO: 67304 - DNA, 110 bp, synthetic construct
  source 1..110: mol_type = other DNA
tcactcaggttatggacaaacttaatggaacagaatgggatgaaaatagactaactgggcagctggcttcagaatttttcctgctttgatgagctgttctgatgtgaaga

SEQ ID NO: 67305 - DNA, 110 bp, synthetic construct
  source 1..110: mol_type = other DNA
ttaacccaatacaaagtgtgaatctttggctgtgtgcaagtcaggatcctggaagtagctcttagaatcttcgaagggaagaggagaattgcaggctttgagcaccttac

SEQ ID NO: 67306 - DNA, 110 bp, synthetic construct
  source 1..110: mol_type = other DNA
atgtaagaatctagcggaccaactccgggaaagccagttgccttttgaacatgaccaaaggttcatagctctggacatcttgtatgcaagactgtccttaactaactaaa

SEQ ID NO: 67307 - DNA, 110 bp, synthetic construct
  source 1..110: mol_type = other DNA
attgagctcaaagatatgattacagctaccttagaagcattcttgttgacaacgtggttaattctttaaaaacatattggcccgtaatcaaatgtggcacagggtagagg

SEQ ID NO: 67308 - DNA, 110 bp, synthetic construct
  source 1..110: mol_type = other DNA
ggttaattctttaaaaacatattggcccgtaatcaaatgtggcacagggtagaggaaattacataattttaggtggacaaatttataataaatgtactcaggaaaataca

SEQ ID NO: 67309 - DNA, 110 bp, synthetic construct
  source 1..110: mol_type = other DNA
aattttctgatgagataatgcattacagcacatagtctgtttctggcccacagcgaggactcagaagtggtggttaccctctctcctgtggcttggcttcttctgcttcc

SEQ ID NO: 67310 - DNA, 110 bp, synthetic construct
  source 1..110: mol_type = other DNA
atgtcagacgccaattccaggatctcagtcactttgctatatgagatccacatatatatgcataaattaggatgaaaacacaggaaaacaagagcaatggctgtggtgga

SEQ ID NO: 67311 - DNA, 110 bp, synthetic construct
  source 1..110: mol_type = other DNA
atatgcataaattaggatgaaaacacaggaaaacaagagcaatggctgtggtggagtagatttgttcaagataaaatgaattattggtataaaatgcatgtaataacagt

SEQ ID NO: 67312 - DNA, 110 bp, synthetic construct
  source 1..110: mol_type = other DNA
ctttgtgccagcggctgggcccatacagatcaatcaggggcagtttctgcccttgaaatctcacaatattttcaaagcttcttgtatctcagtgttgaatgtttttgctt

SEQ ID NO: 67313 - DNA, 110 bp, synthetic construct
  source 1..110: mol_type = other DNA
gatttattgtctcacacaacaagaaggaagaatcttccagaggtgactaaatctgtaggttaaaaatattagtctctgattcaagttttaaaaacaatctggggtaggag

SEQ ID NO: 67314 - DNA, 110 bp, synthetic construct
  source 1..110: mol_type = other DNA
gggaactccacaatgatggtattcttcggtagcttttagtcccattttcatggcagacgtagaagagaagaaagctggacttccaggccacgcgagcctctcccagatca

SEQ ID NO: 67315 - DNA, 110 bp, synthetic construct; identical to SEQ ID NO: 67314
  source 1..110: mol_type = other DNA

SEQ ID NO: 67316 - DNA, 110 bp, synthetic construct
  source 1..110: mol_type = other DNA
aagggaagtatatttccctttaacagatgagtgcaggaattgtgggcaggtcaggactgaaaactgactctgttccatgagatgctccaggaccccgggatcatcttctc

SEQ ID NO: 67317 - DNA, 110 bp, synthetic construct
  source 1..110: mol_type = other DNA
ctagaaatgattagagaggtttttattctaattttctaagtcatagctttgcatgaatatttccttcttcaattcctgttaaacataacttctggggagactaaagtact

SEQ ID NO: 67318 - DNA, 110 bp, synthetic construct
  source 1..110: mol_type = other DNA
gaaggcttggaaaaggcggagaggaatgtcctgcctgtgttgaacaacttgctggaaaatagggagatgcagcttgaagacggacgcttcctgatgtctgccgagcgtta

SEQ ID NO: 67319 - DNA, 110 bp, synthetic construct
  source 1..110: mol_type = other DNA
cataattcagttgtgcaaatgaaccagcaacatttattttgatttgccctatttttcttgcaagagtgatccactgtgctgtcctgtagcatagccatgcctgaagaagc

SEQ ID NO: 67320 - DNA, 110 bp, synthetic construct
  source 1..110: mol_type = other DNA
tcttgcaagagtgatccactgtgctgtcctgtagcatagccatgcctgaagaagctcattctcaccataaaccatctcaggaagctctgatgatggtgataggtttagtc

SEQ ID NO: 67321 - DNA, 110 bp, synthetic construct
  source 1..110: mol_type = other DNA
ttctcagttttctaaacaaactctgaaactattgcctaatgtgacaggtagaaggaaaatattctacatgtcaaaaaaaattcataaaccaagttaaagtgagtgaccaa

SEQ ID NO: 67322 - DNA, 110 bp, synthetic construct
  source 1..110: mol_type = other DNA
actattaactaaggagactctgtacacattgtttctacataattctctataatcctttctatcccattctatatgttaattataggctaagtgtgatcatggacttagtt

SEQ ID NO: 67323 - DNA, 110 bp, synthetic construct
  source 1..110: mol_type = other DNA
cctttgaccactcggaaaatcagttgccagccacagattaacacctttttgtcatttcagaaaatgaagaaaagactctgtatgtagttgcctgcaatcctgtttcctta

SEQ ID NO: 67324 - DNA, 110 bp, synthetic construct
  source 1..110: mol_type = other DNA
ccctggatattaccttcccttcctccagacccctctgccccttggcaccactgcttgcctggctgtgcagctctacctggacccagggctctgatgcccaccctggaatc

SEQ ID NO: 67325 - DNA, 110 bp, synthetic construct
  source 1..110: mol_type = other DNA
tactagtcagattcgtttctgctgcgccaccacgggaactcctttagctaagtcttcttgcattttctcctcaaagatggcccaagttacgaaggggtttattacagtcc

SEQ ID NO: 67326 - DNA, 110 bp, synthetic construct; identical to SEQ ID NO: 67325
  source 1..110: mol_type = other DNA

SEQ ID NO: 67327 - DNA, 110 bp, synthetic construct
  source 1..110: mol_type = other DNA
aaactaaagtcactggcgcgtgtcgttgtgtgatgtttgtgaccagagtcatcatttgttaaaggtgtcggaattcaggagtgaaaagagaagctggagaggttttaagc

SEQ ID NO: 67328 - DNA, 110 bp, synthetic construct
  source 1..110: mol_type = other DNA
ttgttaaaggtgtcggaattcaggagtgaaaagagaagctggagaggttttaagctagaactctctccatcaatagattgttggagcagcattccgtcacctctgattgt

SEQ ID NO: 67329 - DNA, 110 bp, synthetic construct
  source 1..110: mol_type = other DNA
actctgagacagggtggtgccaggcacacagcccccagctcagcagatgtcagctccccagcgtccctgggaccttgtccagcgtcattcccagtgtctctgatcataga

SEQ ID NO: 67330 - DNA, 110 bp, synthetic construct
  source 1..110: mol_type = other DNA
ccccagcgtccctgggaccttgtccagcgtcattcccagtgtctctgatcatagaagctgtgtgacctggatgacccgccagtgtgacgatccaagggcagggactgctg

SEQ ID NO: 67331 - DNA, 110 bp, synthetic construct
  source 1..110: mol_type = other DNA
cttctgcttcagaggctgcagagctttcttgcagagctttggggcagggcttccgagggggtctggcgctgctgcttttcacagggcttggctcctgcctcaccttggag

SEQ ID NO: 67332 - DNA, 110 bp, synthetic construct
  source 1..110: mol_type = other DNA
agggggtctggcgctgctgcttttcacagggcttggctcctgcctcaccttggaggatgagccgagagcttcgagcatcttccaggtcacttctgcctcctcctcctgct

SEQ ID NO: 67333 - DNA, 110 bp, synthetic construct
  source 1..110: mol_type = other DNA
aaactttaccccaatcagcactttacctctatgtctggcagctcccagtcccaggccacttactttcccacttatgctctgacaccagctcaagttccatcttcctaggt

SEQ ID NO: 67334 - DNA, 110 bp, synthetic construct
  source 1..110: mol_type = other DNA
ccacttactttcccacttatgctctgacaccagctcaagttccatcttcctaggttttctcttctcttttggctagtttctgaaattcactttttttctgttgcttctgt

SEQ ID NO: 67335 - DNA, 110 bp, synthetic construct
  source 1..110: mol_type = other DNA
tgccactcagaagcagtcatagacaactgggtttatttgtgtttccataaacctgaatttacaaaaaataggtagtcacccccatggaacctagctttttgacctctctt

SEQ ID NO: 67336 - DNA, 110 bp, synthetic construct
  source 1..110: mol_type = other DNA
aatttacaaaaaataggtagtcacccccatggaacctagctttttgacctctctttcttttatctatttttctggtgcttggggatctggaaaaaatagctatcattttc

SEQ ID NO: 67337 - DNA, 110 bp, synthetic construct; identical to SEQ ID NO: 67335
  source 1..110: mol_type = other DNA

SEQ ID NO: 67338 - DNA, 110 bp, synthetic construct; identical to SEQ ID NO: 67336
  source 1..110: mol_type = other DNA

SEQ ID NO: 67339 - DNA, 110 bp, synthetic construct
  source 1..110: mol_type = other DNA
caccgaatgtattttggaaaagcaaagagtgtctttgctttcagatttctgggaggagtttgaataaaaaagcgtggacctgtggtatagctagaatttgcggtcatgtc

SEQ ID NO: 67340 - DNA, 110 bp, synthetic construct
  source 1..110: mol_type = other DNA
gagtttgaataaaaaagcgtggacctgtggtatagctagaatttgcggtcatgtctgtctcgtgtcagagcccaggacctctgtggtatagttcctgttggatgcctctg

SEQ ID NO: 67341 - DNA, 110 bp, synthetic construct; identical to SEQ ID NO: 67339
  source 1..110: mol_type = other DNA

SEQ ID NO: 67342 - DNA, 110 bp, synthetic construct; identical to SEQ ID NO: 67340
  source 1..110: mol_type = other DNA

SEQ ID NO: 67343 - DNA, 110 bp, synthetic construct
  source 1..110: mol_type = other DNA
aaagacaaataaataaatgaataaataaaatttaaaaagtcccatctaggactgtgtctttgactggaaatctacaggtgttatttcggatagggaatttgtttggcaat

SEQ ID NO: 67344 - DNA, 110 bp, synthetic construct
  source 1..110: mol_type = other DNA
tgagttccaattgctcctgggagattaaggcttttagaaacacaatataaatcattcgttaattttcggtgagacaaaaattacattaaattagtcaatgcattgctgtt

SEQ ID NO: 67345 - DNA, 110 bp, synthetic construct; identical to SEQ ID NO: 67344
  source 1..110: mol_type = other DNA

SEQ ID NO: 67346 - DNA, 110 bp, synthetic construct
  source 1..110: mol_type = other DNA
tggatataaatttattggtattatttacacttcatatatgagtgacaataagtacctcttgtctgtctctgtctgacttactttattcagtatgttaatctctgggtcca

SEQ ID NO: 67347 - DNA, 110 bp, synthetic construct; identical to SEQ ID NO: 67346
  source 1..110: mol_type = other DNA

SEQ ID NO: 67348 - DNA, 110 bp, synthetic construct
  source 1..110: mol_type = other DNA
gtgcagtgctcagagcctagaatttgaagaagtcttcaaataagctacagcaaacacagtgataaaactacaggcctactgtactactttagtgtttctcagctgtgtgt

SEQ ID NO: 67349 - DNA, 110 bp, synthetic construct
  source 1..110: mol_type = other DNA
acagtgataaaactacaggcctactgtactactttagtgtttctcagctgtgtgttgttttgccccaaattctcctcccaaagatatttgacaatgtttgaagaagtatt

SEQ ID NO: 67350 - DNA, 110 bp, synthetic construct; identical to SEQ ID NO: 67348
  source 1..110: mol_type = other DNA

SEQ ID NO: 67351 - DNA, 110 bp, synthetic construct; identical to SEQ ID NO: 67349
  source 1..110: mol_type = other DNA

SEQ ID NO: 67352 - DNA, 110 bp, synthetic construct
  source 1..110: mol_type = other DNA
tgctgtagagctgttctttctaccatggtttagctacaatatttgcccacaagtcaagcaattcagtttccatgctatcttgttcttcttcccatcagcttgctccctaa

SEQ ID NO: 67353 - DNA, 110 bp, synthetic construct
  source 1..110: mol_type = other DNA
aagcaattcagtttccatgctatcttgttcttcttcccatcagcttgctccctaaaaatgtcatttgccctggcaatggtaaagcccaccctaatgctggccaatgagtt

SEQ ID NO: 67354 - DNA, 110 bp, synthetic construct
  source 1..110: mol_type = other DNA
gtacaaaataattaatgttattaagtcggaacagttttaaatctctgggtcaatgttgtaactactggtgaagttaatttgtcacagagcaaaatgtttgaggacagtga

SEQ ID NO: 67355 - DNA, 110 bp, synthetic construct; identical to SEQ ID NO: 67354
  source 1..110: mol_type = other DNA

SEQ ID NO: 67356 - DNA, 110 bp, synthetic construct
  source 1..110: mol_type = other DNA
ctctgtttttctttttgtctctcagtcttatttaagatttcagaccattttaaatttgaaattcaagactaaatagcgttagcattctatcctgttctacccattgcaac

SEQ ID NO: 67357 - DNA, 110 bp, synthetic construct; identical to SEQ ID NO: 67356
  source 1..110: mol_type = other DNA

SEQ ID NO: 67358 - DNA, 110 bp, synthetic construct
  source 1..110: mol_type = other DNA
tcctgggcagataaaataggtatccattctccacattctttcttcccttcgccagtaacctaaggagccatgtgttctaggcagtgtagctataaatgtgaagaggtagc

SEQ ID NO: 67359 - DNA, 110 bp, synthetic construct
  source 1..110: mol_type = other DNA
taacctaaggagccatgtgttctaggcagtgtagctataaatgtgaagaggtagcaaagttcgagttatagtgggccacaagtgcctcactaagaaaactaaataagcaa

SEQ ID NO: 67360 - DNA, 110 bp, synthetic construct; identical to SEQ ID NO: 67358
  source 1..110: mol_type = other DNA

SEQ ID NO: 67361 - DNA, 110 bp, synthetic construct; identical to SEQ ID NO: 67359
  source 1..110: mol_type = other DNA

SEQ ID NO: 67362 - DNA, 110 bp, synthetic construct
  source 1..110: mol_type = other DNA
gttccatgtaaagtctctttcttgaagtttcttttggcctttttatgcaggaactttggaatcatcaagcttcacaagtataagctcccccatcttttcctcccaggata

SEQ ID NO: 67363 - DNA, 110 bp, synthetic construct
  source 1..110: mol_type = other DNA
cattctgggtgcatcctgcctggcccatttccctgccatatttctgcaggctttctcttctccagcttcagtgcagcttccttcctgcacagaggctttctgagttttag

SEQ ID NO: 67364 - DNA, 110 bp, synthetic construct
  source 1..110: mol_type = other DNA
tcttctccagcttcagtgcagcttccttcctgcacagaggctttctgagttttagaaggttgcagaacttttgcaccatacacaggacataagcaaatgtgcacatccca

SEQ ID NO: 67365 - DNA, 110 bp, synthetic construct
  source 1..110: mol_type = other DNA
ccagcctcactactgaaaacaactgtcttgaaggagaaaggagaaagaaggaggagatgaaggcatagggagttggggaggggtgtatgtgtagaagtgaaattgaaagc

SEQ ID NO: 67366 - DNA, 110 bp, synthetic construct
  source 1..110: mol_type = other DNA
gtgcatgtgcctgtgtgtgtgtgtgtgtgtgtatgtgtgtgaaaaatcctaaagctatcattggccatcttccaacagtatcttaacttgccttccctttctacacaatt

SEQ ID NO: 67367 - DNA, 110 bp, synthetic construct
  source 1..110: mol_type = other DNA
tatcattggccatcttccaacagtatcttaacttgccttccctttctacacaattgacaagaagttaatatacagaaccaaataataacattgttttgaaatatttgccc

SEQ ID NO: 67368 - DNA, 110 bp, synthetic construct; identical to SEQ ID NO: 67366
  source 1..110: mol_type = other DNA

SEQ ID NO: 67369 - DNA, 110 bp, synthetic construct; identical to SEQ ID NO: 67367
  source 1..110: mol_type = other DNA

SEQ ID NO: 67370 - DNA, 110 bp, synthetic construct
  source 1..110: mol_type = other DNA
tgctccatcatcttcagactacagagcctgaatgggtcatcacctgcatttccatggtgacttcatacagactttaaggctataccaggttctgaaggttctcttccctc

SEQ ID NO: 67371 - DNA, 110 bp, synthetic construct
  source 1..110: mol_type = other DNA
ggtgacttcatacagactttaaggctataccaggttctgaaggttctcttccctccctgaaagactagtccaggtccaggatttatacacaccagccacatgtgaagagg

SEQ ID NO: 67372 - DNA, 110 bp, synthetic construct
  source 1..110: mol_type = other DNA
gaatgagtgtcccattccaagcttcaaattcggttttaattttttggttttagttaataatgcaaatgcagttgcatttttaaaatgtcagtcatatatgcataaccatg

SEQ ID NO: 67373 - DNA, 110 bp, synthetic construct
  source 1..110: mol_type = other DNA
tatctttcagttcttctgttggaaataaggccctcaaactcacccaggtgaaggatggtaaatttaggctgagcacaggattcctggagcaccaccctgttacttcaccc

SEQ ID NO: 67374 - DNA, 110 bp, synthetic construct
  source 1..110: mol_type = other DNA
tccagactctgaagattctgctcagctatgaccacttttaagggaagaaggggaaaaatgtcagttaacaattaaggaaggaggtcagattcttgctaatttttctattg

SEQ ID NO: 67375 - DNA, 110 bp, synthetic construct
  source 1..110: mol_type = other DNA
ttgcattattatgcaactatcctttgctaagtacctaagggaatcatgtttttaagttgtgattacattcccttctttctggttccaaagtcatactcaatttgtcacta

SEQ ID NO: 67376 - DNA, 110 bp, synthetic construct; identical to SEQ ID NO: 67375
  source 1..110: mol_type = other DNA

SEQ ID NO: 67377 - DNA, 110 bp, synthetic construct
  source 1..110: mol_type = other DNA
tgtgtcatttatgagattgttattgggtgcttattgcccttgcatcaccatgagctgtttgcccagtttgtgaaaagagccccttttcctacccaatcaggtttctccag

SEQ ID NO: 67378 - DNA, 110 bp, synthetic construct
  source 1..110: mol_type = other DNA
tgtttgcccagtttgtgaaaagagccccttttcctacccaatcaggtttctccagaaaggagaatacaattggtgtgggtttccaacaaatgaagtccacttaaaacaat

SEQ ID NO: 67379 - DNA, 110 bp, synthetic construct
  source 1..110: mol_type = other DNA
actagatctgagtccaccacacctacccatggcagacaagcaacctccaaggtgctgtaaattcaacaccaagctgtaatgagctcttgtatcaggggtgcatgagaagc

SEQ ID NO: 67380 - DNA, 110 bp, synthetic construct
  source 1..110: mol_type = other DNA
tggcttgctgaatttaggatagggactgcattattggctctcctgagtctcaagcctgttgtctcacactacagaacttggacttgttaacctccacaatcatgtgagcc

SEQ ID NO: 67381 - DNA, 110 bp, synthetic construct
  source 1..110: mol_type = other DNA
ctgttgtctcacactacagaacttggacttgttaacctccacaatcatgtgagccaactctttatgataaatgcattaccatatacttccccataccattcatcctgtgt

SEQ ID NO: 67382 - DNA, 110 bp, synthetic construct
  source 1..110: mol_type = other DNA
ttctgagtcaggagcatgcttatcacatttgagtatgagcaagagggtcagttcaggtaaagaggattatgaaagaaaatagctggttttgaggcccaagagacaacaaa

SEQ ID NO: 67383 - DNA, 110 bp, synthetic construct
  source 1..110: mol_type = other DNA
tgagattattattattaaattcatttgagttattcaaaagagagatgtcttggctagatgtgactcaattcgatgagatttaaaggaaggtgtggcagcacagagatgta

SEQ ID NO: 67384 - DNA, 110 bp, synthetic construct
  source 1..110: mol_type = other DNA
tggtcacttgttgctccatggtcagaagtttcaccaatgctaagattcaatgatatgtcatgagctttttctcaaaaggcatactaatctttcctggagatttcgtgttc

SEQ ID NO: 67385 - DNA, 110 bp, synthetic construct
  source 1..110: mol_type = other DNA
tcctaaagttaccaaggcttgatttgtgacccataatgtgatcagtcctagagaatgttccgtgtgcacctgagaagaagtgcattctccagctttgtggtggaatgttc

SEQ ID NO: 67386 - DNA, 110 bp, synthetic construct
  source 1..110: mol_type = other DNA
ggcttgatttgtgacccataatgtgatcagtcctagagaatgttccgtgtgcacctgagaagaagtgcattctccagctttgtggtggaatgttctataaatgtctatta

SEQ ID NO: 67387 - DNA, 110 bp, synthetic construct
  source 1..110: mol_type = other DNA
aaatgatttttttaaagcgaataagctagaccagaatccaaagtatgccattcgtataacatgatgtatcagataaaaacaaagacaggatagtttcttcctatcaatct

SEQ ID NO: 67388 - DNA, 110 bp, synthetic construct
  source 1..110: mol_type = other DNA
ttaaaaaagctaatatgtatcaattgccaagatgcctagaatttgcatttgaatatgactcaaccatttcctagttagagtatcttgatcaagtgtctaaatctctctgt

SEQ ID NO: 67389 - DNA, 110 bp, synthetic construct; identical to SEQ ID NO: 67388
  source 1..110: mol_type = other DNA

SEQ ID NO: 67390 - DNA, 110 bp, synthetic construct; identical to SEQ ID NO: 67388
  source 1..110: mol_type = other DNA

SEQ ID NO: 67391 - DNA, 110 bp, synthetic construct; identical to SEQ ID NO: 67388
  source 1..110: mol_type = other DNA

SEQ ID NO: 67392 - DNA, 110 bp, synthetic construct
  source 1..110: mol_type = other DNA
agattccccaccataaaaaagtccttaagtttcagggactgttcctttgatagtattgtccaaggccctgcaagggcccaagcatgtcttcacaagtttctatgtttttg

SEQ ID NO: 67393 - DNA, 110 bp, synthetic construct
  source 1..110: mol_type = other DNA
accacagcatcacacaagaatgaacaatgaactaagctcttccatgaactctaccatttaaaatgttgttcggtctcactgtgccttactatgctcatccgtgaaattat

SEQ ID NO: 67394 - DNA, 110 bp, synthetic construct
  source 1..110: mol_type = other DNA
ggtcaaatctgtgctgctaccattgccacagctgtagcaatgtcagagtttaacccactttagggatcaaaccagtgcctccagagaaacaagccagatttcacttgagt

SEQ ID NO: 67395 - DNA, 110 bp, synthetic construct
  source 1..110: mol_type = other DNA
tccacttctcatattggcttcggcatttctgaggcccaaccaagccatcagaattacagctatttagtgatgtagacgactaggccattgggcaaggagaaaaaaaaata

SEQ ID NO: 67396 - DNA, 110 bp, synthetic construct
  source 1..110: mol_type = other DNA
aatatttcactgtgcgtggccaaatgcagatgatttggtgagaggtctagctacaacaaccacatcagcctacacttttacactgctggtggccatatcatgctttgctc

SEQ ID NO: 67397 - DNA, 110 bp, synthetic construct
  source 1..110: mol_type = other DNA
ggtgcatattctcagatggagctacccctctcatctaatacatctcaaactgtccttctgagcaatcttgtgtctctaaaatggttctgtaagagaagtaccactccaga

SEQ ID NO: 67398 - DNA, 110 bp, synthetic construct
  source 1..110: mol_type = other DNA
tgtcaccactgtcactcttacaagaacaatgttttaaaaggagtgctaggaagacaggggattttgaaccttctttcccaacttttaatccataaattacaaaatggagg

SEQ ID NO: 67399 - DNA, 110 bp, synthetic construct
  source 1..110: mol_type = other DNA
taacattatattcaggattacttagatattctctaaagaccaaggctttctctatagctcttttttttctcaactgaactttcaccacaatcactgttaacgtttcattc

SEQ ID NO: 67400 - DNA, 110 bp, synthetic construct
  source 1..110: mol_type = other DNA
agctcttttttttctcaactgaactttcaccacaatcactgttaacgtttcattcatggcactggaggcattttctagtgtgcacctccaaaatcttccagtctctaccc

SEQ ID NO: 67401 - DNA, 110 bp, synthetic construct
  source 1..110: mol_type = other DNA
caaaacagaaacagattatgaagggaaggaagctgatgggagagtttgggtttggtagatacagctgttacatttataatgggttagtggtggggtcctgctgtacagca

SEQ ID NO: 67402 - DNA, 110 bp, synthetic construct
  source 1..110: mol_type = other DNA
tgcaatacccatgtcagacaaaatagcctttaaaatgagggccacagagtttctcagaaaaaaaatgcactgggctcctctacagcagtgttttgcagcagttacatgca

SEQ ID NO: 67403 - DNA, 110 bp, synthetic construct
  source 1..110: mol_type = other DNA
attaagaaagttttaaacaatctcattattatgcctgcttcagtacctgtgtttgtttaatttccattatcatgattcccagggctggaagtgattcagtatattgtttt

SEQ ID NO: 67404 - DNA, 110 bp, synthetic construct; identical to SEQ ID NO: 67403
  source 1..110: mol_type = other DNA

SEQ ID NO: 67405 - DNA, 110 bp, synthetic construct; identical to SEQ ID NO: 67403
  source 1..110: mol_type = other DNA

SEQ ID NO: 67406 - DNA, 110 bp, synthetic construct; identical to SEQ ID NO: 67403
  source 1..110: mol_type = other DNA

SEQ ID NO: 67407 - DNA, 110 bp, synthetic construct
  source 1..110: mol_type = other DNA
tctcacaagttcagtatttcctaagtaggaatagatgatgcaaaggttcagtttaggcaaaccaccacccaaactctttaacctgcttttagaaactgattcatagaata

SEQ ID NO: 67408 - DNA, 110 bp, synthetic construct
  source 1..110: mol_type = other DNA
ggcaaaccaccacccaaactctttaacctgcttttagaaactgattcatagaatatttgctgcttttatatgatttgccagctgaaatttttgtgtacttcaccacacta

SEQ ID NO: 67409 - DNA, 110 bp, synthetic construct
  source 1..110: mol_type = other DNA
gattttgaatcctggagatatttttaaaagatgtttatgtttctattaatgctcgccttaagaaaatgtatctgattgcccaagtgttctctttatggatgtaatgcctc

SEQ ID NO: 67410 - DNA, 110 bp, synthetic construct
  source 1..110: mol_type = other DNA
agagagaaagatccccaagtcgcgaagaagcgcactcccgcagcctttccggtgcacctgcgcccctctccctggcctctccgggatgccctgagaagagcttgcgggtt

SEQ ID NO: 67411 - DNA, 110 bp, synthetic construct
  source 1..110: mol_type = other DNA
acctgcgcccctctccctggcctctccgggatgccctgagaagagcttgcgggtttctttgagaaagtcagatgccttctgcaaggagaaaaggggtagttttgtatagt

SEQ ID NO: 67412 - DNA, 110 bp, synthetic construct
  source 1..110: mol_type = other DNA
tgagttctaaataaacatccatggttttaagccactcagatgtgagatggtagatggaatagttaacccatacagaaattcattcctgaaagtgggatgctgatgataaa

SEQ ID NO: 67413 - DNA, 110 bp, synthetic construct
  source 1..110: mol_type = other DNA
agacaaggatgcccactctcacaacttttattcaacatagtattagaattcctaaccacatcaatcagaccataaataaataaaacatatccaaattagaagaaaagagg

SEQ ID NO: 67414 - DNA, 110 bp, synthetic construct; identical to SEQ ID NO: 67413
  source 1..110: mol_type = other DNA

SEQ ID NO: 67415 - DNA, 110 bp, synthetic construct
  source 1..110: mol_type = other DNA
catcctttaaatgcatacaagtttgttttacgtcccaggattcagtcagtcatgtgcatgtaaaaatcaagattattcttaaaaggatggctgtgacataggtccatgtg

SEQ ID NO: 67416 - DNA, 110 bp, synthetic construct; identical to SEQ ID NO: 67415
  source 1..110: mol_type = other DNA

SEQ ID NO: 67417 - DNA, 110 bp, synthetic construct
  source 1..110: mol_type = other DNA
gtcttacattactttggactttgaagtgagattgccagattttttgaactccaatttaccacttatgagctctgggaattttgaccttattggctttaaatgctctcatc

SEQ ID NO: 67418 - DNA, 110 bp, synthetic construct
  source 1..110: mol_type = other DNA
aggtcaggaatccaagacagttccctgattgggtcactttttgggtcaccctgggacagatatatttctagattaagaagcttgttaagggcagttttagatagtgatta

SEQ ID NO: 67419 - DNA, 110 bp, synthetic construct
  source 1..110: mol_type = other DNA
aaaatgtccctgttactcacctaaggaaagttataagggttgtggaagaagaacgagagctctgattggagtattttggtccctacaccacctacaaatgaacccgcaat

SEQ ID NO: 67420 - DNA, 110 bp, synthetic construct
  source 1..110: mol_type = other DNA
gcaaagaaaacaaaaatccagtgcacttctgaggcatcagggtcaaaagcagggtactcgcatgatctctgcacacggcatcaccaagacagtgggcagaccacccatct

SEQ ID NO: 67421 - DNA, 110 bp, synthetic construct
  source 1..110: mol_type = other DNA
agagaataatttgtttaaaactatgtgtatcgtgtgttagataagtgaataaaaattcacaaaggaaatgagtacattcatgtaggggaaaccaacatgtcatgcccagt

SEQ ID NO: 67422 - DNA, 110 bp, synthetic construct; identical to SEQ ID NO: 67421
  source 1..110: mol_type = other DNA

SEQ ID NO: 67423 - DNA, 110 bp, synthetic construct
  source 1..110: mol_type = other DNA
gtcactgtggtggcaagggatggatccctggcccagaaacttttgcatgccacaggcatggccacaaaaacaagaaacttcactagacgaatattcactattctgtgtta

SEQ ID NO: 67424 - DNA, 110 bp, synthetic construct
  source 1..110: mol_type = other DNA
gcatggccacaaaaacaagaaacttcactagacgaatattcactattctgtgttaatgccatcatcccctctgtccccagaagagaaggcttagattcatctttataacc

SEQ ID NO: 67425 - DNA, 110 bp, synthetic construct
  source 1..110: mol_type = other DNA
aaaattaatggcacaaaagggagaaatcataataaacagagaaactgactctcctctccagagaaaacaaaaatttctgtagcagaaaaaaacttacaagtccggtaatt

SEQ ID NO: 67426 - DNA, 110 bp, synthetic construct
  source 1..110: mol_type = other DNA
gagatcattaaaaaatttcaaagccaagtctcacagtctttaggtatgggacataggcatcaattgtttttgaagctcctcaggctattccagtgtgtagaaaaatttgg

SEQ ID NO: 67427 - DNA, 110 bp, synthetic construct
  source 1..110: mol_type = other DNA
ttttcaaacactgtgagtgccttttcaaggggaaattattttaggcgatcgtacctaacactctttcaaagctacaaataattgagttgctgatcattagtgtgttcagt

SEQ ID NO: 67428 - DNA, 110 bp, synthetic construct
  source 1..110: mol_type = other DNA
ctgctcaatactgagatgtggaatctgttattaagtactcaaggcattttgttacagagctagttttgtacttggcggggaatgcttgttctcggtttttcgaggggttt

SEQ ID NO: 67429 - DNA, 110 bp, synthetic construct
  source 1..110: mol_type = other DNA
taacccaccgagccacaatgggaacccccattttttccccttcggttccttcttgaccttggtttccatgacaccatgtttataccaagagctactccttactatgttac

SEQ ID NO: 67430 - DNA, 110 bp, synthetic construct
  source 1..110: mol_type = other DNA
accttggtttccatgacaccatgtttataccaagagctactccttactatgttactctttgctgacacctacactttctttccaaactcagtcttgcactcagcctgctt

SEQ ID NO: 67431 - DNA, 110 bp, synthetic construct
  source 1..110: mol_type = other DNA
atgacaaacagtaaaggctaccaatcttcatttctaaaaagcactgattaattaattaatgcagagggacaaaagtaatgtgtgccatataaaaacagagtgggtagtgg

SEQ ID NO: 67432 - DNA, 110 bp, synthetic construct; identical to SEQ ID NO: 67431
  source 1..110: mol_type = other DNA

SEQ ID NO: 67433 - DNA, 110 bp, synthetic construct
  source 1..110: mol_type = other DNA
gagaagatacacatccttccttgttgctgagagtgctactaacagctcccaccctctgggttcacatggtttgaagtttttccattgtctatggtctgcaacatccacgc

SEQ ID NO: 67434 - DNA, 110 bp, synthetic construct
  source 1..110: mol_type = other DNA
ttagttcttcccaaccaaacttactttctgaattacccaactttgtgaacttacaaatcttctgccttgtcttttggacagatgcacatttctggttccagaaatgctgg

SEQ ID NO: 67435 - DNA, 110 bp, synthetic construct
  source 1..110: mol_type = other DNA
tcagtgggctaagaatctgactgaagtagctcagatcactgtgttggttcaatcgccagtccagcgatatgggttaaagatctggtattggagttctcattgtggctcag

SEQ ID NO: 67436 - DNA, 110 bp, synthetic construct
  source 1..110: mol_type = other DNA
tgttacttcagcactccactctcggcagaaaaatcagtcttagcttgagctactataatgaatagccttagcagaaatttattttcttacggttctggaggctggaagtc

SEQ ID NO: 67437 - DNA, 110 bp, synthetic construct
  source 1..110: mol_type = other DNA
gccctgaatctttcattcactctgatgttgccagctgccatcttggaaaccgcgctatggaggggcccatgtggaaaggaactgagggcccctctagcaacaagcaatcc

SEQ ID NO: 67438 - DNA, 110 bp, synthetic construct
  source 1..110: mol_type = other DNA
tctcaaaatttttctgtaatcaaaaatctatgtatttggttacacattttcagtgtcacttgctactttatttcaagccagggtacctgtgtgtatggtggaatcagggc

SEQ ID NO: 67439 - DNA, 110 bp, synthetic construct
  source 1..110: mol_type = other DNA
ttgtctacaaggaggtttgctggtccctttgacaccttgagtttgtctcccatctccttcctttgaaggccattaatcctcgagagcagctgattctctttatagtacat

SEQ ID NO: 67440 - DNA, 110 bp, synthetic construct
  source 1..110: mol_type = other DNA
agcaagaacgggtcccttcaatctctatttggcacaccagtggtaagccacaatgagacactagcgaaagcagtccaactgtggcagcatatttttcatgtaagtttttc

SEQ ID NO: 67441 - DNA, 110 bp, synthetic construct
  source 1..110: mol_type = other DNA
tttgccctcagtccctaaaatagtttgagagtgacaaaagtgactttgttagttatacaagcccctctcgaccacatctgagtttatgttaatgcagtgacttttggaaa

SEQ ID NO: 67442 - DNA, 110 bp, synthetic construct
  source 1..110: mol_type = other DNA
gcgagatactgaggttgctggttagctgggggaagggctcaggatgacctggatcaaagggtcagagggacaaggctgcctggtgcaccttgtctaaccctgaacaagac

SEQ ID NO: 67443 - DNA, 110 bp, synthetic construct
  source 1..110: mol_type = other DNA
ctctgattccactcctaggctgggaacttccacataccacatatgcggccctaaaaacaaaaagttattataaaatagtggcagagtttccactgtggctcagagggtta

SEQ ID NO: 67444 - DNA, 110 bp, synthetic construct
  source 1..110: mol_type = other DNA
tccacccttcaagacctttgccccaggttttcaaagcagcacccagaagtaggataatccctgtagagggaaggacgcttttccacatgtctgcgccctaaagtccaagc

SEQ ID NO: 67445 - DNA, 110 bp, synthetic construct
  source 1..110: mol_type = other DNA
atcccactctgactaccacctctttggtccacttcctctagacacccaacttcaatgattctttgatctgaccaggacctccattcatcaatatcagctcctttctcttt

SEQ ID NO: 67446 - DNA, 110 bp, synthetic construct
  source 1..110: mol_type = other DNA
tgattctttgatctgaccaggacctccattcatcaatatcagctcctttctcttttccctttccccttgatgtcttctccttacgttgtagcctagtgagatcctatggt

SEQ ID NO: 67447 - DNA, 110 bp, synthetic construct
  source 1..110: mol_type = other DNA
gtgtttttcctagttctctcagccaaaatggttgtatctcctccacaagtcattggtgtcacttttactttgttgattgttactctcgccctttgtcttaaccatttgtc

SEQ ID NO: 67448 - DNA, 110 bp, synthetic construct; identical to SEQ ID NO: 67447
  source 1..110: mol_type = other DNA

SEQ ID NO: 67449 - DNA, 110 bp, synthetic construct
  source 1..110: mol_type = other DNA
ggcgagggtggtggatccacagttaatcagctccggagacaagaaatgagatgtggaccccagcagatggaggggggctctgaccacctagacagagtctgacttctaga

SEQ ID NO: 67450 - DNA, 110 bp, synthetic construct
  source 1..110: mol_type = other DNA
aaatagaatattatagtccgagttgtgactgaagctccaaaataatggaggccggccattcctacatttgacttcttacagtggaggtaattaaaacaaaaaataaaaac

SEQ ID NO: 67451 - DNA, 110 bp, synthetic construct
  source 1..110: mol_type = other DNA
ccctataggggaaatacatatattcaagaggtcaagtgtctaatctctttgcagatatcatcattcctgacactcagataagagacaatattgatgggaattttttttca

SEQ ID NO: 67452 - DNA, 110 bp, synthetic construct
  source 1..110: mol_type = other DNA
ggggcttcttcttcataccttcaccttcttctagctttctgtggtccctgactggccttcagtccttattggactataattcgctattgagaagaacactgctataaaca

SEQ ID NO: 67453 - DNA, 110 bp, synthetic construct
  source 1..110: mol_type = other DNA
ccttcagtccttattggactataattcgctattgagaagaacactgctataaacattcatatatgagttttggtgtagagtgtctttgtttctctgggtgtgtacctagg

SEQ ID NO: 67454 - DNA, 110 bp, synthetic construct
  source 1..110: mol_type = other DNA
cactattctgtggcttgactgggtgactcctctacatatgtcaacagggcttatgcacatagttaccatcggctgacaagtcggctggggctggtctcagctgggattgc

SEQ ID NO: 67455 - DNA, 110 bp, synthetic construct
  source 1..110: mol_type = other DNA
cacatagttaccatcggctgacaagtcggctggggctggtctcagctgggattgctggccggctggccatctctctccatgaggcatttcatccttggattcgccacaag

SEQ ID NO: 67456 - DNA, 110 bp, synthetic construct
  source 1..110: mol_type = other DNA
ttttgtgatccagaacacggaattctccgggtcgaatgcccagcggccagccttcctcctgccctggctataaattcttgcccaataaggtcaaattctaattcgtagca

SEQ ID NO: 67457 - DNA, 110 bp, synthetic construct
  source 1..110: mol_type = other DNA
ctcctgccctggctataaattcttgcccaataaggtcaaattctaattcgtagcatggctttgcgggtgcgcaccctaccaaccaaacaaaagccaaggccttatcgctc

SEQ ID NO: 67458 - DNA, 110 bp, synthetic construct
  source 1..110: mol_type = other DNA
caggatggtaagtaaggtctggagaatggtgtcttgatttgatttgatttttttccagctagtgaagacccatctgaagcaggggggaagagtcacagagccctatgctt

SEQ ID NO: 67459 - DNA, 110 bp, synthetic construct
  source 1..110: mol_type = other DNA
cagctagtgaagacccatctgaagcaggggggaagagtcacagagccctatgcttgcctccgtatttagcatccctctcagtagagcagagtggctgataacatgagttt

SEQ ID NO: 67460 - DNA, 110 bp, synthetic construct
  source 1..110: mol_type = other DNA
tgcctcaatgacacaagatagctgcttcagctccaggtgtcctactcgagcccaaggcaggaaaaatttgagaagaggaaagaagctttaaatgttggcttagccagaga

SEQ ID NO: 67461 - DNA, 110 bp, synthetic construct
  source 1..110: mol_type = other DNA
ggcaggaaaaatttgagaagaggaaagaagctttaaatgttggcttagccagagaaacctgggacatgattttggtcctgaagcaataaaaattaattaatttttttgtt

SEQ ID NO: 67462 - DNA, 110 bp, synthetic construct; identical to SEQ ID NO: 67460
  source 1..110: mol_type = other DNA

SEQ ID NO: 67463 - DNA, 110 bp, synthetic construct; identical to SEQ ID NO: 67461
  source 1..110: mol_type = other DNA

SEQ ID NO: 67464 - DNA, 110 bp, synthetic construct
  source 1..110: mol_type = other DNA
ttcctcttctgtaaaatgagggagttagactgaatgaggttccaagtctatgtaagttctaaaattcaagattttaagtagaatgtggctgccattgcagtcctaagatt

SEQ ID NO: 67465 - DNA, 110 bp, synthetic construct
  source 1..110: mol_type = other DNA
ttgggttcattaccactgagccaccacaggaactccctctatccttttgatatcaaagttggaaattcatggcagagcagtgtaatctttgtgtagcatatcaagtccca

SEQ ID NO: 67466 - DNA, 110 bp, synthetic construct; identical to SEQ ID NO: 67465
  source 1..110: mol_type = other DNA

SEQ ID NO: 67467 - DNA, 110 bp, synthetic construct
  source 1..110: mol_type = other DNA
ggtcgagcttcttcctttgtaggactgatgtgtgcagagaatcaggtgagaccactgtgctcttgctttgcctttccccaaacagccctagctttactagttttattctg

SEQ ID NO: 67468 - DNA, 110 bp, synthetic construct
  source 1..110: mol_type = other DNA
tgtgctcttgctttgcctttccccaaacagccctagctttactagttttattctgtgtgcttttaacatttgatctcctttgttatgcagtatttgtaacccagatgcta

SEQ ID NO: 67469 - DNA, 110 bp, synthetic construct; identical to SEQ ID NO: 67467
  source 1..110: mol_type = other DNA

SEQ ID NO: 67470 - DNA, 110 bp, synthetic construct; identical to SEQ ID NO: 67468
  source 1..110: mol_type = other DNA

SEQ ID NO: 67471 - DNA, 110 bp, synthetic construct
  source 1..110: mol_type = other DNA
tttatctcagctctgtctcaggaattgagccccaagataggagaaaagagactgttctctcaggatgacctgaattcaacaggtgatgcagacagagctccaagaagcca

SEQ ID NO: 67472 - DNA, 110 bp, synthetic construct
  source 1..110: mol_type = other DNA
tgcttgtcctatggaaatcagaaacataaactcctgtccagctcgatattcttaaaaatctcttgagctgattccacctgtatacccactgtgttctcacccctctcact

SEQ ID NO: 67473 - DNA, 110 bp, synthetic construct
  source 1..110: mol_type = other DNA
aaatctcttgagctgattccacctgtatacccactgtgttctcacccctctcacttatgcctagttctgcagtttatgctaccttttagttttgtgatatacatgtatat

SEQ ID NO: 67474 - DNA, 110 bp, synthetic construct
  source 1..110: mol_type = other DNA
agtcattcagaactccctctccacaaatgcctcaatttgagagggtgagctgagggaagtataacagtgataagaataatttcaccagggataatgccagcatattttag

SEQ ID NO: 67475 - DNA, 110 bp, synthetic construct
  source 1..110: mol_type = other DNA
tgagctgagggaagtataacagtgataagaataatttcaccagggataatgccagcatattttagctactaaagttcatggctgtttttggtaatttaaagctattcaaa

SEQ ID NO: 67476 - DNA, 110 bp, synthetic construct
  source 1..110: mol_type = other DNA
taatcagtttctctggctgcacattagatgttgctcagaggatggcatgccaaatgttcccatggccagctctttcttcaatatctccattcattgcaatttcactacta

SEQ ID NO: 67477 - DNA, 110 bp, synthetic construct
  source 1..110: mol_type = other DNA
tctagatcacgtcttctgtattctctgctctggcatgctggggagaaagccaaaatatattgcttcatgttaataattatgagagtttgtcaagctttcagtggaattga

SEQ ID NO: 67478 - DNA, 110 bp, synthetic construct
  source 1..110: mol_type = other DNA
tgctggggagaaagccaaaatatattgcttcatgttaataattatgagagtttgtcaagctttcagtggaattgatttcacattcacttactcaatataaattccttact

SEQ ID NO: 67479 - DNA, 110 bp, synthetic construct; identical to SEQ ID NO: 67477
  source 1..110: mol_type = other DNA

SEQ ID NO: 67480 - DNA, 110 bp, synthetic construct; identical to SEQ ID NO: 67478
  source 1..110: mol_type = other DNA

SEQ ID NO: 67481 - DNA, 110 bp, synthetic construct
  source 1..110: mol_type = other DNA
ggatcaccaccttctgccagaatctatctgtgttctaccttccaccagtaattatattttcattgtcagccacgtaaagagttatccagcagcaatgcacccttttatca

SEQ ID NO: 67482 - DNA, 110 bp, synthetic construct
  source 1..110: mol_type = other DNA
attttcattgtcagccacgtaaagagttatccagcagcaatgcacccttttatcatcagctgctttgaatttttctgtatacaaacgctgcagcgtaggttttccaagat

SEQ ID NO: 67483 - DNA, 110 bp, synthetic construct
  source 1..110: mol_type = other DNA
gttcatcaaatctgaaggtaaaatggcatctttcccaaaaggaaacatcatacattgtaaatatattccttttatagaggcacatactggttactgaggtagattctaaa

SEQ ID NO: 67484 - DNA, 110 bp, synthetic construct
  source 1..110: mol_type = other DNA
gatcattccttccacccctttcaacagtttcagaagcaagttatccttcatattaaattactcctgaaatatctaacagtggcttctgcttcctacgtatactcatttca

SEQ ID NO: 67485 - DNA, 110 bp, synthetic construct
  source 1..110: mol_type = other DNA
aattactcctgaaatatctaacagtggcttctgcttcctacgtatactcatttcataagctaaaacataggaaacgattccttgaccaaactatcagcacacacagattc

SEQ ID NO: 67486 - DNA, 110 bp, synthetic construct; identical to SEQ ID NO: 67484
  source 1..110: mol_type = other DNA

SEQ ID NO: 67487 - DNA, 110 bp, synthetic construct; identical to SEQ ID NO: 67485
  source 1..110: mol_type = other DNA

SEQ ID NO: 67488 - DNA, 110 bp, synthetic construct
  source 1..110: mol_type = other DNA
tactaacgacactatgcaagagtggtgaaatatgccaagaaaaaaaggtatgccacaagttatgcattatttaaaggatggtaccttcaaggagaatagaagagttcagt

SEQ ID NO: 67489 - DNA, 110 bp, synthetic construct
  source 1..110: mol_type = other DNA
ttaaccactgtgccacgatgggaactccatgattttaactattttagataccttatataagtggaatcatacagtatttgtgactagcttagcatgatgtcttcaagttt

SEQ ID NO: 67490 - DNA, 110 bp, synthetic construct
  source 1..110: mol_type = other DNA
tataagtggaatcatacagtatttgtgactagcttagcatgatgtcttcaagtttcacccatgttgtagcatttgtcagattttcctaagtctgaataattttccattat

SEQ ID NO: 67491 - DNA, 110 bp, synthetic construct
  source 1..110: mol_type = other DNA
aaataacatatattacttccttagaaatagtactttgggcatggtaaactctacgtaaattttagtttttctctctgaatgatttgctttgtaacctaaagctctggtgt

SEQ ID NO: 67492 - DNA, 110 bp, synthetic construct
  source 1..110: mol_type = other DNA
tactttgcagttacaaggaataggacagtagggtcccgggagttgagtggatggctttgtaatataaggtattaaacctggtgctttggtgggtgattttaaaagagatg

SEQ ID NO: 67493 - DNA, 110 bp, synthetic construct
  source 1..110: mol_type = other DNA
tcagttgttgttgtatttttatgatttcaaatccaggtaggaaagtaacactttatagcttcttctggtacctggaagtcaattcagacccagtccgaactaaacttatt

SEQ ID NO: 67494 - DNA, 110 bp, synthetic construct
  source 1..110: mol_type = other DNA
tagtcgaatttgttaaccactgagccacggcgggaactcagtggtttttaaagatttggattgtaatcttatgttcagcagtgctttagctttggaagtcatgctatgtc

SEQ ID NO: 67495 - DNA, 110 bp, synthetic construct
  source 1..110: mol_type = other DNA
ttggattgtaatcttatgttcagcagtgctttagctttggaagtcatgctatgtcaggttaatattgatgaattcagagaggggatgactttggttgttttctaaatgct

SEQ ID NO: 67496 - DNA, 110 bp, synthetic construct
  source 1..110: mol_type = other DNA
agcaaagtcatgttgttggctagcgctgcagtcctctctatttggatttgctgttccacaaggaagggataacccctattgccttgattcttttggtgtgccttctttct

SEQ ID NO: 67497 - DNA, 110 bp, synthetic construct
  source 1..110: mol_type = other DNA
ccacaaggaagggataacccctattgccttgattcttttggtgtgccttctttctgtctagctcctgacataggcttataccagaagtgagtggctcctggccaaagact

SEQ ID NO: 67498 - DNA, 110 bp, synthetic construct; identical to SEQ ID NO: 67496
  source 1..110: mol_type = other DNA

SEQ ID NO: 67499 - DNA, 110 bp, synthetic construct; identical to SEQ ID NO: 67497
  source 1..110: mol_type = other DNA

SEQ ID NO: 67500 - DNA, 110 bp, synthetic construct
  source 1..110: mol_type = other DNA
tttttctaattgattcattttcatagatgccagtgttctggtgaaattccctattttccctttattttctgtaacacatttttccaagctattttaaaatccttgttggc

SEQ ID NO: 67501 - DNA, 110 bp, synthetic construct
  source 1..110: mol_type = other DNA
ttccctttattttctgtaacacatttttccaagctattttaaaatccttgttggctaattccaatatgtggatcactgcagattggagtttactgtttttctctttactt

SEQ ID NO: 67502 - DNA, 110 bp, synthetic construct
  source 1..110: mol_type = other DNA
aaataaagataaaattaaaataaaaatcctactagagaacctgagacctaaaatactgtgttcacagacctctatgtttttgtagcagaaagtttgagaaacacgtgcag

SEQ ID NO: 67503 - DNA, 110 bp, synthetic construct; identical to SEQ ID NO: 67502
  source 1..110: mol_type = other DNA

SEQ ID NO: 67504 - DNA, 110 bp, synthetic construct
  source 1..110: mol_type = other DNA
attgtgtggacagattagttccttaagactggcgccctgtaaggtcagctactggaaggaaaaaaaaattggactggacatggagggagaggaaaactacacatctccta

SEQ ID NO: 67505 - DNA, 110 bp, synthetic construct
  source 1..110: mol_type = other DNA
aagagacaaggaccttttagcaggaacattatctcaccatcaaccaatcagaaaaagatctgtgagctgaacaagcatcctacaactctccccctaacactgtatttaaa

SEQ ID NO: 67506 - DNA, 110 bp, synthetic construct
  source 1..110: mol_type = other DNA
cttcagaagcagtctataaaataagtatccttgtgcatgtgatttttaaagactgtgtgcccataagaaattagtaagagtgtgaggaaagcagtacagaaacgaggagg

SEQ ID NO: 67507 - DNA, 110 bp, synthetic construct
  source 1..110: mol_type = other DNA
aatataacggaggaatctagacatatcagtgtatgggccattggttaagtgaccctttgaaagttaaaaaatttttaaatgaataaatttgcacctctaacatggtaatt

SEQ ID NO: 67508 - DNA, 110 bp, synthetic construct
  source 1..110: mol_type = other DNA
ataatgttgtcatgctaacttcaaaaagacaaagttctctataggtcggagctattgttagagtcgttagtgatgtctgggggtctatctaataagtagcatcatgatgt

SEQ ID NO: 67509 - DNA, 110 bp, synthetic construct
  source 1..110: mol_type = other DNA
tgttagagtcgttagtgatgtctgggggtctatctaataagtagcatcatgatgttgatgttcatggtggtctggtcaggcattcctcagttcccaccagggacatttgg

SEQ ID NO: 67510 - DNA, 110 bp, synthetic construct
  source 1..110: mol_type = other DNA
tactttctaacttgactcaaacatcagaatttaggcaactttaaatttcccgcagatgcttttcctcatccctcattcaaaatcaggatatttttcttactcattttcac

SEQ ID NO: 67511 - DNA, 110 bp, synthetic construct
  source 1..110: mol_type = other DNA
ctaaggcagcttggacttctgtctgcagccatttcaacacagtatatgctccactttgagccaagagcttatttacacaggttcatctggtttcagcaccactcctctct

SEQ ID NO: 67512 - DNA, 110 bp, synthetic construct
  source 1..110: mol_type = other DNA
ttgagccaagagcttatttacacaggttcatctggtttcagcaccactcctctctggggcaactcacttggtgctaggataggagaaagtacccacataaggggaacaga

SEQ ID NO: 67513 - DNA, 110 bp, synthetic construct
  source 1..110: mol_type = other DNA
gaacttcagtttcttccttttaggtagagctaattgtgcctactttacaggttacactgatggttcagtgagttcatgtgtgtaaagtacatcatgcagcatctctcctg

SEQ ID NO: 67514 - DNA, 110 bp, synthetic construct
  source 1..110: mol_type = other DNA
tttgacagggctagcaatttaacttcattgaattaataaatgaaaatagctagcattcagttttcccgattgatctgcccctcacaaaaaaggaaggagtagggagatgg

SEQ ID NO: 67515 - DNA, 110 bp, synthetic construct
  source 1..110: mol_type = other DNA
aaagtctgcttcctcctactttctaacatctaatcggtggtgccattgttgaggatgaagtgtctatggacgctttgtgctgtcaggttctccacatccagggccagctc

SEQ ID NO: 67516 - DNA, 110 bp, synthetic construct
  source 1..110: mol_type = other DNA
tgaagtgtctatggacgctttgtgctgtcaggttctccacatccagggccagctctaggtcggagagcatgtctggggcctgcagatagtaagagtatatgctcagtgaa

SEQ ID NO: 67517 - DNA, 110 bp, synthetic construct
  source 1..110: mol_type = other DNA
tggactggattttcagacaccctgatattgtaggaaaatagctttctgttggtaaggggactttcactttctctccacgtgttggaattggtaccggaaccaaaacacct

SEQ ID NO: 67518 - DNA, 110 bp, synthetic construct
  source 1..110: mol_type = other DNA
ggggactttcactttctctccacgtgttggaattggtaccggaaccaaaacacctaacaatgtgttttttttttgttttactattttttgcacacgagtagttttaggga

SEQ ID NO: 67519 - DNA, 110 bp, synthetic construct
  source 1..110: mol_type = other DNA
atcttattctcatccatggtaacaactccaggttaaacttatgtcattgaaggttgtgcctctagctctttgttcagcttcgacctgtttgtatcatcgtttgctaaaac

SEQ ID NO: 67520 - DNA, 110 bp, synthetic construct
  source 1..110: mol_type = other DNA
aaaaactgagtgtagagacgatggacatggaaaagccaggccaaggggaagatgaaagaaatctccttgatagagaacagtgttcaatttacagataaaatccactatgt

SEQ ID NO: 67521 - DNA, 110 bp, synthetic construct
  source 1..110: mol_type = other DNA
acagaacttgaaaaataaggtcactactgtcccctttcttcttcacttctctccttttctttctttcactttcctttccattccttctgcaaggtgaaatgaaatgtcta

SEQ ID NO: 67522 - DNA, 110 bp, synthetic construct
  source 1..110: mol_type = other DNA
ggatccttaacccacggagcaaggccgaggatcgaacctgtgtcctcacagaggctagtcaaattcgtttctgctgaggcacaatgggaattgctagctcctaagttttt

SEQ ID NO: 67523 - DNA, 110 bp, synthetic construct
  source 1..110: mol_type = other DNA
tagtcaaattcgtttctgctgaggcacaatgggaattgctagctcctaagtttttatcacatgtagggatattcctcactgacagatccatttttagtgttttggtaaat

SEQ ID NO: 67524 - DNA, 110 bp, synthetic construct
  source 1..110: mol_type = other DNA
tgggaggggagaagatgtgtccactttgccgtttctagtggccggctgcaagccttggcttgtggccccttcctccaaattcgaagcacattattctaagctctgtacct

SEQ ID NO: 67525 - DNA, 110 bp, synthetic construct
  source 1..110: mol_type = other DNA
tggcttgtggccccttcctccaaattcgaagcacattattctaagctctgtacctatcatcaccccacctcttcctctgactctatgactgctcctgtttccctcttata

SEQ ID NO: 67526 - DNA, 110 bp, synthetic construct
  source 1..110: mol_type = other DNA
cctgtaggaataaagaaagctgtattggatcatggccacacccttttggttagctattgtgtttggctgcattcacgcaggcaaaaagagcagagctgtgtggttgggat

SEQ ID NO: 67527 - DNA, 110 bp, synthetic construct
  source 1..110: mol_type = other DNA
attgtgtttggctgcattcacgcaggcaaaaagagcagagctgtgtggttgggatagagatcttgggtatcactaagcttaaacggttagctatctggccttttgtggaa

SEQ ID NO: 67528 - DNA, 110 bp, synthetic construct
  source 1..110: mol_type = other DNA
tggatctgatgctgctatgcctgtggtgtaggctggcagctgcagctcagactagacctccatatggagtctggaaaactccttatgccaccggtagggccctgaaaagc

SEQ ID NO: 67529 - DNA, 110 bp, synthetic construct
  source 1..110: mol_type = other DNA
ctagacgctgccttcccgggatgtgtgagtggagatgatagacttaaagggagcaatggcatttaagcagcagctgtcctaacgtactgctttccagagtcagcgagcgt

SEQ ID NO: 67530 - DNA, 110 bp, synthetic construct
  source 1..110: mol_type = other DNA
atggcatttaagcagcagctgtcctaacgtactgctttccagagtcagcgagcgtgtgcacgtcagtgttttggtcaaccttcaaggcaccggcataatgagttgacttt

SEQ ID NO: 67531 - DNA, 110 bp, synthetic construct
  source 1..110: mol_type = other DNA
tttgcttctcagagtgcacttagcagctttaggtagacatccaagtaggttcttaggaaaatagttgattgcagggttgaggcaaaaaagaaaaaaaaaaaaaaaaaagc

SEQ ID NO: 67532 - DNA, 110 bp, synthetic construct
  source 1..110: mol_type = other DNA
aaaaataccaggtaccaataggcctggaccaggtgacttaacattgacactgtgacagaaaaatgtcctggaagctgccaggacctgtgatgtccagatgatgtctcttc

SEQ ID NO: 67533 - DNA, 110 bp, synthetic construct
  source 1..110: mol_type = other DNA
cagaaaaatgtcctggaagctgccaggacctgtgatgtccagatgatgtctcttcaaaggagacctcccaaggacacctgctgaggggccaacacctgcacagcctcata

SEQ ID NO: 67534 - DNA, 110 bp, synthetic construct
  source 1..110: mol_type = other DNA
caccaatgccaacttcacacagtcttcaagtaaatagaatccctgatataaccagaaagtagtatgtaattgggggaggggagtaaaaaaacttctgtgacaactctgtc

SEQ ID NO: 67535 - DNA, 110 bp, synthetic construct
  source 1..110: mol_type = other DNA
ctattttattttgggtctttcatcacttgcaactaattccctctcctgtggtgtgggttccattttcctgactaattcacacggacctgggaagatgtgcacagaagacc

SEQ ID NO: 67536 - DNA, 110 bp, synthetic construct
  source 1..110: mol_type = other DNA
taaaaactgccttgtttcttagattgtgcagaaattctctttcttaaatctcttaagaagtgcacctccaaagcatattgcacgccctacaggtggtggcttctttccta

SEQ ID NO: 67537 - DNA, 110 bp, synthetic construct
  source 1..110: mol_type = other DNA
agaagtgcacctccaaagcatattgcacgccctacaggtggtggcttctttcctagacttagcaatctggtgtcagtgttcctgcccaatctttttttttttttggcttt

SEQ ID NO: 67538 - DNA, 110 bp, synthetic construct
  source 1..110: mol_type = other DNA
aaacatctccacgaagctgactctctgctgcagtggtgcagacccttcctcggccctgtgcccaggctctgtgttcctcctgctttgcttagcctcccagctcctggacc

SEQ ID NO: 67539 - DNA, 110 bp, synthetic construct
  source 1..110: mol_type = other DNA
ctgtgcccaggctctgtgttcctcctgctttgcttagcctcccagctcctggacctcagccgattccacacccctgtttaatcctggacctcagacctctcattggttct

SEQ ID NO: 67540 - DNA, 110 bp, synthetic construct
  source 1..110: mol_type = other DNA
ggataaacatctcgaaagtcaaaatgaaatggctgttaggaaaaaggatacaaaaaactgctgatcctaatctgtgagtgaaattacctcatggctattcctggcagatg

SEQ ID NO: 67541 - DNA, 110 bp, synthetic construct
  source 1..110: mol_type = other DNA
aactgctgatcctaatctgtgagtgaaattacctcatggctattcctggcagatgatagggagttaactctgtttacaaacggggcagaacaaaacatgaaaaaacacag

SEQ ID NO: 67542 - DNA, 110 bp, synthetic construct
  source 1..110: mol_type = other DNA
tcaatatcctttcatgaacagagagtcctgggctcataggactggttgctcagcgccctgcctcagtgcaggccctcccctagggttcagtcctgttcacactctttctt

SEQ ID NO: 67543 - DNA, 110 bp, synthetic construct
  source 1..110: mol_type = other DNA
cacattctttttcggtatcaggttgctgtgttcaaaccaaggtagctgtattgcaggtcctggcagcaaacagagacacactccggattgccagggggcgaggaacagag

SEQ ID NO: 67544 - DNA, 110 bp, synthetic construct
  source 1..110: mol_type = other DNA
agaaagagacatacaataaaattcctggtagaaattttccttctttacagttggaacatttccaaaggagattatttgctgagttttgatgggcttctgtaacagattga

SEQ ID NO: 67545 - DNA, 110 bp, synthetic construct
  source 1..110: mol_type = other DNA
tgctccatttgatttggtagtgctgaaatcaaacatacacacacacgcttttattcttagctccctaaatagactataaagtccttgaatttggggaagagtgtccagtt

SEQ ID NO: 67546 - DNA, 110 bp, synthetic construct
  source 1..110: mol_type = other DNA
gtgaattgatgcttccttccctattgttgtaacatccgatggaatgtccattggcaatacttccttatgttttcaaagctgagcttccatttttctctagcttcatctcc

SEQ ID NO: 67547 - DNA, 110 bp, synthetic construct
  source 1..110: mol_type = other DNA
aatacttccttatgttttcaaagctgagcttccatttttctctagcttcatctccatcaagtagtggctctttataaagatcaggaaaatgcgcttgatgagtgagaatg

SEQ ID NO: 67548 - DNA, 110 bp, synthetic construct
  source 1..110: mol_type = other DNA
aagtttagtctactttgttcttaatgtagttaacgtttaaaaatttgtagaaacacagtgatgctttgatgcatgctgaataatcagaggaactccagctaaaaactggg

SEQ ID NO: 67549 - DNA, 110 bp, synthetic construct
  source 1..110: mol_type = other DNA
tggaagttaccttttccatttggtataggtgggaaggagagagagcgagagagtcagacatttgcttaatatcaaactgtggatgctcatcattaggtgagcaataatcc

SEQ ID NO: 67550 - DNA, 110 bp, synthetic construct
  source 1..110: mol_type = other DNA
ctgaagtgctgtctgcagctccgaatgttctctggcttcagctgactaccaaaaaccaggagctgtgagtcacagcacttgatggtcgtgtggggtttcaggtctgcctt

SEQ ID NO: 67551 - DNA, 110 bp, synthetic construct
  source 1..110: mol_type = other DNA
ccaggagctgtgagtcacagcacttgatggtcgtgtggggtttcaggtctgcctttttcccagtcagtaccttcctctgtctcttgttttcttgctctctctgggttttc

SEQ ID NO: 67552 - DNA, 110 bp, synthetic construct; identical to SEQ ID NO: 67550
  source 1..110: mol_type = other DNA

SEQ ID NO: 67553 - DNA, 110 bp, synthetic construct; identical to SEQ ID NO: 67551
  source 1..110: mol_type = other DNA

SEQ ID NO: 67554 - DNA, 110 bp, synthetic construct
  source 1..110: mol_type = other DNA
gtttcacaactcaaatttggcatccggtgaacccacagcacagctctttgtctcttggatattattagtagcggttgtgcagaaccccaaaggaaacaaagtttaaaact

SEQ ID NO: 67555 - DNA, 110 bp, synthetic construct
  source 1..110: mol_type = other DNA
taggtcgcagctgtggctcaaatctgatccctatcctgggaacgtcatatgtcgccgggcagccaagagtgaaaaaaaaggaaaaaaaaaactgaaaacaaaataaaata

SEQ ID NO: 67556 - DNA, 110 bp, synthetic construct
  source 1..110: mol_type = other DNA
ataacttcctattgtgtccacacgggagcaaagctgttggataataaagtctatgtgcccaggttttagtagatacgacttcagttttccaaagtagttgtcctgggaga

SEQ ID NO: 67557 - DNA, 110 bp, synthetic construct
  source 1..110: mol_type = other DNA
tgtctgagaacagtcattccaaggtcgcatagataaattcccgagtcagcatcgcaggctcagagcctgcagctggggaacagttgcttctcccaggctggaaggtaaat

SEQ ID NO: 67558 - DNA, 110 bp, synthetic construct
  source 1..110: mol_type = other DNA
tgaacctggctgatgccctccatgtgcgatgagaaggcagctgttaaactcacgttctccccgatagcaaagtagaaggagcagacattttcccaagagtctgctgtcca

SEQ ID NO: 67559 - DNA, 110 bp, synthetic construct
  source 1..110: mol_type = other DNA
tctccccgatagcaaagtagaaggagcagacattttcccaagagtctgctgtccatctggtgctctgctgggccccaaaatgtattactttatttaatctttaaaaagat

SEQ ID NO: 67560 - DNA, 110 bp, synthetic construct
  source 1..110: mol_type = other DNA
aaggacgctgtggttagaagcggagctaaattacagccaagttgctgaaagggaccattctcttccccgcccgagtcaggactctgaaatccaatctgaagtgtgtttaa

SEQ ID NO: 67561 - DNA, 110 bp, synthetic construct
  source 1..110: mol_type = other DNA
gtgttcagtgacgtatgcagatcacgctcccatttggttgagtattgggaccgaagcatcagtgagatcccagcaagggtgtgggttttactttgaaccccttcttaaag

SEQ ID NO: 67562 - DNA, 110 bp, synthetic construct
  source 1..110: mol_type = other DNA
gcatcagtgagatcccagcaagggtgtgggttttactttgaaccccttcttaaaggggccgcttttctgcgcctcttaaagtgaggaattgacaacatgcgaagccaaat

SEQ ID NO: 67563 - DNA, 110 bp, synthetic construct
  source 1..110: mol_type = other DNA
gtcgcattccgtgctttgccatggtattaccagctgtcaggcaggctaaaacccacccctggcaagaagggagccatctgccaagatggggacagcagggccctaaacaa

SEQ ID NO: 67564 - DNA, 110 bp, synthetic construct
  source 1..110: mol_type = other DNA
gaaacctctttaagaggatgaaactgatagaacgttttgagaagttgaccctcttgagagcagatttactaaaccaaggcagatttggaggtcgaattagtcaagatgtg

SEQ ID NO: 67565 - DNA, 110 bp, synthetic construct
  source 1..110: mol_type = other DNA
gagagcagatttactaaaccaaggcagatttggaggtcgaattagtcaagatgtgtagaaaagtaagcaaatttaaaaaagaagaactccagggaaactgaactatggta

SEQ ID NO: 67566 - DNA, 110 bp, synthetic construct
  source 1..110: mol_type = other DNA
ggttttctctaaggagtagaaaagaacagagggccaaacatggatgtgagatgtctttacatgaacctttcttattcttatgcatttgacctgggaatgatgagaattac

SEQ ID NO: 67567 - DNA, 110 bp, synthetic construct
  source 1..110: mol_type = other DNA
actcaggagctggtgactcaaggacgctttaggtacctggggaagagagaggatcgggaggcagtcagaccagtacacaaataggacacaagagcgaggtgaggcggaca

SEQ ID NO: 67568 - DNA, 110 bp, synthetic construct
  source 1..110: mol_type = other DNA
gcttcccagaaagccgactgcgctctcagcagctccctatgatccacctgcaccggtcacaaccctctttcttcctcccaggctgagaaacagcaaagagggagaggacg

SEQ ID NO: 67569 - DNA, 110 bp, synthetic construct
  source 1..110: mol_type = other DNA
tttttctacaagacagaaaactatgccaggtccccccaaaatgaaggcctcatgtttctaaacagctctgatcggaaaggcatatcaagcaaaagaatgagaccaaaagg

SEQ ID NO: 67570 - DNA, 110 bp, synthetic construct
  source 1..110: mol_type = other DNA
ttctaaacagctctgatcggaaaggcatatcaagcaaaagaatgagaccaaaaggagagcgcttcgaggtggttgagaagaggcctgggcgaacgtgtttgggcaagata

SEQ ID NO: 67571 - DNA, 110 bp, synthetic construct
  source 1..110: mol_type = other DNA
actaaactctcctagttttcctaattttcactggcagccccttctcaggtttctttgccgacttctcctactctgtccccaaaattgttttacgccaggctcaatcccaa

SEQ ID NO: 67572 - DNA, 110 bp, synthetic construct
  source 1..110: mol_type = other DNA
tgccgacttctcctactctgtccccaaaattgttttacgccaggctcaatcccaagtcctttctcttctgccgtacatctgccactctcattattatctcatctaatccc

SEQ ID NO: 67573 - DNA, 110 bp, synthetic construct
  source 1..110: mol_type = other DNA
atgagagccttatttctggttcatagatggccaccttcttgccatgactgcacgtggtagaaaggtcttctcccattcaagggctctaccctcatgacctaattaccctc

SEQ ID NO: 67574 - DNA, 110 bp, synthetic construct
  source 1..110: mol_type = other DNA
gtccttccttccagcctgatgctcccaaaggtggaaggtcctgaagaaatccgatgggtgagtaactcatgctttgcttcagttgaggactcgggtgcggctgagaagca

SEQ ID NO: 67575 - DNA, 110 bp, synthetic construct
  source 1..110: mol_type = other DNA
agcgagcgcctgagctgctgcaggctcacaggaccacctgttgataggattggtaggtacagacaaaggcccccttgggctcttcctcatgtcttctttcccaggggtgt

SEQ ID NO: 67576 - DNA, 110 bp, synthetic construct
  source 1..110: mol_type = other DNA
ggtacagacaaaggcccccttgggctcttcctcatgtcttctttcccaggggtgtgtgcacatgatgtttgcacttctctcccccgtgtccctgccgagtcgttgctcat

SEQ ID NO: 67577 - DNA, 110 bp, synthetic construct; identical to SEQ ID NO: 67575
  source 1..110: mol_type = other DNA

SEQ ID NO: 67578 - DNA, 110 bp, synthetic construct; identical to SEQ ID NO: 67576
  source 1..110: mol_type = other DNA

SEQ ID NO: 67579 - DNA, 110 bp, synthetic construct
  source 1..110: mol_type = other DNA
acaaccacccggtccagaaacaaagcagtttagaccaaacacattcccatcacagtaaaaagtgaagcctggattttcaatacactgagagcagcacatgttttctaggt

SEQ ID NO: 67580 - DNA, 110 bp, synthetic construct
  source 1..110: mol_type = other DNA
agagcaccaacatgtgccttagcaggacagagatttacataagcgtttctgggccatcagatctctgggaagagcatttccgtgttccagatgtagggtaggaatgtgta

SEQ ID NO: 67581 - DNA, 110 bp, synthetic construct
  source 1..110: mol_type = other DNA
atcagatctctgggaagagcatttccgtgttccagatgtagggtaggaatgtgtaaagcccacgtggagatgacagttcactaccttgtggatgggccccctgagaaaag

SEQ ID NO: 67582 - DNA, 110 bp, synthetic construct
  source 1..110: mol_type = other DNA
tttatcagctgcagacttttgtacagtagtccgtttttaattcaaccttttccctactgattcattaaagggtggtaaggaatcattaatggttaagcatttttctgctt

SEQ ID NO: 67583 - DNA, 110 bp, synthetic construct
  source 1..110: mol_type = other DNA
actgattcattaaagggtggtaaggaatcattaatggttaagcatttttctgcttcaaaaacaagactgcactgaccatcctgatgcagtgtcagtttttactgggcttt

SEQ ID NO: 67584 - DNA, 110 bp, synthetic construct
  source 1..110: mol_type = other DNA
cgtcattgaaccaagtaaggatgtctgcggatgcagactgagaggtaggggtcatgtcagcagcctcgggctacagacagttgcagcacaaaaagaagaggaaacgaggt

SEQ ID NO: 67585 - DNA, 110 bp, synthetic construct
  source 1..110: mol_type = other DNA
gacaacagcctctgttcacacagtgccagtttcaaaggtcagcttcccccacaggctgaaaagaagataggaaacccaatcaaaaatgtaaagtagggagttctccttgt

SEQ ID NO: 67586 - DNA, 110 bp, synthetic construct
  source 1..110: mol_type = other DNA
aaaaagcatttctacccttaagcagcagactatagaggaagatggctccacacatacatgggccgaagtatttgagacgcgaggtgtgcaacttgcacaagaagagggga

SEQ ID NO: 67587 - DNA, 110 bp, synthetic construct
  source 1..110: mol_type = other DNA
tatgtctaaatgtcccagtagcgacaggggtcatgaaagacacaaggagctggttcaagaccatgaaagattattattccacgactatataccctcaggatttgtgagat

SEQ ID NO: 67588 - DNA, 110 bp, synthetic construct
  source 1..110: mol_type = other DNA
ttatgtttagaccttgtcttctgggtgagattgtgatggcagtgtactagttttctgtgctgcgtaacaaattaacacgaacagcagctcaccacctgcgttcctaccat

SEQ ID NO: 67589 - DNA, 110 bp, synthetic construct
  source 1..110: mol_type = other DNA
agaagcctttgatatgatacgcataggataatgctgctgaaattcctaattctctaggtgtatcagtatattcaggttgattcttatctttccagaaacttctgcctttc

SEQ ID NO: 67590 - DNA, 110 bp, synthetic construct
  source 1..110: mol_type = other DNA
aggtgtatcagtatattcaggttgattcttatctttccagaaacttctgcctttccatcttcctcttggaagaaactgctccctcaaccatgcaaatagctttatttggg

SEQ ID NO: 67591 - DNA, 110 bp, synthetic construct
  source 1..110: mol_type = other DNA
agcatggagaagtcacaggagagagattgggggaaaggggacagagaggcatctttacgacacatgaaaaaaagaagctaaacctgtgagataggcagaggaaaaagcgg

SEQ ID NO: 67592 - DNA, 110 bp, synthetic construct
  source 1..110: mol_type = other DNA
caaaacaaaaccaaattgggtttttttttttttcaaatctattttactgcctgcgttctctcagttaatttaatcatcactaacatactctactcactcaaatatgtctc

SEQ ID NO: 67593 - DNA, 110 bp, synthetic construct
  source 1..110: mol_type = other DNA
attttgtaagcaatgctaatgagagctcacaaaaatcacagcattacagccgcgctctagtttcatcgctgatggaattactaggcacaggattaacttttcaaatcatt

SEQ ID NO: 67594 - DNA, 110 bp, synthetic construct
  source 1..110: mol_type = other DNA
tttaaaaaaaaaatatgcgatgatccgtagcaatgagtgcaacacgtgcccaatgcagaggcagcagggccaggaggaaatgtagtggatggaaggtctccatcgcggaa

SEQ ID NO: 67595 - DNA, 110 bp, synthetic construct
  source 1..110: mol_type = other DNA
cagaggcagcagggccaggaggaaatgtagtggatggaaggtctccatcgcggaagactttccagaaatcgactttataaaattgtaaatactggacgcctttttaatat

SEQ ID NO: 67596 - DNA, 110 bp, synthetic construct
  source 1..110: mol_type = other DNA
tttaagtgaaggaaaaagcgtttctgtgattaattaggcctaggaaatgaatggataaagttaaacagatttccctactgtccaacttgtcagaagacaagtaaaccaac

SEQ ID NO: 67597 - DNA, 110 bp, synthetic construct
  source 1..110: mol_type = other DNA
caggcaaacggtttgattgttcattctaaagaacaatccatcaactcttcaataggaagcactgagagtatgtgccctaaggttctttaaatctcttgctgcaaaatcct

SEQ ID NO: 67598 - DNA, 110 bp, synthetic construct
  source 1..110: mol_type = other DNA
gaagcactgagagtatgtgccctaaggttctttaaatctcttgctgcaaaatccttagctctgtacgtactcaacctttcccctccatccccaccaagatggccaaactc

SEQ ID NO: 67599 - DNA, 110 bp, synthetic construct
  source 1..110: mol_type = other DNA
tttgtgtctggtacttaaaagattgggaataatttatgaaagcagtaaacatcttgagaaaatcagctctgaaacaagaattgaaagagataaagaaatggaaagatgaa

SEQ ID NO: 67600 - DNA, 110 bp, synthetic construct
  source 1..110: mol_type = other DNA
ttcattactaccttccctagcacaggaggggctctcaaaaatatctgatagcacgggggtggggcgcaaagaacctacttaatattaactcggtagcttcggaaatacat

SEQ ID NO: 67601 - DNA, 110 bp, synthetic construct
  source 1..110: mol_type = other DNA
ggggtggggcgcaaagaacctacttaatattaactcggtagcttcggaaatacataaggctaaaagttcaaaggaggacaatttgggaaaagccaccctgttaattatgc

SEQ ID NO: 67602 - DNA, 110 bp, synthetic construct
  source 1..110: mol_type = other DNA
cctgcgccgccagagtccatatgcttctatttttagaacaggatgcaggcttaccgaaggaaaaggatctcgataaataaacaagacaccatttgtgacaagcaaaaggt

SEQ ID NO: 67603 - DNA, 110 bp, synthetic construct
  source 1..110: mol_type = other DNA
gaaggaaaaggatctcgataaataaacaagacaccatttgtgacaagcaaaaggttttcttttgtgccgtttttttttttttttacctattgaacaaacatgaagactcc

SEQ ID NO: 67604 - DNA, 110 bp, synthetic construct
  source 1..110: mol_type = other DNA
gtttctctgacagcaagtgcagatggactttaagtggatttatcaaaggaatctcctacttggaagaaccatccagctcctttaggctcagatgcctgccttgctgtaca

SEQ ID NO: 67605 - DNA, 110 bp, synthetic construct
  source 1..110: mol_type = other DNA
gataaaacagacaagtaaaatgctgccagctgtttgaggcgaaagcgataacatctgaatatcatgcagacccctggacctcaagaatcagcgaggacaaggagtggatt

SEQ ID NO: 67606 - DNA, 110 bp, synthetic construct
  source 1..110: mol_type = other DNA
tgaatatcatgcagacccctggacctcaagaatcagcgaggacaaggagtggatttgcaaagaggccggcagactgcttgtcgatacccagctgcagagcttggccactg

SEQ ID NO: 67607 - DNA, 110 bp, synthetic construct
  source 1..110: mol_type = other DNA
tgcagagagatgccagcgttctccaggtgggccctcactcttcgcccccagctcttctcactgcctgagatcagtgttaccggcatagagcaataagattggacggctgg

SEQ ID NO: 67608 - DNA, 110 bp, synthetic construct
  source 1..110: mol_type = other DNA
tgtacactgacctaaaccatcttctgacaagtgcttgaactgcacagggtcatcatcaatgcctttaagctcctgtgtgtttctgggtcagggttttcacactgatacag

SEQ ID NO: 67609 - DNA, 110 bp, synthetic construct
  source 1..110: mol_type = other DNA
cttgactcctttcccacctcccttcgaggcccactcacttgcttatcccccagtgtttgcaccagccacagcttccgccccatcctaactcccacacaccctcttcatct

SEQ ID NO: 67610 - DNA, 110 bp, synthetic construct
  source 1..110: mol_type = other DNA
tttgcaccagccacagcttccgccccatcctaactcccacacaccctcttcatctctcacgcatctcagcaggctccagatctgggttctgcaccgtcgtccacacggac

SEQ ID NO: 67611 - DNA, 110 bp, synthetic construct
  source 1..110: mol_type = other DNA
agttctgctgtataaatataccataatttgtttactcattctcaaacaacacacggggtgttcccattatgaataatgggaactttttctatacaaatccttttgtaaat

SEQ ID NO: 67612 - DNA, 110 bp, synthetic construct
  source 1..110: mol_type = other DNA
tctcccacagtctccgttgcgaatgtagcaagtccagtccgggtgtagattaagttccaaattaaatcccccctctgctcccacgtaggagttggccgtggttctcactg

SEQ ID NO: 67613 - DNA, 110 bp, synthetic construct
  source 1..110: mol_type = other DNA
tgaaggttgagagctcacaagggcagcctgcctcccagtccgtctccactgactgcttggagcagagggttcatgttgaaagcatctagatgatgatgcttttgaaagac

SEQ ID NO: 67614 - DNA, 110 bp, synthetic construct
  source 1..110: mol_type = other DNA
cttggagcagagggttcatgttgaaagcatctagatgatgatgcttttgaaagacttgacatctgagaagatcctcaatgaagaaacaagaagtaggcttctctgcgatt

SEQ ID NO: 67615 - DNA, 110 bp, synthetic construct
  source 1..110: mol_type = other DNA
agaaagaaagagaatacacgggaacacgtaaacggtaaattgggcaacatgaacgttcgtcttgttttaaatgacattttattttattttcttgatgttaggcgtacgca

SEQ ID NO: 67616 - DNA, 110 bp, synthetic construct
  source 1..110: mol_type = other DNA
gagagacaccgctgtacctggcactgctttgttgttctgccagccggatttactctgtcaccccaaggaatcaaagacataagaaaagaaaatcacagagcaatacccct

SEQ ID NO: 67617 - DNA, 110 bp, synthetic construct
  source 1..110: mol_type = other DNA
tgtcaccccaaggaatcaaagacataagaaaagaaaatcacagagcaatacccctcagggacaaaagtgtaaaaatcttcagcaaaatattaagaaattaagtgcagcaa

SEQ ID NO: 67618 - DNA, 110 bp, synthetic construct
  source 1..110: mol_type = other DNA
gtgggtaatgagggcttttgtggaggcctgtgcacgctgtttcacaggctggaggggaaaaagaacaggctctcacgggagacctcaagactgtgtccttcctgagtcaa

SEQ ID NO: 67619 - DNA, 110 bp, synthetic construct
  source 1..110: mol_type = other DNA
gacagacagatgacacaatttcatgtaaaaatagtgccttccaaggacaccagaaaacttgaacggcctgacccctgccctccaggacgatgacagctcacaccccgtgg

SEQ ID NO: 67620 - DNA, 110 bp, synthetic construct
  source 1..110: mol_type = other DNA
ccggcagccagacacctgtgcgctcagggaggtgttagcggaggtgaccggagcgtttcctggggcccgtgttatctgcagcgtgttctcaatcaccagccgtgaacatc

SEQ ID NO: 67621 - DNA, 110 bp, synthetic construct
  source 1..110: mol_type = other DNA
ttctcaggcgcccggaactgggcatgaccgtgtgccttcacgttgcccgttcccccccttcagcacacatcccagctgtcattctgcatttgtcagtgcaaatgtggtta

SEQ ID NO: 67622 - DNA, 110 bp, synthetic construct
  source 1..110: mol_type = other DNA
ccccccctgcaggcctgcgtgtggccacagcacttttagggagtttgtatgcacggttttcctcttctgttatttgtagttgcgggcatctgtcctctgttctcattgac

SEQ ID NO: 67623 - DNA, 110 bp, synthetic construct
  source 1..110: mol_type = other DNA
gttttcctcttctgttatttgtagttgcgggcatctgtcctctgttctcattgaccttatcattcaaattatgtccactctaaggaacataaaaacaagttctgagtttc

SEQ ID NO: 67624 - DNA, 110 bp, synthetic construct
  source 1..110: mol_type = other DNA
aggagggcttttgtgattgtcacggtcgggccggaaagatcacgcagaggttcggggccgggaacttatccctcagcggctgggtgcgaagagagcttgacttctgggtc

SEQ ID NO: 67625 - DNA, 110 bp, synthetic construct
  source 1..110: mol_type = other DNA
cttcacacgtcgcaaagctggtggctcagtttagcctccgcgcaagggagagcacgtggccgcatgtccgctctgaggacactacaaagtacaaattgagcaaaggcggc

SEQ ID NO: 67626 - DNA, 110 bp, synthetic construct
  source 1..110: mol_type = other DNA
gtggccgcatgtccgctctgaggacactacaaagtacaaattgagcaaaggcggcgaggttccaaattttggaagtaacatcagcatccaggtgcgcatgagttagggca

SEQ ID NO: 67627 - DNA, 110 bp, synthetic construct
  source 1..110: mol_type = other DNA
cggacgtgaaaatgctcaccgttggtgagtataaagagctcactgctgagctcctgccatggttcagcgagttacaaacccaacaaatatgcatgaggatgcgggttcga

SEQ ID NO: 67628 - DNA, 110 bp, synthetic construct
  source 1..110: mol_type = other DNA
gacaaccggcgtgggaaagcaggcatattcctaaagttcccagcagcctaagccgggcaccccagtggtctttgttctcttcctcaggacacagcccattcgtaaggtct

SEQ ID NO: 67629 - DNA, 110 bp, synthetic construct
  source 1..110: mol_type = other DNA
ctggcacacgctgtttcgtgaggccccaggtcttcccggtatttgcatcccatcggggggcttagcagctgaaggggatgagctgggctctaaggcaggggagccctgat

SEQ ID NO: 67630 - DNA, 110 bp, synthetic construct
  source 1..110: mol_type = other DNA
aaagaacgtcgcccacagggcaggggacacccctctgccttccggacgtggtcgaattagcctgggcacaggggtcgtgcgtgctcaagagggcagtttcctttgttcgt

SEQ ID NO: 67631 - DNA, 110 bp, synthetic construct
  source 1..110: mol_type = other DNA
aacagctgtcgctctgcaaatgccttagtagagggttaaaaagcaagctacaggctgagaggggctgcaatcaagtatctaacgaaatgctcctgtttatttatttattt

SEQ ID NO: 67632 - DNA, 110 bp, synthetic construct
  source 1..110: mol_type = other DNA
tccatcaacattcatcagccacctcaggtgacaggtattttcgcccttggcatcaaggtcatgatgttgctgagcggcatccagctggaggagctcgcggggcgcccgcg

SEQ ID NO: 67633 - DNA, 110 bp, synthetic construct
  source 1..110: mol_type = other DNA
cttggcatcaaggtcatgatgttgctgagcggcatccagctggaggagctcgcggggcgcccgcgctcagggcccgggagcacttccggcgccgtccccgggtcctttcc

SEQ ID NO: 67634 - DNA, 110 bp, synthetic construct
  source 1..110: mol_type = other DNA
cacaggaactgagaactgcccggtccagtgatgtatgacccgatcctcacaagggtcaaggtgcaagagcccaacagtgtccttggcccagtggatgagatccaggacaa

SEQ ID NO: 67635 - DNA, 110 bp, synthetic construct
  source 1..110: mol_type = other DNA
atcgaacctgcgtcctcacggttcctcatcagattcattaccgctgcgctacgatgggaattccaacgcctttaaccgagagttagagatgcgagggctccttaccaaac

SEQ ID NO: 67636 - DNA, 110 bp, synthetic construct; identical to SEQ ID NO: 67635
  source 1..110: mol_type = other DNA

SEQ ID NO: 67637 - DNA, 110 bp, synthetic construct
  source 1..110: mol_type = other DNA
gaaaccgataaccaaggcaggtggggtttcggtaagaaaacgacagcagcaaatctaccttcgtgagcctcttaaataacattgacggcttaagcagaattgtaatacca

SEQ ID NO: 67638 - DNA, 110 bp, synthetic construct
  source 1..110: mol_type = other DNA
taccttcgtgagcctcttaaataacattgacggcttaagcagaattgtaataccatccgatgtggcatttgtagaagaagtacgtacggcaatcatgtttcaagcggagc

SEQ ID NO: 67639 - DNA, 110 bp, synthetic construct
  source 1..110: mol_type = other DNA
agactgcgacaagaatgcagctgagctgaggacaacgtgagcgtgtcgcaggaagtggagacggagcggctggacaaccaggacggctgcatgggaactgcagctcagcg

SEQ ID NO: 67640 - DNA, 110 bp, synthetic construct
  source 1..110: mol_type = other DNA
gcctctgttgacgctgtgctgggcctgaaacctagaaacacgctgttccttggggctgggcctgcatgttccactcgaatcgcgtaatcagagatgcttggattcccgag

SEQ ID NO: 67641 - DNA, 110 bp, synthetic construct
  source 1..110: mol_type = other DNA
ctgggcctgcatgttccactcgaatcgcgtaatcagagatgcttggattcccgagtcccagacttacaaatgcctttttaaccaagttaaatgcaggcagaaatgctatt

SEQ ID NO: 67642 - DNA, 110 bp, synthetic construct
  source 1..110: mol_type = other DNA
ggaaagtggctccggtggtttctagtgaccgcggggctgtgggctggtgaagctgtgtttaccagacagtttcctgctttgtcttgaacttgaagggtggctgttggccc

SEQ ID NO: 67643 - DNA, 110 bp, synthetic construct
  source 1..110: mol_type = other DNA
tgatgtcatccctgggttttggggacggaggctccttcctgagcagggagctgcgtctgcaatttgaatggtgagcaggctgcctcccgggggcaggaaggcaccggcca

SEQ ID NO: 67644 - DNA, 110 bp, synthetic construct
  source 1..110: mol_type = other DNA
tgttttcctgccttccaggcgatcgagagcttcgccctcatggtcaagcagacagcgcagatgctgcaggccttcgggaccgagctggccgagacggagctgcccaacga

SEQ ID NO: 67645 - DNA, 110 bp, synthetic construct
  source 1..110: mol_type = other DNA
ctgcagaccctcacacaggccgaagcgccaggacccgcttcccccagggaggctgcaggtgctgctcctggcgcggggctcacgcagtttcctctttgcttcctcagagg

SEQ ID NO: 67646 - DNA, 110 bp, synthetic construct
  source 1..110: mol_type = other DNA
acaaataacacccgctttgtgtcacacctgtgtctcacgtgggtacctaggccatgcgtcagaggcaggggagctgcctcaccagtctggtcccagctggggccccttaa

SEQ ID NO: 67647 - DNA, 110 bp, synthetic construct
  source 1..110: mol_type = other DNA
cctgacctcactgccctccctcaccccagtccctgacctcactgatttgctttctacccggcctgttttaccctttccagctctcatcgcaggggaagcaggcacttccc

SEQ ID NO: 67648 - DNA, 110 bp, synthetic construct; identical to SEQ ID NO: 67647
  source 1..110: mol_type = other DNA

SEQ ID NO: 67649 - DNA, 110 bp, synthetic construct
  source 1..110: mol_type = other DNA
cttgctttacattgggcctggctctgccactcatcaccacgtgttaggggcaatgaccggacgccccctccccaggtccctgctaggatatgcggtccccttggggtgac

SEQ ID NO: 67650 - DNA, 110 bp, synthetic construct
  source 1..110: mol_type = other DNA
caccagtaaccctggacgctgcaggtgaccttgaaaggagcctggtcagggagagcagctgggagcctcaacctcccggcccagggagagcacgtcactgccctgccggg

SEQ ID NO: 67651 - DNA, 110 bp, synthetic construct
  source 1..110: mol_type = other DNA
cagctgggagcctcaacctcccggcccagggagagcacgtcactgccctgccgggatgaaggtgggtcatgagagcttccgataatcttcttttttcttttctttttttt

SEQ ID NO: 67652 - DNA, 110 bp, synthetic construct
  source 1..110: mol_type = other DNA
ccaacgcggccacagcagcgacctgaagccacgcctcctctgggctcccaagcactttcggggtccccccgcacctaatctgggcaccttccaacagcacttttactctg

SEQ ID NO: 67653 - DNA, 110 bp, synthetic construct
  source 1..110: mol_type = other DNA
tgtttacaagctagttggggtcgggggtgttatagcccagctgacagaacaggatggaagaagctgcaagcattttccataaggtatccttctctgcatgtgcaggaaac

SEQ ID NO: 67654 - DNA, 110 bp, synthetic construct
  source 1..110: mol_type = other DNA
agtctgaaagcatgacgcactgctagtctttctattaacggacagaaaaataaattacagcaagaagggtgatgcccacatggaagaggtgagtcctttagggtcttgtt

SEQ ID NO: 67655 - DNA, 110 bp, synthetic construct
  source 1..110: mol_type = other DNA
tatttttgttttattttttatgcaaaattctgtccttataaagacccttaaagggttttgctcagctctggagtgaggcgaccgtcccgagatttcacccttgatgggtc

SEQ ID NO: 67656 - DNA, 110 bp, synthetic construct
  source 1..110: mol_type = other DNA
ttttgctcagctctggagtgaggcgaccgtcccgagatttcacccttgatgggtcactggatagaaacggtgtcctcagactggccaggctattcttggtgcatgctggc

SEQ ID NO: 67657 - DNA, 110 bp, synthetic construct
  source 1..110: mol_type = other DNA
tgtggtggggaaaaggatgctttgcgagaggtgagaagggctggaagcacttggcttggcaggtggatcaggagagaccttcccagctgaggccactggggaaggcggct

SEQ ID NO: 67658 - DNA, 110 bp, synthetic construct
  source 1..110: mol_type = other DNA
ttggctgttttacaagacaggcggtgctgcgggagcggccagaagcggccctgctttggacccgtgtctgcagatgagggaggccggtcaggctggggaggctgccccct

SEQ ID NO: 67659 - DNA, 110 bp, synthetic construct
  source 1..110: mol_type = other DNA
aaacgaagacgggcaaacaaacacgcacgtgaatgttcacaacagcgctgcccacgccgacaagcaagatgggggtgtcctgagacaggagtgtttgcagaataaacgct

SEQ ID NO: 67660 - DNA, 110 bp, synthetic construct
  source 1..110: mol_type = other DNA
atggaggttcccaggccaggggtcaaatcggagccgcagctgtaagccacagccacagccttaagccaccgagcgaggccagatttgaaacgggcatccttgtggatact

SEQ ID NO: 67661 - DNA, 110 bp, synthetic construct
  source 1..110: mol_type = other DNA
ggggaggtcaggctgcctagcagagaaagcaaactcctgagagaggtgggctccacacatggggccgggtaggaccatgggtgtgagacctgagcttcagccgccaggaa

SEQ ID NO: 67662 - DNA, 110 bp, synthetic construct
  source 1..110: mol_type = other DNA
ttatgtatttatgaagatggatgtataggcatgtaacaattttttcatagtttcccatctctgattcctacatttgtgatgtcttcctcctttttcctttgattttccct

SEQ ID NO: 67663 - DNA, 110 bp, synthetic construct
  source 1..110: mol_type = other DNA
tctatgtcttaggtgagctgtcacacctgcaccctgcggacttcagggagagtcggattttggagagaatgacactgttttcctgagtgaccaaggggcaaggccgggac

SEQ ID NO: 67664 - DNA, 110 bp, synthetic construct
  source 1..110: mol_type = other DNA
ggtcccccggccccaccaccttaggggtggcggcatctggagtggtttagtaaactcaagacctgtggccttgccggacaactgaactcatggggctgttgcctcattac

SEQ ID NO: 67665 - DNA, 110 bp, synthetic construct
  source 1..110: mol_type = other DNA
tcaagacctgtggccttgccggacaactgaactcatggggctgttgcctcattacttagaagcaataggcagcatccaccacagacgcaggtgaggctggacaggactct

SEQ ID NO: 67666 - DNA, 110 bp, synthetic construct
  source 1..110: mol_type = other DNA
tccttgctcagacctgtccacggcctgctgatgaatgaagggcggaaactgtagctagtttgtctgtgcaggaacacatcgcatcttcctaaaacacgcacccaaacacg

SEQ ID NO: 67667 - DNA, 110 bp, synthetic construct
  source 1..110: mol_type = other DNA
accccgagtttgccctctgtgagagctctcggggccacatgcacccctctgcccacggaactttccagagaccaaccctgtcgcccacacagggcccggcaaagcggtct

SEQ ID NO: 67668 - DNA, 110 bp, synthetic construct
  source 1..110: mol_type = other DNA
cggaactttccagagaccaaccctgtcgcccacacagggcccggcaaagcggtctgctggcctcaaggaaaaggaaggaaaagctacagcccactcgccagccctcggcc

SEQ ID NO: 67669 - DNA, 110 bp, synthetic construct
  source 1..110: mol_type = other DNA
cagaggccctataagacctgctccccgacctggaagggtctgggcccagctttcgccacagccacaggaaggtgcctgaaggtcacaccttacagtgggagcacagccgc

SEQ ID NO: 67670 - DNA, 110 bp, synthetic construct
  source 1..110: mol_type = other DNA
acctcttgttctcgtcatcttcagtttgttaggcggagcattttctataaatcgtttattacgggacacccatttcggcctctgaaacgcatgaaaacaagttgtgggtt

SEQ ID NO: 67671 - DNA, 110 bp, synthetic construct
  source 1..110: mol_type = other DNA
actgtggtctgacttgtgcttctctcgtcaccagtgatgctgagcttttttcatgtgtccgctgaccgtcccagcgtctgctttggggatgtatctgcttaggtcttctc

SEQ ID NO: 67672 - DNA, 110 bp, synthetic construct
  source 1..110: mol_type = other DNA
tgcgtcagcgacagcaggcgcgggagcactgccgaggacacgtgggagcgaccatcagactcccggtttcagatccagccaccagtcacctgtcccgtaaccatcaggga

SEQ ID NO: 67673 - DNA, 110 bp, synthetic construct
  source 1..110: mol_type = other DNA
gccgccgggaaagagtgaggccgggcctggggacagggtggggctcagggtgatgaggtcacggagggcaaccctcaaggtaaaaaggcgagaaaacgaaggagccgctg

SEQ ID NO: 67674 - DNA, 110 bp, synthetic construct
  source 1..110: mol_type = other DNA
ttaactgttgaaattgagtttataatggttgggatgaaacagctaactgttatcgggtaggattcaaaatgaaaaatatacaattccgataaatttgtcaagaaagtcac

SEQ ID NO: 67675 - DNA, 110 bp, synthetic construct
  source 1..110: mol_type = other DNA
caccctttgtgggtggacacattttatttattttttcatgtggccaccaccacaataaagaaacatcagaaaatgagagtaataaacaaaggtcagggagttcccgctgt

SEQ ID NO: 67676 - DNA, 110 bp, synthetic construct
  source 1..110: mol_type = other DNA
atttattttttcatgtggccaccaccacaataaagaaacatcagaaaatgagagtaataaacaaaggtcagggagttcccgctgtggctcagcagtaacgaacccgacta

SEQ ID NO: 67677 - DNA, 110 bp, synthetic construct
  source 1..110: mol_type = other DNA
actaattttgttgtagtctgtacccgtcaagggaagagaattgtacggaaccaaatgcctctaatttagaacctggacggactgcaggctgcagggcggcccctgtgtct

SEQ ID NO: 67678 - DNA, 110 bp, synthetic construct
  source 1..110: mol_type = other DNA
aagtaactgcattatgggtacgagggctcctcgtggggtgaagaaatggcgtttcaactagttagaagtgatggcttcggagttcccgttgtggcccagtggttaacgaa

SEQ ID NO: 67679 - DNA, 110 bp, synthetic construct; identical to SEQ ID NO: 67678
  source 1..110: mol_type = other DNA

SEQ ID NO: 67680 - DNA, 110 bp, synthetic construct
  source 1..110: mol_type = other DNA
caactccgggcagctgtgtgagcacggagttaaggtgcaggacgacagctggcatccacagagaactggaaattgtttggcatggaagccccgcacatttggcgtctgaa

SEQ ID NO: 67681 - DNA, 110 bp, synthetic construct
  source 1..110: mol_type = other DNA
caagtggttggtgctttgcgggtcagagcaggggatgcagccacagtgcagccattacagttcagcagagaagggccttccttacagagaaaatgggtctctgggggatg

SEQ ID NO: 67682 - DNA, 110 bp, synthetic construct
  source 1..110: mol_type = other DNA
ttggctgtttagttcccgtttatttgtgtgtcatttttaacaaaataaagtcagagagttttgcaccaagctgttgcccggagctcttcctcagaaagtccttgttggtt

SEQ ID NO: 67683 - DNA, 110 bp, synthetic construct
  source 1..110: mol_type = other DNA
gagttttgcaccaagctgttgcccggagctcttcctcagaaagtccttgttggttcacctgtcgtctgccctcagggaccgatcaatcctggccacccctgctgagccct

SEQ ID NO: 67684 - DNA, 110 bp, synthetic construct
  source 1..110: mol_type = other DNA
ttctcatttctctgattaaattgattctttgactgaggtttttctataaacaaacggaggtggaggacctgagccagggtccccagggtcctgctcccttacagccctcg

SEQ ID NO: 67685 - DNA, 110 bp, synthetic construct; identical to SEQ ID NO: 67684
  source 1..110: mol_type = other DNA

SEQ ID NO: 67686 - DNA, 110 bp, synthetic construct
  source 1..110: mol_type = other DNA
ccagtggcctagcagctaaagaacgggtgttgtcaccgctgtggctcaggtcactgctgcagcatgggtttgaaacctggccttgggaacttaagcatgctggtgtgcag

SEQ ID NO: 67687 - DNA, 110 bp, synthetic construct
  source 1..110: mol_type = other DNA
gctgcagcatgggtttgaaacctggccttgggaacttaagcatgctggtgtgcagccaaagaatacatttacatgtgatagttcacagcgagtttcctaggtcacatttc

SEQ ID NO: 67688 - DNA, 110 bp, synthetic construct
  source 1..110: mol_type = other DNA
cctcccagccacgatggaggctggaggtggggtatcagcaagacgtaaacgcgcctcatcagtccccgaggtctgggggctctttgttacacagcttcgccagcctggcc

SEQ ID NO: 67689 - DNA, 110 bp, synthetic construct
  source 1..110: mol_type = other DNA
tcatcagtccccgaggtctgggggctctttgttacacagcttcgccagcctggcctgaccgagaccatccgtaccccaaacggtccaccgaatgtggccacccggaacat

SEQ ID NO: 67690 - DNA, 110 bp, synthetic construct
  source 1..110: mol_type = other DNA
tggtggtcccttcaggctgcctgcgaccccacagaagagccgcaaagtggtctcgttagattaagatgtagcgggaaggcgggtctgaggaagctcacatatactgtggt

SEQ ID NO: 67691 - DNA, 110 bp, synthetic construct
  source 1..110: mol_type = other DNA
ctcatggatgctagtcagattggtttccgctgagccacagtgggaactccccaaccactccttctgagacaccaagtccactgaggccttgtgctctttttttccccggc

SEQ ID NO: 67692 - DNA, 110 bp, synthetic construct
  source 1..110: mol_type = other DNA
cagccgcaccctccataaacagagtgtgtgaaacagccgcttcaggcatcagacgagggcccaggacggtggtccttgaatgagggaagacagagacggcgccactggga

SEQ ID NO: 67693 - DNA, 110 bp, synthetic construct
  source 1..110: mol_type = other DNA
aacgatacagtcaaccaggggacagcgcacccaacgagagcagagtgcgcctctttccagatccacgtggaacattcaccgagatgctttgcatcctgcagcatcaaacc

SEQ ID NO: 67694 - DNA, 110 bp, synthetic construct
  source 1..110: mol_type = other DNA
tccagatccacgtggaacattcaccgagatgctttgcatcctgcagcatcaaaccagtctggacacgctcacaggagctcaacgtctatgaagaagtttctttgaccgca

SEQ ID NO: 67695 - DNA, 110 bp, synthetic construct
  source 1..110: mol_type = other DNA
ccgtcctggactctgatgtaaacggctgacacttcagagcttcggagttcccgttgtggctcagtggttcacaaatccagctgggaagcatgaggttgctcagtgggttg

SEQ ID NO: 67696 - DNA, 110 bp, synthetic construct
  source 1..110: mol_type = other DNA
gagcaacgttttcatgctttagaaatagtcccggaggaaccagaacagctaccatcaatctggacgaggtgtaatctgctgccgccagcgtcaggttgcagaggaggagc

SEQ ID NO: 67697 - DNA, 110 bp, synthetic construct
  source 1..110: mol_type = other DNA
cttttaaatagatagtacagaagtccccatcatagagcagcagaaacaacgccgctgtggtgtaggtcgcagatgcagctgggaggccactgctgtggctgtggtgtagg

SEQ ID NO: 67698 - DNA, 110 bp, synthetic construct
  source 1..110: mol_type = other DNA
ccttgaccctcaggccccttccaggccccagggggagtcacgtcacggtccaagtccatgacccttgtcatccaaatacagaaactaaccccaaagcctctgcaccccgc

SEQ ID NO: 67699 - DNA, 110 bp, synthetic construct
  source 1..110: mol_type = other DNA
gtcctggaggagggggtggtccggccagtgagtgacggaggcccaggacccccatctgaagaaggcagcaaatgcctgcacccagtttgctaactcaatcaatattagca

SEQ ID NO: 67700 - DNA, 110 bp, synthetic construct
  source 1..110: mol_type = other DNA
aacgtccgcgttacagtcggtgacagttgcaccgttttgccatgtacctagttaccggctgtcctttgtgtccgcgagtttgtttttgcggaaggcaaccctgcttgggc

SEQ ID NO: 67701 - DNA, 110 bp, synthetic construct
  source 1..110: mol_type = other DNA
cggctgtcctttgtgtccgcgagtttgtttttgcggaaggcaaccctgcttgggcttttcagcggtggccgctctgcagtcaggcgcttgccctgggtttggctctcagc

SEQ ID NO: 67702 - DNA, 110 bp, synthetic construct
  source 1..110: mol_type = other DNA
ctaggactgcctcctggattgattcttcagagttggcgttttctctttccttcttctccagctttgggagctgctttccgatggaagcactgcaatgtatcgttcgacct

SEQ ID NO: 67703 - DNA, 110 bp, synthetic construct
  source 1..110: mol_type = other DNA
ggaggcgcctggccccgtggccttcagctgggacggccggctccagactggggagaacctgtttctgcttgaagccccgtttttgcggtcatttgtcatggccgccccag

SEQ ID NO: 67704 - DNA, 110 bp, synthetic construct
  source 1..110: mol_type = other DNA
ccctcacgaacccttgagcccaaggtcagataacaggcatttgccttgagcccagccatctccttgtgcgcccagaactggcatcatgttgatatttccttgtttcctca

SEQ ID NO: 67705 - DNA, 110 bp, synthetic construct
  source 1..110: mol_type = other DNA
ccatctccttgtgcgcccagaactggcatcatgttgatatttccttgtttcctcaaaacgtcttctgggagttcccactgtagctcagtatccatgaagacacgggttca

SEQ ID NO: 67706 - DNA, 110 bp, synthetic construct
  source 1..110: mol_type = other DNA
agttggatgttggcgaaaggatttctgaggagaaaacagaaggcggtttcagtggttttagcaacaggcgctgtgaggccggcccacggctgcaggtggtgcccacccgg

SEQ ID NO: 67707 - DNA, 110 bp, synthetic construct
  source 1..110: mol_type = other DNA
cgaagctgaaaggacggacttcctcaaaaggcctcggacaactagttcaagaatgtttgaaaaacactgacagcacacagcagatcttttagaaacggaagtcctgttgc

SEQ ID NO: 67708 - DNA, 110 bp, synthetic construct
  source 1..110: mol_type = other DNA
tacacccgggtaaaccggggaaccggaggcagcgtcctgagttccgatggccgctgcagcacatcgctggtccgagcggtggaagacccagttgcagccaaggaggacag

SEQ ID NO: 67709 - DNA, 110 bp, synthetic construct
  source 1..110: mol_type = other DNA
gcagcacatcgctggtccgagcggtggaagacccagttgcagccaaggaggacagagtgaggggaaccggggacctcatgggccgcactgaccctggtgggcagtgtcag

SEQ ID NO: 67710 - DNA, 110 bp, synthetic construct
  source 1..110: mol_type = other DNA
ccaggccatatgtgccgggggtgtgttgctttgctccagaaaaaaagtgctgtttgtgggaccccagcggcagctggactccacaacaaatgatgtttacaacaagccac

SEQ ID NO: 67711 - DNA, 110 bp, synthetic construct
  source 1..110: mol_type = other DNA
gtgggaccccagcggcagctggactccacaacaaatgatgtttacaacaagccacagccaccctccaacatgtccagtccgtagtctcaggaactggggcgagagctgca

SEQ ID NO: 67712 - DNA, 110 bp, synthetic construct
  source 1..110: mol_type = other DNA
aggtttggtaaaaacgtgactgaattcagcgttgggtgacagtgactattgggggctggtgggtccaggtgacacaagcagggcctggcgtttgtcttctgtcccgggga

SEQ ID NO: 67713 - DNA, 110 bp, synthetic construct
  source 1..110: mol_type = other DNA
aacagtatacataagaaaggctcatcttggtgtattgatcttatactccgcaatcttgctgaacccacttattagctgcagcatttctctggtggatcagtcagattctc

SEQ ID NO: 67714 - DNA, 110 bp, synthetic construct
  source 1..110: mol_type = other DNA
gaattcttcactggcaaacctgcactaaagggaataaagcgaaacgatcgcaggaggacgcttggaggggcgggcaggaaggcaagacgacagaagatgcgacccacgcc

SEQ ID NO: 67715 - DNA, 110 bp, synthetic construct
  source 1..110: mol_type = other DNA
ggacgcttggaggggcgggcaggaaggcaagacgacagaagatgcgacccacgccccagcgcacggcgacgccggatccccaacccactgagcgaggccagaggcgaacc

SEQ ID NO: 67716 - DNA, 110 bp, synthetic construct
  source 1..110: mol_type = other DNA
tggggttgttcttcctgaatgaacagccagctgctgcagcagcacctgttgaaaggacgggcccctccaccgaactgtctggcaccccatccccatggactggccaccgt

SEQ ID NO: 67717 - DNA, 110 bp, synthetic construct
  source 1..110: mol_type = other DNA
gacgggcccctccaccgaactgtctggcaccccatccccatggactggccaccgtgcgtgtcgatgtctgcaccctgaattccgctccatcctcaaacctatacctggct

SEQ ID NO: 67718 - DNA, 110 bp, synthetic construct
  source 1..110: mol_type = other DNA
gatgaacgtcgtccctagtttgtcatcaccctgttactgcagcctctggagacacagccagacaaaggcgacagcgtgagacggacacgaccggggcagagggctcagac

SEQ ID NO: 67719 - DNA, 110 bp, synthetic construct
  source 1..110: mol_type = other DNA
gaagctctcctttagctcacaggctcccttcaatgctgtcaggggaccaaacatgtgcaggtggcccgctgaacacgccgccgggcaacccagttagacggctgggttca

SEQ ID NO: 67720 - DNA, 110 bp, synthetic construct
  source 1..110: mol_type = other DNA
ggagtttcaggaagacgtggaagcaaatgaggaaaaagcttcatgaaggagggcgggggccaccccggaaggctgcagggaagtcaagagagaaggacagagaagggaca

SEQ ID NO: 67721 - DNA, 110 bp, synthetic construct
  source 1..110: mol_type = other DNA
gtcgcagacatcaggctttccagaggccgggagccggggctcagcggggacccggccacattagaacccccaatatcacagcctcatacctggggaggaaacggaacagc

SEQ ID NO: 67722 - DNA, 110 bp, synthetic construct
  source 1..110: mol_type = other DNA
aggctgagccacggggaagggcccgtgagctctgagctcaaggctgacagagcgcagctgagctcgtagaagcagcttttcagcaagtgccttgagttttcttggaagca

SEQ ID NO: 67723 - DNA, 110 bp, synthetic construct
  source 1..110: mol_type = other DNA
ctcacaaaagcaggactaaacgagctctccgggctttctgaccagcccacagaatcctgccatcatcgctaagcacccactgcccgagtcccctctgctgatcctcaaca

SEQ ID NO: 67724 - DNA, 110 bp, synthetic construct
  source 1..110: mol_type = other DNA
ggaagagctcccacgctggcatcctgtggatgtcgcaccagctcgcggggcccccatgccaggacctacctctaactcctcctgggtggacactctggtggtcagcagaa

SEQ ID NO: 67725 - DNA, 110 bp, synthetic construct
  source 1..110: mol_type = other DNA
cccacacacagtggcatcaaagtgccctgacacacaccagcttcgagggcctctgaggcagggcggaactcctttccaggatttcaacgacatataaatggcacgggttc

SEQ ID NO: 67726 - DNA, 110 bp, synthetic construct
  source 1..110: mol_type = other DNA
tggtgtcccctagaacctcagagcaaggaacctgccgggaagggtcttcacagatggaattaagggtcaagatgagatcacattagatgagggtgggctctacatccaat

SEQ ID NO: 67727 - DNA, 110 bp, synthetic construct
  source 1..110: mol_type = other DNA
ggaattaagggtcaagatgagatcacattagatgagggtgggctctacatccaattagcgaccttattaagacaaaaacggacacccagacccagggcagaggcagagat

SEQ ID NO: 67728 - DNA, 110 bp, synthetic construct
  source 1..110: mol_type = other DNA
cccggcagatgggagggctaacagtgctggctgcctgcagggcagtggggaggtaatttgtagaactttgcttgggcagcaggctgaggctgtaagtttaatttccctgt

SEQ ID NO: 67729 - DNA, 110 bp, synthetic construct
  source 1..110: mol_type = other DNA
gcaaacacacgcacacgcacgtgcacacgtgcgtgtgaaatcagtctgtaggagataggcctttcgatggcggggctcagcctcgttggggagactgtctgcatccgact

SEQ ID NO: 67730 - DNA, 110 bp, synthetic construct
  source 1..110: mol_type = other DNA
cgattgtgaccccccattttatagatgaggaaaactgaggaagagagagatggagccgtgtgcccgggactggcgcgaaccctcttctactttcaagccgattgttctgt

SEQ ID NO: 67731 - DNA, 110 bp, synthetic construct
  source 1..110: mol_type = other DNA
ccgtgtgcccgggactggcgcgaaccctcttctactttcaagccgattgttctgttggggttgatgtccgtgtcggtagcttgaaattggccagggtgggagtattcaca

SEQ ID NO: 67732 - DNA, 110 bp, synthetic construct; identical to SEQ ID NO: 67730
  source 1..110: mol_type = other DNA

SEQ ID NO: 67733 - DNA, 110 bp, synthetic construct; identical to SEQ ID NO: 67731
  source 1..110: mol_type = other DNA

SEQ ID NO: 67734 - DNA, 110 bp, synthetic construct
  source 1..110: mol_type = other DNA
gcctcgcatgctcctcggccacccagatggcatcagcatttcccacccagatggcatcagctcttcccgcccataccgggcacgttcacagttgatgcacgggagacacc

SEQ ID NO: 67735 - DNA, 110 bp, synthetic construct
  source 1..110: mol_type = other DNA
atcagctcttcccgcccataccgggcacgttcacagttgatgcacgggagacacctcgctgaagttcagtgcgcggtctggaccccgggtctggaagttgggtggtgtgc

SEQ ID NO: 67736 - DNA, 110 bp, synthetic construct
  source 1..110: mol_type = other DNA
tgccgccgtgaacaggtgtgaacgtgtatctgtctgactgtctcgtttcagttcttctgatgagacgttcctatgagccgcatgctgggtcgtgcggtcattttaggatc

SEQ ID NO: 67737 - DNA, 110 bp, synthetic construct
  source 1..110: mol_type = other DNA
tctgatgagacgttcctatgagccgcatgctgggtcgtgcggtcattttaggatcaactttttgaggaccgtccacctgtttccacagtggctgaaacattttacattcc

SEQ ID NO: 67738 - DNA, 110 bp, synthetic construct
  source 1..110: mol_type = other DNA
acagtaccacccccccgacaacagatatgtccatttcaaacctcagaatgtgagctgacttggtctaagaatctttgcaggtgtacttaggtaagaatcttttttttttt

SEQ ID NO: 67739 - DNA, 110 bp, synthetic construct
  source 1..110: mol_type = other DNA
gggcagtgcccccctctcagactcaacgcatccaggaatattcgcagagctcgtgctgttggccagatgctgcttgagaccctttgtgtgttatcttcccgcctcctcgt

SEQ ID NO: 67740 - DNA, 110 bp, synthetic construct
  source 1..110: mol_type = other DNA
ccgacgttggcttcccatcgccttgcagccgctttacaactgttgataagcacacaaattgttccctggctgtgacttcccttctccctcaggagaaaccagtttgcccc

SEQ ID NO: 67741 - DNA, 110 bp, synthetic construct
  source 1..110: mol_type = other DNA
ctgcggaggaattaatttcatgcctggcttgccttcacattaattgatgtgggctacctcctgtgtgccgggcacgcggtagctgctggggattcagtggggaagagatg

SEQ ID NO: 67742 - DNA, 110 bp, synthetic construct
  source 1..110: mol_type = other DNA
gatgaaatggtggcaactgaaattaaagccagataaaacttgtgggggccaaatgaagctacctccctccagcctagatctgctccatgggctgtggtttgggatctggt

SEQ ID NO: 67743 - DNA, 110 bp, synthetic construct
  source 1..110: mol_type = other DNA
aaaaaaaggagctccactgtggcaccacaggatcagcagcgtcttgggagtgctgggactcgggttccatcccctgcctggcacagtgggttagggatctgtcattgctt

SEQ ID NO: 67744 - DNA, 110 bp, synthetic construct
  source 1..110: mol_type = other DNA
ggactcgggttccatcccctgcctggcacagtgggttagggatctgtcattgcttccactgcagctttggtcgtgatgcctggcctgggagctccatgtgccacagggcg

SEQ ID NO: 67745 - DNA, 110 bp, synthetic construct
  source 1..110: mol_type = other DNA
aggacgaaaggcaaagagaaaataagacggggtcatgttcttggcatagtaaatgcaagtgtgtgtgatgaagtgtgatgcacgcacacacgcccatacatgtgcacacc

SEQ ID NO: 67746 - DNA, 110 bp, synthetic construct
  source 1..110: mol_type = other DNA
caagtgtgtgtgatgaagtgtgatgcacgcacacacgcccatacatgtgcacacctgtgtacataggtgtgtgtacgtgtacgcgcgtgtgcctgtaggtgcatttgggt

SEQ ID NO: 67747 - DNA, 110 bp, synthetic construct
  source 1..110: mol_type = other DNA
gtgtgtggtacacagtaggtgcctaatacatgctgcactctaatgattatcactggccattccaagcaccttcatctccctctgcacccgaccccccagctataaggaca

SEQ ID NO: 67748 - DNA, 110 bp, synthetic construct
  source 1..110: mol_type = other DNA
gccattccaagcaccttcatctccctctgcacccgaccccccagctataaggacaccattcttctggcacaacctacacttgtctcattttctgtgtgtccttgtcctag

SEQ ID NO: 67749 - DNA, 110 bp, synthetic construct
  source 1..110: mol_type = other DNA
agactgtcaaactcctggctggcctttctgctgttgcctggtggcactttactgctagaggaaagctgagattcacagggaggctgtgctcaggcagagagaggggtggc

SEQ ID NO: 67750 - DNA, 110 bp, synthetic construct
  source 1..110: mol_type = other DNA
caggcccctccagctgtgcttcccttctagctgggcagggggagatagaagggggtaaggctgacatccttatttcattccatgttgaattactaactggcatgcctgtc

SEQ ID NO: 67751 - DNA, 110 bp, synthetic construct
  source 1..110: mol_type = other DNA
taaggctgacatccttatttcattccatgttgaattactaactggcatgcctgtctccctccctggagtataaactccttagttgcagggacaatctcttagtcaccatt

SEQ ID NO: 67752 - DNA, 110 bp, synthetic construct
  source 1..110: mol_type = other DNA
ctcgagtgttggaataggctttcttctctgccaggccagccaggggaggcgtcctggaataaacactcataacctttctcatcctgtctgccttcagcacctctgctctc

SEQ ID NO: 67753 - DNA, 110 bp, synthetic construct
  source 1..110: mol_type = other DNA
ggaataaacactcataacctttctcatcctgtctgccttcagcacctctgctctcaggggctgggctaggggaggcaagtgatgcataatttaaggaggggctccctctc

SEQ ID NO: 67754 - DNA, 110 bp, synthetic construct
  source 1..110: mol_type = other DNA
caactagagggtcacatcttgatttttttttccccaaaccatgtccagctttcaagagcccttcatcacattttctttgatgctttactttctaacaacttgtcatcgcc

SEQ ID NO: 67755 - DNA, 110 bp, synthetic construct
  source 1..110: mol_type = other DNA
gagcccttcatcacattttctttgatgctttactttctaacaacttgtcatcgcctctcctggaaggacgctgggctcgctgcgtttgtcgtttctgatgccttctctcc

SEQ ID NO: 67756 - DNA, 110 bp, synthetic construct
  source 1..110: mol_type = other DNA
gaactccagatgtggaagtttgttttcctcctctttgcgcctgagttaatggcagtagctgtgaaaagaggcatggctcactgataatactccagccgcttcagattctt

SEQ ID NO: 67757 - DNA, 110 bp, synthetic construct
  source 1..110: mol_type = other DNA
tagctgtgaaaagaggcatggctcactgataatactccagccgcttcagattcttgtcttaattacctccctaatttgcacttttggtggagcacctggggtatgaacgc

SEQ ID NO: 67758 - DNA, 110 bp, synthetic construct
  source 1..110: mol_type = other DNA
gactttgtcctgcctcccagaggccagactccaggaggtaagagggagatgcaatgacggcccctccccacaccggacacccgcctcctagattgatttgtttatttact

SEQ ID NO: 67759 - DNA, 110 bp, synthetic construct
  source 1..110: mol_type = other DNA
gacggcccctccccacaccggacacccgcctcctagattgatttgtttatttacttttctccccttttctttcttcctttcgggcagctctcgaggcatttggaagttcc

SEQ ID NO: 67760 - DNA, 110 bp, synthetic construct
  source 1..110: mol_type = other DNA
ctaacatgacaggggaggcaaagcagcagtgtagtttaaggagttctagctctagcatcataaaacagttaccgaagggcagatttggagctgagagacagtactttgat

SEQ ID NO: 67761 - DNA, 110 bp, synthetic construct
  source 1..110: mol_type = other DNA
catcataaaacagttaccgaagggcagatttggagctgagagacagtactttgataattggccatatatgttgtcatccgttgtaagtccatagcaatctcagatatatt

SEQ ID NO: 67762 - DNA, 110 bp, synthetic construct
  source 1..110: mol_type = other DNA
agtcactttaaatagctgcatgtggcttagtggccaccatcatggattgcaagtttatgtcaagatgggagatattttagatattatctaattcaaagtgatcattacag

SEQ ID NO: 67763 - DNA, 110 bp, synthetic construct
  source 1..110: mol_type = other DNA
tgcccctcctgcctctctaccgcttgggccacaagcttctttgcttatccttcatttcacctgtttgttcatagaccctcccgttccctgtaacacaggcctagctcacc

SEQ ID NO: 67764 - DNA, 110 bp, synthetic construct
  source 1..110: mol_type = other DNA
ttcacctgtttgttcatagaccctcccgttccctgtaacacaggcctagctcacccccagattccagtcgcttatccaccctgtgggccggcgccagagtactttgcaat

SEQ ID NO: 67765 - DNA, 110 bp, synthetic construct
  source 1..110: mol_type = other DNA
cagagcatcatcacttggcgtcaagcactgattcaattagataagggttctccgcactatggaaacatggctactgtgactcgttgtgaaataaaacgtccctctagttc

SEQ ID NO: 67766 - DNA, 110 bp, synthetic construct
  source 1..110: mol_type = other DNA
actatggaaacatggctactgtgactcgttgtgaaataaaacgtccctctagttctagctgagtggcctcctaaatgtttatttctcttagtttttcaatatatgactta

SEQ ID NO: 67767 - DNA, 110 bp, synthetic construct; identical to SEQ ID NO: 67765
  source 1..110: mol_type = other DNA

SEQ ID NO: 67768 - DNA, 110 bp, synthetic construct; identical to SEQ ID NO: 67766
  source 1..110: mol_type = other DNA

SEQ ID NO: 67769 - DNA, 110 bp, synthetic construct
  source 1..110: mol_type = other DNA
ttgtaaaaaggactcagaactcaaactggagaggcccctacagacataggtaggacatttttaacttcaatagaacaataatgcaattaatagaaacatttcaggtatgt

SEQ ID NO: 67770 - DNA, 110 bp, synthetic construct
  source 1..110: mol_type = other DNA
agacgtgcaccagagcagcagtctaagccaccgcagtgacaacaccagatccttagcccactgtgccacaagagaactctgtagttattattttatgtcatgcatctgtt

SEQ ID NO: 67771 - DNA, 110 bp, synthetic construct
  source 1..110: mol_type = other DNA
gcccactgtgccacaagagaactctgtagttattattttatgtcatgcatctgttcttatagctgcattttgctttataactgcgtttatactagctgtcttttcatcac

SEQ ID NO: 67772 - DNA, 110 bp, synthetic construct
  source 1..110: mol_type = other DNA
gctcacacatgcagagtttagcaatcgccaaatgtcgaaccgattttaggggctcctccccagcccactctttctcacttcacactctgtgccccaaagtccagctgggt

SEQ ID NO: 67773 - DNA, 110 bp, synthetic construct
  source 1..110: mol_type = other DNA
ctccccagcccactctttctcacttcacactctgtgccccaaagtccagctgggtatccgtaaccttgggctccctctctctcttcaagaccactctcgctccctgactg

SEQ ID NO: 67774 - DNA, 110 bp, synthetic construct
  source 1..110: mol_type = other DNA
caacattcaattgagaaagggtcaggtaagattgcaggtgacttctttctggaaatctcactgcagaagatgtgtcaaaaagataaagctgagtctgaatagatcactga

SEQ ID NO: 67775 - DNA, 110 bp, synthetic construct
  source 1..110: mol_type = other DNA
gagggtggtgatcctggcagctagcgaatagaggtcagggatgctggcaattacactgcaggacacgggaagcctcccacaacaaagaattatctggtccaaaagacagt

SEQ ID NO: 67776 - DNA, 110 bp, synthetic construct
  source 1..110: mol_type = other DNA
agtggaaaaaactgatcttaacagtctgacgatcctaagagtttgacagtcgtggcagttagatcacattaattattctttatttataaatattttccagccgcacattc

SEQ ID NO: 67777 - DNA, 110 bp, synthetic construct
  source 1..110: mol_type = other DNA
aaaggaggaaaaaacgtgtatttctttctctctctcgtttttctttaaaatcagtagtgccccagatcatccgtggttttgaactgggctgtacatggacttcagcggat

SEQ ID NO: 67778 - DNA, 110 bp, synthetic construct
  source 1..110: mol_type = other DNA
ctgtgatcggaaaaaaaaatacaaattaaaggaaaaatctctaagcagcgcatgtcaaatgttctataagccaaccttttccactcataatccacttctccatttaattc

SEQ ID NO: 67779 - DNA, 110 bp, synthetic construct
  source 1..110: mol_type = other DNA
caaatgttctataagccaaccttttccactcataatccacttctccatttaattcattttctcaccatctctctgtcccttacccaggggacctggctatccctcagtct

SEQ ID NO: 67780 - DNA, 110 bp, synthetic construct; identical to SEQ ID NO: 67778
  source 1..110: mol_type = other DNA

SEQ ID NO: 67781 - DNA, 110 bp, synthetic construct; identical to SEQ ID NO: 67779
  source 1..110: mol_type = other DNA

SEQ ID NO: 67782 - DNA, 110 bp, synthetic construct
  source 1..110: mol_type = other DNA
gtgatggatttgttttacgtcttagtctgggtgatgattacagaggtgttcacatatataaaaattaatcaagctgtatgtttaaaagttgtgttctttgctgcatgtga

SEQ ID NO: 67783 - DNA, 110 bp, synthetic construct
  source 1..110: mol_type = other DNA
gatgcagttactcttcatgaatctgtggctagaaccccacacactcaaagagagtttttacaactaaccatccaactacttcacccattctagacaaccaggatgagaac

SEQ ID NO: 67784 - DNA, 110 bp, synthetic construct
  source 1..110: mol_type = other DNA
ccttgttggacatggtgcatgaggctgtgtagaatcaaggttttctgctctagctggatttctgggctgcccttgcagacctgtgtccatgctggcctgctgaatgttcc

SEQ ID NO: 67785 - DNA, 110 bp, synthetic construct
  source 1..110: mol_type = other DNA
ggatttctgggctgcccttgcagacctgtgtccatgctggcctgctgaatgttccagtggttggtccctcgacagttgggcttgaacttgaggctcaaaggtaatgaatg

SEQ ID NO: 67786 - DNA, 110 bp, synthetic construct
  source 1..110: mol_type = other DNA
tactgcatgtactcttggggtcatgagaccgtctggacctctgcttacagcccagggaactttagtcacttgtgatggagcacgatggcagacaatgtgagaagaagaat

SEQ ID NO: 67787 - DNA, 110 bp, synthetic construct
  source 1..110: mol_type = other DNA
gaatatactactatatacaatataattttctgaagtgagcatatccagtaaacacctggacgtttactggtatggcctcacatttgaaaccctaactttcttctttaaac

SEQ ID NO: 67788 - DNA, 110 bp, synthetic construct
  source 1..110: mol_type = other DNA
aatcatgagaattcatcttaaaagttctccagtgaaaatactgatcaacctatgatttctgggtaaatgagggctttcaaactgtagagatacttgctgaataaagtcct

SEQ ID NO: 67789 - DNA, 110 bp, synthetic construct
  source 1..110: mol_type = other DNA
aaaccccactggtgttcctgttacatttgacagctcttcatatgcccttcataaatgacctctgcagagaaagaagaatcacgagttcattgtgccggaggccccctcgg

SEQ ID NO: 67790 - DNA, 110 bp, synthetic construct
  source 1..110: mol_type = other DNA
tgacctctgcagagaaagaagaatcacgagttcattgtgccggaggccccctcggaaatggccaccgctcactcaaacctaccacctgtttagggggtgtattgcttcac

SEQ ID NO: 67791 - DNA, 110 bp, synthetic construct
  source 1..110: mol_type = other DNA
gatccttaacccactgaaccgcaagagaactcctctgtgacttacattcgtataactggatgtttgtacctcctgagtctctacagctattttgcccatcccccacctct

SEQ ID NO: 67792 - DNA, 110 bp, synthetic construct
  source 1..110: mol_type = other DNA
ctggatgtttgtacctcctgagtctctacagctattttgcccatcccccacctctcccttctggcaccaacagtttgttctttgtatctacgagtctgttttcacacaaa

SEQ ID NO: 67793 - DNA, 110 bp, synthetic construct
  source 1..110: mol_type = other DNA
ttccagacagagagatgagctagagcaacggccctgtgctgcagaagcaaggacgccacagggctttgggagagggaaggagggagcaggaggtgagaacagctgcattg

SEQ ID NO: 67794 - DNA, 110 bp, synthetic construct
  source 1..110: mol_type = other DNA
aactctctcttgttactttgtgcatccgagtttctttttaattccacttgccttttttatttctgccttctgtcctgtttggggccttgagacaatgaaacagaccttag

SEQ ID NO: 67795 - DNA, 110 bp, synthetic construct
  source 1..110: mol_type = other DNA
agcagcaaatacaccctgggccttggccagctgctctgacaccacttcagagccctcagcagctatggcccctgtgcccatgtcagcaaatgctgctgttattgcatgag

SEQ ID NO: 67796 - DNA, 110 bp, synthetic construct
  source 1..110: mol_type = other DNA
gaaaactgaggctcagaggttaagcaacttttcgaaggtcacccggctaataaatggccaagcagggactggaggaatccaggtgtgactccagagctggggccggagcc

SEQ ID NO: 67797 - DNA, 110 bp, synthetic construct
  source 1..110: mol_type = other DNA
ggatttttattttatggcaatatttaaggaatatttaatttgtctgaagtcacctaacaatttaaaggctttatgaaaataaaggggtcccgctgtggtgcagcaggtta

SEQ ID NO: 67798 - DNA, 110 bp, synthetic construct
  source 1..110: mol_type = other DNA
tgtccacaatgctggctaagccttgggttggtggcactcccgtgctgggagacagcagactgtgggagaggggatgggtttgtgggcggtatttgttctctcaagctgga

SEQ ID NO: 67799 - DNA, 110 bp, synthetic construct
  source 1..110: mol_type = other DNA
tctacaataagccattgtattgctactattacttcaagctttttatattacattgtctatgacacagtatagcatggtggttaagagcacaggctccagagtctgccaga

SEQ ID NO: 67800 - DNA, 110 bp, synthetic construct
  source 1..110: mol_type = other DNA
gggggcacattttgcaactcgttctgcaccacattcactgccacgtttagcaatctgcctcgcatatcctcctgggtccctgccatccggagcctctctcggtaccaaat

SEQ ID NO: 67801 - DNA, 110 bp, synthetic construct
  source 1..110: mol_type = other DNA
tgcctcgcatatcctcctgggtccctgccatccggagcctctctcggtaccaaattccacgacaccttcggtgacaccgaagtgaccgaccctggactcttctgaagaca

SEQ ID NO: 67802 - DNA, 110 bp, synthetic construct
  source 1..110: mol_type = other DNA
cttatggatcctagtcgggtttgttaacatctgagccatgatgggaactccccgctaccatttatcttgattcatccctttctactttacttttttaaaatgttttactt

SEQ ID NO: 67803 - DNA, 110 bp, synthetic construct; identical to SEQ ID NO: 67802
  source 1..110: mol_type = other DNA

SEQ ID NO: 67804 - DNA, 110 bp, synthetic construct
  source 1..110: mol_type = other DNA
cagggatcctcatggatactagctgggttcatttctgctgagctgcaacaggagctccctaagattacttttgacaggcagtaagacagagatcattccatgtttgcaca

SEQ ID NO: 67805 - DNA, 110 bp, synthetic construct
  source 1..110: mol_type = other DNA
cattctcctgggccactgaggactccgagggacccctcactgcagctaatgtcgacagtatccccagtgccctgtcaccacaccagcttctctatagaaacagggcccag

SEQ ID NO: 67806 - DNA, 110 bp, synthetic construct
  source 1..110: mol_type = other DNA
ttataatgtaaatgttaaagtttgcatatagtcacttcagattcttagtagtgcgtatgtaacctgattggaattggggttaagggctgtatgactgctgcttctttctt

SEQ ID NO: 67807 - DNA, 110 bp, synthetic construct
  source 1..110: mol_type = other DNA
tatgaatattggggtgcatgtatcttttcaaattagtgtttttgcgggggttttttcggttctatactcaggaattgagttgtacactcctaccaacagtgtacaagagt

SEQ ID NO: 67808 - DNA, 110 bp, synthetic construct
  source 1..110: mol_type = other DNA
gggggttttttcggttctatactcaggaattgagttgtacactcctaccaacagtgtacaagagttcccttttcttcacatcctcgccaacatatttgtgttccttttga

SEQ ID NO: 67809 - DNA, 110 bp, synthetic construct
  source 1..110: mol_type = other DNA
tggcgcctcaaggaataaactgagtcatgtggggtcaaatgagggcagaatggagtgagaaggcacgttttgaaatgtcttgaacatatgagacaattgcaaattggtag

SEQ ID NO: 67810 - DNA, 110 bp, synthetic construct
  source 1..110: mol_type = other DNA
cttttcggtcagcattgccatcttctgtagctgttttcatggtgaccctaatccagatgttggtttcttcagctgcattcctccatctgcctctgtatctccgcatgcct

SEQ ID NO: 67811 - DNA, 110 bp, synthetic construct
  source 1..110: mol_type = other DNA
gatgttggtttcttcagctgcattcctccatctgcctctgtatctccgcatgcctgcatcctcaagtatccggacctgcccacctgaagtagcagtcaggtctctcaaga

SEQ ID NO: 67812 - DNA, 110 bp, synthetic construct
  source 1..110: mol_type = other DNA
ccactatccaattccagaacattttcatcaccgcgaatagaaaccgtgtacctgttagtagtcattcctcattctctcctctcccagctcctaacaagcaccgttttctg

SEQ ID NO: 67813 - DNA, 110 bp, synthetic construct
  source 1..110: mol_type = other DNA
tagtagtcattcctcattctctcctctcccagctcctaacaagcaccgttttctgtctctatggatttacatagtccagacatttcatataaagggatcatataatacat

SEQ ID NO: 67814 - DNA, 110 bp, synthetic construct
  source 1..110: mol_type = other DNA
ggagacatggggggaaagctcctctagggtagaggggctccggcaagtaggaccctgctctgtgatattctctctaaccccggtttcccagaagggggagactctgcttc

SEQ ID NO: 67815 - DNA, 110 bp, synthetic construct
  source 1..110: mol_type = other DNA
tcaatccagccaaactgggtgggaatgtagccacactactcactatggataatgtactcaatccggtctctgagctcaatttccttatctgtacaatgggcagaagactg

SEQ ID NO: 67816 - DNA, 110 bp, synthetic construct
  source 1..110: mol_type = other DNA
tcaaattttcatggtcattgaaatcatgttttggggggtcgggaggggtgttctgatttggcagaactgggatagagcaccgtaatccataaatccgcattgaaaacagc

SEQ ID NO: 67817 - DNA, 110 bp, synthetic construct
  source 1..110: mol_type = other DNA
ctgaaatccaccgggccggcactgacactgcagttcatagacaggctttcttcttcctcgagcaccattagtttttttttccatgtgcgtgtgttttgtttttggctttt

SEQ ID NO: 67818 - DNA, 110 bp, synthetic construct
  source 1..110: mol_type = other DNA
cctcgagcaccattagtttttttttccatgtgcgtgtgttttgtttttggcttttttggctgccgaagcctaatggagtccctcggccagggatcagatctgagctgcag

SEQ ID NO: 67819 - DNA, 110 bp, synthetic construct
  source 1..110: mol_type = other DNA
tcgcacaaacacccagcaaacacctactgtgttctgacacttttctaggagcccaggagacagccaagagctgagataaggttttgcttttctgacgcttaccttgcaga

SEQ ID NO: 67820 - DNA, 110 bp, synthetic construct
  source 1..110: mol_type = other DNA
ggagacagccaagagctgagataaggttttgcttttctgacgcttaccttgcagaaagcagggcagagactaggaaaaactgtgtacacgggactcatcaggcaggccaa

SEQ ID NO: 67821 - DNA, 110 bp, synthetic construct
  source 1..110: mol_type = other DNA
tgacctctgctttctgtttgaggtccatttttaaggaacacgtaaggctctccgcgggagaaatgcaaaaaaaaaaaaaaaacaaaaaaaaaaaaaacaaggcaaaccaa

SEQ ID NO: 67822 - DNA, 110 bp, synthetic construct
  source 1..110: mol_type = other DNA
ttatcacataccaaaccccctagtatacttggctttttttttttttttttttttttgctttttttagggccacatatggaagttcccaggataggggtggaatcggagct

SEQ ID NO: 67823 - DNA, 110 bp, synthetic construct; identical to SEQ ID NO: 67822
  source 1..110: mol_type = other DNA

SEQ ID NO: 67824 - DNA, 110 bp, synthetic construct
  source 1..110: mol_type = other DNA
cgtatttgggtcactgtgacagttgtctgaatttggctgaagagatctagaccacgtatgtgcctaacgaaggtaaaatgttctaactacttaggaagctattggaaact

SEQ ID NO: 67825 - DNA, 110 bp, synthetic construct
  source 1..110: mol_type = other DNA
ttggcccagccacacatgttgtactgtactttctgcctttgtccctgattcttttttggtggtggtggtggttggaggaggcatgcccgcagcatgtgaaagttcctagg

SEQ ID NO: 67826 - DNA, 110 bp, synthetic construct
  source 1..110: mol_type = other DNA
ttggtggtggtggtggttggaggaggcatgcccgcagcatgtgaaagttcctaggccaggtatcaaacctataccatggcagtaacctgagccactgtggtgacaatgcc

SEQ ID NO: 67827 - DNA, 110 bp, synthetic construct
  source 1..110: mol_type = other DNA
cttttctcatttcttcagtgttttccgtttcccctatttcttccgattctgttttctccaacctttccgactctcctctgccagtttctgaaagtttcttctccaggact

SEQ ID NO: 67828 - DNA, 110 bp, synthetic construct
  source 1..110: mol_type = other DNA
ctccaacctttccgactctcctctgccagtttctgaaagtttcttctccaggacttccggttcccttgtgcttaattcctctgagaggttttggtccagatctgaaggcc

SEQ ID NO: 67829 - DNA, 110 bp, synthetic construct
  source 1..110: mol_type = other DNA
tgtggctttcctggggaagagtggctctccccttctccagggtgtgagtgagtgggaacctcagggaactttcccaggagacagcggggatcctgggagctgccaggctc

SEQ ID NO: 67830 - DNA, 110 bp, synthetic construct
  source 1..110: mol_type = other DNA
atagcgccagtcataacagcaaggagcacctgcccagcacgttacaagtgaattgcagcgattatctcagctgatactgacagtatcactgggagaaaggagcaaatcag

SEQ ID NO: 67831 - DNA, 110 bp, synthetic construct
  source 1..110: mol_type = other DNA
cactgtgggccggcaaagagagaggctgccaggggcccctcccttcccacgccccctaacgacggcgctttgcttatatctcggccttggactttttctgtgtacgccca

SEQ ID NO: 67832 - DNA, 110 bp, synthetic construct
  source 1..110: mol_type = other DNA
ctaacgacggcgctttgcttatatctcggccttggactttttctgtgtacgcccacgctctggccccttcaggctgtctctgtgcagccaaccccagtcctattcctgtt

SEQ ID NO: 67833 - DNA, 110 bp, synthetic construct
  source 1..110: mol_type = other DNA
ggaacttccacatgcctcgggtgcggccctaaaaagaaaaaaaaaaaggctttcgtattttgaaattgtcctctaagcatccgtgatgtatatctgttttaccattccct

SEQ ID NO: 67834 - DNA, 110 bp, synthetic construct
  source 1..110: mol_type = other DNA
tattttgaaattgtcctctaagcatccgtgatgtatatctgttttaccattccctcccctgcttgcttgcttgcgatattcttggtgtctgtagagctttcttgctgatc

SEQ ID NO: 67835 - DNA, 110 bp, synthetic construct
  source 1..110: mol_type = other DNA
ttcttttggggtcattctacttctggaaagtttatgcagctcactagaggattacttttcaatagaagaactattatcctcatgagacaaagctgtcacatgattacaaa

SEQ ID NO: 67836 - DNA, 110 bp, synthetic construct
  source 1..110: mol_type = other DNA
tcttggagccaagaccatgtgggttcaagtccaggtccactgacaggttctgtgggttgtatgactttagatcaatcccttagcctctccagccccacagtaagagtacc

SEQ ID NO: 67837 - DNA, 110 bp, synthetic construct
  source 1..110: mol_type = other DNA
gttgtatgactttagatcaatcccttagcctctccagccccacagtaagagtaccttcttcagagaaccattgagaaattaaaatgagcatgttttatgtgtctgttatt

SEQ ID NO: 67838 - DNA, 110 bp, synthetic construct
  source 1..110: mol_type = other DNA
acggctctgctcgtcctcgctgcagaagatgcgaaggcccttgtggccatttcgaagcttgtttggctgtggggagaggaaactggctggtcccacatctgcctagacca

SEQ ID NO: 67839 - DNA, 110 bp, synthetic construct
  source 1..110: mol_type = other DNA
agcttgtttggctgtggggagaggaaactggctggtcccacatctgcctagaccaggtatcgtttcctgtctccgtggggagaggaaactggctggtcccacatctgcct

SEQ ID NO: 67840 - DNA, 110 bp, synthetic construct
  source 1..110: mol_type = other DNA
ccacctccatatgccgtgggtatggtcctaaaaaaggaaacaaaacaaaataaaacaaaacactgaacagctccccccaaagcatcagaccctggaacctggattccgat

SEQ ID NO: 67841 - DNA, 110 bp, synthetic construct
  source 1..110: mol_type = other DNA
caaaacactgaacagctccccccaaagcatcagaccctggaacctggattccgatgatggcggtgacctctggtctttcagagcttccgcctctccatctgcaaaacggt

SEQ ID NO: 67842 - DNA, 110 bp, synthetic construct
  source 1..110: mol_type = other DNA
cagataaccaacagagacctactgtagaacacagggaaatctatttaatatcttgtgatgagctatactagttattataatagacatttgtaagtataactgagtcactc

SEQ ID NO: 67843 - DNA, 110 bp, synthetic construct
  source 1..110: mol_type = other DNA
tgatgagctatactagttattataatagacatttgtaagtataactgagtcactcggctgtacacctgaaactaacacaacattataaaccaatgatacttggattttta

SEQ ID NO: 67844 - DNA, 110 bp, synthetic construct
  source 1..110: mol_type = other DNA
tttctaggtattacatatacatggaatcaccaagtgtgtactctttcttgtcgatttctttcagtgtagcatatttttttttctttttttctttttacgtctgtacctgc

SEQ ID NO: 67845 - DNA, 110 bp, synthetic construct
  source 1..110: mol_type = other DNA
ccccagcattccaacatctgggtacaacagctgcctctccccgggatgcctgcatcttgggtaatcggtgggaaaattggaaccgtgagattggcagggggctctgggaa

SEQ ID NO: 67846 - DNA, 110 bp, synthetic construct
  source 1..110: mol_type = other DNA
ctcgaggctgggtgcccactaaggtccccagatctgacctgctacattcccatgccctggaggccactttggggacagctgggcacactgcccatcagaggaagatgcat

SEQ ID NO: 67847 - DNA, 110 bp, synthetic construct
  source 1..110: mol_type = other DNA
ggtctgtgtgcccgaaggagcaggcacagctggaagaacaaagagacaggcaggagaggtctagcaggggggaccctggcccctccccaaactatctggggaataggcag

SEQ ID NO: 67848 - DNA, 110 bp, synthetic construct
  source 1..110: mol_type = other DNA
gtctggaaccatttcagttttcacagctggggagtggggggtgccacgggcatcgagtggatagaagccagggacgtccgaaacttccttcagggcacaggacagcctcc

SEQ ID NO: 67849 - DNA, 110 bp, synthetic construct
  source 1..110: mol_type = other DNA
cacctatcgggctaacacacacatgcatcctttggaggcagcagtgggaacagatgggggacgaagaaccacaagggagtggaccggacatcagacaaccgaagggactg

SEQ ID NO: 67850 - DNA, 110 bp, synthetic construct
  source 1..110: mol_type = other DNA
agggaaggcagaagccacagatcaataggaataggattaggggaaggcaggcagtgaaagtgagaaggccacctctgcctattggaatggcccccctcctctggggcaat

SEQ ID NO: 67851 - DNA, 110 bp, synthetic construct
  source 1..110: mol_type = other DNA
aaattagcaatctatcctgtcgttacccacagcttccatcctgccctcccctccgcaccccccagctgatgaaaatttcatctaaactggttaagtggggcatcaaatgc

SEQ ID NO: 67852 - DNA, 110 bp, synthetic construct
  source 1..110: mol_type = other DNA
tgcaccacccccctccccaggatccaaaaaagtaggctcaggttcccagcagcctgtaccatctgtccagatgggaggcttcgagctaaatgctgagccccctgcttagc
